United States Patent Application Publication US 2020/0216857 A1 - sequence listing, part 6

SEQ ID NO: 75844 - DNA, 20 bp, Artificial Sequence
  Description of Artificial Sequence: Synthetic oligonucleotide
  Target: ATXN2; (-) strand; PAM type: YTN; PAM sequence: TTC
tggtcccaagcattttagat

SEQ ID NO: 75845 - DNA, 20 bp, Artificial Sequence
  Description of Artificial Sequence: Synthetic oligonucleotide
  Target: ATXN2; (-) strand; PAM type: YTN; PAM sequence: CTT
ctggtcccaagcattttaga

SEQ ID NO: 75846 - DNA, 20 bp, Artificial Sequence
  Description of Artificial Sequence: Synthetic oligonucleotide
  Target: ATXN2; (-) strand; PAM type: YTN; PAM sequence: CTA
aaatacttctggtcccaagc

SEQ ID NO: 75847 - DNA, 20 bp, Artificial Sequence
  Description of Artificial Sequence: Synthetic oligonucleotide
  Target: ATXN2; (-) strand; PAM type: YTN; PAM sequence: CTA
agtataatgcaaatatcccc

SEQ ID NO: 75848 - DNA, 20 bp, Artificial Sequence
  Description of Artificial Sequence: Synthetic oligonucleotide
  Target: ATXN2; (-) strand; PAM type: YTN; PAM sequence: TTC
aagcactaagtataatgcaa

SEQ ID NO: 75849 - DNA, 20 bp, Artificial Sequence
  Description of Artificial Sequence: Synthetic oligonucleotide
  Target: ATXN2; (-) strand; PAM type: YTN; PAM sequence: TTA
gggatgttcaagcactaagt

SEQ ID NO: 75850 - DNA, 20 bp, Artificial Sequence
  Description of Artificial Sequence: Synthetic oligonucleotide
  Target: ATXN2; (-) strand; PAM type: YTN; PAM sequence: TTG
aattagggatgttcaagcac

SEQ ID NO: 75851 - DNA, 20 bp, Artificial Sequence
  Description of Artificial Sequence: Synthetic oligonucleotide
  Target: ATXN2; (-) strand; PAM type: YTN; PAM sequence: TTT
gaattagggatgttcaagca

SEQ ID NO: 75852 - DNA, 20 bp, Artificial Sequence
  Description of Artificial Sequence: Synthetic oligonucleotide
  Target: ATXN2; (-) strand; PAM type: YTN; PAM sequence: TTT
tgaattagggatgttcaagc

SEQ ID NO: 75853 - DNA, 20 bp, Artificial Sequence
  Description of Artificial Sequence: Synthetic oligonucleotide
  Target: ATXN2; (-) strand; PAM type: YTN; PAM sequence: TTC
atattttgaattagggatgt

SEQ ID NO: 75854 - DNA, 20 bp, Artificial Sequence
  Description of Artificial Sequence: Synthetic oligonucleotide
  Target: ATXN2; (-) strand; PAM type: YTN; PAM sequence: TTT
catattttgaattagggatg

SEQ ID NO: 75855 - DNA, 20 bp, Artificial Sequence
  Description of Artificial Sequence: Synthetic oligonucleotide
  Target: ATXN2; (-) strand; PAM type: YTN; PAM sequence: CTC
caaaatttcatattttgaat

SEQ ID NO: 75856 - DNA, 20 bp, Artificial Sequence
  Description of Artificial Sequence: Synthetic oligonucleotide
  Target: ATXN2; (-) strand; PAM type: YTN; PAM sequence: CTA
atcggaaatgctccaaaatt

SEQ ID NO: 75857 - DNA, 20 bp, Artificial Sequence
  Description of Artificial Sequence: Synthetic oligonucleotide
  Target: ATXN2; (-) strand; PAM type: YTN; PAM sequence: CTG
agcatccctaatcggaaatg

SEQ ID NO: 75858 - DNA, 20 bp, Artificial Sequence
  Description of Artificial Sequence: Synthetic oligonucleotide
  Target: ATXN2; (-) strand; PAM type: YTN; PAM sequence: TTA
tatgcaaatgtaaatacagg

SEQ ID NO: 75859 - DNA, 20 bp, Artificial Sequence
  Description of Artificial Sequence: Synthetic oligonucleotide
  Target: ATXN2; (-) strand; PAM type: YTN; PAM sequence: TTT
atatgcaaatgtaaatacag

SEQ ID NO: 75860 - DNA, 20 bp, Artificial Sequence
  Description of Artificial Sequence: Synthetic oligonucleotide
  Target: ATXN2; (-) strand; PAM type: YTN; PAM sequence: CTT
tatatgcaaatgtaaataca

SEQ ID NO: 75861 - DNA, 20 bp, Artificial Sequence
  Description of Artificial Sequence: Synthetic oligonucleotide
  Target: ATXN2; (-) strand; PAM type: YTN; PAM sequence: TTA
gctttatatgcaaatgtaaa

SEQ ID NO: 75862 - DNA, 20 bp, Artificial Sequence
  Description of Artificial Sequence: Synthetic oligonucleotide
  Target: ATXN2; (-) strand; PAM type: YTN; PAM sequence: TTG
caacaaataataaacgttag

SEQ ID NO: 75863 - DNA, 20 bp, Artificial Sequence
  Description of Artificial Sequence: Synthetic oligonucleotide
  Target: ATXN2; (-) strand; PAM type: YTN; PAM sequence: TTT
gcaacaaataataaacgtta

SEQ ID NO: 75864 - DNA, 20 bp, Artificial Sequence
  Description of Artificial Sequence: Synthetic oligonucleotide
  Target: ATXN2; (-) strand; PAM type: YTN; PAM sequence: TTT
tgcaacaaataataaacgtt

SEQ ID NO: 75865 - DNA, 20 bp, Artificial Sequence
  Description of Artificial Sequence: Synthetic oligonucleotide
  Target: ATXN2; (-) strand; PAM type: YTN; PAM sequence: CTA
aacattttgcaacaaataat

SEQ ID NO: 75866 - DNA, 20 bp, Artificial Sequence
  Description of Artificial Sequence: Synthetic oligonucleotide
  Target: ATXN2; (-) strand; PAM type: YTN; PAM sequence: CTA
actaaacattttgcaacaaa

SEQ ID NO: 75867 - DNA, 20 bp, Artificial Sequence
  Description of Artificial Sequence: Synthetic oligonucleotide
  Target: ATXN2; (-) strand; PAM type: YTN; PAM sequence: TTA
atacatgtaagatatcataa

SEQ ID NO: 75868 - DNA, 20 bp, Artificial Sequence
  Description of Artificial Sequence: Synthetic oligonucleotide
  Target: ATXN2; (-) strand; PAM type: YTN; PAM sequence: CTT
aatacatgtaagatatcata

SEQ ID NO: 75869 - DNA, 20 bp, Artificial Sequence
  Description of Artificial Sequence: Synthetic oligonucleotide
  Target: ATXN2; (-) strand; PAM type: YTN; PAM sequence: TTC
ccttaatacatgtaagatat

SEQ ID NO: 75870 - DNA, 20 bp, Artificial Sequence
  Description of Artificial Sequence: Synthetic oligonucleotide
  Target: ATXN2; (-) strand; PAM type: YTN; PAM sequence: CTT
cccttaatacatgtaagata

SEQ ID NO: 75871 - DNA, 20 bp, Artificial Sequence
  Description of Artificial Sequence: Synthetic oligonucleotide
  Target: ATXN2; (-) strand; PAM type: YTN; PAM sequence: TTA
aataaacaaaatcttccctt

SEQ ID NO: 75872 - DNA, 20 bp, Artificial Sequence
  Description of Artificial Sequence: Synthetic oligonucleotide
  Target: ATXN2; (-) strand; PAM type: YTN; PAM sequence: CTA
tggaagcaaaatattaaata

SEQ ID NO: 75873 - DNA, 20 bp, Artificial Sequence
  Description of Artificial Sequence: Synthetic oligonucleotide
  Target: ATXN2; (-) strand; PAM type: YTN; PAM sequence: CTC
tatggaagcaaaatattaaa

SEQ ID NO: 75874 - DNA, 20 bp, Artificial Sequence
  Description of Artificial Sequence: Synthetic oligonucleotide
  Target: ATXN2; (-) strand; PAM type: YTN; PAM sequence: TTC
tctatggaagcaaaatatta

SEQ ID NO: 75875 - DNA, 20 bp, Artificial Sequence
  Description of Artificial Sequence: Synthetic oligonucleotide
  Target: ATXN2; (-) strand; PAM type: YTN; PAM sequence: CTG
ttctctatggaagcaaaata

SEQ ID NO: 75876 - DNA, 20 bp, Artificial Sequence
  Description of Artificial Sequence: Synthetic oligonucleotide
  Target: ATXN2; (-) strand; PAM type: YTN; PAM sequence: TTC
tgttctctatggaagcaaaa

SEQ ID NO: 75877 - DNA, 20 bp, Artificial Sequence
  Description of Artificial Sequence: Synthetic oligonucleotide
  Target: ATXN2; (-) strand; PAM type: YTN; PAM sequence: CTT
ctgttctctatggaagcaaa

SEQ ID NO: 75878 - DNA, 20 bp, Artificial Sequence
  Description of Artificial Sequence: Synthetic oligonucleotide
  Target: ATXN2; (-) strand; PAM type: YTN; PAM sequence: TTC
cttctgttctctatggaagc

SEQ ID NO: 75879 - DNA, 20 bp, Artificial Sequence
  Description of Artificial Sequence: Synthetic oligonucleotide
  Target: ATXN2; (-) strand; PAM type: YTN; PAM sequence: CTG
ttccttctgttctctatgga

SEQ ID NO: 75880 - DNA, 20 bp, Artificial Sequence
  Description of Artificial Sequence: Synthetic oligonucleotide
  Target: ATXN2; (-) strand; PAM type: YTN; PAM sequence: TTC
tgttccttctgttctctatg

SEQ ID NO: 75881 - DNA, 20 bp, Artificial Sequence
  Description of Artificial Sequence: Synthetic oligonucleotide
  Target: ATXN2; (-) strand; PAM type: YTN; PAM sequence: CTT
ctgttccttctgttctctat

SEQ ID NO: 75882 - DNA, 20 bp, Artificial Sequence
  Description of Artificial Sequence: Synthetic oligonucleotide
  Target: ATXN2; (-) strand; PAM type: YTN; PAM sequence: CTG
accttctgttccttctgttc

SEQ ID NO: 75883 - DNA, 20 bp, Artificial Sequence
  Description of Artificial Sequence: Synthetic oligonucleotide
  Target: ATXN2; (-) strand; PAM type: YTN; PAM sequence: TTG
aaaacctgaccttctgttcc

SEQ ID NO: 75884 - DNA, 20 bp, Artificial Sequence
  Description of Artificial Sequence: Synthetic oligonucleotide
  Target: ATXN2; (-) strand; PAM type: YTN; PAM sequence: CTT
gaaaacctgaccttctgttc

SEQ ID NO: 75885 - DNA, 20 bp, Artificial Sequence
  Description of Artificial Sequence: Synthetic oligonucleotide
  Target: ATXN2; (-) strand; PAM type: YTN; PAM sequence: CTG
ataacacttgaaaacctgac

SEQ ID NO: 75886 - DNA, 20 bp, Artificial Sequence
  Description of Artificial Sequence: Synthetic oligonucleotide
  Target: ATXN2; (-) strand; PAM type: YTN; PAM sequence: TTG
actgataacacttgaaaacc

SEQ ID NO: 75887 - DNA, 20 bp, Artificial Sequence
  Description of Artificial Sequence: Synthetic oligonucleotide
  Target: ATXN2; (-) strand; PAM type: YTN; PAM sequence: TTT
gactgataacacttgaaaac

SEQ ID NO: 75888 - DNA, 20 bp, Artificial Sequence
  Description of Artificial Sequence: Synthetic oligonucleotide
  Target: ATXN2; (-) strand; PAM type: YTN; PAM sequence: TTG
gtttgactgataacacttga

SEQ ID NO: 75889 - DNA, 20 bp, Artificial Sequence
  Description of Artificial Sequence: Synthetic oligonucleotide
  Target: ATXN2; (-) strand; PAM type: YTN; PAM sequence: TTA
gttggtttgactgataacac

SEQ ID NO: 75890 - DNA, 20 bp, Artificial Sequence
  Description of Artificial Sequence: Synthetic oligonucleotide
  Target: ATXN2; (-) strand; PAM type: YTN; PAM sequence: TTA
gtcaaaacaccattagttgg

SEQ ID NO: 75891 - DNA, 20 bp, Artificial Sequence
  Description of Artificial Sequence: Synthetic oligonucleotide
  Target: ATXN2; (-) strand; PAM type: YTN; PAM sequence: TTT
agtcaaaacaccattagttg

SEQ ID NO: 75892 - DNA, 20 bp, Artificial Sequence
  Description of Artificial Sequence: Synthetic oligonucleotide
  Target: ATXN2; (-) strand; PAM type: YTN; PAM sequence: TTA
tgtcatgtttagtcaaaaca

SEQ ID NO: 75893 - DNA, 20 bp, Artificial Sequence
  Description of Artificial Sequence: Synthetic oligonucleotide
  Target: ATXN2; (-) strand; PAM type: YTN; PAM sequence: TTT
atgtcatgtttagtcaaaac

SEQ ID NO: 75894 - DNA, 20 bp, Artificial Sequence
  Description of Artificial Sequence: Synthetic oligonucleotide
  Target: ATXN2; (-) strand; PAM type: YTN; PAM sequence: TTT
tatgtcatgtttagtcaaaa

SEQ ID NO: 75895 - DNA, 20 bp, Artificial Sequence
  Description of Artificial Sequence: Synthetic oligonucleotide
  Target: ATXN2; (-) strand; PAM type: YTN; PAM sequence: TTT
ttatgtcatgtttagtcaaa

SEQ ID NO: 75896 - DNA, 20 bp, Artificial Sequence
  Description of Artificial Sequence: Synthetic oligonucleotide
  Target: ATXN2; (-) strand; PAM type: YTN; PAM sequence: TTT
tttatgtcatgtttagtcaa

SEQ ID NO: 75897 - DNA, 20 bp, Artificial Sequence
  Description of Artificial Sequence: Synthetic oligonucleotide
  Target: ATXN2; (-) strand; PAM type: YTN; PAM sequence: CTT
ttttatgtcatgtttagtca

SEQ ID NO: 75898 - DNA, 20 bp, Artificial Sequence
  Description of Artificial Sequence: Synthetic oligonucleotide
  Target: ATXN2; (-) strand; PAM type: YTN; PAM sequence: TTG
cttttttatgtcatgtttag

SEQ ID NO: 75899 - DNA, 20 bp, Artificial Sequence
  Description of Artificial Sequence: Synthetic oligonucleotide
  Target: ATXN2; (-) strand; PAM type: YTN; PAM sequence: CTT
gcttttttatgtcatgttta

SEQ ID NO: 75900 - DNA, 20 bp, Artificial Sequence
  Description of Artificial Sequence: Synthetic oligonucleotide
  Target: ATXN2; (-) strand; PAM type: YTN; PAM sequence: CTC
ttgcttttttatgtcatgtt

SEQ ID NO: 75901 - DNA, 20 bp, Artificial Sequence
  Description of Artificial Sequence: Synthetic oligonucleotide
  Target: ATXN2; (-) strand; PAM type: YTN; PAM sequence: TTA
ctcttgcttttttatgtcat

SEQ ID NO: 75902 - DNA, 20 bp, Artificial Sequence
  Description of Artificial Sequence: Synthetic oligonucleotide
  Target: ATXN2; (-) strand; PAM type: YTN; PAM sequence: TTT
actcttgcttttttatgtca

SEQ ID NO: 75903 - DNA, 20 bp, Artificial Sequence
  Description of Artificial Sequence: Synthetic oligonucleotide
  Target: ATXN2; (-) strand; PAM type: YTN; PAM sequence: CTA
tggaagtttactcttgcttt

SEQ ID NO: 75904 - DNA, 20 bp, Artificial Sequence
  Description of Artificial Sequence: Synthetic oligonucleotide
  Target: ATXN2; (-) strand; PAM type: YTN; PAM sequence: CTC
tatggaagtttactcttgct

SEQ ID NO: 75905 - DNA, 20 bp, Artificial Sequence
  Description of Artificial Sequence: Synthetic oligonucleotide
  Target: ATXN2; (-) strand; PAM type: YTN; PAM sequence: CTC
ctctatggaagtttactctt

SEQ ID NO: 75906 - DNA, 20 bp, Artificial Sequence
  Description of Artificial Sequence: Synthetic oligonucleotide
  Target: ATXN2; (-) strand; PAM type: YTN; PAM sequence: TTC
ctcctctatggaagtttact

SEQ ID NO: 75907 - DNA, 20 bp, Artificial Sequence
  Description of Artificial Sequence: Synthetic oligonucleotide
  Target: ATXN2; (-) strand; PAM type: YTN; PAM sequence: CTT
cctcctctatggaagtttac

SEQ ID NO: 75908 - DNA, 20 bp, Artificial Sequence
  Description of Artificial Sequence: Synthetic oligonucleotide
  Target: ATXN2; (-) strand; PAM type: YTN; PAM sequence: TTG
tgtccttcctcctctatgga

SEQ ID NO: 75909 - DNA, 20 bp, Artificial Sequence
  Description of Artificial Sequence: Synthetic oligonucleotide
  Target: ATXN2; (-) strand; PAM type: YTN; PAM sequence: TTT
gtgtccttcctcctctatgg

SEQ ID NO: 75910 - DNA, 20 bp, Artificial Sequence
  Description of Artificial Sequence: Synthetic oligonucleotide
  Target: ATXN2; (-) strand; PAM type: YTN; PAM sequence: TTA
cggtttgtgtccttcctcct

SEQ ID NO: 75911 - DNA, 20 bp, Artificial Sequence
  Description of Artificial Sequence: Synthetic oligonucleotide
  Target: ATXN2; (-) strand; PAM type: YTN; PAM sequence: CTT
acggtttgtgtccttcctcc

SEQ ID NO: 75912 - DNA, 20 bp, Artificial Sequence
  Description of Artificial Sequence: Synthetic oligonucleotide
  Target: ATXN2; (-) strand; PAM type: YTN; PAM sequence: TTC
catccttacggtttgtgtcc

SEQ ID NO: 75913 - DNA, 20 bp, Artificial Sequence
  Description of Artificial Sequence: Synthetic oligonucleotide
  Target: ATXN2; (-) strand; PAM type: YTN; PAM sequence: CTT
ccatccttacggtttgtgtc

SEQ ID NO: 75914 - DNA, 20 bp, Artificial Sequence
  Description of Artificial Sequence: Synthetic oligonucleotide
  Target: ATXN2; (-) strand; PAM type: YTN; PAM sequence: TTG
tcttccatccttacggtttg

SEQ ID NO: 75915 - DNA, 20 bp, Artificial Sequence
  Description of Artificial Sequence: Synthetic oligonucleotide
  Target: ATXN2; (-) strand; PAM type: YTN; PAM sequence: TTT
gtcttccatccttacggttt

SEQ ID NO: 75916 - DNA, 20 bp, Artificial Sequence
  Description of Artificial Sequence: Synthetic oligonucleotide
  Target: ATXN2; (-) strand; PAM type: YTN; PAM sequence: TTG
atttgtcttccatccttacg

SEQ ID NO: 75917 - DNA, 20 bp, Artificial Sequence
  Description of Artificial Sequence: Synthetic oligonucleotide
  Target: ATXN2; (-) strand; PAM type: YTN; PAM sequence: CTC
caaccattgatttgtcttcc

SEQ ID NO: 75918 - DNA, 20 bp, Artificial Sequence
  Description of Artificial Sequence: Synthetic oligonucleotide
  Target: ATXN2; (-) strand; PAM type: YTN; PAM sequence: CTC
tccaaccattgatttgtctt

SEQ ID NO: 75919 - DNA, 20 bp, Artificial Sequence
  Description of Artificial Sequence: Synthetic oligonucleotide
  Target: ATXN2; (-) strand; PAM type: YTN; PAM sequence: CTC
tctccaaccattgatttgtc

SEQ ID NO: 75920 - DNA, 20 bp, Artificial Sequence
  Description of Artificial Sequence: Synthetic oligonucleotide
  Target: ATXN2; (-) strand; PAM type: YTN; PAM sequence: CTC
tctctccaaccattgatttg

SEQ ID NO: 75921 - DNA, 20 bp, Artificial Sequence
  Description of Artificial Sequence: Synthetic oligonucleotide
  Target: ATXN2; (-) strand; PAM type: YTN; PAM sequence: CTC
ctctctctccaaccattgat

SEQ ID NO: 75922 - DNA, 20 bp, Artificial Sequence
  Description of Artificial Sequence: Synthetic oligonucleotide
  Target: ATXN2; (-) strand; PAM type: YTN; PAM sequence: TTC
agtgaaccctcctctctctc

SEQ ID NO: 75923 - DNA, 20 bp, Artificial Sequence
  Description of Artificial Sequence: Synthetic oligonucleotide
  Target: ATXN2; (-) strand; PAM type: YTN; PAM sequence: TTT
cagtgaaccctcctctctct

SEQ ID NO: 75924 - DNA, 20 bp, Artificial Sequence
  Description of Artificial Sequence: Synthetic oligonucleotide
  Target: ATXN2; (-) strand; PAM type: YTN; PAM sequence: TTT
tcagtgaaccctcctctctc

SEQ ID NO: 75925 - DNA, 20 bp, Artificial Sequence
  Description of Artificial Sequence: Synthetic oligonucleotide
  Target: ATXN2; (-) strand; PAM type: YTN; PAM sequence: CTT
ttcagtgaaccctcctctct

SEQ ID NO: 75926 - DNA, 20 bp, Artificial Sequence
  Description of Artificial Sequence: Synthetic oligonucleotide
  Target: ATXN2; (-) strand; PAM type: YTN; PAM sequence: CTC
aaatcacttttcagtgaacc

SEQ ID NO: 75927 - DNA, 20 bp, Artificial Sequence
  Description of Artificial Sequence: Synthetic oligonucleotide
  Target: ATXN2; (-) strand; PAM type: YTN; PAM sequence: TTG
cccaccaaaatccctcaaat

SEQ ID NO: 75928 - DNA, 20 bp, Artificial Sequence
  Description of Artificial Sequence: Synthetic oligonucleotide
  Target: ATXN2; (-) strand; PAM type: YTN; PAM sequence: TTC
attgcccaccaaaatccctc

SEQ ID NO: 75929 - DNA, 20 bp, Artificial Sequence
  Description of Artificial Sequence: Synthetic oligonucleotide
  Target: ATXN2; (-) strand; PAM type: YTN; PAM sequence: TTT
cattgcccaccaaaatccct

SEQ ID NO: 75930 - DNA, 20 bp, Artificial Sequence
  Description of Artificial Sequence: Synthetic oligonucleotide
  Target: ATXN2; (-) strand; PAM type: YTN; PAM sequence: TTA
atagaacagtttcattgccc

SEQ ID NO: 75931 - DNA, 20 bp, Artificial Sequence
  Description of Artificial Sequence: Synthetic oligonucleotide
  Target: ATXN2; (-) strand; PAM type: YTN; PAM sequence: CTA
ccaccacaatcaagttaata

SEQ ID NO: 75932 - DNA, 20 bp, Artificial Sequence
  Description of Artificial Sequence: Synthetic oligonucleotide
  Target: ATXN2; (-) strand; PAM type: YTN; PAM sequence: TTG
catacaatcagtgtaactac

SEQ ID NO: 75933 - DNA, 20 bp, Artificial Sequence
  Description of Artificial Sequence: Synthetic oligonucleotide
  Target: ATXN2; (-) strand; PAM type: YTN; PAM sequence: TTA
acaattgcatacaatcagtg

SEQ ID NO: 75934 - DNA, 20 bp, Artificial Sequence
  Description of Artificial Sequence: Synthetic oligonucleotide
  Target: ATXN2; (-) strand; PAM type: YTN; PAM sequence: TTT
aacaattgcatacaatcagt

SEQ ID NO: 75935 - DNA, 20 bp, Artificial Sequence
  Description of Artificial Sequence: Synthetic oligonucleotide
  Target: ATXN2; (-) strand; PAM type: YTN; PAM sequence: TTT
taacaattgcatacaatcag

SEQ ID NO: 75936 - DNA, 20 bp, Artificial Sequence
  Description of Artificial Sequence: Synthetic oligonucleotide
  Target: ATXN2; (-) strand; PAM type: YTN; PAM sequence: CTG
tgagttttaacaattgcata

SEQ ID NO: 75937 - DNA, 20 bp, Artificial Sequence
  Description of Artificial Sequence: Synthetic oligonucleotide
  Target: ATXN2; (-) strand; PAM type: YTN; PAM sequence: TTC
tgtgagttttaacaattgca

SEQ ID NO: 75938 - DNA, 20 bp, Artificial Sequence
  Description of Artificial Sequence: Synthetic oligonucleotide
  Target: ATXN2; (-) strand; PAM type: YTN; PAM sequence: TTT
ctgtgagttttaacaattgc

SEQ ID NO: 75939 - DNA, 20 bp, Artificial Sequence
  Description of Artificial Sequence: Synthetic oligonucleotide
  Target: ATXN2; (-) strand; PAM type: YTN; PAM sequence: TTA
gggtacatttctgtgagttt

SEQ ID NO: 75940 - DNA, 20 bp, Artificial Sequence
  Description of Artificial Sequence: Synthetic oligonucleotide
  Target: ATXN2; (-) strand; PAM type: YTN; PAM sequence: CTT
agggtacatttctgtgagtt

SEQ ID NO: 75941 - DNA, 20 bp, Artificial Sequence
  Description of Artificial Sequence: Synthetic oligonucleotide
  Target: ATXN2; (-) strand; PAM type: YTN; PAM sequence: TTC
ttagggtacatttctgtgag

SEQ ID NO: 75942 - DNA, 20 bp, Artificial Sequence
  Description of Artificial Sequence: Synthetic oligonucleotide
  Target: ATXN2; (-) strand; PAM type: YTN; PAM sequence: CTT
cttagggtacatttctgtga

SEQ ID NO: 75943 - DNA, 20 bp, Artificial Sequence
  Description of Artificial Sequence: Synthetic oligonucleotide
  Target: ATXN2; (-) strand; PAM type: YTN; PAM sequence: TTC
acccttcttagggtacattt

SEQ ID NO: 75944 - DNA, 20 bp, Artificial Sequence
  Description of Artificial Sequence: Synthetic oligonucleotide
  Target: ATXN2; (-) strand; PAM type: YTN; PAM sequence: CTT
cacccttcttagggtacatt

SEQ ID NO: 75945 - DNA, 20 bp, Artificial Sequence
  Description of Artificial Sequence: Synthetic oligonucleotide
  Target: ATXN2; (-) strand; PAM type: YTN; PAM sequence: TTA
tacttcacccttcttagggt

SEQ ID NO: 75946 - DNA, 20 bp, Artificial Sequence
  Description of Artificial Sequence: Synthetic oligonucleotide
  Target: ATXN2; (-) strand; PAM type: YTN; PAM sequence: TTT
atacttcacccttcttaggg

SEQ ID NO: 75947 - DNA, 20 bp, Artificial Sequence
  Description of Artificial Sequence: Synthetic oligonucleotide
  Target: ATXN2; (-) strand; PAM type: YTN; PAM sequence: TTA
tttatacttcacccttctta

SEQ ID NO: 75948 - DNA, 20 bp, Artificial Sequence
  Description of Artificial Sequence: Synthetic oligonucleotide
  Target: ATXN2; (-) strand; PAM type: YTN; PAM sequence: TTT
atttatacttcacccttctt

SEQ ID NO: 75949 - DNA, 20 bp, Artificial Sequence
  Description of Artificial Sequence: Synthetic oligonucleotide
  Target: ATXN2; (-) strand; PAM type: YTN; PAM sequence: CTA
ccccatttatttatacttca

SEQ ID NO: 75950 - DNA, 20 bp, Artificial Sequence
  Description of Artificial Sequence: Synthetic oligonucleotide
  Target: ATXN2; (-) strand; PAM type: YTN; PAM sequence: TTC
ctaccccatttatttatact

SEQ ID NO: 75951 - DNA, 20 bp, Artificial Sequence
  Description of Artificial Sequence: Synthetic oligonucleotide
  Target: ATXN2; (-) strand; PAM type: YTN; PAM sequence: CTT
cctaccccatttatttatac

SEQ ID NO: 75952 - DNA, 20 bp, Artificial Sequence
  Description of Artificial Sequence: Synthetic oligonucleotide
  Target: ATXN2; (-) strand; PAM type: YTN; PAM sequence: CTG
gcttcctaccccatttattt

SEQ ID NO: 75953 - DNA, 20 bp, Artificial Sequence
  Description of Artificial Sequence: Synthetic oligonucleotide
  Target: ATXN2; (-) strand; PAM type: YTN; PAM sequence: CTA
tgaaggtatgacctggcttc

SEQ ID NO: 75954 - DNA, 20 bp, Artificial Sequence
  Description of Artificial Sequence: Synthetic oligonucleotide
  Target: ATXN2; (-) strand; PAM type: YTN; PAM sequence: TTC
tatgaaggtatgacctggct

SEQ ID NO: 75955 - DNA, 20 bp, Artificial Sequence
  Description of Artificial Sequence: Synthetic oligonucleotide
  Target: ATXN2; (-) strand; PAM type: YTN; PAM sequence: CTT
ctatgaaggtatgacctggc

SEQ ID NO: 75956 - DNA, 20 bp, Artificial Sequence
  Description of Artificial Sequence: Synthetic oligonucleotide
  Target: ATXN2; (-) strand; PAM type: YTN; PAM sequence: TTC
ttctatgaaggtatgacctg

SEQ ID NO: 75957 - DNA, 20 bp, Artificial Sequence
  Description of Artificial Sequence: Synthetic oligonucleotide
  Target: ATXN2; (-) strand; PAM type: YTN; PAM sequence: CTA
gtcagggttcttctatgaag

SEQ ID NO: 75958 - DNA, 20 bp, Artificial Sequence
  Description of Artificial Sequence: Synthetic oligonucleotide
  Target: ATXN2; (-) strand; PAM type: YTN; PAM sequence: CTG
ggagaacctagtcagggttc

SEQ ID NO: 75959 - DNA, 20 bp, Artificial Sequence
  Description of Artificial Sequence: Synthetic oligonucleotide
  Target: ATXN2; (-) strand; PAM type: YTN; PAM sequence: CTG
atatgctgggagaacctagt

SEQ ID NO: 75960 - DNA, 20 bp, Artificial Sequence
  Description of Artificial Sequence: Synthetic oligonucleotide
  Target: ATXN2; (-) strand; PAM type: YTN; PAM sequence: CTG
atgctgatatgctgggagaa

SEQ ID NO: 75961 - DNA, 20 bp, Artificial Sequence
  Description of Artificial Sequence: Synthetic oligonucleotide
  Target: ATXN2; (-) strand; PAM type: YTN; PAM sequence: CTG
tcactgatgctgatatgctg

SEQ ID NO: 75962 - DNA, 20 bp, Artificial Sequence
  Description of Artificial Sequence: Synthetic oligonucleotide
  Target: ATXN2; (-) strand; PAM type: YTN; PAM sequence: TTA
agcactgtcactgatgctga

SEQ ID NO: 75963 - DNA, 20 bp, Artificial Sequence
  Description of Artificial Sequence: Synthetic oligonucleotide
  Target: ATXN2; (-) strand; PAM type: YTN; PAM sequence: CTT
aagcactgtcactgatgctg

SEQ ID NO: 75964 - DNA, 20 bp, Artificial Sequence
  Description of Artificial Sequence: Synthetic oligonucleotide
  Target: ATXN2; (-) strand; PAM type: YTN; PAM sequence: TTG
atcagacttaagcactgtca

SEQ ID NO: 75965 - DNA, 20 bp, Artificial Sequence
  Description of Artificial Sequence: Synthetic oligonucleotide
  Target: ATXN2; (-) strand; PAM type: YTN; PAM sequence: TTA
caagaatcaggaagatatac

SEQ ID NO: 75966 - DNA, 20 bp, Artificial Sequence
  Description of Artificial Sequence: Synthetic oligonucleotide
  Target: ATXN2; (-) strand; PAM type: YTN; PAM sequence: TTT
acaagaatcaggaagatata

SEQ ID NO: 75967 - DNA, 20 bp, Artificial Sequence
  Description of Artificial Sequence: Synthetic oligonucleotide
  Target: ATXN2; (-) strand; PAM type: YTN; PAM sequence: TTT
tacaagaatcaggaagatat

SEQ ID NO: 75968 - DNA, 20 bp, Artificial Sequence
  Description of Artificial Sequence: Synthetic oligonucleotide
  Target: ATXN2; (-) strand; PAM type: YTN; PAM sequence: TTG
ttttacaagaatcaggaaga

SEQ ID NO: 75969 - DNA, 20 bp, Artificial Sequence
  Description of Artificial Sequence: Synthetic oligonucleotide
  Target: ATXN2; (-) strand; PAM type: YTN; PAM sequence: TTA
gattgttttacaagaatcag

SEQ ID NO: 75970 - DNA, 20 bp, Artificial Sequence
  Description of Artificial Sequence: Synthetic oligonucleotide
  Target: ATXN2; (-) strand; PAM type: YTN; PAM sequence: TTA
ttagattgttttacaagaat

SEQ ID NO: 75971 - DNA, 20 bp, Artificial Sequence
  Description of Artificial Sequence: Synthetic oligonucleotide
  Target: ATXN2; (-) strand; PAM type: YTN; PAM sequence: TTT
attagattgttttacaagaa

SEQ ID NO: 75972 - DNA, 20 bp, Artificial Sequence
  Description of Artificial Sequence: Synthetic oligonucleotide
  Target: ATXN2; (-) strand; PAM type: YTN; PAM sequence: CTT
tattagattgttttacaaga

SEQ ID NO: 75973 - DNA, 20 bp, Artificial Sequence
  Description of Artificial Sequence: Synthetic oligonucleotide
  Target: ATXN2; (-) strand; PAM type: YTN; PAM sequence: TTG
cctttattagattgttttac

SEQ ID NO: 75974 - DNA, 20 bp, Artificial Sequence
  Description of Artificial Sequence: Synthetic oligonucleotide
  Target: ATXN2; (-) strand; PAM type: YTN; PAM sequence: TTT
gcctttattagattgtttta

SEQ ID NO: 75975 - DNA, 20 bp, Artificial Sequence
  Description of Artificial Sequence: Synthetic oligonucleotide
  Target: ATXN2; (-) strand; PAM type: YTN; PAM sequence: CTT
tgcctttattagattgtttt

SEQ ID NO: 75976 - DNA, 20 bp, Artificial Sequence
  Description of Artificial Sequence: Synthetic oligonucleotide
  Target: ATXN2; (-) strand; PAM type: YTN; PAM sequence: TTG
agactttgcctttattagat

SEQ ID NO: 75977 - DNA, 20 bp, Artificial Sequence
  Description of Artificial Sequence: Synthetic oligonucleotide
  Target: ATXN2; (-) strand; PAM type: YTN; PAM sequence: TTT
gagactttgcctttattaga

SEQ ID NO: 75978 - DNA, 20 bp, Artificial Sequence
  Description of Artificial Sequence: Synthetic oligonucleotide
  Target: ATXN2; (-) strand; PAM type: YTN; PAM sequence: TTT
tgagactttgcctttattag

SEQ ID NO: 75979 - DNA, 20 bp, Artificial Sequence
  Description of Artificial Sequence: Synthetic oligonucleotide
  Target: ATXN2; (-) strand; PAM type: YTN; PAM sequence: TTT
ttgagactttgcctttatta

SEQ ID NO: 75980 - DNA, 20 bp, Artificial Sequence
  Description of Artificial Sequence: Synthetic oligonucleotide
  Target: ATXN2; (-) strand; PAM type: YTN; PAM sequence: CTA
tcacaaatttttgagacttt

SEQ ID NO: 75981 - DNA, 20 bp, Artificial Sequence
  Description of Artificial Sequence: Synthetic oligonucleotide
  Target: ATXN2; (-) strand; PAM type: YTN; PAM sequence: CTA
taagtcccacatgatggaag

SEQ ID NO: 75982 - DNA, 20 bp, Artificial Sequence
  Description of Artificial Sequence: Synthetic oligonucleotide
  Target: ATXN2; (-) strand; PAM type: YTN; PAM sequence: TTG
aaccggacatgaagggcaga

SEQ ID NO: 75983 - DNA, 20 bp, Artificial Sequence
  Description of Artificial Sequence: Synthetic oligonucleotide
  Target: ATXN2; (-) strand; PAM type: YTN; PAM sequence: TTA
tcaatgaaattgaaccggac

SEQ ID NO: 75984 - DNA, 20 bp, Artificial Sequence
  Description of Artificial Sequence: Synthetic oligonucleotide
  Target: ATXN2; (-) strand; PAM type: YTN; PAM sequence: TTG
gaatgttatcaatgaaattg

SEQ ID NO: 75985 - DNA, 20 bp, Artificial Sequence
  Description of Artificial Sequence: Synthetic oligonucleotide
  Target: ATXN2; (-) strand; PAM type: YTN; PAM sequence: TTT
ggaatgttatcaatgaaatt

SEQ ID NO: 75986 - DNA, 20 bp, Artificial Sequence
  Description of Artificial Sequence: Synthetic oligonucleotide
  Target: ATXN2; (-) strand; PAM type: YTN; PAM sequence: TTT
tggaatgttatcaatgaaat

SEQ ID NO: 75987 - DNA, 20 bp, Artificial Sequence
  Description of Artificial Sequence: Synthetic oligonucleotide
  Target: ATXN2; (-) strand; PAM type: YTN; PAM sequence: TTA
aattttggaatgttatcaat

SEQ ID NO: 75988 - DNA, 20 bp, Artificial Sequence
  Description of Artificial Sequence: Synthetic oligonucleotide
  Target: ATXN2; (-) strand; PAM type: YTN; PAM sequence: CTT
aaattttggaatgttatcaa

SEQ ID NO: 75989 - DNA, 20 bp, Artificial Sequence
  Description of Artificial Sequence: Synthetic oligonucleotide
  Target: ATXN2; (-) strand; PAM type: YTN; PAM sequence: CTG
gtcttaaattttggaatgtt

SEQ ID NO: 75990 - DNA, 20 bp, Artificial Sequence
  Description of Artificial Sequence: Synthetic oligonucleotide
  Target: ATXN2; (-) strand; PAM type: YTN; PAM sequence: TTC
tggtcttaaattttggaatg

SEQ ID NO: 75991 - DNA, 20 bp, Artificial Sequence
  Description of Artificial Sequence: Synthetic oligonucleotide
  Target: ATXN2; (-) strand; PAM type: YTN; PAM sequence: TTT
ctggtcttaaattttggaat

SEQ ID NO: 75992 - DNA, 20 bp, Artificial Sequence
  Description of Artificial Sequence: Synthetic oligonucleotide
  Target: ATXN2; (-) strand; PAM type: YTN; PAM sequence: CTT
tctggtcttaaattttggaa

SEQ ID NO: 75993 - DNA, 20 bp, Artificial Sequence
  Description of Artificial Sequence: Synthetic oligonucleotide
  Target: ATXN2; (-) strand; PAM type: YTN; PAM sequence: TTG
gctttctggtcttaaatttt

SEQ ID NO: 75994 - DNA, 20 bp, Artificial Sequence
  Description of Artificial Sequence: Synthetic oligonucleotide
  Target: ATXN2; (-) strand; PAM type: YTN; PAM sequence: TTT
ggctttctggtcttaaattt

SEQ ID NO: 75995 - DNA, 20 bp, Artificial Sequence
  Description of Artificial Sequence: Synthetic oligonucleotide
  Target: ATXN2; (-) strand; PAM type: YTN; PAM sequence: CTT
tggctttctggtcttaaatt

SEQ ID NO: 75996 - DNA, 20 bp, Artificial Sequence
  Description of Artificial Sequence: Synthetic oligonucleotide
  Target: ATXN2; (-) strand; PAM type: YTN; PAM sequence: CTC
ctttggctttctggtcttaa

SEQ ID NO: 75997 - DNA, 20 bp, Artificial Sequence
  Description of Artificial Sequence: Synthetic oligonucleotide
  Target: ATXN2; (-) strand; PAM type: YTN; PAM sequence: TTC
tcctttggctttctggtctt

SEQ ID NO: 75998 - DNA, 20 bp, Artificial Sequence
  Description of Artificial Sequence: Synthetic oligonucleotide
  Target: ATXN2; (-) strand; PAM type: YTN; PAM sequence: TTT
ctcctttggctttctggtct

SEQ ID NO: 75999 - DNA, 20 bp, Artificial Sequence
  Description of Artificial Sequence: Synthetic oligonucleotide
  Target: ATXN2; (-) strand; PAM type: YTN; PAM sequence: TTT
tctcctttggctttctggtc

SEQ ID NO: 76000 - DNA, 20 bp, Artificial Sequence
  Description of Artificial Sequence: Synthetic oligonucleotide
  Target: ATXN2; (-) strand; PAM type: YTN; PAM sequence: TTT
ttctcctttggctttctggt

SEQ ID NO: 76001 - DNA, 20 bp, Artificial Sequence
  Description of Artificial Sequence: Synthetic oligonucleotide
  Target: ATXN2; (-) strand; PAM type: YTN; PAM sequence: TTC
atttttctcctttggctttc

SEQ ID NO: 76002 - DNA, 20 bp, Artificial Sequence
  Description of Artificial Sequence: Synthetic oligonucleotide
  Target: ATXN2; (-) strand; PAM type: YTN; PAM sequence: TTT
catttttctcctttggcttt

SEQ ID NO: 76003 - DNA, 20 bp, Artificial Sequence
  Description of Artificial Sequence: Synthetic oligonucleotide
  Target: ATXN2; (-) strand; PAM type: YTN; PAM sequence: CTT
tcatttttctcctttggctt

SEQ ID NO: 76004 - DNA, 20 bp, Artificial Sequence
  Description of Artificial Sequence: Synthetic oligonucleotide
  Target: ATXN2; (-) strand; PAM type: YTN; PAM sequence: CTG
ctttcatttttctcctttgg

SEQ ID NO: 76005 - DNA, 20 bp, Artificial Sequence
  Description of Artificial Sequence: Synthetic oligonucleotide
  Target: ATXN2; (-) strand; PAM type: YTN; PAM sequence: CTG
ctgctttcatttttctcctt

SEQ ID NO: 76006 - DNA, 20 bp, Artificial Sequence
  Description of Artificial Sequence: Synthetic oligonucleotide
  Target: ATXN2; (-) strand; PAM type: YTN; PAM sequence: TTC
tgctgctttcatttttctcc

SEQ ID NO: 76007 - DNA, 20 bp, Artificial Sequence
  Description of Artificial Sequence: Synthetic oligonucleotide
  Target: ATXN2; (-) strand; PAM type: YTN; PAM sequence: TTT
ctgctgctttcatttttctc

SEQ ID NO: 76008 - DNA, 20 bp, Artificial Sequence
  Description of Artificial Sequence: Synthetic oligonucleotide
  Target: ATXN2; (-) strand; PAM type: YTN; PAM sequence: TTT
tctgctgctttcatttttct

SEQ ID NO: 76009 - DNA, 20 bp, Artificial Sequence
  Description of Artificial Sequence: Synthetic oligonucleotide
  Target: ATXN2; (-) strand; PAM type: YTN; PAM sequence: TTT
ttctgctgctttcatttttc

SEQ ID NO: 76010 - DNA, 20 bp, Artificial Sequence
  Description of Artificial Sequence: Synthetic oligonucleotide
  Target: ATXN2; (-) strand; PAM type: YTN; PAM sequence: TTT
tttctgctgctttcattttt

SEQ ID NO: 76011 - DNA, 20 bp, Artificial Sequence
  Description of Artificial Sequence: Synthetic oligonucleotide
  Target: ATXN2; (-) strand; PAM type: YTN; PAM sequence: TTT
ttttctgctgctttcatttt

SEQ ID NO: 76012 - DNA, 20 bp, Artificial Sequence
  Description of Artificial Sequence: Synthetic oligonucleotide
  Target: ATXN2; (-) strand; PAM type: YTN; PAM sequence: CTT
tttttctgctgctttcattt

SEQ ID NO: 76013 - DNA, 20 bp, Artificial Sequence
  Description of Artificial Sequence: Synthetic oligonucleotide
  Target: ATXN2; (-) strand; PAM type: YTN; PAM sequence: TTA
atgtgctttttttctgctgc

SEQ ID NO: 76014 - DNA, 20 bp, Artificial Sequence
  Description of Artificial Sequence: Synthetic oligonucleotide
  Target: ATXN2; (-) strand; PAM type: YTN; PAM sequence: TTG
aattaatgtgctttttttct

SEQ ID NO: 76015 - DNA, 20 bp, Artificial Sequence
  Description of Artificial Sequence: Synthetic oligonucleotide
  Target: ATXN2; (-) strand; PAM type: YTN; PAM sequence: TTT
gaattaatgtgctttttttc

SEQ ID NO: 76016 - DNA, 20 bp, Artificial Sequence
  Description of Artificial Sequence: Synthetic oligonucleotide
  Target: ATXN2; (-) strand; PAM type: YTN; PAM sequence: TTT
tgaattaatgtgcttttttt

SEQ ID NO: 76017 - DNA, 20 bp, Artificial Sequence
  Description of Artificial Sequence: Synthetic oligonucleotide
  Target: ATXN2; (-) strand; PAM type: YTN; PAM sequence: TTA
ttttgaattaatgtgctttt

SEQ ID NO: 76018 - DNA, 20 bp, Artificial Sequence
  Description of Artificial Sequence: Synthetic oligonucleotide
  Target: ATXN2; (-) strand; PAM type: YTN; PAM sequence: TTT
attttgaattaatgtgcttt

SEQ ID NO: 76019 - DNA, 20 bp, Artificial Sequence
  Description of Artificial Sequence: Synthetic oligonucleotide
  Target: ATXN2; (-) strand; PAM type: YTN; PAM sequence: TTT
tattttgaattaatgtgctt

SEQ ID NO: 76020 - DNA, 20 bp, Artificial Sequence
  Description of Artificial Sequence: Synthetic oligonucleotide
  Target: ATXN2; (-) strand; PAM type: YTN; PAM sequence: TTT
ttattttgaattaatgtgct

SEQ ID NO: 76021 - DNA, 20 bp, Artificial Sequence
  Description of Artificial Sequence: Synthetic oligonucleotide
  Target: ATXN2; (-) strand; PAM type: YTN; PAM sequence: CTT
tttattttgaattaatgtgc

SEQ ID NO: 76022 - DNA, 20 bp, Artificial Sequence
  Description of Artificial Sequence: Synthetic oligonucleotide
  Target: ATXN2; (-) strand; PAM type: YTN; PAM sequence: TTA
tgctttttattttgaattaa

SEQ ID NO: 76023 - DNA, 20 bp, Artificial Sequence
  Description of Artificial Sequence: Synthetic oligonucleotide
  Target: ATXN2; (-) strand; PAM type: YTN; PAM sequence: TTT
atgctttttattttgaatta

SEQ ID NO: 76024 - DNA, 20 bp, Artificial Sequence
  Description of Artificial Sequence: Synthetic oligonucleotide
  Target: ATXN2; (-) strand; PAM type: YTN; PAM sequence: CTT
tatgctttttattttgaatt

SEQ ID NO: 76025 - DNA, 20 bp, Artificial Sequence
  Description of Artificial Sequence: Synthetic oligonucleotide
  Target: ATXN2; (-) strand; PAM type: YTN; PAM sequence: TTC
tttatgctttttattttgaa

SEQ ID NO: 76026 - DNA, 20 bp, Artificial Sequence
  Description of Artificial Sequence: Synthetic oligonucleotide
  Target: ATXN2; (-) strand; PAM type: YTN; PAM sequence: CTG
cagagttctttatgcttttt

SEQ ID NO: 76027 - DNA, 20 bp, Artificial Sequence
  Description of Artificial Sequence: Synthetic oligonucleotide
  Target: ATXN2; (-) strand; PAM type: YTN; PAM sequence: CTC
caaaagatacgtagaacacc

SEQ ID NO: 76028 - DNA, 20 bp, Artificial Sequence
  Description of Artificial Sequence: Synthetic oligonucleotide
  Target: ATXN2; (-) strand; PAM type: YTN; PAM sequence: CTA
agtgaaaaacctccaaaaga

SEQ ID NO: 76029 - DNA, 20 bp, Artificial Sequence
  Description of Artificial Sequence: Synthetic oligonucleotide
  Target: ATXN2; (-) strand; PAM type: YTN; PAM sequence: CTA
agtgcaaatctaagtgaaaa

SEQ ID NO: 76030 - DNA, 20 bp, Artificial Sequence
  Description of Artificial Sequence: Synthetic oligonucleotide
  Target: ATXN2; (-) strand; PAM type: YTN; PAM sequence: CTA
aatgactaagtgcaaatcta

SEQ ID NO: 76031 - DNA, 20 bp, Artificial Sequence
  Description of Artificial Sequence: Synthetic oligonucleotide
  Target: ATXN2; (-) strand; PAM type: YTN; PAM sequence: TTC
taaatgactaagtgcaaatc

SEQ ID NO: 76032 - DNA, 20 bp, Artificial Sequence
  Description of Artificial Sequence: Synthetic oligonucleotide
  Target: ATXN2; (-) strand; PAM type: YTN; PAM sequence: TTT
ctaaatgactaagtgcaaat

SEQ ID NO: 76033 - DNA, 20 bp, Artificial Sequence
  Description of Artificial Sequence: Synthetic oligonucleotide
  Target: ATXN2; (-) strand; PAM type: YTN; PAM sequence: TTT
tctaaatgactaagtgcaaa

SEQ ID NO: 76034 - DNA, 20 bp, Artificial Sequence
  Description of Artificial Sequence: Synthetic oligonucleotide
  Target: ATXN2; (-) strand; PAM type: YTN; PAM sequence: CTT
ttctaaatgactaagtgcaa

SEQ ID NO: 76035 - DNA, 20 bp, Artificial Sequence
  Description of Artificial Sequence: Synthetic oligonucleotide
  Target: ATXN2; (-) strand; PAM type: YTN; PAM sequence: TTC
ttttctaaatgactaagtgc

SEQ ID NO: 76036 - DNA, 20 bp, Artificial Sequence
  Description of Artificial Sequence: Synthetic oligonucleotide
  Target: ATXN2; (-) strand; PAM type: YTN; PAM sequence: TTG
ttcttttctaaatgactaag

SEQ ID NO: 76037 - DNA, 20 bp, Artificial Sequence
  Description of Artificial Sequence: Synthetic oligonucleotide
  Target: ATXN2; (-) strand; PAM type: YTN; PAM sequence: CTT
gttcttttctaaatgactaa

SEQ ID NO: 76038 - DNA, 20 bp, Artificial Sequence
  Description of Artificial Sequence: Synthetic oligonucleotide
  Target: ATXN2; (-) strand; PAM type: YTN; PAM sequence: TTG
tcacgtgtaataacaagaac

SEQ ID NO: 76039 - DNA, 20 bp, Artificial Sequence
  Description of Artificial Sequence: Synthetic oligonucleotide
  Target: ATXN2; (-) strand; PAM type: YTN; PAM sequence: TTT
gtcacgtgtaataacaagaa

SEQ ID NO: 76040 - DNA, 20 bp, Artificial Sequence
  Description of Artificial Sequence: Synthetic oligonucleotide
  Target: ATXN2; (-) strand; PAM type: YTN; PAM sequence: TTT
tgtcacgtgtaataacaaga

SEQ ID NO: 76041 - DNA, 20 bp, Artificial Sequence
  Description of Artificial Sequence: Synthetic oligonucleotide
  Target: ATXN2; (-) strand; PAM type: YTN; PAM sequence: TTT
ttgtcacgtgtaataacaag

SEQ ID NO: 76042 - DNA, 20 bp, Artificial Sequence
  Description of Artificial Sequence: Synthetic oligonucleotide
  Target: ATXN2; (-) strand; PAM type: YTN; PAM sequence: TTG
taaatagtatttttgtcacg

SEQ ID NO: 76043 - DNA, 20 bp, Artificial Sequence
  Description of Artificial Sequence: Synthetic oligonucleotide
  Target: ATXN2; (-) strand; PAM type: YTN; PAM sequence: TTT
gtaaatagtatttttgtcac

SEQ ID NO: 76044 - DNA, 20 bp, Artificial Sequence
  Description of Artificial Sequence: Synthetic oligonucleotide
  Target: ATXN2; (-) strand; PAM type: YTN; PAM sequence: TTG
ggtggggacacagaaccaaa

SEQ ID NO: 76045 - DNA, 20 bp, Artificial Sequence
  Description of Artificial Sequence: Synthetic oligonucleotide
  Target: ATXN2; (-) strand; PAM type: YTN; PAM sequence: TTT
gggtggggacacagaaccaa

SEQ ID NO: 76046 - DNA, 20 bp, Artificial Sequence
  Description of Artificial Sequence: Synthetic oligonucleotide
  Target: ATXN2; (-) strand; PAM type: YTN; PAM sequence: TTA
aagataagatttgggtgggg

SEQ ID NO: 76047 - DNA, 20 bp, Artificial Sequence
  Description of Artificial Sequence: Synthetic oligonucleotide
  Target: ATXN2; (-) strand; PAM type: YTN; PAM sequence: TTA
taattaaagataagatttgg

SEQ ID NO: 76048 - DNA, 20 bp, Artificial Sequence
  Description of Artificial Sequence: Synthetic oligonucleotide
  Target: ATXN2; (-) strand; PAM type: YTN; PAM sequence: TTA
ttataattaaagataagatt

SEQ ID NO: 76049 - DNA, 20 bp, Artificial Sequence
  Description of Artificial Sequence: Synthetic oligonucleotide
  Target: ATXN2; (-) strand; PAM type: YTN; PAM sequence: TTG
acacacgagaattattataa

SEQ ID NO: 76050 - DNA, 20 bp, Artificial Sequence
  Description of Artificial Sequence: Synthetic oligonucleotide
  Target: ATXN2; (-) strand; PAM type: YTN; PAM sequence: CTT
gacacacgagaattattata

SEQ ID NO: 76051 - DNA, 20 bp, Artificial Sequence
  Description of Artificial Sequence: Synthetic oligonucleotide
  Target: ATXN2; (-) strand; PAM type: YTN; PAM sequence: TTG
cccttgacacacgagaatta

SEQ ID NO: 76052 - DNA, 20 bp, Artificial Sequence
  Description of Artificial Sequence: Synthetic oligonucleotide
  Target: ATXN2; (-) strand; PAM type: YTN; PAM sequence: CTT
gcccttgacacacgagaatt

SEQ ID NO: 76053 - DNA, 20 bp, Artificial Sequence
  Description of Artificial Sequence: Synthetic oligonucleotide
  Target: ATXN2; (-) strand; PAM type: YTN; PAM sequence: CTG
gtcttgcccttgacacacga

SEQ ID NO: 76054 - DNA, 20 bp, Artificial Sequence
  Description of Artificial Sequence: Synthetic oligonucleotide
  Target: ATXN2; (-) strand; PAM type: YTN; PAM sequence: CTC
cacctggtcttgcccttgac

SEQ ID NO: 76055 - DNA, 20 bp, Artificial Sequence
  Description of Artificial Sequence: Synthetic oligonucleotide
  Target: ATXN2; (-) strand; PAM type: YTN; PAM sequence: TTA
tctccacctggtcttgccct

SEQ ID NO: 76056 - DNA, 20 bp, Artificial Sequence
  Description of Artificial Sequence: Synthetic oligonucleotide
  Target: ATXN2; (-) strand; PAM type: YTN; PAM sequence: TTC
agttatctccacctggtctt

SEQ ID NO: 76057 - DNA, 20 bp, Artificial Sequence
  Description of Artificial Sequence: Synthetic oligonucleotide
  Target: ATXN2; (-) strand; PAM type: YTN; PAM sequence: CTG
cccccatgattcagttatct

SEQ ID NO: 76058 - DNA, 20 bp, Artificial Sequence
  Description of Artificial Sequence: Synthetic oligonucleotide
  Target: ATXN2; (-) strand; PAM type: YTN; PAM sequence: CTA
tcatgagagcagcgtagggg

SEQ ID NO: 76059 - DNA, 20 bp, Artificial Sequence
  Description of Artificial Sequence: Synthetic oligonucleotide
  Target: ATXN2; (-) strand; PAM type: YTN; PAM sequence: CTC
actatcatgagagcagcgta

SEQ ID NO: 76060 - DNA, 20 bp, Artificial Sequence
  Description of Artificial Sequence: Synthetic oligonucleotide
  Target: ATXN2; (-) strand; PAM type: YTN; PAM sequence: CTC
actcactatcatgagagcag

SEQ ID NO: 76061 - DNA, 20 bp, Artificial Sequence
  Description of Artificial Sequence: Synthetic oligonucleotide
  Target: ATXN2; (-) strand; PAM type: YTN; PAM sequence: CTG
agaactcactcactatcatg

SEQ ID NO: 76062 - DNA, 20 bp, Artificial Sequence
  Description of Artificial Sequence: Synthetic oligonucleotide
  Target: ATXN2; (-) strand; PAM type: YTN; PAM sequence: CTC
ctgagaactcactcactatc

SEQ ID NO: 76063 - DNA, 20 bp, Artificial Sequence
  Description of Artificial Sequence: Synthetic oligonucleotide
  Target: ATXN2; (-) strand; PAM type: YTN; PAM sequence: TTA
taaaaccatcagatctcctg

SEQ ID NO: 76064 - DNA, 20 bp, Artificial Sequence
  Description of Artificial Sequence: Synthetic oligonucleotide
  Target: ATXN2; (-) strand; PAM type: YTN; PAM sequence: CTT
ataaaaccatcagatctcct

SEQ ID NO: 76065 - DNA, 20 bp, Artificial Sequence
  Description of Artificial Sequence: Synthetic oligonucleotide
  Target: ATXN2; (-) strand; PAM type: YTN; PAM sequence: CTG
agcaaagcagggaaagcccc

SEQ ID NO: 76066 - DNA, 20 bp, Artificial Sequence
  Description of Artificial Sequence: Synthetic oligonucleotide
  Target: ATXN2; (-) strand; PAM type: YTN; PAM sequence: TTC
acatagcgacaggagagaga

SEQ ID NO: 76067 - DNA, 20 bp, Artificial Sequence
  Description of Artificial Sequence: Synthetic oligonucleotide
  Target: ATXN2; (-) strand; PAM type: YTN; PAM sequence: CTT
cacatagcgacaggagagag

SEQ ID NO: 76068 - DNA, 20 bp, Artificial Sequence
  Description of Artificial Sequence: Synthetic oligonucleotide
  Target: ATXN2; (-) strand; PAM type: YTN; PAM sequence: TTC
ttcacatagcgacaggagag

SEQ ID NO: 76069 - DNA, 20 bp, Artificial Sequence
  Description of Artificial Sequence: Synthetic oligonucleotide
  Target: ATXN2; (-) strand; PAM type: YTN; PAM sequence: CTT
cttcacatagcgacaggaga

SEQ ID NO: 76070 - DNA, 20 bp, Artificial Sequence
  Description of Artificial Sequence: Synthetic oligonucleotide
  Target: ATXN2; (-) strand; PAM type: YTN; PAM sequence: TTA
caatcatggtggaaggggaa

SEQ ID NO: 76071 - DNA, 20 bp, Artificial Sequence
  Description of Artificial Sequence: Synthetic oligonucleotide
  Target: ATXN2; (-) strand; PAM type: YTN; PAM sequence: CTT
acaatcatggtggaagggga

SEQ ID NO: 76072 - DNA, 20 bp, Artificial Sequence
  Description of Artificial Sequence: Synthetic oligonucleotide
  Target: ATXN2; (-) strand; PAM type: YTN; PAM sequence: CTC
aggaaacttacaatcatggt

SEQ ID NO: 76073 - DNA, 20 bp, Artificial Sequence
  Description of Artificial Sequence: Synthetic oligonucleotide
  Target: ATXN2; (-) strand; PAM type: YTN; PAM sequence: CTG
gggaggcctcaggaaactta

SEQ ID NO: 76074 - DNA, 20 bp, Artificial Sequence
  Description of Artificial Sequence: Synthetic oligonucleotide
  Target: ATXN2; (-) strand; PAM type: YTN; PAM sequence: TTG
ctggggaggcctcaggaaac

SEQ ID NO: 76075 - DNA, 20 bp, Artificial Sequence
  Description of Artificial Sequence: Synthetic oligonucleotide
  Target: ATXN2; (-) strand; PAM type: YTN; PAM sequence: CTG
cattgctggggaggcctcag

SEQ ID NO: 76076 - DNA, 20 bp, Artificial Sequence
  Description of Artificial Sequence: Synthetic oligonucleotide
  Target: ATXN2; (-) strand; PAM type: YTN; PAM sequence: CTC
tgcattgctggggaggcctc

SEQ ID NO: 76077 - DNA, 20 bp, Artificial Sequence
  Description of Artificial Sequence: Synthetic oligonucleotide
  Target: ATXN2; (-) strand; PAM type: YTN; PAM sequence: CTC
atgctctgcattgctgggga

SEQ ID NO: 76078 - DNA, 20 bp, Artificial Sequence
  Description of Artificial Sequence: Synthetic oligonucleotide
  Target: ATXN2; (-) strand; PAM type: YTN; PAM sequence: TTG
actcatgctctgcattgctg

SEQ ID NO: 76079 - DNA, 20 bp, Artificial Sequence
  Description of Artificial Sequence: Synthetic oligonucleotide
  Target: ATXN2; (-) strand; PAM type: YTN; PAM sequence: TTA
attgactcatgctctgcatt

SEQ ID NO: 76080 - DNA, 20 bp, Artificial Sequence
  Description of Artificial Sequence: Synthetic oligonucleotide
  Target: ATXN2; (-) strand; PAM type: YTN; PAM sequence: TTT
aattgactcatgctctgcat

SEQ ID NO: 76081 - DNA, 20 bp, Artificial Sequence
  Description of Artificial Sequence: Synthetic oligonucleotide
  Target: ATXN2; (-) strand; PAM type: YTN; PAM sequence: TTA
taaaggaaagaggtttaatt

SEQ ID NO: 76082 - DNA, 20 bp, Artificial Sequence
  Description of Artificial Sequence: Synthetic oligonucleotide
  Target: ATXN2; (-) strand; PAM type: YTN; PAM sequence: TTT
ataaaggaaagaggtttaat

SEQ ID NO: 76083 - DNA, 20 bp, Artificial Sequence
  Description of Artificial Sequence: Synthetic oligonucleotide
  Target: ATXN2; (-) strand; PAM type: YTN; PAM sequence: CTG
ggtaatttataaaggaaaga

SEQ ID NO: 76084 - DNA, 20 bp, Artificial Sequence
  Description of Artificial Sequence: Synthetic oligonucleotide
  Target: ATXN2; (-) strand; PAM type: YTN; PAM sequence: CTA
agactgggtaatttataaag

SEQ ID NO: 76085 - DNA, 20 bp, Artificial Sequence
  Description of Artificial Sequence: Synthetic oligonucleotide
  Target: ATXN2; (-) strand; PAM type: YTN; PAM sequence: CTA
ataaagatatacctaagact

SEQ ID NO: 76086 - DNA, 20 bp, Artificial Sequence
  Description of Artificial Sequence: Synthetic oligonucleotide
  Target: ATXN2; (-) strand; PAM type: YTN; PAM sequence: CTG
ctaataaagatatacctaag

SEQ ID NO: 76087 - DNA, 20 bp, Artificial Sequence
  Description of Artificial Sequence: Synthetic oligonucleotide
  Target: ATXN2; (-) strand; PAM type: YTN; PAM sequence: TTA
cactgctaataaagatatac

SEQ ID NO: 76088 - DNA, 20 bp, Artificial Sequence
  Description of Artificial Sequence: Synthetic oligonucleotide
  Target: ATXN2; (-) strand; PAM type: YTN; PAM sequence: CTT
acactgctaataaagatata

SEQ ID NO: 76089 - DNA, 20 bp, Artificial Sequence
  Description of Artificial Sequence: Synthetic oligonucleotide
  Target: ATXN2; (-) strand; PAM type: YTN; PAM sequence: TTC
ttacactgctaataaagata

SEQ ID NO: 76090 - DNA, 20 bp, Artificial Sequence
  Description of Artificial Sequence: Synthetic oligonucleotide
  Target: ATXN2; (-) strand; PAM type: YTN; PAM sequence: TTA
gtccattcttacactgctaa

SEQ ID NO: 76091 - DNA, 20 bp, Artificial Sequence
  Description of Artificial Sequence: Synthetic oligonucleotide
  Target: ATXN2; (-) strand; PAM type: YTN; PAM sequence: TTG
tattagtccattcttacact

SEQ ID NO: 76092 - DNA, 20 bp, Artificial Sequence
  Description of Artificial Sequence: Synthetic oligonucleotide
  Target: ATXN2; (-) strand; PAM type: YTN; PAM sequence: TTG
ttgtattagtccattcttac

SEQ ID NO: 76093 - DNA, 20 bp, Artificial Sequence
  Description of Artificial Sequence: Synthetic oligonucleotide
  Target: ATXN2; (-) strand; PAM type: YTN; PAM sequence: CTT
gttgtattagtccattctta

SEQ ID NO: 76094 - DNA, 20 bp, Artificial Sequence
  Description of Artificial Sequence: Synthetic oligonucleotide
  Target: ATXN2; (-) strand; PAM type: YTN; PAM sequence: TTA
cttgttgtattagtccattc

SEQ ID NO: 76095 - DNA, 20 bp, Artificial Sequence
  Description of Artificial Sequence: Synthetic oligonucleotide
  Target: ATXN2; (-) strand; PAM type: YTN; PAM sequence: CTG
tataaaatgtacaattactt

SEQ ID NO: 76096 - DNA, 20 bp, Artificial Sequence
  Description of Artificial Sequence: Synthetic oligonucleotide
  Target: ATXN2; (-) strand; PAM type: YTN; PAM sequence: CTC
tgtataaaatgtacaattac

SEQ ID NO: 76097 - DNA, 20 bp, Artificial Sequence
  Description of Artificial Sequence: Synthetic oligonucleotide
  Target: ATXN2; (-) strand; PAM type: YTN; PAM sequence: TTA
atgactctgtataaaatgta

SEQ ID NO: 76098 - DNA, 20 bp, Artificial Sequence
  Description of Artificial Sequence: Synthetic oligonucleotide
  Target: ATXN2; (-) strand; PAM type: YTN; PAM sequence: TTT
aatgactctgtataaaatgt

SEQ ID NO: 76099 - DNA, 20 bp, Artificial Sequence
  Description of Artificial Sequence: Synthetic oligonucleotide
  Target: ATXN2; (-) strand; PAM type: YTN; PAM sequence: TTT
taatgactctgtataaaatg

SEQ ID NO: 76100 - DNA, 20 bp, Artificial Sequence
  Description of Artificial Sequence: Synthetic oligonucleotide
  Target: ATXN2; (-) strand; PAM type: YTN; PAM sequence: TTT
ttaatgactctgtataaaat

SEQ ID NO: 76101 - DNA, 20 bp, Artificial Sequence
  Description of Artificial Sequence: Synthetic oligonucleotide
  Target: ATXN2; (-) strand; PAM type: YTN; PAM sequence: TTT
tttaatgactctgtataaaa

SEQ ID NO: 76102 - DNA, 20 bp, Artificial Sequence
  Description of Artificial Sequence: Synthetic oligonucleotide
  Target: ATXN2; (-) strand; PAM type: YTN; PAM sequence: TTT
ttttaatgactctgtataaa

SEQ ID NO: 76103 - DNA, 20 bp, Artificial Sequence
  Description of Artificial Sequence: Synthetic oligonucleotide
  Target: ATXN2; (-) strand; PAM type: YTN; PAM sequence: CTA
tatgtgtttttttaatgact

SEQ ID NO: 76104 - DNA, 20 bp, Artificial Sequence
  Description of Artificial Sequence: Synthetic oligonucleotide
  Target: ATXN2; (-) strand; PAM type: YTN; PAM sequence: TTA
gcctatatgtgtttttttaa

SEQ ID NO: 76105 - DNA, 20 bp, Artificial Sequence
  Description of Artificial Sequence: Synthetic oligonucleotide
  Target: ATXN2; (-) strand; PAM type: YTN; PAM sequence: TTA
ttagcctatatgtgtttttt

SEQ ID NO: 76106 - DNA, 20 bp, Artificial Sequence
  Description of Artificial Sequence: Synthetic oligonucleotide
  Target: ATXN2; (-) strand; PAM type: YTN; PAM sequence: TTA
agtatgttattagcctatat

SEQ ID NO: 76107 - DNA, 20 bp, Artificial Sequence
  Description of Artificial Sequence: Synthetic oligonucleotide
  Target: ATXN2; (-) strand; PAM type: YTN; PAM sequence: TTT
aagtatgttattagcctata

SEQ ID NO: 76108 - DNA, 20 bp, Artificial Sequence
  Description of Artificial Sequence: Synthetic oligonucleotide
  Target: ATXN2; (-) strand; PAM type: YTN; PAM sequence: CTG
tttaagtatgttattagcct

SEQ ID NO: 76109 - DNA, 20 bp, Artificial Sequence
  Description of Artificial Sequence: Synthetic oligonucleotide
  Target: ATXN2; (-) strand; PAM type: YTN; PAM sequence: TTG
actgtttaagtatgttatta

SEQ ID NO: 76110 - DNA, 20 bp, Artificial Sequence
  Description of Artificial Sequence: Synthetic oligonucleotide
  Target: ATXN2; (-) strand; PAM type: YTN; PAM sequence: CTT
gactgtttaagtatgttatt

SEQ ID NO: 76111 - DNA, 20 bp, Artificial Sequence
  Description of Artificial Sequence: Synthetic oligonucleotide
  Target: ATXN2; (-) strand; PAM type: YTN; PAM sequence: TTG
tcatagataacttgactgtt

SEQ ID NO: 76112 - DNA, 20 bp, Artificial Sequence
  Description of Artificial Sequence: Synthetic oligonucleotide
  Target: ATXN2; (-) strand; PAM type: YTN; PAM sequence: TTT
gtcatagataacttgactgt

SEQ ID NO: 76113 - DNA, 20 bp, Artificial Sequence
  Description of Artificial Sequence: Synthetic oligonucleotide
  Target: ATXN2; (-) strand; PAM type: YTN; PAM sequence: TTT
tgtcatagataacttgactg

SEQ ID NO: 76114 - DNA, 20 bp, Artificial Sequence
  Description of Artificial Sequence: Synthetic oligonucleotide
  Target: ATXN2; (-) strand; PAM type: YTN; PAM sequence: TTG
aattttgtcatagataactt

SEQ ID NO: 76115 - DNA, 20 bp, Artificial Sequence
  Description of Artificial Sequence: Synthetic oligonucleotide
  Target: ATXN2; (-) strand; PAM type: YTN; PAM sequence: TTT
gaattttgtcatagataact

SEQ ID NO: 76116 - DNA, 20 bp, Artificial Sequence
  Description of Artificial Sequence: Synthetic oligonucleotide
  Target: ATXN2; (-) strand; PAM type: YTN; PAM sequence: TTT
tgaattttgtcatagataac

SEQ ID NO: 76117 - DNA, 20 bp, Artificial Sequence
  Description of Artificial Sequence: Synthetic oligonucleotide
  Target: ATXN2; (-) strand; PAM type: YTN; PAM sequence: CTT
ttgaattttgtcatagataa

SEQ ID NO: 76118 - DNA, 20 bp, Artificial Sequence
  Description of Artificial Sequence: Synthetic oligonucleotide
  Target: ATXN2; (-) strand; PAM type: YTN; PAM sequence: TTC
ttttgaattttgtcatagat

SEQ ID NO: 76119 - DNA, 20 bp, Artificial Sequence
  Description of Artificial Sequence: Synthetic oligonucleotide
  Target: ATXN2; (-) strand; PAM type: YTN; PAM sequence: CTT
cttttgaattttgtcataga

SEQ ID NO: 76120 - DNA, 20 bp, Artificial Sequence
  Description of Artificial Sequence: Synthetic oligonucleotide
  Target: ATXN2; (-) strand; PAM type: YTN; PAM sequence: TTC
ccttcttttgaattttgtca

SEQ ID NO: 76121 - DNA, 20 bp, Artificial Sequence
  Description of Artificial Sequence: Synthetic oligonucleotide
  Target: ATXN2; (-) strand; PAM type: YTN; PAM sequence: CTA
accacagaccaaatgccaag

SEQ ID NO: 76122 - DNA, 20 bp, Artificial Sequence
  Description of Artificial Sequence: Synthetic oligonucleotide
  Target: ATXN2; (-) strand; PAM type: YTN; PAM sequence: CTC
taaccacagaccaaatgcca

SEQ ID NO: 76123 - DNA, 20 bp, Artificial Sequence
  Description of Artificial Sequence: Synthetic oligonucleotide
  Target: ATXN2; (-) strand; PAM type: YTN; PAM sequence: CTA
aaacatgatctctaaccaca

SEQ ID NO: 76124 - DNA, 20 bp, Artificial Sequence
  Description of Artificial Sequence: Synthetic oligonucleotide
  Target: ATXN2; (-) strand; PAM type: YTN; PAM sequence: TTA
gtagctaaaacatgatctct

SEQ ID NO: 76125 - DNA, 20 bp, Artificial Sequence
  Description of Artificial Sequence: Synthetic oligonucleotide
  Target: ATXN2; (-) strand; PAM type: YTN; PAM sequence: TTG
gggaaaattagtagctaaaa

SEQ ID NO: 76126 - DNA, 20 bp, Artificial Sequence
  Description of Artificial Sequence: Synthetic oligonucleotide
  Target: ATXN2; (-) strand; PAM type: YTN; PAM sequence: TTA
ttggggaaaattagtagcta

SEQ ID NO: 76127 - DNA, 20 bp, Artificial Sequence
  Description of Artificial Sequence: Synthetic oligonucleotide
  Target: ATXN2; (-) strand; PAM type: YTN; PAM sequence: CTT
attggggaaaattagtagct

SEQ ID NO: 76128 - DNA, 20 bp, Artificial Sequence
  Description of Artificial Sequence: Synthetic oligonucleotide
  Target: ATXN2; (-) strand; PAM type: YTN; PAM sequence: TTA
cttattggggaaaattagta

SEQ ID NO: 76129 - DNA, 20 bp, Artificial Sequence
  Description of Artificial Sequence: Synthetic oligonucleotide
  Target: ATXN2; (-) strand; PAM type: YTN; PAM sequence: TTA
atgttacttattggggaaaa

SEQ ID NO: 76130 - DNA, 20 bp, Artificial Sequence
  Description of Artificial Sequence: Synthetic oligonucleotide
  Target: ATXN2; (-) strand; PAM type: YTN; PAM sequence: TTT
aatgttacttattggggaaa

SEQ ID NO: 76131 - DNA, 20 bp, Artificial Sequence
  Description of Artificial Sequence: Synthetic oligonucleotide
  Target: ATXN2; (-) strand; PAM type: YTN; PAM sequence: CTT
taatgttacttattggggaa

SEQ ID NO: 76132 - DNA, 20 bp, Artificial Sequence
  Description of Artificial Sequence: Synthetic oligonucleotide
  Target: ATXN2; (-) strand; PAM type: YTN; PAM sequence: CTA
cggtgagtaactttaatgtt

SEQ ID NO: 76133 - DNA, 20 bp, Artificial Sequence
  Description of Artificial Sequence: Synthetic oligonucleotide
  Target: ATXN2; (-) strand; PAM type: YTN; PAM sequence: CTC
agtctacggtgagtaacttt

SEQ ID NO: 76134 - DNA, 20 bp, Artificial Sequence
  Description of Artificial Sequence: Synthetic oligonucleotide
  Target: ATXN2; (-) strand; PAM type: YTN; PAM sequence: CTG
cctcagtctacggtgagtaa

SEQ ID NO: 76135 - DNA, 20 bp, Artificial Sequence
  Description of Artificial Sequence: Synthetic oligonucleotide
  Target: ATXN2; (-) strand; PAM type: YTN; PAM sequence: TTC
agaggtcgaaacagtaacaa

SEQ ID NO: 76136 - DNA, 20 bp, Artificial Sequence
  Description of Artificial Sequence: Synthetic oligonucleotide
  Target: ATXN2; (-) strand; PAM type: YTN; PAM sequence: TTT
cagaggtcgaaacagtaaca

SEQ ID NO: 76137 - DNA, 20 bp, Artificial Sequence
  Description of Artificial Sequence: Synthetic oligonucleotide
  Target: ATXN2; (-) strand; PAM type: YTN; PAM sequence: TTT
tcagaggtcgaaacagtaac

SEQ ID NO: 76138 - DNA, 20 bp, Artificial Sequence
  Description of Artificial Sequence: Synthetic oligonucleotide
  Target: ATXN2; (-) strand; PAM type: YTN; PAM sequence: CTT
ttcagaggtcgaaacagtaa

SEQ ID NO: 76139 - DNA, 20 bp, Artificial Sequence
  Description of Artificial Sequence: Synthetic oligonucleotide
  Target: ATXN2; (-) strand; PAM type: YTN; PAM sequence: TTA
atcttttcagaggtcgaaac

SEQ ID NO: 76140 - DNA, 20 bp, Artificial Sequence
  Description of Artificial Sequence: Synthetic oligonucleotide
  Target: ATXN2; (-) strand; PAM type: YTN; PAM sequence: TTT
aatcttttcagaggtcgaaa

SEQ ID NO: 76141 - DNA, 20 bp, Artificial Sequence
  Description of Artificial Sequence: Synthetic oligonucleotide
  Target: ATXN2; (-) strand; PAM type: YTN; PAM sequence: TTA
ataaaaataatatttaatct

SEQ ID NO: 76142 - DNA, 20 bp, Artificial Sequence
  Description of Artificial Sequence: Synthetic oligonucleotide
  Target: ATXN2; (-) strand; PAM type: YTN; PAM sequence: TTT
aataaaaataatatttaatc

SEQ ID NO: 76143 - DNA, 20 bp, Artificial Sequence
  Description of Artificial Sequence: Synthetic oligonucleotide
  Target: ATXN2; (-) strand; PAM type: YTN; PAM sequence: TTG
aatttaataaaaataatatt

SEQ ID NO: 76144 - DNA, 20 bp, Artificial Sequence
  Description of Artificial Sequence: Synthetic oligonucleotide
  Target: ATXN2; (-) strand; PAM type: YTN; PAM sequence: CTG
ttgaatttaataaaaataat

SEQ ID NO: 76145 - DNA, 20 bp, Artificial Sequence
  Description of Artificial Sequence: Synthetic oligonucleotide
  Target: ATXN2; (-) strand; PAM type: YTN; PAM sequence: TTA
gcctgttgaatttaataaaa

SEQ ID NO: 76146 - DNA, 20 bp, Artificial Sequence
  Description of Artificial Sequence: Synthetic oligonucleotide
  Target: ATXN2; (-) strand; PAM type: YTN; PAM sequence: TTT
agcctgttgaatttaataaa

SEQ ID NO: 76147 - DNA, 20 bp, Artificial Sequence
  Description of Artificial Sequence: Synthetic oligonucleotide
  Target: ATXN2; (-) strand; PAM type: YTN; PAM sequence: TTA
tttagcctgttgaatttaat

SEQ ID NO: 76148 - DNA, 20 bp, Artificial Sequence
  Description of Artificial Sequence: Synthetic oligonucleotide
  Target: ATXN2; (-) strand; PAM type: YTN; PAM sequence: CTT
atttagcctgttgaatttaa

SEQ ID NO: 76149 - DNA, 20 bp, Artificial Sequence
  Description of Artificial Sequence: Synthetic oligonucleotide
  Target: ATXN2; (-) strand; PAM type: YTN; PAM sequence: TTC
agcttatttagcctgttgaa

SEQ ID NO: 76150 - DNA, 20 bp, Artificial Sequence
  Description of Artificial Sequence: Synthetic oligonucleotide
  Target: ATXN2; (-) strand; PAM type: YTN; PAM sequence: TTT
cagcttatttagcctgttga

SEQ ID NO: 76151 - DNA, 20 bp, Artificial Sequence
  Description of Artificial Sequence: Synthetic oligonucleotide
  Target: ATXN2; (-) strand; PAM type: YTN; PAM sequence: TTT
tcagcttatttagcctgttg

SEQ ID NO: 76152 - DNA, 20 bp, Artificial Sequence
  Description of Artificial Sequence: Synthetic oligonucleotide
  Target: ATXN2; (-) strand; PAM type: YTN; PAM sequence: TTT
ttcagcttatttagcctgtt

SEQ ID NO: 76153 - DNA, 20 bp, Artificial Sequence
  Description of Artificial Sequence: Synthetic oligonucleotide
  Target: ATXN2; (-) strand; PAM type: YTN; PAM sequence: TTG
gaaatatttttcagcttatt

SEQ ID NO: 76154 - DNA, 20 bp, Artificial Sequence
  Description of Artificial Sequence: Synthetic oligonucleotide
  Target: ATXN2; (-) strand; PAM type: YTN; PAM sequence: TTT
ggaaatatttttcagcttat

SEQ ID NO: 76155 - DNA, 20 bp, Artificial Sequence
  Description of Artificial Sequence: Synthetic oligonucleotide
  Target: ATXN2; (-) strand; PAM type: YTN; PAM sequence: TTA
agtttggaaatatttttcag

SEQ ID NO: 76156 - DNA, 20 bp, Artificial Sequence
  Description of Artificial Sequence: Synthetic oligonucleotide
  Target: ATXN2; (-) strand; PAM type: YTN; PAM sequence: TTT
aagtttggaaatatttttca

SEQ ID NO: 76157 - DNA, 20 bp, Artificial Sequence
  Description of Artificial Sequence: Synthetic oligonucleotide
  Target: ATXN2; (-) strand; PAM type: YTN; PAM sequence: TTT
taagtttggaaatatttttc

SEQ ID NO: 76158 - DNA, 20 bp, Artificial Sequence
  Description of Artificial Sequence: Synthetic oligonucleotide
  Target: ATXN2; (-) strand; PAM type: YTN; PAM sequence: TTA
tattttaagtttggaaatat

SEQ ID NO: 76159 - DNA, 20 bp, Artificial Sequence
  Description of Artificial Sequence: Synthetic oligonucleotide
  Target: ATXN2; (-) strand; PAM type: YTN; PAM sequence: TTG
aatggaattatattttaagt

SEQ ID NO: 76160 - DNA, 20 bp, Artificial Sequence
  Description of Artificial Sequence: Synthetic oligonucleotide
  Target: ATXN2; (-) strand; PAM type: YTN; PAM sequence: TTT
gaatggaattatattttaag

SEQ ID NO: 76161 - DNA, 20 bp, Artificial Sequence
  Description of Artificial Sequence: Synthetic oligonucleotide
  Target: ATXN2; (-) strand; PAM type: YTN; PAM sequence: TTA
tttgaatggaattatatttt

SEQ ID NO: 76162 - DNA, 20 bp, Artificial Sequence
  Description of Artificial Sequence: Synthetic oligonucleotide
  Target: ATXN2; (-) strand; PAM type: YTN; PAM sequence: TTT
atttgaatggaattatattt

SEQ ID NO: 76163 - DNA, 20 bp, Artificial Sequence
  Description of Artificial Sequence: Synthetic oligonucleotide
  Target: ATXN2; (-) strand; PAM type: YTN; PAM sequence: CTT
tatttgaatggaattatatt

SEQ ID NO: 76164 - DNA, 20 bp, Artificial Sequence
  Description of Artificial Sequence: Synthetic oligonucleotide
  Target: ATXN2; (-) strand; PAM type: YTN; PAM sequence: CTC
ctttatttgaatggaattat

SEQ ID NO: 76165 - DNA, 20 bp, Artificial Sequence
  Description of Artificial Sequence: Synthetic oligonucleotide
  Target: ATXN2; (-) strand; PAM type: YTN; PAM sequence: CTC
tcctttatttgaatggaatt

SEQ ID NO: 76166 - DNA, 20 bp, Artificial Sequence
  Description of Artificial Sequence: Synthetic oligonucleotide
  Target: ATXN2; (-) strand; PAM type: YTN; PAM sequence: CTC
cccacagatagcctctcctt

SEQ ID NO: 76167 - DNA, 20 bp, Artificial Sequence
  Description of Artificial Sequence: Synthetic oligonucleotide
  Target: ATXN2; (-) strand; PAM type: YTN; PAM sequence: CTC
tccccacagatagcctctcc

SEQ ID NO: 76168 - DNA, 20 bp, Artificial Sequence
  Description of Artificial Sequence: Synthetic oligonucleotide
  Target: ATXN2; (-) strand; PAM type: YTN; PAM sequence: TTA
ggtgagctctccccacagat

SEQ ID NO: 76169 - DNA, 20 bp, Artificial Sequence
  Description of Artificial Sequence: Synthetic oligonucleotide
  Target: ATXN2; (-) strand; PAM type: YTN; PAM sequence: TTA
atattaggtgagctctcccc

SEQ ID NO: 76170 - DNA, 20 bp, Artificial Sequence
  Description of Artificial Sequence: Synthetic oligonucleotide
  Target: ATXN2; (-) strand; PAM type: YTN; PAM sequence: CTT
aatattaggtgagctctccc

SEQ ID NO: 76171 - DNA, 20 bp, Artificial Sequence
  Description of Artificial Sequence: Synthetic oligonucleotide
  Target: ATXN2; (-) strand; PAM type: YTN; PAM sequence: TTA
gacttaatattaggtgagct

SEQ ID NO: 76172 - DNA, 20 bp, Artificial Sequence
  Description of Artificial Sequence: Synthetic oligonucleotide
  Target: ATXN2; (-) strand; PAM type: YTN; PAM sequence: TTT
agacttaatattaggtgagc

SEQ ID NO: 76173 - DNA, 20 bp, Artificial Sequence
  Description of Artificial Sequence: Synthetic oligonucleotide
  Target: ATXN2; (-) strand; PAM type: YTN; PAM sequence: CTT
tagacttaatattaggtgag

SEQ ID NO: 76174 - DNA, 20 bp, Artificial Sequence
  Description of Artificial Sequence: Synthetic oligonucleotide
  Target: ATXN2; (-) strand; PAM type: YTN; PAM sequence: TTA
ggtagcctttagacttaata

SEQ ID NO: 76175 - DNA, 20 bp, Artificial Sequence
  Description of Artificial Sequence: Synthetic oligonucleotide
  Target: ATXN2; (-) strand; PAM type: YTN; PAM sequence: CTT
aggtagcctttagacttaat

SEQ ID NO: 76176 - DNA, 20 bp, Artificial Sequence
  Description of Artificial Sequence: Synthetic oligonucleotide
  Target: ATXN2; (-) strand; PAM type: YTN; PAM sequence: CTC
caggcaagcagtgcataggt

SEQ ID NO: 76177 - DNA, 20 bp, Artificial Sequence
  Description of Artificial Sequence: Synthetic oligonucleotide
  Target: ATXN2; (-) strand; PAM type: YTN; PAM sequence: TTG
tgggtctccaggcaagcagt

SEQ ID NO: 76178 - DNA, 20 bp, Artificial Sequence
  Description of Artificial Sequence: Synthetic oligonucleotide
  Target: ATXN2; (-) strand; PAM type: YTN; PAM sequence: CTG
ttgtgggtctccaggcaagc

SEQ ID NO: 76179 - DNA, 20 bp, Artificial Sequence
  Description of Artificial Sequence: Synthetic oligonucleotide
  Target: ATXN2; (-) strand; PAM type: YTN; PAM sequence: CTA
cctgttgtgggtctccaggc

SEQ ID NO: 76180 - DNA, 20 bp, Artificial Sequence
  Description of Artificial Sequence: Synthetic oligonucleotide
  Target: ATXN2; (-) strand; PAM type: YTN; PAM sequence: CTA
tgacccctacctgttgtggg

SEQ ID NO: 76181 - DNA, 20 bp, Artificial Sequence
  Description of Artificial Sequence: Synthetic oligonucleotide
  Target: ATXN2; (-) strand; PAM type: YTN; PAM sequence: TTC
tatgacccctacctgttgtg

SEQ ID NO: 76182 - DNA, 20 bp, Artificial Sequence
  Description of Artificial Sequence: Synthetic oligonucleotide
  Target: ATXN2; (-) strand; PAM type: YTN; PAM sequence: CTT
ctatgacccctacctgttgt

SEQ ID NO: 76183 - DNA, 20 bp, Artificial Sequence
  Description of Artificial Sequence: Synthetic oligonucleotide
  Target: ATXN2; (-) strand; PAM type: YTN; PAM sequence: TTC
cttctatgacccctacctgt

SEQ ID NO: 76184 - DNA, 20 bp, Artificial Sequence
  Description of Artificial Sequence: Synthetic oligonucleotide
  Target: ATXN2; (-) strand; PAM type: YTN; PAM sequence: CTT
ccttctatgacccctacctg

SEQ ID NO: 76185 - DNA, 20 bp, Artificial Sequence
  Description of Artificial Sequence: Synthetic oligonucleotide
  Target: ATXN2; (-) strand; PAM type: YTN; PAM sequence: TTG
cttccttctatgacccctac

SEQ ID NO: 76186 - DNA, 20 bp, Artificial Sequence
  Description of Artificial Sequence: Synthetic oligonucleotide
  Target: ATXN2; (-) strand; PAM type: YTN; PAM sequence: TTT
gcttccttctatgaccccta

SEQ ID NO: 76187 - DNA, 20 bp, Artificial Sequence
  Description of Artificial Sequence: Synthetic oligonucleotide
  Target: ATXN2; (-) strand; PAM type: YTN; PAM sequence: CTA
gtttgcttccttctatgacc

SEQ ID NO: 76188 - DNA, 20 bp, Artificial Sequence
  Description of Artificial Sequence: Synthetic oligonucleotide
  Target: ATXN2; (-) strand; PAM type: YTN; PAM sequence: TTC
tagtttgcttccttctatga

SEQ ID NO: 76189 - DNA, 20 bp, Artificial Sequence
  Description of Artificial Sequence: Synthetic oligonucleotide
  Target: ATXN2; (-) strand; PAM type: YTN; PAM sequence: TTT
ctagtttgcttccttctatg

SEQ ID NO: 76190 - DNA, 20 bp, Artificial Sequence
  Description of Artificial Sequence: Synthetic oligonucleotide
  Target: ATXN2; (-) strand; PAM type: YTN; PAM sequence: TTA
tttctagtttgcttccttct

SEQ ID NO: 76191 - DNA, 20 bp, Artificial Sequence
  Description of Artificial Sequence: Synthetic oligonucleotide
  Target: ATXN2; (-) strand; PAM type: YTN; PAM sequence: TTG
attatttctagtttgcttcc

SEQ ID NO: 76192 - DNA, 20 bp, Artificial Sequence
  Description of Artificial Sequence: Synthetic oligonucleotide
  Target: ATXN2; (-) strand; PAM type: YTN; PAM sequence: TTT
gattatttctagtttgcttc

SEQ ID NO: 76193 - DNA, 20 bp, Artificial Sequence
  Description of Artificial Sequence: Synthetic oligonucleotide
  Target: ATXN2; (-) strand; PAM type: YTN; PAM sequence: TTG
atgaagtttgattatttcta

SEQ ID NO: 76194 - DNA, 20 bp, Artificial Sequence
  Description of Artificial Sequence: Synthetic oligonucleotide
  Target: ATXN2; (-) strand; PAM type: YTN; PAM sequence: TTT
gatgaagtttgattatttct

SEQ ID NO: 76195 - DNA, 20 bp, Artificial Sequence
  Description of Artificial Sequence: Synthetic oligonucleotide
  Target: ATXN2; (-) strand; PAM type: YTN; PAM sequence: TTT
tgatgaagtttgattatttc

SEQ ID NO: 76196 - DNA, 20 bp, Artificial Sequence
  Description of Artificial Sequence: Synthetic oligonucleotide
  Target: ATXN2; (-) strand; PAM type: YTN; PAM sequence: TTG
attttgatgaagtttgatta

SEQ ID NO: 76197 - DNA, 20 bp, Artificial Sequence
  Description of Artificial Sequence: Synthetic oligonucleotide
  Target: ATXN2; (-) strand; PAM type: YTN; PAM sequence: TTT
gattttgatgaagtttgatt

SEQ ID NO: 76198 - DNA, 20 bp, Artificial Sequence
  Description of Artificial Sequence: Synthetic oligonucleotide
  Target: ATXN2; (-) strand; PAM type: YTN; PAM sequence: TTA
tttgattttgatgaagtttg

SEQ ID NO: 76199 - DNA, 20 bp, Artificial Sequence
  Description of Artificial Sequence: Synthetic oligonucleotide
  Target: ATXN2; (-) strand; PAM type: YTN; PAM sequence: TTT
atttgattttgatgaagttt

SEQ ID NO: 76200 - DNA, 20 bp, Artificial Sequence
  Description of Artificial Sequence: Synthetic oligonucleotide
  Target: ATXN2; (-) strand; PAM type: YTN; PAM sequence: TTA
tttatttgattttgatgaag

SEQ ID NO: 76201 - DNA, 20 bp, Artificial Sequence
  Description of Artificial Sequence: Synthetic oligonucleotide
  Target: ATXN2; (-) strand; PAM type: YTN; PAM sequence: TTT
atttatttgattttgatgaa

SEQ ID NO: 76202 - DNA, 20 bp, Artificial Sequence
  Description of Artificial Sequence: Synthetic oligonucleotide
  Target: ATXN2; (-) strand; PAM type: YTN; PAM sequence: CTT
tatttatttgattttgatga

SEQ ID NO: 76203 - DNA, 20 bp, Artificial Sequence
  Description of Artificial Sequence: Synthetic oligonucleotide
  Target: ATXN2; (-) strand; PAM type: YTN; PAM sequence: TTA
ctttatttatttgattttga

SEQ ID NO: 76204 - DNA, 20 bp, Artificial Sequence
  Description of Artificial Sequence: Synthetic oligonucleotide
  Target: ATXN2; (-) strand; PAM type: YTN; PAM sequence: TTT
actttatttatttgattttg

SEQ ID NO: 76205 - DNA, 20 bp, Artificial Sequence
  Description of Artificial Sequence: Synthetic oligonucleotide
  Target: ATXN2; (-) strand; PAM type: YTN; PAM sequence: TTT
tactttatttatttgatttt

SEQ ID NO: 76206 - DNA, 20 bp, Artificial Sequence
  Description of Artificial Sequence: Synthetic oligonucleotide
  Target: ATXN2; (-) strand; PAM type: YTN; PAM sequence: CTA
ttttactttatttatttgat

SEQ ID NO: 76207 - DNA, 20 bp, Artificial Sequence
  Description of Artificial Sequence: Synthetic oligonucleotide
  Target: ATXN2; (-) strand; PAM type: YTN; PAM sequence: TTC
cagtaggctattttacttta

SEQ ID NO: 76208 - DNA, 20 bp, Artificial Sequence
  Description of Artificial Sequence: Synthetic oligonucleotide
  Target: ATXN2; (-) strand; PAM type: YTN; PAM sequence: CTT
ccagtaggctattttacttt

SEQ ID NO: 76209 - DNA, 20 bp, Artificial Sequence
  Description of Artificial Sequence: Synthetic oligonucleotide
  Target: ATXN2; (-) strand; PAM type: YTN; PAM sequence: TTC
ttccagtaggctattttact

SEQ ID NO: 76210 - DNA, 20 bp, Artificial Sequence
  Description of Artificial Sequence: Synthetic oligonucleotide
  Target: ATXN2; (-) strand; PAM type: YTN; PAM sequence: TTT
cttccagtaggctattttac

SEQ ID NO: 76211 - DNA, 20 bp, Artificial Sequence
  Description of Artificial Sequence: Synthetic oligonucleotide
  Target: ATXN2; (-) strand; PAM type: YTN; PAM sequence: TTT
tcttccagtaggctatttta

SEQ ID NO: 76212 - DNA, 20 bp, Artificial Sequence
  Description of Artificial Sequence: Synthetic oligonucleotide
  Target: ATXN2; (-) strand; PAM type: YTN; PAM sequence: TTT
ttcttccagtaggctatttt

SEQ ID NO: 76213 - DNA, 20 bp, Artificial Sequence
  Description of Artificial Sequence: Synthetic oligonucleotide
  Target: ATXN2; (-) strand; PAM type: YTN; PAM sequence: TTT
tttcttccagtaggctattt

SEQ ID NO: 76214 - DNA, 20 bp, Artificial Sequence
  Description of Artificial Sequence: Synthetic oligonucleotide
  Target: ATXN2; (-) strand; PAM type: YTN; PAM sequence: TTT
ttttcttccagtaggctatt

SEQ ID NO: 76215 - DNA, 20 bp, Artificial Sequence
  Description of Artificial Sequence: Synthetic oligonucleotide
  Target: ATXN2; (-) strand; PAM type: YTN; PAM sequence: TTA
gtttttttcttccagtaggc

SEQ ID NO: 76216 - DNA, 20 bp, Artificial Sequence
  Description of Artificial Sequence: Synthetic oligonucleotide
  Target: ATXN2; (-) strand; PAM type: YTN; PAM sequence: TTA
gcattagtttttttcttcca

SEQ ID NO: 76217 - DNA, 20 bp, Artificial Sequence
  Description of Artificial Sequence: Synthetic oligonucleotide
  Target: ATXN2; (-) strand; PAM type: YTN; PAM sequence: TTT
agcattagtttttttcttcc

SEQ ID NO: 76218 - DNA, 20 bp, Artificial Sequence
  Description of Artificial Sequence: Synthetic oligonucleotide
  Target: ATXN2; (-) strand; PAM type: YTN; PAM sequence: TTA
cgtttagcattagttttttt

SEQ ID NO: 76219 - DNA, 20 bp, Artificial Sequence
  Description of Artificial Sequence: Synthetic oligonucleotide
  Target: ATXN2; (-) strand; PAM type: YTN; PAM sequence: TTT
acgtttagcattagtttttt

SEQ ID NO: 76220 - DNA, 20 bp, Artificial Sequence
  Description of Artificial Sequence: Synthetic oligonucleotide
  Target: ATXN2; (-) strand; PAM type: YTN; PAM sequence: TTA
atttacgtttagcattagtt

SEQ ID NO: 76221 - DNA, 20 bp, Artificial Sequence
  Description of Artificial Sequence: Synthetic oligonucleotide
  Target: ATXN2; (-) strand; PAM type: YTN; PAM sequence: TTA
ttaatttacgtttagcatta

SEQ ID NO: 76222 - DNA, 20 bp, Artificial Sequence
  Description of Artificial Sequence: Synthetic oligonucleotide
  Target: ATXN2; (-) strand; PAM type: YTN; PAM sequence: TTA
ttattaatttacgtttagca

SEQ ID NO: 76223 - DNA, 20 bp, Artificial Sequence
  Description of Artificial Sequence: Synthetic oligonucleotide
  Target: ATXN2; (-) strand; PAM type: YTN; PAM sequence: CTA
taattattattaatttacgt

SEQ ID NO: 76224 - DNA, 20 bp, Artificial Sequence
  Description of Artificial Sequence: Synthetic oligonucleotide
  Target: ATXN2; (-) strand; PAM type: YTN; PAM sequence: CTG
gctataattattattaattt

SEQ ID NO: 76225 - DNA, 20 bp, Artificial Sequence
  Description of Artificial Sequence: Synthetic oligonucleotide
  Target: ATXN2; (-) strand; PAM type: YTN; PAM sequence: CTA
gaggtgcatgccacatgcct

SEQ ID NO: 76226 - DNA, 20 bp, Artificial Sequence
  Description of Artificial Sequence: Synthetic oligonucleotide
  Target: ATXN2; (-) strand; PAM type: YTN; PAM sequence: CTA
ggactagaggtgcatgccac

SEQ ID NO: 76227 - DNA, 20 bp, Artificial Sequence
  Description of Artificial Sequence: Synthetic oligonucleotide
  Target: ATXN2; (-) strand; PAM type: YTN; PAM sequence: CTG
agtagctaggactagaggtg

SEQ ID NO: 76228 - DNA, 20 bp, Artificial Sequence
  Description of Artificial Sequence: Synthetic oligonucleotide
  Target: ATXN2; (-) strand; PAM type: YTN; PAM sequence: CTC
ctgagtagctaggactagag

SEQ ID NO: 76229 - DNA, 20 bp, Artificial Sequence
  Description of Artificial Sequence: Synthetic oligonucleotide
  Target: ATXN2; (-) strand; PAM type: YTN; PAM sequence: CTC
agcctcctgagtagctagga

SEQ ID NO: 76230 - DNA, 20 bp, Artificial Sequence
  Description of Artificial Sequence: Synthetic oligonucleotide
  Target: ATXN2; (-) strand; PAM type: YTN; PAM sequence: CTG
cctcagcctcctgagtagct

SEQ ID NO: 76231 - DNA, 20 bp, Artificial Sequence
  Description of Artificial Sequence: Synthetic oligonucleotide
  Target: ATXN2; (-) strand; PAM type: YTN; PAM sequence: CTG
gtgatcctgcctcagcctcc

SEQ ID NO: 76232 - DNA, 20 bp, Artificial Sequence
  Description of Artificial Sequence: Synthetic oligonucleotide
  Target: ATXN2; (-) strand; PAM type: YTN; PAM sequence: CTC
tggtgatcctgcctcagcct

SEQ ID NO: 76233 - DNA, 20 bp, Artificial Sequence
  Description of Artificial Sequence: Synthetic oligonucleotide
  Target: ATXN2; (-) strand; PAM type: YTN; PAM sequence: CTG
gactctggtgatcctgcctc

SEQ ID NO: 76234 - DNA, 20 bp, Artificial Sequence
  Description of Artificial Sequence: Synthetic oligonucleotide
  Target: ATXN2; (-) strand; PAM type: YTN; PAM sequence: CTC
ctggactctggtgatcctgc

SEQ ID NO: 76235 - DNA, 20 bp, Artificial Sequence
  Description of Artificial Sequence: Synthetic oligonucleotide
  Target: ATXN2; (-) strand; PAM type: YTN; PAM sequence: CTC
agactcctggactctggtga

SEQ ID NO: 76236 - DNA, 20 bp, Artificial Sequence
  Description of Artificial Sequence: Synthetic oligonucleotide
  Target: ATXN2; (-) strand; PAM type: YTN; PAM sequence: CTG
cagcctcagactcctggact

SEQ ID NO: 76237 - DNA, 20 bp, Artificial Sequence
  Description of Artificial Sequence: Synthetic oligonucleotide
  Target: ATXN2; (-) strand; PAM type: YTN; PAM sequence: CTA
ctgcagcctcagactcctgg

SEQ ID NO: 76238 - DNA, 20 bp, Artificial Sequence
  Description of Artificial Sequence: Synthetic oligonucleotide
  Target: ATXN2; (-) strand; PAM type: YTN; PAM sequence: CTG
cagtggaatgatcgtagcct

SEQ ID NO: 76239 - DNA, 20 bp, Artificial Sequence
  Description of Artificial Sequence: Synthetic oligonucleotide
  Target: ATXN2; (-) strand; PAM type: YTN; PAM sequence: CTA
gactgcagtggaatgatcgt

SEQ ID NO: 76240 - DNA, 20 bp, Artificial Sequence
  Description of Artificial Sequence: Synthetic oligonucleotide
  Target: ATXN2; (-) strand; PAM type: YTN; PAM sequence: TTG
tcgcccaggctagactgcag

SEQ ID NO: 76241 - DNA, 20 bp, Artificial Sequence
  Description of Artificial Sequence: Synthetic oligonucleotide
  Target: ATXN2; (-) strand; PAM type: YTN; PAM sequence: TTT
gtcgcccaggctagactgca

SEQ ID NO: 76242 - DNA, 20 bp, Artificial Sequence
  Description of Artificial Sequence: Synthetic oligonucleotide
  Target: ATXN2; (-) strand; PAM type: YTN; PAM sequence: CTT
tgtcgcccaggctagactgc

SEQ ID NO: 76243 - DNA, 20 bp, Artificial Sequence
  Description of Artificial Sequence: Synthetic oligonucleotide
  Target: ATXN2; (-) strand; PAM type: YTN; PAM sequence: TTG
ctttgtcgcccaggctagac

SEQ ID NO: 76244 - DNA, 20 bp, Artificial Sequence
  Description of Artificial Sequence: Synthetic oligonucleotide
  Target: ATXN2; (-) strand; PAM type: YTN; PAM sequence: CTT
gctttgtcgcccaggctaga

SEQ ID NO: 76245 - DNA, 20 bp, Artificial Sequence
  Description of Artificial Sequence: Synthetic oligonucleotide
  Target: ATXN2; (-) strand; PAM type: YTN; PAM sequence: TTA
gagacagagtcttgctttgt

SEQ ID NO: 76246 - DNA, 20 bp, Artificial Sequence
  Description of Artificial Sequence: Synthetic oligonucleotide
  Target: ATXN2; (-) strand; PAM type: YTN; PAM sequence: TTT
agagacagagtcttgctttg

SEQ ID NO: 76247 - DNA, 20 bp, Artificial Sequence
  Description of Artificial Sequence: Synthetic oligonucleotide
  Target: ATXN2; (-) strand; PAM type: YTN; PAM sequence: TTA
tttagagacagagtcttgct

SEQ ID NO: 76248 - DNA, 20 bp, Artificial Sequence
  Description of Artificial Sequence: Synthetic oligonucleotide
  Target: ATXN2; (-) strand; PAM type: YTN; PAM sequence: TTA
ttatttagagacagagtctt

SEQ ID NO: 76249 - DNA, 20 bp, Artificial Sequence
  Description of Artificial Sequence: Synthetic oligonucleotide
  Target: ATXN2; (-) strand; PAM type: YTN; PAM sequence: TTG
ggagtaaagattattattta

SEQ ID NO: 76250 - DNA, 20 bp, Artificial Sequence
  Description of Artificial Sequence: Synthetic oligonucleotide
  Target: ATXN2; (-) strand; PAM type: YTN; PAM sequence: TTT
gggagtaaagattattattt

SEQ ID NO: 76251 - DNA, 20 bp, Artificial Sequence
  Description of Artificial Sequence: Synthetic oligonucleotide
  Target: ATXN2; (-) strand; PAM type: YTN; PAM sequence: CTT
tgggagtaaagattattatt

SEQ ID NO: 76252 - DNA, 20 bp, Artificial Sequence
  Description of Artificial Sequence: Synthetic oligonucleotide
  Target: ATXN2; (-) strand; PAM type: YTN; PAM sequence: TTA
ctttgggagtaaagattatt

SEQ ID NO: 76253 - DNA, 20 bp, Artificial Sequence
  Description of Artificial Sequence: Synthetic oligonucleotide
  Target: ATXN2; (-) strand; PAM type: YTN; PAM sequence: TTG
gttactttgggagtaaagat

SEQ ID NO: 76254 - DNA, 20 bp, Artificial Sequence
  Description of Artificial Sequence: Synthetic oligonucleotide
  Target: ATXN2; (-) strand; PAM type: YTN; PAM sequence: TTA
taacagtgattggttacttt

SEQ ID NO: 76255 - DNA, 20 bp, Artificial Sequence
  Description of Artificial Sequence: Synthetic oligonucleotide
  Target: ATXN2; (-) strand; PAM type: YTN; PAM sequence: TTT
ataacagtgattggttactt

SEQ ID NO: 76256 - DNA, 20 bp, Artificial Sequence
  Description of Artificial Sequence: Synthetic oligonucleotide
  Target: ATXN2; (-) strand; PAM type: YTN; PAM sequence: CTT
tataacagtgattggttact

SEQ ID NO: 76257 - DNA, 20 bp, Artificial Sequence
  Description of Artificial Sequence: Synthetic oligonucleotide
  Target: ATXN2; (-) strand; PAM type: YTN; PAM sequence: CTC
tttataacagtgattggtta

SEQ ID NO: 76258 - DNA, 20 bp, Artificial Sequence
  Description of Artificial Sequence: Synthetic oligonucleotide
  Target: ATXN2; (-) strand; PAM type: YTN; PAM sequence: CTG
aatagctctttataacagtg

SEQ ID NO: 76259 - DNA, 20 bp, Artificial Sequence
  Description of Artificial Sequence: Synthetic oligonucleotide
  Target: ATXN2; (-) strand; PAM type: YTN; PAM sequence: TTC
tgaatagctctttataacag

SEQ ID NO: 76260 - DNA, 20 bp, Artificial Sequence
  Description of Artificial Sequence: Synthetic oligonucleotide
  Target: ATXN2; (-) strand; PAM type: YTN; PAM sequence: CTT
ctgaatagctctttataaca

SEQ ID NO: 76261 - DNA, 20 bp, Artificial Sequence
  Description of Artificial Sequence: Synthetic oligonucleotide
  Target: ATXN2; (-) strand; PAM type: YTN; PAM sequence: TTG
cttctgaatagctctttata

SEQ ID NO: 76262 - DNA, 20 bp, Artificial Sequence
  Description of Artificial Sequence: Synthetic oligonucleotide
  Target: ATXN2; (-) strand; PAM type: YTN; PAM sequence: TTT
gcttctgaatagctctttat

SEQ ID NO: 76263 - DNA, 20 bp, Artificial Sequence
  Description of Artificial Sequence: Synthetic oligonucleotide
  Target: ATXN2; (-) strand; PAM type: YTN; PAM sequence: TTT
tgcttctgaatagctcttta

SEQ ID NO: 76264 - DNA, 20 bp, Artificial Sequence
  Description of Artificial Sequence: Synthetic oligonucleotide
  Target: ATXN2; (-) strand; PAM type: YTN; PAM sequence: TTA
aatcaagaatataatccgtg

SEQ ID NO: 76265 - DNA, 20 bp, Artificial Sequence
  Description of Artificial Sequence: Synthetic oligonucleotide
  Target: ATXN2; (-) strand; PAM type: YTN; PAM sequence: TTG
gttaaatcaagaatataatc

SEQ ID NO: 76266 - DNA, 20 bp, Artificial Sequence
  Description of Artificial Sequence: Synthetic oligonucleotide
  Target: ATXN2; (-) strand; PAM type: YTN; PAM sequence: CTG
tgttggttaaatcaagaata

SEQ ID NO: 76267 - DNA, 20 bp, Artificial Sequence
  Description of Artificial Sequence: Synthetic oligonucleotide
  Target: ATXN2; (-) strand; PAM type: YTN; PAM sequence: TTG
gtgtcagtcatctgtgttgg

SEQ ID NO: 76268 - DNA, 20 bp, Artificial Sequence
  Description of Artificial Sequence: Synthetic oligonucleotide
  Target: ATXN2; (-) strand; PAM type: YTN; PAM sequence: CTT
ggtgtcagtcatctgtgttg

SEQ ID NO: 76269 - DNA, 20 bp, Artificial Sequence
  Description of Artificial Sequence: Synthetic oligonucleotide
  Target: ATXN2; (-) strand; PAM type: YTN; PAM sequence: TTA
tagatgggggagaaatatgg

SEQ ID NO: 76270 - DNA, 20 bp, Artificial Sequence
  Description of Artificial Sequence: Synthetic oligonucleotide
  Target: ATXN2; (-) strand; PAM type: YTN; PAM sequence: TTT
atagatgggggagaaatatg

SEQ ID NO: 76271 - DNA, 20 bp, Artificial Sequence
  Description of Artificial Sequence: Synthetic oligonucleotide
  Target: ATXN2; (-) strand; PAM type: YTN; PAM sequence: TTT
tatagatgggggagaaatat

SEQ ID NO: 76272 - DNA, 20 bp, Artificial Sequence
  Description of Artificial Sequence: Synthetic oligonucleotide
  Target: ATXN2; (-) strand; PAM type: YTN; PAM sequence: CTT
ttatagatgggggagaaata

SEQ ID NO: 76273 - DNA, 20 bp, Artificial Sequence
  Description of Artificial Sequence: Synthetic oligonucleotide
  Target: ATXN2; (-) strand; PAM type: YTN; PAM sequence: TTC
ttttatagatgggggagaaa

SEQ ID NO: 76274 - DNA, 20 bp, Artificial Sequence
  Description of Artificial Sequence: Synthetic oligonucleotide
  Target: ATXN2; (-) strand; PAM type: YTN; PAM sequence: TTT
cttttatagatgggggagaa

SEQ ID NO: 76275 - DNA, 20 bp, Artificial Sequence
  Description of Artificial Sequence: Synthetic oligonucleotide
  Target: ATXN2; (-) strand; PAM type: YTN; PAM sequence: TTT
tcttttatagatgggggaga

SEQ ID NO: 76276 - DNA, 20 bp, Artificial Sequence
  Description of Artificial Sequence: Synthetic oligonucleotide
  Target: ATXN2; (-) strand; PAM type: YTN; PAM sequence: TTT
ttcttttatagatgggggag

SEQ ID NO: 76277 - DNA, 20 bp, Artificial Sequence
  Description of Artificial Sequence: Synthetic oligonucleotide
  Target: ATXN2; (-) strand; PAM type: YTN; PAM sequence: CTG
tttttcttttatagatgggg

SEQ ID NO: 76278 - DNA, 20 bp, Artificial Sequence
  Description of Artificial Sequence: Synthetic oligonucleotide
  Target: ATXN2; (-) strand; PAM type: YTN; PAM sequence: CTG
cgcccggcccatatgacctg

SEQ ID NO: 76279 - DNA, 20 bp, Artificial Sequence
  Description of Artificial Sequence: Synthetic oligonucleotide
  Target: ATXN2; (-) strand; PAM type: YTN; PAM sequence: TTA
caggcatgagccactgcgcc

SEQ ID NO: 76280 - DNA, 20 bp, Artificial Sequence
  Description of Artificial Sequence: Synthetic oligonucleotide
  Target: ATXN2; (-) strand; PAM type: YTN; PAM sequence: CTG
ggattacaggcatgagccac

SEQ ID NO: 76281 - DNA, 20 bp, Artificial Sequence
  Description of Artificial Sequence: Synthetic oligonucleotide
  Target: ATXN2; (-) strand; PAM type: YTN; PAM sequence: CTC
ccaaagtgctgggattacag

SEQ ID NO: 76282 - DNA, 20 bp, Artificial Sequence
  Description of Artificial Sequence: Synthetic oligonucleotide
  Target: ATXN2; (-) strand; PAM type: YTN; PAM sequence: CTG
cctcccaaagtgctgggatt

SEQ ID NO: 76283 - DNA, 20 bp, Artificial Sequence
  Description of Artificial Sequence: Synthetic oligonucleotide
  Target: ATXN2; (-) strand; PAM type: YTN; PAM sequence: CTC
tgcctcccaaagtgctggga

SEQ ID NO: 76284 - DNA, 20 bp, Artificial Sequence
  Description of Artificial Sequence: Synthetic oligonucleotide
  Target: ATXN2; (-) strand; PAM type: YTN; PAM sequence: CTG
cccacctctgcctcccaaag

SEQ ID NO: 76285 - DNA, 20 bp, Artificial Sequence
  Description of Artificial Sequence: Synthetic oligonucleotide
  Target: ATXN2; (-) strand; PAM type: YTN; PAM sequence: TTG
tgatctgcccacctctgcct

SEQ ID NO: 76286 - DNA, 20 bp, Artificial Sequence
  Description of Artificial Sequence: Synthetic oligonucleotide
  Target: ATXN2; (-) strand; PAM type: YTN; PAM sequence: CTT
gtgatctgcccacctctgcc

SEQ ID NO: 76287 - DNA, 20 bp, Artificial Sequence
  Description of Artificial Sequence: Synthetic oligonucleotide
  Target: ATXN2; (-) strand; PAM type: YTN; PAM sequence: CTG
accttgtgatctgcccacct

SEQ ID NO: 76288 - DNA, 20 bp, Artificial Sequence
  Description of Artificial Sequence: Synthetic oligonucleotide
  Target: ATXN2; (-) strand; PAM type: YTN; PAM sequence: CTC
ctgaccttgtgatctgccca

SEQ ID NO: 76289 - DNA, 20 bp, Artificial Sequence
  Description of Artificial Sequence: Synthetic oligonucleotide
  Target: ATXN2; (-) strand; PAM type: YTN; PAM sequence: CTC
gaactcctgaccttgtgatc

SEQ ID NO: 76290 - DNA, 20 bp, Artificial Sequence
  Description of Artificial Sequence: Synthetic oligonucleotide
  Target: ATXN2; (-) strand; PAM type: YTN; PAM sequence: TTA
gccaggatggtctcgaactc

SEQ ID NO: 76291 - DNA, 20 bp, Artificial Sequence
  Description of Artificial Sequence: Synthetic oligonucleotide
  Target: ATXN2; (-) strand; PAM type: YTN; PAM sequence: CTG
tgttagccaggatggtctcg

SEQ ID NO: 76292 - DNA, 20 bp, Artificial Sequence
  Description of Artificial Sequence: Synthetic oligonucleotide
  Target: ATXN2; (-) strand; PAM type: YTN; PAM sequence: TTC
actgtgttagccaggatggt

SEQ ID NO: 76293 - DNA, 20 bp, Artificial Sequence
  Description of Artificial Sequence: Synthetic oligonucleotide
  Target: ATXN2; (-) strand; PAM type: YTN; PAM sequence: TTT
cactgtgttagccaggatgg

SEQ ID NO: 76294 - DNA, 20 bp, Artificial Sequence
  Description of Artificial Sequence: Synthetic oligonucleotide
  Target: ATXN2; (-) strand; PAM type: YTN; PAM sequence: TTA
gtagagatggggtttcactg

SEQ ID NO: 76295 - DNA, 20 bp, Artificial Sequence
  Description of Artificial Sequence: Synthetic oligonucleotide
  Target: ATXN2; (-) strand; PAM type: YTN; PAM sequence: CTT
agtagagatggggtttcact

SEQ ID NO: 76296 - DNA, 20 bp, Artificial Sequence
  Description of Artificial Sequence: Synthetic oligonucleotide
  Target: ATXN2; (-) strand; PAM type: YTN; PAM sequence: TTC
ttagtagagatggggtttca

SEQ ID NO: 76297 - DNA, 20 bp, Artificial Sequence
  Description of Artificial Sequence: Synthetic oligonucleotide
  Target: ATXN2; (-) strand; PAM type: YTN; PAM sequence: TTA
ttcttagtagagatggggtt

SEQ ID NO: 76298 - DNA, 20 bp, Artificial Sequence
  Description of Artificial Sequence: Synthetic oligonucleotide
  Target: ATXN2; (-) strand; PAM type: YTN; PAM sequence: TTT
attcttagtagagatggggt

SEQ ID NO: 76299 - DNA, 20 bp, Artificial Sequence
  Description of Artificial Sequence: Synthetic oligonucleotide
  Target: ATXN2; (-) strand; PAM type: YTN; PAM sequence: TTT
tattcttagtagagatgggg

SEQ ID NO: 76300 - DNA, 20 bp, Artificial Sequence
  Description of Artificial Sequence: Synthetic oligonucleotide
  Target: ATXN2; (-) strand; PAM type: YTN; PAM sequence: TTT
ttattcttagtagagatggg

SEQ ID NO: 76301 - DNA, 20 bp, Artificial Sequence
  Description of Artificial Sequence: Synthetic oligonucleotide
  Target: ATXN2; (-) strand; PAM type: YTN; PAM sequence: TTT
tttattcttagtagagatgg

SEQ ID NO: 76302 - DNA, 20 bp, Artificial Sequence
  Description of Artificial Sequence: Synthetic oligonucleotide
  Target: ATXN2; (-) strand; PAM type: YTN; PAM sequence: TTT
ttttattcttagtagagatg

SEQ ID NO: 76303 - DNA, 20 bp, Artificial Sequence
  Description of Artificial Sequence: Synthetic oligonucleotide
  Target: ATXN2; (-) strand; PAM type: YTN; PAM sequence: CTA
atttttttattcttagtaga

SEQ ID NO: 76304 - DNA, 20 bp, Artificial Sequence
  Description of Artificial Sequence: Synthetic oligonucleotide
  Target: ATXN2; (-) strand; PAM type: YTN; PAM sequence: CTG
gctaatttttttattcttag

SEQ ID NO: 76305 - DNA, 20 bp, Artificial Sequence
  Description of Artificial Sequence: Synthetic oligonucleotide
  Target: ATXN2; (-) strand; PAM type: YTN; PAM sequence: CTA
caggcgcatgccaccacacc

SEQ ID NO: 76306 - DNA, 20 bp, Artificial Sequence
  Description of Artificial Sequence: Synthetic oligonucleotide
  Target: ATXN2; (-) strand; PAM type: YTN; PAM sequence: CTG
ggactacaggcgcatgccac

SEQ ID NO: 76307 - DNA, 20 bp, Artificial Sequence
  Description of Artificial Sequence: Synthetic oligonucleotide
  Target: ATXN2; (-) strand; PAM type: YTN; PAM sequence: CTA
gtagctgggactacaggcgc

SEQ ID NO: 76308 - DNA, 20 bp, Artificial Sequence
  Description of Artificial Sequence: Synthetic oligonucleotide
  Target: ATXN2; (-) strand; PAM type: YTN; PAM sequence: CTC
cctagtagctgggactacag

SEQ ID NO: 76309 - DNA, 20 bp, Artificial Sequence
  Description of Artificial Sequence: Synthetic oligonucleotide
  Target: ATXN2; (-) strand; PAM type: YTN; PAM sequence: CTC
agcctccctagtagctggga

SEQ ID NO: 76310 - DNA, 20 bp, Artificial Sequence
  Description of Artificial Sequence: Synthetic oligonucleotide
  Target: ATXN2; (-) strand; PAM type: YTN; PAM sequence: CTG
cctcagcctccctagtagct

SEQ ID NO: 76311 - DNA, 20 bp, Artificial Sequence
  Description of Artificial Sequence: Synthetic oligonucleotide
  Target: ATXN2; (-) strand; PAM type: YTN; PAM sequence: TTC
tgcctcagcctccctagtag

SEQ ID NO: 76312 - DNA, 20 bp, Artificial Sequence
  Description of Artificial Sequence: Synthetic oligonucleotide
  Target: ATXN2; (-) strand; PAM type: YTN; PAM sequence: CTT
ctgcctcagcctccctagta

SEQ ID NO: 76313 - DNA, 20 bp, Artificial Sequence
  Description of Artificial Sequence: Synthetic oligonucleotide
  Target: ATXN2; (-) strand; PAM type: YTN; PAM sequence: TTC
ttctgcctcagcctccctag

SEQ ID NO: 76314 - DNA, 20 bp, Artificial Sequence
  Description of Artificial Sequence: Synthetic oligonucleotide
  Target: ATXN2; (-) strand; PAM type: YTN; PAM sequence: TTC
aggcgattcttctgcctcag

SEQ ID NO: 76315 - DNA, 20 bp, Artificial Sequence
  Description of Artificial Sequence: Synthetic oligonucleotide
  Target: ATXN2; (-) strand; PAM type: YTN; PAM sequence: CTC
ccaggttcaggcgattcttc

SEQ ID NO: 76316 - DNA, 20 bp, Artificial Sequence
  Description of Artificial Sequence: Synthetic oligonucleotide
  Target: ATXN2; (-) strand; PAM type: YTN; PAM sequence: CTC
cacctcccaggttcaggcga

SEQ ID NO: 76317 - DNA, 20 bp, Artificial Sequence
  Description of Artificial Sequence: Synthetic oligonucleotide
  Target: ATXN2; (-) strand; PAM type: YTN; PAM sequence: CTG
caacctccacctcccaggtt

SEQ ID NO: 76318 - DNA, 20 bp, Artificial Sequence
  Description of Artificial Sequence: Synthetic oligonucleotide
  Target: ATXN2; (-) strand; PAM type: YTN; PAM sequence: CTC
actgcaacctccacctccca

SEQ ID NO: 76319 - DNA, 20 bp, Artificial Sequence
  Description of Artificial Sequence: Synthetic oligonucleotide
  Target: ATXN2; (-) strand; PAM type: YTN; PAM sequence: CTC
agctcactgcaacctccacc

SEQ ID NO: 76320 - DNA, 20 bp, Artificial Sequence
  Description of Artificial Sequence: Synthetic oligonucleotide
  Target: ATXN2; (-) strand; PAM type: YTN; PAM sequence: CTG
gagtacaatggggcggtctc

SEQ ID NO: 76321 - DNA, 20 bp, Artificial Sequence
  Description of Artificial Sequence: Synthetic oligonucleotide
  Target: ATXN2; (-) strand; PAM type: YTN; PAM sequence: CTG
tcaccccggctggagtacaa

SEQ ID NO: 76322 - DNA, 20 bp, Artificial Sequence
  Description of Artificial Sequence: Synthetic oligonucleotide
  Target: ATXN2; (-) strand; PAM type: YTN; PAM sequence: CTC
tgtcaccccggctggagtac

SEQ ID NO: 76323 - DNA, 20 bp, Artificial Sequence
  Description of Artificial Sequence: Synthetic oligonucleotide
  Target: ATXN2; (-) strand; PAM type: YTN; PAM sequence: TTG
ctctgtcaccccggctggag

SEQ ID NO: 76324 - DNA, 20 bp, Artificial Sequence
  Description of Artificial Sequence: Synthetic oligonucleotide
  Target: ATXN2; (-) strand; PAM type: YTN; PAM sequence: CTT
gctctgtcaccccggctgga

SEQ ID NO: 76325 - DNA, 20 bp, Artificial Sequence
  Description of Artificial Sequence: Synthetic oligonucleotide
  Target: ATXN2; (-) strand; PAM type: YTN; PAM sequence: TTG
agacagagtcttgctctgtc

SEQ ID NO: 76326 - DNA, 20 bp, Artificial Sequence
  Description of Artificial Sequence: Synthetic oligonucleotide
  Target: ATXN2; (-) strand; PAM type: YTN; PAM sequence: TTT
gagacagagtcttgctctgt

SEQ ID NO: 76327 - DNA, 20 bp, Artificial Sequence
  Description of Artificial Sequence: Synthetic oligonucleotide
  Target: ATXN2; (-) strand; PAM type: YTN; PAM sequence: TTT
tgagacagagtcttgctctg

SEQ ID NO: 76328 - DNA, 20 bp, Artificial Sequence
  Description of Artificial Sequence: Synthetic oligonucleotide
  Target: ATXN2; (-) strand; PAM type: YTN; PAM sequence: TTT
ttgagacagagtcttgctct

SEQ ID NO: 76329 - DNA, 20 bp, Artificial Sequence
  Description of Artificial Sequence: Synthetic oligonucleotide
  Target: ATXN2; (-) strand; PAM type: YTN; PAM sequence: TTT
tttgagacagagtcttgctc

SEQ ID NO: 76330 - DNA, 20 bp, Artificial Sequence
  Description of Artificial Sequence: Synthetic oligonucleotide
  Target: ATXN2; (-) strand; PAM type: YTN; PAM sequence: TTT
ttttgagacagagtcttgct

SEQ ID NO: 76331 - DNA, 20 bp, Artificial Sequence
  Description of Artificial Sequence: Synthetic oligonucleotide
  Target: ATXN2; (-) strand; PAM type: YTN; PAM sequence: TTT
tttttgagacagagtcttgc

SEQ ID NO: 76332 - DNA, 20 bp, Artificial Sequence
  Description of Artificial Sequence: Synthetic oligonucleotide
  Target: ATXN2; (-) strand; PAM type: YTN; PAM sequence: TTT
ttttttgagacagagtcttg

SEQ ID NO: 76333 - DNA, 20 bp, Artificial Sequence
  Description of Artificial Sequence: Synthetic oligonucleotide
  Target: ATXN2; (-) strand; PAM type: YTN; PAM sequence: TTT
tttttttgagacagagtctt

SEQ ID NO: 76334 - DNA, 20 bp, Artificial Sequence
  Description of Artificial Sequence: Synthetic oligonucleotide
  Target: ATXN2; (-) strand; PAM type: YTN; PAM sequence: TTT
ttttttttgagacagagtct

SEQ ID NO: 76335 - DNA, 20 bp, Artificial Sequence
  Description of Artificial Sequence: Synthetic oligonucleotide
  Target: ATXN2; (-) strand; PAM type: YTN; PAM sequence: TTT
tttttttttgagacagagtc

SEQ ID NO: 76336 - DNA, 20 bp, Artificial Sequence
  Description of Artificial Sequence: Synthetic oligonucleotide
  Target: ATXN2; (-) strand; PAM type: YTN; PAM sequence: TTT
ttttttttttgagacagagt

SEQ ID NO: 76337 - DNA, 20 bp, Artificial Sequence
  Description of Artificial Sequence: Synthetic oligonucleotide
  Target: ATXN2; (-) strand; PAM type: YTN; PAM sequence: CTT
tttttttttttgagacagag

SEQ ID NO: 76338 - DNA, 20 bp, Artificial Sequence
  Description of Artificial Sequence: Synthetic oligonucleotide
  Target: ATXN2; (-) strand; PAM type: YTN; PAM sequence: TTC
tttttttttttttgagacag

SEQ ID NO: 76339 - DNA, 20 bp, Artificial Sequence
  Description of Artificial Sequence: Synthetic oligonucleotide
  Target: ATXN2; (-) strand; PAM type: YTN; PAM sequence: TTT
ctttttttttttttgagaca

SEQ ID NO: 76340 - DNA, 20 bp, Artificial Sequence
  Description of Artificial Sequence: Synthetic oligonucleotide
  Target: ATXN2; (-) strand; PAM type: YTN; PAM sequence: CTT
tctttttttttttttgagac

SEQ ID NO: 76341 - DNA, 20 bp, Artificial Sequence
  Description of Artificial Sequence: Synthetic oligonucleotide
  Target: ATXN2; (-) strand; PAM type: YTN; PAM sequence: TTC
tttctttttttttttttgag

SEQ ID NO: 76342 - DNA, 20 bp, Artificial Sequence
  Description of Artificial Sequence: Synthetic oligonucleotide
  Target: ATXN2; (-) strand; PAM type: YTN; PAM sequence: TTT
ctttctttttttttttttga

SEQ ID NO: 76343 - DNA, 20 bp, Artificial Sequence
  Description of Artificial Sequence: Synthetic oligonucleotide
  Target: ATXN2; (-) strand; PAM type: YTN; PAM sequence: TTT
tctttctttttttttttttg

SEQ ID NO: 76344 - DNA, 20 bp, Artificial Sequence
  Description of Artificial Sequence: Synthetic oligonucleotide
  Target: ATXN2; (-) strand; PAM type: YTN; PAM sequence: TTT
ttctttcttttttttttttt

SEQ ID NO: 76345 - DNA, 20 bp, Artificial Sequence
  Description of Artificial Sequence: Synthetic oligonucleotide
  Target: ATXN2; (-) strand; PAM type: YTN; PAM sequence: CTG
tttttctttctttttttttt

SEQ ID NO: 76346 - DNA, 20 bp, Artificial Sequence
  Description of Artificial Sequence: Synthetic oligonucleotide
  Target: ATXN2; (-) strand; PAM type: YTN; PAM sequence: TTG
taatcatatgacctgttttt

SEQ ID NO: 76347 - DNA, 20 bp, Artificial Sequence
  Description of Artificial Sequence: Synthetic oligonucleotide
  Target: ATXN2; (-) strand; PAM type: YTN; PAM sequence: CTG
cagttgtaatcatatgacct

SEQ ID NO: 76348 - DNA, 20 bp, Artificial Sequence
  Description of Artificial Sequence: Synthetic oligonucleotide
  Target: ATXN2; (-) strand; PAM type: YTN; PAM sequence: TTC
tgcagttgtaatcatatgac

SEQ ID NO: 76349 - DNA, 20 bp, Artificial Sequence
  Description of Artificial Sequence: Synthetic oligonucleotide
  Target: ATXN2; (-) strand; PAM type: YTN; PAM sequence: TTT
ctgcagttgtaatcatatga

SEQ ID NO: 76350 - DNA, 20 bp, Artificial Sequence
  Description of Artificial Sequence: Synthetic oligonucleotide
  Target: ATXN2; (-) strand; PAM type: YTN; PAM sequence: TTT
tctgcagttgtaatcatatg

SEQ ID NO: 76351 - DNA, 20 bp, Artificial Sequence
  Description of Artificial Sequence: Synthetic oligonucleotide
  Target: ATXN2; (-) strand; PAM type: YTN; PAM sequence: TTT
ttctgcagttgtaatcatat

SEQ ID NO: 76352 - DNA, 20 bp, Artificial Sequence
  Description of Artificial Sequence: Synthetic oligonucleotide
  Target: ATXN2; (-) strand; PAM type: YTN; PAM sequence: TTT
tttctgcagttgtaatcata

SEQ ID NO: 76353 - DNA, 20 bp, Artificial Sequence
  Description of Artificial Sequence: Synthetic oligonucleotide
  Target: ATXN2; (-) strand; PAM type: YTN; PAM sequence: TTT
ttttctgcagttgtaatcat

SEQ ID NO: 76354 - DNA, 20 bp, Artificial Sequence
  Description of Artificial Sequence: Synthetic oligonucleotide
  Target: ATXN2; (-) strand; PAM type: YTN; PAM sequence: TTT
tttttctgcagttgtaatca

SEQ ID NO: 76355 - DNA, 20 bp, Artificial Sequence
  Description of Artificial Sequence: Synthetic oligonucleotide
  Target: ATXN2; (-) strand; PAM type: YTN; PAM sequence: TTT
ttttttctgcagttgtaatc

SEQ ID NO: 76356 - DNA, 20 bp, Artificial Sequence
  Description of Artificial Sequence: Synthetic oligonucleotide
  Target: ATXN2; (-) strand; PAM type: YTN; PAM sequence: TTT
tttttttctgcagttgtaat

SEQ ID NO: 76357 - DNA, 20 bp, Artificial Sequence
  Description of Artificial Sequence: Synthetic oligonucleotide
  Target: ATXN2; (-) strand; PAM type: YTN; PAM sequence: TTT
ttttttttctgcagttgtaa

SEQ ID NO: 76358 - DNA, 20 bp, Artificial Sequence
  Description of Artificial Sequence: Synthetic oligonucleotide
  Target: ATXN2; (-) strand; PAM type: YTN; PAM sequence: TTC
agtttttttttttctgcagt

SEQ ID NO: 76359 - DNA, 20 bp, Artificial Sequence
  Description of Artificial Sequence: Synthetic oligonucleotide
  Target: ATXN2; (-) strand; PAM type: YTN; PAM sequence: TTT
cagtttttttttttctgcag

SEQ ID NO: 76360 - DNA, 20 bp, Artificial Sequence
  Description of Artificial Sequence: Synthetic oligonucleotide
  Target: ATXN2; (-) strand; PAM type: YTN; PAM sequence: TTT
tcagtttttttttttctgca

SEQ ID NO: 76361 - DNA, 20 bp, Artificial Sequence
  Description of Artificial Sequence: Synthetic oligonucleotide
  Target: ATXN2; (-) strand; PAM type: YTN; PAM sequence: TTA
ttttcagtttttttttttct

SEQ ID NO: 76362 - DNA, 20 bp, Artificial Sequence
  Description of Artificial Sequence: Synthetic oligonucleotide
  Target: ATXN2; (-) strand; PAM type: YTN; PAM sequence: CTT
attttcagtttttttttttc

SEQ ID NO: 76363 - DNA, 20 bp, Artificial Sequence
  Description of Artificial Sequence: Synthetic oligonucleotide
  Target: ATXN2; (-) strand; PAM type: YTN; PAM sequence: TTA
gcttattttcagtttttttt

SEQ ID NO: 76364 - DNA, 20 bp, Artificial Sequence
  Description of Artificial Sequence: Synthetic oligonucleotide
  Target: ATXN2; (-) strand; PAM type: YTN; PAM sequence: TTT
agcttattttcagttttttt

SEQ ID NO: 76365 - DNA, 20 bp, Artificial Sequence
  Description of Artificial Sequence: Synthetic oligonucleotide
  Target: ATXN2; (-) strand; PAM type: YTN; PAM sequence: TTG
aatgatttagcttattttca

SEQ ID NO: 76366 - DNA, 20 bp, Artificial Sequence
  Description of Artificial Sequence: Synthetic oligonucleotide
  Target: ATXN2; (-) strand; PAM type: YTN; PAM sequence: TTT
gaatgatttagcttattttc

SEQ ID NO: 76367 - DNA, 20 bp, Artificial Sequence
  Description of Artificial Sequence: Synthetic oligonucleotide
  Target: ATXN2; (-) strand; PAM type: YTN; PAM sequence: CTT
tgaatgatttagcttatttt

SEQ ID NO: 76368 - DNA, 20 bp, Artificial Sequence
  Description of Artificial Sequence: Synthetic oligonucleotide
  Target: ATXN2; (-) strand; PAM type: YTN; PAM sequence: TTA
gaaatgaaagtgctttgaat

SEQ ID NO: 76369 - DNA, 20 bp, Artificial Sequence
  Description of Artificial Sequence: Synthetic oligonucleotide
  Target: ATXN2; (-) strand; PAM type: YTN; PAM sequence: TTT
agaaatgaaagtgctttgaa

SEQ ID NO: 76370 - DNA, 20 bp, Artificial Sequence
  Description of Artificial Sequence: Synthetic oligonucleotide
  Target: ATXN2; (-) strand; PAM type: YTN; PAM sequence: TTA
tttagaaatgaaagtgcttt

SEQ ID NO: 76371 - DNA, 20 bp, Artificial Sequence
  Description of Artificial Sequence: Synthetic oligonucleotide
  Target: ATXN2; (-) strand; PAM type: YTN; PAM sequence: TTA
caacgatccacacatataga

SEQ ID NO: 76372 - DNA, 20 bp, Artificial Sequence
  Description of Artificial Sequence: Synthetic oligonucleotide
  Target: ATXN2; (-) strand; PAM type: YTN; PAM sequence: TTG
ttacaacgatccacacatat

SEQ ID NO: 76373 - DNA, 20 bp, Artificial Sequence
  Description of Artificial Sequence: Synthetic oligonucleotide
  Target: ATXN2; (-) strand; PAM type: YTN; PAM sequence: CTT
gttacaacgatccacacata

SEQ ID NO: 76374 - DNA, 20 bp, Artificial Sequence
  Description of Artificial Sequence: Synthetic oligonucleotide
  Target: ATXN2; (-) strand; PAM type: YTN; PAM sequence: TTG
gcaaggaaaggcacttgtta

SEQ ID NO: 76375 - DNA, 20 bp, Artificial Sequence
  Description of Artificial Sequence: Synthetic oligonucleotide
  Target: ATXN2; (-) strand; PAM type: YTN; PAM sequence: CTG
agggagagagttggcaagga

SEQ ID NO: 76376 - DNA, 20 bp, Artificial Sequence
  Description of Artificial Sequence: Synthetic oligonucleotide
  Target: ATXN2; (-) strand; PAM type: YTN; PAM sequence: TTC
tgagggagagagttggcaag

SEQ ID NO: 76377 - DNA, 20 bp, Artificial Sequence
  Description of Artificial Sequence: Synthetic oligonucleotide
  Target: ATXN2; (-) strand; PAM type: YTN; PAM sequence: TTT
ctgagggagagagttggcaa

SEQ ID NO: 76378 - DNA, 20 bp, Artificial Sequence
  Description of Artificial Sequence: Synthetic oligonucleotide
  Target: ATXN2; (-) strand; PAM type: YTN; PAM sequence: TTT
tctgagggagagagttggca

SEQ ID NO: 76379 - DNA, 20 bp, Artificial Sequence
  Description of Artificial Sequence: Synthetic oligonucleotide
  Target: ATXN2; (-) strand; PAM type: YTN; PAM sequence: CTT
ttctgagggagagagttggc

SEQ ID NO: 76380 - DNA, 20 bp, Artificial Sequence
  Description of Artificial Sequence: Synthetic oligonucleotide
  Target: ATXN2; (-) strand; PAM type: YTN; PAM sequence: CTG
catcttttctgagggagaga

SEQ ID NO: 76381 - DNA, 20 bp, Artificial Sequence
  Description of Artificial Sequence: Synthetic oligonucleotide
  Target: ATXN2; (-) strand; PAM type: YTN; PAM sequence: TTG
tgtactgcatcttttctgag

SEQ ID NO: 76382 - DNA, 20 bp, Artificial Sequence
  Description of Artificial Sequence: Synthetic oligonucleotide
  Target: ATXN2; (-) strand; PAM type: YTN; PAM sequence: TTT
gtgtactgcatcttttctga

SEQ ID NO: 76383 - DNA, 20 bp, Artificial Sequence
  Description of Artificial Sequence: Synthetic oligonucleotide
  Target: ATXN2; (-) strand; PAM type: YTN; PAM sequence: TTT
tgtgtactgcatcttttctg

SEQ ID NO: 76384 - DNA, 20 bp, Artificial Sequence
  Description of Artificial Sequence: Synthetic oligonucleotide
  Target: ATXN2; (-) strand; PAM type: YTN; PAM sequence: TTG
acagccaaattttgtgtact

SEQ ID NO: 76385 - DNA, 20 bp, Artificial Sequence
  Description of Artificial Sequence: Synthetic oligonucleotide
  Target: ATXN2; (-) strand; PAM type: YTN; PAM sequence: CTT
gacagccaaattttgtgtac

SEQ ID NO: 76386 - DNA, 20 bp, Artificial Sequence
  Description of Artificial Sequence: Synthetic oligonucleotide
  Target: ATXN2; (-) strand; PAM type: YTN; PAM sequence: TTA
cttgacagccaaattttgtg

SEQ ID NO: 76387 - DNA, 20 bp, Artificial Sequence
  Description of Artificial Sequence: Synthetic oligonucleotide
  Target: ATXN2; (-) strand; PAM type: YTN; PAM sequence: TTT
acttgacagccaaattttgt

SEQ ID NO: 76388 - DNA, 20 bp, Artificial Sequence
  Description of Artificial Sequence: Synthetic oligonucleotide
  Target: ATXN2; (-) strand; PAM type: YTN; PAM sequence: CTT
tacttgacagccaaattttg

SEQ ID NO: 76389 - DNA, 20 bp, Artificial Sequence
  Description of Artificial Sequence: Synthetic oligonucleotide
  Target: ATXN2; (-) strand; PAM type: YTN; PAM sequence: TTC
atctttacttgacagccaaa

SEQ ID NO: 76390 - DNA, 20 bp, Artificial Sequence
  Description of Artificial Sequence: Synthetic oligonucleotide
  Target: ATXN2; (-) strand; PAM type: YTN; PAM sequence: TTG
aaaatagaattcatctttac

SEQ ID NO: 76391 - DNA, 20 bp, Artificial Sequence
  Description of Artificial Sequence: Synthetic oligonucleotide
  Target: ATXN2; (-) strand; PAM type: YTN; PAM sequence: CTT
gaaaatagaattcatcttta

SEQ ID NO: 76392 - DNA, 20 bp, Artificial Sequence
  Description of Artificial Sequence: Synthetic oligonucleotide
  Target: ATXN2; (-) strand; PAM type: YTN; PAM sequence: TTC
acttgaaaatagaattcatc

SEQ ID NO: 76393 - DNA, 20 bp, Artificial Sequence
  Description of Artificial Sequence: Synthetic oligonucleotide
  Target: ATXN2; (-) strand; PAM type: YTN; PAM sequence: CTA
taattcacttgaaaatagaa

SEQ ID NO: 76394 - DNA, 20 bp, Artificial Sequence
  Description of Artificial Sequence: Synthetic oligonucleotide
  Target: ATXN2; (-) strand; PAM type: YTN; PAM sequence: TTC
tataattcacttgaaaatag

SEQ ID NO: 76395 - DNA, 20 bp, Artificial Sequence
  Description of Artificial Sequence: Synthetic oligonucleotide
  Target: ATXN2; (-) strand; PAM type: YTN; PAM sequence: TTA
tattctataattcacttgaa

SEQ ID NO: 76396 - DNA, 20 bp, Artificial Sequence
  Description of Artificial Sequence: Synthetic oligonucleotide
  Target: ATXN2; (-) strand; PAM type: YTN; PAM sequence: TTG
tattatattctataattcac

SEQ ID NO: 76397 - DNA, 20 bp, Artificial Sequence
  Description of Artificial Sequence: Synthetic oligonucleotide
  Target: ATXN2; (-) strand; PAM type: YTN; PAM sequence: TTA
ggttgtattatattctataa

SEQ ID NO: 76398 - DNA, 20 bp, Artificial Sequence
  Description of Artificial Sequence: Synthetic oligonucleotide
  Target: ATXN2; (-) strand; PAM type: YTN; PAM sequence: TTT
aggttgtattatattctata

SEQ ID NO: 76399 - DNA, 20 bp, Artificial Sequence
  Description of Artificial Sequence: Synthetic oligonucleotide
  Target: ATXN2; (-) strand; PAM type: YTN; PAM sequence: CTT
taggttgtattatattctat

SEQ ID NO: 76400 - DNA, 20 bp, Artificial Sequence
  Description of Artificial Sequence: Synthetic oligonucleotide
  Target: ATXN2; (-) strand; PAM type: YTN; PAM sequence: TTC
agtggaataagctttaggtt

SEQ ID NO: 76401 - DNA, 20 bp, Artificial Sequence
  Description of Artificial Sequence: Synthetic oligonucleotide
  Target: ATXN2; (-) strand; PAM type: YTN; PAM sequence: TTT
cagtggaataagctttaggt

SEQ ID NO: 76402 - DNA, 20 bp, Artificial Sequence
  Description of Artificial Sequence: Synthetic oligonucleotide
  Target: ATXN2; (-) strand; PAM type: YTN; PAM sequence: TTT
tcagtggaataagctttagg

SEQ ID NO: 76403 - DNA, 20 bp, Artificial Sequence
  Description of Artificial Sequence: Synthetic oligonucleotide
  Target: ATXN2; (-) strand; PAM type: YTN; PAM sequence: TTT
ttcagtggaataagctttag

SEQ ID NO: 76404 - DNA, 20 bp, Artificial Sequence
  Description of Artificial Sequence: Synthetic oligonucleotide
  Target: ATXN2; (-) strand; PAM type: YTN; PAM sequence: CTT
tttcagtggaataagcttta

SEQ ID NO: 76405 - DNA, 20 bp, Artificial Sequence
  Description of Artificial Sequence: Synthetic oligonucleotide
  Target: ATXN2; (-) strand; PAM type: YTN; PAM sequence: CTA
atctttttcagtggaataag

SEQ ID NO: 76406 - DNA, 20 bp, Artificial Sequence
  Description of Artificial Sequence: Synthetic oligonucleotide
  Target: ATXN2; (-) strand; PAM type: YTN; PAM sequence: CTA
aggggcctaatctttttcag

SEQ ID NO: 76407 - DNA, 20 bp, Artificial Sequence
  Description of Artificial Sequence: Synthetic oligonucleotide
  Target: ATXN2; (-) strand; PAM type: YTN; PAM sequence: TTC
taaggggcctaatctttttc

SEQ ID NO: 76408 - DNA, 20 bp, Artificial Sequence
  Description of Artificial Sequence: Synthetic oligonucleotide
  Target: ATXN2; (-) strand; PAM type: YTN; PAM sequence: TTA
ttctaaggggcctaatcttt

SEQ ID NO: 76409 - DNA, 20 bp, Artificial Sequence
  Description of Artificial Sequence: Synthetic oligonucleotide
  Target: ATXN2; (-) strand; PAM type: YTN; PAM sequence: TTA
attattctaaggggcctaat

SEQ ID NO: 76410 - DNA, 20 bp, Artificial Sequence
  Description of Artificial Sequence: Synthetic oligonucleotide
  Target: ATXN2; (-) strand; PAM type: YTN; PAM sequence: TTT
aattattctaaggggcctaa

SEQ ID NO: 76411 - DNA, 20 bp, Artificial Sequence
  Description of Artificial Sequence: Synthetic oligonucleotide
  Target: ATXN2; (-) strand; PAM type: YTN; PAM sequence: TTT
taattattctaaggggccta

SEQ ID NO: 76412 - DNA, 20 bp, Artificial Sequence
  Description of Artificial Sequence: Synthetic oligonucleotide
  Target: ATXN2; (-) strand; PAM type: YTN; PAM sequence: TTT
ttaattattctaaggggcct

SEQ ID NO: 76413 - DNA, 20 bp, Artificial Sequence
  Description of Artificial Sequence: Synthetic oligonucleotide
  Target: ATXN2; (-) strand; PAM type: YTN; PAM sequence: TTT
tttaattattctaaggggcc

SEQ ID NO: 76414 - DNA, 20 bp, Artificial Sequence
  Description of Artificial Sequence: Synthetic oligonucleotide
  Target: ATXN2; (-) strand; PAM type: YTN; PAM sequence: TTA
atgatgttttttaattattc

SEQ ID NO: 76415 - DNA, 20 bp, Artificial Sequence
  Description of Artificial Sequence: Synthetic oligonucleotide
  Target: ATXN2; (-) strand; PAM type: YTN; PAM sequence: TTT
aatgatgttttttaattatt

SEQ ID NO: 76416 - DNA, 20 bp, Artificial Sequence
  Description of Artificial Sequence: Synthetic oligonucleotide
  Target: ATXN2; (-) strand; PAM type: YTN; PAM sequence: CTT
taatgatgttttttaattat

SEQ ID NO: 76417 - DNA, 20 bp, Artificial Sequence
  Description of Artificial Sequence: Synthetic oligonucleotide
  Target: ATXN2; (-) strand; PAM type: YTN; PAM sequence: TTC
actttaatgatgttttttaa

SEQ ID NO: 76418 - DNA, 20 bp, Artificial Sequence
  Description of Artificial Sequence: Synthetic oligonucleotide
  Target: ATXN2; (-) strand; PAM type: YTN; PAM sequence: TTT
cactttaatgatgtttttta

SEQ ID NO: 76419 - DNA, 20 bp, Artificial Sequence
  Description of Artificial Sequence: Synthetic oligonucleotide
  Target: ATXN2; (-) strand; PAM type: YTN; PAM sequence: TTA
tgagaaatataacatttcac

SEQ ID NO: 76420 - DNA, 20 bp, Artificial Sequence
  Description of Artificial Sequence: Synthetic oligonucleotide
  Target: ATXN2; (-) strand; PAM type: YTN; PAM sequence: TTT
atgagaaatataacatttca

SEQ ID NO: 76421 - DNA, 20 bp, Artificial Sequence
  Description of Artificial Sequence: Synthetic oligonucleotide
  Target: ATXN2; (-) strand; PAM type: YTN; PAM sequence: CTA
atgtttatgagaaatataac

SEQ ID NO: 76422 - DNA, 20 bp, Artificial Sequence
  Description of Artificial Sequence: Synthetic oligonucleotide
  Target: ATXN2; (-) strand; PAM type: YTN; PAM sequence: TTG
tcatgactaatgtttatgag

SEQ ID NO: 76423 - DNA, 20 bp, Artificial Sequence
  Description of Artificial Sequence: Synthetic oligonucleotide
  Target: ATXN2; (-) strand; PAM type: YTN; PAM sequence: CTA
ttgtcatgactaatgtttat

SEQ ID NO: 76424 - DNA, 20 bp, Artificial Sequence
  Description of Artificial Sequence: Synthetic oligonucleotide
  Target: ATXN2; (-) strand; PAM type: YTN; PAM sequence: TTC
cagtcctattgtcatgacta

SEQ ID NO: 76425 - DNA, 20 bp, Artificial Sequence
  Description of Artificial Sequence: Synthetic oligonucleotide
  Target: ATXN2; (-) strand; PAM type: YTN; PAM sequence: TTA
aaatgagattccagtcctat

SEQ ID NO: 76426 - DNA, 20 bp, Artificial Sequence
  Description of Artificial Sequence: Synthetic oligonucleotide
  Target: ATXN2; (-) strand; PAM type: YTN; PAM sequence: TTA
ttaaaatgagattccagtcc

SEQ ID NO: 76427 - DNA, 20 bp, Artificial Sequence
  Description of Artificial Sequence: Synthetic oligonucleotide
  Target: ATXN2; (-) strand; PAM type: YTN; PAM sequence: TTT
attaaaatgagattccagtc

SEQ ID NO: 76428 - DNA, 20 bp, Artificial Sequence
  Description of Artificial Sequence: Synthetic oligonucleotide
  Target: ATXN2; (-) strand; PAM type: YTN; PAM sequence: TTT
tattaaaatgagattccagt

SEQ ID NO: 76429 - DNA, 20 bp, Artificial Sequence
  Description of Artificial Sequence: Synthetic oligonucleotide
  Target: ATXN2; (-) strand; PAM type: YTN; PAM sequence: TTA
ttttattaaaatgagattcc

SEQ ID NO: 76430 - DNA, 20 bp, Artificial Sequence
  Description of Artificial Sequence: Synthetic oligonucleotide
  Target: ATXN2; (-) strand; PAM type: YTN; PAM sequence: TTG
tgattattttattaaaatga

SEQ ID NO: 76431 - DNA, 20 bp, Artificial Sequence
  Description of Artificial Sequence: Synthetic oligonucleotide
  Target: ATXN2; (-) strand; PAM type: YTN; PAM sequence: TTG
agtgttgtgattattttatt

SEQ ID NO: 76432 - DNA, 20 bp, Artificial Sequence
  Description of Artificial Sequence: Synthetic oligonucleotide
  Target: ATXN2; (-) strand; PAM type: YTN; PAM sequence: CTT
gagtgttgtgattattttat

SEQ ID NO: 76433 - DNA, 20 bp, Artificial Sequence
  Description of Artificial Sequence: Synthetic oligonucleotide
  Target: ATXN2; (-) strand; PAM type: YTN; PAM sequence: TTG
gcttgagtgttgtgattatt

SEQ ID NO: 76434 - DNA, 20 bp, Artificial Sequence
  Description of Artificial Sequence: Synthetic oligonucleotide
  Target: ATXN2; (-) strand; PAM type: YTN; PAM sequence: TTT
ggcttgagtgttgtgattat

SEQ ID NO: 76435 - DNA, 20 bp, Artificial Sequence
  Description of Artificial Sequence: Synthetic oligonucleotide
  Target: ATXN2; (-) strand; PAM type: YTN; PAM sequence: TTT
tggcttgagtgttgtgatta

SEQ ID NO: 76436 - DNA, 20 bp, Artificial Sequence
  Description of Artificial Sequence: Synthetic oligonucleotide
  Target: ATXN2; (-) strand; PAM type: YTN; PAM sequence: TTG
aattttggcttgagtgttgt

SEQ ID NO: 76437 - DNA, 20 bp, Artificial Sequence
  Description of Artificial Sequence: Synthetic oligonucleotide
  Target: ATXN2; (-) strand; PAM type: YTN; PAM sequence: TTT
gaattttggcttgagtgttg

SEQ ID NO: 76438 - DNA, 20 bp, Artificial Sequence
  Description of Artificial Sequence: Synthetic oligonucleotide
  Target: ATXN2; (-) strand; PAM type: YTN; PAM sequence: TTT
tgaattttggcttgagtgtt

SEQ ID NO: 76439 - DNA, 20 bp, Artificial Sequence
  Description of Artificial Sequence: Synthetic oligonucleotide
  Target: ATXN2; (-) strand; PAM type: YTN; PAM sequence: TTG
aatgttttgaattttggctt

SEQ ID NO: 76440 - DNA, 20 bp, Artificial Sequence
  Description of Artificial Sequence: Synthetic oligonucleotide
  Target: ATXN2; (-) strand; PAM type: YTN; PAM sequence: CTT
gaatgttttgaattttggct

SEQ ID NO: 76441 - DNA, 20 bp, Artificial Sequence
  Description of Artificial Sequence: Synthetic oligonucleotide
  Target: ATXN2; (-) strand; PAM type: YTN; PAM sequence: TTC
cttgaatgttttgaattttg

SEQ ID NO: 76442 - DNA, 20 bp, Artificial Sequence
  Description of Artificial Sequence: Synthetic oligonucleotide
  Target: ATXN2; (-) strand; PAM type: YTN; PAM sequence: TTT
ccttgaatgttttgaatttt

SEQ ID NO: 76443 - DNA, 20 bp, Artificial Sequence
  Description of Artificial Sequence: Synthetic oligonucleotide
  Target: ATXN2; (-) strand; PAM type: YTN; PAM sequence: TTT
tccttgaatgttttgaattt

SEQ ID NO: 76444 - DNA, 20 bp, Artificial Sequence
  Description of Artificial Sequence: Synthetic oligonucleotide
  Target: ATXN2; (-) strand; PAM type: YTN; PAM sequence: CTT
ttccttgaatgttttgaatt

SEQ ID NO: 76445 - DNA, 20 bp, Artificial Sequence
  Description of Artificial Sequence: Synthetic oligonucleotide
  Target: ATXN2; (-) strand; PAM type: YTN; PAM sequence: TTG
tgcttttccttgaatgtttt

SEQ ID NO: 76446 - DNA, 20 bp, Artificial Sequence
  Description of Artificial Sequence: Synthetic oligonucleotide
  Target: ATXN2; (-) strand; PAM type: YTN; PAM sequence: CTG
aattgtgcttttccttgaat

SEQ ID NO: 76447 - DNA, 20 bp, Artificial Sequence
  Description of Artificial Sequence: Synthetic oligonucleotide
  Target: ATXN2; (-) strand; PAM type: YTN; PAM sequence: TTG
gatctgaattgtgcttttcc

SEQ ID NO: 76448 - DNA, 20 bp, Artificial Sequence
  Description of Artificial Sequence: Synthetic oligonucleotide
  Target: ATXN2; (-) strand; PAM type: YTN; PAM sequence: TTT
ggatctgaattgtgcttttc

SEQ ID NO: 76449 - DNA, 20 bp, Artificial Sequence
  Description of Artificial Sequence: Synthetic oligonucleotide
  Target: ATXN2; (-) strand; PAM type: YTN; PAM sequence: TTT
tggatctgaattgtgctttt

SEQ ID NO: 76450 - DNA, 20 bp, Artificial Sequence
  Description of Artificial Sequence: Synthetic oligonucleotide
  Target: ATXN2; (-) strand; PAM type: YTN; PAM sequence: TTT
ttggatctgaattgtgcttt

SEQ ID NO: 76451 - DNA, 20 bp, Artificial Sequence
  Description of Artificial Sequence: Synthetic oligonucleotide
  Target: ATXN2; (-) strand; PAM type: YTN; PAM sequence: CTT
tttggatctgaattgtgctt

SEQ ID NO: 76452 - DNA, 20 bp, Artificial Sequence
  Description of Artificial Sequence: Synthetic oligonucleotide
  Target: ATXN2; (-) strand; PAM type: YTN; PAM sequence: CTA
gactttttggatctgaattg

SEQ ID NO: 76453 - DNA, 20 bp, Artificial Sequence
  Description of Artificial Sequence: Synthetic oligonucleotide
  Target: ATXN2; (-) strand; PAM type: YTN; PAM sequence: TTA
ctagactttttggatctgaa

SEQ ID NO: 76454 - DNA, 20 bp, Artificial Sequence
  Description of Artificial Sequence: Synthetic oligonucleotide
  Target: ATXN2; (-) strand; PAM type: YTN; PAM sequence: CTA
gggatcgaccagtcgtgtta

SEQ ID NO: 76455 - DNA, 20 bp, Artificial Sequence
  Description of Artificial Sequence: Synthetic oligonucleotide
  Target: ATXN2; (-) strand; PAM type: YTN; PAM sequence: TTC
tagggatcgaccagtcgtgt

SEQ ID NO: 76456 - DNA, 20 bp, Artificial Sequence
  Description of Artificial Sequence: Synthetic oligonucleotide
  Target: ATXN2; (-) strand; PAM type: YTN; PAM sequence: CTT
ctagggatcgaccagtcgtg

SEQ ID NO: 76457 - DNA, 20 bp, Artificial Sequence
  Description of Artificial Sequence: Synthetic oligonucleotide
  Target: ATXN2; (-) strand; PAM type: YTN; PAM sequence: CTC
ttctagggatcgaccagtcg

SEQ ID NO: 76458 - DNA, 20 bp, Artificial Sequence
  Description of Artificial Sequence: Synthetic oligonucleotide
  Target: ATXN2; (-) strand; PAM type: YTN; PAM sequence: TTA
agagtactcttctagggatc

SEQ ID NO: 76459 - DNA, 20 bp, Artificial Sequence
  Description of Artificial Sequence: Synthetic oligonucleotide
  Target: ATXN2; (-) strand; PAM type: YTN; PAM sequence: CTC
agaatgttaagagtactctt

SEQ ID NO: 76460 - DNA, 20 bp, Artificial Sequence
  Description of Artificial Sequence: Synthetic oligonucleotide
  Target: ATXN2; (-) strand; PAM type: YTN; PAM sequence: CTG
gcctcagaatgttaagagta

SEQ ID NO: 76461 - DNA, 20 bp, Artificial Sequence
  Description of Artificial Sequence: Synthetic oligonucleotide
  Target: ATXN2; (-) strand; PAM type: YTN; PAM sequence: CTA
ggactggcctcagaatgtta

SEQ ID NO: 76462 - DNA, 20 bp, Artificial Sequence
  Description of Artificial Sequence: Synthetic oligonucleotide
  Target: ATXN2; (-) strand; PAM type: YTN; PAM sequence: TTG
gagaccaagctaggactggc

SEQ ID NO: 76463 - DNA, 20 bp, Artificial Sequence
  Description of Artificial Sequence: Synthetic oligonucleotide
  Target: ATXN2; (-) strand; PAM type: YTN; PAM sequence: CTG
gatgagagaagaaagtgagg

SEQ ID NO: 76464 - DNA, 20 bp, Artificial Sequence
  Description of Artificial Sequence: Synthetic oligonucleotide
  Target: ATXN2; (-) strand; PAM type: YTN; PAM sequence: TTC
tggatgagagaagaaagtga

SEQ ID NO: 76465 - DNA, 20 bp, Artificial Sequence
  Description of Artificial Sequence: Synthetic oligonucleotide
  Target: ATXN2; (-) strand; PAM type: YTN; PAM sequence: TTT
ctggatgagagaagaaagtg

SEQ ID NO: 76466 - DNA, 20 bp, Artificial Sequence
  Description of Artificial Sequence: Synthetic oligonucleotide
  Target: ATXN2; (-) strand; PAM type: YTN; PAM sequence: TTT
tctggatgagagaagaaagt

SEQ ID NO: 76467 - DNA, 20 bp, Artificial Sequence
  Description of Artificial Sequence: Synthetic oligonucleotide
  Target: ATXN2; (-) strand; PAM type: YTN; PAM sequence: TTG
ttttctggatgagagaagaa

SEQ ID NO: 76468 - DNA, 20 bp, Artificial Sequence
  Description of Artificial Sequence: Synthetic oligonucleotide
  Target: ATXN2; (-) strand; PAM type: YTN; PAM sequence: TTC
aagtccattgttttctggat

SEQ ID NO: 76469 - DNA, 20 bp, Artificial Sequence
  Description of Artificial Sequence: Synthetic oligonucleotide
  Target: ATXN2; (-) strand; PAM type: YTN; PAM sequence: TTA
attcaagtccattgttttct

SEQ ID NO: 76470 - DNA, 20 bp, Artificial Sequence
  Description of Artificial Sequence: Synthetic oligonucleotide
  Target: ATXN2; (-) strand; PAM type: YTN; PAM sequence: TTT
aattcaagtccattgttttc

SEQ ID NO: 76471 - DNA, 20 bp, Artificial Sequence
  Description of Artificial Sequence: Synthetic oligonucleotide
  Target: ATXN2; (-) strand; PAM type: YTN; PAM sequence: CTA
gatgtcatttaattcaagtc

SEQ ID NO: 76472 - DNA, 20 bp, Artificial Sequence
  Description of Artificial Sequence: Synthetic oligonucleotide
  Target: ATXN2; (-) strand; PAM type: YTN; PAM sequence: TTA
gaaatgaaaggaatcctaga

SEQ ID NO: 76473 - DNA, 20 bp, Artificial Sequence
  Description of Artificial Sequence: Synthetic oligonucleotide
  Target: ATXN2; (-) strand; PAM type: YTN; PAM sequence: TTA
gaatgttagaaatgaaagga

SEQ ID NO: 76474 - DNA, 20 bp, Artificial Sequence
  Description of Artificial Sequence: Synthetic oligonucleotide
  Target: ATXN2; (-) strand; PAM type: YTN; PAM sequence: TTA
cagaattagaatgttagaaa

SEQ ID NO: 76475 - DNA, 20 bp, Artificial Sequence
  Description of Artificial Sequence: Synthetic oligonucleotide
  Target: ATXN2; (-) strand; PAM type: YTN; PAM sequence: TTG
aggcaaacagttacagaatt

SEQ ID NO: 76476 - DNA, 20 bp, Artificial Sequence
  Description of Artificial Sequence: Synthetic oligonucleotide
  Target: ATXN2; (-) strand; PAM type: YTN; PAM sequence: TTT
gaggcaaacagttacagaat

SEQ ID NO: 76477 - DNA, 20 bp, Artificial Sequence
  Description of Artificial Sequence: Synthetic oligonucleotide
  Target: ATXN2; (-) strand; PAM type: YTN; PAM sequence: CTG
tgccatgtttgaggcaaaca

SEQ ID NO: 76478 - DNA, 20 bp, Artificial Sequence
  Description of Artificial Sequence: Synthetic oligonucleotide
  Target: ATXN2; (-) strand; PAM type: YTN; PAM sequence: CTC
tgtgccatgtttgaggcaaa

SEQ ID NO: 76479 - DNA, 20 bp, Artificial Sequence
  Description of Artificial Sequence: Synthetic oligonucleotide
  Target: ATXN2; (-) strand; PAM type: YTN; PAM sequence: TTA
tctctgtgccatgtttgagg

SEQ ID NO: 76480 - DNA, 20 bp, Artificial Sequence
  Description of Artificial Sequence: Synthetic oligonucleotide
  Target: ATXN2; (-) strand; PAM type: YTN; PAM sequence: TTT
atctctgtgccatgtttgag

SEQ ID NO: 76481 - DNA, 20 bp, Artificial Sequence
  Description of Artificial Sequence: Synthetic oligonucleotide
  Target: ATXN2; (-) strand; PAM type: YTN; PAM sequence: TTC
aggaatttatctctgtgcca

SEQ ID NO: 76482 - DNA, 20 bp, Artificial Sequence
  Description of Artificial Sequence: Synthetic oligonucleotide
  Target: ATXN2; (-) strand; PAM type: YTN; PAM sequence: CTT
caggaatttatctctgtgcc

SEQ ID NO: 76483 - DNA, 20 bp, Artificial Sequence
  Description of Artificial Sequence: Synthetic oligonucleotide
  Target: ATXN2; (-) strand; PAM type: YTN; PAM sequence: TTA
gacttcaggaatttatctct

SEQ ID NO: 76484 - DNA, 20 bp, Artificial Sequence
  Description of Artificial Sequence: Synthetic oligonucleotide
  Target: ATXN2; (-) strand; PAM type: YTN; PAM sequence: CTT
agacttcaggaatttatctc

SEQ ID NO: 76485 - DNA, 20 bp, Artificial Sequence
  Description of Artificial Sequence: Synthetic oligonucleotide
  Target: ATXN2; (-) strand; PAM type: YTN; PAM sequence: TTC
cttagacttcaggaatttat

SEQ ID NO: 76486 - DNA, 20 bp, Artificial Sequence
  Description of Artificial Sequence: Synthetic oligonucleotide
  Target: ATXN2; (-) strand; PAM type: YTN; PAM sequence: TTA
gtcatattccttagacttca

SEQ ID NO: 76487 - DNA, 20 bp, Artificial Sequence
  Description of Artificial Sequence: Synthetic oligonucleotide
  Target: ATXN2; (-) strand; PAM type: YTN; PAM sequence: TTA
ttagtcatattccttagact

SEQ ID NO: 76488 - DNA, 20 bp, Artificial Sequence
  Description of Artificial Sequence: Synthetic oligonucleotide
  Target: ATXN2; (-) strand; PAM type: YTN; PAM sequence: CTA
taaaagataaattattagtc

SEQ ID NO: 76489 - DNA, 20 bp, Artificial Sequence
  Description of Artificial Sequence: Synthetic oligonucleotide
  Target: ATXN2; (-) strand; PAM type: YTN; PAM sequence: TTG
tagtaagatctataaaagat

SEQ ID NO: 76490 - DNA, 20 bp, Artificial Sequence
  Description of Artificial Sequence: Synthetic oligonucleotide
  Target: ATXN2; (-) strand; PAM type: YTN; PAM sequence: TTT
gtagtaagatctataaaaga

SEQ ID NO: 76491 - DNA, 20 bp, Artificial Sequence
  Description of Artificial Sequence: Synthetic oligonucleotide
  Target: ATXN2; (-) strand; PAM type: YTN; PAM sequence: TTT
tgtagtaagatctataaaag

SEQ ID NO: 76492 - DNA, 20 bp, Artificial Sequence
  Description of Artificial Sequence: Synthetic oligonucleotide
  Target: ATXN2; (-) strand; PAM type: YTN; PAM sequence: CTG
gttttgtagtaagatctata

SEQ ID NO: 76493 - DNA, 20 bp, Artificial Sequence
  Description of Artificial Sequence: Synthetic oligonucleotide
  Target: ATXN2; (-) strand; PAM type: YTN; PAM sequence: TTA
gtatggtgtctggttttgta

SEQ ID NO: 76494 - DNA, 20 bp, Artificial Sequence
  Description of Artificial Sequence: Synthetic oligonucleotide
  Target: ATXN2; (-) strand; PAM type: YTN; PAM sequence: CTT
agtatggtgtctggttttgt

SEQ ID NO: 76495 - DNA, 20 bp, Artificial Sequence
  Description of Artificial Sequence: Synthetic oligonucleotide
  Target: ATXN2; (-) strand; PAM type: YTN; PAM sequence: TTG
catgtgaagtacttagtatg

SEQ ID NO: 76496 - DNA, 20 bp, Artificial Sequence
  Description of Artificial Sequence: Synthetic oligonucleotide
  Target: ATXN2; (-) strand; PAM type: YTN; PAM sequence: TTA
gacatgttgcatgtgaagta

SEQ ID NO: 76497 - DNA, 20 bp, Artificial Sequence
  Description of Artificial Sequence: Synthetic oligonucleotide
  Target: ATXN2; (-) strand; PAM type: YTN; PAM sequence: CTG
taaagtagaggtgatagatt

SEQ ID NO: 76498 - DNA, 20 bp, Artificial Sequence
  Description of Artificial Sequence: Synthetic oligonucleotide
  Target: ATXN2; (-) strand; PAM type: YTN; PAM sequence: CTC
acctgtaaagtagaggtgat

SEQ ID NO: 76499 - DNA, 20 bp, Artificial Sequence
  Description of Artificial Sequence: Synthetic oligonucleotide
  Target: ATXN2; (-) strand; PAM type: YTN; PAM sequence: TTC
ctcacctgtaaagtagaggt

SEQ ID NO: 76500 - DNA, 20 bp, Artificial Sequence
  Description of Artificial Sequence: Synthetic oligonucleotide
  Target: ATXN2; (-) strand; PAM type: YTN; PAM sequence: TTT
cctcacctgtaaagtagagg

SEQ ID NO: 76501 - DNA, 20 bp, Artificial Sequence
  Description of Artificial Sequence: Synthetic oligonucleotide
  Target: ATXN2; (-) strand; PAM type: YTN; PAM sequence: TTC
agtttcctcacctgtaaagt

SEQ ID NO: 76502 - DNA, 20 bp, Artificial Sequence
  Description of Artificial Sequence: Synthetic oligonucleotide
  Target: ATXN2; (-) strand; PAM type: YTN; PAM sequence: CTG
aggttcagtttcctcacctg

SEQ ID NO: 76503 - DNA, 20 bp, Artificial Sequence
  Description of Artificial Sequence: Synthetic oligonucleotide
  Target: ATXN2; (-) strand; PAM type: YTN; PAM sequence: CTG
ctgaggttcagtttcctcac

SEQ ID NO: 76504 - DNA, 20 bp, Artificial Sequence
  Description of Artificial Sequence: Synthetic oligonucleotide
  Target: ATXN2; (-) strand; PAM type: YTN; PAM sequence: TTG
actgctgaggttcagtttcc

SEQ ID NO: 76505 - DNA, 20 bp, Artificial Sequence
  Description of Artificial Sequence: Synthetic oligonucleotide
  Target: ATXN2; (-) strand; PAM type: YTN; PAM sequence: CTT
gactgctgaggttcagtttc

SEQ ID NO: 76506 - DNA, 20 bp, Artificial Sequence
  Description of Artificial Sequence: Synthetic oligonucleotide
  Target: ATXN2; (-) strand; PAM type: YTN; PAM sequence: TTG
gtcaagatacttgactgctg

SEQ ID NO: 76507 - DNA, 20 bp, Artificial Sequence
  Description of Artificial Sequence: Synthetic oligonucleotide
  Target: ATXN2; (-) strand; PAM type: YTN; PAM sequence: TTT
ggtcaagatacttgactgct

SEQ ID NO: 76508 - DNA, 20 bp, Artificial Sequence
  Description of Artificial Sequence: Synthetic oligonucleotide
  Target: ATXN2; (-) strand; PAM type: YTN; PAM sequence: TTT
tggtcaagatacttgactgc

SEQ ID NO: 76509 - DNA, 20 bp, Artificial Sequence
  Description of Artificial Sequence: Synthetic oligonucleotide
  Target: ATXN2; (-) strand; PAM type: YTN; PAM sequence: CTG
gatgattttggtcaagatac

SEQ ID NO: 76510 - DNA, 20 bp, Artificial Sequence
  Description of Artificial Sequence: Synthetic oligonucleotide
  Target: ATXN2; (-) strand; PAM type: YTN; PAM sequence: CTC
atgaactggatgattttggt

SEQ ID NO: 76511 - DNA, 20 bp, Artificial Sequence
  Description of Artificial Sequence: Synthetic oligonucleotide
  Target: ATXN2; (-) strand; PAM type: YTN; PAM sequence: CTG
ctcatgaactggatgatttt

SEQ ID NO: 76512 - DNA, 20 bp, Artificial Sequence
  Description of Artificial Sequence: Synthetic oligonucleotide
  Target: ATXN2; (-) strand; PAM type: YTN; PAM sequence: CTA
ctgctcatgaactggatgat

SEQ ID NO: 76513 - DNA, 20 bp, Artificial Sequence
  Description of Artificial Sequence: Synthetic oligonucleotide
  Target: ATXN2; (-) strand; PAM type: YTN; PAM sequence: CTC
tactgctcatgaactggatg

SEQ ID NO: 76514 - DNA, 20 bp, Artificial Sequence
  Description of Artificial Sequence: Synthetic oligonucleotide
  Target: ATXN2; (-) strand; PAM type: YTN; PAM sequence: TTA
aataccagctctactgctca

SEQ ID NO: 76515 - DNA, 20 bp, Artificial Sequence
  Description of Artificial Sequence: Synthetic oligonucleotide
  Target: ATXN2; (-) strand; PAM type: YTN; PAM sequence: TTT
aaataccagctctactgctc

SEQ ID NO: 76516 - DNA, 20 bp, Artificial Sequence
  Description of Artificial Sequence: Synthetic oligonucleotide
  Target: ATXN2; (-) strand; PAM type: YTN; PAM sequence: CTG
gtttaaataccagctctact

SEQ ID NO: 76517 - DNA, 20 bp, Artificial Sequence
  Description of Artificial Sequence: Synthetic oligonucleotide
  Target: ATXN2; (-) strand; PAM type: YTN; PAM sequence: TTA
gacgtggaatcagatacacc

SEQ ID NO: 76518 - DNA, 20 bp, Artificial Sequence
  Description of Artificial Sequence: Synthetic oligonucleotide
  Target: ATXN2; (-) strand; PAM type: YTN; PAM sequence: CTT
agacgtggaatcagatacac

SEQ ID NO: 76519 - DNA, 20 bp, Artificial Sequence
  Description of Artificial Sequence: Synthetic oligonucleotide
  Target: ATXN2; (-) strand; PAM type: YTN; PAM sequence: CTA
ggaatgaaaaacttagacgt

SEQ ID NO: 76520 - DNA, 20 bp, Artificial Sequence
  Description of Artificial Sequence: Synthetic oligonucleotide
  Target: ATXN2; (-) strand; PAM type: YTN; PAM sequence: TTC
cagagaggcagcataaccta

SEQ ID NO: 76521 - DNA, 20 bp, Artificial Sequence
  Description of Artificial Sequence: Synthetic oligonucleotide
  Target: ATXN2; (-) strand; PAM type: YTN; PAM sequence: TTG
tgatacagttccagagaggc

SEQ ID NO: 76522 - DNA, 20 bp, Artificial Sequence
  Description of Artificial Sequence: Synthetic oligonucleotide
  Target: ATXN2; (-) strand; PAM type: YTN; PAM sequence: CTT
gtgatacagttccagagagg

SEQ ID NO: 76523 - DNA, 20 bp, Artificial Sequence
  Description of Artificial Sequence: Synthetic oligonucleotide
  Target: ATXN2; (-) strand; PAM type: YTN; PAM sequence: TTC
cttgtgatacagttccagag

SEQ ID NO: 76524 - DNA, 20 bp, Artificial Sequence
  Description of Artificial Sequence: Synthetic oligonucleotide
  Target: ATXN2; (-) strand; PAM type: YTN; PAM sequence: TTA
ttccttgtgatacagttcca

SEQ ID NO: 76525 - DNA, 20 bp, Artificial Sequence
  Description of Artificial Sequence: Synthetic oligonucleotide
  Target: ATXN2; (-) strand; PAM type: YTN; PAM sequence: TTT
attccttgtgatacagttcc

SEQ ID NO: 76526 - DNA, 20 bp, Artificial Sequence
  Description of Artificial Sequence: Synthetic oligonucleotide
  Target: ATXN2; (-) strand; PAM type: YTN; PAM sequence: TTA
ggcgaggtagtttattcctt

SEQ ID NO: 76527 - DNA, 20 bp, Artificial Sequence
  Description of Artificial Sequence: Synthetic oligonucleotide
  Target: ATXN2; (-) strand; PAM type: YTN; PAM sequence: TTG
ttaggcgaggtagtttattc

SEQ ID NO: 76528 - DNA, 20 bp, Artificial Sequence
  Description of Artificial Sequence: Synthetic oligonucleotide
  Target: ATXN2; (-) strand; PAM type: YTN; PAM sequence: TTT
gttaggcgaggtagtttatt

SEQ ID NO: 76529 - DNA, 20 bp, Artificial Sequence
  Description of Artificial Sequence: Synthetic oligonucleotide
  Target: ATXN2; (-) strand; PAM type: YTN; PAM sequence: TTT
tgttaggcgaggtagtttat

SEQ ID NO: 76530 - DNA, 20 bp, Artificial Sequence
  Description of Artificial Sequence: Synthetic oligonucleotide
  Target: ATXN2; (-) strand; PAM type: YTN; PAM sequence: TTT
ttgttaggcgaggtagttta

SEQ ID NO: 76531 - DNA, 20 bp, Artificial Sequence
  Description of Artificial Sequence: Synthetic oligonucleotide
  Target: ATXN2; (-) strand; PAM type: YTN; PAM sequence: TTG
aaaaagcatagaatttttgt

SEQ ID NO: 76532 - DNA, 20 bp, Artificial Sequence
  Description of Artificial Sequence: Synthetic oligonucleotide
  Target: ATXN2; (-) strand; PAM type: YTN; PAM sequence: TTT
gaaaaagcatagaatttttg

SEQ ID NO: 76533 - DNA, 20 bp, Artificial Sequence
  Description of Artificial Sequence: Synthetic oligonucleotide
  Target: ATXN2; (-) strand; PAM type: YTN; PAM sequence: TTC
aaatgatgtttgaaaaagca

SEQ ID NO: 76534 - DNA, 20 bp, Artificial Sequence
  Description of Artificial Sequence: Synthetic oligonucleotide
  Target: ATXN2; (-) strand; PAM type: YTN; PAM sequence: CTG
taaattcaaatgatgtttga

SEQ ID NO: 76535 - DNA, 20 bp, Artificial Sequence
  Description of Artificial Sequence: Synthetic oligonucleotide
  Target: ATXN2; (-) strand; PAM type: YTN; PAM sequence: CTA
ccaaaactgtaaattcaaat

SEQ ID NO: 76536 - DNA, 20 bp, Artificial Sequence
  Description of Artificial Sequence: Synthetic oligonucleotide
  Target: ATXN2; (-) strand; PAM type: YTN; PAM sequence: CTA
taagtacacccccccacacc

SEQ ID NO: 76537 - DNA, 20 bp, Artificial Sequence
  Description of Artificial Sequence: Synthetic oligonucleotide
  Target: ATXN2; (-) strand; PAM type: YTN; PAM sequence: TTC
atgtacagactataagtaca

SEQ ID NO: 76538 - DNA, 20 bp, Artificial Sequence
  Description of Artificial Sequence: Synthetic oligonucleotide
  Target: ATXN2; (-) strand; PAM type: YTN; PAM sequence: CTT
catgtacagactataagtac

SEQ ID NO: 76539 - DNA, 20 bp, Artificial Sequence
  Description of Artificial Sequence: Synthetic oligonucleotide
  Target: ATXN2; (-) strand; PAM type: YTN; PAM sequence: TTA
gccttcatgtacagactata

SEQ ID NO: 76540 - DNA, 20 bp, Artificial Sequence
  Description of Artificial Sequence: Synthetic oligonucleotide
  Target: ATXN2; (-) strand; PAM type: YTN; PAM sequence: TTT
agccttcatgtacagactat

SEQ ID NO: 76541 - DNA, 20 bp, Artificial Sequence
  Description of Artificial Sequence: Synthetic oligonucleotide
  Target: ATXN2; (-) strand; PAM type: YTN; PAM sequence: TTT
tagccttcatgtacagacta

SEQ ID NO: 76542 - DNA, 20 bp, Artificial Sequence
  Description of Artificial Sequence: Synthetic oligonucleotide
  Target: ATXN2; (-) strand; PAM type: YTN; PAM sequence: TTA
ggcattttagccttcatgta

SEQ ID NO: 76543 - DNA, 20 bp, Artificial Sequence
  Description of Artificial Sequence: Synthetic oligonucleotide
  Target: ATXN2; (-) strand; PAM type: YTN; PAM sequence: TTT
aggcattttagccttcatgt

SEQ ID NO: 76544 - DNA, 20 bp, Artificial Sequence
  Description of Artificial Sequence: Synthetic oligonucleotide
  Target: ATXN2; (-) strand; PAM type: YTN; PAM sequence: CTA
agtaagatttaggcatttta

SEQ ID NO: 76545 - DNA, 20 bp, Artificial Sequence
  Description of Artificial Sequence: Synthetic oligonucleotide
  Target: ATXN2; (-) strand; PAM type: YTN; PAM sequence: TTC
taagtaagatttaggcattt

SEQ ID NO: 76546 - DNA, 20 bp, Artificial Sequence
  Description of Artificial Sequence: Synthetic oligonucleotide
  Target: ATXN2; (-) strand; PAM type: YTN; PAM sequence: CTC
agcagccaccaggataccag

SEQ ID NO: 76547 - DNA, 20 bp, Artificial Sequence
  Description of Artificial Sequence: Synthetic oligonucleotide
  Target: ATXN2; (-) strand; PAM type: YTN; PAM sequence: TTG
gcatctcagcagccaccagg

SEQ ID NO: 76548 - DNA, 20 bp, Artificial Sequence
  Description of Artificial Sequence: Synthetic oligonucleotide
  Target: ATXN2; (-) strand; PAM type: YTN; PAM sequence: CTT
ggcatctcagcagccaccag

SEQ ID NO: 76549 - DNA, 20 bp, Artificial Sequence
  Description of Artificial Sequence: Synthetic oligonucleotide
  Target: ATXN2; (-) strand; PAM type: YTN; PAM sequence: TTG
taacttggcatctcagcagc

SEQ ID NO: 76550 - DNA, 20 bp, Artificial Sequence
  Description of Artificial Sequence: Synthetic oligonucleotide
  Target: ATXN2; (-) strand; PAM type: YTN; PAM sequence: TTT
gtaacttggcatctcagcag

SEQ ID NO: 76551 - DNA, 20 bp, Artificial Sequence
  Description of Artificial Sequence: Synthetic oligonucleotide
  Target: ATXN2; (-) strand; PAM type: YTN; PAM sequence: TTT
tgtaacttggcatctcagca

SEQ ID NO: 76552 - DNA, 20 bp, Artificial Sequence
  Description of Artificial Sequence: Synthetic oligonucleotide
  Target: ATXN2; (-) strand; PAM type: YTN; PAM sequence: TTC
aaggttttgtaacttggcat

SEQ ID NO: 76553 - DNA, 20 bp, Artificial Sequence
  Description of Artificial Sequence: Synthetic oligonucleotide
  Target: ATXN2; (-) strand; PAM type: YTN; PAM sequence: TTG
ttcaaggttttgtaacttgg

SEQ ID NO: 76554 - DNA, 20 bp, Artificial Sequence
  Description of Artificial Sequence: Synthetic oligonucleotide
  Target: ATXN2; (-) strand; PAM type: YTN; PAM sequence: TTT
gttcaaggttttgtaacttg

SEQ ID NO: 76555 - DNA, 20 bp, Artificial Sequence
  Description of Artificial Sequence: Synthetic oligonucleotide
  Target: ATXN2; (-) strand; PAM type: YTN; PAM sequence: TTC
gtggcatttgttcaaggttt

SEQ ID NO: 76556 - DNA, 20 bp, Artificial Sequence
  Description of Artificial Sequence: Synthetic oligonucleotide
  Target: ATXN2; (-) strand; PAM type: YTN; PAM sequence: TTA
aggacagttcgtggcatttg

SEQ ID NO: 76557 - DNA, 20 bp, Artificial Sequence
  Description of Artificial Sequence: Synthetic oligonucleotide
  Target: ATXN2; (-) strand; PAM type: YTN; PAM sequence: TTT
aaggacagttcgtggcattt

SEQ ID NO: 76558 - DNA, 20 bp, Artificial Sequence
  Description of Artificial Sequence: Synthetic oligonucleotide
  Target: ATXN2; (-) strand; PAM type: YTN; PAM sequence: TTG
tagggaggccatatgagttt

SEQ ID NO: 76559 - DNA, 20 bp, Artificial Sequence
  Description of Artificial Sequence: Synthetic oligonucleotide
  Target: ATXN2; (-) strand; PAM type: YTN; PAM sequence: TTT
gtagggaggccatatgagtt

SEQ ID NO: 76560 - DNA, 20 bp, Artificial Sequence
  Description of Artificial Sequence: Synthetic oligonucleotide
  Target: ATXN2; (-) strand; PAM type: YTN; PAM sequence: CTT
tgtagggaggccatatgagt

SEQ ID NO: 76561 - DNA, 20 bp, Artificial Sequence
  Description of Artificial Sequence: Synthetic oligonucleotide
  Target: ATXN2; (-) strand; PAM type: YTN; PAM sequence: TTA
tatagctttgtagggaggcc

SEQ ID NO: 76562 - DNA, 20 bp, Artificial Sequence
  Description of Artificial Sequence: Synthetic oligonucleotide
  Target: ATXN2; (-) strand; PAM type: YTN; PAM sequence: TTT
atatagctttgtagggaggc

SEQ ID NO: 76563 - DNA, 20 bp, Artificial Sequence
  Description of Artificial Sequence: Synthetic oligonucleotide
  Target: ATXN2; (-) strand; PAM type: YTN; PAM sequence: TTT
tatatagctttgtagggagg

SEQ ID NO: 76564 - DNA, 20 bp, Artificial Sequence
  Description of Artificial Sequence: Synthetic oligonucleotide
  Target: ATXN2; (-) strand; PAM type: YTN; PAM sequence: CTT
ttatatagctttgtagggag

SEQ ID NO: 76565 - DNA, 20 bp, Artificial Sequence
  Description of Artificial Sequence: Synthetic oligonucleotide
  Target: ATXN2; (-) strand; PAM type: YTN; PAM sequence: TTA
agtcttttatatagctttgt

SEQ ID NO: 76566 - DNA, 20 bp, Artificial Sequence
  Description of Artificial Sequence: Synthetic oligonucleotide
  Target: ATXN2; (-) strand; PAM type: YTN; PAM sequence: TTT
aagtcttttatatagctttg

SEQ ID NO: 76567 - DNA, 20 bp, Artificial Sequence
  Description of Artificial Sequence: Synthetic oligonucleotide
  Target: ATXN2; (-) strand; PAM type: YTN; PAM sequence: TTT
taagtcttttatatagcttt

SEQ ID NO: 76568 - DNA, 20 bp, Artificial Sequence
  Description of Artificial Sequence: Synthetic oligonucleotide
  Target: ATXN2; (-) strand; PAM type: YTN; PAM sequence: TTT
ttaagtcttttatatagctt

SEQ ID NO: 76569 - DNA, 20 bp, Artificial Sequence
  Description of Artificial Sequence: Synthetic oligonucleotide
  Target: ATXN2; (-) strand; PAM type: YTN; PAM sequence: TTA
tgtttttaagtcttttatat

SEQ ID NO: 76570 - DNA, 20 bp, Artificial Sequence
  Description of Artificial Sequence: Synthetic oligonucleotide
  Target: ATXN2; (-) strand; PAM type: YTN; PAM sequence: TTA
aaggggattatgtttttaag

SEQ ID NO: 76571 - DNA, 20 bp, Artificial Sequence
  Description of Artificial Sequence: Synthetic oligonucleotide
  Target: ATXN2; (-) strand; PAM type: YTN; PAM sequence: TTT
aaaggggattatgtttttaa

SEQ ID NO: 76572 - DNA, 20 bp, Artificial Sequence
  Description of Artificial Sequence: Synthetic oligonucleotide
  Target: ATXN2; (-) strand; PAM type: YTN; PAM sequence: TTA
tttaaaggggattatgtttt

SEQ ID NO: 76573 - DNA, 20 bp, Artificial Sequence
  Description of Artificial Sequence: Synthetic oligonucleotide
  Target: ATXN2; (-) strand; PAM type: YTN; PAM sequence: CTT
atttaaaggggattatgttt

SEQ ID NO: 76574 - DNA, 20 bp, Artificial Sequence
  Description of Artificial Sequence: Synthetic oligonucleotide
  Target: ATXN2; (-) strand; PAM type: YTN; PAM sequence: CTA
aaaagaacagtgtgacttat

SEQ ID NO: 76575 - DNA, 20 bp, Artificial Sequence
  Description of Artificial Sequence: Synthetic oligonucleotide
  Target: ATXN2; (-) strand; PAM type: YTN; PAM sequence: TTA
gtcaaagatgtaaccacata

SEQ ID NO: 76576 - DNA, 20 bp, Artificial Sequence
  Description of Artificial Sequence: Synthetic oligonucleotide
  Target: ATXN2; (-) strand; PAM type: YTN; PAM sequence: TTA
ttagtcaaagatgtaaccac

SEQ ID NO: 76577 - DNA, 20 bp, Artificial Sequence
  Description of Artificial Sequence: Synthetic oligonucleotide
  Target: ATXN2; (-) strand; PAM type: YTN; PAM sequence: TTT
attagtcaaagatgtaacca

SEQ ID NO: 76578 - DNA, 20 bp, Artificial Sequence
  Description of Artificial Sequence: Synthetic oligonucleotide
  Target: ATXN2; (-) strand; PAM type: YTN; PAM sequence: TTT
tattagtcaaagatgtaacc

SEQ ID NO: 76579 - DNA, 20 bp, Artificial Sequence
  Description of Artificial Sequence: Synthetic oligonucleotide
  Target: ATXN2; (-) strand; PAM type: YTN; PAM sequence: TTT
ttattagtcaaagatgtaac

SEQ ID NO: 76580 - DNA, 20 bp, Artificial Sequence
  Description of Artificial Sequence: Synthetic oligonucleotide
  Target: ATXN2; (-) strand; PAM type: YTN; PAM sequence: CTT
tttattagtcaaagatgtaa

SEQ ID NO: 76581 - DNA, 20 bp, Artificial Sequence
  Description of Artificial Sequence: Synthetic oligonucleotide
  Target: ATXN2; (-) strand; PAM type: YTN; PAM sequence: TTA
ctttttattagtcaaagatg

SEQ ID NO: 76582 - DNA, 20 bp, Artificial Sequence
  Description of Artificial Sequence: Synthetic oligonucleotide
  Target: ATXN2; (-) strand; PAM type: YTN; PAM sequence: CTC
catggtcaaacaattacttt

SEQ ID NO: 76583 - DNA, 20 bp, Artificial Sequence
  Description of Artificial Sequence: Synthetic oligonucleotide
  Target: ATXN2; (-) strand; PAM type: YTN; PAM sequence: TTG
agtaaactccatggtcaaac

SEQ ID NO: 76584 - DNA, 20 bp, Artificial Sequence
  Description of Artificial Sequence: Synthetic oligonucleotide
  Target: ATXN2; (-) strand; PAM type: YTN; PAM sequence: TTT
gagtaaactccatggtcaaa

SEQ ID NO: 76585 - DNA, 20 bp, Artificial Sequence
  Description of Artificial Sequence: Synthetic oligonucleotide
  Target: ATXN2; (-) strand; PAM type: YTN; PAM sequence: TTT
tgagtaaactccatggtcaa

SEQ ID NO: 76586 - DNA, 20 bp, Artificial Sequence
  Description of Artificial Sequence: Synthetic oligonucleotide
  Target: ATXN2; (-) strand; PAM type: YTN; PAM sequence: CTT
ttgagtaaactccatggtca

SEQ ID NO: 76587 - DNA, 20 bp, Artificial Sequence
  Description of Artificial Sequence: Synthetic oligonucleotide
  Target: ATXN2; (-) strand; PAM type: YTN; PAM sequence: TTC
ttttgagtaaactccatggt

SEQ ID NO: 76588 - DNA, 20 bp, Artificial Sequence
  Description of Artificial Sequence: Synthetic oligonucleotide
  Target: ATXN2; (-) strand; PAM type: YTN; PAM sequence: TTC
gttcttttgagtaaactcca

SEQ ID NO: 76589 - DNA, 20 bp, Artificial Sequence
  Description of Artificial Sequence: Synthetic oligonucleotide
  Target: ATXN2; (-) strand; PAM type: YTN; PAM sequence: TTG
aatgattcgttcttttgagt

SEQ ID NO: 76590 - DNA, 20 bp, Artificial Sequence
  Description of Artificial Sequence: Synthetic oligonucleotide
  Target: ATXN2; (-) strand; PAM type: YTN; PAM sequence: CTG
gttgaatgattcgttctttt

SEQ ID NO: 76591 - DNA, 20 bp, Artificial Sequence
  Description of Artificial Sequence: Synthetic oligonucleotide
  Target: ATXN2; (-) strand; PAM type: YTN; PAM sequence: TTC
ctggttgaatgattcgttct

SEQ ID NO: 76592 - DNA, 20 bp, Artificial Sequence
  Description of Artificial Sequence: Synthetic oligonucleotide
  Target: ATXN2; (-) strand; PAM type: YTN; PAM sequence: TTT
cctggttgaatgattcgttc

SEQ ID NO: 76593 - DNA, 20 bp, Artificial Sequence
  Description of Artificial Sequence: Synthetic oligonucleotide
  Target: ATXN2; (-) strand; PAM type: YTN; PAM sequence: TTT
tcctggttgaatgattcgtt

SEQ ID NO: 76594 - DNA, 20 bp, Artificial Sequence
  Description of Artificial Sequence: Synthetic oligonucleotide
  Target: ATXN2; (-) strand; PAM type: YTN; PAM sequence: TTA
tatgataatattttcctggt

SEQ ID NO: 76595 - DNA, 20 bp, Artificial Sequence
  Description of Artificial Sequence: Synthetic oligonucleotide
  Target: ATXN2; (-) strand; PAM type: YTN; PAM sequence: TTT
atatgataatattttcctgg

SEQ ID NO: 76596 - DNA, 20 bp, Artificial Sequence
  Description of Artificial Sequence: Synthetic oligonucleotide
  Target: ATXN2; (-) strand; PAM type: YTN; PAM sequence: TTT
tatatgataatattttcctg

SEQ ID NO: 76597 - DNA, 20 bp, Artificial Sequence
  Description of Artificial Sequence: Synthetic oligonucleotide
  Target: ATXN2; (-) strand; PAM type: YTN; PAM sequence: TTT
ttatatgataatattttcct

SEQ ID NO: 76598 - DNA, 20 bp, Artificial Sequence
  Description of Artificial Sequence: Synthetic oligonucleotide
  Target: ATXN2; (-) strand; PAM type: YTN; PAM sequence: TTT
tttatatgataatattttcc

SEQ ID NO: 76599 - DNA, 20 bp, Artificial Sequence
  Description of Artificial Sequence: Synthetic oligonucleotide
  Target: ATXN2; (-) strand; PAM type: YTN; PAM sequence: TTT
ttttatatgataatattttc

SEQ ID NO: 76600 - DNA, 20 bp, Artificial Sequence
  Description of Artificial Sequence: Synthetic oligonucleotide
  Target: ATXN2; (-) strand; PAM type: YTN; PAM sequence: CTG
tttttttatatgataatatt

SEQ ID NO: 76601 - DNA, 20 bp, Artificial Sequence
  Description of Artificial Sequence: Synthetic oligonucleotide
  Target: ATXN2; (-) strand; PAM type: YTN; PAM sequence: CTG
tactgtttttttatatgata

SEQ ID NO: 76602 - DNA, 20 bp, Artificial Sequence
  Description of Artificial Sequence: Synthetic oligonucleotide
  Target: ATXN2; (-) strand; PAM type: YTN; PAM sequence: TTA
ctgtactgtttttttatatg

SEQ ID NO: 76603 - DNA, 20 bp, Artificial Sequence
  Description of Artificial Sequence: Synthetic oligonucleotide
  Target: ATXN2; (-) strand; PAM type: YTN; PAM sequence: TTT
actgtactgtttttttatat

SEQ ID NO: 76604 - DNA, 20 bp, Artificial Sequence
  Description of Artificial Sequence: Synthetic oligonucleotide
  Target: ATXN2; (-) strand; PAM type: YTN; PAM sequence: CTT
tactgtactgtttttttata

SEQ ID NO: 76605 - DNA, 20 bp, Artificial Sequence
  Description of Artificial Sequence: Synthetic oligonucleotide
  Target: ATXN2; (-) strand; PAM type: YTN; PAM sequence: CTG
cactttactgtactgttttt

SEQ ID NO: 76606 - DNA, 20 bp, Artificial Sequence
  Description of Artificial Sequence: Synthetic oligonucleotide
  Target: ATXN2; (-) strand; PAM type: YTN; PAM sequence: TTC
tgcactttactgtactgttt

SEQ ID NO: 76607 - DNA, 20 bp, Artificial Sequence
  Description of Artificial Sequence: Synthetic oligonucleotide
  Target: ATXN2; (-) strand; PAM type: YTN; PAM sequence: TTT
ctgcactttactgtactgtt

SEQ ID NO: 76608 - DNA, 20 bp, Artificial Sequence
  Description of Artificial Sequence: Synthetic oligonucleotide
  Target: ATXN2; (-) strand; PAM type: YTN; PAM sequence: TTA
gtggtttctgcactttactg

SEQ ID NO: 76609 - DNA, 20 bp, Artificial Sequence
  Description of Artificial Sequence: Synthetic oligonucleotide
  Target: ATXN2; (-) strand; PAM type: YTN; PAM sequence: TTG
ggtgtccaaccgtgtcatag

SEQ ID NO: 76610 - DNA, 20 bp, Artificial Sequence
  Description of Artificial Sequence: Synthetic oligonucleotide
  Target: ATXN2; (-) strand; PAM type: YTN; PAM sequence: CTG
ttgggtgtccaaccgtgtca

SEQ ID NO: 76611 - DNA, 20 bp, Artificial Sequence
  Description of Artificial Sequence: Synthetic oligonucleotide
  Target: ATXN2; (-) strand; PAM type: YTN; PAM sequence: TTC
ctgttgggtgtccaaccgtg

SEQ ID NO: 76612 - DNA, 20 bp, Artificial Sequence
  Description of Artificial Sequence: Synthetic oligonucleotide
  Target: ATXN2; (-) strand; PAM type: YTN; PAM sequence: CTA
acattcctgttgggtgtcca

SEQ ID NO: 76613 - DNA, 20 bp, Artificial Sequence
  Description of Artificial Sequence: Synthetic oligonucleotide
  Target: ATXN2; (-) strand; PAM type: YTN; PAM sequence: TTC
gatatgctaacattcctgtt

SEQ ID NO: 76614 - DNA, 20 bp, Artificial Sequence
  Description of Artificial Sequence: Synthetic oligonucleotide
  Target: ATXN2; (-) strand; PAM type: YTN; PAM sequence: CTT
cgatatgctaacattcctgt

SEQ ID NO: 76615 - DNA, 20 bp, Artificial Sequence
  Description of Artificial Sequence: Synthetic oligonucleotide
  Target: ATXN2; (-) strand; PAM type: YTN; PAM sequence: CTG
cttcgatatgctaacattcc

SEQ ID NO: 76616 - DNA, 20 bp, Artificial Sequence
  Description of Artificial Sequence: Synthetic oligonucleotide
  Target: ATXN2; (-) strand; PAM type: YTN; PAM sequence: TTC
agagaatactgcttcgatat

SEQ ID NO: 76617 - DNA, 20 bp, Artificial Sequence
  Description of Artificial Sequence: Synthetic oligonucleotide
  Target: ATXN2; (-) strand; PAM type: YTN; PAM sequence: TTT
cagagaatactgcttcgata

SEQ ID NO: 76618 - DNA, 20 bp, Artificial Sequence
  Description of Artificial Sequence: Synthetic oligonucleotide
  Target: ATXN2; (-) strand; PAM type: YTN; PAM sequence: TTC
agtggatttcagagaatact

SEQ ID NO: 76619 - DNA, 20 bp, Artificial Sequence
  Description of Artificial Sequence: Synthetic oligonucleotide
  Target: ATXN2; (-) strand; PAM type: YTN; PAM sequence: CTT
cagtggatttcagagaatac

SEQ ID NO: 76620 - DNA, 20 bp, Artificial Sequence
  Description of Artificial Sequence: Synthetic oligonucleotide
  Target: ATXN2; (-) strand; PAM type: YTN; PAM sequence: TTA
gacttcagtggatttcagag

SEQ ID NO: 76621 - DNA, 20 bp, Artificial Sequence
  Description of Artificial Sequence: Synthetic oligonucleotide
  Target: ATXN2; (-) strand; PAM type: YTN; PAM sequence: TTT
agacttcagtggatttcaga

SEQ ID NO: 76622 - DNA, 20 bp, Artificial Sequence
  Description of Artificial Sequence: Synthetic oligonucleotide
  Target: ATXN2; (-) strand; PAM type: YTN; PAM sequence: TTG
aatggatacaaaaagaaaca

SEQ ID NO: 76623 - DNA, 20 bp, Artificial Sequence
  Description of Artificial Sequence: Synthetic oligonucleotide
  Target: ATXN2; (-) strand; PAM type: YTN; PAM sequence: CTT
gaatggatacaaaaagaaac

SEQ ID NO: 76624 - DNA, 20 bp, Artificial Sequence
  Description of Artificial Sequence: Synthetic oligonucleotide
  Target: ATXN2; (-) strand; PAM type: YTN; PAM sequence: TTA
aaagtaaagcataacttgaa

SEQ ID NO: 76625 - DNA, 20 bp, Artificial Sequence
  Description of Artificial Sequence: Synthetic oligonucleotide
  Target: ATXN2; (-) strand; PAM type: YTN; PAM sequence: CTA
atgaaaagattaaaagtaaa

SEQ ID NO: 76626 - DNA, 20 bp, Artificial Sequence
  Description of Artificial Sequence: Synthetic oligonucleotide
  Target: ATXN2; (-) strand; PAM type: YTN; PAM sequence: TTG
agatactaatgaaaagatta

SEQ ID NO: 76627 - DNA, 20 bp, Artificial Sequence
  Description of Artificial Sequence: Synthetic oligonucleotide
  Target: ATXN2; (-) strand; PAM type: YTN; PAM sequence: TTT
gagatactaatgaaaagatt

SEQ ID NO: 76628 - DNA, 20 bp, Artificial Sequence
  Description of Artificial Sequence: Synthetic oligonucleotide
  Target: ATXN2; (-) strand; PAM type: YTN; PAM sequence: TTG
gtttgagatactaatgaaaa

SEQ ID NO: 76629 - DNA, 20 bp, Artificial Sequence
  Description of Artificial Sequence: Synthetic oligonucleotide
  Target: ATXN2; (-) strand; PAM type: YTN; PAM sequence: TTT
ggtttgagatactaatgaaa

SEQ ID NO: 76630 - DNA, 20 bp, Artificial Sequence
  Description of Artificial Sequence: Synthetic oligonucleotide
  Target: ATXN2; (-) strand; PAM type: YTN; PAM sequence: TTA
aatagtaaaatatttggttt

SEQ ID NO: 76631 - DNA, 20 bp, Artificial Sequence
  Description of Artificial Sequence: Synthetic oligonucleotide
  Target: ATXN2; (-) strand; PAM type: YTN; PAM sequence: CTA
tattaaatagtaaaatattt

SEQ ID NO: 76632 - DNA, 20 bp, Artificial Sequence
  Description of Artificial Sequence: Synthetic oligonucleotide
  Target: ATXN2; (-) strand; PAM type: YTN; PAM sequence: TTA
ctatattaaatagtaaaata

SEQ ID NO: 76633 - DNA, 20 bp, Artificial Sequence
  Description of Artificial Sequence: Synthetic oligonucleotide
  Target: ATXN2; (-) strand; PAM type: YTN; PAM sequence: TTG
ttactatattaaatagtaaa

SEQ ID NO: 76634 - DNA, 20 bp, Artificial Sequence
  Description of Artificial Sequence: Synthetic oligonucleotide
  Target: ATXN2; (-) strand; PAM type: YTN; PAM sequence: TTT
gttactatattaaatagtaa

SEQ ID NO: 76635 - DNA, 20 bp, Artificial Sequence
  Description of Artificial Sequence: Synthetic oligonucleotide
  Target: ATXN2; (-) strand; PAM type: YTN; PAM sequence: TTC
agtatttgttactatattaa

SEQ ID NO: 76636 - DNA, 20 bp, Artificial Sequence
  Description of Artificial Sequence: Synthetic oligonucleotide
  Target: ATXN2; (-) strand; PAM type: YTN; PAM sequence: TTG
cggttcagtatttgttacta

SEQ ID NO: 76637 - DNA, 20 bp, Artificial Sequence
  Description of Artificial Sequence: Synthetic oligonucleotide
  Target: ATXN2; (-) strand; PAM type: YTN; PAM sequence: TTA
ttgcggttcagtatttgtta

SEQ ID NO: 76638 - DNA, 20 bp, Artificial Sequence
  Description of Artificial Sequence: Synthetic oligonucleotide
  Target: ATXN2; (-) strand; PAM type: YTN; PAM sequence: TTT
attgcggttcagtatttgtt

SEQ ID NO: 76639 - DNA, 20 bp, Artificial Sequence
  Description of Artificial Sequence: Synthetic oligonucleotide
  Target: ATXN2; (-) strand; PAM type: YTN; PAM sequence: TTG
tttattgcggttcagtattt

SEQ ID NO: 76640 - DNA, 20 bp, Artificial Sequence
  Description of Artificial Sequence: Synthetic oligonucleotide
  Target: ATXN2; (-) strand; PAM type: YTN; PAM sequence: TTT
gtttattgcggttcagtatt

SEQ ID NO: 76641 - DNA, 20 bp, Artificial Sequence
  Description of Artificial Sequence: Synthetic oligonucleotide
  Target: ATXN2; (-) strand; PAM type: YTN; PAM sequence: CTT
tgtttattgcggttcagtat

SEQ ID NO: 76642 - DNA, 20 bp, Artificial Sequence
  Description of Artificial Sequence: Synthetic oligonucleotide
  Target: ATXN2; (-) strand; PAM type: YTN; PAM sequence: TTG
gcctttgtttattgcggttc

SEQ ID NO: 76643 - DNA, 20 bp, Artificial Sequence
  Description of Artificial Sequence: Synthetic oligonucleotide
  Target: ATXN2; (-) strand; PAM type: YTN; PAM sequence: CTT
ggcctttgtttattgcggtt

SEQ ID NO: 76644 - DNA, 20 bp, Artificial Sequence
  Description of Artificial Sequence: Synthetic oligonucleotide
  Target: ATXN2; (-) strand; PAM type: YTN; PAM sequence: CTC
ttggcctttgtttattgcgg

SEQ ID NO: 76645 - DNA, 20 bp, Artificial Sequence
  Description of Artificial Sequence: Synthetic oligonucleotide
  Target: ATXN2; (-) strand; PAM type: YTN; PAM sequence: CTA
aaatatgctcttggcctttg

SEQ ID NO: 76646 - DNA, 20 bp, Artificial Sequence
  Description of Artificial Sequence: Synthetic oligonucleotide
  Target: ATXN2; (-) strand; PAM type: YTN; PAM sequence: TTA
ggtctaaaatatgctcttgg

SEQ ID NO: 76647 - DNA, 20 bp, Artificial Sequence
  Description of Artificial Sequence: Synthetic oligonucleotide
  Target: ATXN2; (-) strand; PAM type: YTN; PAM sequence: CTT
aggtctaaaatatgctcttg

SEQ ID NO: 76648 - DNA, 20 bp, Artificial Sequence
  Description of Artificial Sequence: Synthetic oligonucleotide
  Target: ATXN2; (-) strand; PAM type: YTN; PAM sequence: CTA
atcataaatatacttaggtc

SEQ ID NO: 76649 - DNA, 20 bp, Artificial Sequence
  Description of Artificial Sequence: Synthetic oligonucleotide
  Target: ATXN2; (-) strand; PAM type: YTN; PAM sequence: CTA
tctaatcataaatatactta

SEQ ID NO: 76650 - DNA, 20 bp, Artificial Sequence
  Description of Artificial Sequence: Synthetic oligonucleotide
  Target: ATXN2; (-) strand; PAM type: YTN; PAM sequence: CTG
atctatctaatcataaatat

SEQ ID NO: 76651 - DNA, 20 bp, Artificial Sequence
  Description of Artificial Sequence: Synthetic oligonucleotide
  Target: ATXN2; (-) strand; PAM type: YTN; PAM sequence: TTA
aacctgatctatctaatcat

SEQ ID NO: 76652 - DNA, 20 bp, Artificial Sequence
  Description of Artificial Sequence: Synthetic oligonucleotide
  Target: ATXN2; (-) strand; PAM type: YTN; PAM sequence: TTG
ttaaacctgatctatctaat

SEQ ID NO: 76653 - DNA, 20 bp, Artificial Sequence
  Description of Artificial Sequence: Synthetic oligonucleotide
  Target: ATXN2; (-) strand; PAM type: YTN; PAM sequence: TTT
gttaaacctgatctatctaa

SEQ ID NO: 76654 - DNA, 20 bp, Artificial Sequence
  Description of Artificial Sequence: Synthetic oligonucleotide
  Target: ATXN2; (-) strand; PAM type: YTN; PAM sequence: TTT
tgttaaacctgatctatcta

SEQ ID NO: 76655 - DNA, 20 bp, Artificial Sequence
  Description of Artificial Sequence: Synthetic oligonucleotide
  Target: ATXN2; (-) strand; PAM type: YTN; PAM sequence: TTA
gtgttttgttaaacctgatc

SEQ ID NO: 76656 - DNA, 20 bp, Artificial Sequence
  Description of Artificial Sequence: Synthetic oligonucleotide
  Target: ATXN2; (-) strand; PAM type: YTN; PAM sequence: CTG
gatattagtgttttgttaaa

SEQ ID NO: 76657 - DNA, 20 bp, Artificial Sequence
  Description of Artificial Sequence: Synthetic oligonucleotide
  Target: ATXN2; (-) strand; PAM type: YTN; PAM sequence: TTA
aaagcatagagtcctggata

SEQ ID NO: 76658 - DNA, 20 bp, Artificial Sequence
  Description of Artificial Sequence: Synthetic oligonucleotide
  Target: ATXN2; (-) strand; PAM type: YTN; PAM sequence: CTA
ttaaaagcatagagtcctgg

SEQ ID NO: 76659 - DNA, 20 bp, Artificial Sequence
  Description of Artificial Sequence: Synthetic oligonucleotide
  Target: ATXN2; (-) strand; PAM type: YTN; PAM sequence: TTG
gcaactattaaaagcataga

SEQ ID NO: 76660 - DNA, 20 bp, Artificial Sequence
  Description of Artificial Sequence: Synthetic oligonucleotide
  Target: ATXN2; (-) strand; PAM type: YTN; PAM sequence: TTT
ggcaactattaaaagcatag

SEQ ID NO: 76661 - DNA, 20 bp, Artificial Sequence
  Description of Artificial Sequence: Synthetic oligonucleotide
  Target: ATXN2; (-) strand; PAM type: YTN; PAM sequence: TTC
atatttggcaactattaaaa

SEQ ID NO: 76662 - DNA, 20 bp, Artificial Sequence
  Description of Artificial Sequence: Synthetic oligonucleotide
  Target: ATXN2; (-) strand; PAM type: YTN; PAM sequence: TTT
catatttggcaactattaaa

SEQ ID NO: 76663 - DNA, 20 bp, Artificial Sequence
  Description of Artificial Sequence: Synthetic oligonucleotide
  Target: ATXN2; (-) strand; PAM type: YTN; PAM sequence: TTG
aatttcatatttggcaacta

SEQ ID NO: 76664 - DNA, 20 bp, Artificial Sequence
  Description of Artificial Sequence: Synthetic oligonucleotide
  Target: ATXN2; (-) strand; PAM type: YTN; PAM sequence: CTT
gaatttcatatttggcaact

SEQ ID NO: 76665 - DNA, 20 bp, Artificial Sequence
  Description of Artificial Sequence: Synthetic oligonucleotide
  Target: ATXN2; (-) strand; PAM type: YTN; PAM sequence: TTA
agtcacacttgaatttcata

SEQ ID NO: 76666 - DNA, 20 bp, Artificial Sequence
  Description of Artificial Sequence: Synthetic oligonucleotide
  Target: ATXN2; (-) strand; PAM type: YTN; PAM sequence: TTT
aagtcacacttgaatttcat

SEQ ID NO: 76667 - DNA, 20 bp, Artificial Sequence
  Description of Artificial Sequence: Synthetic oligonucleotide
  Target: ATXN2; (-) strand; PAM type: YTN; PAM sequence: TTT
taagtcacacttgaatttca

SEQ ID NO: 76668 - DNA, 20 bp, Artificial Sequence
  Description of Artificial Sequence: Synthetic oligonucleotide
  Target: ATXN2; (-) strand; PAM type: YTN; PAM sequence: CTG
gcattttaagtcacacttga

SEQ ID NO: 76669 - DNA, 20 bp, Artificial Sequence
  Description of Artificial Sequence: Synthetic oligonucleotide
  Target: ATXN2; (-) strand; PAM type: YTN; PAM sequence: TTG
actggcattttaagtcacac

SEQ ID NO: 76670 - DNA, 20 bp, Artificial Sequence
  Description of Artificial Sequence: Synthetic oligonucleotide
  Target: ATXN2; (-) strand; PAM type: YTN; PAM sequence: TTT
gactggcattttaagtcaca

SEQ ID NO: 76671 - DNA, 20 bp, Artificial Sequence
  Description of Artificial Sequence: Synthetic oligonucleotide
  Target: ATXN2; (-) strand; PAM type: YTN; PAM sequence: TTA
atttgactggcattttaagt

SEQ ID NO: 76672 - DNA, 20 bp, Artificial Sequence
  Description of Artificial Sequence: Synthetic oligonucleotide
  Target: ATXN2; (-) strand; PAM type: YTN; PAM sequence: TTA
tattaatttgactggcattt

SEQ ID NO: 76673 - DNA, 20 bp, Artificial Sequence
  Description of Artificial Sequence: Synthetic oligonucleotide
  Target: ATXN2; (-) strand; PAM type: YTN; PAM sequence: TTT
atattaatttgactggcatt

SEQ ID NO: 76674 - DNA, 20 bp, Artificial Sequence
  Description of Artificial Sequence: Synthetic oligonucleotide
  Target: ATXN2; (-) strand; PAM type: YTN; PAM sequence: CTT
tatattaatttgactggcat

SEQ ID NO: 76675 - DNA, 20 bp, Artificial Sequence
  Description of Artificial Sequence: Synthetic oligonucleotide
  Target: ATXN2; (-) strand; PAM type: YTN; PAM sequence: TTC
tttatattaatttgactggc

SEQ ID NO: 76676 - DNA, 20 bp, Artificial Sequence
  Description of Artificial Sequence: Synthetic oligonucleotide
  Target: ATXN2; (-) strand; PAM type: YTN; PAM sequence: TTT
ctttatattaatttgactgg

SEQ ID NO: 76677 - DNA, 20 bp, Artificial Sequence
  Description of Artificial Sequence: Synthetic oligonucleotide
  Target: ATXN2; (-) strand; PAM type: YTN; PAM sequence: TTC
agcatgtaaatttctttata

SEQ ID NO: 76678 - DNA, 20 bp, Artificial Sequence
  Description of Artificial Sequence: Synthetic oligonucleotide
  Target: ATXN2; (-) strand; PAM type: YTN; PAM sequence: CTA
ccacattcagcatgtaaatt

SEQ ID NO: 76679 - DNA, 20 bp, Artificial Sequence
  Description of Artificial Sequence: Synthetic oligonucleotide
  Target: ATXN2; (-) strand; PAM type: YTN; PAM sequence: TTA
caagcatgagctaccacatt

SEQ ID NO: 76680 - DNA, 20 bp, Artificial Sequence
  Description of Artificial Sequence: Synthetic oligonucleotide
  Target: ATXN2; (-) strand; PAM type: YTN; PAM sequence: CTG
ggattacaagcatgagctac

SEQ ID NO: 76681 - DNA, 20 bp, Artificial Sequence
  Description of Artificial Sequence: Synthetic oligonucleotide
  Target: ATXN2; (-) strand; PAM type: YTN; PAM sequence: CTA
aagtgctgggattacaagca

SEQ ID NO: 76682 - DNA, 20 bp, Artificial Sequence
  Description of Artificial Sequence: Synthetic oligonucleotide
  Target: ATXN2; (-) strand; PAM type: YTN; PAM sequence: CTC
ctaaagtgctgggattacaa

SEQ ID NO: 76683 - DNA, 20 bp, Artificial Sequence
  Description of Artificial Sequence: Synthetic oligonucleotide
  Target: ATXN2; (-) strand; PAM type: YTN; PAM sequence: CTC
agcctcctaaagtgctggga

SEQ ID NO: 76684 - DNA, 20 bp, Artificial Sequence
  Description of Artificial Sequence: Synthetic oligonucleotide
  Target: ATXN2; (-) strand; PAM type: YTN; PAM sequence: CTG
cctcagcctcctaaagtgct

SEQ ID NO: 76685 - DNA, 20 bp, Artificial Sequence
  Description of Artificial Sequence: Synthetic oligonucleotide
  Target: ATXN2; (-) strand; PAM type: YTN; PAM sequence: CTC
ctgcctcagcctcctaaagt

SEQ ID NO: 76686 - DNA, 20 bp, Artificial Sequence
  Description of Artificial Sequence: Synthetic oligonucleotide
  Target: ATXN2; (-) strand; PAM type: YTN; PAM sequence: CTC
aagtgatcctcctgcctcag

SEQ ID NO: 76687 - DNA, 20 bp, Artificial Sequence
  Description of Artificial Sequence: Synthetic oligonucleotide
  Target: ATXN2; (-) strand; PAM type: YTN; PAM sequence: CTC
cggcactcaagtgatcctcc

SEQ ID NO: 76688 - DNA, 20 bp, Artificial Sequence
  Description of Artificial Sequence: Synthetic oligonucleotide
  Target: ATXN2; (-) strand; PAM type: YTN; PAM sequence: CTC
aaactccggcactcaagtga

SEQ ID NO: 76689 - DNA, 20 bp, Artificial Sequence
  Description of Artificial Sequence: Synthetic oligonucleotide
  Target: ATXN2; (-) strand; PAM type: YTN; PAM sequence: CTG
atctcaaactccggcactca

SEQ ID NO: 76690 - DNA, 20 bp, Artificial Sequence
  Description of Artificial Sequence: Synthetic oligonucleotide
  Target: ATXN2; (-) strand; PAM type: YTN; PAM sequence: TTG
cccagactgatctcaaactc

SEQ ID NO: 76691 - DNA, 20 bp, Artificial Sequence
  Description of Artificial Sequence: Synthetic oligonucleotide
  Target: ATXN2; (-) strand; PAM type: YTN; PAM sequence: TTG
ttgcccagactgatctcaaa

SEQ ID NO: 76692 - DNA, 20 bp, Artificial Sequence
  Description of Artificial Sequence: Synthetic oligonucleotide
  Target: ATXN2; (-) strand; PAM type: YTN; PAM sequence: TTT
gttgcccagactgatctcaa

SEQ ID NO: 76693 - DNA, 20 bp, Artificial Sequence
  Description of Artificial Sequence: Synthetic oligonucleotide
  Target: ATXN2; (-) strand; PAM type: YTN; PAM sequence: CTT
tgttgcccagactgatctca

SEQ ID NO: 76694 - DNA, 20 bp, Artificial Sequence
  Description of Artificial Sequence: Synthetic oligonucleotide
  Target: ATXN2; (-) strand; PAM type: YTN; PAM sequence: TTG
ctttgttgcccagactgatc

SEQ ID NO: 76695 - DNA, 20 bp, Artificial Sequence
  Description of Artificial Sequence: Synthetic oligonucleotide
  Target: ATXN2; (-) strand; PAM type: YTN; PAM sequence: TTT
gctttgttgcccagactgat

SEQ ID NO: 76696 - DNA, 20 bp, Artificial Sequence
  Description of Artificial Sequence: Synthetic oligonucleotide
  Target: ATXN2; (-) strand; PAM type: YTN; PAM sequence: TTT
tgctttgttgcccagactga

SEQ ID NO: 76697 - DNA, 20 bp, Artificial Sequence
  Description of Artificial Sequence: Synthetic oligonucleotide
  Target: ATXN2; (-) strand; PAM type: YTN; PAM sequence: TTG
tagaaacagggttttgcttt

SEQ ID NO: 76698 - DNA, 20 bp, Artificial Sequence
  Description of Artificial Sequence: Synthetic oligonucleotide
  Target: ATXN2; (-) strand; PAM type: YTN; PAM sequence: TTT
gtagaaacagggttttgctt

SEQ ID NO: 76699 - DNA, 20 bp, Artificial Sequence
  Description of Artificial Sequence: Synthetic oligonucleotide
  Target: ATXN2; (-) strand; PAM type: YTN; PAM sequence: TTT
tgtagaaacagggttttgct

SEQ ID NO: 76700 - DNA, 20 bp, Artificial Sequence
  Description of Artificial Sequence: Synthetic oligonucleotide
  Target: ATXN2; (-) strand; PAM type: YTN; PAM sequence: TTT
ttgtagaaacagggttttgc

SEQ ID NO: 76701 - DNA, 20 bp, Artificial Sequence
  Description of Artificial Sequence: Synthetic oligonucleotide
  Target: ATXN2; (-) strand; PAM type: YTN; PAM sequence: TTT
tttgtagaaacagggttttg

SEQ ID NO: 76702 - DNA, 20 bp, Artificial Sequence
  Description of Artificial Sequence: Synthetic oligonucleotide
  Target: ATXN2; (-) strand; PAM type: YTN; PAM sequence: TTA
ttttttgtagaaacagggtt

SEQ ID NO: 76703 - DNA, 20 bp, Artificial Sequence
  Description of Artificial Sequence: Synthetic oligonucleotide
  Target: ATXN2; (-) strand; PAM type: YTN; PAM sequence: TTT
attttttgtagaaacagggt

SEQ ID NO: 76704 - DNA, 20 bp, Artificial Sequence
  Description of Artificial Sequence: Synthetic oligonucleotide
  Target: ATXN2; (-) strand; PAM type: YTN; PAM sequence: TTT
tattttttgtagaaacaggg

SEQ ID NO: 76705 - DNA, 20 bp, Artificial Sequence
  Description of Artificial Sequence: Synthetic oligonucleotide
  Target: ATXN2; (-) strand; PAM type: YTN; PAM sequence: TTT
ttattttttgtagaaacagg

SEQ ID NO: 76706 - DNA, 20 bp, Artificial Sequence
  Description of Artificial Sequence: Synthetic oligonucleotide
  Target: ATXN2; (-) strand; PAM type: YTN; PAM sequence: TTT
tttattttttgtagaaacag

SEQ ID NO: 76707 - DNA, 20 bp, Artificial Sequence
  Description of Artificial Sequence: Synthetic oligonucleotide
  Target: ATXN2; (-) strand; PAM type: YTN; PAM sequence: CTA
gttttttattttttgtagaa

SEQ ID NO: 76708 - DNA, 20 bp, Artificial Sequence
  Description of Artificial Sequence: Synthetic oligonucleotide
  Target: ATXN2; (-) strand; PAM type: YTN; PAM sequence: CTG
gctagttttttattttttgt

SEQ ID NO: 76709 - DNA, 20 bp, Artificial Sequence
  Description of Artificial Sequence: Synthetic oligonucleotide
  Target: ATXN2; (-) strand; PAM type: YTN; PAM sequence: CTA
ccaagtagcggggaccacag

SEQ ID NO: 76710 - DNA, 20 bp, Artificial Sequence
  Description of Artificial Sequence: Synthetic oligonucleotide
  Target: ATXN2; (-) strand; PAM type: YTN; PAM sequence: CTC
accctaccaagtagcgggga

SEQ ID NO: 76711 - DNA, 20 bp, Artificial Sequence
  Description of Artificial Sequence: Synthetic oligonucleotide
  Target: ATXN2; (-) strand; PAM type: YTN; PAM sequence: CTC
ccacctcaccctaccaagta

SEQ ID NO: 76712 - DNA, 20 bp, Artificial Sequence
  Description of Artificial Sequence: Synthetic oligonucleotide
  Target: ATXN2; (-) strand; PAM type: YTN; PAM sequence: CTC
aagtgatcctcccacctcac

SEQ ID NO: 76713 - DNA, 20 bp, Artificial Sequence
  Description of Artificial Sequence: Synthetic oligonucleotide
  Target: ATXN2; (-) strand; PAM type: YTN; PAM sequence: CTG
ggctcaagtgatcctcccac

SEQ ID NO: 76714 - DNA, 20 bp, Artificial Sequence
  Description of Artificial Sequence: Synthetic oligonucleotide
  Target: ATXN2; (-) strand; PAM type: YTN; PAM sequence: CTC
ctgggctcaagtgatcctcc

SEQ ID NO: 76715 - DNA, 20 bp, Artificial Sequence
  Description of Artificial Sequence: Synthetic oligonucleotide
  Target: ATXN2; (-) strand; PAM type: YTN; PAM sequence: TTG
acctcctgggctcaagtgat

SEQ ID NO: 76716 - DNA, 20 bp, Artificial Sequence
  Description of Artificial Sequence: Synthetic oligonucleotide
  Target: ATXN2; (-) strand; PAM type: YTN; PAM sequence: CTT
gacctcctgggctcaagtga

SEQ ID NO: 76717 - DNA, 20 bp, Artificial Sequence
  Description of Artificial Sequence: Synthetic oligonucleotide
  Target: ATXN2; (-) strand; PAM type: YTN; PAM sequence: CTG
tcttgacctcctgggctcaa

SEQ ID NO: 76718 - DNA, 20 bp, Artificial Sequence
  Description of Artificial Sequence: Synthetic oligonucleotide
  Target: ATXN2; (-) strand; PAM type: YTN; PAM sequence: CTG
ctgtcttgacctcctgggct

SEQ ID NO: 76719 - DNA, 20 bp, Artificial Sequence
  Description of Artificial Sequence: Synthetic oligonucleotide
  Target: ATXN2; (-) strand; PAM type: YTN; PAM sequence: CTC
actgctgtcttgacctcctg

SEQ ID NO: 76720 - DNA, 20 bp, Artificial Sequence
  Description of Artificial Sequence: Synthetic oligonucleotide
  Target: ATXN2; (-) strand; PAM type: YTN; PAM sequence: CTG
gagtgcagtggcataatcac

SEQ ID NO: 76721 - DNA, 20 bp, Artificial Sequence
  Description of Artificial Sequence: Synthetic oligonucleotide
  Target: ATXN2; (-) strand; PAM type: YTN; PAM sequence: CTG
tcaccaatgctggagtgcag

SEQ ID NO: 76722 - DNA, 20 bp, Artificial Sequence
  Description of Artificial Sequence: Synthetic oligonucleotide
  Target: ATXN2; (-) strand; PAM type: YTN; PAM sequence: CTC
tgtcaccaatgctggagtgc

SEQ ID NO: 76723 - DNA, 20 bp, Artificial Sequence
  Description of Artificial Sequence: Synthetic oligonucleotide
  Target: ATXN2; (-) strand; PAM type: YTN; PAM sequence: TTG
ctctgtcaccaatgctggag

SEQ ID NO: 76724 - DNA, 20 bp, Artificial Sequence
  Description of Artificial Sequence: Synthetic oligonucleotide
  Target: ATXN2; (-) strand; PAM type: YTN; PAM sequence: TTT
gctctgtcaccaatgctgga

SEQ ID NO: 76725 - DNA, 20 bp, Artificial Sequence
  Description of Artificial Sequence: Synthetic oligonucleotide
  Target: ATXN2; (-) strand; PAM type: YTN; PAM sequence: TTT
tgctctgtcaccaatgctgg

SEQ ID NO: 76726 - DNA, 20 bp, Artificial Sequence
  Description of Artificial Sequence: Synthetic oligonucleotide
  Target: ATXN2; (-) strand; PAM type: YTN; PAM sequence: TTG
agacagggttttgctctgtc

SEQ ID NO: 76727 - DNA, 20 bp, Artificial Sequence
  Description of Artificial Sequence: Synthetic oligonucleotide
  Target: ATXN2; (-) strand; PAM type: YTN; PAM sequence: TTT
gagacagggttttgctctgt

SEQ ID NO: 76728 - DNA, 20 bp, Artificial Sequence
  Description of Artificial Sequence: Synthetic oligonucleotide
  Target: ATXN2; (-) strand; PAM type: YTN; PAM sequence: TTT
tgagacagggttttgctctg

SEQ ID NO: 76729 - DNA, 20 bp, Artificial Sequence
  Description of Artificial Sequence: Synthetic oligonucleotide
  Target: ATXN2; (-) strand; PAM type: YTN; PAM sequence: TTT
ttgagacagggttttgctct

SEQ ID NO: 76730 - DNA, 20 bp, Artificial Sequence
  Description of Artificial Sequence: Synthetic oligonucleotide
  Target: ATXN2; (-) strand; PAM type: YTN; PAM sequence: TTT
tttgagacagggttttgctc

SEQ ID NO: 76731 - DNA, 20 bp, Artificial Sequence
  Description of Artificial Sequence: Synthetic oligonucleotide
  Target: ATXN2; (-) strand; PAM type: YTN; PAM sequence: TTA
ttttttgagacagggttttg

SEQ ID NO: 76732 - DNA, 20 bp, Artificial Sequence
  Description of Artificial Sequence: Synthetic oligonucleotide
  Target: ATXN2; (-) strand; PAM type: YTN; PAM sequence: TTA
attattttttgagacagggt

SEQ ID NO: 76733 - DNA, 20 bp, Artificial Sequence
  Description of Artificial Sequence: Synthetic oligonucleotide
  Target: ATXN2; (-) strand; PAM type: YTN; PAM sequence: TTA
gttaattattttttgagaca

SEQ ID NO: 76734 - DNA, 20 bp, Artificial Sequence
  Description of Artificial Sequence: Synthetic oligonucleotide
  Target: ATXN2; (-) strand; PAM type: YTN; PAM sequence: TTT
agttaattattttttgagac

SEQ ID NO: 76735 - DNA, 20 bp, Artificial Sequence
  Description of Artificial Sequence: Synthetic oligonucleotide
  Target: ATXN2; (-) strand; PAM type: YTN; PAM sequence: TTA
tttagttaattattttttga

SEQ ID NO: 76736 - DNA, 20 bp, Artificial Sequence
  Description of Artificial Sequence: Synthetic oligonucleotide
  Target: ATXN2; (-) strand; PAM type: YTN; PAM sequence: TTA
ttatttagttaattattttt

SEQ ID NO: 76737 - DNA, 20 bp, Artificial Sequence
  Description of Artificial Sequence: Synthetic oligonucleotide
  Target: ATXN2; (-) strand; PAM type: YTN; PAM sequence: TTA
ttattatttagttaattatt

SEQ ID NO: 76738 - DNA, 20 bp, Artificial Sequence
  Description of Artificial Sequence: Synthetic oligonucleotide
  Target: ATXN2; (-) strand; PAM type: YTN; PAM sequence: CTG
tattattattatttagttaa

SEQ ID NO: 76739 - DNA, 20 bp, Artificial Sequence
  Description of Artificial Sequence: Synthetic oligonucleotide
  Target: ATXN2; (-) strand; PAM type: YTN; PAM sequence: TTC
tgtattattattatttagtt

SEQ ID NO: 76740 - DNA, 20 bp, Artificial Sequence
  Description of Artificial Sequence: Synthetic oligonucleotide
  Target: ATXN2; (-) strand; PAM type: YTN; PAM sequence: CTT
ctgtattattattatttagt

SEQ ID NO: 76741 - DNA, 20 bp, Artificial Sequence
  Description of Artificial Sequence: Synthetic oligonucleotide
  Target: ATXN2; (-) strand; PAM type: YTN; PAM sequence: CTC
ccttctgtattattattatt

SEQ ID NO: 76742 - DNA, 20 bp, Artificial Sequence
  Description of Artificial Sequence: Synthetic oligonucleotide
  Target: ATXN2; (-) strand; PAM type: YTN; PAM sequence: TTC
tcccttctgtattattatta

SEQ ID NO: 76743 - DNA, 20 bp, Artificial Sequence
  Description of Artificial Sequence: Synthetic oligonucleotide
  Target: ATXN2; (-) strand; PAM type: YTN; PAM sequence: TTT
ctcccttctgtattattatt

SEQ ID NO: 76744 - DNA, 20 bp, Artificial Sequence
  Description of Artificial Sequence: Synthetic oligonucleotide
  Target: ATXN2; (-) strand; PAM type: YTN; PAM sequence: TTC
atttctcccttctgtattat

SEQ ID NO: 76745 - DNA, 20 bp, Artificial Sequence
  Description of Artificial Sequence: Synthetic oligonucleotide
  Target: ATXN2; (-) strand; PAM type: YTN; PAM sequence: TTA
caaccccattcatttctccc

SEQ ID NO: 76746 - DNA, 20 bp, Artificial Sequence
  Description of Artificial Sequence: Synthetic oligonucleotide
  Target: ATXN2; (-) strand; PAM type: YTN; PAM sequence: TTT
acaaccccattcatttctcc

SEQ ID NO: 76747 - DNA, 20 bp, Artificial Sequence
  Description of Artificial Sequence: Synthetic oligonucleotide
  Target: ATXN2; (-) strand; PAM type: YTN; PAM sequence: TTG
atttacaaccccattcattt

SEQ ID NO: 76748 - DNA, 20 bp, Artificial Sequence
  Description of Artificial Sequence: Synthetic oligonucleotide
  Target: ATXN2; (-) strand; PAM type: YTN; PAM sequence: TTT
gatttacaaccccattcatt

SEQ ID NO: 76749 - DNA, 20 bp, Artificial Sequence
  Description of Artificial Sequence: Synthetic oligonucleotide
  Target: ATXN2; (-) strand; PAM type: YTN; PAM sequence: TTG
tttgatttacaaccccattc

SEQ ID NO: 76750 - DNA, 20 bp, Artificial Sequence
  Description of Artificial Sequence: Synthetic oligonucleotide
  Target: ATXN2; (-) strand; PAM type: YTN; PAM sequence: CTT
gtttgatttacaaccccatt

SEQ ID NO: 76751 - DNA, 20 bp, Artificial Sequence
  Description of Artificial Sequence: Synthetic oligonucleotide
  Target: ATXN2; (-) strand; PAM type: YTN; PAM sequence: TTC
ttgtttgatttacaacccca

SEQ ID NO: 76752 - DNA, 20 bp, Artificial Sequence
  Description of Artificial Sequence: Synthetic oligonucleotide
  Target: ATXN2; (-) strand; PAM type: YTN; PAM sequence: CTC
ataccattcttgtttgattt

SEQ ID NO: 76753 - DNA, 20 bp, Artificial Sequence
  Description of Artificial Sequence: Synthetic oligonucleotide
  Target: ATXN2; (-) strand; PAM type: YTN; PAM sequence: TTA
tcagctcataccattcttgt

SEQ ID NO: 76754 - DNA, 20 bp, Artificial Sequence
  Description of Artificial Sequence: Synthetic oligonucleotide
  Target: ATXN2; (-) strand; PAM type: YTN; PAM sequence: TTA
atagttatcagctcatacca

SEQ ID NO: 76755 - DNA, 20 bp, Artificial Sequence
  Description of Artificial Sequence: Synthetic oligonucleotide
  Target: ATXN2; (-) strand; PAM type: YTN; PAM sequence: TTT
aatagttatcagctcatacc

SEQ ID NO: 76756 - DNA, 20 bp, Artificial Sequence
  Description of Artificial Sequence: Synthetic oligonucleotide
  Target: ATXN2; (-) strand; PAM type: YTN; PAM sequence: CTT
taatagttatcagctcatac

SEQ ID NO: 76757 - DNA, 20 bp, Artificial Sequence
  Description of Artificial Sequence: Synthetic oligonucleotide
  Target: ATXN2; (-) strand; PAM type: YTN; PAM sequence: CTA
tcacccagctttaatagtta

SEQ ID NO: 76758 - DNA, 20 bp, Artificial Sequence
  Description of Artificial Sequence: Synthetic oligonucleotide
  Target: ATXN2; (-) strand; PAM type: YTN; PAM sequence: CTG
cacacctatcacccagcttt

SEQ ID NO: 76759 - DNA, 20 bp, Artificial Sequence
  Description of Artificial Sequence: Synthetic oligonucleotide
  Target: ATXN2; (-) strand; PAM type: YTN; PAM sequence: TTG
tgtgaaagtagacagaatgg

SEQ ID NO: 76760 - DNA, 20 bp, Artificial Sequence
  Description of Artificial Sequence: Synthetic oligonucleotide
  Target: ATXN2; (-) strand; PAM type: YTN; PAM sequence: TTA
agggaaattgtgtgaaagta

SEQ ID NO: 76761 - DNA, 20 bp, Artificial Sequence
  Description of Artificial Sequence: Synthetic oligonucleotide
  Target: ATXN2; (-) strand; PAM type: YTN; PAM sequence: TTT
aagggaaattgtgtgaaagt

SEQ ID NO: 76762 - DNA, 20 bp, Artificial Sequence
  Description of Artificial Sequence: Synthetic oligonucleotide
  Target: ATXN2; (-) strand; PAM type: YTN; PAM sequence: TTT
taagggaaattgtgtgaaag

SEQ ID NO: 76763 - DNA, 20 bp, Artificial Sequence
  Description of Artificial Sequence: Synthetic oligonucleotide
  Target: ATXN2; (-) strand; PAM type: YTN; PAM sequence: TTT
ttaagggaaattgtgtgaaa

SEQ ID NO: 76764 - DNA, 20 bp, Artificial Sequence
  Description of Artificial Sequence: Synthetic oligonucleotide
  Target: ATXN2; (-) strand; PAM type: YTN; PAM sequence: TTT
tttaagggaaattgtgtgaa

SEQ ID NO: 76765 - DNA, 20 bp, Artificial Sequence
  Description of Artificial Sequence: Synthetic oligonucleotide
  Target: ATXN2; (-) strand; PAM type: YTN; PAM sequence: TTT
ttttaagggaaattgtgtga

SEQ ID NO: 76766 - DNA, 20 bp, Artificial Sequence
  Description of Artificial Sequence: Synthetic oligonucleotide
  Target: ATXN2; (-) strand; PAM type: YTN; PAM sequence: TTT
tttttaagggaaattgtgtg

SEQ ID NO: 76767 - DNA, 20 bp, Artificial Sequence
  Description of Artificial Sequence: Synthetic oligonucleotide
  Target: ATXN2; (-) strand; PAM type: YTN; PAM sequence: TTT
ttttttaagggaaattgtgt

SEQ ID NO: 76768 - DNA, 20 bp, Artificial Sequence
  Description of Artificial Sequence: Synthetic oligonucleotide
  Target: ATXN2; (-) strand; PAM type: YTN; PAM sequence: TTT
tttttttaagggaaattgtg

SEQ ID NO: 76769 - DNA, 20 bp, Artificial Sequence
  Description of Artificial Sequence: Synthetic oligonucleotide
  Target: ATXN2; (-) strand; PAM type: YTN; PAM sequence: TTT
ttttttttaagggaaattgt

SEQ ID NO: 76770 - DNA, 20 bp, Artificial Sequence
  Description of Artificial Sequence: Synthetic oligonucleotide
  Target: ATXN2; (-) strand; PAM type: YTN; PAM sequence: TTT
tttttttttaagggaaattg

SEQ ID NO: 76771 - DNA, 20 bp, Artificial Sequence
  Description of Artificial Sequence: Synthetic oligonucleotide
  Target: ATXN2; (-) strand; PAM type: YTN; PAM sequence: TTT
ttttttttttaagggaaatt

SEQ ID NO: 76772 - DNA, 20 bp, Artificial Sequence
  Description of Artificial Sequence: Synthetic oligonucleotide
  Target: ATXN2; (-) strand; PAM type: YTN; PAM sequence: TTT
tttttttttttaagggaaat

SEQ ID NO: 76773 - DNA, 20 bp, Artificial Sequence
  Description of Artificial Sequence: Synthetic oligonucleotide
  Target: ATXN2; (-) strand; PAM type: YTN; PAM sequence: CTT
ttttttttttttaagggaaa

SEQ ID NO: 76774 - DNA, 20 bp, Artificial Sequence
  Description of Artificial Sequence: Synthetic oligonucleotide
  Target: ATXN2; (-) strand; PAM type: YTN; PAM sequence: TTG
tatcacatcagaagcagaag

SEQ ID NO: 76775 - DNA, 20 bp, Artificial Sequence
  Description of Artificial Sequence: Synthetic oligonucleotide
  Target: ATXN2; (-) strand; PAM type: YTN; PAM sequence: CTA
ttgtatcacatcagaagcag

SEQ ID NO: 76776 - DNA, 20 bp, Artificial Sequence
  Description of Artificial Sequence: Synthetic oligonucleotide
  Target: ATXN2; (-) strand; PAM type: YTN; PAM sequence: CTA
tcctattgtatcacatcaga

SEQ ID NO: 76777 - DNA, 20 bp, Artificial Sequence
  Description of Artificial Sequence: Synthetic oligonucleotide
  Target: ATXN2; (-) strand; PAM type: YTN; PAM sequence: TTA
ggtctatcctattgtatcac

SEQ ID NO: 76778 - DNA, 20 bp, Artificial Sequence
  Description of Artificial Sequence: Synthetic oligonucleotide
  Target: ATXN2; (-) strand; PAM type: YTN; PAM sequence: TTG
attaggtctatcctattgta

SEQ ID NO: 76779 - DNA, 20 bp, Artificial Sequence
  Description of Artificial Sequence: Synthetic oligonucleotide
  Target: ATXN2; (-) strand; PAM type: YTN; PAM sequence: CTT
gattaggtctatcctattgt

SEQ ID NO: 76780 - DNA, 20 bp, Artificial Sequence
  Description of Artificial Sequence: Synthetic oligonucleotide
  Target: ATXN2; (-) strand; PAM type: YTN; PAM sequence: CTG
taaacttgattaggtctatc

SEQ ID NO: 76781 - DNA, 20 bp, Artificial Sequence
  Description of Artificial Sequence: Synthetic oligonucleotide
  Target: ATXN2; (-) strand; PAM type: YTN; PAM sequence: CTG
gtagatctgtaaacttgatt

SEQ ID NO: 76782 - DNA, 20 bp, Artificial Sequence
  Description of Artificial Sequence: Synthetic oligonucleotide
  Target: ATXN2; (-) strand; PAM type: YTN; PAM sequence: CTC
gtaaactggtagatctgtaa

SEQ ID NO: 76783 - DNA, 20 bp, Artificial Sequence
  Description of Artificial Sequence: Synthetic oligonucleotide
  Target: ATXN2; (-) strand; PAM type: YTN; PAM sequence: TTC
tcgtaaactggtagatctgt

SEQ ID NO: 76784 - DNA, 20 bp, Artificial Sequence
  Description of Artificial Sequence: Synthetic oligonucleotide
  Target: ATXN2; (-) strand; PAM type: YTN; PAM sequence: TTT
ctcgtaaactggtagatctg

SEQ ID NO: 76785 - DNA, 20 bp, Artificial Sequence
  Description of Artificial Sequence: Synthetic oligonucleotide
  Target: ATXN2; (-) strand; PAM type: YTN; PAM sequence: TTA
atgtttctcgtaaactggta

SEQ ID NO: 76786 - DNA, 20 bp, Artificial Sequence
  Description of Artificial Sequence: Synthetic oligonucleotide
  Target: ATXN2; (-) strand; PAM type: YTN; PAM sequence: CTT
aatgtttctcgtaaactggt

SEQ ID NO: 76787 - DNA, 20 bp, Artificial Sequence
  Description of Artificial Sequence: Synthetic oligonucleotide
  Target: ATXN2; (-) strand; PAM type: YTN; PAM sequence: TTC
catcttaatgtttctcgtaa

SEQ ID NO: 76788 - DNA, 20 bp, Artificial Sequence
  Description of Artificial Sequence: Synthetic oligonucleotide
  Target: ATXN2; (-) strand; PAM type: YTN; PAM sequence: CTT
ccatcttaatgtttctcgta

SEQ ID NO: 76789 - DNA, 20 bp, Artificial Sequence
  Description of Artificial Sequence: Synthetic oligonucleotide
  Target: ATXN2; (-) strand; PAM type: YTN; PAM sequence: TTC
ttccatcttaatgtttctcg

SEQ ID NO: 76790 - DNA, 20 bp, Artificial Sequence
  Description of Artificial Sequence: Synthetic oligonucleotide
  Target: ATXN2; (-) strand; PAM type: YTN; PAM sequence: TTA
atatattcttccatcttaat

SEQ ID NO: 76791 - DNA, 20 bp, Artificial Sequence
  Description of Artificial Sequence: Synthetic oligonucleotide
  Target: ATXN2; (-) strand; PAM type: YTN; PAM sequence: CTC
atggtatcagttaatatatt

SEQ ID NO: 76792 - DNA, 20 bp, Artificial Sequence
  Description of Artificial Sequence: Synthetic oligonucleotide
  Target: ATXN2; (-) strand; PAM type: YTN; PAM sequence: CTG
tgaggaacctcatggtatca

SEQ ID NO: 76793 - DNA, 20 bp, Artificial Sequence
  Description of Artificial Sequence: Synthetic oligonucleotide
  Target: ATXN2; (-) strand; PAM type: YTN; PAM sequence: TTA
aactgtgaggaacctcatgg

SEQ ID NO: 76794 - DNA, 20 bp, Artificial Sequence
  Description of Artificial Sequence: Synthetic oligonucleotide
  Target: ATXN2; (-) strand; PAM type: YTN; PAM sequence: TTT
aaactgtgaggaacctcatg

SEQ ID NO: 76795 - DNA, 20 bp, Artificial Sequence
  Description of Artificial Sequence: Synthetic oligonucleotide
  Target: ATXN2; (-) strand; PAM type: YTN; PAM sequence: CTG
gatttaaactgtgaggaacc

SEQ ID NO: 76796 - DNA, 20 bp, Artificial Sequence
  Description of Artificial Sequence: Synthetic oligonucleotide
  Target: ATXN2; (-) strand; PAM type: YTN; PAM sequence: TTC
tggatttaaactgtgaggaa

SEQ ID NO: 76797 - DNA, 20 bp, Artificial Sequence
  Description of Artificial Sequence: Synthetic oligonucleotide
  Target: ATXN2; (-) strand; PAM type: YTN; PAM sequence: CTG
cattctggatttaaactgtg

SEQ ID NO: 76798 - DNA, 20 bp, Artificial Sequence
  Description of Artificial Sequence: Synthetic oligonucleotide
  Target: ATXN2; (-) strand; PAM type: YTN; PAM sequence: TTA
ctgcattctggatttaaact

SEQ ID NO: 76799 - DNA, 20 bp, Artificial Sequence
  Description of Artificial Sequence: Synthetic oligonucleotide
  Target: ATXN2; (-) strand; PAM type: YTN; PAM sequence: TTT
actgcattctggatttaaac

SEQ ID NO: 76800 - DNA, 20 bp, Artificial Sequence
  Description of Artificial Sequence: Synthetic oligonucleotide
  Target: ATXN2; (-) strand; PAM type: YTN; PAM sequence: TTG
catttactgcattctggatt

SEQ ID NO: 76801 - DNA, 20 bp, Artificial Sequence
  Description of Artificial Sequence: Synthetic oligonucleotide
  Target: ATXN2; (-) strand; PAM type: YTN; PAM sequence: TTA
tgttgcatttactgcattct

SEQ ID NO: 76802 - DNA, 20 bp, Artificial Sequence
  Description of Artificial Sequence: Synthetic oligonucleotide
  Target: ATXN2; (-) strand; PAM type: YTN; PAM sequence: TTT
atgttgcatttactgcattc

SEQ ID NO: 76803 - DNA, 20 bp, Artificial Sequence
  Description of Artificial Sequence: Synthetic oligonucleotide
  Target: ATXN2; (-) strand; PAM type: YTN; PAM sequence: TTT
tatgttgcatttactgcatt

SEQ ID NO: 76804 - DNA, 20 bp, Artificial Sequence
  Description of Artificial Sequence: Synthetic oligonucleotide
  Target: ATXN2; (-) strand; PAM type: YTN; PAM sequence: TTT
ttatgttgcatttactgcat

SEQ ID NO: 76805 - DNA, 20 bp, Artificial Sequence
  Description of Artificial Sequence: Synthetic oligonucleotide
  Target: ATXN2; (-) strand; PAM type: YTN; PAM sequence: TTT
tttatgttgcatttactgca

SEQ ID NO: 76806 - DNA, 20 bp, Artificial Sequence
  Description of Artificial Sequence: Synthetic oligonucleotide
  Target: ATXN2; (-) strand; PAM type: YTN; PAM sequence: CTG
tcattttttatgttgcattt

SEQ ID NO: 76807 - DNA, 20 bp, Artificial Sequence
  Description of Artificial Sequence: Synthetic oligonucleotide
  Target: ATXN2; (-) strand; PAM type: YTN; PAM sequence: CTC
agaaaaaaaaaaaaacaaaa

SEQ ID NO: 76808 - DNA, 20 bp, Artificial Sequence
  Description of Artificial Sequence: Synthetic oligonucleotide
  Target: ATXN2; (-) strand; PAM type: YTN; PAM sequence: CTG
tctcagaaaaaaaaaaaaac

SEQ ID NO: 76809 - DNA, 20 bp, Artificial Sequence
  Description of Artificial Sequence: Synthetic oligonucleotide
  Target: ATXN2; (-) strand; PAM type: YTN; PAM sequence: CTC
tgtctcagaaaaaaaaaaaa

SEQ ID NO: 76810 - DNA, 20 bp, Artificial Sequence
  Description of Artificial Sequence: Synthetic oligonucleotide
  Target: ATXN2; (-) strand; PAM type: YTN; PAM sequence: CTG
gcgacagagtgagactctgt

SEQ ID NO: 76811 - DNA, 20 bp, Artificial Sequence
  Description of Artificial Sequence: Synthetic oligonucleotide
  Target: ATXN2; (-) strand; PAM type: YTN; PAM sequence: CTC
cagcctggcgacagagtgag

SEQ ID NO: 76812 - DNA, 20 bp, Artificial Sequence
  Description of Artificial Sequence: Synthetic oligonucleotide
  Target: ATXN2; (-) strand; PAM type: YTN; PAM sequence: CTG
cactccagcctggcgacaga

SEQ ID NO: 76813 - DNA, 20 bp, Artificial Sequence
  Description of Artificial Sequence: Synthetic oligonucleotide
  Target: ATXN2; (-) strand; PAM type: YTN; PAM sequence: TTG
cagtgagccaagatcgtgcc

SEQ ID NO: 76814 - DNA, 20 bp, Artificial Sequence
  Description of Artificial Sequence: Synthetic oligonucleotide
  Target: ATXN2; (-) strand; PAM type: YTN; PAM sequence: CTG
ggaggcggaggttgcagtga

SEQ ID NO: 76815 - DNA, 20 bp, Artificial Sequence
  Description of Artificial Sequence: Synthetic oligonucleotide
  Target: ATXN2; (-) strand; PAM type: YTN; PAM sequence: CTA
cctgggaggcggaggttgca

SEQ ID NO: 76816 - DNA, 20 bp, Artificial Sequence
  Description of Artificial Sequence: Synthetic oligonucleotide
  Target: ATXN2; (-) strand; PAM type: YTN; PAM sequence: CTA
gctacctgggaggcggaggt

SEQ ID NO: 76817 - DNA, 20 bp, Artificial Sequence
  Description of Artificial Sequence: Synthetic oligonucleotide
  Target: ATXN2; (-) strand; PAM type: YTN; PAM sequence: CTG
tagtcctagctacctgggag

SEQ ID NO: 76818 - DNA, 20 bp, Artificial Sequence
  Description of Artificial Sequence: Synthetic oligonucleotide
  Target: ATXN2; (-) strand; PAM type: YTN; PAM sequence: CTG
ggcatggtgacgcgtacctg

SEQ ID NO: 76819 - DNA, 20 bp, Artificial Sequence
  Description of Artificial Sequence: Synthetic oligonucleotide
  Target: ATXN2; (-) strand; PAM type: YTN; PAM sequence: TTA
tctgggcatggtgacgcgta

SEQ ID NO: 76820 - DNA, 20 bp, Artificial Sequence
  Description of Artificial Sequence: Synthetic oligonucleotide
  Target: ATXN2; (-) strand; PAM type: YTN; PAM sequence: CTA
agaatacaaaaattatctgg

SEQ ID NO: 76821 - DNA, 20 bp, Artificial Sequence
  Description of Artificial Sequence: Synthetic oligonucleotide
  Target: ATXN2; (-) strand; PAM type: YTN; PAM sequence: CTA
ctaagaatacaaaaattatc

SEQ ID NO: 76822 - DNA, 20 bp, Artificial Sequence
  Description of Artificial Sequence: Synthetic oligonucleotide
  Target: ATXN2; (-) strand; PAM type: YTN; PAM sequence: CTC
tactaagaatacaaaaatta

SEQ ID NO: 76823 - DNA, 20 bp, Artificial Sequence
  Description of Artificial Sequence: Synthetic oligonucleotide
  Target: ATXN2; (-) strand; PAM type: YTN; PAM sequence: CTG
gccaacatggtgaaaccccg

SEQ ID NO: 76824 - DNA, 20 bp, Artificial Sequence
  Description of Artificial Sequence: Synthetic oligonucleotide
  Target: ATXN2; (-) strand; PAM type: YTN; PAM sequence: TTA
agagatcaagaccatcctgg

SEQ ID NO: 76825 - DNA, 20 bp, Artificial Sequence
  Description of Artificial Sequence: Synthetic oligonucleotide
  Target: ATXN2; (-) strand; PAM type: YTN; PAM sequence: CTG
aggtgggtggatcacaaggt

SEQ ID NO: 76826 - DNA, 20 bp, Artificial Sequence
  Description of Artificial Sequence: Synthetic oligonucleotide
  Target: ATXN2; (-) strand; PAM type: YTN; PAM sequence: TTG
ggaggctgaggtgggtggat

SEQ ID NO: 76827 - DNA, 20 bp, Artificial Sequence
  Description of Artificial Sequence: Synthetic oligonucleotide
  Target: ATXN2; (-) strand; PAM type: YTN; PAM sequence: TTT
gggaggctgaggtgggtgga

SEQ ID NO: 76828 - DNA, 20 bp, Artificial Sequence
  Description of Artificial Sequence: Synthetic oligonucleotide
  Target: ATXN2; (-) strand; PAM type: YTN; PAM sequence: CTT
tgggaggctgaggtgggtgg

SEQ ID NO: 76829 - DNA, 20 bp, Artificial Sequence
  Description of Artificial Sequence: Synthetic oligonucleotide
  Target: ATXN2; (-) strand; PAM type: YTN; PAM sequence: CTG
taatcccagcactttgggag

SEQ ID NO: 76830 - DNA, 20 bp, Artificial Sequence
  Description of Artificial Sequence: Synthetic oligonucleotide
  Target: ATXN2; (-) strand; PAM type: YTN; PAM sequence: CTC
acgcctgtaatcccagcact

SEQ ID NO: 76831 - DNA, 20 bp, Artificial Sequence
  Description of Artificial Sequence: Synthetic oligonucleotide
  Target: ATXN2; (-) strand; PAM type: YTN; PAM sequence: TTG
gccgggcgtggtagctcacg

SEQ ID NO: 76832 - DNA, 20 bp, Artificial Sequence
  Description of Artificial Sequence: Synthetic oligonucleotide
  Target: ATXN2; (-) strand; PAM type: YTN; PAM sequence: TTT
ggccgggcgtggtagctcac

SEQ ID NO: 76833 - DNA, 20 bp, Artificial Sequence
  Description of Artificial Sequence: Synthetic oligonucleotide
  Target: ATXN2; (-) strand; PAM type: YTN; PAM sequence: CTT
tggccgggcgtggtagctca

SEQ ID NO: 76834 - DNA, 20 bp, Artificial Sequence
  Description of Artificial Sequence: Synthetic oligonucleotide
  Target: ATXN2; (-) strand; PAM type: YTN; PAM sequence: TTA
aaccgtcatctttggccggg

SEQ ID NO: 76835 - DNA, 20 bp, Artificial Sequence
  Description of Artificial Sequence: Synthetic oligonucleotide
  Target: ATXN2; (-) strand; PAM type: YTN; PAM sequence: TTG
ttaaaccgtcatctttggcc

SEQ ID NO: 76836 - DNA, 20 bp, Artificial Sequence
  Description of Artificial Sequence: Synthetic oligonucleotide
  Target: ATXN2; (-) strand; PAM type: YTN; PAM sequence: TTT
gttaaaccgtcatctttggc

SEQ ID NO: 76837 - DNA, 20 bp, Artificial Sequence
  Description of Artificial Sequence: Synthetic oligonucleotide
  Target: ATXN2; (-) strand; PAM type: YTN; PAM sequence: TTA
tttgttaaaccgtcatcttt

SEQ ID NO: 76838 - DNA, 20 bp, Artificial Sequence
  Description of Artificial Sequence: Synthetic oligonucleotide
  Target: ATXN2; (-) strand; PAM type: YTN; PAM sequence: TTT
atttgttaaaccgtcatctt

SEQ ID NO: 76839 - DNA, 20 bp, Artificial Sequence
  Description of Artificial Sequence: Synthetic oligonucleotide
  Target: ATXN2; (-) strand; PAM type: YTN; PAM sequence: TTG
tcccatgtgatttatttgtt

SEQ ID NO: 76840 - DNA, 20 bp, Artificial Sequence
  Description of Artificial Sequence: Synthetic oligonucleotide
  Target: ATXN2; (-) strand; PAM type: YTN; PAM sequence: TTT
gtcccatgtgatttatttgt

SEQ ID NO: 76841 - DNA, 20 bp, Artificial Sequence
  Description of Artificial Sequence: Synthetic oligonucleotide
  Target: ATXN2; (-) strand; PAM type: YTN; PAM sequence: TTT
tgtcccatgtgatttatttg

SEQ ID NO: 76842 - DNA, 20 bp, Artificial Sequence
  Description of Artificial Sequence: Synthetic oligonucleotide
  Target: ATXN2; (-) strand; PAM type: YTN; PAM sequence: TTT
ttgtcccatgtgatttattt

SEQ ID NO: 76843 - DNA, 20 bp, Artificial Sequence
  Description of Artificial Sequence: Synthetic oligonucleotide
  Target: ATXN2; (-) strand; PAM type: YTN; PAM sequence: CTA
tgatgtttttgtcccatgtg

SEQ ID NO: 76844 - DNA, 20 bp, Artificial Sequence
  Description of Artificial Sequence: Synthetic oligonucleotide
  Target: ATXN2; (-) strand; PAM type: YTN; PAM sequence: CTC
ctatgatgtttttgtcccat

SEQ ID NO: 76845 - DNA, 20 bp, Artificial Sequence
  Description of Artificial Sequence: Synthetic oligonucleotide
  Target: ATXN2; (-) strand; PAM type: YTN; PAM sequence: CTC
ctcctatgatgtttttgtcc

SEQ ID NO: 76846 - DNA, 20 bp, Artificial Sequence
  Description of Artificial Sequence: Synthetic oligonucleotide
  Target: ATXN2; (-) strand; PAM type: YTN; PAM sequence: TTC
tcctcctatgatgtttttgt

SEQ ID NO: 76847 - DNA, 20 bp, Artificial Sequence
  Description of Artificial Sequence: Synthetic oligonucleotide
  Target: ATXN2; (-) strand; PAM type: YTN; PAM sequence: TTC
ataagttctcctcctatgat

SEQ ID NO: 76848 - DNA, 20 bp, Artificial Sequence
  Description of Artificial Sequence: Synthetic oligonucleotide
  Target: ATXN2; (-) strand; PAM type: YTN; PAM sequence: TTA
aaattcataagttctcctcc

SEQ ID NO: 76849 - DNA, 20 bp, Artificial Sequence
  Description of Artificial Sequence: Synthetic oligonucleotide
  Target: ATXN2; (-) strand; PAM type: YTN; PAM sequence: TTT
aaaattcataagttctcctc

SEQ ID NO: 76850 - DNA, 20 bp, Artificial Sequence
  Description of Artificial Sequence: Synthetic oligonucleotide
  Target: ATXN2; (-) strand; PAM type: YTN; PAM sequence: TTT
taaaattcataagttctcct

SEQ ID NO: 76851 - DNA, 20 bp, Artificial Sequence
  Description of Artificial Sequence: Synthetic oligonucleotide
  Target: ATXN2; (-) strand; PAM type: YTN; PAM sequence: TTA
tatgtattttaaaattcata

SEQ ID NO: 76852 - DNA, 20 bp, Artificial Sequence
  Description of Artificial Sequence: Synthetic oligonucleotide
  Target: ATXN2; (-) strand; PAM type: YTN; PAM sequence: TTT
atatgtattttaaaattcat

SEQ ID NO: 76853 - DNA, 20 bp, Artificial Sequence
  Description of Artificial Sequence: Synthetic oligonucleotide
  Target: ATXN2; (-) strand; PAM type: YTN; PAM sequence: TTT
tatatgtattttaaaattca

SEQ ID NO: 76854 - DNA, 20 bp, Artificial Sequence
  Description of Artificial Sequence: Synthetic oligonucleotide
  Target: ATXN2; (-) strand; PAM type: YTN; PAM sequence: CTT
ttatatgtattttaaaattc

SEQ ID NO: 76855 - DNA, 20 bp, Artificial Sequence
  Description of Artificial Sequence: Synthetic oligonucleotide
  Target: ATXN2; (-) strand; PAM type: YTN; PAM sequence: TTG
cttttatatgtattttaaaa

SEQ ID NO: 76856 - DNA, 20 bp, Artificial Sequence
  Description of Artificial Sequence: Synthetic oligonucleotide
  Target: ATXN2; (-) strand; PAM type: YTN; PAM sequence: CTA
tgcattgcttttatatgtat

SEQ ID NO: 76857 - DNA, 20 bp, Artificial Sequence
  Description of Artificial Sequence: Synthetic oligonucleotide
  Target: ATXN2; (-) strand; PAM type: YTN; PAM sequence: CTG
gcctatgcattgcttttata

SEQ ID NO: 76858 - DNA, 20 bp, Artificial Sequence
  Description of Artificial Sequence: Synthetic oligonucleotide
  Target: ATXN2; (-) strand; PAM type: YTN; PAM sequence: TTA
gccaccacacctggcctatg

SEQ ID NO: 76859 - DNA, 20 bp, Artificial Sequence
  Description of Artificial Sequence: Synthetic oligonucleotide
  Target: ATXN2; (-) strand; PAM type: YTN; PAM sequence: CTT
agccaccacacctggcctat

SEQ ID NO: 76860 - DNA, 20 bp, Artificial Sequence
  Description of Artificial Sequence: Synthetic oligonucleotide
  Target: ATXN2; (-) strand; PAM type: YTN; PAM sequence: TTA
caggccttagccaccacacc

SEQ ID NO: 76861 - DNA, 20 bp, Artificial Sequence
  Description of Artificial Sequence: Synthetic oligonucleotide
  Target: ATXN2; (-) strand; PAM type: YTN; PAM sequence: CTG
ggattacaggccttagccac

SEQ ID NO: 76862 - DNA, 20 bp, Artificial Sequence
  Description of Artificial Sequence: Synthetic oligonucleotide
  Target: ATXN2; (-) strand; PAM type: YTN; PAM sequence: CTC
ccaaagtgctgggattacag

SEQ ID NO: 76863 - DNA, 20 bp, Artificial Sequence
  Description of Artificial Sequence: Synthetic oligonucleotide
  Target: ATXN2; (-) strand; PAM type: YTN; PAM sequence: CTC
ggcctcccaaagtgctggga

SEQ ID NO: 76864 - DNA, 20 bp, Artificial Sequence
  Description of Artificial Sequence: Synthetic oligonucleotide
  Target: ATXN2; (-) strand; PAM type: YTN; PAM sequence: CTC
gtgatccacccacctcggcc

SEQ ID NO: 76865 - DNA, 20 bp, Artificial Sequence
  Description of Artificial Sequence: Synthetic oligonucleotide
  Target: ATXN2; (-) strand; PAM type: YTN; PAM sequence: CTG
agctcgtgatccacccacct

SEQ ID NO: 76866 - DNA, 20 bp, Artificial Sequence
  Description of Artificial Sequence: Synthetic oligonucleotide
  Target: ATXN2; (-) strand; PAM type: YTN; PAM sequence: TTC
tgagctcgtgatccacccac

SEQ ID NO: 76867 - DNA, 20 bp, Artificial Sequence
  Description of Artificial Sequence: Synthetic oligonucleotide
  Target: ATXN2; (-) strand; PAM type: YTN; PAM sequence: CTT
ctgagctcgtgatccaccca

SEQ ID NO: 76868 - DNA, 20 bp, Artificial Sequence
  Description of Artificial Sequence: Synthetic oligonucleotide
  Target: ATXN2; (-) strand; PAM type: YTN; PAM sequence: TTG
aacttctgagctcgtgatcc

SEQ ID NO: 76869 - DNA, 20 bp, Artificial Sequence
  Description of Artificial Sequence: Synthetic oligonucleotide
  Target: ATXN2; (-) strand; PAM type: YTN; PAM sequence: CTT
gaacttctgagctcgtgatc

SEQ ID NO: 76870 - DNA, 20 bp, Artificial Sequence
  Description of Artificial Sequence: Synthetic oligonucleotide
  Target: ATXN2; (-) strand; PAM type: YTN; PAM sequence: CTG
gtcttgaacttctgagctcg

SEQ ID NO: 76871 - DNA, 20 bp, Artificial Sequence
  Description of Artificial Sequence: Synthetic oligonucleotide
  Target: ATXN2; (-) strand; PAM type: YTN; PAM sequence: TTG
gtcaggctggtcttgaactt

SEQ ID NO: 76872 - DNA, 20 bp, Artificial Sequence
  Description of Artificial Sequence: Synthetic oligonucleotide
  Target: ATXN2; (-) strand; PAM type: YTN; PAM sequence: TTC
accatattggtcaggctggt

SEQ ID NO: 76873 - DNA, 20 bp, Artificial Sequence
  Description of Artificial Sequence: Synthetic oligonucleotide
  Target: ATXN2; (-) strand; PAM type: YTN; PAM sequence: TTT
caccatattggtcaggctgg

SEQ ID NO: 76874 - DNA, 20 bp, Artificial Sequence
  Description of Artificial Sequence: Synthetic oligonucleotide
  Target: ATXN2; (-) strand; PAM type: YTN; PAM sequence: TTA
gtagaaacggggtttcacca

SEQ ID NO: 76875 - DNA, 20 bp, Artificial Sequence
  Description of Artificial Sequence: Synthetic oligonucleotide
  Target: ATXN2; (-) strand; PAM type: YTN; PAM sequence: TTT
agtagaaacggggtttcacc

SEQ ID NO: 76876 - DNA, 20 bp, Artificial Sequence
  Description of Artificial Sequence: Synthetic oligonucleotide
  Target: ATXN2; (-) strand; PAM type: YTN; PAM sequence: TTT
tagtagaaacggggtttcac

SEQ ID NO: 76877 - DNA, 20 bp, Artificial Sequence
  Description of Artificial Sequence: Synthetic oligonucleotide
  Target: ATXN2; (-) strand; PAM type: YTN; PAM sequence: TTT
ttagtagaaacggggtttca

SEQ ID NO: 76878 - DNA, 20 bp, Artificial Sequence
  Description of Artificial Sequence: Synthetic oligonucleotide
  Target: ATXN2; (-) strand; PAM type: YTN; PAM sequence: CTA
tttttagtagaaacggggtt

SEQ ID NO: 76879 - DNA, 20 bp, Artificial Sequence
  Description of Artificial Sequence: Synthetic oligonucleotide
  Target: ATXN2; (-) strand; PAM type: YTN; PAM sequence: TTC
tatttttagtagaaacgggg

SEQ ID NO: 76880 - DNA, 20 bp, Artificial Sequence
  Description of Artificial Sequence: Synthetic oligonucleotide
  Target: ATXN2; (-) strand; PAM type: YTN; PAM sequence: TTT
ctatttttagtagaaacggg

SEQ ID NO: 76881 - DNA, 20 bp, Artificial Sequence
  Description of Artificial Sequence: Synthetic oligonucleotide
  Target: ATXN2; (-) strand; PAM type: YTN; PAM sequence: TTT
tctatttttagtagaaacgg

SEQ ID NO: 76882 - DNA, 20 bp, Artificial Sequence
  Description of Artificial Sequence: Synthetic oligonucleotide
  Target: ATXN2; (-) strand; PAM type: YTN; PAM sequence: TTT
ttctatttttagtagaaacg

SEQ ID NO: 76883 - DNA, 20 bp, Artificial Sequence
  Description of Artificial Sequence: Synthetic oligonucleotide
  Target: ATXN2; (-) strand; PAM type: YTN; PAM sequence: CTA
atttttctatttttagtaga

SEQ ID NO: 76884 - DNA, 20 bp, Artificial Sequence
  Description of Artificial Sequence: Synthetic oligonucleotide
  Target: ATXN2; (-) strand; PAM type: YTN; PAM sequence: CTG
gctaatttttctatttttag

SEQ ID NO: 76885 - DNA, 20 bp, Artificial Sequence
  Description of Artificial Sequence: Synthetic oligonucleotide
  Target: ATXN2; (-) strand; PAM type: YTN; PAM sequence: TTA
caggtgtgcaccaccacgcc

SEQ ID NO: 76886 - DNA, 20 bp, Artificial Sequence
  Description of Artificial Sequence: Synthetic oligonucleotide
  Target: ATXN2; (-) strand; PAM type: YTN; PAM sequence: CTG
ggattacaggtgtgcaccac

SEQ ID NO: 76887 - DNA, 20 bp, Artificial Sequence
  Description of Artificial Sequence: Synthetic oligonucleotide
  Target: ATXN2; (-) strand; PAM type: YTN; PAM sequence: CTC
cccaaatatctgggattaca

SEQ ID NO: 76888 - DNA, 20 bp, Artificial Sequence
  Description of Artificial Sequence: Synthetic oligonucleotide
  Target: ATXN2; (-) strand; PAM type: YTN; PAM sequence: CTC
agcctccccaaatatctggg

SEQ ID NO: 76889 - DNA, 20 bp, Artificial Sequence
  Description of Artificial Sequence: Synthetic oligonucleotide
  Target: ATXN2; (-) strand; PAM type: YTN; PAM sequence: CTG
gtctcagcctccccaaatat

SEQ ID NO: 76890 - DNA, 20 bp, Artificial Sequence
  Description of Artificial Sequence: Synthetic oligonucleotide
  Target: ATXN2; (-) strand; PAM type: YTN; PAM sequence: CTC
tggtctcagcctccccaaat

SEQ ID NO: 76891 - DNA, 20 bp, Artificial Sequence
  Description of Artificial Sequence: Synthetic oligonucleotide
  Target: ATXN2; (-) strand; PAM type: YTN; PAM sequence: TTC
tctggtctcagcctccccaa

SEQ ID NO: 76892 - DNA, 20 bp, Artificial Sequence
  Description of Artificial Sequence: Synthetic oligonucleotide
  Target: ATXN2; (-) strand; PAM type: YTN; PAM sequence: TTC
aagtgattctctggtctcag

SEQ ID NO: 76893 - DNA, 20 bp, Artificial Sequence
  Description of Artificial Sequence: Synthetic oligonucleotide
  Target: ATXN2; (-) strand; PAM type: YTN; PAM sequence: TTC
ccgggttcaagtgattctct

SEQ ID NO: 76894 - DNA, 20 bp, Artificial Sequence
  Description of Artificial Sequence: Synthetic oligonucleotide
  Target: ATXN2; (-) strand; PAM type: YTN; PAM sequence: CTT
cccgggttcaagtgattctc

SEQ ID NO: 76895 - DNA, 20 bp, Artificial Sequence
  Description of Artificial Sequence: Synthetic oligonucleotide
  Target: ATXN2; (-) strand; PAM type: YTN; PAM sequence: CTC
cacttcccgggttcaagtga

SEQ ID NO: 76896 - DNA, 20 bp, Artificial Sequence
  Description of Artificial Sequence: Synthetic oligonucleotide
  Target: ATXN2; (-) strand; PAM type: YTN; PAM sequence: CTG
gaacctccacttcccgggtt

SEQ ID NO: 76897 - DNA, 20 bp, Artificial Sequence
  Description of Artificial Sequence: Synthetic oligonucleotide
  Target: ATXN2; (-) strand; PAM type: YTN; PAM sequence: CTC
actggaacctccacttcccg

SEQ ID NO: 76898 - DNA, 20 bp, Artificial Sequence
  Description of Artificial Sequence: Synthetic oligonucleotide
  Target: ATXN2; (-) strand; PAM type: YTN; PAM sequence: CTC
ggctcactggaacctccact

SEQ ID NO: 76899 - DNA, 20 bp, Artificial Sequence
  Description of Artificial Sequence: Synthetic oligonucleotide
  Target: ATXN2; (-) strand; PAM type: YTN; PAM sequence: CTG
gagtgcagtggcacgatctc

SEQ ID NO: 76900 - DNA, 20 bp, Artificial Sequence
  Description of Artificial Sequence: Synthetic oligonucleotide
  Target: ATXN2; (-) strand; PAM type: YTN; PAM sequence: CTG
tcgcccaggctggagtgcag

SEQ ID NO: 76901 - DNA, 20 bp, Artificial Sequence
  Description of Artificial Sequence: Synthetic oligonucleotide
  Target: ATXN2; (-) strand; PAM type: YTN; PAM sequence: CTC
tgtcgcccaggctggagtgc

SEQ ID NO: 76902 - DNA, 20 bp, Artificial Sequence
  Description of Artificial Sequence: Synthetic oligonucleotide
  Target: ATXN2; (-) strand; PAM type: YTN; PAM sequence: TTG
ctctgtcgcccaggctggag

SEQ ID NO: 76903 - DNA, 20 bp, Artificial Sequence
  Description of Artificial Sequence: Synthetic oligonucleotide
  Target: ATXN2; (-) strand; PAM type: YTN; PAM sequence: CTT
gctctgtcgcccaggctgga

SEQ ID NO: 76904 - DNA, 20 bp, Artificial Sequence
  Description of Artificial Sequence: Synthetic oligonucleotide
  Target: ATXN2; (-) strand; PAM type: YTN; PAM sequence: TTG
agatagtcttgctctgtcgc

SEQ ID NO: 76905 - DNA, 20 bp, Artificial Sequence
  Description of Artificial Sequence: Synthetic oligonucleotide
  Target: ATXN2; (-) strand; PAM type: YTN; PAM sequence: TTT
gagatagtcttgctctgtcg

SEQ ID NO: 76906 - DNA, 20 bp, Artificial Sequence
  Description of Artificial Sequence: Synthetic oligonucleotide
  Target: ATXN2; (-) strand; PAM type: YTN; PAM sequence: TTT
tgagatagtcttgctctgtc

SEQ ID NO: 76907 - DNA, 20 bp, Artificial Sequence
  Description of Artificial Sequence: Synthetic oligonucleotide
  Target: ATXN2; (-) strand; PAM type: YTN; PAM sequence: TTT
ttgagatagtcttgctctgt

SEQ ID NO: 76908 - DNA, 20 bp, Artificial Sequence
  Description of Artificial Sequence: Synthetic oligonucleotide
  Target: ATXN2; (-) strand; PAM type: YTN; PAM sequence: TTT
tttgagatagtcttgctctg

SEQ ID NO: 76909 - DNA, 20 bp, Artificial Sequence
  Description of Artificial Sequence: Synthetic oligonucleotide
  Target: ATXN2; (-) strand; PAM type: YTN; PAM sequence: TTG
ttttttgagatagtcttgct

SEQ ID NO: 76910 - DNA, 20 bp, Artificial Sequence
  Description of Artificial Sequence: Synthetic oligonucleotide
  Target: ATXN2; (-) strand; PAM type: YTN; PAM sequence: TTT
gttttttgagatagtcttgc

SEQ ID NO: 76911 - DNA, 20 bp, Artificial Sequence
  Description of Artificial Sequence: Synthetic oligonucleotide
  Target: ATXN2; (-) strand; PAM type: YTN; PAM sequence: TTT
tgttttttgagatagtcttg

SEQ ID NO: 76912 - DNA, 20 bp, Artificial Sequence
  Description of Artificial Sequence: Synthetic oligonucleotide
  Target: ATXN2; (-) strand; PAM type: YTN; PAM sequence: TTT
ttgttttttgagatagtctt

SEQ ID NO: 76913 - DNA, 20 bp, Artificial Sequence
  Description of Artificial Sequence: Synthetic oligonucleotide
  Target: ATXN2; (-) strand; PAM type: YTN; PAM sequence: TTT
tttgttttttgagatagtct

SEQ ID NO: 76914 - DNA, 20 bp, Artificial Sequence
  Description of Artificial Sequence: Synthetic oligonucleotide
  Target: ATXN2; (-) strand; PAM type: YTN; PAM sequence: TTT
ttttgttttttgagatagtc

SEQ ID NO: 76915 - DNA, 20 bp, Artificial Sequence
  Description of Artificial Sequence: Synthetic oligonucleotide
  Target: ATXN2; (-) strand; PAM type: YTN; PAM sequence: TTT
tttttgttttttgagatagt

SEQ ID NO: 76916 - DNA, 20 bp, Artificial Sequence
  Description of Artificial Sequence: Synthetic oligonucleotide
  Target: ATXN2; (-) strand; PAM type: YTN; PAM sequence: TTT
ttttttgttttttgagatag

SEQ ID NO: 76917 - DNA, 20 bp, Artificial Sequence
  Description of Artificial Sequence: Synthetic oligonucleotide
  Target: ATXN2; (-) strand; PAM type: YTN; PAM sequence: TTT
tttttttgttttttgagata

SEQ ID NO: 76918 - DNA, 20 bp, Artificial Sequence
  Description of Artificial Sequence: Synthetic oligonucleotide
  Target: ATXN2; (-) strand; PAM type: YTN; PAM sequence: TTT
ttttttttgttttttgagat

SEQ ID NO: 76919 - DNA, 20 bp, Artificial Sequence
  Description of Artificial Sequence: Synthetic oligonucleotide
  Target: ATXN2; (-) strand; PAM type: YTN; PAM sequence: TTT
tttttttttgttttttgaga

SEQ ID NO: 76920 - DNA, 20 bp, Artificial Sequence
  Description of Artificial Sequence: Synthetic oligonucleotide
  Target: ATXN2; (-) strand; PAM type: YTN; PAM sequence: TTT
ttttttttttgttttttgag

SEQ ID NO: 76921 - DNA, 20 bp, Artificial Sequence
  Description of Artificial Sequence: Synthetic oligonucleotide
  Target: ATXN2; (-) strand; PAM type: YTN; PAM sequence: TTG
tagtttttttttttttgttt

SEQ ID NO: 76922 - DNA, 20 bp, Artificial Sequence
  Description of Artificial Sequence: Synthetic oligonucleotide
  Target: ATXN2; (-) strand; PAM type: YTN; PAM sequence: TTT
gtagtttttttttttttgtt

SEQ ID NO: 76923 - DNA, 20 bp, Artificial Sequence
  Description of Artificial Sequence: Synthetic oligonucleotide
  Target: ATXN2; (-) strand; PAM type: YTN; PAM sequence: TTT
tgtagtttttttttttttgt

SEQ ID NO: 76924 - DNA, 20 bp, Artificial Sequence
  Description of Artificial Sequence: Synthetic oligonucleotide
  Target: ATXN2; (-) strand; PAM type: YTN; PAM sequence: TTT
ttgtagtttttttttttttg

SEQ ID NO: 76925 - DNA, 20 bp, Artificial Sequence
  Description of Artificial Sequence: Synthetic oligonucleotide
  Target: ATXN2; (-) strand; PAM type: YTN; PAM sequence: TTT
tttgtagttttttttttttt

SEQ ID NO: 76926 - DNA, 20 bp, Artificial Sequence
  Description of Artificial Sequence: Synthetic oligonucleotide
  Target: ATXN2; (-) strand; PAM type: YTN; PAM sequence: TTT
ttttgtagtttttttttttt

SEQ ID NO: 76927 - DNA, 20 bp, Artificial Sequence
  Description of Artificial Sequence: Synthetic oligonucleotide
  Target: ATXN2; (-) strand; PAM type: YTN; PAM sequence: TTT
tttttgtagttttttttttt

SEQ ID NO: 76928 - DNA, 20 bp, Artificial Sequence
  Description of Artificial Sequence: Synthetic oligonucleotide
  Target: ATXN2; (-) strand; PAM type: YTN; PAM sequence: TTT
ttttttgtagtttttttttt

SEQ ID NO: 76929 - DNA, 20 bp, Artificial Sequence
  Description of Artificial Sequence: Synthetic oligonucleotide
  Target: ATXN2; (-) strand; PAM type: YTN; PAM sequence: TTT
tttttttgtagttttttttt

SEQ ID NO: 76930 - DNA, 20 bp, Artificial Sequence
  Description of Artificial Sequence: Synthetic oligonucleotide
  Target: ATXN2; (-) strand; PAM type: YTN; PAM sequence: TTT
ttttttttgtagtttttttt

SEQ ID NO: 76931 - DNA, 20 bp, Artificial Sequence
  Description of Artificial Sequence: Synthetic oligonucleotide
  Target: ATXN2; (-) strand; PAM type: YTN; PAM sequence: TTT
tttttttttgtagttttttt

SEQ ID NO: 76932 - DNA, 20 bp, Artificial Sequence
  Description of Artificial Sequence: Synthetic oligonucleotide
  Target: ATXN2; (-) strand; PAM type: YTN; PAM sequence: TTA
agtgttttttttttttgtag

SEQ ID NO: 76933 - DNA, 20 bp, Artificial Sequence
  Description of Artificial Sequence: Synthetic oligonucleotide
  Target: ATXN2; (-) strand; PAM type: YTN; PAM sequence: TTA
agtgtattaagtgttttttt

SEQ ID NO: 76934 - DNA, 20 bp, Artificial Sequence
  Description of Artificial Sequence: Synthetic oligonucleotide
  Target: ATXN2; (-) strand; PAM type: YTN; PAM sequence: TTT
aagtgtattaagtgtttttt

SEQ ID NO: 76935 - DNA, 20 bp, Artificial Sequence
  Description of Artificial Sequence: Synthetic oligonucleotide
  Target: ATXN2; (-) strand; PAM type: YTN; PAM sequence: TTT
taagtgtattaagtgttttt

SEQ ID NO: 76936 - DNA, 20 bp, Artificial Sequence
  Description of Artificial Sequence: Synthetic oligonucleotide
  Target: ATXN2; (-) strand; PAM type: YTN; PAM sequence: TTA
acaattttaagtgtattaag

SEQ ID NO: 76937 - DNA, 20 bp, Artificial Sequence
  Description of Artificial Sequence: Synthetic oligonucleotide
  Target: ATXN2; (-) strand; PAM type: YTN; PAM sequence: TTT
aacaattttaagtgtattaa

SEQ ID NO: 76938 - DNA, 20 bp, Artificial Sequence
  Description of Artificial Sequence: Synthetic oligonucleotide
  Target: ATXN2; (-) strand; PAM type: YTN; PAM sequence: TTT
taacaattttaagtgtatta

SEQ ID NO: 76939 - DNA, 20 bp, Artificial Sequence
  Description of Artificial Sequence: Synthetic oligonucleotide
  Target: ATXN2; (-) strand; PAM type: YTN; PAM sequence: TTA
tggtgcaatataagtaatat

SEQ ID NO: 76940 - DNA, 20 bp, Artificial Sequence
  Description of Artificial Sequence: Synthetic oligonucleotide
  Target: ATXN2; (-) strand; PAM type: YTN; PAM sequence: CTA
aattatggtgcaatataagt

SEQ ID NO: 76941 - DNA, 20 bp, Artificial Sequence
  Description of Artificial Sequence: Synthetic oligonucleotide
  Target: ATXN2; (-) strand; PAM type: YTN; PAM sequence: CTC
ctaaattatggtgcaatata

SEQ ID NO: 76942 - DNA, 20 bp, Artificial Sequence
  Description of Artificial Sequence: Synthetic oligonucleotide
  Target: ATXN2; (-) strand; PAM type: YTN; PAM sequence: TTC
tcctaaattatggtgcaata

SEQ ID NO: 76943 - DNA, 20 bp, Artificial Sequence
  Description of Artificial Sequence: Synthetic oligonucleotide
  Target: ATXN2; (-) strand; PAM type: YTN; PAM sequence: TTT
ctcctaaattatggtgcaat

SEQ ID NO: 76944 - DNA, 20 bp, Artificial Sequence
  Description of Artificial Sequence: Synthetic oligonucleotide
  Target: ATXN2; (-) strand; PAM type: YTN; PAM sequence: TTT
tctcctaaattatggtgcaa

SEQ ID NO: 76945 - DNA, 20 bp, Artificial Sequence
  Description of Artificial Sequence: Synthetic oligonucleotide
  Target: ATXN2; (-) strand; PAM type: YTN; PAM sequence: TTT
ttctcctaaattatggtgca

SEQ ID NO: 76946 - DNA, 20 bp, Artificial Sequence
  Description of Artificial Sequence: Synthetic oligonucleotide
  Target: ATXN2; (-) strand; PAM type: YTN; PAM sequence: TTT
tttctcctaaattatggtgc

SEQ ID NO: 76947 - DNA, 20 bp, Artificial Sequence
  Description of Artificial Sequence: Synthetic oligonucleotide
  Target: ATXN2; (-) strand; PAM type: YTN; PAM sequence: TTT
ttttctcctaaattatggtg

SEQ ID NO: 76948 - DNA, 20 bp, Artificial Sequence
  Description of Artificial Sequence: Synthetic oligonucleotide
  Target: ATXN2; (-) strand; PAM type: YTN; PAM sequence: TTT
tttttctcctaaattatggt

SEQ ID NO: 76949 - DNA, 20 bp, Artificial Sequence
  Description of Artificial Sequence: Synthetic oligonucleotide
  Target: ATXN2; (-) strand; PAM type: YTN; PAM sequence: TTG
tgagttttttttctcctaaa

SEQ ID NO: 76950 - DNA, 20 bp, Artificial Sequence
  Description of Artificial Sequence: Synthetic oligonucleotide
  Target: ATXN2; (-) strand; PAM type: YTN; PAM sequence: TTG
ggaagagattgtgagttttt

SEQ ID NO: 76951 - DNA, 20 bp, Artificial Sequence
  Description of Artificial Sequence: Synthetic oligonucleotide
  Target: ATXN2; (-) strand; PAM type: YTN; PAM sequence: TTT
gggaagagattgtgagtttt

SEQ ID NO: 76952 - DNA, 20 bp, Artificial Sequence
  Description of Artificial Sequence: Synthetic oligonucleotide
  Target: ATXN2; (-) strand; PAM type: YTN; PAM sequence: CTT
tgggaagagattgtgagttt

SEQ ID NO: 76953 - DNA, 20 bp, Artificial Sequence
  Description of Artificial Sequence: Synthetic oligonucleotide
  Target: ATXN2; (-) strand; PAM type: YTN; PAM sequence: TTC
tttgggaagagattgtgagt

SEQ ID NO: 76954 - DNA, 20 bp, Artificial Sequence
  Description of Artificial Sequence: Synthetic oligonucleotide
  Target: ATXN2; (-) strand; PAM type: YTN; PAM sequence: TTT
ctttgggaagagattgtgag

SEQ ID NO: 76955 - DNA, 20 bp, Artificial Sequence
  Description of Artificial Sequence: Synthetic oligonucleotide
  Target: ATXN2; (-) strand; PAM type: YTN; PAM sequence: TTG
caaatgaaatttctttggga

SEQ ID NO: 76956 - DNA, 20 bp, Artificial Sequence
  Description of Artificial Sequence: Synthetic oligonucleotide
  Target: ATXN2; (-) strand; PAM type: YTN; PAM sequence: TTG
ttgcaaatgaaatttctttg

SEQ ID NO: 76957 - DNA, 20 bp, Artificial Sequence
  Description of Artificial Sequence: Synthetic oligonucleotide
  Target: ATXN2; (-) strand; PAM type: YTN; PAM sequence: CTT
gttgcaaatgaaatttcttt

SEQ ID NO: 76958 - DNA, 20 bp, Artificial Sequence
  Description of Artificial Sequence: Synthetic oligonucleotide
  Target: ATXN2; (-) strand; PAM type: YTN; PAM sequence: TTC
ataccttgttgcaaatgaaa

SEQ ID NO: 76959 - DNA, 20 bp, Artificial Sequence
  Description of Artificial Sequence: Synthetic oligonucleotide
  Target: ATXN2; (-) strand; PAM type: YTN; PAM sequence: TTT
cataccttgttgcaaatgaa

SEQ ID NO: 76960 - DNA, 20 bp, Artificial Sequence
  Description of Artificial Sequence: Synthetic oligonucleotide
  Target: ATXN2; (-) strand; PAM type: YTN; PAM sequence: CTT
tcataccttgttgcaaatga

SEQ ID NO: 76961 - DNA, 20 bp, Artificial Sequence
  Description of Artificial Sequence: Synthetic oligonucleotide
  Target: ATXN2; (-) strand; PAM type: YTN; PAM sequence: CTC
tttcataccttgttgcaaat

SEQ ID NO: 76962 - DNA, 20 bp, Artificial Sequence
  Description of Artificial Sequence: Synthetic oligonucleotide
  Target: ATXN2; (-) strand; PAM type: YTN; PAM sequence: TTA
actctttcataccttgttgc

SEQ ID NO: 76963 - DNA, 20 bp, Artificial Sequence
  Description of Artificial Sequence: Synthetic oligonucleotide
  Target: ATXN2; (-) strand; PAM type: YTN; PAM sequence: TTG
aaagcatcattaactctttc

SEQ ID NO: 76964 - DNA, 20 bp, Artificial Sequence
  Description of Artificial Sequence: Synthetic oligonucleotide
  Target: ATXN2; (-) strand; PAM type: YTN; PAM sequence: TTT
gaaagcatcattaactcttt

SEQ ID NO: 76965 - DNA, 20 bp, Artificial Sequence
  Description of Artificial Sequence: Synthetic oligonucleotide
  Target: ATXN2; (-) strand; PAM type: YTN; PAM sequence: CTT
tgaaagcatcattaactctt

SEQ ID NO: 76966 - DNA, 20 bp, Artificial Sequence
  Description of Artificial Sequence: Synthetic oligonucleotide
  Target: ATXN2; (-) strand; PAM type: YTN; PAM sequence: CTA
ccaagtgcctttgaaagcat

SEQ ID NO: 76967 - DNA, 20 bp, Artificial Sequence
  Description of Artificial Sequence: Synthetic oligonucleotide
  Target: ATXN2; (-) strand; PAM type: YTN; PAM sequence: CTC
ctaccaagtgcctttgaaag

SEQ ID NO: 76968 - DNA, 20 bp, Artificial Sequence
  Description of Artificial Sequence: Synthetic oligonucleotide
  Target: ATXN2; (-) strand; PAM type: YTN; PAM sequence: CTC
ctcctaccaagtgcctttga

SEQ ID NO: 76969 - DNA, 20 bp, Artificial Sequence
  Description of Artificial Sequence: Synthetic oligonucleotide
  Target: ATXN2; (-) strand; PAM type: YTN; PAM sequence: TTC
tcctcctaccaagtgccttt

SEQ ID NO: 76970 - DNA, 20 bp, Artificial Sequence
  Description of Artificial Sequence: Synthetic oligonucleotide
  Target: ATXN2; (-) strand; PAM type: YTN; PAM sequence: CTC
caatgattctcctcctacca

SEQ ID NO: 76971 - DNA, 20 bp, Artificial Sequence
  Description of Artificial Sequence: Synthetic oligonucleotide
  Target: ATXN2; (-) strand; PAM type: YTN; PAM sequence: TTA
tctccaatgattctcctcct

SEQ ID NO: 76972 - DNA, 20 bp, Artificial Sequence
  Description of Artificial Sequence: Synthetic oligonucleotide
  Target: ATXN2; (-) strand; PAM type: YTN; PAM sequence: CTT
atctccaatgattctcctcc

SEQ ID NO: 76973 - DNA, 20 bp, Artificial Sequence
  Description of Artificial Sequence: Synthetic oligonucleotide
  Target: ATXN2; (-) strand; PAM type: YTN; PAM sequence: TTA
gcacttatctccaatgattc

SEQ ID NO: 76974 - DNA, 20 bp, Artificial Sequence
  Description of Artificial Sequence: Synthetic oligonucleotide
  Target: ATXN2; (-) strand; PAM type: YTN; PAM sequence: TTT
agcacttatctccaatgatt

SEQ ID NO: 76975 - DNA, 20 bp, Artificial Sequence
  Description of Artificial Sequence: Synthetic oligonucleotide
  Target: ATXN2; (-) strand; PAM type: YTN; PAM sequence: CTA
caatttagcacttatctcca

SEQ ID NO: 76976 - DNA, 20 bp, Artificial Sequence
  Description of Artificial Sequence: Synthetic oligonucleotide
  Target: ATXN2; (-) strand; PAM type: YTN; PAM sequence: CTA
gacaactacaatttagcact

SEQ ID NO: 76977 - DNA, 20 bp, Artificial Sequence
  Description of Artificial Sequence: Synthetic oligonucleotide
  Target: ATXN2; (-) strand; PAM type: YTN; PAM sequence: CTG
gccaccaaactagacaacta

SEQ ID NO: 76978 - DNA, 20 bp, Artificial Sequence
  Description of Artificial Sequence: Synthetic oligonucleotide
  Target: ATXN2; (-) strand; PAM type: YTN; PAM sequence: TTC
tggccaccaaactagacaac

SEQ ID NO: 76979 - DNA, 20 bp, Artificial Sequence
  Description of Artificial Sequence: Synthetic oligonucleotide
  Target: ATXN2; (-) strand; PAM type: YTN; PAM sequence: CTA
gttctggccaccaaactaga

SEQ ID NO: 76980 - DNA, 20 bp, Artificial Sequence
  Description of Artificial Sequence: Synthetic oligonucleotide
  Target: ATXN2; (-) strand; PAM type: YTN; PAM sequence: TTC
cctagttctggccaccaaac

SEQ ID NO: 76981 - DNA, 20 bp, Artificial Sequence
  Description of Artificial Sequence: Synthetic oligonucleotide
  Target: ATXN2; (-) strand; PAM type: YTN; PAM sequence: TTT
ccctagttctggccaccaaa

SEQ ID NO: 76982 - DNA, 20 bp, Artificial Sequence
  Description of Artificial Sequence: Synthetic oligonucleotide
  Target: ATXN2; (-) strand; PAM type: YTN; PAM sequence: CTT
tccctagttctggccaccaa

SEQ ID NO: 76983 - DNA, 20 bp, Artificial Sequence
  Description of Artificial Sequence: Synthetic oligonucleotide
  Target: ATXN2; (-) strand; PAM type: YTN; PAM sequence: CTC
tttccctagttctggccacc

SEQ ID NO: 76984 - DNA, 20 bp, Artificial Sequence
  Description of Artificial Sequence: Synthetic oligonucleotide
  Target: ATXN2; (-) strand; PAM type: YTN; PAM sequence: CTC
tctttccctagttctggcca

SEQ ID NO: 76985 - DNA, 20 bp, Artificial Sequence
  Description of Artificial Sequence: Synthetic oligonucleotide
  Target: ATXN2; (-) strand; PAM type: YTN; PAM sequence: CTC
ccagctctctttccctagtt

SEQ ID NO: 76986 - DNA, 20 bp, Artificial Sequence
  Description of Artificial Sequence: Synthetic oligonucleotide
  Target: ATXN2; (-) strand; PAM type: YTN; PAM sequence: TTC
caatccacagaggagtcctc

SEQ ID NO: 76987 - DNA, 20 bp, Artificial Sequence
  Description of Artificial Sequence: Synthetic oligonucleotide
  Target: ATXN2; (-) strand; PAM type: YTN; PAM sequence: TTG
ttccaatccacagaggagtc

SEQ ID NO: 76988 - DNA, 20 bp, Artificial Sequence
  Description of Artificial Sequence: Synthetic oligonucleotide
  Target: ATXN2; (-) strand; PAM type: YTN; PAM sequence: TTT
gttccaatccacagaggagt

SEQ ID NO: 76989 - DNA, 20 bp, Artificial Sequence
  Description of Artificial Sequence: Synthetic oligonucleotide
  Target: ATXN2; (-) strand; PAM type: YTN; PAM sequence: TTG
aaatttgttccaatccacag

SEQ ID NO: 76990 - DNA, 20 bp, Artificial Sequence
  Description of Artificial Sequence: Synthetic oligonucleotide
  Target: ATXN2; (-) strand; PAM type: YTN; PAM sequence: TTT
gaaatttgttccaatccaca

SEQ ID NO: 76991 - DNA, 20 bp, Artificial Sequence
  Description of Artificial Sequence: Synthetic oligonucleotide
  Target: ATXN2; (-) strand; PAM type: YTN; PAM sequence: CTG
agatcagtgtttgaaatttg

SEQ ID NO: 76992 - DNA, 20 bp, Artificial Sequence
  Description of Artificial Sequence: Synthetic oligonucleotide
  Target: ATXN2; (-) strand; PAM type: YTN; PAM sequence: TTC
tgagatcagtgtttgaaatt

SEQ ID NO: 76993 - DNA, 20 bp, Artificial Sequence
  Description of Artificial Sequence: Synthetic oligonucleotide
  Target: ATXN2; (-) strand; PAM type: YTN; PAM sequence: TTT
ctgagatcagtgtttgaaat

SEQ ID NO: 76994 - DNA, 20 bp, Artificial Sequence
  Description of Artificial Sequence: Synthetic oligonucleotide
  Target: ATXN2; (-) strand; PAM type: YTN; PAM sequence: TTG
aagggatagtttctgagatc

SEQ ID NO: 76995 - DNA, 20 bp, Artificial Sequence
  Description of Artificial Sequence: Synthetic oligonucleotide
  Target: ATXN2; (-) strand; PAM type: YTN; PAM sequence: TTT
gaagggatagtttctgagat

SEQ ID NO: 76996 - DNA, 20 bp, Artificial Sequence
  Description of Artificial Sequence: Synthetic oligonucleotide
  Target: ATXN2; (-) strand; PAM type: YTN; PAM sequence: CTT
tgaagggatagtttctgaga

SEQ ID NO: 76997 - DNA, 20 bp, Artificial Sequence
  Description of Artificial Sequence: Synthetic oligonucleotide
  Target: ATXN2; (-) strand; PAM type: YTN; PAM sequence: TTC
tttgaagggatagtttctga

SEQ ID NO: 76998 - DNA, 20 bp, Artificial Sequence
  Description of Artificial Sequence: Synthetic oligonucleotide
  Target: ATXN2; (-) strand; PAM type: YTN; PAM sequence: CTT
ctttgaagggatagtttctg

SEQ ID NO: 76999 - DNA, 20 bp, Artificial Sequence
  Description of Artificial Sequence: Synthetic oligonucleotide
  Target: ATXN2; (-) strand; PAM type: YTN; PAM sequence: TTG
cgcttctttgaagggatagt

SEQ ID NO: 77000 - DNA, 20 bp, Artificial Sequence
  Description of Artificial Sequence: Synthetic oligonucleotide
  Target: ATXN2; (-) strand; PAM type: YTN; PAM sequence: TTT
gcgcttctttgaagggatag

SEQ ID NO: 77001 - DNA, 20 bp, Artificial Sequence
  Description of Artificial Sequence: Synthetic oligonucleotide
  Target: ATXN2; (-) strand; PAM type: YTN; PAM sequence: CTG
atcaaatttgcgcttctttg

SEQ ID NO: 77002 - DNA, 20 bp, Artificial Sequence
  Description of Artificial Sequence: Synthetic oligonucleotide
  Target: ATXN2; (-) strand; PAM type: YTN; PAM sequence: CTG
atctgatcaaatttgcgctt

SEQ ID NO: 77003 - DNA, 20 bp, Artificial Sequence
  Description of Artificial Sequence: Synthetic oligonucleotide
  Target: ATXN2; (-) strand; PAM type: YTN; PAM sequence: CTC
cacagactgatctgatcaaa

SEQ ID NO: 77004 - DNA, 20 bp, Artificial Sequence
  Description of Artificial Sequence: Synthetic oligonucleotide
  Target: ATXN2; (-) strand; PAM type: YTN; PAM sequence: CTG
ctccacagactgatctgatc

SEQ ID NO: 77005 - DNA, 20 bp, Artificial Sequence
  Description of Artificial Sequence: Synthetic oligonucleotide
  Target: ATXN2; (-) strand; PAM type: YTN; PAM sequence: CTA
aactgctccacagactgatc

SEQ ID NO: 77006 - DNA, 20 bp, Artificial Sequence
  Description of Artificial Sequence: Synthetic oligonucleotide
  Target: ATXN2; (-) strand; PAM type: YTN; PAM sequence: TTG
ggcctaaactgctccacaga

SEQ ID NO: 77007 - DNA, 20 bp, Artificial Sequence
  Description of Artificial Sequence: Synthetic oligonucleotide
  Target: ATXN2; (-) strand; PAM type: YTN; PAM sequence: TTT
gggcctaaactgctccacag

SEQ ID NO: 77008 - DNA, 20 bp, Artificial Sequence
  Description of Artificial Sequence: Synthetic oligonucleotide
  Target: ATXN2; (-) strand; PAM type: YTN; PAM sequence: CTT
tgggcctaaactgctccaca

SEQ ID NO: 77009 - DNA, 20 bp, Artificial Sequence
  Description of Artificial Sequence: Synthetic oligonucleotide
  Target: ATXN2; (-) strand; PAM type: YTN; PAM sequence: TTC
cgtggagctttgggcctaaa

SEQ ID NO: 77010 - DNA, 20 bp, Artificial Sequence
  Description of Artificial Sequence: Synthetic oligonucleotide
  Target: ATXN2; (-) strand; PAM type: YTN; PAM sequence: TTT
ccgtggagctttgggcctaa

SEQ ID NO: 77011 - DNA, 20 bp, Artificial Sequence
  Description of Artificial Sequence: Synthetic oligonucleotide
  Target: ATXN2; (-) strand; PAM type: YTN; PAM sequence: TTT
tccgtggagctttgggccta

SEQ ID NO: 77012 - DNA, 20 bp, Artificial Sequence
  Description of Artificial Sequence: Synthetic oligonucleotide
  Target: ATXN2; (-) strand; PAM type: YTN; PAM sequence: TTG
ttttccgtggagctttgggc

SEQ ID NO: 77013 - DNA, 20 bp, Artificial Sequence
  Description of Artificial Sequence: Synthetic oligonucleotide
  Target: ATXN2; (-) strand; PAM type: YTN; PAM sequence: CTG
cattgttttccgtggagctt

SEQ ID NO: 77014 - DNA, 20 bp, Artificial Sequence
  Description of Artificial Sequence: Synthetic oligonucleotide
  Target: ATXN2; (-) strand; PAM type: YTN; PAM sequence: CTG
cagatatggagggcctgcat

SEQ ID NO: 77015 - DNA, 20 bp, Artificial Sequence
  Description of Artificial Sequence: Synthetic oligonucleotide
  Target: ATXN2; (-) strand; PAM type: YTN; PAM sequence: CTG
aggatgtgaaatctgcagat

SEQ ID NO: 77016 - DNA, 20 bp, Artificial Sequence
  Description of Artificial Sequence: Synthetic oligonucleotide
  Target: ATXN2; (-) strand; PAM type: YTN; PAM sequence: TTG
aatctgaggatgtgaaatct

SEQ ID NO: 77017 - DNA, 20 bp, Artificial Sequence
  Description of Artificial Sequence: Synthetic oligonucleotide
  Target: ATXN2; (-) strand; PAM type: YTN; PAM sequence: CTC
gagtgattgaatctgaggat

SEQ ID NO: 77018 - DNA, 20 bp, Artificial Sequence
  Description of Artificial Sequence: Synthetic oligonucleotide
  Target: ATXN2; (-) strand; PAM type: YTN; PAM sequence: TTA
atctcgagtgattgaatctg

SEQ ID NO: 77019 - DNA, 20 bp, Artificial Sequence
  Description of Artificial Sequence: Synthetic oligonucleotide
  Target: ATXN2; (-) strand; PAM type: YTN; PAM sequence: TTT
aatctcgagtgattgaatct

SEQ ID NO: 77020 - DNA, 20 bp, Artificial Sequence
  Description of Artificial Sequence: Synthetic oligonucleotide
  Target: ATXN2; (-) strand; PAM type: YTN; PAM sequence: TTT
taatctcgagtgattgaatc

SEQ ID NO: 77021 - DNA, 20 bp, Artificial Sequence
  Description of Artificial Sequence: Synthetic oligonucleotide
  Target: ATXN2; (-) strand; PAM type: YTN; PAM sequence: TTT
ttaatctcgagtgattgaat

SEQ ID NO: 77022 - DNA, 20 bp, Artificial Sequence
  Description of Artificial Sequence: Synthetic oligonucleotide
  Target: ATXN2; (-) strand; PAM type: YTN; PAM sequence: TTA
agtgtttttaatctcgagtg

SEQ ID NO: 77023 - DNA, 20 bp, Artificial Sequence
  Description of Artificial Sequence: Synthetic oligonucleotide
  Target: ATXN2; (-) strand; PAM type: YTN; PAM sequence: TTT
aagtgtttttaatctcgagt

SEQ ID NO: 77024 - DNA, 20 bp, Artificial Sequence
  Description of Artificial Sequence: Synthetic oligonucleotide
  Target: ATXN2; (-) strand; PAM type: YTN; PAM sequence: TTT
taagtgtttttaatctcgag

SEQ ID NO: 77025 - DNA, 20 bp, Artificial Sequence
  Description of Artificial Sequence: Synthetic oligonucleotide
  Target: ATXN2; (-) strand; PAM type: YTN; PAM sequence: TTT
ttaagtgtttttaatctcga

SEQ ID NO: 77026 - DNA, 20 bp, Artificial Sequence
  Description of Artificial Sequence: Synthetic oligonucleotide
  Target: ATXN2; (-) strand; PAM type: YTN; PAM sequence: TTA
tttttaagtgtttttaatct

SEQ ID NO: 77027 - DNA, 20 bp, Artificial Sequence
  Description of Artificial Sequence: Synthetic oligonucleotide
  Target: ATXN2; (-) strand; PAM type: YTN; PAM sequence: TTT
atttttaagtgtttttaatc

SEQ ID NO: 77028 - DNA, 20 bp, Artificial Sequence
  Description of Artificial Sequence: Synthetic oligonucleotide
  Target: ATXN2; (-) strand; PAM type: YTN; PAM sequence: TTG
tatttatttttaagtgtttt

SEQ ID NO: 77029 - DNA, 20 bp, Artificial Sequence
  Description of Artificial Sequence: Synthetic oligonucleotide
  Target: ATXN2; (-) strand; PAM type: YTN; PAM sequence: TTA
ttgtatttatttttaagtgt

SEQ ID NO: 77030 - DNA, 20 bp, Artificial Sequence
  Description of Artificial Sequence: Synthetic oligonucleotide
  Target: ATXN2; (-) strand; PAM type: YTN; PAM sequence: TTT
attgtatttatttttaagtg

SEQ ID NO: 77031 - DNA, 20 bp, Artificial Sequence
  Description of Artificial Sequence: Synthetic oligonucleotide
  Target: ATXN2; (-) strand; PAM type: YTN; PAM sequence: TTT
tattgtatttatttttaagt

SEQ ID NO: 77032 - DNA, 20 bp, Artificial Sequence
  Description of Artificial Sequence: Synthetic oligonucleotide
  Target: ATXN2; (-) strand; PAM type: YTN; PAM sequence: TTT
ttattgtatttatttttaag

SEQ ID NO: 77033 - DNA, 20 bp, Artificial Sequence
  Description of Artificial Sequence: Synthetic oligonucleotide
  Target: ATXN2; (-) strand; PAM type: YTN; PAM sequence: TTA
tttttattgtatttattttt

SEQ ID NO: 77034 - DNA, 20 bp, Artificial Sequence
  Description of Artificial Sequence: Synthetic oligonucleotide
  Target: ATXN2; (-) strand; PAM type: YTN; PAM sequence: CTT
atttttattgtatttatttt

SEQ ID NO: 77035 - DNA, 20 bp, Artificial Sequence
  Description of Artificial Sequence: Synthetic oligonucleotide
  Target: ATXN2; (-) strand; PAM type: YTN; PAM sequence: TTG
tcttatttttattgtattta

SEQ ID NO: 77036 - DNA, 20 bp, Artificial Sequence
  Description of Artificial Sequence: Synthetic oligonucleotide
  Target: ATXN2; (-) strand; PAM type: YTN; PAM sequence: TTT
gtcttatttttattgtattt

SEQ ID NO: 77037 - DNA, 20 bp, Artificial Sequence
  Description of Artificial Sequence: Synthetic oligonucleotide
  Target: ATXN2; (-) strand; PAM type: YTN; PAM sequence: TTA
tttgtcttatttttattgta

SEQ ID NO: 77038 - DNA, 20 bp, Artificial Sequence
  Description of Artificial Sequence: Synthetic oligonucleotide
  Target: ATXN2; (-) strand; PAM type: YTN; PAM sequence: TTT
atttgtcttatttttattgt

SEQ ID NO: 77039 - DNA, 20 bp, Artificial Sequence
  Description of Artificial Sequence: Synthetic oligonucleotide
  Target: ATXN2; (-) strand; PAM type: YTN; PAM sequence: TTT
tatttgtcttatttttattg

SEQ ID NO: 77040 - DNA, 20 bp, Artificial Sequence
  Description of Artificial Sequence: Synthetic oligonucleotide
  Target: ATXN2; (-) strand; PAM type: YTN; PAM sequence: TTT
ttatttgtcttatttttatt

SEQ ID NO: 77041 - DNA, 20 bp, Artificial Sequence
  Description of Artificial Sequence: Synthetic oligonucleotide
  Target: ATXN2; (-) strand; PAM type: YTN; PAM sequence: TTT
tttatttgtcttatttttat

SEQ ID NO: 77042 - DNA, 20 bp, Artificial Sequence
  Description of Artificial Sequence: Synthetic oligonucleotide
  Target: ATXN2; (-) strand; PAM type: YTN; PAM sequence: TTA
tatattttttatttgtctta

SEQ ID NO: 77043 - DNA, 20 bp, Artificial Sequence
  Description of Artificial Sequence: Synthetic oligonucleotide
  Target: ATXN2; (-) strand; PAM type: YTN; PAM sequence: TTG
ttatatattttttatttgtc

SEQ ID NO: 77044 - DNA, 20 bp, Artificial Sequence
  Description of Artificial Sequence: Synthetic oligonucleotide
  Target: ATXN2; (-) strand; PAM type: YTN; PAM sequence: CTA
ggtaaatagttgttatatat

SEQ ID NO: 77045 - DNA, 20 bp, Artificial Sequence
  Description of Artificial Sequence: Synthetic oligonucleotide
  Target: ATXN2; (-) strand; PAM type: YTN; PAM sequence: CTA
atatggtgtaaacactaggt

SEQ ID NO: 77046 - DNA, 20 bp, Artificial Sequence
  Description of Artificial Sequence: Synthetic oligonucleotide
  Target: ATXN2; (-) strand; PAM type: YTN; PAM sequence: TTA
taatacctaatatggtgtaa

SEQ ID NO: 77047 - DNA, 20 bp, Artificial Sequence
  Description of Artificial Sequence: Synthetic oligonucleotide
  Target: ATXN2; (-) strand; PAM type: YTN; PAM sequence: CTT
ataatacctaatatggtgta

SEQ ID NO: 77048 - DNA, 20 bp, Artificial Sequence
  Description of Artificial Sequence: Synthetic oligonucleotide
  Target: ATXN2; (-) strand; PAM type: YTN; PAM sequence: TTA
cttataatacctaatatggt

SEQ ID NO: 77049 - DNA, 20 bp, Artificial Sequence
  Description of Artificial Sequence: Synthetic oligonucleotide
  Target: ATXN2; (-) strand; PAM type: YTN; PAM sequence: CTA
gattacttataatacctaat

SEQ ID NO: 77050 - DNA, 20 bp, Artificial Sequence
  Description of Artificial Sequence: Synthetic oligonucleotide
  Target: ATXN2; (-) strand; PAM type: YTN; PAM sequence: TTC
tagattacttataataccta

SEQ ID NO: 77051 - DNA, 20 bp, Artificial Sequence
  Description of Artificial Sequence: Synthetic oligonucleotide
  Target: ATXN2; (-) strand; PAM type: YTN; PAM sequence: TTT
ctagattacttataatacct

SEQ ID NO: 77052 - DNA, 20 bp, Artificial Sequence
  Description of Artificial Sequence: Synthetic oligonucleotide
  Target: ATXN2; (-) strand; PAM type: YTN; PAM sequence: TTG
tcatttctagattacttata

SEQ ID NO: 77053 - DNA, 20 bp, Artificial Sequence
  Description of Artificial Sequence: Synthetic oligonucleotide
  Target: ATXN2; (-) strand; PAM type: YTN; PAM sequence: TTT
gtcatttctagattacttat

SEQ ID NO: 77054 - DNA, 20 bp, Artificial Sequence
  Description of Artificial Sequence: Synthetic oligonucleotide
  Target: ATXN2; (-) strand; PAM type: YTN; PAM sequence: CTT
tgtcatttctagattactta

SEQ ID NO: 77055 - DNA, 20 bp, Artificial Sequence
  Description of Artificial Sequence: Synthetic oligonucleotide
  Target: ATXN2; (-) strand; PAM type: YTN; PAM sequence: CTG
tatgctttgtcatttctaga

SEQ ID NO: 77056 - DNA, 20 bp, Artificial Sequence
  Description of Artificial Sequence: Synthetic oligonucleotide
  Target: ATXN2; (-) strand; PAM type: YTN; PAM sequence: CTC
ctgtatgctttgtcatttct

SEQ ID NO: 77057 - DNA, 20 bp, Artificial Sequence
  Description of Artificial Sequence: Synthetic oligonucleotide
  Target: ATXN2; (-) strand; PAM type: YTN; PAM sequence: TTG
catataccggtgcacatcct

SEQ ID NO: 77058 - DNA, 20 bp, Artificial Sequence
  Description of Artificial Sequence: Synthetic oligonucleotide
  Target: ATXN2; (-) strand; PAM type: YTN; PAM sequence: TTT
gcatataccggtgcacatcc

SEQ ID NO: 77059 - DNA, 20 bp, Artificial Sequence
  Description of Artificial Sequence: Synthetic oligonucleotide
  Target: ATXN2; (-) strand; PAM type: YTN; PAM sequence: CTC
ataaaatggcacagtatttg

SEQ ID NO: 77060 - DNA, 20 bp, Artificial Sequence
  Description of Artificial Sequence: Synthetic oligonucleotide
  Target: ATXN2; (-) strand; PAM type: YTN; PAM sequence: CTA
gtccctcataaaatggcaca

SEQ ID NO: 77061 - DNA, 20 bp, Artificial Sequence
  Description of Artificial Sequence: Synthetic oligonucleotide
  Target: ATXN2; (-) strand; PAM type: YTN; PAM sequence: CTC
tagtccctcataaaatggca

SEQ ID NO: 77062 - DNA, 20 bp, Artificial Sequence
  Description of Artificial Sequence: Synthetic oligonucleotide
  Target: ATXN2; (-) strand; PAM type: YTN; PAM sequence: TTA
tggatgctctagtccctcat

SEQ ID NO: 77063 - DNA, 20 bp, Artificial Sequence
  Description of Artificial Sequence: Synthetic oligonucleotide
  Target: ATXN2; (-) strand; PAM type: YTN; PAM sequence: TTT
atggatgctctagtccctca

SEQ ID NO: 77064 - DNA, 20 bp, Artificial Sequence
  Description of Artificial Sequence: Synthetic oligonucleotide
  Target: ATXN2; (-) strand; PAM type: YTN; PAM sequence: TTG
gatataaaaatttatggatg

SEQ ID NO: 77065 - DNA, 20 bp, Artificial Sequence
  Description of Artificial Sequence: Synthetic oligonucleotide
  Target: ATXN2; (-) strand; PAM type: YTN; PAM sequence: TTG
gtcccaggacccccccgttg

SEQ ID NO: 77066 - DNA, 20 bp, Artificial Sequence
  Description of Artificial Sequence: Synthetic oligonucleotide
  Target: ATXN2; (-) strand; PAM type: YTN; PAM sequence: TTG
ggggattggtcccaggaccc

SEQ ID NO: 77067 - DNA, 20 bp, Artificial Sequence
  Description of Artificial Sequence: Synthetic oligonucleotide
  Target: ATXN2; (-) strand; PAM type: YTN; PAM sequence: CTT
gggggattggtcccaggacc

SEQ ID NO: 77068 - DNA, 20 bp, Artificial Sequence
  Description of Artificial Sequence: Synthetic oligonucleotide
  Target: ATXN2; (-) strand; PAM type: YTN; PAM sequence: TTG
gtgtccttgggggattggtc

SEQ ID NO: 77069 - DNA, 20 bp, Artificial Sequence
  Description of Artificial Sequence: Synthetic oligonucleotide
  Target: ATXN2; (-) strand; PAM type: YTN; PAM sequence: CTT
ggtgtccttgggggattggt

SEQ ID NO: 77070 - DNA, 20 bp, Artificial Sequence
  Description of Artificial Sequence: Synthetic oligonucleotide
  Target: ATXN2; (-) strand; PAM type: YTN; PAM sequence: TTC
ttggtgtccttgggggattg

SEQ ID NO: 77071 - DNA, 20 bp, Artificial Sequence
  Description of Artificial Sequence: Synthetic oligonucleotide
  Target: ATXN2; (-) strand; PAM type: YTN; PAM sequence: TTT
cttggtgtccttgggggatt

SEQ ID NO: 77072 - DNA, 20 bp, Artificial Sequence
  Description of Artificial Sequence: Synthetic oligonucleotide
  Target: ATXN2; (-) strand; PAM type: YTN; PAM sequence: CTG
tgtagtcatttcttggtgtc

SEQ ID NO: 77073 - DNA, 20 bp, Artificial Sequence
  Description of Artificial Sequence: Synthetic oligonucleotide
  Target: ATXN2; (-) strand; PAM type: YTN; PAM sequence: CTA
ggtgatgctgtgtagtcatt

SEQ ID NO: 77074 - DNA, 20 bp, Artificial Sequence
  Description of Artificial Sequence: Synthetic oligonucleotide
  Target: ATXN2; (-) strand; PAM type: YTN; PAM sequence: TTA
ctaggtgatgctgtgtagtc

SEQ ID NO: 77075 - DNA, 20 bp, Artificial Sequence
  Description of Artificial Sequence: Synthetic oligonucleotide
  Target: ATXN2; (-) strand; PAM type: YTN; PAM sequence: CTA
attactaggtgatgctgtgt

SEQ ID NO: 77076 - DNA, 20 bp, Artificial Sequence
  Description of Artificial Sequence: Synthetic oligonucleotide
  Target: ATXN2; (-) strand; PAM type: YTN; PAM sequence: CTA
cactaattactaggtgatgc

SEQ ID NO: 77077 - DNA, 20 bp, Artificial Sequence
  Description of Artificial Sequence: Synthetic oligonucleotide
  Target: ATXN2; (-) strand; PAM type: YTN; PAM sequence: TTA
agctacactaattactaggt

SEQ ID NO: 77078 - DNA, 20 bp, Artificial Sequence
  Description of Artificial Sequence: Synthetic oligonucleotide
  Target: ATXN2; (-) strand; PAM type: YTN; PAM sequence: CTG
ttaagctacactaattacta

SEQ ID NO: 77079 - DNA, 20 bp, Artificial Sequence
  Description of Artificial Sequence: Synthetic oligonucleotide
  Target: ATXN2; (-) strand; PAM type: YTN; PAM sequence: CTG
tacccagctgttaagctaca

SEQ ID NO: 77080 - DNA, 20 bp, Artificial Sequence
  Description of Artificial Sequence: Synthetic oligonucleotide
  Target: ATXN2; (-) strand; PAM type: YTN; PAM sequence: CTG
actgtacccagctgttaagc

SEQ ID NO: 77081 - DNA, 20 bp, Artificial Sequence
  Description of Artificial Sequence: Synthetic oligonucleotide
  Target: ATXN2; (-) strand; PAM type: YTN; PAM sequence: TTC
ctgactgtacccagctgtta

SEQ ID NO: 77082 - DNA, 20 bp, Artificial Sequence
  Description of Artificial Sequence: Synthetic oligonucleotide
  Target: ATXN2; (-) strand; PAM type: YTN; PAM sequence: TTT
cctgactgtacccagctgtt

SEQ ID NO: 77083 - DNA, 20 bp, Artificial Sequence
  Description of Artificial Sequence: Synthetic oligonucleotide
  Target: ATXN2; (-) strand; PAM type: YTN; PAM sequence: TTT
tcctgactgtacccagctgt

SEQ ID NO: 77084 - DNA, 20 bp, Artificial Sequence
  Description of Artificial Sequence: Synthetic oligonucleotide
  Target: ATXN2; (-) strand; PAM type: YTN; PAM sequence: CTT
ttcctgactgtacccagctg

SEQ ID NO: 77085 - DNA, 20 bp, Artificial Sequence
  Description of Artificial Sequence: Synthetic oligonucleotide
  Target: ATXN2; (-) strand; PAM type: YTN; PAM sequence: CTC
ttttcctgactgtacccagc

SEQ ID NO: 77086 - DNA, 20 bp, Artificial Sequence
  Description of Artificial Sequence: Synthetic oligonucleotide
  Target: ATXN2; (-) strand; PAM type: YTN; PAM sequence: TTG
tctcttttcctgactgtacc

SEQ ID NO: 77087 - DNA, 20 bp, Artificial Sequence
  Description of Artificial Sequence: Synthetic oligonucleotide
  Target: ATXN2; (-) strand; PAM type: YTN; PAM sequence: TTT
gtctcttttcctgactgtac

SEQ ID NO: 77088 - DNA, 20 bp, Artificial Sequence
  Description of Artificial Sequence: Synthetic oligonucleotide
  Target: ATXN2; (-) strand; PAM type: YTN; PAM sequence: CTT
tgtctcttttcctgactgta

SEQ ID NO: 77089 - DNA, 20 bp, Artificial Sequence
  Description of Artificial Sequence: Synthetic oligonucleotide
  Target: ATXN2; (-) strand; PAM type: YTN; PAM sequence: TTG
gcatggctttgtctcttttc

SEQ ID NO: 77090 - DNA, 20 bp, Artificial Sequence
  Description of Artificial Sequence: Synthetic oligonucleotide
  Target: ATXN2; (-) strand; PAM type: YTN; PAM sequence: TTT
ggcatggctttgtctctttt

SEQ ID NO: 77091 - DNA, 20 bp, Artificial Sequence
  Description of Artificial Sequence: Synthetic oligonucleotide
  Target: ATXN2; (-) strand; PAM type: YTN; PAM sequence: TTT
tggcatggctttgtctcttt

SEQ ID NO: 77092 - DNA, 20 bp, Artificial Sequence
  Description of Artificial Sequence: Synthetic oligonucleotide
  Target: ATXN2; (-) strand; PAM type: YTN; PAM sequence: CTA
gaatcacagtgattttggca

SEQ ID NO: 77093 - DNA, 20 bp, Artificial Sequence
  Description of Artificial Sequence: Synthetic oligonucleotide
  Target: ATXN2; (-) strand; PAM type: YTN; PAM sequence: CTC
tagaatcacagtgattttgg

SEQ ID NO: 77094 - DNA, 20 bp, Artificial Sequence
  Description of Artificial Sequence: Synthetic oligonucleotide
  Target: ATXN2; (-) strand; PAM type: YTN; PAM sequence: CTA
ccatcactctagaatcacag

SEQ ID NO: 77095 - DNA, 20 bp, Artificial Sequence
  Description of Artificial Sequence: Synthetic oligonucleotide
  Target: ATXN2; (-) strand; PAM type: YTN; PAM sequence: TTG
ggtatgcctaccatcactct

SEQ ID NO: 77096 - DNA, 20 bp, Artificial Sequence
  Description of Artificial Sequence: Synthetic oligonucleotide
  Target: ATXN2; (-) strand; PAM type: YTN; PAM sequence: CTT
gggtatgcctaccatcactc

SEQ ID NO: 77097 - DNA, 20 bp, Artificial Sequence
  Description of Artificial Sequence: Synthetic oligonucleotide
  Target: ATXN2; (-) strand; PAM type: YTN; PAM sequence: TTG
ggatgcagccttgggtatgc

SEQ ID NO: 77098 - DNA, 20 bp, Artificial Sequence
  Description of Artificial Sequence: Synthetic oligonucleotide
  Target: ATXN2; (-) strand; PAM type: YTN; PAM sequence: CTT
gggatgcagccttgggtatg

SEQ ID NO: 77099 - DNA, 20 bp, Artificial Sequence
  Description of Artificial Sequence: Synthetic oligonucleotide
  Target: ATXN2; (-) strand; PAM type: YTN; PAM sequence: TTC
ttgggatgcagccttgggta

SEQ ID NO: 77100 - DNA, 20 bp, Artificial Sequence
  Description of Artificial Sequence: Synthetic oligonucleotide
  Target: ATXN2; (-) strand; PAM type: YTN; PAM sequence: TTT
cttgggatgcagccttgggt

SEQ ID NO: 77101 - DNA, 20 bp, Artificial Sequence
  Description of Artificial Sequence: Synthetic oligonucleotide
  Target: ATXN2; (-) strand; PAM type: YTN; PAM sequence: TTT
tcttgggatgcagccttggg

SEQ ID NO: 77102 - DNA, 20 bp, Artificial Sequence
  Description of Artificial Sequence: Synthetic oligonucleotide
  Target: ATXN2; (-) strand; PAM type: YTN; PAM sequence: CTA
gttttcttgggatgcagcct

SEQ ID NO: 77103 - DNA, 20 bp, Artificial Sequence
  Description of Artificial Sequence: Synthetic oligonucleotide
  Target: ATXN2; (-) strand; PAM type: YTN; PAM sequence: CTG
atgctagttttcttgggatg

SEQ ID NO: 77104 - DNA, 20 bp, Artificial Sequence
  Description of Artificial Sequence: Synthetic oligonucleotide
  Target: ATXN2; (-) strand; PAM type: YTN; PAM sequence: CTG
tacagtgtgacacgtctgat

SEQ ID NO: 77105 - DNA, 20 bp, Artificial Sequence
  Description of Artificial Sequence: Synthetic oligonucleotide
  Target: ATXN2; (-) strand; PAM type: YTN; PAM sequence: CTC
cctgtacagtgtgacacgtc

SEQ ID NO: 77106 - DNA, 20 bp, Artificial Sequence
  Description of Artificial Sequence: Synthetic oligonucleotide
  Target: ATXN2; (-) strand; PAM type: YTN; PAM sequence: TTC
cctccctgtacagtgtgaca

SEQ ID NO: 77107 - DNA, 20 bp, Artificial Sequence
  Description of Artificial Sequence: Synthetic oligonucleotide
  Target: ATXN2; (-) strand; PAM type: YTN; PAM sequence: CTT
ccctccctgtacagtgtgac

SEQ ID NO: 77108 - DNA, 20 bp, Artificial Sequence
  Description of Artificial Sequence: Synthetic oligonucleotide
  Target: ATXN2; (-) strand; PAM type: YTN; PAM sequence: TTC
ttccctccctgtacagtgtg

SEQ ID NO: 77109 - DNA, 20 bp, Artificial Sequence
  Description of Artificial Sequence: Synthetic oligonucleotide
  Target: ATXN2; (-) strand; PAM type: YTN; PAM sequence: CTT
cttccctccctgtacagtgt

SEQ ID NO: 77110 - DNA, 20 bp, Artificial Sequence
  Description of Artificial Sequence: Synthetic oligonucleotide
  Target: ATXN2; (-) strand; PAM type: YTN; PAM sequence: CTA
tccttcttccctccctgtac

SEQ ID NO: 77111 - DNA, 20 bp, Artificial Sequence
  Description of Artificial Sequence: Synthetic oligonucleotide
  Target: ATXN2; (-) strand; PAM type: YTN; PAM sequence: TTC
tatccttcttccctccctgt

SEQ ID NO: 77112 - DNA, 20 bp, Artificial Sequence
  Description of Artificial Sequence: Synthetic oligonucleotide
  Target: ATXN2; (-) strand; PAM type: YTN; PAM sequence: TTA
gtgttctatccttcttccct

SEQ ID NO: 77113 - DNA, 20 bp, Artificial Sequence
  Description of Artificial Sequence: Synthetic oligonucleotide
  Target: ATXN2; (-) strand; PAM type: YTN; PAM sequence: TTT
agtgttctatccttcttccc

SEQ ID NO: 77114 - DNA, 20 bp, Artificial Sequence
  Description of Artificial Sequence: Synthetic oligonucleotide
  Target: ATXN2; (-) strand; PAM type: YTN; PAM sequence: TTT
tagtgttctatccttcttcc

SEQ ID NO: 77115 - DNA, 20 bp, Artificial Sequence
  Description of Artificial Sequence: Synthetic oligonucleotide
  Target: ATXN2; (-) strand; PAM type: YTN; PAM sequence: CTG
aatgattttagtgttctatc

SEQ ID NO: 77116 - DNA, 20 bp, Artificial Sequence
  Description of Artificial Sequence: Synthetic oligonucleotide
  Target: ATXN2; (-) strand; PAM type: YTN; PAM sequence: CTG
gctgaatgattttagtgttc

SEQ ID NO: 77117 - DNA, 20 bp, Artificial Sequence
  Description of Artificial Sequence: Synthetic oligonucleotide
  Target: ATXN2; (-) strand; PAM type: YTN; PAM sequence: CTA
atgactggctgaatgatttt

SEQ ID NO: 77118 - DNA, 20 bp, Artificial Sequence
  Description of Artificial Sequence: Synthetic oligonucleotide
  Target: ATXN2; (-) strand; PAM type: YTN; PAM sequence: TTG
tctaatgactggctgaatga

SEQ ID NO: 77119 - DNA, 20 bp, Artificial Sequence
  Description of Artificial Sequence: Synthetic oligonucleotide
  Target: ATXN2; (-) strand; PAM type: YTN; PAM sequence: TTT
gtctaatgactggctgaatg

SEQ ID NO: 77120 - DNA, 20 bp, Artificial Sequence
  Description of Artificial Sequence: Synthetic oligonucleotide
  Target: ATXN2; (-) strand; PAM type: YTN; PAM sequence: TTA
tttgtctaatgactggctga

SEQ ID NO: 77121 - DNA, 20 bp, Artificial Sequence
  Description of Artificial Sequence: Synthetic oligonucleotide
  Target: ATXN2; (-) strand; PAM type: YTN; PAM sequence: CTT
atttgtctaatgactggctg

SEQ ID NO: 77122 - DNA, 20 bp, Artificial Sequence
  Description of Artificial Sequence: Synthetic oligonucleotide
  Target: ATXN2; (-) strand; PAM type: YTN; PAM sequence: TTG
cttatttgtctaatgactgg

SEQ ID NO: 77123 - DNA, 20 bp, Artificial Sequence
  Description of Artificial Sequence: Synthetic oligonucleotide
  Target: ATXN2; (-) strand; PAM type: YTN; PAM sequence: TTT
gcttatttgtctaatgactg

SEQ ID NO: 77124 - DNA, 20 bp, Artificial Sequence
  Description of Artificial Sequence: Synthetic oligonucleotide
  Target: ATXN2; (-) strand; PAM type: YTN; PAM sequence: TTA
tttgcttatttgtctaatga

SEQ ID NO: 77125 - DNA, 20 bp, Artificial Sequence
  Description of Artificial Sequence: Synthetic oligonucleotide
  Target: ATXN2; (-) strand; PAM type: YTN; PAM sequence: CTG
ttatttgcttatttgtctaa

SEQ ID NO: 77126 - DNA, 20 bp, Artificial Sequence
  Description of Artificial Sequence: Synthetic oligonucleotide
  Target: ATXN2; (-) strand; PAM type: YTN; PAM sequence: TTA
ctgttatttgcttatttgtc

SEQ ID NO: 77127 - DNA, 20 bp, Artificial Sequence
  Description of Artificial Sequence: Synthetic oligonucleotide
  Target: ATXN2; (-) strand; PAM type: YTN; PAM sequence: TTG
ttactgttatttgcttattt

SEQ ID NO: 77128 - DNA, 20 bp, Artificial Sequence
  Description of Artificial Sequence: Synthetic oligonucleotide
  Target: ATXN2; (-) strand; PAM type: YTN; PAM sequence: TTG
ggggtggtggttgttactgt

SEQ ID NO: 77129 - DNA, 20 bp, Artificial Sequence
  Description of Artificial Sequence: Synthetic oligonucleotide
  Target: ATXN2; (-) strand; PAM type: YTN; PAM sequence: CTA
tggttgggggtggtggttgt

SEQ ID NO: 77130 - DNA, 20 bp, Artificial Sequence
  Description of Artificial Sequence: Synthetic oligonucleotide
  Target: ATXN2; (-) strand; PAM type: YTN; PAM sequence: TTA
gcctatggttgggggtggtg

SEQ ID NO: 77131 - DNA, 20 bp, Artificial Sequence
  Description of Artificial Sequence: Synthetic oligonucleotide
  Target: ATXN2; (-) strand; PAM type: YTN; PAM sequence: CTC
attagcctatggttgggggt

SEQ ID NO: 77132 - DNA, 20 bp, Artificial Sequence
  Description of Artificial Sequence: Synthetic oligonucleotide
  Target: ATXN2; (-) strand; PAM type: YTN; PAM sequence: CTG
gatacctcattagcctatgg

SEQ ID NO: 77133 - DNA, 20 bp, Artificial Sequence
  Description of Artificial Sequence: Synthetic oligonucleotide
  Target: ATXN2; (-) strand; PAM type: YTN; PAM sequence: CTC
tggatacctcattagcctat

SEQ ID NO: 77134 - DNA, 20 bp, Artificial Sequence
  Description of Artificial Sequence: Synthetic oligonucleotide
  Target: ATXN2; (-) strand; PAM type: YTN; PAM sequence: TTA
agtaatgtagtaactctgga

SEQ ID NO: 77135 - DNA, 20 bp, Artificial Sequence
  Description of Artificial Sequence: Synthetic oligonucleotide
  Target: ATXN2; (-) strand; PAM type: YTN; PAM sequence: TTT
aagtaatgtagtaactctgg

SEQ ID NO: 77136 - DNA, 20 bp, Artificial Sequence
  Description of Artificial Sequence: Synthetic oligonucleotide
  Target: ATXN2; (-) strand; PAM type: YTN; PAM sequence: TTT
taagtaatgtagtaactctg

SEQ ID NO: 77137 - DNA, 20 bp, Artificial Sequence
  Description of Artificial Sequence: Synthetic oligonucleotide
  Target: ATXN2; (-) strand; PAM type: YTN; PAM sequence: CTG
gacattttaagtaatgtagt

SEQ ID NO: 77138 - DNA, 20 bp, Artificial Sequence
  Description of Artificial Sequence: Synthetic oligonucleotide
  Target: ATXN2; (-) strand; PAM type: YTN; PAM sequence: TTG
aaaactggacattttaagta

SEQ ID NO: 77139 - DNA, 20 bp, Artificial Sequence
  Description of Artificial Sequence: Synthetic oligonucleotide
  Target: ATXN2; (-) strand; PAM type: YTN; PAM sequence: TTG
ttgaaaactggacattttaa

SEQ ID NO: 77140 - DNA, 20 bp, Artificial Sequence
  Description of Artificial Sequence: Synthetic oligonucleotide
  Target: ATXN2; (-) strand; PAM type: YTN; PAM sequence: TTG
ttgttgaaaactggacattt

SEQ ID NO: 77141 - DNA, 20 bp, Artificial Sequence
  Description of Artificial Sequence: Synthetic oligonucleotide
  Target: ATXN2; (-) strand; PAM type: YTN; PAM sequence: TTT
gttgttgaaaactggacatt

SEQ ID NO: 77142 - DNA, 20 bp, Artificial Sequence
  Description of Artificial Sequence: Synthetic oligonucleotide
  Target: ATXN2; (-) strand; PAM type: YTN; PAM sequence: TTT
tgttgttgaaaactggacat

SEQ ID NO: 77143 - DNA, 20 bp, Artificial Sequence
  Description of Artificial Sequence: Synthetic oligonucleotide
  Target: ATXN2; (-) strand; PAM type: YTN; PAM sequence: TTT
ttgttgttgaaaactggaca

SEQ ID NO: 77144 - DNA, 20 bp, Artificial Sequence
  Description of Artificial Sequence: Synthetic oligonucleotide
  Target: ATXN2; (-) strand; PAM type: YTN; PAM sequence: TTT
tttgttgttgaaaactggac

SEQ ID NO: 77145 - DNA, 20 bp, Artificial Sequence
  Description of Artificial Sequence: Synthetic oligonucleotide
  Target: ATXN2; (-) strand; PAM type: YTN; PAM sequence: TTT
ttttgttgttgaaaactgga

SEQ ID NO: 77146 - DNA, 20 bp, Artificial Sequence
  Description of Artificial Sequence: Synthetic oligonucleotide
  Target: ATXN2; (-) strand; PAM type: YTN; PAM sequence: TTT
tttttgttgttgaaaactgg

SEQ ID NO: 77147 - DNA, 20 bp, Artificial Sequence
  Description of Artificial Sequence: Synthetic oligonucleotide
  Target: ATXN2; (-) strand; PAM type: YTN; PAM sequence: TTT
ttttttgttgttgaaaactg

SEQ ID NO: 77148 - DNA, 20 bp, Artificial Sequence
  Description of Artificial Sequence: Synthetic oligonucleotide
  Target: ATXN2; (-) strand; PAM type: YTN; PAM sequence: TTT
tttttttgttgttgaaaact

SEQ ID NO: 77149 - DNA, 20 bp, Artificial Sequence
  Description of Artificial Sequence: Synthetic oligonucleotide
  Target: ATXN2; (-) strand; PAM type: YTN; PAM sequence: TTT
ttttttttgttgttgaaaac

SEQ ID NO: 77150 - DNA, 20 bp, Artificial Sequence
  Description of Artificial Sequence: Synthetic oligonucleotide
  Target: ATXN2; (-) strand; PAM type: YTN; PAM sequence: TTG
tcgtttttttttttgttgtt

SEQ ID NO: 77151 - DNA, 20 bp, Artificial Sequence
  Description of Artificial Sequence: Synthetic oligonucleotide
  Target: ATXN2; (-) strand; PAM type: YTN; PAM sequence: CTT
gtcgtttttttttttgttgt

SEQ ID NO: 77152 - DNA, 20 bp, Artificial Sequence
  Description of Artificial Sequence: Synthetic oligonucleotide
  Target: ATXN2; (-) strand; PAM type: YTN; PAM sequence: TTA
gcttgtcgtttttttttttg

SEQ ID NO: 77153 - DNA, 20 bp, Artificial Sequence
  Description of Artificial Sequence: Synthetic oligonucleotide
  Target: ATXN2; (-) strand; PAM type: YTN; PAM sequence: CTT
agcttgtcgttttttttttt

SEQ ID NO: 77154 - DNA, 20 bp, Artificial Sequence
  Description of Artificial Sequence: Synthetic oligonucleotide
  Target: ATXN2; (-) strand; PAM type: YTN; PAM sequence: CTG
tgtcttagcttgtcgttttt

SEQ ID NO: 77155 - DNA, 20 bp, Artificial Sequence
  Description of Artificial Sequence: Synthetic oligonucleotide
  Target: ATXN2; (-) strand; PAM type: YTN; PAM sequence: TTC
ctgtgtcttagcttgtcgtt

SEQ ID NO: 77156 - DNA, 20 bp, Artificial Sequence
  Description of Artificial Sequence: Synthetic oligonucleotide
  Target: ATXN2; (-) strand; PAM type: YTN; PAM sequence: TTT
cctgtgtcttagcttgtcgt

SEQ ID NO: 77157 - DNA, 20 bp, Artificial Sequence
  Description of Artificial Sequence: Synthetic oligonucleotide
  Target: ATXN2; (-) strand; PAM type: YTN; PAM sequence: CTT
tcctgtgtcttagcttgtcg

SEQ ID NO: 77158 - DNA, 20 bp, Artificial Sequence
  Description of Artificial Sequence: Synthetic oligonucleotide
  Target: ATXN2; (-) strand; PAM type: YTN; PAM sequence: TTA
tactttcctgtgtcttagct

SEQ ID NO: 77159 - DNA, 20 bp, Artificial Sequence
  Description of Artificial Sequence: Synthetic oligonucleotide
  Target: ATXN2; (-) strand; PAM type: YTN; PAM sequence: TTC
cagtgggtggggttatactt

SEQ ID NO: 77160 - DNA, 20 bp, Artificial Sequence
  Description of Artificial Sequence: Synthetic oligonucleotide
  Target: ATXN2; (-) strand; PAM type: YTN; PAM sequence: TTT
ccagtgggtggggttatact

SEQ ID NO: 77161 - DNA, 20 bp, Artificial Sequence
  Description of Artificial Sequence: Synthetic oligonucleotide
  Target: ATXN2; (-) strand; PAM type: YTN; PAM sequence: TTT
tccagtgggtggggttatac

SEQ ID NO: 77162 - DNA, 20 bp, Artificial Sequence
  Description of Artificial Sequence: Synthetic oligonucleotide
  Target: ATXN2; (-) strand; PAM type: YTN; PAM sequence: TTT
ttccagtgggtggggttata

SEQ ID NO: 77163 - DNA, 20 bp, Artificial Sequence
  Description of Artificial Sequence: Synthetic oligonucleotide
  Target: ATXN2; (-) strand; PAM type: YTN; PAM sequence: CTT
tttccagtgggtggggttat

SEQ ID NO: 77164 - DNA, 20 bp, Artificial Sequence
  Description of Artificial Sequence: Synthetic oligonucleotide
  Target: ATXN2; (-) strand; PAM type: YTN; PAM sequence: TTC
tttttccagtgggtggggtt

SEQ ID NO: 77165 - DNA, 20 bp, Artificial Sequence
  Description of Artificial Sequence: Synthetic oligonucleotide
  Target: ATXN2; (-) strand; PAM type: YTN; PAM sequence: CTT
ctttttccagtgggtggggt

SEQ ID NO: 77166 - DNA, 20 bp, Artificial Sequence
  Description of Artificial Sequence: Synthetic oligonucleotide
  Target: ATXN2; (-) strand; PAM type: YTN; PAM sequence: CTA
cttctttttccagtgggtgg

SEQ ID NO: 77167 - DNA, 20 bp, Artificial Sequence
  Description of Artificial Sequence: Synthetic oligonucleotide
  Target: ATXN2; (-) strand; PAM type: YTN; PAM sequence: TTG
cctacttctttttccagtgg

SEQ ID NO: 77168 - DNA, 20 bp, Artificial Sequence
  Description of Artificial Sequence: Synthetic oligonucleotide
  Target: ATXN2; (-) strand; PAM type: YTN; PAM sequence: CTA
ttgcctacttctttttccag

SEQ ID NO: 77169 - DNA, 20 bp, Artificial Sequence
  Description of Artificial Sequence: Synthetic oligonucleotide
  Target: ATXN2; (-) strand; PAM type: YTN; PAM sequence: TTC
tattgcctacttctttttcc

SEQ ID NO: 77170 - DNA, 20 bp, Artificial Sequence
  Description of Artificial Sequence: Synthetic oligonucleotide
  Target: ATXN2; (-) strand; PAM type: YTN; PAM sequence: TTT
ctattgcctacttctttttc

SEQ ID NO: 77171 - DNA, 20 bp, Artificial Sequence
  Description of Artificial Sequence: Synthetic oligonucleotide
  Target: ATXN2; (-) strand; PAM type: YTN; PAM sequence: TTA
tacaagcaatttctattgcc

SEQ ID NO: 77172 - DNA, 20 bp, Artificial Sequence
  Description of Artificial Sequence: Synthetic oligonucleotide
  Target: ATXN2; (-) strand; PAM type: YTN; PAM sequence: CTG
gttatacaagcaatttctat

SEQ ID NO: 77173 - DNA, 20 bp, Artificial Sequence
  Description of Artificial Sequence: Synthetic oligonucleotide
  Target: ATXN2; (-) strand; PAM type: YTN; PAM sequence: TTA
agtcagacatctggttatac

SEQ ID NO: 77174 - DNA, 20 bp, Artificial Sequence
  Description of Artificial Sequence: Synthetic oligonucleotide
  Target: ATXN2; (-) strand; PAM type: YTN; PAM sequence: TTA
ttaagtcagacatctggtta

SEQ ID NO: 77175 - DNA, 20 bp, Artificial Sequence
  Description of Artificial Sequence: Synthetic oligonucleotide
  Target: ATXN2; (-) strand; PAM type: YTN; PAM sequence: CTT
attaagtcagacatctggtt

SEQ ID NO: 77176 - DNA, 20 bp, Artificial Sequence
  Description of Artificial Sequence: Synthetic oligonucleotide
  Target: ATXN2; (-) strand; PAM type: YTN; PAM sequence: TTC
ttattaagtcagacatctgg

SEQ ID NO: 77177 - DNA, 20 bp, Artificial Sequence
  Description of Artificial Sequence: Synthetic oligonucleotide
  Target: ATXN2; (-) strand; PAM type: YTN; PAM sequence: TTG
aaattcttattaagtcagac

SEQ ID NO: 77178 - DNA, 20 bp, Artificial Sequence
  Description of Artificial Sequence: Synthetic oligonucleotide
  Target: ATXN2; (-) strand; PAM type: YTN; PAM sequence: TTT
gaaattcttattaagtcaga

SEQ ID NO: 77179 - DNA, 20 bp, Artificial Sequence
  Description of Artificial Sequence: Synthetic oligonucleotide
  Target: ATXN2; (-) strand; PAM type: YTN; PAM sequence: TTT
tgaaattcttattaagtcag

SEQ ID NO: 77180 - DNA, 20 bp, Artificial Sequence
  Description of Artificial Sequence: Synthetic oligonucleotide
  Target: ATXN2; (-) strand; PAM type: YTN; PAM sequence: CTT
ttgaaattcttattaagtca

SEQ ID NO: 77181 - DNA, 20 bp, Artificial Sequence
  Description of Artificial Sequence: Synthetic oligonucleotide
  Target: ATXN2; (-) strand; PAM type: YTN; PAM sequence: TTA
tagtgaccacttttgaaatt

SEQ ID NO: 77182 - DNA, 20 bp, Artificial Sequence
  Description of Artificial Sequence: Synthetic oligonucleotide
  Target: ATXN2; (-) strand; PAM type: YTN; PAM sequence: TTT
atagtgaccacttttgaaat

SEQ ID NO: 77183 - DNA, 20 bp, Artificial Sequence
  Description of Artificial Sequence: Synthetic oligonucleotide
  Target: ATXN2; (-) strand; PAM type: YTN; PAM sequence: TTA
aaacatgtttatagtgacca

SEQ ID NO: 77184 - DNA, 20 bp, Artificial Sequence
  Description of Artificial Sequence: Synthetic oligonucleotide
  Target: ATXN2; (-) strand; PAM type: YTN; PAM sequence: CTT
aaaacatgtttatagtgacc

SEQ ID NO: 77185 - DNA, 20 bp, Artificial Sequence
  Description of Artificial Sequence: Synthetic oligonucleotide
  Target: ATXN2; (-) strand; PAM type: YTN; PAM sequence: TTC
ttaaaacatgtttatagtga

SEQ ID NO: 77186 - DNA, 20 bp, Artificial Sequence
  Description of Artificial Sequence: Synthetic oligonucleotide
  Target: ATXN2; (-) strand; PAM type: YTN; PAM sequence: TTC
gttcttaaaacatgtttata

SEQ ID NO: 77187 - DNA, 20 bp, Artificial Sequence
  Description of Artificial Sequence: Synthetic oligonucleotide
  Target: ATXN2; (-) strand; PAM type: YTN; PAM sequence: TTT
cgttcttaaaacatgtttat

SEQ ID NO: 77188 - DNA, 20 bp, Artificial Sequence
  Description of Artificial Sequence: Synthetic oligonucleotide
  Target: ATXN2; (-) strand; PAM type: YTN; PAM sequence: CTT
tcgttcttaaaacatgttta

SEQ ID NO: 77189 - DNA, 20 bp, Artificial Sequence
  Description of Artificial Sequence: Synthetic oligonucleotide
  Target: ATXN2; (-) strand; PAM type: YTN; PAM sequence: TTC
tttcgttcttaaaacatgtt

SEQ ID NO: 77190 - DNA, 20 bp, Artificial Sequence
  Description of Artificial Sequence: Synthetic oligonucleotide
  Target: ATXN2; (-) strand; PAM type: YTN; PAM sequence: TTT
ctttcgttcttaaaacatgt

SEQ ID NO: 77191 - DNA, 20 bp, Artificial Sequence
  Description of Artificial Sequence: Synthetic oligonucleotide
  Target: ATXN2; (-) strand; PAM type: YTN; PAM sequence: TTT
tctttcgttcttaaaacatg

SEQ ID NO: 77192 - DNA, 20 bp, Artificial Sequence
  Description of Artificial Sequence: Synthetic oligonucleotide
  Target: ATXN2; (-) strand; PAM type: YTN; PAM sequence: TTA
tggttttctttcgttcttaa

SEQ ID NO: 77193 - DNA, 20 bp, Artificial Sequence
  Description of Artificial Sequence: Synthetic oligonucleotide
  Target: ATXN2; (-) strand; PAM type: YTN; PAM sequence: TTA
attatggttttctttcgttc

SEQ ID NO: 77194 - DNA, 20 bp, Artificial Sequence
  Description of Artificial Sequence: Synthetic oligonucleotide
  Target: ATXN2; (-) strand; PAM type: YTN; PAM sequence: CTG
cattaattatggttttcttt

SEQ ID NO: 77195 - DNA, 20 bp, Artificial Sequence
  Description of Artificial Sequence: Synthetic oligonucleotide
  Target: ATXN2; (-) strand; PAM type: YTN; PAM sequence: TTA
ctgcattaattatggttttc

SEQ ID NO: 77196 - DNA, 20 bp, Artificial Sequence
  Description of Artificial Sequence: Synthetic oligonucleotide
  Target: ATXN2; (-) strand; PAM type: YTN; PAM sequence: TTT
actgcattaattatggtttt

SEQ ID NO: 77197 - DNA, 20 bp, Artificial Sequence
  Description of Artificial Sequence: Synthetic oligonucleotide
  Target: ATXN2; (-) strand; PAM type: YTN; PAM sequence: TTT
tactgcattaattatggttt

SEQ ID NO: 77198 - DNA, 20 bp, Artificial Sequence
  Description of Artificial Sequence: Synthetic oligonucleotide
  Target: ATXN2; (-) strand; PAM type: YTN; PAM sequence: CTT
ttactgcattaattatggtt

SEQ ID NO: 77199 - DNA, 20 bp, Artificial Sequence
  Description of Artificial Sequence: Synthetic oligonucleotide
  Target: ATXN2; (-) strand; PAM type: YTN; PAM sequence: TTC
ttttactgcattaattatgg

SEQ ID NO: 77200 - DNA, 20 bp, Artificial Sequence
  Description of Artificial Sequence: Synthetic oligonucleotide
  Target: ATXN2; (-) strand; PAM type: YTN; PAM sequence: CTT
cttttactgcattaattatg

SEQ ID NO: 77201 - DNA, 20 bp, Artificial Sequence
  Description of Artificial Sequence: Synthetic oligonucleotide
  Target: ATXN2; (-) strand; PAM type: YTN; PAM sequence: CTG
gccaatcataccttctttta

SEQ ID NO: 77202 - DNA, 20 bp, Artificial Sequence
  Description of Artificial Sequence: Synthetic oligonucleotide
  Target: ATXN2; (-) strand; PAM type: YTN; PAM sequence: TTA
caggcgtgagtcagggcgcc

SEQ ID NO: 77203 - DNA, 20 bp, Artificial Sequence
  Description of Artificial Sequence: Synthetic oligonucleotide
  Target: ATXN2; (-) strand; PAM type: YTN; PAM sequence: CTG
ggattacaggcgtgagtcag

SEQ ID NO: 77204 - DNA, 20 bp, Artificial Sequence
  Description of Artificial Sequence: Synthetic oligonucleotide
  Target: ATXN2; (-) strand; PAM type: YTN; PAM sequence: CTG
gagtgctgggattacaggcg

SEQ ID NO: 77205 - DNA, 20 bp, Artificial Sequence
  Description of Artificial Sequence: Synthetic oligonucleotide
  Target: ATXN2; (-) strand; PAM type: YTN; PAM sequence: CTC
ctggagtgctgggattacag

SEQ ID NO: 77206 - DNA, 20 bp, Artificial Sequence
  Description of Artificial Sequence: Synthetic oligonucleotide
  Target: ATXN2; (-) strand; PAM type: YTN; PAM sequence: TTG
gcctcctggagtgctgggat

SEQ ID NO: 77207 - DNA, 20 bp, Artificial Sequence
  Description of Artificial Sequence: Synthetic oligonucleotide
  Target: ATXN2; (-) strand; PAM type: YTN; PAM sequence: CTT
ggcctcctggagtgctggga

SEQ ID NO: 77208 - DNA, 20 bp, Artificial Sequence
  Description of Artificial Sequence: Synthetic oligonucleotide
  Target: ATXN2; (-) strand; PAM type: YTN; PAM sequence: TTC
agcccgccttggcctcctgg

SEQ ID NO: 77209 - DNA, 20 bp, Artificial Sequence
  Description of Artificial Sequence: Synthetic oligonucleotide
  Target: ATXN2; (-) strand; PAM type: YTN; PAM sequence: TTT
cagcccgccttggcctcctg

SEQ ID NO: 77210 - DNA, 20 bp, Artificial Sequence
  Description of Artificial Sequence: Synthetic oligonucleotide
  Target: ATXN2; (-) strand; PAM type: YTN; PAM sequence: TTA
gtagagatggggtttcagcc

SEQ ID NO: 77211 - DNA, 20 bp, Artificial Sequence
  Description of Artificial Sequence: Synthetic oligonucleotide
  Target: ATXN2; (-) strand; PAM type: YTN; PAM sequence: TTT
agtagagatggggtttcagc

SEQ ID NO: 77212 - DNA, 20 bp, Artificial Sequence
  Description of Artificial Sequence: Synthetic oligonucleotide
  Target: ATXN2; (-) strand; PAM type: YTN; PAM sequence: TTT
tagtagagatggggtttcag

SEQ ID NO: 77213 - DNA, 20 bp, Artificial Sequence
  Description of Artificial Sequence: Synthetic oligonucleotide
  Target: ATXN2; (-) strand; PAM type: YTN; PAM sequence: TTT
ttagtagagatggggtttca

SEQ ID NO: 77214 - DNA, 20 bp, Artificial Sequence
  Description of Artificial Sequence: Synthetic oligonucleotide
  Target: ATXN2; (-) strand; PAM type: YTN; PAM sequence: TTG
tatttttagtagagatgggg

SEQ ID NO: 77215 - DNA, 20 bp, Artificial Sequence
  Description of Artificial Sequence: Synthetic oligonucleotide
  Target: ATXN2; (-) strand; PAM type: YTN; PAM sequence: TTT
gtatttttagtagagatggg

SEQ ID NO: 77216 - DNA, 20 bp, Artificial Sequence
  Description of Artificial Sequence: Synthetic oligonucleotide
  Target: ATXN2; (-) strand; PAM type: YTN; PAM sequence: TTT
tgtatttttagtagagatgg

SEQ ID NO: 77217 - DNA, 20 bp, Artificial Sequence
  Description of Artificial Sequence: Synthetic oligonucleotide
  Target: ATXN2; (-) strand; PAM type: YTN; PAM sequence: TTT
ttgtatttttagtagagatg

SEQ ID NO: 77218 - DNA, 20 bp, Artificial Sequence
  Description of Artificial Sequence: Synthetic oligonucleotide
  Target: ATXN2; (-) strand; PAM type: YTN; PAM sequence: TTG
tttttgtatttttagtagag

SEQ ID NO: 77219 - DNA, 20 bp, Artificial Sequence
  Description of Artificial Sequence: Synthetic oligonucleotide
  Target: ATXN2; (-) strand; PAM type: YTN; PAM sequence: TTT
gtttttgtatttttagtaga

SEQ ID NO: 77220 - DNA, 20 bp, Artificial Sequence
  Description of Artificial Sequence: Synthetic oligonucleotide
  Target: ATXN2; (-) strand; PAM type: YTN; PAM sequence: TTT
tgtttttgtatttttagtag

SEQ ID NO: 77221 - DNA, 20 bp, Artificial Sequence
  Description of Artificial Sequence: Synthetic oligonucleotide
  Target: ATXN2; (-) strand; PAM type: YTN; PAM sequence: CTA
attttgtttttgtattttta

SEQ ID NO: 77222 - DNA, 20 bp, Artificial Sequence
  Description of Artificial Sequence: Synthetic oligonucleotide
  Target: ATXN2; (-) strand; PAM type: YTN; PAM sequence: CTG
gctaattttgtttttgtatt

SEQ ID NO: 77223 - DNA, 20 bp, Artificial Sequence
  Description of Artificial Sequence: Synthetic oligonucleotide
  Target: ATXN2; (-) strand; PAM type: YTN; PAM sequence: CTG
ccaccacgcctggctaattt

SEQ ID NO: 77224 - DNA, 20 bp, Artificial Sequence
  Description of Artificial Sequence: Synthetic oligonucleotide
  Target: ATXN2; (-) strand; PAM type: YTN; PAM sequence: CTA
caggtgcctgccaccacgcc

SEQ ID NO: 77225 - DNA, 20 bp, Artificial Sequence
  Description of Artificial Sequence: Synthetic oligonucleotide
  Target: ATXN2; (-) strand; PAM type: YTN; PAM sequence: CTG
ggactacaggtgcctgccac

SEQ ID NO: 77226 - DNA, 20 bp, Artificial Sequence
  Description of Artificial Sequence: Synthetic oligonucleotide
  Target: ATXN2; (-) strand; PAM type: YTN; PAM sequence: CTG
agtagctgggactacaggtg

SEQ ID NO: 77227 - DNA, 20 bp, Artificial Sequence
  Description of Artificial Sequence: Synthetic oligonucleotide
  Target: ATXN2; (-) strand; PAM type: YTN; PAM sequence: CTC
ctgagtagctgggactacag

SEQ ID NO: 77228 - DNA, 20 bp, Artificial Sequence
  Description of Artificial Sequence: Synthetic oligonucleotide
  Target: ATXN2; (-) strand; PAM type: YTN; PAM sequence: TTA
gcctcctgagtagctgggac

SEQ ID NO: 77229 - DNA, 20 bp, Artificial Sequence
  Description of Artificial Sequence: Synthetic oligonucleotide
  Target: ATXN2; (-) strand; PAM type: YTN; PAM sequence: CTT
agcctcctgagtagctggga

SEQ ID NO: 77230 - DNA, 20 bp, Artificial Sequence
  Description of Artificial Sequence: Synthetic oligonucleotide
  Target: ATXN2; (-) strand; PAM type: YTN; PAM sequence: CTG
ccttagcctcctgagtagct

SEQ ID NO: 77231 - DNA, 20 bp, Artificial Sequence
  Description of Artificial Sequence: Synthetic oligonucleotide
  Target: ATXN2; (-) strand; PAM type: YTN; PAM sequence: TTG
tcctgccttagcctcctgag

SEQ ID NO: 77232 - DNA, 20 bp, Artificial Sequence
  Description of Artificial Sequence: Synthetic oligonucleotide
  Target: ATXN2; (-) strand; PAM type: YTN; PAM sequence: TTC
acaccattgtcctgccttag

SEQ ID NO: 77233 - DNA, 20 bp, Artificial Sequence
  Description of Artificial Sequence: Synthetic oligonucleotide
  Target: ATXN2; (-) strand; PAM type: YTN; PAM sequence: CTC
ccaagttcacaccattgtcc

SEQ ID NO: 77234 - DNA, 20 bp, Artificial Sequence
  Description of Artificial Sequence: Synthetic oligonucleotide
  Target: ATXN2; (-) strand; PAM type: YTN; PAM sequence: CTC
cgcctcccaagttcacacca

SEQ ID NO: 77235 - DNA, 20 bp, Artificial Sequence
  Description of Artificial Sequence: Synthetic oligonucleotide
  Target: ATXN2; (-) strand; PAM type: YTN; PAM sequence: CTG
caagctccgcctcccaagtt

SEQ ID NO: 77236 - DNA, 20 bp, Artificial Sequence
  Description of Artificial Sequence: Synthetic oligonucleotide
  Target: ATXN2; (-) strand; PAM type: YTN; PAM sequence: CTC
actgcaagctccgcctccca

SEQ ID NO: 77237 - DNA, 20 bp, Artificial Sequence
  Description of Artificial Sequence: Synthetic oligonucleotide
  Target: ATXN2; (-) strand; PAM type: YTN; PAM sequence: CTC
ggctcactgcaagctccgcc

SEQ ID NO: 77238 - DNA, 20 bp, Artificial Sequence
  Description of Artificial Sequence: Synthetic oligonucleotide
  Target: ATXN2; (-) strand; PAM type: YTN; PAM sequence: CTG
gagtgcagtggcacaatctc

SEQ ID NO: 77239 - DNA, 20 bp, Artificial Sequence
  Description of Artificial Sequence: Synthetic oligonucleotide
  Target: ATXN2; (-) strand; PAM type: YTN; PAM sequence: TTG
cccaggctggagtgcagtgg

SEQ ID NO: 77240 - DNA, 20 bp, Artificial Sequence
  Description of Artificial Sequence: Synthetic oligonucleotide
  Target: ATXN2; (-) strand; PAM type: YTN; PAM sequence: CTG
tattgcccaggctggagtgc

SEQ ID NO: 77241 - DNA, 20 bp, Artificial Sequence
  Description of Artificial Sequence: Synthetic oligonucleotide
  Target: ATXN2; (-) strand; PAM type: YTN; PAM sequence: CTC
gctgtattgcccaggctgga

SEQ ID NO: 77242 - DNA, 20 bp, Artificial Sequence
  Description of Artificial Sequence: Synthetic oligonucleotide
  Target: ATXN2; (-) strand; PAM type: YTN; PAM sequence: TTG
aggcggagtctcgctgtatt

SEQ ID NO: 77243 - DNA, 20 bp, Artificial Sequence
  Description of Artificial Sequence: Synthetic oligonucleotide
  Target: ATXN2; (-) strand; PAM type: YTN; PAM sequence: TTT
gaggcggagtctcgctgtat

SEQ ID NO: 77244 - DNA, 20 bp, Artificial Sequence
  Description of Artificial Sequence: Synthetic oligonucleotide
  Target: ATXN2; (-) strand; PAM type: YTN; PAM sequence: TTT
tgaggcggagtctcgctgta

SEQ ID NO: 77245 - DNA, 20 bp, Artificial Sequence
  Description of Artificial Sequence: Synthetic oligonucleotide
  Target: ATXN2; (-) strand; PAM type: YTN; PAM sequence: TTT
ttgaggcggagtctcgctgt

SEQ ID NO: 77246 - DNA, 20 bp, Artificial Sequence
  Description of Artificial Sequence: Synthetic oligonucleotide
  Target: ATXN2; (-) strand; PAM type: YTN; PAM sequence: TTT
tttgaggcggagtctcgctg

SEQ ID NO: 77247 - DNA, 20 bp, Artificial Sequence
  Description of Artificial Sequence: Synthetic oligonucleotide
  Target: ATXN2; (-) strand; PAM type: YTN; PAM sequence: TTT
ttttgaggcggagtctcgct

SEQ ID NO: 77248 - DNA, 20 bp, Artificial Sequence
  Description of Artificial Sequence: Synthetic oligonucleotide
  Target: ATXN2; (-) strand; PAM type: YTN; PAM sequence: TTT
tttttgaggcggagtctcgc

SEQ ID NO: 77249 - DNA, 20 bp, Artificial Sequence
  Description of Artificial Sequence: Synthetic oligonucleotide
  Target: ATXN2; (-) strand; PAM type: YTN; PAM sequence: TTT
ttttttgaggcggagtctcg

SEQ ID NO: 77250 - DNA, 20 bp, Artificial Sequence
  Description of Artificial Sequence: Synthetic oligonucleotide
  Target: ATXN2; (-) strand; PAM type: YTN; PAM sequence: TTT
tttttttgaggcggagtctc

SEQ ID NO: 77251 - DNA, 20 bp, Artificial Sequence
  Description of Artificial Sequence: Synthetic oligonucleotide
  Target: ATXN2; (-) strand; PAM type: YTN; PAM sequence: TTT
ttttttttgaggcggagtct

SEQ ID NO: 77252 - DNA, 20 bp, Artificial Sequence
  Description of Artificial Sequence: Synthetic oligonucleotide
  Target: ATXN2; (-) strand; PAM type: YTN; PAM sequence: TTT
tttttttttgaggcggagtc

SEQ ID NO: 77253 - DNA, 20 bp, Artificial Sequence
  Description of Artificial Sequence: Synthetic oligonucleotide
  Target: ATXN2; (-) strand; PAM type: YTN; PAM sequence: TTA
ttttttttttttgaggcgga

SEQ ID NO: 77254 - DNA, 20 bp, Artificial Sequence
  Description of Artificial Sequence: Synthetic oligonucleotide
  Target: ATXN2; (-) strand; PAM type: YTN; PAM sequence: TTT
attttttttttttgaggcgg

SEQ ID NO: 77255 - DNA, 20 bp, Artificial Sequence
  Description of Artificial Sequence: Synthetic oligonucleotide
  Target: ATXN2; (-) strand; PAM type: YTN; PAM sequence: TTC
atttattttttttttttgag

SEQ ID NO: 77256 - DNA, 20 bp, Artificial Sequence
  Description of Artificial Sequence: Synthetic oligonucleotide
  Target: ATXN2; (-) strand; PAM type: YTN; PAM sequence: CTG
ttcatttatttttttttttt

SEQ ID NO: 77257 - DNA, 20 bp, Artificial Sequence
  Description of Artificial Sequence: Synthetic oligonucleotide
  Target: ATXN2; (-) strand; PAM type: YTN; PAM sequence: TTA
aggcatgagccaccatgccc

SEQ ID NO: 77258 - DNA, 20 bp, Artificial Sequence
  Description of Artificial Sequence: Synthetic oligonucleotide
  Target: ATXN2; (-) strand; PAM type: YTN; PAM sequence: CTG
ggattaaggcatgagccacc

SEQ ID NO: 77259 - DNA, 20 bp, Artificial Sequence
  Description of Artificial Sequence: Synthetic oligonucleotide
  Target: ATXN2; (-) strand; PAM type: YTN; PAM sequence: CTC
ccaaagtgctgggattaagg

SEQ ID NO: 77260 - DNA, 20 bp, Artificial Sequence
  Description of Artificial Sequence: Synthetic oligonucleotide
  Target: ATXN2; (-) strand; PAM type: YTN; PAM sequence: TTG
gcctcccaaagtgctgggat

SEQ ID NO: 77261 - DNA, 20 bp, Artificial Sequence
  Description of Artificial Sequence: Synthetic oligonucleotide
  Target: ATXN2; (-) strand; PAM type: YTN; PAM sequence: CTT
ggcctcccaaagtgctggga

SEQ ID NO: 77262 - DNA, 20 bp, Artificial Sequence
  Description of Artificial Sequence: Synthetic oligonucleotide
  Target: ATXN2; (-) strand; PAM type: YTN; PAM sequence: CTG
ccttggcctcccaaagtgct

SEQ ID NO: 77263 - DNA, 20 bp, Artificial Sequence
  Description of Artificial Sequence: Synthetic oligonucleotide
  Target: ATXN2; (-) strand; PAM type: YTN; PAM sequence: CTC
aggtgatccacctgccttgg

SEQ ID NO: 77264 - DNA, 20 bp, Artificial Sequence
  Description of Artificial Sequence: Synthetic oligonucleotide
  Target: ATXN2; (-) strand; PAM type: YTN; PAM sequence: CTG
acctcaggtgatccacctgc

SEQ ID NO: 77265 - DNA, 20 bp, Artificial Sequence
  Description of Artificial Sequence: Synthetic oligonucleotide
  Target: ATXN2; (-) strand; PAM type: YTN; PAM sequence: CTC
tgacctcaggtgatccacct

SEQ ID NO: 77266 - DNA, 20 bp, Artificial Sequence
  Description of Artificial Sequence: Synthetic oligonucleotide
  Target: ATXN2; (-) strand; PAM type: YTN; PAM sequence: TTG
aacctctgacctcaggtgat

SEQ ID NO: 77267 - DNA, 20 bp, Artificial Sequence
  Description of Artificial Sequence: Synthetic oligonucleotide
  Target: ATXN2; (-) strand; PAM type: YTN; PAM sequence: CTT
gaacctctgacctcaggtga

SEQ ID NO: 77268 - DNA, 20 bp, Artificial Sequence
  Description of Artificial Sequence: Synthetic oligonucleotide
  Target: ATXN2; (-) strand; PAM type: YTN; PAM sequence: CTG
gtcttgaacctctgacctca

SEQ ID NO: 77269 - DNA, 20 bp, Artificial Sequence
  Description of Artificial Sequence: Synthetic oligonucleotide
  Target: ATXN2; (-) strand; PAM type: YTN; PAM sequence: TTG
ccaggctggtcttgaacctc

SEQ ID NO: 77270 - DNA, 20 bp, Artificial Sequence
  Description of Artificial Sequence: Synthetic oligonucleotide
  Target: ATXN2; (-) strand; PAM type: YTN; PAM sequence: TTG
agcatgttgccaggctggtc

SEQ ID NO: 77271 - DNA, 20 bp, Artificial Sequence
  Description of Artificial Sequence: Synthetic oligonucleotide
  Target: ATXN2; (-) strand; PAM type: YTN; PAM sequence: TTT
gagcatgttgccaggctggt

SEQ ID NO: 77272 - DNA, 20 bp, Artificial Sequence
  Description of Artificial Sequence: Synthetic oligonucleotide
  Target: ATXN2; (-) strand; PAM type: YTN; PAM sequence: CTA
gtagtgatggagtttgagca

SEQ ID NO: 77273 - DNA, 20 bp, Artificial Sequence
  Description of Artificial Sequence: Synthetic oligonucleotide
  Target: ATXN2; (-) strand; PAM type: YTN; PAM sequence: TTG
tatatctagtagtgatggag

SEQ ID NO: 77274 - DNA, 20 bp, Artificial Sequence
  Description of Artificial Sequence: Synthetic oligonucleotide
  Target: ATXN2; (-) strand; PAM type: YTN; PAM sequence: TTT
gtatatctagtagtgatgga

SEQ ID NO: 77275 - DNA, 20 bp, Artificial Sequence
  Description of Artificial Sequence: Synthetic oligonucleotide
  Target: ATXN2; (-) strand; PAM type: YTN; PAM sequence: TTT
tgtatatctagtagtgatgg

SEQ ID NO: 77276 - DNA, 20 bp, Artificial Sequence
  Description of Artificial Sequence: Synthetic oligonucleotide
  Target: ATXN2; (-) strand; PAM type: YTN; PAM sequence: TTT
ttgtatatctagtagtgatg

SEQ ID NO: 77277 - DNA, 20 bp, Artificial Sequence
  Description of Artificial Sequence: Synthetic oligonucleotide
  Target: ATXN2; (-) strand; PAM type: YTN; PAM sequence: TTT
tttgtatatctagtagtgat

SEQ ID NO: 77278 - DNA, 20 bp, Artificial Sequence
  Description of Artificial Sequence: Synthetic oligonucleotide
  Target: ATXN2; (-) strand; PAM type: YTN; PAM sequence: CTA
attttttgtatatctagtag

SEQ ID NO: 77279 - DNA, 20 bp, Artificial Sequence
  Description of Artificial Sequence: Synthetic oligonucleotide
  Target: ATXN2; (-) strand; PAM type: YTN; PAM sequence: CTG
gctaattttttgtatatcta

SEQ ID NO: 77280 - DNA, 20 bp, Artificial Sequence
  Description of Artificial Sequence: Synthetic oligonucleotide
  Target: ATXN2; (-) strand; PAM type: YTN; PAM sequence: CTG
ccaccatgcctggctaattt

SEQ ID NO: 77281 - DNA, 20 bp, Artificial Sequence
  Description of Artificial Sequence: Synthetic oligonucleotide
  Target: ATXN2; (-) strand; PAM type: YTN; PAM sequence: TTA
taggcgcctgccaccatgcc

SEQ ID NO: 77282 - DNA, 20 bp, Artificial Sequence
  Description of Artificial Sequence: Synthetic oligonucleotide
  Target: ATXN2; (-) strand; PAM type: YTN; PAM sequence: TTG
ggattataggcgcctgccac

SEQ ID NO: 77283 - DNA, 20 bp, Artificial Sequence
  Description of Artificial Sequence: Synthetic oligonucleotide
  Target: ATXN2; (-) strand; PAM type: YTN; PAM sequence: CTG
aatagttgggattataggcg

SEQ ID NO: 77284 - DNA, 20 bp, Artificial Sequence
  Description of Artificial Sequence: Synthetic oligonucleotide
  Target: ATXN2; (-) strand; PAM type: YTN; PAM sequence: CTC
ctgaatagttgggattatag

SEQ ID NO: 77285 - DNA, 20 bp, Artificial Sequence
  Description of Artificial Sequence: Synthetic oligonucleotide
  Target: ATXN2; (-) strand; PAM type: YTN; PAM sequence: CTC
ctcctgaatagttgggatta

SEQ ID NO: 77286 - DNA, 20 bp, Artificial Sequence
  Description of Artificial Sequence: Synthetic oligonucleotide
  Target: ATXN2; (-) strand; PAM type: YTN; PAM sequence: CTC
agccacctcctcctgaatag

SEQ ID NO: 77287 - DNA, 20 bp, Artificial Sequence
  Description of Artificial Sequence: Synthetic oligonucleotide
  Target: ATXN2; (-) strand; PAM type: YTN; PAM sequence: CTC
cctcagccacctcctcctga

SEQ ID NO: 77288 - DNA, 20 bp, Artificial Sequence
  Description of Artificial Sequence: Synthetic oligonucleotide
  Target: ATXN2; (-) strand; PAM type: YTN; PAM sequence: CTC
ctccctcagccacctcctcc

SEQ ID NO: 77289 - DNA, 20 bp, Artificial Sequence
  Description of Artificial Sequence: Synthetic oligonucleotide
  Target: ATXN2; (-) strand; PAM type: YTN; PAM sequence: TTC
tcctccctcagccacctcct

SEQ ID NO: 77290 - DNA, 20 bp, Artificial Sequence
  Description of Artificial Sequence: Synthetic oligonucleotide
  Target: ATXN2; (-) strand; PAM type: YTN; PAM sequence: TTC
aagccgttctcctccctcag

SEQ ID NO: 77291 - DNA, 20 bp, Artificial Sequence
  Description of Artificial Sequence: Synthetic oligonucleotide
  Target: ATXN2; (-) strand; PAM type: YTN; PAM sequence: CTG
ggttcaagccgttctcctcc

SEQ ID NO: 77292 - DNA, 20 bp, Artificial Sequence
  Description of Artificial Sequence: Synthetic oligonucleotide
  Target: ATXN2; (-) strand; PAM type: YTN; PAM sequence: CTC
ctgggttcaagccgttctcc

SEQ ID NO: 77293 - DNA, 20 bp, Artificial Sequence
  Description of Artificial Sequence: Synthetic oligonucleotide
  Target: ATXN2; (-) strand; PAM type: YTN; PAM sequence: CTC
cacctcctgggttcaagccg

SEQ ID NO: 77294 - DNA, 20 bp, Artificial Sequence
  Description of Artificial Sequence: Synthetic oligonucleotide
  Target: ATXN2; (-) strand; PAM type: YTN; PAM sequence: CTG
cagcctccacctcctgggtt

SEQ ID NO: 77295 - DNA, 20 bp, Artificial Sequence
  Description of Artificial Sequence: Synthetic oligonucleotide
  Target: ATXN2; (-) strand; PAM type: YTN; PAM sequence: CTC
actgcagcctccacctcctg

SEQ ID NO: 77296 - DNA, 20 bp, Artificial Sequence
  Description of Artificial Sequence: Synthetic oligonucleotide
  Target: ATXN2; (-) strand; PAM type: YTN; PAM sequence: CTC
ggctcactgcagcctccacc

SEQ ID NO: 77297 - DNA, 20 bp, Artificial Sequence
  Description of Artificial Sequence: Synthetic oligonucleotide
  Target: ATXN2; (-) strand; PAM type: YTN; PAM sequence: CTG
gagtacagtggtgccatctc

SEQ ID NO: 77298 - DNA, 20 bp, Artificial Sequence
  Description of Artificial Sequence: Synthetic oligonucleotide
  Target: ATXN2; (-) strand; PAM type: YTN; PAM sequence: TTG
cccaagctggagtacagtgg

SEQ ID NO: 77299 - DNA, 20 bp, Artificial Sequence
  Description of Artificial Sequence: Synthetic oligonucleotide
  Target: ATXN2; (-) strand; PAM type: YTN; PAM sequence: TTG
ttgcccaagctggagtacag

SEQ ID NO: 77300 - DNA, 20 bp, Artificial Sequence
  Description of Artificial Sequence: Synthetic oligonucleotide
  Target: ATXN2; (-) strand; PAM type: YTN; PAM sequence: CTT
gttgcccaagctggagtaca

SEQ ID NO: 77301 - DNA, 20 bp, Artificial Sequence
  Description of Artificial Sequence: Synthetic oligonucleotide
  Target: ATXN2; (-) strand; PAM type: YTN; PAM sequence: CTC
ttgttgcccaagctggagta

SEQ ID NO: 77302 - DNA, 20 bp, Artificial Sequence
  Description of Artificial Sequence: Synthetic oligonucleotide
  Target: ATXN2; (-) strand; PAM type: YTN; PAM sequence: TTG
ctcttgttgcccaagctgga

SEQ ID NO: 77303 - DNA, 20 bp, Artificial Sequence
  Description of Artificial Sequence: Synthetic oligonucleotide
  Target: ATXN2; (-) strand; PAM type: YTN; PAM sequence: TTT
gctcttgttgcccaagctgg

SEQ ID NO: 77304 - DNA, 20 bp, Artificial Sequence
  Description of Artificial Sequence: Synthetic oligonucleotide
  Target: ATXN2; (-) strand; PAM type: YTN; PAM sequence: TTG
agacggaggtttgctcttgt

SEQ ID NO: 77305 - DNA, 20 bp, Artificial Sequence
  Description of Artificial Sequence: Synthetic oligonucleotide
  Target: ATXN2; (-) strand; PAM type: YTN; PAM sequence: TTT
gagacggaggtttgctcttg

SEQ ID NO: 77306 - DNA, 20 bp, Artificial Sequence
  Description of Artificial Sequence: Synthetic oligonucleotide
  Target: ATXN2; (-) strand; PAM type: YTN; PAM sequence: CTT
tgagacggaggtttgctctt

SEQ ID NO: 77307 - DNA, 20 bp, Artificial Sequence
  Description of Artificial Sequence: Synthetic oligonucleotide
  Target: ATXN2; (-) strand; PAM type: YTN; PAM sequence: TTC
tttgagacggaggtttgctc

SEQ ID NO: 77308 - DNA, 20 bp, Artificial Sequence
  Description of Artificial Sequence: Synthetic oligonucleotide
  Target: ATXN2; (-) strand; PAM type: YTN; PAM sequence: TTT
ctttgagacggaggtttgct

SEQ ID NO: 77309 - DNA, 20 bp, Artificial Sequence
  Description of Artificial Sequence: Synthetic oligonucleotide
  Target: ATXN2; (-) strand; PAM type: YTN; PAM sequence: TTT
tctttgagacggaggtttgc

SEQ ID NO: 77310 - DNA, 20 bp, Artificial Sequence
  Description of Artificial Sequence: Synthetic oligonucleotide
  Target: ATXN2; (-) strand; PAM type: YTN; PAM sequence: TTT
ttctttgagacggaggtttg

SEQ ID NO: 77311 - DNA, 20 bp, Artificial Sequence
  Description of Artificial Sequence: Synthetic oligonucleotide
  Target: ATXN2; (-) strand; PAM type: YTN; PAM sequence: TTT
tttctttgagacggaggttt

SEQ ID NO: 77312 - DNA, 20 bp, Artificial Sequence
  Description of Artificial Sequence: Synthetic oligonucleotide
  Target: ATXN2; (-) strand; PAM type: YTN; PAM sequence: TTT
ttttctttgagacggaggtt

SEQ ID NO: 77313 - DNA, 20 bp, Artificial Sequence
  Description of Artificial Sequence: Synthetic oligonucleotide
  Target: ATXN2; (-) strand; PAM type: YTN; PAM sequence: TTT
tttttctttgagacggaggt

SEQ ID NO: 77314 - DNA, 20 bp, Artificial Sequence
  Description of Artificial Sequence: Synthetic oligonucleotide
  Target: ATXN2; (-) strand; PAM type: YTN; PAM sequence: TTT
ttttttctttgagacggagg

SEQ ID NO: 77315 - DNA, 20 bp, Artificial Sequence
  Description of Artificial Sequence: Synthetic oligonucleotide
  Target: ATXN2; (-) strand; PAM type: YTN; PAM sequence: TTA
tgatttttttttctttgaga

SEQ ID NO: 77316 - DNA, 20 bp, Artificial Sequence
  Description of Artificial Sequence: Synthetic oligonucleotide
  Target: ATXN2; (-) strand; PAM type: YTN; PAM sequence: TTT
atgatttttttttctttgag

SEQ ID NO: 77317 - DNA, 20 bp, Artificial Sequence
  Description of Artificial Sequence: Synthetic oligonucleotide
  Target: ATXN2; (-) strand; PAM type: YTN; PAM sequence: TTT
tatgatttttttttctttga

SEQ ID NO: 77318 - DNA, 20 bp, Artificial Sequence
  Description of Artificial Sequence: Synthetic oligonucleotide
  Target: ATXN2; (-) strand; PAM type: YTN; PAM sequence: TTA
attttatgatttttttttct

SEQ ID NO: 77319 - DNA, 20 bp, Artificial Sequence
  Description of Artificial Sequence: Synthetic oligonucleotide
  Target: ATXN2; (-) strand; PAM type: YTN; PAM sequence: TTT
aattttatgatttttttttc

SEQ ID NO: 77320 - DNA, 20 bp, Artificial Sequence
  Description of Artificial Sequence: Synthetic oligonucleotide
  Target: ATXN2; (-) strand; PAM type: YTN; PAM sequence: TTT
taattttatgattttttttt

SEQ ID NO: 77321 - DNA, 20 bp, Artificial Sequence
  Description of Artificial Sequence: Synthetic oligonucleotide
  Target: ATXN2; (-) strand; PAM type: YTN; PAM sequence: TTA
tgtagtattttaattttatg

SEQ ID NO: 77322 - DNA, 20 bp, Artificial Sequence
  Description of Artificial Sequence: Synthetic oligonucleotide
  Target: ATXN2; (-) strand; PAM type: YTN; PAM sequence: CTT
atgtagtattttaattttat

SEQ ID NO: 77323 - DNA, 20 bp, Artificial Sequence
  Description of Artificial Sequence: Synthetic oligonucleotide
  Target: ATXN2; (-) strand; PAM type: YTN; PAM sequence: TTG
cttatgtagtattttaattt

SEQ ID NO: 77324 - DNA, 20 bp, Artificial Sequence
  Description of Artificial Sequence: Synthetic oligonucleotide
  Target: ATXN2; (-) strand; PAM type: YTN; PAM sequence: TTT
gcttatgtagtattttaatt

SEQ ID NO: 77325 - DNA, 20 bp, Artificial Sequence
  Description of Artificial Sequence: Synthetic oligonucleotide
  Target: ATXN2; (-) strand; PAM type: YTN; PAM sequence: CTG
tgcccagccaagtgagtatt

SEQ ID NO: 77326 - DNA, 20 bp, Artificial Sequence
  Description of Artificial Sequence: Synthetic oligonucleotide
  Target: ATXN2; (-) strand; PAM type: YTN; PAM sequence: TTA
tgagtgtgagccactgtgcc

SEQ ID NO: 77327 - DNA, 20 bp, Artificial Sequence
  Description of Artificial Sequence: Synthetic oligonucleotide
  Target: ATXN2; (-) strand; PAM type: YTN; PAM sequence: TTG
aagtggtgggattatgagtg

SEQ ID NO: 77328 - DNA, 20 bp, Artificial Sequence
  Description of Artificial Sequence: Synthetic oligonucleotide
  Target: ATXN2; (-) strand; PAM type: YTN; PAM sequence: CTT
gaagtggtgggattatgagt

SEQ ID NO: 77329 - DNA, 20 bp, Artificial Sequence
  Description of Artificial Sequence: Synthetic oligonucleotide
  Target: ATXN2; (-) strand; PAM type: YTN; PAM sequence: CTC
ttgaagtggtgggattatga

SEQ ID NO: 77330 - DNA, 20 bp, Artificial Sequence
  Description of Artificial Sequence: Synthetic oligonucleotide
  Target: ATXN2; (-) strand; PAM type: YTN; PAM sequence: TTG
gcctcttgaagtggtgggat

SEQ ID NO: 77331 - DNA, 20 bp, Artificial Sequence
  Description of Artificial Sequence: Synthetic oligonucleotide
  Target: ATXN2; (-) strand; PAM type: YTN; PAM sequence: CTT
ggcctcttgaagtggtggga

SEQ ID NO: 77332 - DNA, 20 bp, Artificial Sequence
  Description of Artificial Sequence: Synthetic oligonucleotide
  Target: ATXN2; (-) strand; PAM type: YTN; PAM sequence: TTC
aggtgatccacccgccttgg

SEQ ID NO: 77333 - DNA, 20 bp, Artificial Sequence
  Description of Artificial Sequence: Synthetic oligonucleotide
  Target: ATXN2; (-) strand; PAM type: YTN; PAM sequence: CTT
caggtgatccacccgccttg

SEQ ID NO: 77334 - DNA, 20 bp, Artificial Sequence
  Description of Artificial Sequence: Synthetic oligonucleotide
  Target: ATXN2; (-) strand; PAM type: YTN; PAM sequence: CTG
acttcaggtgatccacccgc

SEQ ID NO: 77335 - DNA, 20 bp, Artificial Sequence
  Description of Artificial Sequence: Synthetic oligonucleotide
  Target: ATXN2; (-) strand; PAM type: YTN; PAM sequence: CTC
ctgacttcaggtgatccacc

SEQ ID NO: 77336 - DNA, 20 bp, Artificial Sequence
  Description of Artificial Sequence: Synthetic oligonucleotide
  Target: ATXN2; (-) strand; PAM type: YTN; PAM sequence: TTG
aactcctgacttcaggtgat

SEQ ID NO: 77337 - DNA, 20 bp, Artificial Sequence
  Description of Artificial Sequence: Synthetic oligonucleotide
  Target: ATXN2; (-) strand; PAM type: YTN; PAM sequence: CTT
gaactcctgacttcaggtga

SEQ ID NO: 77338 - DNA, 20 bp, Artificial Sequence
  Description of Artificial Sequence: Synthetic oligonucleotide
  Target: ATXN2; (-) strand; PAM type: YTN; PAM sequence: CTG
gtcttgaactcctgacttca

SEQ ID NO: 77339 - DNA, 20 bp, Artificial Sequence
  Description of Artificial Sequence: Synthetic oligonucleotide
  Target: ATXN2; (-) strand; PAM type: YTN; PAM sequence: CTA
ggctggtcttgaactcctga

SEQ ID NO: 77340 - DNA, 20 bp, Artificial Sequence
  Description of Artificial Sequence: Synthetic oligonucleotide
  Target: ATXN2; (-) strand; PAM type: YTN; PAM sequence: TTG
gctaggctggtcttgaactc

SEQ ID NO: 77341 - DNA, 20 bp, Artificial Sequence
  Description of Artificial Sequence: Synthetic oligonucleotide
  Target: ATXN2; (-) strand; PAM type: YTN; PAM sequence: TTC
accatgttggctaggctggt

SEQ ID NO: 77342 - DNA, 20 bp, Artificial Sequence
  Description of Artificial Sequence: Synthetic oligonucleotide
  Target: ATXN2; (-) strand; PAM type: YTN; PAM sequence: TTT
caccatgttggctaggctgg

SEQ ID NO: 77343 - DNA, 20 bp, Artificial Sequence
  Description of Artificial Sequence: Synthetic oligonucleotide
  Target: ATXN2; (-) strand; PAM type: YTN; PAM sequence: TTA
gtagaggtggagtttcacca

SEQ ID NO: 77344 - DNA, 20 bp, Artificial Sequence
  Description of Artificial Sequence: Synthetic oligonucleotide
  Target: ATXN2; (-) strand; PAM type: YTN; PAM sequence: TTT
agtagaggtggagtttcacc

SEQ ID NO: 77345 - DNA, 20 bp, Artificial Sequence
  Description of Artificial Sequence: Synthetic oligonucleotide
  Target: ATXN2; (-) strand; PAM type: YTN; PAM sequence: TTT
tagtagaggtggagtttcac

SEQ ID NO: 77346 - DNA, 20 bp, Artificial Sequence
  Description of Artificial Sequence: Synthetic oligonucleotide
  Target: ATXN2; (-) strand; PAM type: YTN; PAM sequence: TTA
tagttttagtagaggtggag

SEQ ID NO: 77347 - DNA, 20 bp, Artificial Sequence
  Description of Artificial Sequence: Synthetic oligonucleotide
  Target: ATXN2; (-) strand; PAM type: YTN; PAM sequence: TTT
atagttttagtagaggtgga

SEQ ID NO: 77348 - DNA, 20 bp, Artificial Sequence
  Description of Artificial Sequence: Synthetic oligonucleotide
  Target: ATXN2; (-) strand; PAM type: YTN; PAM sequence: TTT
tatagttttagtagaggtgg

SEQ ID NO: 77349 - DNA, 20 bp, Artificial Sequence
  Description of Artificial Sequence: Synthetic oligonucleotide
  Target: ATXN2; (-) strand; PAM type: YTN; PAM sequence: TTT
ttatagttttagtagaggtg

SEQ ID NO: 77350 - DNA, 20 bp, Artificial Sequence
  Description of Artificial Sequence: Synthetic oligonucleotide
  Target: ATXN2; (-) strand; PAM type: YTN; PAM sequence: CTA
atttttatagttttagtaga

SEQ ID NO: 77351 - DNA, 20 bp, Artificial Sequence
  Description of Artificial Sequence: Synthetic oligonucleotide
  Target: ATXN2; (-) strand; PAM type: YTN; PAM sequence: TTA
cagacatgtgccaccacacg

SEQ ID NO: 77352 - DNA, 20 bp, Artificial Sequence
  Description of Artificial Sequence: Synthetic oligonucleotide
  Target: ATXN2; (-) strand; PAM type: YTN; PAM sequence: CTG
ggattacagacatgtgccac

SEQ ID NO: 77353 - DNA, 20 bp, Artificial Sequence
  Description of Artificial Sequence: Synthetic oligonucleotide
  Target: ATXN2; (-) strand; PAM type: YTN; PAM sequence: CTC
ccaagtagctgggattacag

SEQ ID NO: 77354 - DNA, 20 bp, Artificial Sequence
  Description of Artificial Sequence: Synthetic oligonucleotide
  Target: ATXN2; (-) strand; PAM type: YTN; PAM sequence: CTC
agcctcccaagtagctggga

SEQ ID NO: 77355 - DNA, 20 bp, Artificial Sequence
  Description of Artificial Sequence: Synthetic oligonucleotide
  Target: ATXN2; (-) strand; PAM type: YTN; PAM sequence: TTG
tgcctcagcctcccaagtag

SEQ ID NO: 77356 - DNA, 20 bp, Artificial Sequence
  Description of Artificial Sequence: Synthetic oligonucleotide
  Target: ATXN2; (-) strand; PAM type: YTN; PAM sequence: CTT
gtgcctcagcctcccaagta

SEQ ID NO: 77357 - DNA, 20 bp, Artificial Sequence
  Description of Artificial Sequence: Synthetic oligonucleotide
  Target: ATXN2; (-) strand; PAM type: YTN; PAM sequence: TTC
ttgtgcctcagcctcccaag

SEQ ID NO: 77358 - DNA, 20 bp, Artificial Sequence
  Description of Artificial Sequence: Synthetic oligonucleotide
  Target: ATXN2; (-) strand; PAM type: YTN; PAM sequence: TTC
aagcaattcttgtgcctcag

SEQ ID NO: 77359 - DNA, 20 bp, Artificial Sequence
  Description of Artificial Sequence: Synthetic oligonucleotide
  Target: ATXN2; (-) strand; PAM type: YTN; PAM sequence: CTG
agttcaagcaattcttgtgc

SEQ ID NO: 77360 - DNA, 20 bp, Artificial Sequence
  Description of Artificial Sequence: Synthetic oligonucleotide
  Target: ATXN2; (-) strand; PAM type: YTN; PAM sequence: CTC
ctgagttcaagcaattcttg

SEQ ID NO: 77361 - DNA, 20 bp, Artificial Sequence
  Description of Artificial Sequence: Synthetic oligonucleotide
  Target: ATXN2; (-) strand; PAM type: YTN; PAM sequence: CTC
cgcctcctgagttcaagcaa

SEQ ID NO: 77362 - DNA, 20 bp, Artificial Sequence
  Description of Artificial Sequence: Synthetic oligonucleotide
  Target: ATXN2; (-) strand; PAM type: YTN; PAM sequence: TTG
cagtggcatgaactccgcct

SEQ ID NO: 77363 - DNA, 20 bp, Artificial Sequence
  Description of Artificial Sequence: Synthetic oligonucleotide
  Target: ATXN2; (-) strand; PAM type: YTN; PAM sequence: CTG
cattgcagtggcatgaactc

SEQ ID NO: 77364 - DNA, 20 bp, Artificial Sequence
  Description of Artificial Sequence: Synthetic oligonucleotide
  Target: ATXN2; (-) strand; PAM type: YTN; PAM sequence: CTG
tcacccaggctgcattgcag

SEQ ID NO: 77365 - DNA, 20 bp, Artificial Sequence
  Description of Artificial Sequence: Synthetic oligonucleotide
  Target: ATXN2; (-) strand; PAM type: YTN; PAM sequence: CTC
tgtcacccaggctgcattgc

SEQ ID NO: 77366 - DNA, 20 bp, Artificial Sequence
  Description of Artificial Sequence: Synthetic oligonucleotide
  Target: ATXN2; (-) strand; PAM type: YTN; PAM sequence: TTG
ctctgtcacccaggctgcat

SEQ ID NO: 77367 - DNA, 20 bp, Artificial Sequence
  Description of Artificial Sequence: Synthetic oligonucleotide
  Target: ATXN2; (-) strand; PAM type: YTN; PAM sequence: CTT
gctctgtcacccaggctgca

SEQ ID NO: 77368 - DNA, 20 bp, Artificial Sequence
  Description of Artificial Sequence: Synthetic oligonucleotide
  Target: ATXN2; (-) strand; PAM type: YTN; PAM sequence: CTC
aaaaaaaacagaaagacgga

SEQ ID NO: 77369 - DNA, 20 bp, Artificial Sequence
  Description of Artificial Sequence: Synthetic oligonucleotide
  Target: ATXN2; (-) strand; PAM type: YTN; PAM sequence: CTG
tctcaaaaaaaacagaaaga

SEQ ID NO: 77370 - DNA, 20 bp, Artificial Sequence
  Description of Artificial Sequence: Synthetic oligonucleotide
  Target: ATXN2; (-) strand; PAM type: YTN; PAM sequence: CTC
tgtctcaaaaaaaacagaaa

SEQ ID NO: 77371 - DNA, 20 bp, Artificial Sequence
  Description of Artificial Sequence: Synthetic oligonucleotide
  Target: ATXN2; (-) strand; PAM type: YTN; PAM sequence: CTG
agcgacagaggtagactctg

SEQ ID NO: 77372 - DNA, 20 bp, Artificial Sequence
  Description of Artificial Sequence: Synthetic oligonucleotide
  Target: ATXN2; (-) strand; PAM type: YTN; PAM sequence: CTC
cagcctgagcgacagaggta

SEQ ID NO: 77373 - DNA, 20 bp, Artificial Sequence
  Description of Artificial Sequence: Synthetic oligonucleotide
  Target: ATXN2; (-) strand; PAM type: YTN; PAM sequence: CTG
cactccagcctgagcgacag

SEQ ID NO: 77374 - DNA, 20 bp, Artificial Sequence
  Description of Artificial Sequence: Synthetic oligonucleotide
  Target: ATXN2; (-) strand; PAM type: YTN; PAM sequence: TTG
cagtgagtcaagatcatgcc

SEQ ID NO: 77375 - DNA, 20 bp, Artificial Sequence
  Description of Artificial Sequence: Synthetic oligonucleotide
  Target: ATXN2; (-) strand; PAM type: YTN; PAM sequence: TTG
aacccaggaggtggaggttg

SEQ ID NO: 77376 - DNA, 20 bp, Artificial Sequence
  Description of Artificial Sequence: Synthetic oligonucleotide
  Target: ATXN2; (-) strand; PAM type: YTN; PAM sequence: CTT
gaacccaggaggtggaggtt

SEQ ID NO: 77377 - DNA, 20 bp, Artificial Sequence
  Description of Artificial Sequence: Synthetic oligonucleotide
  Target: ATXN2; (-) strand; PAM type: YTN; PAM sequence: TTG
cttgaacccaggaggtggag

SEQ ID NO: 77378 - DNA, 20 bp, Artificial Sequence
  Description of Artificial Sequence: Synthetic oligonucleotide
  Target: ATXN2; (-) strand; PAM type: YTN; PAM sequence: CTG
aggcaggagaattgcttgaa

SEQ ID NO: 77379 - DNA, 20 bp, Artificial Sequence
  Description of Artificial Sequence: Synthetic oligonucleotide
  Target: ATXN2; (-) strand; PAM type: YTN; PAM sequence: CTC
gggaggctgaggcaggagaa

SEQ ID NO: 77380 - DNA, 20 bp, Artificial Sequence
  Description of Artificial Sequence: Synthetic oligonucleotide
  Target: ATXN2; (-) strand; PAM type: YTN; PAM sequence: CTA
ctcgggaggctgaggcagga

SEQ ID NO: 77381 - DNA, 20 bp, Artificial Sequence
  Description of Artificial Sequence: Synthetic oligonucleotide
  Target: ATXN2; (-) strand; PAM type: YTN; PAM sequence: CTG
tagtcccagctactcgggag

SEQ ID NO: 77382 - DNA, 20 bp, Artificial Sequence
  Description of Artificial Sequence: Synthetic oligonucleotide
  Target: ATXN2; (-) strand; PAM type: YTN; PAM sequence: CTG
ggcatggtggcacacgcctg

SEQ ID NO: 77383 - DNA, 20 bp, Artificial Sequence
  Description of Artificial Sequence: Synthetic oligonucleotide
  Target: ATXN2; (-) strand; PAM type: YTN; PAM sequence: TTA
actgggcatggtggcacacg

SEQ ID NO: 77384 - DNA, 20 bp, Artificial Sequence
  Description of Artificial Sequence: Synthetic oligonucleotide
  Target: ATXN2; (-) strand; PAM type: YTN; PAM sequence: CTA
aaaatacaaaaaattaactg

SEQ ID NO: 77385 - DNA, 20 bp, Artificial Sequence
  Description of Artificial Sequence: Synthetic oligonucleotide
  Target: ATXN2; (-) strand; PAM type: YTN; PAM sequence: CTA
ctaaaaatacaaaaaattaa

SEQ ID NO: 77386 - DNA, 20 bp, Artificial Sequence
  Description of Artificial Sequence: Synthetic oligonucleotide
  Target: ATXN2; (-) strand; PAM type: YTN; PAM sequence: CTC
tactaaaaatacaaaaaatt

SEQ ID NO: 77387 - DNA, 20 bp, Artificial Sequence
  Description of Artificial Sequence: Synthetic oligonucleotide
  Target: ATXN2; (-) strand; PAM type: YTN; PAM sequence: CTG
tctctactaaaaatacaaaa

SEQ ID NO: 77388 - DNA, 20 bp, Artificial Sequence
  Description of Artificial Sequence: Synthetic oligonucleotide
  Target: ATXN2; (-) strand; PAM type: YTN; PAM sequence: CTA
acatggtgaaaccctgtctc

SEQ ID NO: 77389 - DNA, 20 bp, Artificial Sequence
  Description of Artificial Sequence: Synthetic oligonucleotide
  Target: ATXN2; (-) strand; PAM type: YTN; PAM sequence: CTG
gctaacatggtgaaaccctg

SEQ ID NO: 77390 - DNA, 20 bp, Artificial Sequence
  Description of Artificial Sequence: Synthetic oligonucleotide
  Target: ATXN2; (-) strand; PAM type: YTN; PAM sequence: TTG
gaaggccgaggtgggtggat

SEQ ID NO: 77391 - DNA, 20 bp, Artificial Sequence
  Description of Artificial Sequence: Synthetic oligonucleotide
  Target: ATXN2; (-) strand; PAM type: YTN; PAM sequence: TTT
ggaaggccgaggtgggtgga

SEQ ID NO: 77392 - DNA, 20 bp, Artificial Sequence
  Description of Artificial Sequence: Synthetic oligonucleotide
  Target: ATXN2; (-) strand; PAM type: YTN; PAM sequence: CTT
tggaaggccgaggtgggtgg

SEQ ID NO: 77393 - DNA, 20 bp, Artificial Sequence
  Description of Artificial Sequence: Synthetic oligonucleotide
  Target: ATXN2; (-) strand; PAM type: YTN; PAM sequence: CTG
taatcccagcactttggaag

SEQ ID NO: 77394 - DNA, 20 bp, Artificial Sequence
  Description of Artificial Sequence: Synthetic oligonucleotide
  Target: ATXN2; (-) strand; PAM type: YTN; PAM sequence: CTC
acacctgtaatcccagcact

SEQ ID NO: 77395 - DNA, 20 bp, Artificial Sequence
  Description of Artificial Sequence: Synthetic oligonucleotide
  Target: ATXN2; (-) strand; PAM type: YTN; PAM sequence: CTC
gaggccgggcgcagtggctc

SEQ ID NO: 77396 - DNA, 20 bp, Artificial Sequence
  Description of Artificial Sequence: Synthetic oligonucleotide
  Target: ATXN2; (-) strand; PAM type: YTN; PAM sequence: TTA
aggtggagtctcgaggccgg

SEQ ID NO: 77397 - DNA, 20 bp, Artificial Sequence
  Description of Artificial Sequence: Synthetic oligonucleotide
  Target: ATXN2; (-) strand; PAM type: YTN; PAM sequence: TTT
aaggtggagtctcgaggccg

SEQ ID NO: 77398 - DNA, 20 bp, Artificial Sequence
  Description of Artificial Sequence: Synthetic oligonucleotide
  Target: ATXN2; (-) strand; PAM type: YTN; PAM sequence: TTT
taaggtggagtctcgaggcc

SEQ ID NO: 77399 - DNA, 20 bp, Artificial Sequence
  Description of Artificial Sequence: Synthetic oligonucleotide
  Target: ATXN2; (-) strand; PAM type: YTN; PAM sequence: TTT
ttaaggtggagtctcgaggc

SEQ ID NO: 77400 - DNA, 20 bp, Artificial Sequence
  Description of Artificial Sequence: Synthetic oligonucleotide
  Target: ATXN2; (-) strand; PAM type: YTN; PAM sequence: TTT
tttaaggtggagtctcgagg

SEQ ID NO: 77401 - DNA, 20 bp, Artificial Sequence
  Description of Artificial Sequence: Synthetic oligonucleotide
  Target: ATXN2; (-) strand; PAM type: YTN; PAM sequence: TTT
ttttaaggtggagtctcgag

SEQ ID NO: 77402 - DNA, 20 bp, Artificial Sequence
  Description of Artificial Sequence: Synthetic oligonucleotide
  Target: ATXN2; (-) strand; PAM type: YTN; PAM sequence: TTT
tttttaaggtggagtctcga

SEQ ID NO: 77403 - DNA, 20 bp, Artificial Sequence
  Description of Artificial Sequence: Synthetic oligonucleotide
  Target: ATXN2; (-) strand; PAM type: YTN; PAM sequence: TTT
ttttttaaggtggagtctcg

SEQ ID NO: 77404 - DNA, 20 bp, Artificial Sequence
  Description of Artificial Sequence: Synthetic oligonucleotide
  Target: ATXN2; (-) strand; PAM type: YTN; PAM sequence: TTT
tttttttaaggtggagtctc

SEQ ID NO: 77405 - DNA, 20 bp, Artificial Sequence
  Description of Artificial Sequence: Synthetic oligonucleotide
  Target: ATXN2; (-) strand; PAM type: YTN; PAM sequence: TTT
ttttttttaaggtggagtct

SEQ ID NO: 77406 - DNA, 20 bp, Artificial Sequence
  Description of Artificial Sequence: Synthetic oligonucleotide
  Target: ATXN2; (-) strand; PAM type: YTN; PAM sequence: TTT
tttttttttaaggtggagtc

SEQ ID NO: 77407 - DNA, 20 bp, Artificial Sequence
  Description of Artificial Sequence: Synthetic oligonucleotide
  Target: ATXN2; (-) strand; PAM type: YTN; PAM sequence: TTT
ttttttttttaaggtggagt

SEQ ID NO: 77408 - DNA, 20 bp, Artificial Sequence
  Description of Artificial Sequence: Synthetic oligonucleotide
  Target: ATXN2; (-) strand; PAM type: YTN; PAM sequence: CTT
tttttttttttaaggtggag

SEQ ID NO: 77409 - DNA, 20 bp, Artificial Sequence
  Description of Artificial Sequence: Synthetic oligonucleotide
  Target: ATXN2; (-) strand; PAM type: YTN; PAM sequence: TTC
tttttttttttttaaggtgg

SEQ ID NO: 77410 - DNA, 20 bp, Artificial Sequence
  Description of Artificial Sequence: Synthetic oligonucleotide
  Target: ATXN2; (-) strand; PAM type: YTN; PAM sequence: TTT
ctttttttttttttaaggtg

SEQ ID NO: 77411 - DNA, 20 bp, Artificial Sequence
  Description of Artificial Sequence: Synthetic oligonucleotide
  Target: ATXN2; (-) strand; PAM type: YTN; PAM sequence: TTT
tctttttttttttttaaggt

SEQ ID NO: 77412 - DNA, 20 bp, Artificial Sequence
  Description of Artificial Sequence: Synthetic oligonucleotide
  Target: ATXN2; (-) strand; PAM type: YTN; PAM sequence: CTG
gcaagtgcatattttctttt

SEQ ID NO: 77413 - DNA, 20 bp, Artificial Sequence
  Description of Artificial Sequence: Synthetic oligonucleotide
  Target: ATXN2; (-) strand; PAM type: YTN; PAM sequence: TTG
tacctggcaagtgcatattt

SEQ ID NO: 77414 - DNA, 20 bp, Artificial Sequence
  Description of Artificial Sequence: Synthetic oligonucleotide
  Target: ATXN2; (-) strand; PAM type: YTN; PAM sequence: TTA
caggcatgagccattgtacc

SEQ ID NO: 77415 - DNA, 20 bp, Artificial Sequence
  Description of Artificial Sequence: Synthetic oligonucleotide
  Target: ATXN2; (-) strand; PAM type: YTN; PAM sequence: TTG
gcattacaggcatgagccat

SEQ ID NO: 77416 - DNA, 20 bp, Artificial Sequence
  Description of Artificial Sequence: Synthetic oligonucleotide
  Target: ATXN2; (-) strand; PAM type: YTN; PAM sequence: TTA
gttggcattacaggcatgag

SEQ ID NO: 77417 - DNA, 20 bp, Artificial Sequence
  Description of Artificial Sequence: Synthetic oligonucleotide
  Target: ATXN2; (-) strand; PAM type: YTN; PAM sequence: CTG
gattagttggcattacaggc

SEQ ID NO: 77418 - DNA, 20 bp, Artificial Sequence
  Description of Artificial Sequence: Synthetic oligonucleotide
  Target: ATXN2; (-) strand; PAM type: YTN; PAM sequence: CTC
tggattagttggcattacag

SEQ ID NO: 77419 - DNA, 20 bp, Artificial Sequence
  Description of Artificial Sequence: Synthetic oligonucleotide
  Target: ATXN2; (-) strand; PAM type: YTN; PAM sequence: CTC
agcctctggattagttggca

SEQ ID NO: 77420 - DNA, 20 bp, Artificial Sequence
  Description of Artificial Sequence: Synthetic oligonucleotide
  Target: ATXN2; (-) strand; PAM type: YTN; PAM sequence: CTG
cctcagcctctggattagtt

SEQ ID NO: 77421 - DNA, 20 bp, Artificial Sequence
  Description of Artificial Sequence: Synthetic oligonucleotide
  Target: ATXN2; (-) strand; PAM type: YTN; PAM sequence: TTC
tgcctcagcctctggattag

SEQ ID NO: 77422 - DNA, 20 bp, Artificial Sequence
  Description of Artificial Sequence: Synthetic oligonucleotide
  Target: ATXN2; (-) strand; PAM type: YTN; PAM sequence: CTT
ctgcctcagcctctggatta

SEQ ID NO: 77423 - DNA, 20 bp, Artificial Sequence
  Description of Artificial Sequence: Synthetic oligonucleotide
  Target: ATXN2; (-) strand; PAM type: YTN; PAM sequence: TTA
agtggtccttctgcctcagc

SEQ ID NO: 77424 - DNA, 20 bp, Artificial Sequence
  Description of Artificial Sequence: Synthetic oligonucleotide
  Target: ATXN2; (-) strand; PAM type: YTN; PAM sequence: CTT
aagtggtccttctgcctcag

SEQ ID NO: 77425 - DNA, 20 bp, Artificial Sequence
  Description of Artificial Sequence: Synthetic oligonucleotide
  Target: ATXN2; (-) strand; PAM type: YTN; PAM sequence: CTC
cgggtcttaagtggtccttc

SEQ ID NO: 77426 - DNA, 20 bp, Artificial Sequence
  Description of Artificial Sequence: Synthetic oligonucleotide
  Target: ATXN2; (-) strand; PAM type: YTN; PAM sequence: TTG
aactccgggtcttaagtggt

SEQ ID NO: 77427 - DNA, 20 bp, Artificial Sequence
  Description of Artificial Sequence: Synthetic oligonucleotide
  Target: ATXN2; (-) strand; PAM type: YTN; PAM sequence: CTT
gaactccgggtcttaagtgg

SEQ ID NO: 77428 - DNA, 20 bp, Artificial Sequence
  Description of Artificial Sequence: Synthetic oligonucleotide
  Target: ATXN2; (-) strand; PAM type: YTN; PAM sequence: CTC
aggatggtcttgaactccgg

SEQ ID NO: 77429 - DNA, 20 bp, Artificial Sequence
  Description of Artificial Sequence: Synthetic oligonucleotide
  Target: ATXN2; (-) strand; PAM type: YTN; PAM sequence: TTG
ctcaggatggtcttgaactc

SEQ ID NO: 77430 - DNA, 20 bp, Artificial Sequence
  Description of Artificial Sequence: Synthetic oligonucleotide
  Target: ATXN2; (-) strand; PAM type: YTN; PAM sequence: TTG
cgaagttgctcaggatggtc

SEQ ID NO: 77431 - DNA, 20 bp, Artificial Sequence
  Description of Artificial Sequence: Synthetic oligonucleotide
  Target: ATXN2; (-) strand; PAM type: YTN; PAM sequence: CTT
gcgaagttgctcaggatggt

SEQ ID NO: 77432 - DNA, 20 bp, Artificial Sequence
  Description of Artificial Sequence: Synthetic oligonucleotide
  Target: ATXN2; (-) strand; PAM type: YTN; PAM sequence: TTA
gagatggggtcttgcgaagt

SEQ ID NO: 77433 - DNA, 20 bp, Artificial Sequence
  Description of Artificial Sequence: Synthetic oligonucleotide
  Target: ATXN2; (-) strand; PAM type: YTN; PAM sequence: TTT
agagatggggtcttgcgaag

SEQ ID NO: 77434 - DNA, 20 bp, Artificial Sequence
  Description of Artificial Sequence: Synthetic oligonucleotide
  Target: ATXN2; (-) strand; PAM type: YTN; PAM sequence: TTT
tagagatggggtcttgcgaa

SEQ ID NO: 77435 - DNA, 20 bp, Artificial Sequence
  Description of Artificial Sequence: Synthetic oligonucleotide
  Target: ATXN2; (-) strand; PAM type: YTN; PAM sequence: CTA
ttttagagatggggtcttgc

SEQ ID NO: 77436 - DNA, 20 bp, Artificial Sequence
  Description of Artificial Sequence: Synthetic oligonucleotide
  Target: ATXN2; (-) strand; PAM type: YTN; PAM sequence: TTA
aaactattttagagatgggg

SEQ ID NO: 77437 - DNA, 20 bp, Artificial Sequence
  Description of Artificial Sequence: Synthetic oligonucleotide
  Target: ATXN2; (-) strand; PAM type: YTN; PAM sequence: TTT
aaaactattttagagatggg

SEQ ID NO: 77438 - DNA, 20 bp, Artificial Sequence
  Description of Artificial Sequence: Synthetic oligonucleotide
  Target: ATXN2; (-) strand; PAM type: YTN; PAM sequence: TTT
taaaactattttagagatgg

SEQ ID NO: 77439 - DNA, 20 bp, Artificial Sequence
  Description of Artificial Sequence: Synthetic oligonucleotide
  Target: ATXN2; (-) strand; PAM type: YTN; PAM sequence: TTT
ttaaaactattttagagatg

SEQ ID NO: 77440 - DNA, 20 bp, Artificial Sequence
  Description of Artificial Sequence: Synthetic oligonucleotide
  Target: ATXN2; (-) strand; PAM type: YTN; PAM sequence: TTT
tttaaaactattttagagat

SEQ ID NO: 77441 - DNA, 20 bp, Artificial Sequence
  Description of Artificial Sequence: Synthetic oligonucleotide
  Target: ATXN2; (-) strand; PAM type: YTN; PAM sequence: CTG
ttttttaaaactattttaga

SEQ ID NO: 77442 - DNA, 20 bp, Artificial Sequence
  Description of Artificial Sequence: Synthetic oligonucleotide
  Target: ATXN2; (-) strand; PAM type: YTN; PAM sequence: CTG
actgttttttaaaactattt

SEQ ID NO: 77443 - DNA, 20 bp, Artificial Sequence
  Description of Artificial Sequence: Synthetic oligonucleotide
  Target: ATXN2; (-) strand; PAM type: YTN; PAM sequence: CTG
cataacacctgactgttttt

SEQ ID NO: 77444 - DNA, 20 bp, Artificial Sequence
  Description of Artificial Sequence: Synthetic oligonucleotide
  Target: ATXN2; (-) strand; PAM type: YTN; PAM sequence: CTA
caggcacctgcataacacct

SEQ ID NO: 77445 - DNA, 20 bp, Artificial Sequence
  Description of Artificial Sequence: Synthetic oligonucleotide
  Target: ATXN2; (-) strand; PAM type: YTN; PAM sequence: CTG
ggactacaggcacctgcata

SEQ ID NO: 77446 - DNA, 20 bp, Artificial Sequence
  Description of Artificial Sequence: Synthetic oligonucleotide
  Target: ATXN2; (-) strand; PAM type: YTN; PAM sequence: CTG
tagctgggactacaggcacc

SEQ ID NO: 77447 - DNA, 20 bp, Artificial Sequence
  Description of Artificial Sequence: Synthetic oligonucleotide
  Target: ATXN2; (-) strand; PAM type: YTN; PAM sequence: CTC
ccatctgtagctgggactac

SEQ ID NO: 77448 - DNA, 20 bp, Artificial Sequence
  Description of Artificial Sequence: Synthetic oligonucleotide
  Target: ATXN2; (-) strand; PAM type: YTN; PAM sequence: CTC
aagtgaacctcccatctgta

SEQ ID NO: 77449 - DNA, 20 bp, Artificial Sequence
  Description of Artificial Sequence: Synthetic oligonucleotide
  Target: ATXN2; (-) strand; PAM type: YTN; PAM sequence: CTG
ggctcaagtgaacctcccat

SEQ ID NO: 77450 - DNA, 20 bp, Artificial Sequence
  Description of Artificial Sequence: Synthetic oligonucleotide
  Target: ATXN2; (-) strand; PAM type: YTN; PAM sequence: CTC
ctgggctcaagtgaacctcc

SEQ ID NO: 77451 - DNA, 20 bp, Artificial Sequence
  Description of Artificial Sequence: Synthetic oligonucleotide
  Target: ATXN2; (-) strand; PAM type: YTN; PAM sequence: CTC
aaactcctgggctcaagtga

SEQ ID NO: 77452 - DNA, 20 bp, Artificial Sequence
  Description of Artificial Sequence: Synthetic oligonucleotide
  Target: ATXN2; (-) strand; PAM type: YTN; PAM sequence: CTG
cagcctcaaactcctgggct

SEQ ID NO: 77453 - DNA, 20 bp, Artificial Sequence
  Description of Artificial Sequence: Synthetic oligonucleotide
  Target: ATXN2; (-) strand; PAM type: YTN; PAM sequence: TTC
actgcagcctcaaactcctg

SEQ ID NO: 77454 - DNA, 20 bp, Artificial Sequence
  Description of Artificial Sequence: Synthetic oligonucleotide
  Target: ATXN2; (-) strand; PAM type: YTN; PAM sequence: CTG
gagtgcagtggcatgatgat

SEQ ID NO: 77455 - DNA, 20 bp, Artificial Sequence
  Description of Artificial Sequence: Synthetic oligonucleotide
  Target: ATXN2; (-) strand; PAM type: YTN; PAM sequence: TTG
tcaccaaggctggagtgcag

SEQ ID NO: 77456 - DNA, 20 bp, Artificial Sequence
  Description of Artificial Sequence: Synthetic oligonucleotide
  Target: ATXN2; (-) strand; PAM type: YTN; PAM sequence: TTT
gtcaccaaggctggagtgca

SEQ ID NO: 77457 - DNA, 20 bp, Artificial Sequence
  Description of Artificial Sequence: Synthetic oligonucleotide
  Target: ATXN2; (-) strand; PAM type: YTN; PAM sequence: CTT
tgtcaccaaggctggagtgc

SEQ ID NO: 77458 - DNA, 20 bp, Artificial Sequence
  Description of Artificial Sequence: Synthetic oligonucleotide
  Target: ATXN2; (-) strand; PAM type: YTN; PAM sequence: CTG
ctttgtcaccaaggctggag

SEQ ID NO: 77459 - DNA, 20 bp, Artificial Sequence
  Description of Artificial Sequence: Synthetic oligonucleotide
  Target: ATXN2; (-) strand; PAM type: YTN; PAM sequence: TTA
agagatagagtcctgctttg

SEQ ID NO: 77460 - DNA, 20 bp, Artificial Sequence
  Description of Artificial Sequence: Synthetic oligonucleotide
  Target: ATXN2; (-) strand; PAM type: YTN; PAM sequence: TTT
aagagatagagtcctgcttt

SEQ ID NO: 77461 - DNA, 20 bp, Artificial Sequence
  Description of Artificial Sequence: Synthetic oligonucleotide
  Target: ATXN2; (-) strand; PAM type: YTN; PAM sequence: TTT
taagagatagagtcctgctt

SEQ ID NO: 77462 - DNA, 20 bp, Artificial Sequence
  Description of Artificial Sequence: Synthetic oligonucleotide
  Target: ATXN2; (-) strand; PAM type: YTN; PAM sequence: CTT
ttaagagatagagtcctgct

SEQ ID NO: 77463 - DNA, 20 bp, Artificial Sequence
  Description of Artificial Sequence: Synthetic oligonucleotide
  Target: ATXN2; (-) strand; PAM type: YTN; PAM sequence: CTC
ttttaagagatagagtcctg

SEQ ID NO: 77464 - DNA, 20 bp, Artificial Sequence
  Description of Artificial Sequence: Synthetic oligonucleotide
  Target: ATXN2; (-) strand; PAM type: YTN; PAM sequence: TTC
tcttttaagagatagagtcc

SEQ ID NO: 77465 - DNA, 20 bp, Artificial Sequence
  Description of Artificial Sequence: Synthetic oligonucleotide
  Target: ATXN2; (-) strand; PAM type: YTN; PAM sequence: TTT
ctcttttaagagatagagtc

SEQ ID NO: 77466 - DNA, 20 bp, Artificial Sequence
  Description of Artificial Sequence: Synthetic oligonucleotide
  Target: ATXN2; (-) strand; PAM type: YTN; PAM sequence: TTT
tctcttttaagagatagagt

SEQ ID NO: 77467 - DNA, 20 bp, Artificial Sequence
  Description of Artificial Sequence: Synthetic oligonucleotide
  Target: ATXN2; (-) strand; PAM type: YTN; PAM sequence: TTT
ttctcttttaagagatagag

SEQ ID NO: 77468 - DNA, 20 bp, Artificial Sequence
  Description of Artificial Sequence: Synthetic oligonucleotide
  Target: ATXN2; (-) strand; PAM type: YTN; PAM sequence: CTT
tttctcttttaagagataga

SEQ ID NO: 77469 - DNA, 20 bp, Artificial Sequence
  Description of Artificial Sequence: Synthetic oligonucleotide
  Target: ATXN2; (-) strand; PAM type: YTN; PAM sequence: TTC
tttttctcttttaagagata

SEQ ID NO: 77470 - DNA, 20 bp, Artificial Sequence
  Description of Artificial Sequence: Synthetic oligonucleotide
  Target: ATXN2; (-) strand; PAM type: YTN; PAM sequence: CTT
ctttttctcttttaagagat

SEQ ID NO: 77471 - DNA, 20 bp, Artificial Sequence
  Description of Artificial Sequence: Synthetic oligonucleotide
  Target: ATXN2; (-) strand; PAM type: YTN; PAM sequence: CTG
ccacaccaggccttcttttt

SEQ ID NO: 77472 - DNA, 20 bp, Artificial Sequence
  Description of Artificial Sequence: Synthetic oligonucleotide
  Target: ATXN2; (-) strand; PAM type: YTN; PAM sequence: TTA
caggcgtgagctgccacacc

SEQ ID NO: 77473 - DNA, 20 bp, Artificial Sequence
  Description of Artificial Sequence: Synthetic oligonucleotide
  Target: ATXN2; (-) strand; PAM type: YTN; PAM sequence: CTA
ggattacaggcgtgagctgc

SEQ ID NO: 77474 - DNA, 20 bp, Artificial Sequence
  Description of Artificial Sequence: Synthetic oligonucleotide
  Target: ATXN2; (-) strand; PAM type: YTN; PAM sequence: CTC
ccagagtgctaggattacag

SEQ ID NO: 77475 - DNA, 20 bp, Artificial Sequence
  Description of Artificial Sequence: Synthetic oligonucleotide
  Target: ATXN2; (-) strand; PAM type: YTN; PAM sequence: CTC
agcctcccagagtgctagga

SEQ ID NO: 77476 - DNA, 20 bp, Artificial Sequence
  Description of Artificial Sequence: Synthetic oligonucleotide
  Target: ATXN2; (-) strand; PAM type: YTN; PAM sequence: CTC
aggtgatccacccacctcag

SEQ ID NO: 77477 - DNA, 20 bp, Artificial Sequence
  Description of Artificial Sequence: Synthetic oligonucleotide
  Target: ATXN2; (-) strand; PAM type: YTN; PAM sequence: CTC
ccgacctcaggtgatccacc

SEQ ID NO: 77478 - DNA, 20 bp, Artificial Sequence
  Description of Artificial Sequence: Synthetic oligonucleotide
  Target: ATXN2; (-) strand; PAM type: YTN; PAM sequence: CTC
caactcccgacctcaggtga

SEQ ID NO: 77479 - DNA, 20 bp, Artificial Sequence
  Description of Artificial Sequence: Synthetic oligonucleotide
  Target: ATXN2; (-) strand; PAM type: YTN; PAM sequence: CTG
gtctccaactcccgacctca

SEQ ID NO: 77480 - DNA, 20 bp, Artificial Sequence
  Description of Artificial Sequence: Synthetic oligonucleotide
  Target: ATXN2; (-) strand; PAM type: YTN; PAM sequence: TTG
gtcaggctggtctccaactc

SEQ ID NO: 77481 - DNA, 20 bp, Artificial Sequence
  Description of Artificial Sequence: Synthetic oligonucleotide
  Target: ATXN2; (-) strand; PAM type: YTN; PAM sequence: TTC
catgttggtcaggctggtct

SEQ ID NO: 77482 - DNA, 20 bp, Artificial Sequence
  Description of Artificial Sequence: Synthetic oligonucleotide
  Target: ATXN2; (-) strand; PAM type: YTN; PAM sequence: TTT
ccatgttggtcaggctggtc

SEQ ID NO: 77483 - DNA, 20 bp, Artificial Sequence
  Description of Artificial Sequence: Synthetic oligonucleotide
  Target: ATXN2; (-) strand; PAM type: YTN; PAM sequence: TTT
tccatgttggtcaggctggt

SEQ ID NO: 77484 - DNA, 20 bp, Artificial Sequence
  Description of Artificial Sequence: Synthetic oligonucleotide
  Target: ATXN2; (-) strand; PAM type: YTN; PAM sequence: TTT
ttccatgttggtcaggctgg

SEQ ID NO: 77485 - DNA, 20 bp, Artificial Sequence
  Description of Artificial Sequence: Synthetic oligonucleotide
  Target: ATXN2; (-) strand; PAM type: YTN; PAM sequence: TTC
agtagagacaggatttttcc

SEQ ID NO: 77486 - DNA, 20 bp, Artificial Sequence
  Description of Artificial Sequence: Synthetic oligonucleotide
  Target: ATXN2; (-) strand; PAM type: YTN; PAM sequence: TTG
tatgttcagtagagacagga

SEQ ID NO: 77487 - DNA, 20 bp, Artificial Sequence
  Description of Artificial Sequence: Synthetic oligonucleotide
  Target: ATXN2; (-) strand; PAM type: YTN; PAM sequence: TTT
gtatgttcagtagagacagg

SEQ ID NO: 77488 - DNA, 20 bp, Artificial Sequence
  Description of Artificial Sequence: Synthetic oligonucleotide
  Target: ATXN2; (-) strand; PAM type: YTN; PAM sequence: TTT
tgtatgttcagtagagacag

SEQ ID NO: 77489 - DNA, 20 bp, Artificial Sequence
  Description of Artificial Sequence: Synthetic oligonucleotide
  Target: ATXN2; (-) strand; PAM type: YTN; PAM sequence: CTA
attttgtatgttcagtagag

SEQ ID NO: 77490 - DNA, 20 bp, Artificial Sequence
  Description of Artificial Sequence: Synthetic oligonucleotide
  Target: ATXN2; (-) strand; PAM type: YTN; PAM sequence: CTG
gctaattttgtatgttcagt

SEQ ID NO: 77491 - DNA, 20 bp, Artificial Sequence
  Description of Artificial Sequence: Synthetic oligonucleotide
  Target: ATXN2; (-) strand; PAM type: YTN; PAM sequence: CTC
ctggctaattttgtatgttc

SEQ ID NO: 77492 - DNA, 20 bp, Artificial Sequence
  Description of Artificial Sequence: Synthetic oligonucleotide
  Target: ATXN2; (-) strand; PAM type: YTN; PAM sequence: TTA
cagacatgcgccaccactcc

SEQ ID NO: 77493 - DNA, 20 bp, Artificial Sequence
  Description of Artificial Sequence: Synthetic oligonucleotide
  Target: ATXN2; (-) strand; PAM type: YTN; PAM sequence: CTG
ggattacagacatgcgccac

SEQ ID NO: 77494 - DNA, 20 bp, Artificial Sequence
  Description of Artificial Sequence: Synthetic oligonucleotide
  Target: ATXN2; (-) strand; PAM type: YTN; PAM sequence: CTC
ccgagtagctgggattacag

SEQ ID NO: 77495 - DNA, 20 bp, Artificial Sequence
  Description of Artificial Sequence: Synthetic oligonucleotide
  Target: ATXN2; (-) strand; PAM type: YTN; PAM sequence: CTG
cgtcagcctcccgagtagct

SEQ ID NO: 77496 - DNA, 20 bp, Artificial Sequence
  Description of Artificial Sequence: Synthetic oligonucleotide
  Target: ATXN2; (-) strand; PAM type: YTN; PAM sequence: CTC
ctgcgtcagcctcccgagta

SEQ ID NO: 77497 - DNA, 20 bp, Artificial Sequence
  Description of Artificial Sequence: Synthetic oligonucleotide
  Target: ATXN2; (-) strand; PAM type: YTN; PAM sequence: TTC
tcctgcgtcagcctcccgag

SEQ ID NO: 77498 - DNA, 20 bp, Artificial Sequence
  Description of Artificial Sequence: Synthetic oligonucleotide
  Target: ATXN2; (-) strand; PAM type: YTN; PAM sequence: TTC
aagcagttctcctgcgtcag

SEQ ID NO: 77499 - DNA, 20 bp, Artificial Sequence
  Description of Artificial Sequence: Synthetic oligonucleotide
  Target: ATXN2; (-) strand; PAM type: YTN; PAM sequence: CTC
ccgggttcaagcagttctcc

SEQ ID NO: 77500 - DNA, 20 bp, Artificial Sequence
  Description of Artificial Sequence: Synthetic oligonucleotide
  Target: ATXN2; (-) strand; PAM type: YTN; PAM sequence: CTG
cctcccgggttcaagcagtt

SEQ ID NO: 77501 - DNA, 20 bp, Artificial Sequence
  Description of Artificial Sequence: Synthetic oligonucleotide
  Target: ATXN2; (-) strand; PAM type: YTN; PAM sequence: CTC
tgcctcccgggttcaagcag

SEQ ID NO: 77502 - DNA, 20 bp, Artificial Sequence
  Description of Artificial Sequence: Synthetic oligonucleotide
  Target: ATXN2; (-) strand; PAM type: YTN; PAM sequence: CTG
caacctctgcctcccgggtt

SEQ ID NO: 77503 - DNA, 20 bp, Artificial Sequence
  Description of Artificial Sequence: Synthetic oligonucleotide
  Target: ATXN2; (-) strand; PAM type: YTN; PAM sequence: CTC
actgcaacctctgcctcccg

SEQ ID NO: 77504 - DNA, 20 bp, Artificial Sequence
  Description of Artificial Sequence: Synthetic oligonucleotide
  Target: ATXN2; (-) strand; PAM type: YTN; PAM sequence: TTG
gctcactgcaacctctgcct

SEQ ID NO: 77505 - DNA, 20 bp, Artificial Sequence
  Description of Artificial Sequence: Synthetic oligonucleotide
  Target: ATXN2; (-) strand; PAM type: YTN; PAM sequence: CTT
ggctcactgcaacctctgcc

SEQ ID NO: 77506 - DNA, 20 bp, Artificial Sequence
  Description of Artificial Sequence: Synthetic oligonucleotide
  Target: ATXN2; (-) strand; PAM type: YTN; PAM sequence: CTG
atcttggctcactgcaacct

SEQ ID NO: 77507 - DNA, 20 bp, Artificial Sequence
  Description of Artificial Sequence: Synthetic oligonucleotide
  Target: ATXN2; (-) strand; PAM type: YTN; PAM sequence: CTG
gagtgcggtggcctgatctt

SEQ ID NO: 77508 - DNA, 20 bp, Artificial Sequence
  Description of Artificial Sequence: Synthetic oligonucleotide
  Target: ATXN2; (-) strand; PAM type: YTN; PAM sequence: TTG
cccaggctggagtgcggtgg

SEQ ID NO: 77509 - DNA, 20 bp, Artificial Sequence
  Description of Artificial Sequence: Synthetic oligonucleotide
  Target: ATXN2; (-) strand; PAM type: YTN; PAM sequence: TTA
ttgcccaggctggagtgcgg

SEQ ID NO: 77510 - DNA, 20 bp, Artificial Sequence
  Description of Artificial Sequence: Synthetic oligonucleotide
  Target: ATXN2; (-) strand; PAM type: YTN; PAM sequence: CTT
attgcccaggctggagtgcg

SEQ ID NO: 77511 - DNA, 20 bp, Artificial Sequence
  Description of Artificial Sequence: Synthetic oligonucleotide
  Target: ATXN2; (-) strand; PAM type: YTN; PAM sequence: CTC
ttattgcccaggctggagtg

SEQ ID NO: 77512 - DNA, 20 bp, Artificial Sequence
  Description of Artificial Sequence: Synthetic oligonucleotide
  Target: ATXN2; (-) strand; PAM type: YTN; PAM sequence: TTC
gctcttattgcccaggctgg

SEQ ID NO: 77513 - DNA, 20 bp, Artificial Sequence
  Description of Artificial Sequence: Synthetic oligonucleotide
  Target: ATXN2; (-) strand; PAM type: YTN; PAM sequence: TTT
cgctcttattgcccaggctg

SEQ ID NO: 77514 - DNA, 20 bp, Artificial Sequence
  Description of Artificial Sequence: Synthetic oligonucleotide
  Target: ATXN2; (-) strand; PAM type: YTN; PAM sequence: TTG
agatggagtttcgctcttat

SEQ ID NO: 77515 - DNA, 20 bp, Artificial Sequence
  Description of Artificial Sequence: Synthetic oligonucleotide
  Target: ATXN2; (-) strand; PAM type: YTN; PAM sequence: TTT
gagatggagtttcgctctta

SEQ ID NO: 77516 - DNA, 20 bp, Artificial Sequence
  Description of Artificial Sequence: Synthetic oligonucleotide
  Target: ATXN2; (-) strand; PAM type: YTN; PAM sequence: TTT
tgagatggagtttcgctctt

SEQ ID NO: 77517 - DNA, 20 bp, Artificial Sequence
  Description of Artificial Sequence: Synthetic oligonucleotide
  Target: ATXN2; (-) strand; PAM type: YTN; PAM sequence: TTT
ttgagatggagtttcgctct

SEQ ID NO: 77518 - DNA, 20 bp, Artificial Sequence
  Description of Artificial Sequence: Synthetic oligonucleotide
  Target: ATXN2; (-) strand; PAM type: YTN; PAM sequence: TTT
tttgagatggagtttcgctc

SEQ ID NO: 77519 - DNA, 20 bp, Artificial Sequence
  Description of Artificial Sequence: Synthetic oligonucleotide
  Target: ATXN2; (-) strand; PAM type: YTN; PAM sequence: TTT
ttttgagatggagtttcgct

SEQ ID NO: 77520 - DNA, 20 bp, Artificial Sequence
  Description of Artificial Sequence: Synthetic oligonucleotide
  Target: ATXN2; (-) strand; PAM type: YTN; PAM sequence: TTT
tttttgagatggagtttcgc

SEQ ID NO: 77521 - DNA, 20 bp, Artificial Sequence
  Description of Artificial Sequence: Synthetic oligonucleotide
  Target: ATXN2; (-) strand; PAM type: YTN; PAM sequence: TTT
ttttttgagatggagtttcg

SEQ ID NO: 77522 - DNA, 20 bp, Artificial Sequence
  Description of Artificial Sequence: Synthetic oligonucleotide
  Target: ATXN2; (-) strand; PAM type: YTN; PAM sequence: TTT
tttttttgagatggagtttc

SEQ ID NO: 77523 - DNA, 20 bp, Artificial Sequence
  Description of Artificial Sequence: Synthetic oligonucleotide
  Target: ATXN2; (-) strand; PAM type: YTN; PAM sequence: TTT
ttttttttgagatggagttt

SEQ ID NO: 77524 - DNA, 20 bp, Artificial Sequence
  Description of Artificial Sequence: Synthetic oligonucleotide
  Target: ATXN2; (-) strand; PAM type: YTN; PAM sequence: TTT
tttttttttgagatggagtt

SEQ ID NO: 77525 - DNA, 20 bp, Artificial Sequence
  Description of Artificial Sequence: Synthetic oligonucleotide
  Target: ATXN2; (-) strand; PAM type: YTN; PAM sequence: TTT
ttttttttttgagatggagt

SEQ ID NO: 77526 - DNA, 20 bp, Artificial Sequence
  Description of Artificial Sequence: Synthetic oligonucleotide
  Target: ATXN2; (-) strand; PAM type: YTN; PAM sequence: TTT
tttttttttttgagatggag

SEQ ID NO: 77527 - DNA, 20 bp, Artificial Sequence
  Description of Artificial Sequence: Synthetic oligonucleotide
  Target: ATXN2; (-) strand; PAM type: YTN; PAM sequence: TTT
ttttttttttttgagatgga

SEQ ID NO: 77528 - DNA, 20 bp, Artificial Sequence
  Description of Artificial Sequence: Synthetic oligonucleotide
  Target: ATXN2; (-) strand; PAM type: YTN; PAM sequence: TTT
tttttttttttttgagatgg

SEQ ID NO: 77529 - DNA, 20 bp, Artificial Sequence
  Description of Artificial Sequence: Synthetic oligonucleotide
  Target: ATXN2; (-) strand; PAM type: YTN; PAM sequence: TTT
ttttttttttttttgagatg

SEQ ID NO: 77530 - DNA, 20 bp, Artificial Sequence
  Description of Artificial Sequence: Synthetic oligonucleotide
  Target: ATXN2; (-) strand; PAM type: YTN; PAM sequence: TTT
tttttttttttttttgagat

SEQ ID NO: 77531 - DNA, 20 bp, Artificial Sequence
  Description of Artificial Sequence: Synthetic oligonucleotide
  Target: ATXN2; (-) strand; PAM type: YTN; PAM sequence: TTT
ttttttttttttttttgaga

SEQ ID NO: 77532 - DNA, 20 bp, Artificial Sequence
  Description of Artificial Sequence: Synthetic oligonucleotide
  Target: ATXN2; (-) strand; PAM type: YTN; PAM sequence: TTT
tttttttttttttttttgag

SEQ ID NO: 77533 - DNA, 20 bp, Artificial Sequence
  Description of Artificial Sequence: Synthetic oligonucleotide
  Target: ATXN2; (-) strand; PAM type: YTN; PAM sequence: TTT
ttttttttttttttttttga

SEQ ID NO: 77534 - DNA, 20 bp, Artificial Sequence
  Description of Artificial Sequence: Synthetic oligonucleotide
  Target: ATXN2; (-) strand; PAM type: YTN; PAM sequence: TTT
tttttttttttttttttttg

SEQ ID NO: 77535 - DNA, 20 bp, Artificial Sequence
  Description of Artificial Sequence: Synthetic oligonucleotide
  Target: ATXN2; (-) strand; PAM type: YTN; PAM sequence: TTT
tttttttttttttttttttt

SEQ ID NO: 77536 - DNA, 20 bp, Artificial Sequence
  Description of Artificial Sequence: Synthetic oligonucleotide
  Target: ATXN2; (-) strand; PAM type: YTN; PAM sequence: TTT
tttttttttttttttttttt

SEQ ID NO: 77537 - DNA, 20 bp, Artificial Sequence
  Description of Artificial Sequence: Synthetic oligonucleotide
  Target: ATXN2; (-) strand; PAM type: YTN; PAM sequence: TTT
tttttttttttttttttttt

SEQ ID NO: 77538 - DNA, 20 bp, Artificial Sequence
  Description of Artificial Sequence: Synthetic oligonucleotide
  Target: ATXN2; (-) strand; PAM type: YTN; PAM sequence: CTA
catttttttttttttttttt

SEQ ID NO: 77539 - DNA, 20 bp, Artificial Sequence
  Description of Artificial Sequence: Synthetic oligonucleotide
  Target: ATXN2; (-) strand; PAM type: YTN; PAM sequence: CTG
tctacatttttttttttttt

SEQ ID NO: 77540 - DNA, 20 bp, Artificial Sequence
  Description of Artificial Sequence: Synthetic oligonucleotide
  Target: ATXN2; (-) strand; PAM type: YTN; PAM sequence: TTC
tgtctacatttttttttttt

SEQ ID NO: 77541 - DNA, 20 bp, Artificial Sequence
  Description of Artificial Sequence: Synthetic oligonucleotide
  Target: ATXN2; (-) strand; PAM type: YTN; PAM sequence: TTC
catcattctgtctacatttt

SEQ ID NO: 77542 - DNA, 20 bp, Artificial Sequence
  Description of Artificial Sequence: Synthetic oligonucleotide
  Target: ATXN2; (-) strand; PAM type: YTN; PAM sequence: CTT
ccatcattctgtctacattt

SEQ ID NO: 77543 - DNA, 20 bp, Artificial Sequence
  Description of Artificial Sequence: Synthetic oligonucleotide
  Target: ATXN2; (-) strand; PAM type: YTN; PAM sequence: TTC
ttccatcattctgtctacat

SEQ ID NO: 77544 - DNA, 20 bp, Artificial Sequence
  Description of Artificial Sequence: Synthetic oligonucleotide
  Target: ATXN2; (-) strand; PAM type: YTN; PAM sequence: TTT
cttccatcattctgtctaca

SEQ ID NO: 77545 - DNA, 20 bp, Artificial Sequence
  Description of Artificial Sequence: Synthetic oligonucleotide
  Target: ATXN2; (-) strand; PAM type: YTN; PAM sequence: TTT
tcttccatcattctgtctac

SEQ ID NO: 77546 - DNA, 20 bp, Artificial Sequence
  Description of Artificial Sequence: Synthetic oligonucleotide
  Target: ATXN2; (-) strand; PAM type: YTN; PAM sequence: CTT
ttcttccatcattctgtcta

SEQ ID NO: 77547 - DNA, 20 bp, Artificial Sequence
  Description of Artificial Sequence: Synthetic oligonucleotide
  Target: ATXN2; (-) strand; PAM type: YTN; PAM sequence: TTA
ccaagtagtgatgccctttt

SEQ ID NO: 77548 - DNA, 20 bp, Artificial Sequence
  Description of Artificial Sequence: Synthetic oligonucleotide
  Target: ATXN2; (-) strand; PAM type: YTN; PAM sequence: CTA
tggtgttaccaagtagtgat

SEQ ID NO: 77549 - DNA, 20 bp, Artificial Sequence
  Description of Artificial Sequence: Synthetic oligonucleotide
  Target: ATXN2; (-) strand; PAM type: YTN; PAM sequence: TTA
ctatggtgttaccaagtagt

SEQ ID NO: 77550 - DNA, 20 bp, Artificial Sequence
  Description of Artificial Sequence: Synthetic oligonucleotide
  Target: ATXN2; (-) strand; PAM type: YTN; PAM sequence: TTT
actatggtgttaccaagtag

SEQ ID NO: 77551 - DNA, 20 bp, Artificial Sequence
  Description of Artificial Sequence: Synthetic oligonucleotide
  Target: ATXN2; (-) strand; PAM type: YTN; PAM sequence: TTA
tttactatggtgttaccaag

SEQ ID NO: 77552 - DNA, 20 bp, Artificial Sequence
  Description of Artificial Sequence: Synthetic oligonucleotide
  Target: ATXN2; (-) strand; PAM type: YTN; PAM sequence: CTG
aaacagttatttactatggt

SEQ ID NO: 77553 - DNA, 20 bp, Artificial Sequence
  Description of Artificial Sequence: Synthetic oligonucleotide
  Target: ATXN2; (-) strand; PAM type: YTN; PAM sequence: TTG
cctgaaacagttatttacta

SEQ ID NO: 77554 - DNA, 20 bp, Artificial Sequence
  Description of Artificial Sequence: Synthetic oligonucleotide
  Target: ATXN2; (-) strand; PAM type: YTN; PAM sequence: TTT
gcctgaaacagttatttact

SEQ ID NO: 77555 - DNA, 20 bp, Artificial Sequence
  Description of Artificial Sequence: Synthetic oligonucleotide
  Target: ATXN2; (-) strand; PAM type: YTN; PAM sequence: TTT
tgcctgaaacagttatttac

SEQ ID NO: 77556 - DNA, 20 bp, Artificial Sequence
  Description of Artificial Sequence: Synthetic oligonucleotide
  Target: ATXN2; (-) strand; PAM type: YTN; PAM sequence: CTT
ttgcctgaaacagttattta

SEQ ID NO: 77557 - DNA, 20 bp, Artificial Sequence
  Description of Artificial Sequence: Synthetic oligonucleotide
  Target: ATXN2; (-) strand; PAM type: YTN; PAM sequence: CTG
tggacacttttgcctgaaac

SEQ ID NO: 77558 - DNA, 20 bp, Artificial Sequence
  Description of Artificial Sequence: Synthetic oligonucleotide
  Target: ATXN2; (-) strand; PAM type: YTN; PAM sequence: TTC
tgtggacacttttgcctgaa

SEQ ID NO: 77559 - DNA, 20 bp, Artificial Sequence
  Description of Artificial Sequence: Synthetic oligonucleotide
  Target: ATXN2; (-) strand; PAM type: YTN; PAM sequence: CTT
ctgtggacacttttgcctga

SEQ ID NO: 77560 - DNA, 20 bp, Artificial Sequence
  Description of Artificial Sequence: Synthetic oligonucleotide
  Target: ATXN2; (-) strand; PAM type: YTN; PAM sequence: TTA
gcttctgtggacacttttgc

SEQ ID NO: 77561 - DNA, 20 bp, Artificial Sequence
  Description of Artificial Sequence: Synthetic oligonucleotide
  Target: ATXN2; (-) strand; PAM type: YTN; PAM sequence: TTT
agcttctgtggacacttttg

SEQ ID NO: 77562 - DNA, 20 bp, Artificial Sequence
  Description of Artificial Sequence: Synthetic oligonucleotide
  Target: ATXN2; (-) strand; PAM type: YTN; PAM sequence: CTA
tatttagcttctgtggacac

SEQ ID NO: 77563 - DNA, 20 bp, Artificial Sequence
  Description of Artificial Sequence: Synthetic oligonucleotide
  Target: ATXN2; (-) strand; PAM type: YTN; PAM sequence: TTA
ctatatttagcttctgtgga

SEQ ID NO: 77564 - DNA, 20 bp, Artificial Sequence
  Description of Artificial Sequence: Synthetic oligonucleotide
  Target: ATXN2; (-) strand; PAM type: YTN; PAM sequence: CTT
actatatttagcttctgtgg

SEQ ID NO: 77565 - DNA, 20 bp, Artificial Sequence
  Description of Artificial Sequence: Synthetic oligonucleotide
  Target: ATXN2; (-) strand; PAM type: YTN; PAM sequence: TTC
ccttactatatttagcttct

SEQ ID NO: 77566 - DNA, 20 bp, Artificial Sequence
  Description of Artificial Sequence: Synthetic oligonucleotide
  Target: ATXN2; (-) strand; PAM type: YTN; PAM sequence: TTT
cccttactatatttagcttc

SEQ ID NO: 77567 - DNA, 20 bp, Artificial Sequence
  Description of Artificial Sequence: Synthetic oligonucleotide
  Target: ATXN2; (-) strand; PAM type: YTN; PAM sequence: CTT
tcccttactatatttagctt

SEQ ID NO: 77568 - DNA, 20 bp, Artificial Sequence
  Description of Artificial Sequence: Synthetic oligonucleotide
  Target: ATXN2; (-) strand; PAM type: YTN; PAM sequence: CTA
ctttcccttactatatttag

SEQ ID NO: 77569 - DNA, 20 bp, Artificial Sequence
  Description of Artificial Sequence: Synthetic oligonucleotide
  Target: ATXN2; (-) strand; PAM type: YTN; PAM sequence: TTC
tactttcccttactatattt

SEQ ID NO: 77570 - DNA, 20 bp, Artificial Sequence
  Description of Artificial Sequence: Synthetic oligonucleotide
  Target: ATXN2; (-) strand; PAM type: YTN; PAM sequence: TTT
ctactttcccttactatatt

SEQ ID NO: 77571 - DNA, 20 bp, Artificial Sequence
  Description of Artificial Sequence: Synthetic oligonucleotide
  Target: ATXN2; (-) strand; PAM type: YTN; PAM sequence: CTG
tttctactttcccttactat

SEQ ID NO: 77572 - DNA, 20 bp, Artificial Sequence
  Description of Artificial Sequence: Synthetic oligonucleotide
  Target: ATXN2; (-) strand; PAM type: YTN; PAM sequence: CTC
tgtttctactttcccttact

SEQ ID NO: 77573 - DNA, 20 bp, Artificial Sequence
  Description of Artificial Sequence: Synthetic oligonucleotide
  Target: ATXN2; (-) strand; PAM type: YTN; PAM sequence: TTA
tataaatactctgtttctac

SEQ ID NO: 77574 - DNA, 20 bp, Artificial Sequence
  Description of Artificial Sequence: Synthetic oligonucleotide
  Target: ATXN2; (-) strand; PAM type: YTN; PAM sequence: TTG
tggttatataaatactctgt

SEQ ID NO: 77575 - DNA, 20 bp, Artificial Sequence
  Description of Artificial Sequence: Synthetic oligonucleotide
  Target: ATXN2; (-) strand; PAM type: YTN; PAM sequence: TTT
gtggttatataaatactctg

SEQ ID NO: 77576 - DNA, 20 bp, Artificial Sequence
  Description of Artificial Sequence: Synthetic oligonucleotide
  Target: ATXN2; (-) strand; PAM type: YTN; PAM sequence: CTT
tgtggttatataaatactct

SEQ ID NO: 77577 - DNA, 20 bp, Artificial Sequence
  Description of Artificial Sequence: Synthetic oligonucleotide
  Target: ATXN2; (-) strand; PAM type: YTN; PAM sequence: TTA
ctttgtggttatataaatac

SEQ ID NO: 77578 - DNA, 20 bp, Artificial Sequence
  Description of Artificial Sequence: Synthetic oligonucleotide
  Target: ATXN2; (-) strand; PAM type: YTN; PAM sequence: TTG
tggggagttactttgtggtt

SEQ ID NO: 77579 - DNA, 20 bp, Artificial Sequence
  Description of Artificial Sequence: Synthetic oligonucleotide
  Target: ATXN2; (-) strand; PAM type: YTN; PAM sequence: CTT
gtggggagttactttgtggt

SEQ ID NO: 77580 - DNA, 20 bp, Artificial Sequence
  Description of Artificial Sequence: Synthetic oligonucleotide
  Target: ATXN2; (-) strand; PAM type: YTN; PAM sequence: TTC
atcagtatcttgtggggagt

SEQ ID NO: 77581 - DNA, 20 bp, Artificial Sequence
  Description of Artificial Sequence: Synthetic oligonucleotide
  Target: ATXN2; (-) strand; PAM type: YTN; PAM sequence: TTT
catcagtatcttgtggggag

SEQ ID NO: 77582 - DNA, 20 bp, Artificial Sequence
  Description of Artificial Sequence: Synthetic oligonucleotide
  Target: ATXN2; (-) strand; PAM type: YTN; PAM sequence: TTG
gtcatttcatcagtatcttg

SEQ ID NO: 77583 - DNA, 20 bp, Artificial Sequence
  Description of Artificial Sequence: Synthetic oligonucleotide
  Target: ATXN2; (-) strand; PAM type: YTN; PAM sequence: CTT
ggtcatttcatcagtatctt

SEQ ID NO: 77584 - DNA, 20 bp, Artificial Sequence
  Description of Artificial Sequence: Synthetic oligonucleotide
  Target: ATXN2; (-) strand; PAM type: YTN; PAM sequence: TTC
acttggtcatttcatcagta

SEQ ID NO: 77585 - DNA, 20 bp, Artificial Sequence
  Description of Artificial Sequence: Synthetic oligonucleotide
  Target: ATXN2; (-) strand; PAM type: YTN; PAM sequence: TTT
cacttggtcatttcatcagt

SEQ ID NO: 77586 - DNA, 20 bp, Artificial Sequence
  Description of Artificial Sequence: Synthetic oligonucleotide
  Target: ATXN2; (-) strand; PAM type: YTN; PAM sequence: TTT
tcacttggtcatttcatcag

SEQ ID NO: 77587 - DNA, 20 bp, Artificial Sequence
  Description of Artificial Sequence: Synthetic oligonucleotide
  Target: ATXN2; (-) strand; PAM type: YTN; PAM sequence: TTT
ttcacttggtcatttcatca

SEQ ID NO: 77588 - DNA, 20 bp, Artificial Sequence
  Description of Artificial Sequence: Synthetic oligonucleotide
  Target: ATXN2; (-) strand; PAM type: YTN; PAM sequence: TTA
tttttcacttggtcatttca

SEQ ID NO: 77589 - DNA, 20 bp, Artificial Sequence
  Description of Artificial Sequence: Synthetic oligonucleotide
  Target: ATXN2; (-) strand; PAM type: YTN; PAM sequence: CTA
taaagttatttttcacttgg

SEQ ID NO: 77590 - DNA, 20 bp, Artificial Sequence
  Description of Artificial Sequence: Synthetic oligonucleotide
  Target: ATXN2; (-) strand; PAM type: YTN; PAM sequence: TTC
actataaagttatttttcac

SEQ ID NO: 77591 - DNA, 20 bp, Artificial Sequence
  Description of Artificial Sequence: Synthetic oligonucleotide
  Target: ATXN2; (-) strand; PAM type: YTN; PAM sequence: CTT
cactataaagttatttttca

SEQ ID NO: 77592 - DNA, 20 bp, Artificial Sequence
  Description of Artificial Sequence: Synthetic oligonucleotide
  Target: ATXN2; (-) strand; PAM type: YTN; PAM sequence: TTC
ttcactataaagttattttt

SEQ ID NO: 77593 - DNA, 20 bp, Artificial Sequence
  Description of Artificial Sequence: Synthetic oligonucleotide
  Target: ATXN2; (-) strand; PAM type: YTN; PAM sequence: TTT
cttcactataaagttatttt

SEQ ID NO: 77594 - DNA, 20 bp, Artificial Sequence
  Description of Artificial Sequence: Synthetic oligonucleotide
  Target: ATXN2; (-) strand; PAM type: YTN; PAM sequence: CTA
agtttcttcactataaagtt

SEQ ID NO: 77595 - DNA, 20 bp, Artificial Sequence
  Description of Artificial Sequence: Synthetic oligonucleotide
  Target: ATXN2; (-) strand; PAM type: YTN; PAM sequence: CTA
ctaagtttcttcactataaa

SEQ ID NO: 77596 - DNA, 20 bp, Artificial Sequence
  Description of Artificial Sequence: Synthetic oligonucleotide
  Target: ATXN2; (-) strand; PAM type: YTN; PAM sequence: TTG
tgtctactaagtttcttcac

SEQ ID NO: 77597 - DNA, 20 bp, Artificial Sequence
  Description of Artificial Sequence: Synthetic oligonucleotide
  Target: ATXN2; (-) strand; PAM type: YTN; PAM sequence: TTA
gagttgtgtctactaagttt

SEQ ID NO: 77598 - DNA, 20 bp, Artificial Sequence
  Description of Artificial Sequence: Synthetic oligonucleotide
  Target: ATXN2; (-) strand; PAM type: YTN; PAM sequence: TTG
gttagagttgtgtctactaa

SEQ ID NO: 77599 - DNA, 20 bp, Artificial Sequence
  Description of Artificial Sequence: Synthetic oligonucleotide
  Target: ATXN2; (-) strand; PAM type: YTN; PAM sequence: CTT
ggttagagttgtgtctacta

SEQ ID NO: 77600 - DNA, 20 bp, Artificial Sequence
  Description of Artificial Sequence: Synthetic oligonucleotide
  Target: ATXN2; (-) strand; PAM type: YTN; PAM sequence: TTG
atcacttggttagagttgtg

SEQ ID NO: 77601 - DNA, 20 bp, Artificial Sequence
  Description of Artificial Sequence: Synthetic oligonucleotide
  Target: ATXN2; (-) strand; PAM type: YTN; PAM sequence: TTT
gatcacttggttagagttgt

SEQ ID NO: 77602 - DNA, 20 bp, Artificial Sequence
  Description of Artificial Sequence: Synthetic oligonucleotide
  Target: ATXN2; (-) strand; PAM type: YTN; PAM sequence: CTT
tgatcacttggttagagttg

SEQ ID NO: 77603 - DNA, 20 bp, Artificial Sequence
  Description of Artificial Sequence: Synthetic oligonucleotide
  Target: ATXN2; (-) strand; PAM type: YTN; PAM sequence: TTA
actttgatcacttggttaga

SEQ ID NO: 77604 - DNA, 20 bp, Artificial Sequence
  Description of Artificial Sequence: Synthetic oligonucleotide
  Target: ATXN2; (-) strand; PAM type: YTN; PAM sequence: TTG
ttaactttgatcacttggtt

SEQ ID NO: 77605 - DNA, 20 bp, Artificial Sequence
  Description of Artificial Sequence: Synthetic oligonucleotide
  Target: ATXN2; (-) strand; PAM type: YTN; PAM sequence: CTG
gggttgttaactttgatcac

SEQ ID NO: 77606 - DNA, 20 bp, Artificial Sequence
  Description of Artificial Sequence: Synthetic oligonucleotide
  Target: ATXN2; (-) strand; PAM type: YTN; PAM sequence: TTA
ctggggttgttaactttgat

SEQ ID NO: 77607 - DNA, 20 bp, Artificial Sequence
  Description of Artificial Sequence: Synthetic oligonucleotide
  Target: ATXN2; (-) strand; PAM type: YTN; PAM sequence: TTA
tcccattactggggttgtta

SEQ ID NO: 77608 - DNA, 20 bp, Artificial Sequence
  Description of Artificial Sequence: Synthetic oligonucleotide
  Target: ATXN2; (-) strand; PAM type: YTN; PAM sequence: TTT
atcccattactggggttgtt

SEQ ID NO: 77609 - DNA, 20 bp, Artificial Sequence
  Description of Artificial Sequence: Synthetic oligonucleotide
  Target: ATXN2; (-) strand; PAM type: YTN; PAM sequence: TTG
tatatatttatcccattact

SEQ ID NO: 77610 - DNA, 20 bp, Artificial Sequence
  Description of Artificial Sequence: Synthetic oligonucleotide
  Target: ATXN2; (-) strand; PAM type: YTN; PAM sequence: TTG
catgatatcagaaagtgcat

SEQ ID NO: 77611 - DNA, 20 bp, Artificial Sequence
  Description of Artificial Sequence: Synthetic oligonucleotide
  Target: ATXN2; (-) strand; PAM type: YTN; PAM sequence: CTC
attgcatgatatcagaaagt

SEQ ID NO: 77612 - DNA, 20 bp, Artificial Sequence
  Description of Artificial Sequence: Synthetic oligonucleotide
  Target: ATXN2; (-) strand; PAM type: YTN; PAM sequence: TTC
tcattgcatgatatcagaaa

SEQ ID NO: 77613 - DNA, 20 bp, Artificial Sequence
  Description of Artificial Sequence: Synthetic oligonucleotide
  Target: ATXN2; (-) strand; PAM type: YTN; PAM sequence: TTT
ctcattgcatgatatcagaa

SEQ ID NO: 77614 - DNA, 20 bp, Artificial Sequence
  Description of Artificial Sequence: Synthetic oligonucleotide
  Target: ATXN2; (-) strand; PAM type: YTN; PAM sequence: TTT
tctcattgcatgatatcaga

SEQ ID NO: 77615 - DNA, 20 bp, Artificial Sequence
  Description of Artificial Sequence: Synthetic oligonucleotide
  Target: ATXN2; (-) strand; PAM type: YTN; PAM sequence: TTT
ttctcattgcatgatatcag

SEQ ID NO: 77616 - DNA, 20 bp, Artificial Sequence
  Description of Artificial Sequence: Synthetic oligonucleotide
  Target: ATXN2; (-) strand; PAM type: YTN; PAM sequence: TTG
tgtgtttttctcattgcatg

SEQ ID NO: 77617 - DNA, 20 bp, Artificial Sequence
  Description of Artificial Sequence: Synthetic oligonucleotide
  Target: ATXN2; (-) strand; PAM type: YTN; PAM sequence: TTT
gtgtgtttttctcattgcat

SEQ ID NO: 77618 - DNA, 20 bp, Artificial Sequence
  Description of Artificial Sequence: Synthetic oligonucleotide
  Target: ATXN2; (-) strand; PAM type: YTN; PAM sequence: TTG
gcaggaatacaacagaaatg

SEQ ID NO: 77619 - DNA, 20 bp, Artificial Sequence
  Description of Artificial Sequence: Synthetic oligonucleotide
  Target: ATXN2; (-) strand; PAM type: YTN; PAM sequence: TTT
ggcaggaatacaacagaaat

SEQ ID NO: 77620 - DNA, 20 bp, Artificial Sequence
  Description of Artificial Sequence: Synthetic oligonucleotide
  Target: ATXN2; (-) strand; PAM type: YTN; PAM sequence: TTT
tggcaggaatacaacagaaa

SEQ ID NO: 77621 - DNA, 20 bp, Artificial Sequence
  Description of Artificial Sequence: Synthetic oligonucleotide
  Target: ATXN2; (-) strand; PAM type: YTN; PAM sequence: TTT
ttggcaggaatacaacagaa

SEQ ID NO: 77622 - DNA, 20 bp, Artificial Sequence
  Description of Artificial Sequence: Synthetic oligonucleotide
  Target: ATXN2; (-) strand; PAM type: YTN; PAM sequence: TTA
tttttggcaggaatacaaca

SEQ ID NO: 77623 - DNA, 20 bp, Artificial Sequence
  Description of Artificial Sequence: Synthetic oligonucleotide
  Target: ATXN2; (-) strand; PAM type: YTN; PAM sequence: TTT
atttttggcaggaatacaac

SEQ ID NO: 77624 - DNA, 20 bp, Artificial Sequence
  Description of Artificial Sequence: Synthetic oligonucleotide
  Target: ATXN2; (-) strand; PAM type: YTN; PAM sequence: TTC
agatatttatttttggcagg

SEQ ID NO: 77625 - DNA, 20 bp, Artificial Sequence
  Description of Artificial Sequence: Synthetic oligonucleotide
  Target: ATXN2; (-) strand; PAM type: YTN; PAM sequence: TTA
gattcagatatttatttttg

SEQ ID NO: 77626 - DNA, 20 bp, Artificial Sequence
  Description of Artificial Sequence: Synthetic oligonucleotide
  Target: ATXN2; (-) strand; PAM type: YTN; PAM sequence: TTA
tgattagattcagatattta

SEQ ID NO: 77627 - DNA, 20 bp, Artificial Sequence
  Description of Artificial Sequence: Synthetic oligonucleotide
  Target: ATXN2; (-) strand; PAM type: YTN; PAM sequence: CTT
atgattagattcagatattt

SEQ ID NO: 77628 - DNA, 20 bp, Artificial Sequence
  Description of Artificial Sequence: Synthetic oligonucleotide
  Target: ATXN2; (-) strand; PAM type: YTN; PAM sequence: TTC
cttatgattagattcagata

SEQ ID NO: 77629 - DNA, 20 bp, Artificial Sequence
  Description of Artificial Sequence: Synthetic oligonucleotide
  Target: ATXN2; (-) strand; PAM type: YTN; PAM sequence: TTT
ccttatgattagattcagat

SEQ ID NO: 77630 - DNA, 20 bp, Artificial Sequence
  Description of Artificial Sequence: Synthetic oligonucleotide
  Target: ATXN2; (-) strand; PAM type: YTN; PAM sequence: CTG
aggtttccttatgattagat

SEQ ID NO: 77631 - DNA, 20 bp, Artificial Sequence
  Description of Artificial Sequence: Synthetic oligonucleotide
  Target: ATXN2; (-) strand; PAM type: YTN; PAM sequence: TTA
tctgaggtttccttatgatt

SEQ ID NO: 77632 - DNA, 20 bp, Artificial Sequence
  Description of Artificial Sequence: Synthetic oligonucleotide
  Target: ATXN2; (-) strand; PAM type: YTN; PAM sequence: TTT
atctgaggtttccttatgat

SEQ ID NO: 77633 - DNA, 20 bp, Artificial Sequence
  Description of Artificial Sequence: Synthetic oligonucleotide
  Target: ATXN2; (-) strand; PAM type: YTN; PAM sequence: CTA
gggtttatctgaggtttcct

SEQ ID NO: 77634 - DNA, 20 bp, Artificial Sequence
  Description of Artificial Sequence: Synthetic oligonucleotide
  Target: ATXN2; (-) strand; PAM type: YTN; PAM sequence: CTC
aactagggtttatctgaggt

SEQ ID NO: 77635 - DNA, 20 bp, Artificial Sequence
  Description of Artificial Sequence: Synthetic oligonucleotide
  Target: ATXN2; (-) strand; PAM type: YTN; PAM sequence: CTG
tccctcaactagggtttatc

SEQ ID NO: 77636 - DNA, 20 bp, Artificial Sequence
  Description of Artificial Sequence: Synthetic oligonucleotide
  Target: ATXN2; (-) strand; PAM type: YTN; PAM sequence: TTG
tagactgtccctcaactagg

SEQ ID NO: 77637 - DNA, 20 bp, Artificial Sequence
  Description of Artificial Sequence: Synthetic oligonucleotide
  Target: ATXN2; (-) strand; PAM type: YTN; PAM sequence: TTT
gtagactgtccctcaactag

SEQ ID NO: 77638 - DNA, 20 bp, Artificial Sequence
  Description of Artificial Sequence: Synthetic oligonucleotide
  Target: ATXN2; (-) strand; PAM type: YTN; PAM sequence: TTT
tgtagactgtccctcaacta

SEQ ID NO: 77639 - DNA, 20 bp, Artificial Sequence
  Description of Artificial Sequence: Synthetic oligonucleotide
  Target: ATXN2; (-) strand; PAM type: YTN; PAM sequence: TTA
ttttgtagactgtccctcaa

SEQ ID NO: 77640 - DNA, 20 bp, Artificial Sequence
  Description of Artificial Sequence: Synthetic oligonucleotide
  Target: ATXN2; (-) strand; PAM type: YTN; PAM sequence: TTA
caggttattttgtagactgt

SEQ ID NO: 77641 - DNA, 20 bp, Artificial Sequence
  Description of Artificial Sequence: Synthetic oligonucleotide
  Target: ATXN2; (-) strand; PAM type: YTN; PAM sequence: TTG
aagattacaggttattttgt

SEQ ID NO: 77642 - DNA, 20 bp, Artificial Sequence
  Description of Artificial Sequence: Synthetic oligonucleotide
  Target: ATXN2; (-) strand; PAM type: YTN; PAM sequence: TTT
gaagattacaggttattttg

SEQ ID NO: 77643 - DNA, 20 bp, Artificial Sequence
  Description of Artificial Sequence: Synthetic oligonucleotide
  Target: ATXN2; (-) strand; PAM type: YTN; PAM sequence: TTT
tgaagattacaggttatttt

SEQ ID NO: 77644 - DNA, 20 bp, Artificial Sequence
  Description of Artificial Sequence: Synthetic oligonucleotide
  Target: ATXN2; (-) strand; PAM type: YTN; PAM sequence: CTT
ttgaagattacaggttattt

SEQ ID NO: 77645 - DNA, 20 bp, Artificial Sequence
  Description of Artificial Sequence: Synthetic oligonucleotide
  Target: ATXN2; (-) strand; PAM type: YTN; PAM sequence: TTG
acacttttgaagattacagg

SEQ ID NO: 77646 - DNA, 20 bp, Artificial Sequence
  Description of Artificial Sequence: Synthetic oligonucleotide
  Target: ATXN2; (-) strand; PAM type: YTN; PAM sequence: CTT
gacacttttgaagattacag

SEQ ID NO: 77647 - DNA, 20 bp, Artificial Sequence
  Description of Artificial Sequence: Synthetic oligonucleotide
  Target: ATXN2; (-) strand; PAM type: YTN; PAM sequence: TTA
tgacttgacacttttgaaga

SEQ ID NO: 77648 - DNA, 20 bp, Artificial Sequence
  Description of Artificial Sequence: Synthetic oligonucleotide
  Target: ATXN2; (-) strand; PAM type: YTN; PAM sequence: TTT
atgacttgacacttttgaag

SEQ ID NO: 77649 - DNA, 20 bp, Artificial Sequence
  Description of Artificial Sequence: Synthetic oligonucleotide
  Target: ATXN2; (-) strand; PAM type: YTN; PAM sequence: TTT
tatgacttgacacttttgaa

SEQ ID NO: 77650 - DNA, 20 bp, Artificial Sequence
  Description of Artificial Sequence: Synthetic oligonucleotide
  Target: ATXN2; (-) strand; PAM type: YTN; PAM sequence: CTT
ttatgacttgacacttttga

SEQ ID NO: 77651 - DNA, 20 bp, Artificial Sequence
  Description of Artificial Sequence: Synthetic oligonucleotide
  Target: ATXN2; (-) strand; PAM type: YTN; PAM sequence: TTG
tcttttatgacttgacactt

SEQ ID NO: 77652 - DNA, 20 bp, Artificial Sequence
  Description of Artificial Sequence: Synthetic oligonucleotide
  Target: ATXN2; (-) strand; PAM type: YTN; PAM sequence: TTT
gtcttttatgacttgacact

SEQ ID NO: 77653 - DNA, 20 bp, Artificial Sequence
  Description of Artificial Sequence: Synthetic oligonucleotide
  Target: ATXN2; (-) strand; PAM type: YTN; PAM sequence: CTT
tgtcttttatgacttgacac

SEQ ID NO: 77654 - DNA, 20 bp, Artificial Sequence
  Description of Artificial Sequence: Synthetic oligonucleotide
  Target: ATXN2; (-) strand; PAM type: YTN; PAM sequence: TTC
tttgtcttttatgacttgac

SEQ ID NO: 77655 - DNA, 20 bp, Artificial Sequence
  Description of Artificial Sequence: Synthetic oligonucleotide
  Target: ATXN2; (-) strand; PAM type: YTN; PAM sequence: TTT
ctttgtcttttatgacttga

SEQ ID NO: 77656 - DNA, 20 bp, Artificial Sequence
  Description of Artificial Sequence: Synthetic oligonucleotide
  Target: ATXN2; (-) strand; PAM type: YTN; PAM sequence: TTA
atccaaagcagtttctttgt

SEQ ID NO: 77657 - DNA, 20 bp, Artificial Sequence
  Description of Artificial Sequence: Synthetic oligonucleotide
  Target: ATXN2; (-) strand; PAM type: YTN; PAM sequence: TTT
aatccaaagcagtttctttg

SEQ ID NO: 77658 - DNA, 20 bp, Artificial Sequence
  Description of Artificial Sequence: Synthetic oligonucleotide
  Target: ATXN2; (-) strand; PAM type: YTN; PAM sequence: CTT
taatccaaagcagtttcttt

SEQ ID NO: 77659 - DNA, 20 bp, Artificial Sequence
  Description of Artificial Sequence: Synthetic oligonucleotide
  Target: ATXN2; (-) strand; PAM type: YTN; PAM sequence: CTC
ctttaatccaaagcagtttc

SEQ ID NO: 77660 - DNA, 20 bp, Artificial Sequence
  Description of Artificial Sequence: Synthetic oligonucleotide
  Target: ATXN2; (-) strand; PAM type: YTN; PAM sequence: TTG
gtctcctttaatccaaagca

SEQ ID NO: 77661 - DNA, 20 bp, Artificial Sequence
  Description of Artificial Sequence: Synthetic oligonucleotide
  Target: ATXN2; (-) strand; PAM type: YTN; PAM sequence: TTT
ggtctcctttaatccaaagc

SEQ ID NO: 77662 - DNA, 20 bp, Artificial Sequence
  Description of Artificial Sequence: Synthetic oligonucleotide
  Target: ATXN2; (-) strand; PAM type: YTN; PAM sequence: CTT
tggtctcctttaatccaaag

SEQ ID NO: 77663 - DNA, 20 bp, Artificial Sequence
  Description of Artificial Sequence: Synthetic oligonucleotide
  Target: ATXN2; (-) strand; PAM type: YTN; PAM sequence: TTA
tcatgtatctttggtctcct

SEQ ID NO: 77664 - DNA, 20 bp, Artificial Sequence
  Description of Artificial Sequence: Synthetic oligonucleotide
  Target: ATXN2; (-) strand; PAM type: YTN; PAM sequence: TTC
ggttatcatgtatctttggt

SEQ ID NO: 77665 - DNA, 20 bp, Artificial Sequence
  Description of Artificial Sequence: Synthetic oligonucleotide
  Target: ATXN2; (-) strand; PAM type: YTN; PAM sequence: CTT
cggttatcatgtatctttgg

SEQ ID NO: 77666 - DNA, 20 bp, Artificial Sequence
  Description of Artificial Sequence: Synthetic oligonucleotide
  Target: ATXN2; (-) strand; PAM type: YTN; PAM sequence: TTA
ccttcggttatcatgtatct

SEQ ID NO: 77667 - DNA, 20 bp, Artificial Sequence
  Description of Artificial Sequence: Synthetic oligonucleotide
  Target: ATXN2; (-) strand; PAM type: YTN; PAM sequence: TTG
ttaccttcggttatcatgta

SEQ ID NO: 77668 - DNA, 20 bp, Artificial Sequence
  Description of Artificial Sequence: Synthetic oligonucleotide
  Target: ATXN2; (-) strand; PAM type: YTN; PAM sequence: CTG
tccaagaaccaatccaggat

SEQ ID NO: 77669 - DNA, 20 bp, Artificial Sequence
  Description of Artificial Sequence: Synthetic oligonucleotide
  Target: ATXN2; (-) strand; PAM type: YTN; PAM sequence: CTC
tgtccaagaaccaatccagg

SEQ ID NO: 77670 - DNA, 20 bp, Artificial Sequence
  Description of Artificial Sequence: Synthetic oligonucleotide
  Target: ATXN2; (-) strand; PAM type: YTN; PAM sequence: CTC
cctctgtccaagaaccaatc

SEQ ID NO: 77671 - DNA, 20 bp, Artificial Sequence
  Description of Artificial Sequence: Synthetic oligonucleotide
  Target: ATXN2; (-) strand; PAM type: YTN; PAM sequence: TTA
ctccctctgtccaagaacca

SEQ ID NO: 77672 - DNA, 20 bp, Artificial Sequence
  Description of Artificial Sequence: Synthetic oligonucleotide
  Target: ATXN2; (-) strand; PAM type: YTN; PAM sequence: TTT
actccctctgtccaagaacc

SEQ ID NO: 77673 - DNA, 20 bp, Artificial Sequence
  Description of Artificial Sequence: Synthetic oligonucleotide
  Target: ATXN2; (-) strand; PAM type: YTN; PAM sequence: CTA
catatatatgtggaatatac

SEQ ID NO: 77674 - DNA, 20 bp, Artificial Sequence
  Description of Artificial Sequence: Synthetic oligonucleotide
  Target: ATXN2; (-) strand; PAM type: YTN; PAM sequence: TTC
tacatatatatgtggaatat

SEQ ID NO: 77675 - DNA, 20 bp, Artificial Sequence
  Description of Artificial Sequence: Synthetic oligonucleotide
  Target: ATXN2; (-) strand; PAM type: YTN; PAM sequence: CTA
catatatatatacacatata

SEQ ID NO: 77676 - DNA, 20 bp, Artificial Sequence
  Description of Artificial Sequence: Synthetic oligonucleotide
  Target: ATXN2; (-) strand; PAM type: YTN; PAM sequence: TTC
tacatatatatatacacata

SEQ ID NO: 77677 - DNA, 20 bp, Artificial Sequence
  Description of Artificial Sequence: Synthetic oligonucleotide
  Target: ATXN2; (-) strand; PAM type: YTN; PAM sequence: CTG
gtcaagaaccagtaaatatg

SEQ ID NO: 77678 - DNA, 20 bp, Artificial Sequence
  Description of Artificial Sequence: Synthetic oligonucleotide
  Target: ATXN2; (-) strand; PAM type: YTN; PAM sequence: TTC
tggtcaagaaccagtaaata

SEQ ID NO: 77679 - DNA, 20 bp, Artificial Sequence
  Description of Artificial Sequence: Synthetic oligonucleotide
  Target: ATXN2; (-) strand; PAM type: YTN; PAM sequence: TTT
ctggtcaagaaccagtaaat

SEQ ID NO: 77680 - DNA, 20 bp, Artificial Sequence
  Description of Artificial Sequence: Synthetic oligonucleotide
  Target: ATXN2; (-) strand; PAM type: YTN; PAM sequence: TTT
tctggtcaagaaccagtaaa

SEQ ID NO: 77681 - DNA, 20 bp, Artificial Sequence
  Description of Artificial Sequence: Synthetic oligonucleotide
  Target: ATXN2; (-) strand; PAM type: YTN; PAM sequence: TTT
ttctggtcaagaaccagtaa

SEQ ID NO: 77682 - DNA, 20 bp, Artificial Sequence
  Description of Artificial Sequence: Synthetic oligonucleotide
  Target: ATXN2; (-) strand; PAM type: YTN; PAM sequence: TTA
aaacaatcaacaaatcaaca

SEQ ID NO: 77683 - DNA, 20 bp, Artificial Sequence
  Description of Artificial Sequence: Synthetic oligonucleotide
  Target: ATXN2; (-) strand; PAM type: YTN; PAM sequence: TTT
aaaacaatcaacaaatcaac

SEQ ID NO: 77684 - DNA, 20 bp, Artificial Sequence
  Description of Artificial Sequence: Synthetic oligonucleotide
  Target: ATXN2; (-) strand; PAM type: YTN; PAM sequence: CTT
taaaacaatcaacaaatcaa

SEQ ID NO: 77685 - DNA, 20 bp, Artificial Sequence
  Description of Artificial Sequence: Synthetic oligonucleotide
  Target: ATXN2; (-) strand; PAM type: YTN; PAM sequence: CTA
atgtcctttaaaacaatcaa

SEQ ID NO: 77686 - DNA, 20 bp, Artificial Sequence
  Description of Artificial Sequence: Synthetic oligonucleotide
  Target: ATXN2; (-) strand; PAM type: YTN; PAM sequence: TTC
taatgtcctttaaaacaatc

SEQ ID NO: 77687 - DNA, 20 bp, Artificial Sequence
  Description of Artificial Sequence: Synthetic oligonucleotide
  Target: ATXN2; (-) strand; PAM type: YTN; PAM sequence: CTT
ctaatgtcctttaaaacaat

SEQ ID NO: 77688 - DNA, 20 bp, Artificial Sequence
  Description of Artificial Sequence: Synthetic oligonucleotide
  Target: ATXN2; (-) strand; PAM type: YTN; PAM sequence: TTA
tagaccttctaatgtccttt

SEQ ID NO: 77689 - DNA, 20 bp, Artificial Sequence
  Description of Artificial Sequence: Synthetic oligonucleotide
  Target: ATXN2; (-) strand; PAM type: YTN; PAM sequence: TTT
atagaccttctaatgtcctt

SEQ ID NO: 77690 - DNA, 20 bp, Artificial Sequence
  Description of Artificial Sequence: Synthetic oligonucleotide
  Target: ATXN2; (-) strand; PAM type: YTN; PAM sequence: CTG
tttatagaccttctaatgtc

SEQ ID NO: 77691 - DNA, 20 bp, Artificial Sequence
  Description of Artificial Sequence: Synthetic oligonucleotide
  Target: ATXN2; (-) strand; PAM type: YTN; PAM sequence: TTC
tgtttatagaccttctaatg

SEQ ID NO: 77692 - DNA, 20 bp, Artificial Sequence
  Description of Artificial Sequence: Synthetic oligonucleotide
  Target: ATXN2; (-) strand; PAM type: YTN; PAM sequence: TTA
ttctgtttatagaccttcta

SEQ ID NO: 77693 - DNA, 20 bp, Artificial Sequence
  Description of Artificial Sequence: Synthetic oligonucleotide
  Target: ATXN2; (-) strand; PAM type: YTN; PAM sequence: CTG
ttattctgtttatagacctt

SEQ ID NO: 77694 - DNA, 20 bp, Artificial Sequence
  Description of Artificial Sequence: Synthetic oligonucleotide
  Target: ATXN2; (-) strand; PAM type: YTN; PAM sequence: TTG
tgtcaaactgttattctgtt

SEQ ID NO: 77695 - DNA, 20 bp, Artificial Sequence
  Description of Artificial Sequence: Synthetic oligonucleotide
  Target: ATXN2; (-) strand; PAM type: YTN; PAM sequence: TTA
ataattgtgtcaaactgtta

SEQ ID NO: 77696 - DNA, 20 bp, Artificial Sequence
  Description of Artificial Sequence: Synthetic oligonucleotide
  Target: ATXN2; (-) strand; PAM type: YTN; PAM sequence: TTG
tcaaaataaggaaattaata

SEQ ID NO: 77697 - DNA, 20 bp, Artificial Sequence
  Description of Artificial Sequence: Synthetic oligonucleotide
  Target: ATXN2; (-) strand; PAM type: YTN; PAM sequence: TTC
aaaaccacagtacagttgtc

SEQ ID NO: 77698 - DNA, 20 bp, Artificial Sequence
  Description of Artificial Sequence: Synthetic oligonucleotide
  Target: ATXN2; (-) strand; PAM type: YTN; PAM sequence: TTT
caaaaccacagtacagttgt

SEQ ID NO: 77699 - DNA, 20 bp, Artificial Sequence
  Description of Artificial Sequence: Synthetic oligonucleotide
  Target: ATXN2; (-) strand; PAM type: YTN; PAM sequence: CTA
tttcaaaaccacagtacagt

SEQ ID NO: 77700 - DNA, 20 bp, Artificial Sequence
  Description of Artificial Sequence: Synthetic oligonucleotide
  Target: ATXN2; (-) strand; PAM type: YTN; PAM sequence: TTC
tatttcaaaaccacagtaca

SEQ ID NO: 77701 - DNA, 20 bp, Artificial Sequence
  Description of Artificial Sequence: Synthetic oligonucleotide
  Target: ATXN2; (-) strand; PAM type: YTN; PAM sequence: CTA
ataacaagggcattctattt

SEQ ID NO: 77702 - DNA, 20 bp, Artificial Sequence
  Description of Artificial Sequence: Synthetic oligonucleotide
  Target: ATXN2; (-) strand; PAM type: YTN; PAM sequence: TTG
tatgtactaataacaagggc

SEQ ID NO: 77703 - DNA, 20 bp, Artificial Sequence
  Description of Artificial Sequence: Synthetic oligonucleotide
  Target: ATXN2; (-) strand; PAM type: YTN; PAM sequence: CTT
gtatgtactaataacaaggg

SEQ ID NO: 77704 - DNA, 20 bp, Artificial Sequence
  Description of Artificial Sequence: Synthetic oligonucleotide
  Target: ATXN2; (-) strand; PAM type: YTN; PAM sequence: TTC
aacttgtatgtactaataac

SEQ ID NO: 77705 - DNA, 20 bp, Artificial Sequence
  Description of Artificial Sequence: Synthetic oligonucleotide
  Target: ATXN2; (-) strand; PAM type: YTN; PAM sequence: CTT
caacttgtatgtactaataa

SEQ ID NO: 77706 - DNA, 20 bp, Artificial Sequence
  Description of Artificial Sequence: Synthetic oligonucleotide
  Target: ATXN2; (-) strand; PAM type: YTN; PAM sequence: CTA
aatacttcaacttgtatgta

SEQ ID NO: 77707 - DNA, 20 bp, Artificial Sequence
  Description of Artificial Sequence: Synthetic oligonucleotide
  Target: ATXN2; (-) strand; PAM type: YTN; PAM sequence: TTA
gccctaaatacttcaacttg

SEQ ID NO: 77708 - DNA, 20 bp, Artificial Sequence
  Description of Artificial Sequence: Synthetic oligonucleotide
  Target: ATXN2; (-) strand; PAM type: YTN; PAM sequence: TTT
agccctaaatacttcaactt

SEQ ID NO: 77709 - DNA, 20 bp, Artificial Sequence
  Description of Artificial Sequence: Synthetic oligonucleotide
  Target: ATXN2; (-) strand; PAM type: YTN; PAM sequence: CTT
tagccctaaatacttcaact

SEQ ID NO: 77710 - DNA, 20 bp, Artificial Sequence
  Description of Artificial Sequence: Synthetic oligonucleotide
  Target: ATXN2; (-) strand; PAM type: YTN; PAM sequence: CTC
tttagccctaaatacttcaa

SEQ ID NO: 77711 - DNA, 20 bp, Artificial Sequence
  Description of Artificial Sequence: Synthetic oligonucleotide
  Target: ATXN2; (-) strand; PAM type: YTN; PAM sequence: TTA
aacatatgagagacatgatg

SEQ ID NO: 77712 - DNA, 20 bp, Artificial Sequence
  Description of Artificial Sequence: Synthetic oligonucleotide
  Target: ATXN2; (-) strand; PAM type: YTN; PAM sequence: TTA
ttaaacatatgagagacatg

SEQ ID NO: 77713 - DNA, 20 bp, Artificial Sequence
  Description of Artificial Sequence: Synthetic oligonucleotide
  Target: ATXN2; (-) strand; PAM type: YTN; PAM sequence: CTT
attaaacatatgagagacat

SEQ ID NO: 77714 - DNA, 20 bp, Artificial Sequence
  Description of Artificial Sequence: Synthetic oligonucleotide
  Target: ATXN2; (-) strand; PAM type: YTN; PAM sequence: TTC
ttattaaacatatgagagac

SEQ ID NO: 77715 - DNA, 20 bp, Artificial Sequence
  Description of Artificial Sequence: Synthetic oligonucleotide
  Target: ATXN2; (-) strand; PAM type: YTN; PAM sequence: TTA
atataaaataaaaattctta

SEQ ID NO: 77716 - DNA, 20 bp, Artificial Sequence
  Description of Artificial Sequence: Synthetic oligonucleotide
  Target: ATXN2; (-) strand; PAM type: YTN; PAM sequence: TTT
aatataaaataaaaattctt

SEQ ID NO: 77717 - DNA, 20 bp, Artificial Sequence
  Description of Artificial Sequence: Synthetic oligonucleotide
  Target: ATXN2; (-) strand; PAM type: YTN; PAM sequence: TTG
tatatgtaagatttaatata

SEQ ID NO: 77718 - DNA, 20 bp, Artificial Sequence
  Description of Artificial Sequence: Synthetic oligonucleotide
  Target: ATXN2; (-) strand; PAM type: YTN; PAM sequence: TTG
gtaattgtatatgtaagatt

SEQ ID NO: 77719 - DNA, 20 bp, Artificial Sequence
  Description of Artificial Sequence: Synthetic oligonucleotide
  Target: ATXN2; (-) strand; PAM type: YTN; PAM sequence: CTG
tattggtaattgtatatgta

SEQ ID NO: 77720 - DNA, 20 bp, Artificial Sequence
  Description of Artificial Sequence: Synthetic oligonucleotide
  Target: ATXN2; (-) strand; PAM type: YTN; PAM sequence: CTC
tgtattggtaattgtatatg

SEQ ID NO: 77721 - DNA, 20 bp, Artificial Sequence
  Description of Artificial Sequence: Synthetic oligonucleotide
  Target: ATXN2; (-) strand; PAM type: YTN; PAM sequence: TTC
tctgtattggtaattgtata

SEQ ID NO: 77722 - DNA, 20 bp, Artificial Sequence
  Description of Artificial Sequence: Synthetic oligonucleotide
  Target: ATXN2; (-) strand; PAM type: YTN; PAM sequence: TTT
ctctgtattggtaattgtat

SEQ ID NO: 77723 - DNA, 20 bp, Artificial Sequence
  Description of Artificial Sequence: Synthetic oligonucleotide
  Target: ATXN2; (-) strand; PAM type: YTN; PAM sequence: TTT
tctctgtattggtaattgta

SEQ ID NO: 77724 - DNA, 20 bp, Artificial Sequence
  Description of Artificial Sequence: Synthetic oligonucleotide
  Target: ATXN2; (-) strand; PAM type: YTN; PAM sequence: TTA
acattttctctgtattggta

SEQ ID NO: 77725 - DNA, 20 bp, Artificial Sequence
  Description of Artificial Sequence: Synthetic oligonucleotide
  Target: ATXN2; (-) strand; PAM type: YTN; PAM sequence: CTT
aacattttctctgtattggt

SEQ ID NO: 77726 - DNA, 20 bp, Artificial Sequence
  Description of Artificial Sequence: Synthetic oligonucleotide
  Target: ATXN2; (-) strand; PAM type: YTN; PAM sequence: TTC
accttaacattttctctgta

SEQ ID NO: 77727 - DNA, 20 bp, Artificial Sequence
  Description of Artificial Sequence: Synthetic oligonucleotide
  Target: ATXN2; (-) strand; PAM type: YTN; PAM sequence: TTA
ccatattcaccttaacattt

SEQ ID NO: 77728 - DNA, 20 bp, Artificial Sequence
  Description of Artificial Sequence: Synthetic oligonucleotide
  Target: ATXN2; (-) strand; PAM type: YTN; PAM sequence: TTT
accatattcaccttaacatt

SEQ ID NO: 77729 - DNA, 20 bp, Artificial Sequence
  Description of Artificial Sequence: Synthetic oligonucleotide
  Target: ATXN2; (-) strand; PAM type: YTN; PAM sequence: TTT
taccatattcaccttaacat

SEQ ID NO: 77730 - DNA, 20 bp, Artificial Sequence
  Description of Artificial Sequence: Synthetic oligonucleotide
  Target: ATXN2; (-) strand; PAM type: YTN; PAM sequence: TTC
aagtaacattttaccatatt

SEQ ID NO: 77731 - DNA, 20 bp, Artificial Sequence
  Description of Artificial Sequence: Synthetic oligonucleotide
  Target: ATXN2; (-) strand; PAM type: YTN; PAM sequence: CTT
caagtaacattttaccatat

SEQ ID NO: 77732 - DNA, 20 bp, Artificial Sequence
  Description of Artificial Sequence: Synthetic oligonucleotide
  Target: ATXN2; (-) strand; PAM type: YTN; PAM sequence: TTC
ttcaagtaacattttaccat

SEQ ID NO: 77733 - DNA, 20 bp, Artificial Sequence
  Description of Artificial Sequence: Synthetic oligonucleotide
  Target: ATXN2; (-) strand; PAM type: YTN; PAM sequence: CTG
tattcttcaagtaacatttt

SEQ ID NO: 77734 - DNA, 20 bp, Artificial Sequence
  Description of Artificial Sequence: Synthetic oligonucleotide
  Target: ATXN2; (-) strand; PAM type: YTN; PAM sequence: CTC
acctgtattcttcaagtaac

SEQ ID NO: 77735 - DNA, 20 bp, Artificial Sequence
  Description of Artificial Sequence: Synthetic oligonucleotide
  Target: ATXN2; (-) strand; PAM type: YTN; PAM sequence: CTA
tatatctcacctgtattctt

SEQ ID NO: 77736 - DNA, 20 bp, Artificial Sequence
  Description of Artificial Sequence: Synthetic oligonucleotide
  Target: ATXN2; (-) strand; PAM type: YTN; PAM sequence: CTC
ctatatatctcacctgtatt

SEQ ID NO: 77737 - DNA, 20 bp, Artificial Sequence
  Description of Artificial Sequence: Synthetic oligonucleotide
  Target: ATXN2; (-) strand; PAM type: YTN; PAM sequence: TTC
tcctatatatctcacctgta

SEQ ID NO: 77738 - DNA, 20 bp, Artificial Sequence
  Description of Artificial Sequence: Synthetic oligonucleotide
  Target: ATXN2; (-) strand; PAM type: YTN; PAM sequence: TTA
taaagaattctcctatatat

SEQ ID NO: 77739 - DNA, 20 bp, Artificial Sequence
  Description of Artificial Sequence: Synthetic oligonucleotide
  Target: ATXN2; (-) strand; PAM type: YTN; PAM sequence: TTG
caaagatattataaagaatt

SEQ ID NO: 77740 - DNA, 20 bp, Artificial Sequence
  Description of Artificial Sequence: Synthetic oligonucleotide
  Target: ATXN2; (-) strand; PAM type: YTN; PAM sequence: TTA
gaaaaattgcaaagatatta

SEQ ID NO: 77741 - DNA, 20 bp, Artificial Sequence
  Description of Artificial Sequence: Synthetic oligonucleotide
  Target: ATXN2; (-) strand; PAM type: YTN; PAM sequence: TTT
agaaaaattgcaaagatatt

SEQ ID NO: 77742 - DNA, 20 bp, Artificial Sequence
  Description of Artificial Sequence: Synthetic oligonucleotide
  Target: ATXN2; (-) strand; PAM type: YTN; PAM sequence: TTT
tagaaaaattgcaaagatat

SEQ ID NO: 77743 - DNA, 20 bp, Artificial Sequence
  Description of Artificial Sequence: Synthetic oligonucleotide
  Target: ATXN2; (-) strand; PAM type: YTN; PAM sequence: CTT
ttagaaaaattgcaaagata

SEQ ID NO: 77744 - DNA, 20 bp, Artificial Sequence
  Description of Artificial Sequence: Synthetic oligonucleotide
  Target: ATXN2; (-) strand; PAM type: YTN; PAM sequence: TTA
gacttttagaaaaattgcaa

SEQ ID NO: 77745 - DNA, 20 bp, Artificial Sequence
  Description of Artificial Sequence: Synthetic oligonucleotide
  Target: ATXN2; (-) strand; PAM type: YTN; PAM sequence: TTT
agacttttagaaaaattgca

SEQ ID NO: 77746 - DNA, 20 bp, Artificial Sequence
  Description of Artificial Sequence: Synthetic oligonucleotide
  Target: ATXN2; (-) strand; PAM type: YTN; PAM sequence: TTT
tagacttttagaaaaattgc

SEQ ID NO: 77747 - DNA, 20 bp, Artificial Sequence
  Description of Artificial Sequence: Synthetic oligonucleotide
  Target: ATXN2; (-) strand; PAM type: YTN; PAM sequence: TTA
aacataattttagactttta

SEQ ID NO: 77748 - DNA, 20 bp, Artificial Sequence
  Description of Artificial Sequence: Synthetic oligonucleotide
  Target: ATXN2; (-) strand; PAM type: YTN; PAM sequence: CTT
aaacataattttagactttt

SEQ ID NO: 77749 - DNA, 20 bp, Artificial Sequence
  Description of Artificial Sequence: Synthetic oligonucleotide
  Target: ATXN2; (-) strand; PAM type: YTN; PAM sequence: TTA
cttaaacataattttagact

SEQ ID NO: 77750 - DNA, 20 bp, Artificial Sequence
  Description of Artificial Sequence: Synthetic oligonucleotide
  Target: ATXN2; (-) strand; PAM type: YTN; PAM sequence: TTT
acttaaacataattttagac

SEQ ID NO: 77751 - DNA, 20 bp, Artificial Sequence
  Description of Artificial Sequence: Synthetic oligonucleotide
  Target: ATXN2; (-) strand; PAM type: YTN; PAM sequence: TTT
tacttaaacataattttaga

SEQ ID NO: 77752 - DNA, 20 bp, Artificial Sequence
  Description of Artificial Sequence: Synthetic oligonucleotide
  Target: ATXN2; (-) strand; PAM type: YTN; PAM sequence: TTA
aaaacattttacttaaacat

SEQ ID NO: 77753 - DNA, 20 bp, Artificial Sequence
  Description of Artificial Sequence: Synthetic oligonucleotide
  Target: ATXN2; (-) strand; PAM type: YTN; PAM sequence: CTC
caattaaaaacattttactt

SEQ ID NO: 77754 - DNA, 20 bp, Artificial Sequence
  Description of Artificial Sequence: Synthetic oligonucleotide
  Target: ATXN2; (-) strand; PAM type: YTN; PAM sequence: TTA
tagtctccaattaaaaacat

SEQ ID NO: 77755 - DNA, 20 bp, Artificial Sequence
  Description of Artificial Sequence: Synthetic oligonucleotide
  Target: ATXN2; (-) strand; PAM type: YTN; PAM sequence: CTT
atagtctccaattaaaaaca

SEQ ID NO: 77756 - DNA, 20 bp, Artificial Sequence
  Description of Artificial Sequence: Synthetic oligonucleotide
  Target: ATXN2; (-) strand; PAM type: YTN; PAM sequence: TTA
acaaatcacatcacttatag

SEQ ID NO: 77757 - DNA, 20 bp, Artificial Sequence
  Description of Artificial Sequence: Synthetic oligonucleotide
  Target: ATXN2; (-) strand; PAM type: YTN; PAM sequence: TTA
aatagagttaacaaatcaca

SEQ ID NO: 77758 - DNA, 20 bp, Artificial Sequence
  Description of Artificial Sequence: Synthetic oligonucleotide
  Target: ATXN2; (-) strand; PAM type: YTN; PAM sequence: TTG
gacaatgcattaaatagagt

SEQ ID NO: 77759 - DNA, 20 bp, Artificial Sequence
  Description of Artificial Sequence: Synthetic oligonucleotide
  Target: ATXN2; (-) strand; PAM type: YTN; PAM sequence: CTT
ggacaatgcattaaatagag

SEQ ID NO: 77760 - DNA, 20 bp, Artificial Sequence
  Description of Artificial Sequence: Synthetic oligonucleotide
  Target: ATXN2; (-) strand; PAM type: YTN; PAM sequence: TTA
aaaaatgccttggacaatgc

SEQ ID NO: 77761 - DNA, 20 bp, Artificial Sequence
  Description of Artificial Sequence: Synthetic oligonucleotide
  Target: ATXN2; (-) strand; PAM type: YTN; PAM sequence: TTT
aaaaaatgccttggacaatg

SEQ ID NO: 77762 - DNA, 20 bp, Artificial Sequence
  Description of Artificial Sequence: Synthetic oligonucleotide
  Target: ATXN2; (-) strand; PAM type: YTN; PAM sequence: TTA
tttaaaaaatgccttggaca

SEQ ID NO: 77763 - DNA, 20 bp, Artificial Sequence
  Description of Artificial Sequence: Synthetic oligonucleotide
  Target: ATXN2; (-) strand; PAM type: YTN; PAM sequence: TTA
ttatttaaaaaatgccttgg

SEQ ID NO: 77764 - DNA, 20 bp, Artificial Sequence
  Description of Artificial Sequence: Synthetic oligonucleotide
  Target: ATXN2; (-) strand; PAM type: YTN; PAM sequence: TTA
agtattattatttaaaaaat

SEQ ID NO: 77765 - DNA, 20 bp, Artificial Sequence
  Description of Artificial Sequence: Synthetic oligonucleotide
  Target: ATXN2; (-) strand; PAM type: YTN; PAM sequence: CTG
agtaggattaagtattatta

SEQ ID NO: 77766 - DNA, 20 bp, Artificial Sequence
  Description of Artificial Sequence: Synthetic oligonucleotide
  Target: ATXN2; (-) strand; PAM type: YTN; PAM sequence: TTC
aaggctgagtaggattaagt

SEQ ID NO: 77767 - DNA, 20 bp, Artificial Sequence
  Description of Artificial Sequence: Synthetic oligonucleotide
  Target: ATXN2; (-) strand; PAM type: YTN; PAM sequence: TTT
caaggctgagtaggattaag

SEQ ID NO: 77768 - DNA, 20 bp, Artificial Sequence
  Description of Artificial Sequence: Synthetic oligonucleotide
  Target: ATXN2; (-) strand; PAM type: YTN; PAM sequence: TTG
agtttcaaggctgagtagga

SEQ ID NO: 77769 - DNA, 20 bp, Artificial Sequence
  Description of Artificial Sequence: Synthetic oligonucleotide
  Target: ATXN2; (-) strand; PAM type: YTN; PAM sequence: TTT
gagtttcaaggctgagtagg

SEQ ID NO: 77770 - DNA, 20 bp, Artificial Sequence
  Description of Artificial Sequence: Synthetic oligonucleotide
  Target: ATXN2; (-) strand; PAM type: YTN; PAM sequence: CTG
aaaagatggcatttgagttt

SEQ ID NO: 77771 - DNA, 20 bp, Artificial Sequence
  Description of Artificial Sequence: Synthetic oligonucleotide
  Target: ATXN2; (-) strand; PAM type: YTN; PAM sequence: TTC
ctgaaaagatggcatttgag

SEQ ID NO: 77772 - DNA, 20 bp, Artificial Sequence
  Description of Artificial Sequence: Synthetic oligonucleotide
  Target: ATXN2; (-) strand; PAM type: YTN; PAM sequence: CTT
cctgaaaagatggcatttga

SEQ ID NO: 77773 - DNA, 20 bp, Artificial Sequence
  Description of Artificial Sequence: Synthetic oligonucleotide
  Target: ATXN2; (-) strand; PAM type: YTN; PAM sequence: TTG
agataatcgaaggaagactt

SEQ ID NO: 77774 - DNA, 20 bp, Artificial Sequence
  Description of Artificial Sequence: Synthetic oligonucleotide
  Target: ATXN2; (-) strand; PAM type: YTN; PAM sequence: TTG
attgagataatcgaaggaag

SEQ ID NO: 77775 - DNA, 20 bp, Artificial Sequence
  Description of Artificial Sequence: Synthetic oligonucleotide
  Target: ATXN2; (-) strand; PAM type: YTN; PAM sequence: TTT
gattgagataatcgaaggaa

SEQ ID NO: 77776 - DNA, 20 bp, Artificial Sequence
  Description of Artificial Sequence: Synthetic oligonucleotide
  Target: ATXN2; (-) strand; PAM type: YTN; PAM sequence: TTG
aaaacagcatcgtatatttg

SEQ ID NO: 77777 - DNA, 20 bp, Artificial Sequence
  Description of Artificial Sequence: Synthetic oligonucleotide
  Target: ATXN2; (-) strand; PAM type: YTN; PAM sequence: CTG
gagagttgaaaacagcatcg

SEQ ID NO: 77778 - DNA, 20 bp, Artificial Sequence
  Description of Artificial Sequence: Synthetic oligonucleotide
  Target: ATXN2; (-) strand; PAM type: YTN; PAM sequence: CTA
aactggagagttgaaaacag

SEQ ID NO: 77779 - DNA, 20 bp, Artificial Sequence
  Description of Artificial Sequence: Synthetic oligonucleotide
  Target: ATXN2; (-) strand; PAM type: YTN; PAM sequence: TTA
taatacagatctaaactgga

SEQ ID NO: 77780 - DNA, 20 bp, Artificial Sequence
  Description of Artificial Sequence: Synthetic oligonucleotide
  Target: ATXN2; (-) strand; PAM type: YTN; PAM sequence: CTA
gtaattataatacagatcta

SEQ ID NO: 77781 - DNA, 20 bp, Artificial Sequence
  Description of Artificial Sequence: Synthetic oligonucleotide
  Target: ATXN2; (-) strand; PAM type: YTN; PAM sequence: CTG
agtagtgggtatatgacaga

SEQ ID NO: 77782 - DNA, 20 bp, Artificial Sequence
  Description of Artificial Sequence: Synthetic oligonucleotide
  Target: ATXN2; (-) strand; PAM type: YTN; PAM sequence: TTC
acagaagcataatatggtca

SEQ ID NO: 77783 - DNA, 20 bp, Artificial Sequence
  Description of Artificial Sequence: Synthetic oligonucleotide
  Target: ATXN2; (-) strand; PAM type: YTN; PAM sequence: TTT
cacagaagcataatatggtc

SEQ ID NO: 77784 - DNA, 20 bp, Artificial Sequence
  Description of Artificial Sequence: Synthetic oligonucleotide
  Target: ATXN2; (-) strand; PAM type: YTN; PAM sequence: TTT
tcacagaagcataatatggt

SEQ ID NO: 77785 - DNA, 20 bp, Artificial Sequence
  Description of Artificial Sequence: Synthetic oligonucleotide
  Target: ATXN2; (-) strand; PAM type: YTN; PAM sequence: CTG
attttcacagaagcataata

SEQ ID NO: 77786 - DNA, 20 bp, Artificial Sequence
  Description of Artificial Sequence: Synthetic oligonucleotide
  Target: ATXN2; (-) strand; PAM type: YTN; PAM sequence: TTC
tgattttcacagaagcataa

SEQ ID NO: 77787 - DNA, 20 bp, Artificial Sequence
  Description of Artificial Sequence: Synthetic oligonucleotide
  Target: ATXN2; (-) strand; PAM type: YTN; PAM sequence: TTT
ctgattttcacagaagcata

SEQ ID NO: 77788 - DNA, 20 bp, Artificial Sequence
  Description of Artificial Sequence: Synthetic oligonucleotide
  Target: ATXN2; (-) strand; PAM type: YTN; PAM sequence: TTT
tctgattttcacagaagcat

SEQ ID NO: 77789 - DNA, 20 bp, Artificial Sequence
  Description of Artificial Sequence: Synthetic oligonucleotide
  Target: ATXN2; (-) strand; PAM type: YTN; PAM sequence: CTG
gaagaggcatcattttctga

SEQ ID NO: 77790 - DNA, 20 bp, Artificial Sequence
  Description of Artificial Sequence: Synthetic oligonucleotide
  Target: ATXN2; (-) strand; PAM type: YTN; PAM sequence: CTA
tgaccccctggaagaggcat

SEQ ID NO: 77791 - DNA, 20 bp, Artificial Sequence
  Description of Artificial Sequence: Synthetic oligonucleotide
  Target: ATXN2; (-) strand; PAM type: YTN; PAM sequence: CTA
atgtggggctatgaccccct

SEQ ID NO: 77792 - DNA, 20 bp, Artificial Sequence
  Description of Artificial Sequence: Synthetic oligonucleotide
  Target: ATXN2; (-) strand; PAM type: YTN; PAM sequence: TTG
tctaatgtggggctatgacc

SEQ ID NO: 77793 - DNA, 20 bp, Artificial Sequence
  Description of Artificial Sequence: Synthetic oligonucleotide
  Target: ATXN2; (-) strand; PAM type: YTN; PAM sequence: TTT
gtctaatgtggggctatgac

SEQ ID NO: 77794 - DNA, 20 bp, Artificial Sequence
  Description of Artificial Sequence: Synthetic oligonucleotide
  Target: ATXN2; (-) strand; PAM type: YTN; PAM sequence: TTT
tgtctaatgtggggctatga

SEQ ID NO: 77795 - DNA, 20 bp, Artificial Sequence
  Description of Artificial Sequence: Synthetic oligonucleotide
  Target: ATXN2; (-) strand; PAM type: YTN; PAM sequence: CTG
ttttgtctaatgtggggcta

SEQ ID NO: 77796 - DNA, 20 bp, Artificial Sequence
  Description of Artificial Sequence: Synthetic oligonucleotide
  Target: ATXN2; (-) strand; PAM type: YTN; PAM sequence: TTG
ccgaccacactgttttgtct

SEQ ID NO: 77797 - DNA, 20 bp, Artificial Sequence
  Description of Artificial Sequence: Synthetic oligonucleotide
  Target: ATXN2; (-) strand; PAM type: YTN; PAM sequence: CTT
gccgaccacactgttttgtc

SEQ ID NO: 77798 - DNA, 20 bp, Artificial Sequence
  Description of Artificial Sequence: Synthetic oligonucleotide
  Target: ATXN2; (-) strand; PAM type: YTN; PAM sequence: CTG
cttgccgaccacactgtttt

SEQ ID NO: 77799 - DNA, 20 bp, Artificial Sequence
  Description of Artificial Sequence: Synthetic oligonucleotide
  Target: ATXN2; (-) strand; PAM type: YTN; PAM sequence: TTC
acaaagacactgcttgccga

SEQ ID NO: 77800 - DNA, 20 bp, Artificial Sequence
  Description of Artificial Sequence: Synthetic oligonucleotide
  Target: ATXN2; (-) strand; PAM type: YTN; PAM sequence: TTT
cacaaagacactgcttgccg

SEQ ID NO: 77801 - DNA, 20 bp, Artificial Sequence
  Description of Artificial Sequence: Synthetic oligonucleotide
  Target: ATXN2; (-) strand; PAM type: YTN; PAM sequence: TTT
tcacaaagacactgcttgcc

SEQ ID NO: 77802 - DNA, 20 bp, Artificial Sequence
  Description of Artificial Sequence: Synthetic oligonucleotide
  Target: ATXN2; (-) strand; PAM type: YTN; PAM sequence: TTA
attttcacaaagacactgct

SEQ ID NO: 77803 - DNA, 20 bp, Artificial Sequence
  Description of Artificial Sequence: Synthetic oligonucleotide
  Target: ATXN2; (-) strand; PAM type: YTN; PAM sequence: TTT
aattttcacaaagacactgc

SEQ ID NO: 77804 - DNA, 20 bp, Artificial Sequence
  Description of Artificial Sequence: Synthetic oligonucleotide
  Target: ATXN2; (-) strand; PAM type: YTN; PAM sequence: TTT
taattttcacaaagacactg

SEQ ID NO: 77805 - DNA, 20 bp, Artificial Sequence
  Description of Artificial Sequence: Synthetic oligonucleotide
  Target: ATXN2; (-) strand; PAM type: YTN; PAM sequence: CTT
ttaattttcacaaagacact

SEQ ID NO: 77806 - DNA, 20 bp, Artificial Sequence
  Description of Artificial Sequence: Synthetic oligonucleotide
  Target: ATXN2; (-) strand; PAM type: YTN; PAM sequence: TTC
ttttaattttcacaaagaca

SEQ ID NO: 77807 - DNA, 20 bp, Artificial Sequence
  Description of Artificial Sequence: Synthetic oligonucleotide
  Target: ATXN2; (-) strand; PAM type: YTN; PAM sequence: CTT
cttttaattttcacaaagac

SEQ ID NO: 77808 - DNA, 20 bp, Artificial Sequence
  Description of Artificial Sequence: Synthetic oligonucleotide
  Target: ATXN2; (-) strand; PAM type: YTN; PAM sequence: CTG
gtaccttcttttaattttca

SEQ ID NO: 77809 - DNA, 20 bp, Artificial Sequence
  Description of Artificial Sequence: Synthetic oligonucleotide
  Target: ATXN2; (-) strand; PAM type: YTN; PAM sequence: TTC
tggtaccttcttttaatttt

SEQ ID NO: 77810 - DNA, 20 bp, Artificial Sequence
  Description of Artificial Sequence: Synthetic oligonucleotide
  Target: ATXN2; (-) strand; PAM type: YTN; PAM sequence: CTT
ctggtaccttcttttaattt

SEQ ID NO: 77811 - DNA, 20 bp, Artificial Sequence
  Description of Artificial Sequence: Synthetic oligonucleotide
  Target: ATXN2; (-) strand; PAM type: YTN; PAM sequence: CTA
tgtgcttctggtaccttctt

SEQ ID NO: 77812 - DNA, 20 bp, Artificial Sequence
  Description of Artificial Sequence: Synthetic oligonucleotide
  Target: ATXN2; (-) strand; PAM type: YTN; PAM sequence: CTA
tatctatgtgcttctggtac

SEQ ID NO: 77813 - DNA, 20 bp, Artificial Sequence
  Description of Artificial Sequence: Synthetic oligonucleotide
  Target: ATXN2; (-) strand; PAM type: YTN; PAM sequence: TTG
ggggctatatctatgtgctt

SEQ ID NO: 77814 - DNA, 20 bp, Artificial Sequence
  Description of Artificial Sequence: Synthetic oligonucleotide
  Target: ATXN2; (-) strand; PAM type: YTN; PAM sequence: TTT
gggggctatatctatgtgct

SEQ ID NO: 77815 - DNA, 20 bp, Artificial Sequence
  Description of Artificial Sequence: Synthetic oligonucleotide
  Target: ATXN2; (-) strand; PAM type: YTN; PAM sequence: CTT
tgggggctatatctatgtgc

SEQ ID NO: 77816 - DNA, 20 bp, Artificial Sequence
  Description of Artificial Sequence: Synthetic oligonucleotide
  Target: ATXN2; (-) strand; PAM type: YTN; PAM sequence: TTG
gccacacaatgtgcctttgg

SEQ ID NO: 77817 - DNA, 20 bp, Artificial Sequence
  Description of Artificial Sequence: Synthetic oligonucleotide
  Target: ATXN2; (-) strand; PAM type: YTN; PAM sequence: TTT
ggccacacaatgtgcctttg

SEQ ID NO: 77818 - DNA, 20 bp, Artificial Sequence
  Description of Artificial Sequence: Synthetic oligonucleotide
  Target: ATXN2; (-) strand; PAM type: YTN; PAM sequence: CTT
tggccacacaatgtgccttt

SEQ ID NO: 77819 - DNA, 20 bp, Artificial Sequence
  Description of Artificial Sequence: Synthetic oligonucleotide
  Target: ATXN2; (-) strand; PAM type: YTN; PAM sequence: TTC
tttggccacacaatgtgcct

SEQ ID NO: 77820 - DNA, 20 bp, Artificial Sequence
  Description of Artificial Sequence: Synthetic oligonucleotide
  Target: ATXN2; (-) strand; PAM type: YTN; PAM sequence: TTT
ctttggccacacaatgtgcc

SEQ ID NO: 77821 - DNA, 20 bp, Artificial Sequence
  Description of Artificial Sequence: Synthetic oligonucleotide
  Target: ATXN2; (-) strand; PAM type: YTN; PAM sequence: TTG
aaatcaaggtgtttctttgg

SEQ ID NO: 77822 - DNA, 20 bp, Artificial Sequence
  Description of Artificial Sequence: Synthetic oligonucleotide
  Target: ATXN2; (-) strand; PAM type: YTN; PAM sequence: CTG
accaagtgtgaatggatgtt

SEQ ID NO: 77823 - DNA, 20 bp, Artificial Sequence
  Description of Artificial Sequence: Synthetic oligonucleotide
  Target: ATXN2; (-) strand; PAM type: YTN; PAM sequence: TTC
ctgaccaagtgtgaatggat

SEQ ID NO: 77824 - DNA, 20 bp, Artificial Sequence
  Description of Artificial Sequence: Synthetic oligonucleotide
  Target: ATXN2; (-) strand; PAM type: YTN; PAM sequence: TTG
tccaagagttcctgaccaag

SEQ ID NO: 77825 - DNA, 20 bp, Artificial Sequence
  Description of Artificial Sequence: Synthetic oligonucleotide
  Target: ATXN2; (-) strand; PAM type: YTN; PAM sequence: TTT
gtccaagagttcctgaccaa

SEQ ID NO: 77826 - DNA, 20 bp, Artificial Sequence
  Description of Artificial Sequence: Synthetic oligonucleotide
  Target: ATXN2; (-) strand; PAM type: YTN; PAM sequence: TTC
atttgtccaagagttcctga

SEQ ID NO: 77827 - DNA, 20 bp, Artificial Sequence
  Description of Artificial Sequence: Synthetic oligonucleotide
  Target: ATXN2; (-) strand; PAM type: YTN; PAM sequence: TTT
catttgtccaagagttcctg

SEQ ID NO: 77828 - DNA, 20 bp, Artificial Sequence
  Description of Artificial Sequence: Synthetic oligonucleotide
  Target: ATXN2; (-) strand; PAM type: YTN; PAM sequence: TTT
tcatttgtccaagagttcct

SEQ ID NO: 77829 - DNA, 20 bp, Artificial Sequence
  Description of Artificial Sequence: Synthetic oligonucleotide
  Target: ATXN2; (-) strand; PAM type: YTN; PAM sequence: TTA
ggttttcatttgtccaagag

SEQ ID NO: 77830 - DNA, 20 bp, Artificial Sequence
  Description of Artificial Sequence: Synthetic oligonucleotide
  Target: ATXN2; (-) strand; PAM type: YTN; PAM sequence: TTG
ttaggttttcatttgtccaa

SEQ ID NO: 77831 - DNA, 20 bp, Artificial Sequence
  Description of Artificial Sequence: Synthetic oligonucleotide
  Target: ATXN2; (-) strand; PAM type: YTN; PAM sequence: TTG
gttgttaggttttcatttgt

SEQ ID NO: 77832 - DNA, 20 bp, Artificial Sequence
  Description of Artificial Sequence: Synthetic oligonucleotide
  Target: ATXN2; (-) strand; PAM type: YTN; PAM sequence: CTT
ggttgttaggttttcatttg

SEQ ID NO: 77833 - DNA, 20 bp, Artificial Sequence
  Description of Artificial Sequence: Synthetic oligonucleotide
  Target: ATXN2; (-) strand; PAM type: YTN; PAM sequence: TTG
ccaagcttggttgttaggtt

SEQ ID NO: 77834 - DNA, 20 bp, Artificial Sequence
  Description of Artificial Sequence: Synthetic oligonucleotide
  Target: ATXN2; (-) strand; PAM type: YTN; PAM sequence: TTT
gccaagcttggttgttaggt

SEQ ID NO: 77835 - DNA, 20 bp, Artificial Sequence
  Description of Artificial Sequence: Synthetic oligonucleotide
  Target: ATXN2; (-) strand; PAM type: YTN; PAM sequence: TTT
tgccaagcttggttgttagg

SEQ ID NO: 77836 - DNA, 20 bp, Artificial Sequence
  Description of Artificial Sequence: Synthetic oligonucleotide
  Target: ATXN2; (-) strand; PAM type: YTN; PAM sequence: CTT
ttgccaagcttggttgttag

SEQ ID NO: 77837 - DNA, 20 bp, Artificial Sequence
  Description of Artificial Sequence: Synthetic oligonucleotide
  Target: ATXN2; (-) strand; PAM type: YTN; PAM sequence: TTG
gtagtggtagaaagatactt

SEQ ID NO: 77838 - DNA, 20 bp, Artificial Sequence
  Description of Artificial Sequence: Synthetic oligonucleotide
  Target: ATXN2; (-) strand; PAM type: YTN; PAM sequence: TTT
ggtagtggtagaaagatact

SEQ ID NO: 77839 - DNA, 20 bp, Artificial Sequence
  Description of Artificial Sequence: Synthetic oligonucleotide
  Target: ATXN2; (-) strand; PAM type: YTN; PAM sequence: TTT
tggtagtggtagaaagatac

SEQ ID NO: 77840 - DNA, 20 bp, Artificial Sequence
  Description of Artificial Sequence: Synthetic oligonucleotide
  Target: ATXN2; (-) strand; PAM type: YTN; PAM sequence: CTA
attttggtagtggtagaaag

SEQ ID NO: 77841 - DNA, 20 bp, Artificial Sequence
  Description of Artificial Sequence: Synthetic oligonucleotide
  Target: ATXN2; (-) strand; PAM type: YTN; PAM sequence: CTG
ctaattttggtagtggtaga

SEQ ID NO: 77842 - DNA, 20 bp, Artificial Sequence
  Description of Artificial Sequence: Synthetic oligonucleotide
  Target: ATXN2; (-) strand; PAM type: YTN; PAM sequence: CTC
tgctaattttggtagtggta

SEQ ID NO: 77843 - DNA, 20 bp, Artificial Sequence
  Description of Artificial Sequence: Synthetic oligonucleotide
  Target: ATXN2; (-) strand; PAM type: YTN; PAM sequence: TTC
ctctgctaattttggtagtg

SEQ ID NO: 77844 - DNA, 20 bp, Artificial Sequence
  Description of Artificial Sequence: Synthetic oligonucleotide
  Target: ATXN2; (-) strand; PAM type: YTN; PAM sequence: CTC
agtgtgtatcatatgaggca

SEQ ID NO: 77845 - DNA, 20 bp, Artificial Sequence
  Description of Artificial Sequence: Synthetic oligonucleotide
  Target: ATXN2; (-) strand; PAM type: YTN; PAM sequence: TTA
ctcagtgtgtatcatatgag

SEQ ID NO: 77846 - DNA, 20 bp, Artificial Sequence
  Description of Artificial Sequence: Synthetic oligonucleotide
  Target: ATXN2; (-) strand; PAM type: YTN; PAM sequence: TTT
actcagtgtgtatcatatga

SEQ ID NO: 77847 - DNA, 20 bp, Artificial Sequence
  Description of Artificial Sequence: Synthetic oligonucleotide
  Target: ATXN2; (-) strand; PAM type: YTN; PAM sequence: TTA
ggtatttactcagtgtgtat

SEQ ID NO: 77848 - DNA, 20 bp, Artificial Sequence
  Description of Artificial Sequence: Synthetic oligonucleotide
  Target: ATXN2; (-) strand; PAM type: YTN; PAM sequence: TTC
attaggtatttactcagtgt

SEQ ID NO: 77849 - DNA, 20 bp, Artificial Sequence
  Description of Artificial Sequence: Synthetic oligonucleotide
  Target: ATXN2; (-) strand; PAM type: YTN; PAM sequence: TTA
attcattaggtatttactca

SEQ ID NO: 77850 - DNA, 20 bp, Artificial Sequence
  Description of Artificial Sequence: Synthetic oligonucleotide
  Target: ATXN2; (-) strand; PAM type: YTN; PAM sequence: CTG
ttaattcattaggtatttac

SEQ ID NO: 77851 - DNA, 20 bp, Artificial Sequence
  Description of Artificial Sequence: Synthetic oligonucleotide
  Target: ATXN2; (-) strand; PAM type: YTN; PAM sequence: TTG
ggctgttaattcattaggta

SEQ ID NO: 77852 - DNA, 20 bp, Artificial Sequence
  Description of Artificial Sequence: Synthetic oligonucleotide
  Target: ATXN2; (-) strand; PAM type: YTN; PAM sequence: CTG
attgggctgttaattcatta

SEQ ID NO: 77853 - DNA, 20 bp, Artificial Sequence
  Description of Artificial Sequence: Synthetic oligonucleotide
  Target: ATXN2; (-) strand; PAM type: YTN; PAM sequence: TTC
tgattgggctgttaattcat

SEQ ID NO: 77854 - DNA, 20 bp, Artificial Sequence
  Description of Artificial Sequence: Synthetic oligonucleotide
  Target: ATXN2; (-) strand; PAM type: YTN; PAM sequence: TTG
ttctgattgggctgttaatt

SEQ ID NO: 77855 - DNA, 20 bp, Artificial Sequence
  Description of Artificial Sequence: Synthetic oligonucleotide
  Target: ATXN2; (-) strand; PAM type: YTN; PAM sequence: CTT
gttctgattgggctgttaat

SEQ ID NO: 77856 - DNA, 20 bp, Artificial Sequence
  Description of Artificial Sequence: Synthetic oligonucleotide
  Target: ATXN2; (-) strand; PAM type: YTN; PAM sequence: TTC
ccttgttctgattgggctgt

SEQ ID NO: 77857 - DNA, 20 bp, Artificial Sequence
  Description of Artificial Sequence: Synthetic oligonucleotide
  Target: ATXN2; (-) strand; PAM type: YTN; PAM sequence: TTT
cccttgttctgattgggctg

SEQ ID NO: 77858 - DNA, 20 bp, Artificial Sequence
  Description of Artificial Sequence: Synthetic oligonucleotide
  Target: ATXN2; (-) strand; PAM type: YTN; PAM sequence: CTT
tcccttgttctgattgggct

SEQ ID NO: 77859 - DNA, 20 bp, Artificial Sequence
  Description of Artificial Sequence: Synthetic oligonucleotide
  Target: ATXN2; (-) strand; PAM type: YTN; PAM sequence: TTC
tttcccttgttctgattggg

SEQ ID NO: 77860 - DNA, 20 bp, Artificial Sequence
  Description of Artificial Sequence: Synthetic oligonucleotide
  Target: ATXN2; (-) strand; PAM type: YTN; PAM sequence: TTT
ctttcccttgttctgattgg

SEQ ID NO: 77861 - DNA, 20 bp, Artificial Sequence
  Description of Artificial Sequence: Synthetic oligonucleotide
  Target: ATXN2; (-) strand; PAM type: YTN; PAM sequence: TTT
tctttcccttgttctgattg

SEQ ID NO: 77862 - DNA, 20 bp, Artificial Sequence
  Description of Artificial Sequence: Synthetic oligonucleotide
  Target: ATXN2; (-) strand; PAM type: YTN; PAM sequence: TTT
ttctttcccttgttctgatt

SEQ ID NO: 77863 - DNA, 20 bp, Artificial Sequence
  Description of Artificial Sequence: Synthetic oligonucleotide
  Target: ATXN2; (-) strand; PAM type: YTN; PAM sequence: TTT
tttctttcccttgttctgat

SEQ ID NO: 77864 - DNA, 20 bp, Artificial Sequence
  Description of Artificial Sequence: Synthetic oligonucleotide
  Target: ATXN2; (-) strand; PAM type: YTN; PAM sequence: TTT
ttttctttcccttgttctga

SEQ ID NO: 77865 - DNA, 20 bp, Artificial Sequence
  Description of Artificial Sequence: Synthetic oligonucleotide
  Target: ATXN2; (-) strand; PAM type: YTN; PAM sequence: TTT
tttttctttcccttgttctg

SEQ ID NO: 77866 - DNA, 20 bp, Artificial Sequence
  Description of Artificial Sequence: Synthetic oligonucleotide
  Target: ATXN2; (-) strand; PAM type: YTN; PAM sequence: TTT
ttttttctttcccttgttct

SEQ ID NO: 77867 - DNA, 20 bp, Artificial Sequence
  Description of Artificial Sequence: Synthetic oligonucleotide
  Target: ATXN2; (-) strand; PAM type: YTN; PAM sequence: CTT
tttttttctttcccttgttc

SEQ ID NO: 77868 - DNA, 20 bp, Artificial Sequence
  Description of Artificial Sequence: Synthetic oligonucleotide
  Target: ATXN2; (-) strand; PAM type: YTN; PAM sequence: TTC
tttttttttctttcccttgt

SEQ ID NO: 77869 - DNA, 20 bp, Artificial Sequence
  Description of Artificial Sequence: Synthetic oligonucleotide
  Target: ATXN2; (-) strand; PAM type: YTN; PAM sequence: TTT
ctttttttttctttcccttg

SEQ ID NO: 77870 - DNA, 20 bp, Artificial Sequence
  Description of Artificial Sequence: Synthetic oligonucleotide
  Target: ATXN2; (-) strand; PAM type: YTN; PAM sequence: CTT
tctttttttttctttccctt

SEQ ID NO: 77871 - DNA, 20 bp, Artificial Sequence
  Description of Artificial Sequence: Synthetic oligonucleotide
  Target: ATXN2; (-) strand; PAM type: YTN; PAM sequence: TTA
actttctttttttttctttc

SEQ ID NO: 77872 - DNA, 20 bp, Artificial Sequence
  Description of Artificial Sequence: Synthetic oligonucleotide
  Target: ATXN2; (-) strand; PAM type: YTN; PAM sequence: TTT
aactttctttttttttcttt

SEQ ID NO: 77873 - DNA, 20 bp, Artificial Sequence
  Description of Artificial Sequence: Synthetic oligonucleotide
  Target: ATXN2; (-) strand; PAM type: YTN; PAM sequence: TTT
taactttctttttttttctt

SEQ ID NO: 77874 - DNA, 20 bp, Artificial Sequence
  Description of Artificial Sequence: Synthetic oligonucleotide
  Target: ATXN2; (-) strand; PAM type: YTN; PAM sequence: TTG
aaatggaaagttttaacttt

SEQ ID NO: 77875 - DNA, 20 bp, Artificial Sequence
  Description of Artificial Sequence: Synthetic oligonucleotide
  Target: ATXN2; (-) strand; PAM type: YTN; PAM sequence: TTT
gaaatggaaagttttaactt

SEQ ID NO: 77876 - DNA, 20 bp, Artificial Sequence
  Description of Artificial Sequence: Synthetic oligonucleotide
  Target: ATXN2; (-) strand; PAM type: YTN; PAM sequence: CTT
tgaaatggaaagttttaact

SEQ ID NO: 77877 - DNA, 20 bp, Artificial Sequence
  Description of Artificial Sequence: Synthetic oligonucleotide
  Target: ATXN2; (-) strand; PAM type: YTN; PAM sequence: TTG
atagctttgaaatggaaagt

SEQ ID NO: 77878 - DNA, 20 bp, Artificial Sequence
  Description of Artificial Sequence: Synthetic oligonucleotide
  Target: ATXN2; (-) strand; PAM type: YTN; PAM sequence: TTA
aagattgatagctttgaaat

SEQ ID NO: 77879 - DNA, 20 bp, Artificial Sequence
  Description of Artificial Sequence: Synthetic oligonucleotide
  Target: ATXN2; (-) strand; PAM type: YTN; PAM sequence: TTT
aaagattgatagctttgaaa

SEQ ID NO: 77880 - DNA, 20 bp, Artificial Sequence
  Description of Artificial Sequence: Synthetic oligonucleotide
  Target: ATXN2; (-) strand; PAM type: YTN; PAM sequence: CTG
atttaaagattgatagcttt

SEQ ID NO: 77881 - DNA, 20 bp, Artificial Sequence
  Description of Artificial Sequence: Synthetic oligonucleotide
  Target: ATXN2; (-) strand; PAM type: YTN; PAM sequence: CTG
acccctgatttaaagattga

SEQ ID NO: 77882 - DNA, 20 bp, Artificial Sequence
  Description of Artificial Sequence: Synthetic oligonucleotide
  Target: ATXN2; (-) strand; PAM type: YTN; PAM sequence: CTG
tagtgtcctgacccctgatt

SEQ ID NO: 77883 - DNA, 20 bp, Artificial Sequence
  Description of Artificial Sequence: Synthetic oligonucleotide
  Target: ATXN2; (-) strand; PAM type: YTN; PAM sequence: TTG
tgggctgtagtgtcctgacc

SEQ ID NO: 77884 - DNA, 20 bp, Artificial Sequence
  Description of Artificial Sequence: Synthetic oligonucleotide
  Target: ATXN2; (-) strand; PAM type: YTN; PAM sequence: TTA
gcccagaagccagaccaaaa

SEQ ID NO: 77885 - DNA, 20 bp, Artificial Sequence
  Description of Artificial Sequence: Synthetic oligonucleotide
  Target: ATXN2; (-) strand; PAM type: YTN; PAM sequence: CTT
agcccagaagccagaccaaa

SEQ ID NO: 77886 - DNA, 20 bp, Artificial Sequence
  Description of Artificial Sequence: Synthetic oligonucleotide
  Target: ATXN2; (-) strand; PAM type: YTN; PAM sequence: TTC
ttagcccagaagccagacca

SEQ ID NO: 77887 - DNA, 20 bp, Artificial Sequence
  Description of Artificial Sequence: Synthetic oligonucleotide
  Target: ATXN2; (-) strand; PAM type: YTN; PAM sequence: TTG
aggaacataaaaatcattct

SEQ ID NO: 77888 - DNA, 20 bp, Artificial Sequence
  Description of Artificial Sequence: Synthetic oligonucleotide
  Target: ATXN2; (-) strand; PAM type: YTN; PAM sequence: CTT
gaggaacataaaaatcattc

SEQ ID NO: 77889 - DNA, 20 bp, Artificial Sequence
  Description of Artificial Sequence: Synthetic oligonucleotide
  Target: ATXN2; (-) strand; PAM type: YTN; PAM sequence: CTC
ttgaggaacataaaaatcat

SEQ ID NO: 77890 - DNA, 20 bp, Artificial Sequence
  Description of Artificial Sequence: Synthetic oligonucleotide
  Target: ATXN2; (-) strand; PAM type: YTN; PAM sequence: TTA
ccataagcaactcttgagga

SEQ ID NO: 77891 - DNA, 20 bp, Artificial Sequence
  Description of Artificial Sequence: Synthetic oligonucleotide
  Target: ATXN2; (-) strand; PAM type: YTN; PAM sequence: TTT
accataagcaactcttgagg

SEQ ID NO: 77892 - DNA, 20 bp, Artificial Sequence
  Description of Artificial Sequence: Synthetic oligonucleotide
  Target: ATXN2; (-) strand; PAM type: YTN; PAM sequence: TTT
taccataagcaactcttgag

SEQ ID NO: 77893 - DNA, 20 bp, Artificial Sequence
  Description of Artificial Sequence: Synthetic oligonucleotide
  Target: ATXN2; (-) strand; PAM type: YTN; PAM sequence: CTT
ttaccataagcaactcttga

SEQ ID NO: 77894 - DNA, 20 bp, Artificial Sequence
  Description of Artificial Sequence: Synthetic oligonucleotide
  Target: ATXN2; (-) strand; PAM type: YTN; PAM sequence: TTC
cttttaccataagcaactct

SEQ ID NO: 77895 - DNA, 20 bp, Artificial Sequence
  Description of Artificial Sequence: Synthetic oligonucleotide
  Target: ATXN2; (-) strand; PAM type: YTN; PAM sequence: CTC
aaattccttttaccataagc

SEQ ID NO: 77896 - DNA, 20 bp, Artificial Sequence
  Description of Artificial Sequence: Synthetic oligonucleotide
  Target: ATXN2; (-) strand; PAM type: YTN; PAM sequence: TTC
ccctcaaattccttttacca

SEQ ID NO: 77897 - DNA, 20 bp, Artificial Sequence
  Description of Artificial Sequence: Synthetic oligonucleotide
  Target: ATXN2; (-) strand; PAM type: YTN; PAM sequence: TTT
cccctcaaattccttttacc

SEQ ID NO: 77898 - DNA, 20 bp, Artificial Sequence
  Description of Artificial Sequence: Synthetic oligonucleotide
  Target: ATXN2; (-) strand; PAM type: YTN; PAM sequence: TTC
catttcccctcaaattcctt

SEQ ID NO: 77899 - DNA, 20 bp, Artificial Sequence
  Description of Artificial Sequence: Synthetic oligonucleotide
  Target: ATXN2; (-) strand; PAM type: YTN; PAM sequence: TTT
ccatttcccctcaaattcct

SEQ ID NO: 77900 - DNA, 20 bp, Artificial Sequence
  Description of Artificial Sequence: Synthetic oligonucleotide
  Target: ATXN2; (-) strand; PAM type: YTN; PAM sequence: TTT
tccatttcccctcaaattcc

SEQ ID NO: 77901 - DNA, 20 bp, Artificial Sequence
  Description of Artificial Sequence: Synthetic oligonucleotide
  Target: ATXN2; (-) strand; PAM type: YTN; PAM sequence: TTT
ttccatttcccctcaaattc

SEQ ID NO: 77902 - DNA, 20 bp, Artificial Sequence
  Description of Artificial Sequence: Synthetic oligonucleotide
  Target: ATXN2; (-) strand; PAM type: YTN; PAM sequence: TTT
tttccatttcccctcaaatt

SEQ ID NO: 77903 - DNA, 20 bp, Artificial Sequence
  Description of Artificial Sequence: Synthetic oligonucleotide
  Target: ATXN2; (-) strand; PAM type: YTN; PAM sequence: TTT
ttttccatttcccctcaaat

SEQ ID NO: 77904 - DNA, 20 bp, Artificial Sequence
  Description of Artificial Sequence: Synthetic oligonucleotide
  Target: ATXN2; (-) strand; PAM type: YTN; PAM sequence: TTT
tttttccatttcccctcaaa

SEQ ID NO: 77905 - DNA, 20 bp, Artificial Sequence
  Description of Artificial Sequence: Synthetic oligonucleotide
  Target: ATXN2; (-) strand; PAM type: YTN; PAM sequence: TTT
ttttttccatttcccctcaa

SEQ ID NO: 77906 - DNA, 20 bp, Artificial Sequence
  Description of Artificial Sequence: Synthetic oligonucleotide
  Target: ATXN2; (-) strand; PAM type: YTN; PAM sequence: TTT
tttttttccatttcccctca

SEQ ID NO: 77907 - DNA, 20 bp, Artificial Sequence
  Description of Artificial Sequence: Synthetic oligonucleotide
  Target: ATXN2; (-) strand; PAM type: YTN; PAM sequence: TTT
ttttttttccatttcccctc

SEQ ID NO: 77908 - DNA, 20 bp, Artificial Sequence
  Description of Artificial Sequence: Synthetic oligonucleotide
  Target: ATXN2; (-) strand; PAM type: YTN; PAM sequence: TTT
tttttttttccatttcccct

SEQ ID NO: 77909 - DNA, 20 bp, Artificial Sequence
  Description of Artificial Sequence: Synthetic oligonucleotide
  Target: ATXN2; (-) strand; PAM type: YTN; PAM sequence: TTT
ttttttttttccatttcccc

SEQ ID NO: 77910 - DNA, 20 bp, Artificial Sequence
  Description of Artificial Sequence: Synthetic oligonucleotide
  Target: ATXN2; (-) strand; PAM type: YTN; PAM sequence: CTT
tttttttttttccatttccc

SEQ ID NO: 77911 - DNA, 20 bp, Artificial Sequence
  Description of Artificial Sequence: Synthetic oligonucleotide
  Target: ATXN2; (-) strand; PAM type: YTN; PAM sequence: TTG
catatccttttttttttttt

SEQ ID NO: 77912 - DNA, 20 bp, Artificial Sequence
  Description of Artificial Sequence: Synthetic oligonucleotide
  Target: ATXN2; (-) strand; PAM type: YTN; PAM sequence: CTG
ttgcatatcctttttttttt

SEQ ID NO: 77913 - DNA, 20 bp, Artificial Sequence
  Description of Artificial Sequence: Synthetic oligonucleotide
  Target: ATXN2; (-) strand; PAM type: YTN; PAM sequence: CTC
tgttgcatatcctttttttt

SEQ ID NO: 77914 - DNA, 20 bp, Artificial Sequence
  Description of Artificial Sequence: Synthetic oligonucleotide
  Target: ATXN2; (-) strand; PAM type: YTN; PAM sequence: TTC
tctgttgcatatcctttttt

SEQ ID NO: 77915 - DNA, 20 bp, Artificial Sequence
  Description of Artificial Sequence: Synthetic oligonucleotide
  Target: ATXN2; (-) strand; PAM type: YTN; PAM sequence: CTT
ctctgttgcatatccttttt

SEQ ID NO: 77916 - DNA, 20 bp, Artificial Sequence
  Description of Artificial Sequence: Synthetic oligonucleotide
  Target: ATXN2; (-) strand; PAM type: YTN; PAM sequence: CTA
gggccatatagcttctctgt

SEQ ID NO: 77917 - DNA, 20 bp, Artificial Sequence
  Description of Artificial Sequence: Synthetic oligonucleotide
  Target: ATXN2; (-) strand; PAM type: YTN; PAM sequence: CTC
tagggccatatagcttctct

SEQ ID NO: 77918 - DNA, 20 bp, Artificial Sequence
  Description of Artificial Sequence: Synthetic oligonucleotide
  Target: ATXN2; (-) strand; PAM type: YTN; PAM sequence: TTA
ggctctagggccatatagct

SEQ ID NO: 77919 - DNA, 20 bp, Artificial Sequence
  Description of Artificial Sequence: Synthetic oligonucleotide
  Target: ATXN2; (-) strand; PAM type: YTN; PAM sequence: TTT
aggctctagggccatatagc

SEQ ID NO: 77920 - DNA, 20 bp, Artificial Sequence
  Description of Artificial Sequence: Synthetic oligonucleotide
  Target: ATXN2; (-) strand; PAM type: YTN; PAM sequence: TTT
taggctctagggccatatag

SEQ ID NO: 77921 - DNA, 20 bp, Artificial Sequence
  Description of Artificial Sequence: Synthetic oligonucleotide
  Target: ATXN2; (-) strand; PAM type: YTN; PAM sequence: CTC
aggtaataagtattttaggc

SEQ ID NO: 77922 - DNA, 20 bp, Artificial Sequence
  Description of Artificial Sequence: Synthetic oligonucleotide
  Target: ATXN2; (-) strand; PAM type: YTN; PAM sequence: TTA
tgtaaagtctcaggtaataa

SEQ ID NO: 77923 - DNA, 20 bp, Artificial Sequence
  Description of Artificial Sequence: Synthetic oligonucleotide
  Target: ATXN2; (-) strand; PAM type: YTN; PAM sequence: TTT
atgtaaagtctcaggtaata

SEQ ID NO: 77924 - DNA, 20 bp, Artificial Sequence
  Description of Artificial Sequence: Synthetic oligonucleotide
  Target: ATXN2; (-) strand; PAM type: YTN; PAM sequence: TTT
tatgtaaagtctcaggtaat

SEQ ID NO: 77925 - DNA, 20 bp, Artificial Sequence
  Description of Artificial Sequence: Synthetic oligonucleotide
  Target: ATXN2; (-) strand; PAM type: YTN; PAM sequence: TTT
ttatgtaaagtctcaggtaa

SEQ ID NO: 77926 - DNA, 20 bp, Artificial Sequence
  Description of Artificial Sequence: Synthetic oligonucleotide
  Target: ATXN2; (-) strand; PAM type: YTN; PAM sequence: CTT
tttatgtaaagtctcaggta

SEQ ID NO: 77927 - DNA, 20 bp, Artificial Sequence
  Description of Artificial Sequence: Synthetic oligonucleotide
  Target: ATXN2; (-) strand; PAM type: YTN; PAM sequence: TTC
agtgtgaggatgggcaaact

SEQ ID NO: 77928 - DNA, 20 bp, Artificial Sequence
  Description of Artificial Sequence: Synthetic oligonucleotide
  Target: ATXN2; (-) strand; PAM type: YTN; PAM sequence: CTT
cagtgtgaggatgggcaaac

SEQ ID NO: 77929 - DNA, 20 bp, Artificial Sequence
  Description of Artificial Sequence: Synthetic oligonucleotide
  Target: ATXN2; (-) strand; PAM type: YTN; PAM sequence: TTC
ttcagtgtgaggatgggcaa

SEQ ID NO: 77930 - DNA, 20 bp, Artificial Sequence
  Description of Artificial Sequence: Synthetic oligonucleotide
  Target: ATXN2; (-) strand; PAM type: YTN; PAM sequence: TTT
cttcagtgtgaggatgggca

SEQ ID NO: 77931 - DNA, 20 bp, Artificial Sequence
  Description of Artificial Sequence: Synthetic oligonucleotide
  Target: ATXN2; (-) strand; PAM type: YTN; PAM sequence: TTT
tcttcagtgtgaggatgggc

SEQ ID NO: 77932 - DNA, 20 bp, Artificial Sequence
  Description of Artificial Sequence: Synthetic oligonucleotide
  Target: ATXN2; (-) strand; PAM type: YTN; PAM sequence: TTT
ttcttcagtgtgaggatggg

SEQ ID NO: 77933 - DNA, 20 bp, Artificial Sequence
  Description of Artificial Sequence: Synthetic oligonucleotide
  Target: ATXN2; (-) strand; PAM type: YTN; PAM sequence: TTT
tttcttcagtgtgaggatgg

SEQ ID NO: 77934 - DNA, 20 bp, Artificial Sequence
  Description of Artificial Sequence: Synthetic oligonucleotide
  Target: ATXN2; (-) strand; PAM type: YTN; PAM sequence: TTT
ttttcttcagtgtgaggatg

SEQ ID NO: 77935 - DNA, 20 bp, Artificial Sequence
  Description of Artificial Sequence: Synthetic oligonucleotide
  Target: ATXN2; (-) strand; PAM type: YTN; PAM sequence: TTT
tttttcttcagtgtgaggat

SEQ ID NO: 77936 - DNA, 20 bp, Artificial Sequence
  Description of Artificial Sequence: Synthetic oligonucleotide
  Target: ATXN2; (-) strand; PAM type: YTN; PAM sequence: TTT
ttttttcttcagtgtgagga

SEQ ID NO: 77937 - DNA, 20 bp, Artificial Sequence
  Description of Artificial Sequence: Synthetic oligonucleotide
  Target: ATXN2; (-) strand; PAM type: YTN; PAM sequence: TTT
tttttttcttcagtgtgagg

SEQ ID NO: 77938 - DNA, 20 bp, Artificial Sequence
  Description of Artificial Sequence: Synthetic oligonucleotide
  Target: ATXN2; (-) strand; PAM type: YTN; PAM sequence: TTT
ttttttttcttcagtgtgag

SEQ ID NO: 77939 - DNA, 20 bp, Artificial Sequence
  Description of Artificial Sequence: Synthetic oligonucleotide
  Target: ATXN2; (-) strand; PAM type: YTN; PAM sequence: CTA
tgtttttttttttcttcagt

SEQ ID NO: 77940 - DNA, 20 bp, Artificial Sequence
  Description of Artificial Sequence: Synthetic oligonucleotide
  Target: ATXN2; (-) strand; PAM type: YTN; PAM sequence: TTG
cagctatgtttttttttttc

SEQ ID NO: 77941 - DNA, 20 bp, Artificial Sequence
  Description of Artificial Sequence: Synthetic oligonucleotide
  Target: ATXN2; (-) strand; PAM type: YTN; PAM sequence: CTG
ttgcagctatgttttttttt

SEQ ID NO: 77942 - DNA, 20 bp, Artificial Sequence
  Description of Artificial Sequence: Synthetic oligonucleotide
  Target: ATXN2; (-) strand; PAM type: YTN; PAM sequence: TTG
ctgttgcagctatgtttttt

SEQ ID NO: 77943 - DNA, 20 bp, Artificial Sequence
  Description of Artificial Sequence: Synthetic oligonucleotide
  Target: ATXN2; (-) strand; PAM type: YTN; PAM sequence: TTG
tattgctgttgcagctatgt

SEQ ID NO: 77944 - DNA, 20 bp, Artificial Sequence
  Description of Artificial Sequence: Synthetic oligonucleotide
  Target: ATXN2; (-) strand; PAM type: YTN; PAM sequence: TTG
ttgtattgctgttgcagcta

SEQ ID NO: 77945 - DNA, 20 bp, Artificial Sequence
  Description of Artificial Sequence: Synthetic oligonucleotide
  Target: ATXN2; (-) strand; PAM type: YTN; PAM sequence: TTA
attgttgtattgctgttgca

SEQ ID NO: 77946 - DNA, 20 bp, Artificial Sequence
  Description of Artificial Sequence: Synthetic oligonucleotide
  Target: ATXN2; (-) strand; PAM type: YTN; PAM sequence: TTT
aattgttgtattgctgttgc

SEQ ID NO: 77947 - DNA, 20 bp, Artificial Sequence
  Description of Artificial Sequence: Synthetic oligonucleotide
  Target: ATXN2; (-) strand; PAM type: YTN; PAM sequence: TTT
taattgttgtattgctgttg

SEQ ID NO: 77948 - DNA, 20 bp, Artificial Sequence
  Description of Artificial Sequence: Synthetic oligonucleotide
  Target: ATXN2; (-) strand; PAM type: YTN; PAM sequence: TTT
ttaattgttgtattgctgtt

SEQ ID NO: 77949 - DNA, 20 bp, Artificial Sequence
  Description of Artificial Sequence: Synthetic oligonucleotide
  Target: ATXN2; (-) strand; PAM type: YTN; PAM sequence: TTG
atttttaattgttgtattgc

SEQ ID NO: 77950 - DNA, 20 bp, Artificial Sequence
  Description of Artificial Sequence: Synthetic oligonucleotide
  Target: ATXN2; (-) strand; PAM type: YTN; PAM sequence: CTT
gatttttaattgttgtattg

SEQ ID NO: 77951 - DNA, 20 bp, Artificial Sequence
  Description of Artificial Sequence: Synthetic oligonucleotide
  Target: ATXN2; (-) strand; PAM type: YTN; PAM sequence: CTG
cttgatttttaattgttgta

SEQ ID NO: 77952 - DNA, 20 bp, Artificial Sequence
  Description of Artificial Sequence: Synthetic oligonucleotide
  Target: ATXN2; (-) strand; PAM type: YTN; PAM sequence: CTC
tgcttgatttttaattgttg

SEQ ID NO: 77953 - DNA, 20 bp, Artificial Sequence
  Description of Artificial Sequence: Synthetic oligonucleotide
  Target: ATXN2; (-) strand; PAM type: YTN; PAM sequence: CTG
gctctgcttgatttttaatt

SEQ ID NO: 77954 - DNA, 20 bp, Artificial Sequence
  Description of Artificial Sequence: Synthetic oligonucleotide
  Target: ATXN2; (-) strand; PAM type: YTN; PAM sequence: CTG
cacctggctctgcttgattt

SEQ ID NO: 77955 - DNA, 20 bp, Artificial Sequence
  Description of Artificial Sequence: Synthetic oligonucleotide
  Target: ATXN2; (-) strand; PAM type: YTN; PAM sequence: CTC
tgcacctggctctgcttgat

SEQ ID NO: 77956 - DNA, 20 bp, Artificial Sequence
  Description of Artificial Sequence: Synthetic oligonucleotide
  Target: ATXN2; (-) strand; PAM type: YTN; PAM sequence: CTG
cacctctgcacctggctctg

SEQ ID NO: 77957 - DNA, 20 bp, Artificial Sequence
  Description of Artificial Sequence: Synthetic oligonucleotide
  Target: ATXN2; (-) strand; PAM type: YTN; PAM sequence: CTA
caggctgcacctctgcacct

SEQ ID NO: 77958 - DNA, 20 bp, Artificial Sequence
  Description of Artificial Sequence: Synthetic oligonucleotide
  Target: ATXN2; (-) strand; PAM type: YTN; PAM sequence: CTG
agactacaggctgcacctct

SEQ ID NO: 77959 - DNA, 20 bp, Artificial Sequence
  Description of Artificial Sequence: Synthetic oligonucleotide
  Target: ATXN2; (-) strand; PAM type: YTN; PAM sequence: TTG
agtagctgagactacaggct

SEQ ID NO: 77960 - DNA, 20 bp, Artificial Sequence
  Description of Artificial Sequence: Synthetic oligonucleotide
  Target: ATXN2; (-) strand; PAM type: YTN; PAM sequence: TTT
gagtagctgagactacaggc

SEQ ID NO: 77961 - DNA, 20 bp, Artificial Sequence
  Description of Artificial Sequence: Synthetic oligonucleotide
  Target: ATXN2; (-) strand; PAM type: YTN; PAM sequence: TTT
tgagtagctgagactacagg

SEQ ID NO: 77962 - DNA, 20 bp, Artificial Sequence
  Description of Artificial Sequence: Synthetic oligonucleotide
  Target: ATXN2; (-) strand; PAM type: YTN; PAM sequence: CTT
ttgagtagctgagactacag

SEQ ID NO: 77963 - DNA, 20 bp, Artificial Sequence
  Description of Artificial Sequence: Synthetic oligonucleotide
  Target: ATXN2; (-) strand; PAM type: YTN; PAM sequence: CTG
agccttttgagtagctgaga

SEQ ID NO: 77964 - DNA, 20 bp, Artificial Sequence
  Description of Artificial Sequence: Synthetic oligonucleotide
  Target: ATXN2; (-) strand; PAM type: YTN; PAM sequence: CTC
acctgagccttttgagtagc

SEQ ID NO: 77965 - DNA, 20 bp, Artificial Sequence
  Description of Artificial Sequence: Synthetic oligonucleotide
  Target: ATXN2; (-) strand; PAM type: YTN; PAM sequence: CTC
tcacctgagccttttgagta

SEQ ID NO: 77966 - DNA, 20 bp, Artificial Sequence
  Description of Artificial Sequence: Synthetic oligonucleotide
  Target: ATXN2; (-) strand; PAM type: YTN; PAM sequence: CTC
aagcgatcctctcacctgag

SEQ ID NO: 77967 - DNA, 20 bp, Artificial Sequence
  Description of Artificial Sequence: Synthetic oligonucleotide
  Target: ATXN2; (-) strand; PAM type: YTN; PAM sequence: CTG
ggctcaagcgatcctctcac

SEQ ID NO: 77968 - DNA, 20 bp, Artificial Sequence
  Description of Artificial Sequence: Synthetic oligonucleotide
  Target: ATXN2; (-) strand; PAM type: YTN; PAM sequence: TTC
ctgggctcaagcgatcctct

SEQ ID NO: 77969 - DNA, 20 bp, Artificial Sequence
  Description of Artificial Sequence: Synthetic oligonucleotide
  Target: ATXN2; (-) strand; PAM type: YTN; PAM sequence: TTA
attcctgggctcaagcgatc

SEQ ID NO: 77970 - DNA, 20 bp, Artificial Sequence
  Description of Artificial Sequence: Synthetic oligonucleotide
  Target: ATXN2; (-) strand; PAM type: YTN; PAM sequence: TTT
aattcctgggctcaagcgat

SEQ ID NO: 77971 - DNA, 20 bp, Artificial Sequence
  Description of Artificial Sequence: Synthetic oligonucleotide
  Target: ATXN2; (-) strand; PAM type: YTN; PAM sequence: CTT
taattcctgggctcaagcga

SEQ ID NO: 77972 - DNA, 20 bp, Artificial Sequence
  Description of Artificial Sequence: Synthetic oligonucleotide
  Target: ATXN2; (-) strand; PAM type: YTN; PAM sequence: CTG
gcctttaattcctgggctca

SEQ ID NO: 77973 - DNA, 20 bp, Artificial Sequence
  Description of Artificial Sequence: Synthetic oligonucleotide
  Target: ATXN2; (-) strand; PAM type: YTN; PAM sequence: TTG
cccagactggcctttaattc

SEQ ID NO: 77974 - DNA, 20 bp, Artificial Sequence
  Description of Artificial Sequence: Synthetic oligonucleotide
  Target: ATXN2; (-) strand; PAM type: YTN; PAM sequence: TTG
taacgttgcccagactggcc

SEQ ID NO: 77975 - DNA, 20 bp, Artificial Sequence
  Description of Artificial Sequence: Synthetic oligonucleotide
  Target: ATXN2; (-) strand; PAM type: YTN; PAM sequence: CTT
gtaacgttgcccagactggc

SEQ ID NO: 77976 - DNA, 20 bp, Artificial Sequence
  Description of Artificial Sequence: Synthetic oligonucleotide
  Target: ATXN2; (-) strand; PAM type: YTN; PAM sequence: TTA
aaagacagggtcttgtaacg

SEQ ID NO: 77977 - DNA, 20 bp, Artificial Sequence
  Description of Artificial Sequence: Synthetic oligonucleotide
  Target: ATXN2; (-) strand; PAM type: YTN; PAM sequence: TTT
aaaagacagggtcttgtaac

SEQ ID NO: 77978 - DNA, 20 bp, Artificial Sequence
  Description of Artificial Sequence: Synthetic oligonucleotide
  Target: ATXN2; (-) strand; PAM type: YTN; PAM sequence: TTT
taaaagacagggtcttgtaa

SEQ ID NO: 77979 - DNA, 20 bp, Artificial Sequence
  Description of Artificial Sequence: Synthetic oligonucleotide
  Target: ATXN2; (-) strand; PAM type: YTN; PAM sequence: TTT
ttaaaagacagggtcttgta

SEQ ID NO: 77980 - DNA, 20 bp, Artificial Sequence
  Description of Artificial Sequence: Synthetic oligonucleotide
  Target: ATXN2; (-) strand; PAM type: YTN; PAM sequence: TTC
agtttttaaaagacagggtc

SEQ ID NO: 77981 - DNA, 20 bp, Artificial Sequence
  Description of Artificial Sequence: Synthetic oligonucleotide
  Target: ATXN2; (-) strand; PAM type: YTN; PAM sequence: TTT
cagtttttaaaagacagggt

SEQ ID NO: 77982 - DNA, 20 bp, Artificial Sequence
  Description of Artificial Sequence: Synthetic oligonucleotide
  Target: ATXN2; (-) strand; PAM type: YTN; PAM sequence: CTT
tcagtttttaaaagacaggg

SEQ ID NO: 77983 - DNA, 20 bp, Artificial Sequence
  Description of Artificial Sequence: Synthetic oligonucleotide
  Target: ATXN2; (-) strand; PAM type: YTN; PAM sequence: TTA
tctttcagtttttaaaagac

SEQ ID NO: 77984 - DNA, 20 bp, Artificial Sequence
  Description of Artificial Sequence: Synthetic oligonucleotide
  Target: ATXN2; (-) strand; PAM type: YTN; PAM sequence: TTT
atctttcagtttttaaaaga

SEQ ID NO: 77985 - DNA, 20 bp, Artificial Sequence
  Description of Artificial Sequence: Synthetic oligonucleotide
  Target: ATXN2; (-) strand; PAM type: YTN; PAM sequence: CTT
tatctttcagtttttaaaag

SEQ ID NO: 77986 - DNA, 20 bp, Artificial Sequence
  Description of Artificial Sequence: Synthetic oligonucleotide
  Target: ATXN2; (-) strand; PAM type: YTN; PAM sequence: TTC
atgtaaaataataaacaact

SEQ ID NO: 77987 - DNA, 20 bp, Artificial Sequence
  Description of Artificial Sequence: Synthetic oligonucleotide
  Target: ATXN2; (-) strand; PAM type: YTN; PAM sequence: CTG
attcatgtaaaataataaac

SEQ ID NO: 77988 - DNA, 20 bp, Artificial Sequence
  Description of Artificial Sequence: Synthetic oligonucleotide
  Target: ATXN2; (-) strand; PAM type: YTN; PAM sequence: TTA
ccagaaatgcccccatgcag

SEQ ID NO: 77989 - DNA, 20 bp, Artificial Sequence
  Description of Artificial Sequence: Synthetic oligonucleotide
  Target: ATXN2; (-) strand; PAM type: YTN; PAM sequence: TTT
accagaaatgcccccatgca

SEQ ID NO: 77990 - DNA, 20 bp, Artificial Sequence
  Description of Artificial Sequence: Synthetic oligonucleotide
  Target: ATXN2; (-) strand; PAM type: YTN; PAM sequence: CTT
taccagaaatgcccccatgc

SEQ ID NO: 77991 - DNA, 20 bp, Artificial Sequence
  Description of Artificial Sequence: Synthetic oligonucleotide
  Target: ATXN2; (-) strand; PAM type: YTN; PAM sequence: TTC
cagtctttaccagaaatgcc

SEQ ID NO: 77992 - DNA, 20 bp, Artificial Sequence
  Description of Artificial Sequence: Synthetic oligonucleotide
  Target: ATXN2; (-) strand; PAM type: YTN; PAM sequence: TTT
ccagtctttaccagaaatgc

SEQ ID NO: 77993 - DNA, 20 bp, Artificial Sequence
  Description of Artificial Sequence: Synthetic oligonucleotide
  Target: ATXN2; (-) strand; PAM type: YTN; PAM sequence: TTT
tccagtctttaccagaaatg

SEQ ID NO: 77994 - DNA, 20 bp, Artificial Sequence
  Description of Artificial Sequence: Synthetic oligonucleotide
  Target: ATXN2; (-) strand; PAM type: YTN; PAM sequence: CTA
gcaggttttccagtctttac

SEQ ID NO: 77995 - DNA, 20 bp, Artificial Sequence
  Description of Artificial Sequence: Synthetic oligonucleotide
  Target: ATXN2; (-) strand; PAM type: YTN; PAM sequence: TTG
tctagcaggttttccagtct

SEQ ID NO: 77996 - DNA, 20 bp, Artificial Sequence
  Description of Artificial Sequence: Synthetic oligonucleotide
  Target: ATXN2; (-) strand; PAM type: YTN; PAM sequence: TTT
gtctagcaggttttccagtc

SEQ ID NO: 77997 - DNA, 20 bp, Artificial Sequence
  Description of Artificial Sequence: Synthetic oligonucleotide
  Target: ATXN2; (-) strand; PAM type: YTN; PAM sequence: TTA
cagaatttgtctagcaggtt

SEQ ID NO: 77998 - DNA, 20 bp, Artificial Sequence
  Description of Artificial Sequence: Synthetic oligonucleotide
  Target: ATXN2; (-) strand; PAM type: YTN; PAM sequence: CTT
acagaatttgtctagcaggt

SEQ ID NO: 77999 - DNA, 20 bp, Artificial Sequence
  Description of Artificial Sequence: Synthetic oligonucleotide
  Target: ATXN2; (-) strand; PAM type: YTN; PAM sequence: CTC
ttacagaatttgtctagcag

SEQ ID NO: 78000 - DNA, 20 bp, Artificial Sequence
  Description of Artificial Sequence: Synthetic oligonucleotide
  Target: ATXN2; (-) strand; PAM type: YTN; PAM sequence: TTG
cagctcttacagaatttgtc

SEQ ID NO: 78001 - DNA, 20 bp, Artificial Sequence
  Description of Artificial Sequence: Synthetic oligonucleotide
  Target: ATXN2; (-) strand; PAM type: YTN; PAM sequence: CTG
gagtgttgcagctcttacag

SEQ ID NO: 78002 - DNA, 20 bp, Artificial Sequence
  Description of Artificial Sequence: Synthetic oligonucleotide
  Target: ATXN2; (-) strand; PAM type: YTN; PAM sequence: CTA
caaaagagaaaagaagtact

SEQ ID NO: 78003 - DNA, 20 bp, Artificial Sequence
  Description of Artificial Sequence: Synthetic oligonucleotide
  Target: ATXN2; (-) strand; PAM type: YTN; PAM sequence: CTC
tacaaaagagaaaagaagta

SEQ ID NO: 78004 - DNA, 20 bp, Artificial Sequence
  Description of Artificial Sequence: Synthetic oligonucleotide
  Target: ATXN2; (-) strand; PAM type: YTN; PAM sequence: TTG
ggcaatatagtgcgacccca

SEQ ID NO: 78005 - DNA, 20 bp, Artificial Sequence
  Description of Artificial Sequence: Synthetic oligonucleotide
  Target: ATXN2; (-) strand; PAM type: YTN; PAM sequence: CTT
gggcaatatagtgcgacccc

SEQ ID NO: 78006 - DNA, 20 bp, Artificial Sequence
  Description of Artificial Sequence: Synthetic oligonucleotide
  Target: ATXN2; (-) strand; PAM type: YTN; PAM sequence: CTG
gagaccagcttgggcaatat

SEQ ID NO: 78007 - DNA, 20 bp, Artificial Sequence
  Description of Artificial Sequence: Synthetic oligonucleotide
  Target: ATXN2; (-) strand; PAM type: YTN; PAM sequence: TTC
aggagctggagaccagcttg

SEQ ID NO: 78008 - DNA, 20 bp, Artificial Sequence
  Description of Artificial Sequence: Synthetic oligonucleotide
  Target: ATXN2; (-) strand; PAM type: YTN; PAM sequence: TTG
agttcaggagctggagacca

SEQ ID NO: 78009 - DNA, 20 bp, Artificial Sequence
  Description of Artificial Sequence: Synthetic oligonucleotide
  Target: ATXN2; (-) strand; PAM type: YTN; PAM sequence: CTT
gagttcaggagctggagacc

SEQ ID NO: 78010 - DNA, 20 bp, Artificial Sequence
  Description of Artificial Sequence: Synthetic oligonucleotide
  Target: ATXN2; (-) strand; PAM type: YTN; PAM sequence: CTG
aggtaggaggatcacttgag

SEQ ID NO: 78011 - DNA, 20 bp, Artificial Sequence
  Description of Artificial Sequence: Synthetic oligonucleotide
  Target: ATXN2; (-) strand; PAM type: YTN; PAM sequence: TTG
ggaggctgaggtaggaggat

SEQ ID NO: 78012 - DNA, 20 bp, Artificial Sequence
  Description of Artificial Sequence: Synthetic oligonucleotide
  Target: ATXN2; (-) strand; PAM type: YTN; PAM sequence: TTT
gggaggctgaggtaggagga

SEQ ID NO: 78013 - DNA, 20 bp, Artificial Sequence
  Description of Artificial Sequence: Synthetic oligonucleotide
  Target: ATXN2; (-) strand; PAM type: YTN; PAM sequence: CTT
tgggaggctgaggtaggagg

SEQ ID NO: 78014 - DNA, 20 bp, Artificial Sequence
  Description of Artificial Sequence: Synthetic oligonucleotide
  Target: ATXN2; (-) strand; PAM type: YTN; PAM sequence: CTG
taatcccagcactttgggag

SEQ ID NO: 78015 - DNA, 20 bp, Artificial Sequence
  Description of Artificial Sequence: Synthetic oligonucleotide
  Target: ATXN2; (-) strand; PAM type: YTN; PAM sequence: TTA
tgcctgtaatcccagcactt

SEQ ID NO: 78016 - DNA, 20 bp, Artificial Sequence
  Description of Artificial Sequence: Synthetic oligonucleotide
  Target: ATXN2; (-) strand; PAM type: YTN; PAM sequence: CTT
atgcctgtaatcccagcact

SEQ ID NO: 78017 - DNA, 20 bp, Artificial Sequence
  Description of Artificial Sequence: Synthetic oligonucleotide
  Target: ATXN2; (-) strand; PAM type: YTN; PAM sequence: CTA
ggcatggtgtcttatgcctg

SEQ ID NO: 78018 - DNA, 20 bp, Artificial Sequence
  Description of Artificial Sequence: Synthetic oligonucleotide
  Target: ATXN2; (-) strand; PAM type: YTN; PAM sequence: CTG
gaggctaggcatggtgtctt

SEQ ID NO: 78019 - DNA, 20 bp, Artificial Sequence
  Description of Artificial Sequence: Synthetic oligonucleotide
  Target: ATXN2; (-) strand; PAM type: YTN; PAM sequence: TTA
gaagtactggaggctaggca

SEQ ID NO: 78020 - DNA, 20 bp, Artificial Sequence
  Description of Artificial Sequence: Synthetic oligonucleotide
  Target: ATXN2; (-) strand; PAM type: YTN; PAM sequence: TTT
agaagtactggaggctaggc

SEQ ID NO: 78021 - DNA, 20 bp, Artificial Sequence
  Description of Artificial Sequence: Synthetic oligonucleotide
  Target: ATXN2; (-) strand; PAM type: YTN; PAM sequence: TTT
tagaagtactggaggctagg

SEQ ID NO: 78022 - DNA, 20 bp, Artificial Sequence
  Description of Artificial Sequence: Synthetic oligonucleotide
  Target: ATXN2; (-) strand; PAM type: YTN; PAM sequence: TTA
ttttagaagtactggaggct

SEQ ID NO: 78023 - DNA, 20 bp, Artificial Sequence
  Description of Artificial Sequence: Synthetic oligonucleotide
  Target: ATXN2; (-) strand; PAM type: YTN; PAM sequence: TTT
attttagaagtactggaggc

SEQ ID NO: 78024 - DNA, 20 bp, Artificial Sequence
  Description of Artificial Sequence: Synthetic oligonucleotide
  Target: ATXN2; (-) strand; PAM type: YTN; PAM sequence: CTA
tccagcagtttattttagaa

SEQ ID NO: 78025 - DNA, 20 bp, Artificial Sequence
  Description of Artificial Sequence: Synthetic oligonucleotide
  Target: ATXN2; (-) strand; PAM type: YTN; PAM sequence: TTA
atgctatccagcagtttatt

SEQ ID NO: 78026 - DNA, 20 bp, Artificial Sequence
  Description of Artificial Sequence: Synthetic oligonucleotide
  Target: ATXN2; (-) strand; PAM type: YTN; PAM sequence: TTT
aatgctatccagcagtttat

SEQ ID NO: 78027 - DNA, 20 bp, Artificial Sequence
  Description of Artificial Sequence: Synthetic oligonucleotide
  Target: ATXN2; (-) strand; PAM type: YTN; PAM sequence: TTC
atgaaaataatttaatgcta

SEQ ID NO: 78028 - DNA, 20 bp, Artificial Sequence
  Description of Artificial Sequence: Synthetic oligonucleotide
  Target: ATXN2; (-) strand; PAM type: YTN; PAM sequence: CTT
catgaaaataatttaatgct

SEQ ID NO: 78029 - DNA, 20 bp, Artificial Sequence
  Description of Artificial Sequence: Synthetic oligonucleotide
  Target: ATXN2; (-) strand; PAM type: YTN; PAM sequence: TTA
tatgtacataaaacttcatg

SEQ ID NO: 78030 - DNA, 20 bp, Artificial Sequence
  Description of Artificial Sequence: Synthetic oligonucleotide
  Target: ATXN2; (-) strand; PAM type: YTN; PAM sequence: CTT
atatgtacataaaacttcat

SEQ ID NO: 78031 - DNA, 20 bp, Artificial Sequence
  Description of Artificial Sequence: Synthetic oligonucleotide
  Target: ATXN2; (-) strand; PAM type: YTN; PAM sequence: TTC
ttatatgtacataaaacttc

SEQ ID NO: 78032 - DNA, 20 bp, Artificial Sequence
  Description of Artificial Sequence: Synthetic oligonucleotide
  Target: ATXN2; (-) strand; PAM type: YTN; PAM sequence: TTT
cttatatgtacataaaactt

SEQ ID NO: 78033 - DNA, 20 bp, Artificial Sequence
  Description of Artificial Sequence: Synthetic oligonucleotide
  Target: ATXN2; (-) strand; PAM type: YTN; PAM sequence: TTC
atgacatttcttatatgtac

SEQ ID NO: 78034 - DNA, 20 bp, Artificial Sequence
  Description of Artificial Sequence: Synthetic oligonucleotide
  Target: ATXN2; (-) strand; PAM type: YTN; PAM sequence: TTA
aaggagaatatggggacatt

SEQ ID NO: 78035 - DNA, 20 bp, Artificial Sequence
  Description of Artificial Sequence: Synthetic oligonucleotide
  Target: ATXN2; (-) strand; PAM type: YTN; PAM sequence: CTT
aaaggagaatatggggacat

SEQ ID NO: 78036 - DNA, 20 bp, Artificial Sequence
  Description of Artificial Sequence: Synthetic oligonucleotide
  Target: ATXN2; (-) strand; PAM type: YTN; PAM sequence: TTA
cttaaaggagaatatgggga

SEQ ID NO: 78037 - DNA, 20 bp, Artificial Sequence
  Description of Artificial Sequence: Synthetic oligonucleotide
  Target: ATXN2; (-) strand; PAM type: YTN; PAM sequence: TTA
atataaagcattacttaaag

SEQ ID NO: 78038 - DNA, 20 bp, Artificial Sequence
  Description of Artificial Sequence: Synthetic oligonucleotide
  Target: ATXN2; (-) strand; PAM type: YTN; PAM sequence: TTT
aatataaagcattacttaaa

SEQ ID NO: 78039 - DNA, 20 bp, Artificial Sequence
  Description of Artificial Sequence: Synthetic oligonucleotide
  Target: ATXN2; (-) strand; PAM type: YTN; PAM sequence: TTT
taatataaagcattacttaa

SEQ ID NO: 78040 - DNA, 20 bp, Artificial Sequence
  Description of Artificial Sequence: Synthetic oligonucleotide
  Target: ATXN2; (-) strand; PAM type: YTN; PAM sequence: CTC
aaattttaatataaagcatt

SEQ ID NO: 78041 - DNA, 20 bp, Artificial Sequence
  Description of Artificial Sequence: Synthetic oligonucleotide
  Target: ATXN2; (-) strand; PAM type: YTN; PAM sequence: TTC
agtaggtggatcaacctcaa

SEQ ID NO: 78042 - DNA, 20 bp, Artificial Sequence
  Description of Artificial Sequence: Synthetic oligonucleotide
  Target: ATXN2; (-) strand; PAM type: YTN; PAM sequence: TTT
cagtaggtggatcaacctca

SEQ ID NO: 78043 - DNA, 20 bp, Artificial Sequence
  Description of Artificial Sequence: Synthetic oligonucleotide
  Target: ATXN2; (-) strand; PAM type: YTN; PAM sequence: TTT
tcagtaggtggatcaacctc

SEQ ID NO: 78044 - DNA, 20 bp, Artificial Sequence
  Description of Artificial Sequence: Synthetic oligonucleotide
  Target: ATXN2; (-) strand; PAM type: YTN; PAM sequence: TTT
ttcagtaggtggatcaacct

SEQ ID NO: 78045 - DNA, 20 bp, Artificial Sequence
  Description of Artificial Sequence: Synthetic oligonucleotide
  Target: ATXN2; (-) strand; PAM type: YTN; PAM sequence: TTT
tttcagtaggtggatcaacc

SEQ ID NO: 78046 - DNA, 20 bp, Artificial Sequence
  Description of Artificial Sequence: Synthetic oligonucleotide
  Target: ATXN2; (-) strand; PAM type: YTN; PAM sequence: TTT
ttttcagtaggtggatcaac

SEQ ID NO: 78047 - DNA, 20 bp, Artificial Sequence
  Description of Artificial Sequence: Synthetic oligonucleotide
  Target: ATXN2; (-) strand; PAM type: YTN; PAM sequence: TTT
tttttcagtaggtggatcaa

SEQ ID NO: 78048 - DNA, 20 bp, Artificial Sequence
  Description of Artificial Sequence: Synthetic oligonucleotide
  Target: ATXN2; (-) strand; PAM type: YTN; PAM sequence: TTT
ttttttcagtaggtggatca

SEQ ID NO: 78049 - DNA, 20 bp, Artificial Sequence
  Description of Artificial Sequence: Synthetic oligonucleotide
  Target: ATXN2; (-) strand; PAM type: YTN; PAM sequence: TTT
tttttttcagtaggtggatc

SEQ ID NO: 78050 - DNA, 20 bp, Artificial Sequence
  Description of Artificial Sequence: Synthetic oligonucleotide
  Target: ATXN2; (-) strand; PAM type: YTN; PAM sequence: CTA
gtaaaatacgtttttttttt

SEQ ID NO: 78051 - DNA, 20 bp, Artificial Sequence
  Description of Artificial Sequence: Synthetic oligonucleotide
  Target: ATXN2; (-) strand; PAM type: YTN; PAM sequence: TTG
ccatcacatgtacactagta

SEQ ID NO: 78052 - DNA, 20 bp, Artificial Sequence
  Description of Artificial Sequence: Synthetic oligonucleotide
  Target: ATXN2; (-) strand; PAM type: YTN; PAM sequence: TTC
aataaagcaaagcagaataa

SEQ ID NO: 78053 - DNA, 20 bp, Artificial Sequence
  Description of Artificial Sequence: Synthetic oligonucleotide
  Target: ATXN2; (-) strand; PAM type: YTN; PAM sequence: TTT
caataaagcaaagcagaata

SEQ ID NO: 78054 - DNA, 20 bp, Artificial Sequence
  Description of Artificial Sequence: Synthetic oligonucleotide
  Target: ATXN2; (-) strand; PAM type: YTN; PAM sequence: CTG
tgaatttcaataaagcaaag

SEQ ID NO: 78055 - DNA, 20 bp, Artificial Sequence
  Description of Artificial Sequence: Synthetic oligonucleotide
  Target: ATXN2; (-) strand; PAM type: YTN; PAM sequence: TTG
tcaaaaatgcagcatctgtg

SEQ ID NO: 78056 - DNA, 20 bp, Artificial Sequence
  Description of Artificial Sequence: Synthetic oligonucleotide
  Target: ATXN2; (-) strand; PAM type: YTN; PAM sequence: CTT
gtcaaaaatgcagcatctgt

SEQ ID NO: 78057 - DNA, 20 bp, Artificial Sequence
  Description of Artificial Sequence: Synthetic oligonucleotide
  Target: ATXN2; (-) strand; PAM type: YTN; PAM sequence: TTC
cacagacggtcagcttgtca

SEQ ID NO: 78058 - DNA, 20 bp, Artificial Sequence
  Description of Artificial Sequence: Synthetic oligonucleotide
  Target: ATXN2; (-) strand; PAM type: YTN; PAM sequence: TTT
ccacagacggtcagcttgtc

SEQ ID NO: 78059 - DNA, 20 bp, Artificial Sequence
  Description of Artificial Sequence: Synthetic oligonucleotide
  Target: ATXN2; (-) strand; PAM type: YTN; PAM sequence: CTC
ggggtttccacagacggtca

SEQ ID NO: 78060 - DNA, 20 bp, Artificial Sequence
  Description of Artificial Sequence: Synthetic oligonucleotide
  Target: ATXN2; (-) strand; PAM type: YTN; PAM sequence: TTG
cccgactcggggtttccaca

SEQ ID NO: 78061 - DNA, 20 bp, Artificial Sequence
  Description of Artificial Sequence: Synthetic oligonucleotide
  Target: ATXN2; (-) strand; PAM type: YTN; PAM sequence: CTT
gcccgactcggggtttccac

SEQ ID NO: 78062 - DNA, 20 bp, Artificial Sequence
  Description of Artificial Sequence: Synthetic oligonucleotide
  Target: ATXN2; (-) strand; PAM type: YTN; PAM sequence: CTA
atggacttgcccgactcggg

SEQ ID NO: 78063 - DNA, 20 bp, Artificial Sequence
  Description of Artificial Sequence: Synthetic oligonucleotide
  Target: ATXN2; (-) strand; PAM type: YTN; PAM sequence: CTG
gaaatacggcactaatggac

SEQ ID NO: 78064 - DNA, 20 bp, Artificial Sequence
  Description of Artificial Sequence: Synthetic oligonucleotide
  Target: ATXN2; (-) strand; PAM type: YTN; PAM sequence: TTA
ctggaaatacggcactaatg

SEQ ID NO: 78065 - DNA, 20 bp, Artificial Sequence
  Description of Artificial Sequence: Synthetic oligonucleotide
  Target: ATXN2; (-) strand; PAM type: YTN; PAM sequence: TTA
tgagaatgtgacacaggcgc

SEQ ID NO: 78066 - DNA, 20 bp, Artificial Sequence
  Description of Artificial Sequence: Synthetic oligonucleotide
  Target: ATXN2; (-) strand; PAM type: YTN; PAM sequence: TTT
atgagaatgtgacacaggcg

SEQ ID NO: 78067 - DNA, 20 bp, Artificial Sequence
  Description of Artificial Sequence: Synthetic oligonucleotide
  Target: ATXN2; (-) strand; PAM type: YTN; PAM sequence: TTG
tgagatttatgagaatgtga

SEQ ID NO: 78068 - DNA, 20 bp, Artificial Sequence
  Description of Artificial Sequence: Synthetic oligonucleotide
  Target: ATXN2; (-) strand; PAM type: YTN; PAM sequence: TTG
aaaatattgtgagatttatg

SEQ ID NO: 78069 - DNA, 20 bp, Artificial Sequence
  Description of Artificial Sequence: Synthetic oligonucleotide
  Target: ATXN2; (-) strand; PAM type: YTN; PAM sequence: TTT
gaaaatattgtgagatttat

SEQ ID NO: 78070 - DNA, 20 bp, Artificial Sequence
  Description of Artificial Sequence: Synthetic oligonucleotide
  Target: ATXN2; (-) strand; PAM type: YTN; PAM sequence: CTA
taacgtatacaataatagtg

SEQ ID NO: 78071 - DNA, 20 bp, Artificial Sequence
  Description of Artificial Sequence: Synthetic oligonucleotide
  Target: ATXN2; (-) strand; PAM type: YTN; PAM sequence: TTA
ctataacgtatacaataata

SEQ ID NO: 78072 - DNA, 20 bp, Artificial Sequence
  Description of Artificial Sequence: Synthetic oligonucleotide
  Target: ATXN2; (-) strand; PAM type: YTN; PAM sequence: TTA
cagattactataacgtatac

SEQ ID NO: 78073 - DNA, 20 bp, Artificial Sequence
  Description of Artificial Sequence: Synthetic oligonucleotide
  Target: ATXN2; (-) strand; PAM type: YTN; PAM sequence: CTG
attacagattactataacgt

SEQ ID NO: 78074 - DNA, 20 bp, Artificial Sequence
  Description of Artificial Sequence: Synthetic oligonucleotide
  Target: ATXN2; (-) strand; PAM type: YTN; PAM sequence: TTG
taaaatacaatctgattaca

SEQ ID NO: 78075 - DNA, 20 bp, Artificial Sequence
  Description of Artificial Sequence: Synthetic oligonucleotide
  Target: ATXN2; (-) strand; PAM type: YTN; PAM sequence: TTA
ttgtaaaatacaatctgatt

SEQ ID NO: 78076 - DNA, 20 bp, Artificial Sequence
  Description of Artificial Sequence: Synthetic oligonucleotide
  Target: ATXN2; (-) strand; PAM type: YTN; PAM sequence: TTA
caattattgtaaaatacaat

SEQ ID NO: 78077 - DNA, 20 bp, Artificial Sequence
  Description of Artificial Sequence: Synthetic oligonucleotide
  Target: ATXN2; (-) strand; PAM type: YTN; PAM sequence: TTT
acaattattgtaaaatacaa

SEQ ID NO: 78078 - DNA, 20 bp, Artificial Sequence
  Description of Artificial Sequence: Synthetic oligonucleotide
  Target: ATXN2; (-) strand; PAM type: YTN; PAM sequence: TTA
tttacaattattgtaaaata

SEQ ID NO: 78079 - DNA, 20 bp, Artificial Sequence
  Description of Artificial Sequence: Synthetic oligonucleotide
  Target: ATXN2; (-) strand; PAM type: YTN; PAM sequence: TTA
ttatttacaattattgtaaa

SEQ ID NO: 78080 - DNA, 20 bp, Artificial Sequence
  Description of Artificial Sequence: Synthetic oligonucleotide
  Target: ATXN2; (-) strand; PAM type: YTN; PAM sequence: TTT
attatttacaattattgtaa

SEQ ID NO: 78081 - DNA, 20 bp, Artificial Sequence
  Description of Artificial Sequence: Synthetic oligonucleotide
  Target: ATXN2; (-) strand; PAM type: YTN; PAM sequence: CTT
tattatttacaattattgta

SEQ ID NO: 78082 - DNA, 20 bp, Artificial Sequence
  Description of Artificial Sequence: Synthetic oligonucleotide
  Target: ATXN2; (-) strand; PAM type: YTN; PAM sequence: TTC
tttattatttacaattattg

SEQ ID NO: 78083 - DNA, 20 bp, Artificial Sequence
  Description of Artificial Sequence: Synthetic oligonucleotide
  Target: ATXN2; (-) strand; PAM type: YTN; PAM sequence: TTT
ctttattatttacaattatt

SEQ ID NO: 78084 - DNA, 20 bp, Artificial Sequence
  Description of Artificial Sequence: Synthetic oligonucleotide
  Target: ATXN2; (-) strand; PAM type: YTN; PAM sequence: TTT
tctttattatttacaattat

SEQ ID NO: 78085 - DNA, 20 bp, Artificial Sequence
  Description of Artificial Sequence: Synthetic oligonucleotide
  Target: ATXN2; (-) strand; PAM type: YTN; PAM sequence: CTT
ttctttattatttacaatta

SEQ ID NO: 78086 - DNA, 20 bp, Artificial Sequence
  Description of Artificial Sequence: Synthetic oligonucleotide
  Target: ATXN2; (-) strand; PAM type: YTN; PAM sequence: TTG
taaaatacaatcttttcttt

SEQ ID NO: 78087 - DNA, 20 bp, Artificial Sequence
  Description of Artificial Sequence: Synthetic oligonucleotide
  Target: ATXN2; (-) strand; PAM type: YTN; PAM sequence: TTA
caattgtaaaatacaatctt

SEQ ID NO: 78088 - DNA, 20 bp, Artificial Sequence
  Description of Artificial Sequence: Synthetic oligonucleotide
  Target: ATXN2; (-) strand; PAM type: YTN; PAM sequence: TTT
acaattgtaaaatacaatct

SEQ ID NO: 78089 - DNA, 20 bp, Artificial Sequence
  Description of Artificial Sequence: Synthetic oligonucleotide
  Target: ATXN2; (-) strand; PAM type: YTN; PAM sequence: TTA
tttacaattgtaaaatacaa

SEQ ID NO: 78090 - DNA, 20 bp, Artificial Sequence
  Description of Artificial Sequence: Synthetic oligonucleotide
  Target: ATXN2; (-) strand; PAM type: YTN; PAM sequence: TTA
ttatttacaattgtaaaata

SEQ ID NO: 78091 - DNA, 20 bp, Artificial Sequence
  Description of Artificial Sequence: Synthetic oligonucleotide
  Target: ATXN2; (-) strand; PAM type: YTN; PAM sequence: TTG
taaattattatttacaattg

SEQ ID NO: 78092 - DNA, 20 bp, Artificial Sequence
  Description of Artificial Sequence: Synthetic oligonucleotide
  Target: ATXN2; (-) strand; PAM type: YTN; PAM sequence: CTA
taacagatacaataataatt

SEQ ID NO: 78093 - DNA, 20 bp, Artificial Sequence
  Description of Artificial Sequence: Synthetic oligonucleotide
  Target: ATXN2; (-) strand; PAM type: YTN; PAM sequence: TTA
ctataacagatacaataata

SEQ ID NO: 78094 - DNA, 20 bp, Artificial Sequence
  Description of Artificial Sequence: Synthetic oligonucleotide
  Target: ATXN2; (-) strand; PAM type: YTN; PAM sequence: TTA
cagattactataacagatac

SEQ ID NO: 78095 - DNA, 20 bp, Artificial Sequence
  Description of Artificial Sequence: Synthetic oligonucleotide
  Target: ATXN2; (-) strand; PAM type: YTN; PAM sequence: CTG
attacagattactataacag

SEQ ID NO: 78096 - DNA, 20 bp, Artificial Sequence
  Description of Artificial Sequence: Synthetic oligonucleotide
  Target: ATXN2; (-) strand; PAM type: YTN; PAM sequence: TTA
ctgattacagattactataa

SEQ ID NO: 78097 - DNA, 20 bp, Artificial Sequence
  Description of Artificial Sequence: Synthetic oligonucleotide
  Target: ATXN2; (-) strand; PAM type: YTN; PAM sequence: TTA
aaagaaatcagggtaacatc

SEQ ID NO: 78098 - DNA, 20 bp, Artificial Sequence
  Description of Artificial Sequence: Synthetic oligonucleotide
  Target: ATXN2; (-) strand; PAM type: YTN; PAM sequence: CTT
aaaagaaatcagggtaacat

SEQ ID NO: 78099 - DNA, 20 bp, Artificial Sequence
  Description of Artificial Sequence: Synthetic oligonucleotide
  Target: ATXN2; (-) strand; PAM type: YTN; PAM sequence: TTG
tggtgccttaaaagaaatca

SEQ ID NO: 78100 - DNA, 20 bp, Artificial Sequence
  Description of Artificial Sequence: Synthetic oligonucleotide
  Target: ATXN2; (-) strand; PAM type: YTN; PAM sequence: TTT
gtggtgccttaaaagaaatc

SEQ ID NO: 78101 - DNA, 20 bp, Artificial Sequence
  Description of Artificial Sequence: Synthetic oligonucleotide
  Target: ATXN2; (-) strand; PAM type: YTN; PAM sequence: TTA
tatggaccgtttgtggtgcc

SEQ ID NO: 78102 - DNA, 20 bp, Artificial Sequence
  Description of Artificial Sequence: Synthetic oligonucleotide
  Target: ATXN2; (-) strand; PAM type: YTN; PAM sequence: CTT
atatggaccgtttgtggtgc

SEQ ID NO: 78103 - DNA, 20 bp, Artificial Sequence
  Description of Artificial Sequence: Synthetic oligonucleotide
  Target: ATXN2; (-) strand; PAM type: YTN; PAM sequence: CTG
tcttatatggaccgtttgtg

SEQ ID NO: 78104 - DNA, 20 bp, Artificial Sequence
  Description of Artificial Sequence: Synthetic oligonucleotide
  Target: ATXN2; (-) strand; PAM type: YTN; PAM sequence: TTG
ctgtcttatatggaccgttt

SEQ ID NO: 78105 - DNA, 20 bp, Artificial Sequence
  Description of Artificial Sequence: Synthetic oligonucleotide
  Target: ATXN2; (-) strand; PAM type: YTN; PAM sequence: TTA
agattgctgtcttatatgga

SEQ ID NO: 78106 - DNA, 20 bp, Artificial Sequence
  Description of Artificial Sequence: Synthetic oligonucleotide
  Target: ATXN2; (-) strand; PAM type: YTN; PAM sequence: TTA
ttaagattgctgtcttatat

SEQ ID NO: 78107 - DNA, 20 bp, Artificial Sequence
  Description of Artificial Sequence: Synthetic oligonucleotide
  Target: ATXN2; (-) strand; PAM type: YTN; PAM sequence: TTT
attaagattgctgtcttata

SEQ ID NO: 78108 - DNA, 20 bp, Artificial Sequence
  Description of Artificial Sequence: Synthetic oligonucleotide
  Target: ATXN2; (-) strand; PAM type: YTN; PAM sequence: TTC
gtggagtagtcataacacac

SEQ ID NO: 78109 - DNA, 20 bp, Artificial Sequence
  Description of Artificial Sequence: Synthetic oligonucleotide
  Target: ATXN2; (-) strand; PAM type: YTN; PAM sequence: CTG
gttcgtggagtagtcataac

SEQ ID NO: 78110 - DNA, 20 bp, Artificial Sequence
  Description of Artificial Sequence: Synthetic oligonucleotide
  Target: ATXN2; (-) strand; PAM type: YTN; PAM sequence: CTG
ctggttcgtggagtagtcat

SEQ ID NO: 78111 - DNA, 20 bp, Artificial Sequence
  Description of Artificial Sequence: Synthetic oligonucleotide
  Target: ATXN2; (-) strand; PAM type: YTN; PAM sequence: CTG
actgctggttcgtggagtag

SEQ ID NO: 78112 - DNA, 20 bp, Artificial Sequence
  Description of Artificial Sequence: Synthetic oligonucleotide
  Target: ATXN2; (-) strand; PAM type: YTN; PAM sequence: CTC
agggaatagagaggcacgag

SEQ ID NO: 78113 - DNA, 20 bp, Artificial Sequence
  Description of Artificial Sequence: Synthetic oligonucleotide
  Target: ATXN2; (-) strand; PAM type: YTN; PAM sequence: TTA
tatctcagggaatagagagg

SEQ ID NO: 78114 - DNA, 20 bp, Artificial Sequence
  Description of Artificial Sequence: Synthetic oligonucleotide
  Target: ATXN2; (-) strand; PAM type: YTN; PAM sequence: TTG
ttatatctcagggaatagag

SEQ ID NO: 78115 - DNA, 20 bp, Artificial Sequence
  Description of Artificial Sequence: Synthetic oligonucleotide
  Target: ATXN2; (-) strand; PAM type: YTN; PAM sequence: TTC
aatattgttatatctcaggg

SEQ ID NO: 78116 - DNA, 20 bp, Artificial Sequence
  Description of Artificial Sequence: Synthetic oligonucleotide
  Target: ATXN2; (-) strand; PAM type: YTN; PAM sequence: TTT
caatattgttatatctcagg

SEQ ID NO: 78117 - DNA, 20 bp, Artificial Sequence
  Description of Artificial Sequence: Synthetic oligonucleotide
  Target: ATXN2; (-) strand; PAM type: YTN; PAM sequence: CTA
atttcaatattgttatatct

SEQ ID NO: 78118 - DNA, 20 bp, Artificial Sequence
  Description of Artificial Sequence: Synthetic oligonucleotide
  Target: ATXN2; (-) strand; PAM type: YTN; PAM sequence: TTG
gcctaatttcaatattgtta

SEQ ID NO: 78119 - DNA, 20 bp, Artificial Sequence
  Description of Artificial Sequence: Synthetic oligonucleotide
  Target: ATXN2; (-) strand; PAM type: YTN; PAM sequence: CTA
attggcctaatttcaatatt

SEQ ID NO: 78120 - DNA, 20 bp, Artificial Sequence
  Description of Artificial Sequence: Synthetic oligonucleotide
  Target: ATXN2; (-) strand; PAM type: YTN; PAM sequence: CTG
gcctaattggcctaatttca

SEQ ID NO: 78121 - DNA, 20 bp, Artificial Sequence
  Description of Artificial Sequence: Synthetic oligonucleotide
  Target: ATXN2; (-) strand; PAM type: YTN; PAM sequence: CTA
tgcctggcctaattggccta

SEQ ID NO: 78122 - DNA, 20 bp, Artificial Sequence
  Description of Artificial Sequence: Synthetic oligonucleotide
  Target: ATXN2; (-) strand; PAM type: YTN; PAM sequence: TTG
taggtgtgagccactatgcc

SEQ ID NO: 78123 - DNA, 20 bp, Artificial Sequence
  Description of Artificial Sequence: Synthetic oligonucleotide
  Target: ATXN2; (-) strand; PAM type: YTN; PAM sequence: CTG
ggattgtaggtgtgagccac

SEQ ID NO: 78124 - DNA, 20 bp, Artificial Sequence
  Description of Artificial Sequence: Synthetic oligonucleotide
  Target: ATXN2; (-) strand; PAM type: YTN; PAM sequence: CTC
ccaaagtgctgggattgtag

SEQ ID NO: 78125 - DNA, 20 bp, Artificial Sequence
  Description of Artificial Sequence: Synthetic oligonucleotide
  Target: ATXN2; (-) strand; PAM type: YTN; PAM sequence: TTG
gcctcccaaagtgctgggat

SEQ ID NO: 78126 - DNA, 20 bp, Artificial Sequence
  Description of Artificial Sequence: Synthetic oligonucleotide
  Target: ATXN2; (-) strand; PAM type: YTN; PAM sequence: CTT
ggcctcccaaagtgctggga

SEQ ID NO: 78127 - DNA, 20 bp, Artificial Sequence
  Description of Artificial Sequence: Synthetic oligonucleotide
  Target: ATXN2; (-) strand; PAM type: YTN; PAM sequence: CTG
ccttggcctcccaaagtgct

SEQ ID NO: 78128 - DNA, 20 bp, Artificial Sequence
  Description of Artificial Sequence: Synthetic oligonucleotide
  Target: ATXN2; (-) strand; PAM type: YTN; PAM sequence: TTC
aagtgatccacctgccttgg

SEQ ID NO: 78129 - DNA, 20 bp, Artificial Sequence
  Description of Artificial Sequence: Synthetic oligonucleotide
  Target: ATXN2; (-) strand; PAM type: YTN; PAM sequence: CTT
caagtgatccacctgccttg

SEQ ID NO: 78130 - DNA, 20 bp, Artificial Sequence
  Description of Artificial Sequence: Synthetic oligonucleotide
  Target: ATXN2; (-) strand; PAM type: YTN; PAM sequence: CTG
gcttcaagtgatccacctgc

SEQ ID NO: 78131 - DNA, 20 bp, Artificial Sequence
  Description of Artificial Sequence: Synthetic oligonucleotide
  Target: ATXN2; (-) strand; PAM type: YTN; PAM sequence: CTC
ctggcttcaagtgatccacc

SEQ ID NO: 78132 - DNA, 20 bp, Artificial Sequence
  Description of Artificial Sequence: Synthetic oligonucleotide
  Target: ATXN2; (-) strand; PAM type: YTN; PAM sequence: CTC
gaactcctggcttcaagtga

SEQ ID NO: 78133 - DNA, 20 bp, Artificial Sequence
  Description of Artificial Sequence: Synthetic oligonucleotide
  Target: ATXN2; (-) strand; PAM type: YTN; PAM sequence: CTG
ggctcgaactcctggcttca

SEQ ID NO: 78134 - DNA, 20 bp, Artificial Sequence
  Description of Artificial Sequence: Synthetic oligonucleotide
  Target: ATXN2; (-) strand; PAM type: YTN; PAM sequence: TTG
gccaggctgggctcgaactc

SEQ ID NO: 78135 - DNA, 20 bp, Artificial Sequence
  Description of Artificial Sequence: Synthetic oligonucleotide
  Target: ATXN2; (-) strand; PAM type: YTN; PAM sequence: TTC
acgatgttggccaggctggg

SEQ ID NO: 78136 - DNA, 20 bp, Artificial Sequence
  Description of Artificial Sequence: Synthetic oligonucleotide
  Target: ATXN2; (-) strand; PAM type: YTN; PAM sequence: TTT
cacgatgttggccaggctgg

SEQ ID NO: 78137 - DNA, 20 bp, Artificial Sequence
  Description of Artificial Sequence: Synthetic oligonucleotide
  Target: ATXN2; (-) strand; PAM type: YTN; PAM sequence: TTA
gtagagatggggtttcacga

SEQ ID NO: 78138 - DNA, 20 bp, Artificial Sequence
  Description of Artificial Sequence: Synthetic oligonucleotide
  Target: ATXN2; (-) strand; PAM type: YTN; PAM sequence: TTT
agtagagatggggtttcacg

SEQ ID NO: 78139 - DNA, 20 bp, Artificial Sequence
  Description of Artificial Sequence: Synthetic oligonucleotide
  Target: ATXN2; (-) strand; PAM type: YTN; PAM sequence: TTT
tagtagagatggggtttcac

SEQ ID NO: 78140 - DNA, 20 bp, Artificial Sequence
  Description of Artificial Sequence: Synthetic oligonucleotide
  Target: ATXN2; (-) strand; PAM type: YTN; PAM sequence: TTT
ttagtagagatggggtttca

SEQ ID NO: 78141 - DNA, 20 bp, Artificial Sequence
  Description of Artificial Sequence: Synthetic oligonucleotide
  Target: ATXN2; (-) strand; PAM type: YTN; PAM sequence: TTG
tatttttagtagagatgggg

SEQ ID NO: 78142 - DNA, 20 bp, Artificial Sequence
  Description of Artificial Sequence: Synthetic oligonucleotide
  Target: ATXN2; (-) strand; PAM type: YTN; PAM sequence: TTT
gtatttttagtagagatggg

SEQ ID NO: 78143 - DNA, 20 bp, Artificial Sequence
  Description of Artificial Sequence: Synthetic oligonucleotide
  Target: ATXN2; (-) strand; PAM type: YTN; PAM sequence: TTT
tgtatttttagtagagatgg

SEQ ID NO: 78144 - DNA, 20 bp, Artificial Sequence
  Description of Artificial Sequence: Synthetic oligonucleotide
  Target: ATXN2; (-) strand; PAM type: YTN; PAM sequence: TTT
ttgtatttttagtagagatg

SEQ ID NO: 78145 - DNA, 20 bp, Artificial Sequence
  Description of Artificial Sequence: Synthetic oligonucleotide
  Target: ATXN2; (-) strand; PAM type: YTN; PAM sequence: CTA
atttttgtatttttagtaga

SEQ ID NO: 78146 - DNA, 20 bp, Artificial Sequence
  Description of Artificial Sequence: Synthetic oligonucleotide
  Target: ATXN2; (-) strand; PAM type: YTN; PAM sequence: CTG
gctaatttttgtatttttag

SEQ ID NO: 78147 - DNA, 20 bp, Artificial Sequence
  Description of Artificial Sequence: Synthetic oligonucleotide
  Target: ATXN2; (-) strand; PAM type: YTN; PAM sequence: TTA
caggcgcccaccaccacgtc

SEQ ID NO: 78148 - DNA, 20 bp, Artificial Sequence
  Description of Artificial Sequence: Synthetic oligonucleotide
  Target: ATXN2; (-) strand; PAM type: YTN; PAM sequence: CTG
ggattacaggcgcccaccac

SEQ ID NO: 78149 - DNA, 20 bp, Artificial Sequence
  Description of Artificial Sequence: Synthetic oligonucleotide
  Target: ATXN2; (-) strand; PAM type: YTN; PAM sequence: CTG
agtagctgggattacaggcg

SEQ ID NO: 78150 - DNA, 20 bp, Artificial Sequence
  Description of Artificial Sequence: Synthetic oligonucleotide
  Target: ATXN2; (-) strand; PAM type: YTN; PAM sequence: TTA
ctgagtagctgggattacag

SEQ ID NO: 78151 - DNA, 20 bp, Artificial Sequence
  Description of Artificial Sequence: Synthetic oligonucleotide
  Target: ATXN2; (-) strand; PAM type: YTN; PAM sequence: CTT
actgagtagctgggattaca

SEQ ID NO: 78152 - DNA, 20 bp, Artificial Sequence
  Description of Artificial Sequence: Synthetic oligonucleotide
  Target: ATXN2; (-) strand; PAM type: YTN; PAM sequence: CTC
agcttactgagtagctggga

SEQ ID NO: 78153 - DNA, 20 bp, Artificial Sequence
  Description of Artificial Sequence: Synthetic oligonucleotide
  Target: ATXN2; (-) strand; PAM type: YTN; PAM sequence: CTC
gtgcctcagcttactgagta

SEQ ID NO: 78154 - DNA, 20 bp, Artificial Sequence
  Description of Artificial Sequence: Synthetic oligonucleotide
  Target: ATXN2; (-) strand; PAM type: YTN; PAM sequence: TTC
tcgtgcctcagcttactgag

SEQ ID NO: 78155 - DNA, 20 bp, Artificial Sequence
  Description of Artificial Sequence: Synthetic oligonucleotide
  Target: ATXN2; (-) strand; PAM type: YTN; PAM sequence: TTC
aagcaattctcgtgcctcag

SEQ ID NO: 78156 - DNA, 20 bp, Artificial Sequence
  Description of Artificial Sequence: Synthetic oligonucleotide
  Target: ATXN2; (-) strand; PAM type: YTN; PAM sequence: CTG
aggttcaagcaattctcgtg

SEQ ID NO: 78157 - DNA, 20 bp, Artificial Sequence
  Description of Artificial Sequence: Synthetic oligonucleotide
  Target: ATXN2; (-) strand; PAM type: YTN; PAM sequence: CTC
tgaggttcaagcaattctcg

SEQ ID NO: 78158 - DNA, 20 bp, Artificial Sequence
  Description of Artificial Sequence: Synthetic oligonucleotide
  Target: ATXN2; (-) strand; PAM type: YTN; PAM sequence: CTA
caactctgaggttcaagcaa

SEQ ID NO: 78159 - DNA, 20 bp, Artificial Sequence
  Description of Artificial Sequence: Synthetic oligonucleotide
  Target: ATXN2; (-) strand; PAM type: YTN; PAM sequence: CTC
agtgcatcctacaactctga

SEQ ID NO: 78160 - DNA, 20 bp, Artificial Sequence
  Description of Artificial Sequence: Synthetic oligonucleotide
  Target: ATXN2; (-) strand; PAM type: YTN; PAM sequence: CTC
agctcagtgcatcctacaac

SEQ ID NO: 78161 - DNA, 20 bp, Artificial Sequence
  Description of Artificial Sequence: Synthetic oligonucleotide
  Target: ATXN2; (-) strand; PAM type: YTN; PAM sequence: TTC
ccagcgtggagtgcagtggc

SEQ ID NO: 78162 - DNA, 20 bp, Artificial Sequence
  Description of Artificial Sequence: Synthetic oligonucleotide
  Target: ATXN2; (-) strand; PAM type: YTN; PAM sequence: TTT
cccagcgtggagtgcagtgg

SEQ ID NO: 78163 - DNA, 20 bp, Artificial Sequence
  Description of Artificial Sequence: Synthetic oligonucleotide
  Target: ATXN2; (-) strand; PAM type: YTN; PAM sequence: CTG
tttcccagcgtggagtgcag

SEQ ID NO: 78164 - DNA, 20 bp, Artificial Sequence
  Description of Artificial Sequence: Synthetic oligonucleotide
  Target: ATXN2; (-) strand; PAM type: YTN; PAM sequence: CTC
tgtttcccagcgtggagtgc

SEQ ID NO: 78165 - DNA, 20 bp, Artificial Sequence
  Description of Artificial Sequence: Synthetic oligonucleotide
  Target: ATXN2; (-) strand; PAM type: YTN; PAM sequence: CTC
actctgtttcccagcgtgga

SEQ ID NO: 78166 - DNA, 20 bp, Artificial Sequence
  Description of Artificial Sequence: Synthetic oligonucleotide
  Target: ATXN2; (-) strand; PAM type: YTN; PAM sequence: TTG
agacagaatctcactctgtt

SEQ ID NO: 78167 - DNA, 20 bp, Artificial Sequence
  Description of Artificial Sequence: Synthetic oligonucleotide
  Target: ATXN2; (-) strand; PAM type: YTN; PAM sequence: TTT
gagacagaatctcactctgt

SEQ ID NO: 78168 - DNA, 20 bp, Artificial Sequence
  Description of Artificial Sequence: Synthetic oligonucleotide
  Target: ATXN2; (-) strand; PAM type: YTN; PAM sequence: TTT
tgagacagaatctcactctg

SEQ ID NO: 78169 - DNA, 20 bp, Artificial Sequence
  Description of Artificial Sequence: Synthetic oligonucleotide
  Target: ATXN2; (-) strand; PAM type: YTN; PAM sequence: TTT
ttgagacagaatctcactct

SEQ ID NO: 78170 - DNA, 20 bp, Artificial Sequence
  Description of Artificial Sequence: Synthetic oligonucleotide
  Target: ATXN2; (-) strand; PAM type: YTN; PAM sequence: TTT
tttgagacagaatctcactc

SEQ ID NO: 78171 - DNA, 20 bp, Artificial Sequence
  Description of Artificial Sequence: Synthetic oligonucleotide
  Target: ATXN2; (-) strand; PAM type: YTN; PAM sequence: TTT
ttttgagacagaatctcact

SEQ ID NO: 78172 - DNA, 20 bp, Artificial Sequence
  Description of Artificial Sequence: Synthetic oligonucleotide
  Target: ATXN2; (-) strand; PAM type: YTN; PAM sequence: TTT
tttttgagacagaatctcac

SEQ ID NO: 78173 - DNA, 20 bp, Artificial Sequence
  Description of Artificial Sequence: Synthetic oligonucleotide
  Target: ATXN2; (-) strand; PAM type: YTN; PAM sequence: TTT
ttttttgagacagaatctca

SEQ ID NO: 78174 - DNA, 20 bp, Artificial Sequence
  Description of Artificial Sequence: Synthetic oligonucleotide
  Target: ATXN2; (-) strand; PAM type: YTN; PAM sequence: TTT
tttttttgagacagaatctc

SEQ ID NO: 78175 - DNA, 20 bp, Artificial Sequence
  Description of Artificial Sequence: Synthetic oligonucleotide
  Target: ATXN2; (-) strand; PAM type: YTN; PAM sequence: TTT
ttttttttgagacagaatct

SEQ ID NO: 78176 - DNA, 20 bp, Artificial Sequence
  Description of Artificial Sequence: Synthetic oligonucleotide
  Target: ATXN2; (-) strand; PAM type: YTN; PAM sequence: TTT
tttttttttgagacagaatc

SEQ ID NO: 78177 - DNA, 20 bp, Artificial Sequence
  Description of Artificial Sequence: Synthetic oligonucleotide
  Target: ATXN2; (-) strand; PAM type: YTN; PAM sequence: TTT
ttttttttttgagacagaat

SEQ ID NO: 78178 - DNA, 20 bp, Artificial Sequence
  Description of Artificial Sequence: Synthetic oligonucleotide
  Target: ATXN2; (-) strand; PAM type: YTN; PAM sequence: TTT
tttttttttttgagacagaa

SEQ ID NO: 78179 - DNA, 20 bp, Artificial Sequence
  Description of Artificial Sequence: Synthetic oligonucleotide
  Target: ATXN2; (-) strand; PAM type: YTN; PAM sequence: TTT
ttttttttttttgagacaga

SEQ ID NO: 78180 - DNA, 20 bp, Artificial Sequence
  Description of Artificial Sequence: Synthetic oligonucleotide
  Target: ATXN2; (-) strand; PAM type: YTN; PAM sequence: TTT
tttttttttttttgagacag

SEQ ID NO: 78181 - DNA, 20 bp, Artificial Sequence
  Description of Artificial Sequence: Synthetic oligonucleotide
  Target: ATXN2; (-) strand; PAM type: YTN; PAM sequence: TTG
tcaatgagaagtaatttttt

SEQ ID NO: 78182 - DNA, 20 bp, Artificial Sequence
  Description of Artificial Sequence: Synthetic oligonucleotide
  Target: ATXN2; (-) strand; PAM type: YTN; PAM sequence: TTT
gtcaatgagaagtaattttt

SEQ ID NO: 78183 - DNA, 20 bp, Artificial Sequence
  Description of Artificial Sequence: Synthetic oligonucleotide
  Target: ATXN2; (-) strand; PAM type: YTN; PAM sequence: TTT
tgtcaatgagaagtaatttt

SEQ ID NO: 78184 - DNA, 20 bp, Artificial Sequence
  Description of Artificial Sequence: Synthetic oligonucleotide
  Target: ATXN2; (-) strand; PAM type: YTN; PAM sequence: TTT
ttgtcaatgagaagtaattt

SEQ ID NO: 78185 - DNA, 20 bp, Artificial Sequence
  Description of Artificial Sequence: Synthetic oligonucleotide
  Target: ATXN2; (-) strand; PAM type: YTN; PAM sequence: CTT
tttgtcaatgagaagtaatt

SEQ ID NO: 78186 - DNA, 20 bp, Artificial Sequence
  Description of Artificial Sequence: Synthetic oligonucleotide
  Target: ATXN2; (-) strand; PAM type: YTN; PAM sequence: TTC
ccatcatagctttttgtcaa

SEQ ID NO: 78187 - DNA, 20 bp, Artificial Sequence
  Description of Artificial Sequence: Synthetic oligonucleotide
  Target: ATXN2; (-) strand; PAM type: YTN; PAM sequence: TTG
tacattcccatcatagcttt

SEQ ID NO: 78188 - DNA, 20 bp, Artificial Sequence
  Description of Artificial Sequence: Synthetic oligonucleotide
  Target: ATXN2; (-) strand; PAM type: YTN; PAM sequence: CTT
gtacattcccatcatagctt

SEQ ID NO: 78189 - DNA, 20 bp, Artificial Sequence
  Description of Artificial Sequence: Synthetic oligonucleotide
  Target: ATXN2; (-) strand; PAM type: YTN; PAM sequence: TTA
tgtccttgtacattcccatc

SEQ ID NO: 78190 - DNA, 20 bp, Artificial Sequence
  Description of Artificial Sequence: Synthetic oligonucleotide
  Target: ATXN2; (-) strand; PAM type: YTN; PAM sequence: TTT
atgtccttgtacattcccat

SEQ ID NO: 78191 - DNA, 20 bp, Artificial Sequence
  Description of Artificial Sequence: Synthetic oligonucleotide
  Target: ATXN2; (-) strand; PAM type: YTN; PAM sequence: TTA
tgaaaacatttatgtccttg

SEQ ID NO: 78192 - DNA, 20 bp, Artificial Sequence
  Description of Artificial Sequence: Synthetic oligonucleotide
  Target: ATXN2; (-) strand; PAM type: YTN; PAM sequence: TTA
gcagttatgaaaacatttat

SEQ ID NO: 78193 - DNA, 20 bp, Artificial Sequence
  Description of Artificial Sequence: Synthetic oligonucleotide
  Target: ATXN2; (-) strand; PAM type: YTN; PAM sequence: TTG
tgttagcagttatgaaaaca

SEQ ID NO: 78194 - DNA, 20 bp, Artificial Sequence
  Description of Artificial Sequence: Synthetic oligonucleotide
  Target: ATXN2; (-) strand; PAM type: YTN; PAM sequence: CTT
gtgttagcagttatgaaaac

SEQ ID NO: 78195 - DNA, 20 bp, Artificial Sequence
  Description of Artificial Sequence: Synthetic oligonucleotide
  Target: ATXN2; (-) strand; PAM type: YTN; PAM sequence: TTC
ttgtgttagcagttatgaaa

SEQ ID NO: 78196 - DNA, 20 bp, Artificial Sequence
  Description of Artificial Sequence: Synthetic oligonucleotide
  Target: ATXN2; (-) strand; PAM type: YTN; PAM sequence: CTG
attcttgtgttagcagttat

SEQ ID NO: 78197 - DNA, 20 bp, Artificial Sequence
  Description of Artificial Sequence: Synthetic oligonucleotide
  Target: ATXN2; (-) strand; PAM type: YTN; PAM sequence: CTA
tggactgattcttgtgttag

SEQ ID NO: 78198 - DNA, 20 bp, Artificial Sequence
  Description of Artificial Sequence: Synthetic oligonucleotide
  Target: ATXN2; (-) strand; PAM type: YTN; PAM sequence: CTG
ggctatggactgattcttgt

SEQ ID NO: 78199 - DNA, 20 bp, Artificial Sequence
  Description of Artificial Sequence: Synthetic oligonucleotide
  Target: ATXN2; (-) strand; PAM type: YTN; PAM sequence: TTG
atccctgggctatggactga

SEQ ID NO: 78200 - DNA, 20 bp, Artificial Sequence
  Description of Artificial Sequence: Synthetic oligonucleotide
  Target: ATXN2; (-) strand; PAM type: YTN; PAM sequence: CTT
gatccctgggctatggactg

SEQ ID NO: 78201 - DNA, 20 bp, Artificial Sequence
  Description of Artificial Sequence: Synthetic oligonucleotide
  Target: ATXN2; (-) strand; PAM type: YTN; PAM sequence: TTA
tcccttgatccctgggctat

SEQ ID NO: 78202 - DNA, 20 bp, Artificial Sequence
  Description of Artificial Sequence: Synthetic oligonucleotide
  Target: ATXN2; (-) strand; PAM type: YTN; PAM sequence: TTA
aacgtcaaaattatcccttg

SEQ ID NO: 78203 - DNA, 20 bp, Artificial Sequence
  Description of Artificial Sequence: Synthetic oligonucleotide
  Target: ATXN2; (-) strand; PAM type: YTN; PAM sequence: CTT
aaacgtcaaaattatccctt

SEQ ID NO: 78204 - DNA, 20 bp, Artificial Sequence
  Description of Artificial Sequence: Synthetic oligonucleotide
  Target: ATXN2; (-) strand; PAM type: YTN; PAM sequence: TTA
aataaaatggcttaaacgtc

SEQ ID NO: 78205 - DNA, 20 bp, Artificial Sequence
  Description of Artificial Sequence: Synthetic oligonucleotide
  Target: ATXN2; (-) strand; PAM type: YTN; PAM sequence: CTT
aaataaaatggcttaaacgt

SEQ ID NO: 78206 - DNA, 20 bp, Artificial Sequence
  Description of Artificial Sequence: Synthetic oligonucleotide
  Target: ATXN2; (-) strand; PAM type: YTN; PAM sequence: TTC
ttaaataaaatggcttaaac

SEQ ID NO: 78207 - DNA, 20 bp, Artificial Sequence
  Description of Artificial Sequence: Synthetic oligonucleotide
  Target: ATXN2; (-) strand; PAM type: YTN; PAM sequence: TTT
cttaaataaaatggcttaaa

SEQ ID NO: 78208 - DNA, 20 bp, Artificial Sequence
  Description of Artificial Sequence: Synthetic oligonucleotide
  Target: ATXN2; (-) strand; PAM type: YTN; PAM sequence: TTA
caggcgtgagccaccgcgcc

SEQ ID NO: 78209 - DNA, 20 bp, Artificial Sequence
  Description of Artificial Sequence: Synthetic oligonucleotide
  Target: ATXN2; (-) strand; PAM type: YTN; PAM sequence: TTG
agattacaggcgtgagccac

SEQ ID NO: 78210 - DNA, 20 bp, Artificial Sequence
  Description of Artificial Sequence: Synthetic oligonucleotide
  Target: ATXN2; (-) strand; PAM type: YTN; PAM sequence: TTC
cgaagtgttgagattacagg

SEQ ID NO: 78211 - DNA, 20 bp, Artificial Sequence
  Description of Artificial Sequence: Synthetic oligonucleotide
  Target: ATXN2; (-) strand; PAM type: YTN; PAM sequence: CTT
ccgaagtgttgagattacag

SEQ ID NO: 78212 - DNA, 20 bp, Artificial Sequence
  Description of Artificial Sequence: Synthetic oligonucleotide
  Target: ATXN2; (-) strand; PAM type: YTN; PAM sequence: CTC
ggccttccgaagtgttgaga

SEQ ID NO: 78213 - DNA, 20 bp, Artificial Sequence
  Description of Artificial Sequence: Synthetic oligonucleotide
  Target: ATXN2; (-) strand; PAM type: YTN; PAM sequence: CTG
cctcggccttccgaagtgtt

SEQ ID NO: 78214 - DNA, 20 bp, Artificial Sequence
  Description of Artificial Sequence: Synthetic oligonucleotide
  Target: ATXN2; (-) strand; PAM type: YTN; PAM sequence: CTG
cctgcctcggccttccgaag

SEQ ID NO: 78215 - DNA, 20 bp, Artificial Sequence
  Description of Artificial Sequence: Synthetic oligonucleotide
  Target: ATXN2; (-) strand; PAM type: YTN; PAM sequence: CTC
aggtgatctgcctgcctcgg

SEQ ID NO: 78216 - DNA, 20 bp, Artificial Sequence
  Description of Artificial Sequence: Synthetic oligonucleotide
  Target: ATXN2; (-) strand; PAM type: YTN; PAM sequence: CTC
ccgatctcaggtgatctgcc

SEQ ID NO: 78217 - DNA, 20 bp, Artificial Sequence
  Description of Artificial Sequence: Synthetic oligonucleotide
  Target: ATXN2; (-) strand; PAM type: YTN; PAM sequence: TTG
aactcccgatctcaggtgat

SEQ ID NO: 78218 - DNA, 20 bp, Artificial Sequence
  Description of Artificial Sequence: Synthetic oligonucleotide
  Target: ATXN2; (-) strand; PAM type: YTN; PAM sequence: CTT
gaactcccgatctcaggtga

SEQ ID NO: 78219 - DNA, 20 bp, Artificial Sequence
  Description of Artificial Sequence: Synthetic oligonucleotide
  Target: ATXN2; (-) strand; PAM type: YTN; PAM sequence: CTG
gtcttgaactcccgatctca

SEQ ID NO: 78220 - DNA, 20 bp, Artificial Sequence
  Description of Artificial Sequence: Synthetic oligonucleotide
  Target: ATXN2; (-) strand; PAM type: YTN; PAM sequence: TTG
gtcaggctggtcttgaactc

SEQ ID NO: 78221 - DNA, 20 bp, Artificial Sequence
  Description of Artificial Sequence: Synthetic oligonucleotide
  Target: ATXN2; (-) strand; PAM type: YTN; PAM sequence: CTC
catgttggtcaggctggtct

SEQ ID NO: 78222 - DNA, 20 bp, Artificial Sequence
  Description of Artificial Sequence: Synthetic oligonucleotide
  Target: ATXN2; (-) strand; PAM type: YTN; PAM sequence: TTC
tccatgttggtcaggctggt

SEQ ID NO: 78223 - DNA, 20 bp, Artificial Sequence
  Description of Artificial Sequence: Synthetic oligonucleotide
  Target: ATXN2; (-) strand; PAM type: YTN; PAM sequence: TTT
ctccatgttggtcaggctgg

SEQ ID NO: 78224 - DNA, 20 bp, Artificial Sequence
  Description of Artificial Sequence: Synthetic oligonucleotide
  Target: ATXN2; (-) strand; PAM type: YTN; PAM sequence: TTA
gtagaggcggggtttctcca

SEQ ID NO: 78225 - DNA, 20 bp, Artificial Sequence
  Description of Artificial Sequence: Synthetic oligonucleotide
  Target: ATXN2; (-) strand; PAM type: YTN; PAM sequence: TTT
agtagaggcggggtttctcc

SEQ ID NO: 78226 - DNA, 20 bp, Artificial Sequence
  Description of Artificial Sequence: Synthetic oligonucleotide
  Target: ATXN2; (-) strand; PAM type: YTN; PAM sequence: TTT
tagtagaggcggggtttctc

SEQ ID NO: 78227 - DNA, 20 bp, Artificial Sequence
  Description of Artificial Sequence: Synthetic oligonucleotide
  Target: ATXN2; (-) strand; PAM type: YTN; PAM sequence: TTT
ttagtagaggcggggtttct

SEQ ID NO: 78228 - DNA, 20 bp, Artificial Sequence
  Description of Artificial Sequence: Synthetic oligonucleotide
  Target: ATXN2; (-) strand; PAM type: YTN; PAM sequence: TTG
tatttttagtagaggcgggg

SEQ ID NO: 78229 - DNA, 20 bp, Artificial Sequence
  Description of Artificial Sequence: Synthetic oligonucleotide
  Target: ATXN2; (-) strand; PAM type: YTN; PAM sequence: TTT
gtatttttagtagaggcggg

SEQ ID NO: 78230 - DNA, 20 bp, Artificial Sequence
  Description of Artificial Sequence: Synthetic oligonucleotide
  Target: ATXN2; (-) strand; PAM type: YTN; PAM sequence: TTT
tgtatttttagtagaggcgg

SEQ ID NO: 78231 - DNA, 20 bp, Artificial Sequence
  Description of Artificial Sequence: Synthetic oligonucleotide
  Target: ATXN2; (-) strand; PAM type: YTN; PAM sequence: CTA
attttgtatttttagtagag

SEQ ID NO: 78232 - DNA, 20 bp, Artificial Sequence
  Description of Artificial Sequence: Synthetic oligonucleotide
  Target: ATXN2; (-) strand; PAM type: YTN; PAM sequence: TTA
caggcatgcaccaccatgcc

SEQ ID NO: 78233 - DNA, 20 bp, Artificial Sequence
  Description of Artificial Sequence: Synthetic oligonucleotide
  Target: ATXN2; (-) strand; PAM type: YTN; PAM sequence: CTG
ggattacaggcatgcaccac

SEQ ID NO: 78234 - DNA, 20 bp, Artificial Sequence
  Description of Artificial Sequence: Synthetic oligonucleotide
  Target: ATXN2; (-) strand; PAM type: YTN; PAM sequence: CTG
agtagctgggattacaggca

SEQ ID NO: 78235 - DNA, 20 bp, Artificial Sequence
  Description of Artificial Sequence: Synthetic oligonucleotide
  Target: ATXN2; (-) strand; PAM type: YTN; PAM sequence: CTC
ctgagtagctgggattacag

SEQ ID NO: 78236 - DNA, 20 bp, Artificial Sequence
  Description of Artificial Sequence: Synthetic oligonucleotide
  Target: ATXN2; (-) strand; PAM type: YTN; PAM sequence: CTC
agcctcctgagtagctggga

SEQ ID NO: 78237 - DNA, 20 bp, Artificial Sequence
  Description of Artificial Sequence: Synthetic oligonucleotide
  Target: ATXN2; (-) strand; PAM type: YTN; PAM sequence: CTG
cctcagcctcctgagtagct

SEQ ID NO: 78238 - DNA, 20 bp, Artificial Sequence
  Description of Artificial Sequence: Synthetic oligonucleotide
  Target: ATXN2; (-) strand; PAM type: YTN; PAM sequence: CTC
ctgcctcagcctcctgagta

SEQ ID NO: 78239 - DNA, 20 bp, Artificial Sequence
  Description of Artificial Sequence: Synthetic oligonucleotide
  Target: ATXN2; (-) strand; PAM type: YTN; PAM sequence: TTC
tcctgcctcagcctcctgag

SEQ ID NO: 78240 - DNA, 20 bp, Artificial Sequence
  Description of Artificial Sequence: Synthetic oligonucleotide
  Target: ATXN2; (-) strand; PAM type: YTN; PAM sequence: TTC
aagcaattctcctgcctcag

SEQ ID NO: 78241 - DNA, 20 bp, Artificial Sequence
  Description of Artificial Sequence: Synthetic oligonucleotide
  Target: ATXN2; (-) strand; PAM type: YTN; PAM sequence: CTC
ccgggttcaagcaattctcc

SEQ ID NO: 78242 - DNA, 20 bp, Artificial Sequence
  Description of Artificial Sequence: Synthetic oligonucleotide
  Target: ATXN2; (-) strand; PAM type: YTN; PAM sequence: CTC
cgcctcccgggttcaagcaa

SEQ ID NO: 78243 - DNA, 20 bp, Artificial Sequence
  Description of Artificial Sequence: Synthetic oligonucleotide
  Target: ATXN2; (-) strand; PAM type: YTN; PAM sequence: CTC
accgcaacctccgcctcccg

SEQ ID NO: 78244 - DNA, 20 bp, Artificial Sequence
  Description of Artificial Sequence: Synthetic oligonucleotide
  Target: ATXN2; (-) strand; PAM type: YTN; PAM sequence: CTC
ggctcaccgcaacctccgcc

SEQ ID NO: 78245 - DNA, 20 bp, Artificial Sequence
  Description of Artificial Sequence: Synthetic oligonucleotide
  Target: ATXN2; (-) strand; PAM type: YTN; PAM sequence: CTA
tctcggctcaccgcaacctc

SEQ ID NO: 78246 - DNA, 20 bp, Artificial Sequence
  Description of Artificial Sequence: Synthetic oligonucleotide
  Target: ATXN2; (-) strand; PAM type: YTN; PAM sequence: CTG
gagtgcagtggcatgctatc

SEQ ID NO: 78247 - DNA, 20 bp, Artificial Sequence
  Description of Artificial Sequence: Synthetic oligonucleotide
  Target: ATXN2; (-) strand; PAM type: YTN; PAM sequence: TTG
tcacccaggctggagtgcag

SEQ ID NO: 78248 - DNA, 20 bp, Artificial Sequence
  Description of Artificial Sequence: Synthetic oligonucleotide
  Target: ATXN2; (-) strand; PAM type: YTN; PAM sequence: CTT
gtcacccaggctggagtgca

SEQ ID NO: 78249 - DNA, 20 bp, Artificial Sequence
  Description of Artificial Sequence: Synthetic oligonucleotide
  Target: ATXN2; (-) strand; PAM type: YTN; PAM sequence: CTC
ttgtcacccaggctggagtg

SEQ ID NO: 78250 - DNA, 20 bp, Artificial Sequence
  Description of Artificial Sequence: Synthetic oligonucleotide
  Target: ATXN2; (-) strand; PAM type: YTN; PAM sequence: TTG
ctcttgtcacccaggctgga

SEQ ID NO: 78251 - DNA, 20 bp, Artificial Sequence
  Description of Artificial Sequence: Synthetic oligonucleotide
  Target: ATXN2; (-) strand; PAM type: YTN; PAM sequence: TTT
gctcttgtcacccaggctgg

SEQ ID NO: 78252 - DNA, 20 bp, Artificial Sequence
  Description of Artificial Sequence: Synthetic oligonucleotide
  Target: ATXN2; (-) strand; PAM type: YTN; PAM sequence: TTT
tgctcttgtcacccaggctg

SEQ ID NO: 78253 - DNA, 20 bp, Artificial Sequence
  Description of Artificial Sequence: Synthetic oligonucleotide
  Target: ATXN2; (-) strand; PAM type: YTN; PAM sequence: TTT
ttgctcttgtcacccaggct

SEQ ID NO: 78254 - DNA, 20 bp, Artificial Sequence
  Description of Artificial Sequence: Synthetic oligonucleotide
  Target: ATXN2; (-) strand; PAM type: YTN; PAM sequence: TTT
tttgctcttgtcacccaggc

SEQ ID NO: 78255 - DNA, 20 bp, Artificial Sequence
  Description of Artificial Sequence: Synthetic oligonucleotide
  Target: ATXN2; (-) strand; PAM type: YTN; PAM sequence: TTT
ttttgctcttgtcacccagg

SEQ ID NO: 78256 - DNA, 20 bp, Artificial Sequence
  Description of Artificial Sequence: Synthetic oligonucleotide
  Target: ATXN2; (-) strand; PAM type: YTN; PAM sequence: TTT
tttttgctcttgtcacccag

SEQ ID NO: 78257 - DNA, 20 bp, Artificial Sequence
  Description of Artificial Sequence: Synthetic oligonucleotide
  Target: ATXN2; (-) strand; PAM type: YTN; PAM sequence: TTG
agatggagttttttttgctc

SEQ ID NO: 78258 - DNA, 20 bp, Artificial Sequence
  Description of Artificial Sequence: Synthetic oligonucleotide
  Target: ATXN2; (-) strand; PAM type: YTN; PAM sequence: TTT
gagatggagttttttttgct

SEQ ID NO: 78259 - DNA, 20 bp, Artificial Sequence
  Description of Artificial Sequence: Synthetic oligonucleotide
  Target: ATXN2; (-) strand; PAM type: YTN; PAM sequence: TTT
tgagatggagttttttttgc

SEQ ID NO: 78260 - DNA, 20 bp, Artificial Sequence
  Description of Artificial Sequence: Synthetic oligonucleotide
  Target: ATXN2; (-) strand; PAM type: YTN; PAM sequence: TTT
ttgagatggagttttttttg

SEQ ID NO: 78261 - DNA, 20 bp, Artificial Sequence
  Description of Artificial Sequence: Synthetic oligonucleotide
  Target: ATXN2; (-) strand; PAM type: YTN; PAM sequence: TTT
tttgagatggagtttttttt

SEQ ID NO: 78262 - DNA, 20 bp, Artificial Sequence
  Description of Artificial Sequence: Synthetic oligonucleotide
  Target: ATXN2; (-) strand; PAM type: YTN; PAM sequence: TTT
ttttgagatggagttttttt

SEQ ID NO: 78263 - DNA, 20 bp, Artificial Sequence
  Description of Artificial Sequence: Synthetic oligonucleotide
  Target: ATXN2; (-) strand; PAM type: YTN; PAM sequence: TTT
tttttgagatggagtttttt

SEQ ID NO: 78264 - DNA, 20 bp, Artificial Sequence
  Description of Artificial Sequence: Synthetic oligonucleotide
  Target: ATXN2; (-) strand; PAM type: YTN; PAM sequence: TTT
ttttttgagatggagttttt

SEQ ID NO: 78265 - DNA, 20 bp, Artificial Sequence
  Description of Artificial Sequence: Synthetic oligonucleotide
  Target: ATXN2; (-) strand; PAM type: YTN; PAM sequence: CTT
tttttttgagatggagtttt

SEQ ID NO: 78266 - DNA, 20 bp, Artificial Sequence
  Description of Artificial Sequence: Synthetic oligonucleotide
  Target: ATXN2; (-) strand; PAM type: YTN; PAM sequence: TTC
tttttttttgagatggagtt

SEQ ID NO: 78267 - DNA, 20 bp, Artificial Sequence
  Description of Artificial Sequence: Synthetic oligonucleotide
  Target: ATXN2; (-) strand; PAM type: YTN; PAM sequence: TTT
ctttttttttgagatggagt

SEQ ID NO: 78268 - DNA, 20 bp, Artificial Sequence
  Description of Artificial Sequence: Synthetic oligonucleotide
  Target: ATXN2; (-) strand; PAM type: YTN; PAM sequence: TTT
tctttttttttgagatggag

SEQ ID NO: 78269 - DNA, 20 bp, Artificial Sequence
  Description of Artificial Sequence: Synthetic oligonucleotide
  Target: ATXN2; (-) strand; PAM type: YTN; PAM sequence: TTT
ttctttttttttgagatgga

SEQ ID NO: 78270 - DNA, 20 bp, Artificial Sequence
  Description of Artificial Sequence: Synthetic oligonucleotide
  Target: ATXN2; (-) strand; PAM type: YTN; PAM sequence: TTT
tttctttttttttgagatgg

SEQ ID NO: 78271 - DNA, 20 bp, Artificial Sequence
  Description of Artificial Sequence: Synthetic oligonucleotide
  Target: ATXN2; (-) strand; PAM type: YTN; PAM sequence: TTT
ttttctttttttttgagatg

SEQ ID NO: 78272 - DNA, 20 bp, Artificial Sequence
  Description of Artificial Sequence: Synthetic oligonucleotide
  Target: ATXN2; (-) strand; PAM type: YTN; PAM sequence: TTT
tttttctttttttttgagat

SEQ ID NO: 78273 - DNA, 20 bp, Artificial Sequence
  Description of Artificial Sequence: Synthetic oligonucleotide
  Target: ATXN2; (-) strand; PAM type: YTN; PAM sequence: TTT
ttttttctttttttttgaga

SEQ ID NO: 78274 - DNA, 20 bp, Artificial Sequence
  Description of Artificial Sequence: Synthetic oligonucleotide
  Target: ATXN2; (-) strand; PAM type: YTN; PAM sequence: TTT
tttttttctttttttttgag

SEQ ID NO: 78275 - DNA, 20 bp, Artificial Sequence
  Description of Artificial Sequence: Synthetic oligonucleotide
  Target: ATXN2; (-) strand; PAM type: YTN; PAM sequence: TTT
ttttttttctttttttttga

SEQ ID NO: 78276 - DNA, 20 bp, Artificial Sequence
  Description of Artificial Sequence: Synthetic oligonucleotide
  Target: ATXN2; (-) strand; PAM type: YTN; PAM sequence: TTT
tttttttttctttttttttg

SEQ ID NO: 78277 - DNA, 20 bp, Artificial Sequence
  Description of Artificial Sequence: Synthetic oligonucleotide
  Target: ATXN2; (-) strand; PAM type: YTN; PAM sequence: TTT
ttttttttttcttttttttt

SEQ ID NO: 78278 - DNA, 20 bp, Artificial Sequence
  Description of Artificial Sequence: Synthetic oligonucleotide
  Target: ATXN2; (-) strand; PAM type: YTN; PAM sequence: CTT
tttttttttttctttttttt

SEQ ID NO: 78279 - DNA, 20 bp, Artificial Sequence
  Description of Artificial Sequence: Synthetic oligonucleotide
  Target: ATXN2; (-) strand; PAM type: YTN; PAM sequence: TTC
tttttttttttttctttttt

SEQ ID NO: 78280 - DNA, 20 bp, Artificial Sequence
  Description of Artificial Sequence: Synthetic oligonucleotide
  Target: ATXN2; (-) strand; PAM type: YTN; PAM sequence: TTT
ctttttttttttttcttttt

SEQ ID NO: 78281 - DNA, 20 bp, Artificial Sequence
  Description of Artificial Sequence: Synthetic oligonucleotide
  Target: ATXN2; (-) strand; PAM type: YTN; PAM sequence: TTA
cagaatgtatttcttttttt

SEQ ID NO: 78282 - DNA, 20 bp, Artificial Sequence
  Description of Artificial Sequence: Synthetic oligonucleotide
  Target: ATXN2; (-) strand; PAM type: YTN; PAM sequence: CTT
acagaatgtatttctttttt

SEQ ID NO: 78283 - DNA, 20 bp, Artificial Sequence
  Description of Artificial Sequence: Synthetic oligonucleotide
  Target: ATXN2; (-) strand; PAM type: YTN; PAM sequence: CTA
tgaatggcagtagtagcctt

SEQ ID NO: 78284 - DNA, 20 bp, Artificial Sequence
  Description of Artificial Sequence: Synthetic oligonucleotide
  Target: ATXN2; (-) strand; PAM type: YTN; PAM sequence: TTG
ccatcagagaatggctatga

SEQ ID NO: 78285 - DNA, 20 bp, Artificial Sequence
  Description of Artificial Sequence: Synthetic oligonucleotide
  Target: ATXN2; (-) strand; PAM type: YTN; PAM sequence: TTT
gccatcagagaatggctatg

SEQ ID NO: 78286 - DNA, 20 bp, Artificial Sequence
  Description of Artificial Sequence: Synthetic oligonucleotide
  Target: ATXN2; (-) strand; PAM type: YTN; PAM sequence: TTT
tgccatcagagaatggctat

SEQ ID NO: 78287 - DNA, 20 bp, Artificial Sequence
  Description of Artificial Sequence: Synthetic oligonucleotide
  Target: ATXN2; (-) strand; PAM type: YTN; PAM sequence: TTA
ttttgccatcagagaatggc

SEQ ID NO: 78288 - DNA, 20 bp, Artificial Sequence
  Description of Artificial Sequence: Synthetic oligonucleotide
  Target: ATXN2; (-) strand; PAM type: YTN; PAM sequence: TTT
attttgccatcagagaatgg

SEQ ID NO: 78289 - DNA, 20 bp, Artificial Sequence
  Description of Artificial Sequence: Synthetic oligonucleotide
  Target: ATXN2; (-) strand; PAM type: YTN; PAM sequence: TTC
aatttattttgccatcagag

SEQ ID NO: 78290 - DNA, 20 bp, Artificial Sequence
  Description of Artificial Sequence: Synthetic oligonucleotide
  Target: ATXN2; (-) strand; PAM type: YTN; PAM sequence: TTT
caatttattttgccatcaga

SEQ ID NO: 78291 - DNA, 20 bp, Artificial Sequence
  Description of Artificial Sequence: Synthetic oligonucleotide
  Target: ATXN2; (-) strand; PAM type: YTN; PAM sequence: TTT
tcaatttattttgccatcag

SEQ ID NO: 78292 - DNA, 20 bp, Artificial Sequence
  Description of Artificial Sequence: Synthetic oligonucleotide
  Target: ATXN2; (-) strand; PAM type: YTN; PAM sequence: TTA
gaaagttttcaatttatttt

SEQ ID NO: 78293 - DNA, 20 bp, Artificial Sequence
  Description of Artificial Sequence: Synthetic oligonucleotide
  Target: ATXN2; (-) strand; PAM type: YTN; PAM sequence: TTT
agaaagttttcaatttattt

SEQ ID NO: 78294 - DNA, 20 bp, Artificial Sequence
  Description of Artificial Sequence: Synthetic oligonucleotide
  Target: ATXN2; (-) strand; PAM type: YTN; PAM sequence: TTT
tagaaagttttcaatttatt

SEQ ID NO: 78295 - DNA, 20 bp, Artificial Sequence
  Description of Artificial Sequence: Synthetic oligonucleotide
  Target: ATXN2; (-) strand; PAM type: YTN; PAM sequence: TTT
ttagaaagttttcaatttat

SEQ ID NO: 78296 - DNA, 20 bp, Artificial Sequence
  Description of Artificial Sequence: Synthetic oligonucleotide
  Target: ATXN2; (-) strand; PAM type: YTN; PAM sequence: CTT
tttagaaagttttcaattta

SEQ ID NO: 78297 - DNA, 20 bp, Artificial Sequence
  Description of Artificial Sequence: Synthetic oligonucleotide
  Target: ATXN2; (-) strand; PAM type: YTN; PAM sequence: CTA
gaatggtgaatactttttag

SEQ ID NO: 78298 - DNA, 20 bp, Artificial Sequence
  Description of Artificial Sequence: Synthetic oligonucleotide
  Target: ATXN2; (-) strand; PAM type: YTN; PAM sequence: CTC
agtggcatctagaatggtga

SEQ ID NO: 78299 - DNA, 20 bp, Artificial Sequence
  Description of Artificial Sequence: Synthetic oligonucleotide
  Target: ATXN2; (-) strand; PAM type: YTN; PAM sequence: TTC
tcagtggcatctagaatggt

SEQ ID NO: 78300 - DNA, 20 bp, Artificial Sequence
  Description of Artificial Sequence: Synthetic oligonucleotide
  Target: ATXN2; (-) strand; PAM type: YTN; PAM sequence: CTC
atggatggcattctcagtgg

SEQ ID NO: 78301 - DNA, 20 bp, Artificial Sequence
  Description of Artificial Sequence: Synthetic oligonucleotide
  Target: ATXN2; (-) strand; PAM type: YTN; PAM sequence: CTC
ccatgctcatggatggcatt

SEQ ID NO: 78302 - DNA, 20 bp, Artificial Sequence
  Description of Artificial Sequence: Synthetic oligonucleotide
  Target: ATXN2; (-) strand; PAM type: YTN; PAM sequence: CTC
ctcccatgctcatggatggc

SEQ ID NO: 78303 - DNA, 20 bp, Artificial Sequence
  Description of Artificial Sequence: Synthetic oligonucleotide
  Target: ATXN2; (-) strand; PAM type: YTN; PAM sequence: TTA
acctcctcccatgctcatgg

SEQ ID NO: 78304 - DNA, 20 bp, Artificial Sequence
  Description of Artificial Sequence: Synthetic oligonucleotide
  Target: ATXN2; (-) strand; PAM type: YTN; PAM sequence: TTT
aacctcctcccatgctcatg

SEQ ID NO: 78305 - DNA, 20 bp, Artificial Sequence
  Description of Artificial Sequence: Synthetic oligonucleotide
  Target: ATXN2; (-) strand; PAM type: YTN; PAM sequence: TTT
taacctcctcccatgctcat

SEQ ID NO: 78306 - DNA, 20 bp, Artificial Sequence
  Description of Artificial Sequence: Synthetic oligonucleotide
  Target: ATXN2; (-) strand; PAM type: YTN; PAM sequence: TTG
atgttttaacctcctcccat

SEQ ID NO: 78307 - DNA, 20 bp, Artificial Sequence
  Description of Artificial Sequence: Synthetic oligonucleotide
  Target: ATXN2; (-) strand; PAM type: YTN; PAM sequence: TTA
atgttgatgttttaacctcc

SEQ ID NO: 78308 - DNA, 20 bp, Artificial Sequence
  Description of Artificial Sequence: Synthetic oligonucleotide
  Target: ATXN2; (-) strand; PAM type: YTN; PAM sequence: CTG
ttaatgttgatgttttaacc

SEQ ID NO: 78309 - DNA, 20 bp, Artificial Sequence
  Description of Artificial Sequence: Synthetic oligonucleotide
  Target: ATXN2; (-) strand; PAM type: YTN; PAM sequence: CTC
ctgttaatgttgatgtttta

SEQ ID NO: 78310 - DNA, 20 bp, Artificial Sequence
  Description of Artificial Sequence: Synthetic oligonucleotide
  Target: ATXN2; (-) strand; PAM type: YTN; PAM sequence: CTA
aaactcctgttaatgttgat

SEQ ID NO: 78311 - DNA, 20 bp, Artificial Sequence
  Description of Artificial Sequence: Synthetic oligonucleotide
  Target: ATXN2; (-) strand; PAM type: YTN; PAM sequence: CTC
taaaactcctgttaatgttg

SEQ ID NO: 78312 - DNA, 20 bp, Artificial Sequence
  Description of Artificial Sequence: Synthetic oligonucleotide
  Target: ATXN2; (-) strand; PAM type: YTN; PAM sequence: TTC
ctctaaaactcctgttaatg

SEQ ID NO: 78313 - DNA, 20 bp, Artificial Sequence
  Description of Artificial Sequence: Synthetic oligonucleotide
  Target: ATXN2; (-) strand; PAM type: YTN; PAM sequence: TTT
cctctaaaactcctgttaat

SEQ ID NO: 78314 - DNA, 20 bp, Artificial Sequence
  Description of Artificial Sequence: Synthetic oligonucleotide
  Target: ATXN2; (-) strand; PAM type: YTN; PAM sequence: TTA
aaaaaaaaaaaaaagaaaag

SEQ ID NO: 78315 - DNA, 20 bp, Artificial Sequence
  Description of Artificial Sequence: Synthetic oligonucleotide
  Target: ATXN2; (-) strand; PAM type: YTN; PAM sequence: CTT
aaaaaaaaaaaaaaagaaaa

SEQ ID NO: 78316 - DNA, 20 bp, Artificial Sequence
  Description of Artificial Sequence: Synthetic oligonucleotide
  Target: ATXN2; (-) strand; PAM type: YTN; PAM sequence: CTA
tcttaaaaaaaaaaaaaaag

SEQ ID NO: 78317 - DNA, 20 bp, Artificial Sequence
  Description of Artificial Sequence: Synthetic oligonucleotide
  Target: ATXN2; (-) strand; PAM type: YTN; PAM sequence: CTC
tatcttaaaaaaaaaaaaaa

SEQ ID NO: 78318 - DNA, 20 bp, Artificial Sequence
  Description of Artificial Sequence: Synthetic oligonucleotide
  Target: ATXN2; (-) strand; PAM type: YTN; PAM sequence: CTG
ggcaacaggagcgaaactct

SEQ ID NO: 78319 - DNA, 20 bp, Artificial Sequence
  Description of Artificial Sequence: Synthetic oligonucleotide
  Target: ATXN2; (-) strand; PAM type: YTN; PAM sequence: CTC
cagcctgggcaacaggagcg

SEQ ID NO: 78320 - DNA, 20 bp, Artificial Sequence
  Description of Artificial Sequence: Synthetic oligonucleotide
  Target: ATXN2; (-) strand; PAM type: YTN; PAM sequence: TTG
cactccagcctgggcaacag

SEQ ID NO: 78321 - DNA, 20 bp, Artificial Sequence
  Description of Artificial Sequence: Synthetic oligonucleotide
  Target: ATXN2; (-) strand; PAM type: YTN; PAM sequence: CTT
gcactccagcctgggcaaca

SEQ ID NO: 78322 - DNA, 20 bp, Artificial Sequence
  Description of Artificial Sequence: Synthetic oligonucleotide
  Target: ATXN2; (-) strand; PAM type: YTN; PAM sequence: TTG
tgcccttgcactccagcctg

SEQ ID NO: 78323 - DNA, 20 bp, Artificial Sequence
  Description of Artificial Sequence: Synthetic oligonucleotide
  Target: ATXN2; (-) strand; PAM type: YTN; PAM sequence: TTG
agattgtgcccttgcactcc

SEQ ID NO: 78324 - DNA, 20 bp, Artificial Sequence
  Description of Artificial Sequence: Synthetic oligonucleotide
  Target: ATXN2; (-) strand; PAM type: YTN; PAM sequence: TTG
cagtgagttgagattgtgcc

SEQ ID NO: 78325 - DNA, 20 bp, Artificial Sequence
  Description of Artificial Sequence: Synthetic oligonucleotide
  Target: ATXN2; (-) strand; PAM type: YTN; PAM sequence: CTG
ggaggtggaggttgcagtga

SEQ ID NO: 78326 - DNA, 20 bp, Artificial Sequence
  Description of Artificial Sequence: Synthetic oligonucleotide
  Target: ATXN2; (-) strand; PAM type: YTN; PAM sequence: TTG
aacctgggaggtggaggttg

SEQ ID NO: 78327 - DNA, 20 bp, Artificial Sequence
  Description of Artificial Sequence: Synthetic oligonucleotide
  Target: ATXN2; (-) strand; PAM type: YTN; PAM sequence: CTT
gaacctgggaggtggaggtt

SEQ ID NO: 78328 - DNA, 20 bp, Artificial Sequence
  Description of Artificial Sequence: Synthetic oligonucleotide
  Target: ATXN2; (-) strand; PAM type: YTN; PAM sequence: CTG
aggcaggagaatcgcttgaa

SEQ ID NO: 78329 - DNA, 20 bp, Artificial Sequence
  Description of Artificial Sequence: Synthetic oligonucleotide
  Target: ATXN2; (-) strand; PAM type: YTN; PAM sequence: TTG
ggagactgaggcaggagaat

SEQ ID NO: 78330 - DNA, 20 bp, Artificial Sequence
  Description of Artificial Sequence: Synthetic oligonucleotide
  Target: ATXN2; (-) strand; PAM type: YTN; PAM sequence: CTT
gggagactgaggcaggagaa

SEQ ID NO: 78331 - DNA, 20 bp, Artificial Sequence
  Description of Artificial Sequence: Synthetic oligonucleotide
  Target: ATXN2; (-) strand; PAM type: YTN; PAM sequence: CTA
cttgggagactgaggcagga

SEQ ID NO: 78332 - DNA, 20 bp, Artificial Sequence
  Description of Artificial Sequence: Synthetic oligonucleotide
  Target: ATXN2; (-) strand; PAM type: YTN; PAM sequence: CTA
taatcccagctacttgggag

SEQ ID NO: 78333 - DNA, 20 bp, Artificial Sequence
  Description of Artificial Sequence: Synthetic oligonucleotide
  Target: ATXN2; (-) strand; PAM type: YTN; PAM sequence: TTA
gcggggatgtggtggcgggc

SEQ ID NO: 78334 - DNA, 20 bp, Artificial Sequence
  Description of Artificial Sequence: Synthetic oligonucleotide
  Target: ATXN2; (-) strand; PAM type: YTN; PAM sequence: CTA
aaaatacaaaaattagcggg

SEQ ID NO: 78335 - DNA, 20 bp, Artificial Sequence
  Description of Artificial Sequence: Synthetic oligonucleotide
  Target: ATXN2; (-) strand; PAM type: YTN; PAM sequence: CTA
ctaaaaatacaaaaattagc

SEQ ID NO: 78336 - DNA, 20 bp, Artificial Sequence
  Description of Artificial Sequence: Synthetic oligonucleotide
  Target: ATXN2; (-) strand; PAM type: YTN; PAM sequence: TTC
tactaaaaatacaaaaatta

SEQ ID NO: 78337 - DNA, 20 bp, Artificial Sequence
  Description of Artificial Sequence: Synthetic oligonucleotide
  Target: ATXN2; (-) strand; PAM type: YTN; PAM sequence: TTT
ctactaaaaatacaaaaatt

SEQ ID NO: 78338 - DNA, 20 bp, Artificial Sequence
  Description of Artificial Sequence: Synthetic oligonucleotide
  Target: ATXN2; (-) strand; PAM type: YTN; PAM sequence: CTG
gcaaacgtggtgaaaccccg

SEQ ID NO: 78339 - DNA, 20 bp, Artificial Sequence
  Description of Artificial Sequence: Synthetic oligonucleotide
  Target: ATXN2; (-) strand; PAM type: YTN; PAM sequence: TTC
aagaccagtctggcaaacgt

SEQ ID NO: 78340 - DNA, 20 bp, Artificial Sequence
  Description of Artificial Sequence: Synthetic oligonucleotide
  Target: ATXN2; (-) strand; PAM type: YTN; PAM sequence: CTG
aagtcaggagttcaagacca

SEQ ID NO: 78341 - DNA, 20 bp, Artificial Sequence
  Description of Artificial Sequence: Synthetic oligonucleotide
  Target: ATXN2; (-) strand; PAM type: YTN; PAM sequence: TTG
ggaggccaaggagggcggat

SEQ ID NO: 78342 - DNA, 20 bp, Artificial Sequence
  Description of Artificial Sequence: Synthetic oligonucleotide
  Target: ATXN2; (-) strand; PAM type: YTN; PAM sequence: TTT
gggaggccaaggagggcgga

SEQ ID NO: 78343 - DNA, 20 bp, Artificial Sequence
  Description of Artificial Sequence: Synthetic oligonucleotide
  Target: ATXN2; (-) strand; PAM type: YTN; PAM sequence: CTT
tgggaggccaaggagggcgg

SEQ ID NO: 78344 - DNA, 20 bp, Artificial Sequence
  Description of Artificial Sequence: Synthetic oligonucleotide
  Target: ATXN2; (-) strand; PAM type: YTN; PAM sequence: CTG
taatcccagtactttgggag

SEQ ID NO: 78345 - DNA, 20 bp, Artificial Sequence
  Description of Artificial Sequence: Synthetic oligonucleotide
  Target: ATXN2; (-) strand; PAM type: YTN; PAM sequence: CTC
atgcctgtaatcccagtact

SEQ ID NO: 78346 - DNA, 20 bp, Artificial Sequence
  Description of Artificial Sequence: Synthetic oligonucleotide
  Target: ATXN2; (-) strand; PAM type: YTN; PAM sequence: TTG
ggcacggtggctcatgcctg

SEQ ID NO: 78347 - DNA, 20 bp, Artificial Sequence
  Description of Artificial Sequence: Synthetic oligonucleotide
  Target: ATXN2; (-) strand; PAM type: YTN; PAM sequence: CTG
gttgggcacggtggctcatg

SEQ ID NO: 78348 - DNA, 20 bp, Artificial Sequence
  Description of Artificial Sequence: Synthetic oligonucleotide
  Target: ATXN2; (-) strand; PAM type: YTN; PAM sequence: TTC
ctggttgggcacggtggctc

SEQ ID NO: 78349 - DNA, 20 bp, Artificial Sequence
  Description of Artificial Sequence: Synthetic oligonucleotide
  Target: ATXN2; (-) strand; PAM type: YTN; PAM sequence: TTT
cctggttgggcacggtggct

SEQ ID NO: 78350 - DNA, 20 bp, Artificial Sequence
  Description of Artificial Sequence: Synthetic oligonucleotide
  Target: ATXN2; (-) strand; PAM type: YTN; PAM sequence: TTA
gaagcaatttcctggttggg

SEQ ID NO: 78351 - DNA, 20 bp, Artificial Sequence
  Description of Artificial Sequence: Synthetic oligonucleotide
  Target: ATXN2; (-) strand; PAM type: YTN; PAM sequence: TTC
atgagtattagaagcaattt

SEQ ID NO: 78352 - DNA, 20 bp, Artificial Sequence
  Description of Artificial Sequence: Synthetic oligonucleotide
  Target: ATXN2; (-) strand; PAM type: YTN; PAM sequence: CTC
aaaatcattcatgagtatta

SEQ ID NO: 78353 - DNA, 20 bp, Artificial Sequence
  Description of Artificial Sequence: Synthetic oligonucleotide
  Target: ATXN2; (-) strand; PAM type: YTN; PAM sequence: CTG
aacccctcaaaatcattcat

SEQ ID NO: 78354 - DNA, 20 bp, Artificial Sequence
  Description of Artificial Sequence: Synthetic oligonucleotide
  Target: ATXN2; (-) strand; PAM type: YTN; PAM sequence: CTG
aagtcctgaacccctcaaaa

SEQ ID NO: 78355 - DNA, 20 bp, Artificial Sequence
  Description of Artificial Sequence: Synthetic oligonucleotide
  Target: ATXN2; (-) strand; PAM type: YTN; PAM sequence: CTA
ctgaagtcctgaacccctca

SEQ ID NO: 78356 - DNA, 20 bp, Artificial Sequence
  Description of Artificial Sequence: Synthetic oligonucleotide
  Target: ATXN2; (-) strand; PAM type: YTN; PAM sequence: CTC
tactgaagtcctgaacccct

SEQ ID NO: 78357 - DNA, 20 bp, Artificial Sequence
  Description of Artificial Sequence: Synthetic oligonucleotide
  Target: ATXN2; (-) strand; PAM type: YTN; PAM sequence: TTG
ctctactgaagtcctgaacc

SEQ ID NO: 78358 - DNA, 20 bp, Artificial Sequence
  Description of Artificial Sequence: Synthetic oligonucleotide
  Target: ATXN2; (-) strand; PAM type: YTN; PAM sequence: CTT
gctctactgaagtcctgaac

SEQ ID NO: 78359 - DNA, 20 bp, Artificial Sequence
  Description of Artificial Sequence: Synthetic oligonucleotide
  Target: ATXN2; (-) strand; PAM type: YTN; PAM sequence: TTA
cttgctctactgaagtcctg

SEQ ID NO: 78360 - DNA, 20 bp, Artificial Sequence
  Description of Artificial Sequence: Synthetic oligonucleotide
  Target: ATXN2; (-) strand; PAM type: YTN; PAM sequence: CTG
cagttacttgctctactgaa

SEQ ID NO: 78361 - DNA, 20 bp, Artificial Sequence
  Description of Artificial Sequence: Synthetic oligonucleotide
  Target: ATXN2; (-) strand; PAM type: YTN; PAM sequence: TTA
ccacatctgcagttacttgc

SEQ ID NO: 78362 - DNA, 20 bp, Artificial Sequence
  Description of Artificial Sequence: Synthetic oligonucleotide
  Target: ATXN2; (-) strand; PAM type: YTN; PAM sequence: TTT
accacatctgcagttacttg

SEQ ID NO: 78363 - DNA, 20 bp, Artificial Sequence
  Description of Artificial Sequence: Synthetic oligonucleotide
  Target: ATXN2; (-) strand; PAM type: YTN; PAM sequence: TTT
taccacatctgcagttactt

SEQ ID NO: 78364 - DNA, 20 bp, Artificial Sequence
  Description of Artificial Sequence: Synthetic oligonucleotide
  Target: ATXN2; (-) strand; PAM type: YTN; PAM sequence: TTT
ttaccacatctgcagttact

SEQ ID NO: 78365 - DNA, 20 bp, Artificial Sequence
  Description of Artificial Sequence: Synthetic oligonucleotide
  Target: ATXN2; (-) strand; PAM type: YTN; PAM sequence: TTT
tttaccacatctgcagttac

SEQ ID NO: 78366 - DNA, 20 bp, Artificial Sequence
  Description of Artificial Sequence: Synthetic oligonucleotide
  Target: ATXN2; (-) strand; PAM type: YTN; PAM sequence: CTT
ttttaccacatctgcagtta

SEQ ID NO: 78367 - DNA, 20 bp, Artificial Sequence
  Description of Artificial Sequence: Synthetic oligonucleotide
  Target: ATXN2; (-) strand; PAM type: YTN; PAM sequence: TTG
cttttttaccacatctgcag

SEQ ID NO: 78368 - DNA, 20 bp, Artificial Sequence
  Description of Artificial Sequence: Synthetic oligonucleotide
  Target: ATXN2; (-) strand; PAM type: YTN; PAM sequence: CTT
gcttttttaccacatctgca

SEQ ID NO: 78369 - DNA, 20 bp, Artificial Sequence
  Description of Artificial Sequence: Synthetic oligonucleotide
  Target: ATXN2; (-) strand; PAM type: YTN; PAM sequence: CTC
ttgcttttttaccacatctg

SEQ ID NO: 78370 - DNA, 20 bp, Artificial Sequence
  Description of Artificial Sequence: Synthetic oligonucleotide
  Target: ATXN2; (-) strand; PAM type: YTN; PAM sequence: TTC
tcttgcttttttaccacatc

SEQ ID NO: 78371 - DNA, 20 bp, Artificial Sequence
  Description of Artificial Sequence: Synthetic oligonucleotide
  Target: ATXN2; (-) strand; PAM type: YTN; PAM sequence: TTA
gttctcttgcttttttacca

SEQ ID NO: 78372 - DNA, 20 bp, Artificial Sequence
  Description of Artificial Sequence: Synthetic oligonucleotide
  Target: ATXN2; (-) strand; PAM type: YTN; PAM sequence: TTT
agttctcttgcttttttacc

SEQ ID NO: 78373 - DNA, 20 bp, Artificial Sequence
  Description of Artificial Sequence: Synthetic oligonucleotide
  Target: ATXN2; (-) strand; PAM type: YTN; PAM sequence: TTT
tagttctcttgcttttttac

SEQ ID NO: 78374 - DNA, 20 bp, Artificial Sequence
  Description of Artificial Sequence: Synthetic oligonucleotide
  Target: ATXN2; (-) strand; PAM type: YTN; PAM sequence: CTA
attttagttctcttgctttt

SEQ ID NO: 78375 - DNA, 20 bp, Artificial Sequence
  Description of Artificial Sequence: Synthetic oligonucleotide
  Target: ATXN2; (-) strand; PAM type: YTN; PAM sequence: TTC
taattttagttctcttgctt

SEQ ID NO: 78376 - DNA, 20 bp, Artificial Sequence
  Description of Artificial Sequence: Synthetic oligonucleotide
  Target: ATXN2; (-) strand; PAM type: YTN; PAM sequence: CTT
ctaattttagttctcttgct

SEQ ID NO: 78377 - DNA, 20 bp, Artificial Sequence
  Description of Artificial Sequence: Synthetic oligonucleotide
  Target: ATXN2; (-) strand; PAM type: YTN; PAM sequence: CTG
accccacttctaattttagt

SEQ ID NO: 78378 - DNA, 20 bp, Artificial Sequence
  Description of Artificial Sequence: Synthetic oligonucleotide
  Target: ATXN2; (-) strand; PAM type: YTN; PAM sequence: TTC
tgaccccacttctaatttta

SEQ ID NO: 78379 - DNA, 20 bp, Artificial Sequence
  Description of Artificial Sequence: Synthetic oligonucleotide
  Target: ATXN2; (-) strand; PAM type: YTN; PAM sequence: CTT
ctgaccccacttctaatttt

SEQ ID NO: 78380 - DNA, 20 bp, Artificial Sequence
  Description of Artificial Sequence: Synthetic oligonucleotide
  Target: ATXN2; (-) strand; PAM type: YTN; PAM sequence: TTA
catcttctgaccccacttct

SEQ ID NO: 78381 - DNA, 20 bp, Artificial Sequence
  Description of Artificial Sequence: Synthetic oligonucleotide
  Target: ATXN2; (-) strand; PAM type: YTN; PAM sequence: TTC
agttacatcttctgacccca

SEQ ID NO: 78382 - DNA, 20 bp, Artificial Sequence
  Description of Artificial Sequence: Synthetic oligonucleotide
  Target: ATXN2; (-) strand; PAM type: YTN; PAM sequence: TTG
cagcaattcagttacatctt

SEQ ID NO: 78383 - DNA, 20 bp, Artificial Sequence
  Description of Artificial Sequence: Synthetic oligonucleotide
  Target: ATXN2; (-) strand; PAM type: YTN; PAM sequence: TTA
tcatgagattgcagcaattc

SEQ ID NO: 78384 - DNA, 20 bp, Artificial Sequence
  Description of Artificial Sequence: Synthetic oligonucleotide
  Target: ATXN2; (-) strand; PAM type: YTN; PAM sequence: TTT
atcatgagattgcagcaatt

SEQ ID NO: 78385 - DNA, 20 bp, Artificial Sequence
  Description of Artificial Sequence: Synthetic oligonucleotide
  Target: ATXN2; (-) strand; PAM type: YTN; PAM sequence: TTT
tatcatgagattgcagcaat

SEQ ID NO: 78386 - DNA, 20 bp, Artificial Sequence
  Description of Artificial Sequence: Synthetic oligonucleotide
  Target: ATXN2; (-) strand; PAM type: YTN; PAM sequence: TTC
aagttttatcatgagattgc

SEQ ID NO: 78387 - DNA, 20 bp, Artificial Sequence
  Description of Artificial Sequence: Synthetic oligonucleotide
  Target: ATXN2; (-) strand; PAM type: YTN; PAM sequence: CTA
ttcaagttttatcatgagat

SEQ ID NO: 78388 - DNA, 20 bp, Artificial Sequence
  Description of Artificial Sequence: Synthetic oligonucleotide
  Target: ATXN2; (-) strand; PAM type: YTN; PAM sequence: CTC
atctattcaagttttatcat

SEQ ID NO: 78389 - DNA, 20 bp, Artificial Sequence
  Description of Artificial Sequence: Synthetic oligonucleotide
  Target: ATXN2; (-) strand; PAM type: YTN; PAM sequence: TTA
tccatgagaagcaacacctc

SEQ ID NO: 78390 - DNA, 20 bp, Artificial Sequence
  Description of Artificial Sequence: Synthetic oligonucleotide
  Target: ATXN2; (-) strand; PAM type: YTN; PAM sequence: CTT
atccatgagaagcaacacct

SEQ ID NO: 78391 - DNA, 20 bp, Artificial Sequence
  Description of Artificial Sequence: Synthetic oligonucleotide
  Target: ATXN2; (-) strand; PAM type: YTN; PAM sequence: TTG
cttatccatgagaagcaaca

SEQ ID NO: 78392 - DNA, 20 bp, Artificial Sequence
  Description of Artificial Sequence: Synthetic oligonucleotide
  Target: ATXN2; (-) strand; PAM type: YTN; PAM sequence: TTT
gcttatccatgagaagcaac

SEQ ID NO: 78393 - DNA, 20 bp, Artificial Sequence
  Description of Artificial Sequence: Synthetic oligonucleotide
  Target: ATXN2; (-) strand; PAM type: YTN; PAM sequence: CTT
tgcttatccatgagaagcaa

SEQ ID NO: 78394 - DNA, 20 bp, Artificial Sequence
  Description of Artificial Sequence: Synthetic oligonucleotide
  Target: ATXN2; (-) strand; PAM type: YTN; PAM sequence: TTC
tttgcttatccatgagaagc

SEQ ID NO: 78395 - DNA, 20 bp, Artificial Sequence
  Description of Artificial Sequence: Synthetic oligonucleotide
  Target: ATXN2; (-) strand; PAM type: YTN; PAM sequence: TTT
ctttgcttatccatgagaag

SEQ ID NO: 78396 - DNA, 20 bp, Artificial Sequence
  Description of Artificial Sequence: Synthetic oligonucleotide
  Target: ATXN2; (-) strand; PAM type: YTN; PAM sequence: CTT
tctttgcttatccatgagaa

SEQ ID NO: 78397 - DNA, 20 bp, Artificial Sequence
  Description of Artificial Sequence: Synthetic oligonucleotide
  Target: ATXN2; (-) strand; PAM type: YTN; PAM sequence: TTA
agaaaccactttctttgctt

SEQ ID NO: 78398 - DNA, 20 bp, Artificial Sequence
  Description of Artificial Sequence: Synthetic oligonucleotide
  Target: ATXN2; (-) strand; PAM type: YTN; PAM sequence: CTT
aagaaaccactttctttgct

SEQ ID NO: 78399 - DNA, 20 bp, Artificial Sequence
  Description of Artificial Sequence: Synthetic oligonucleotide
  Target: ATXN2; (-) strand; PAM type: YTN; PAM sequence: TTC
catcttaagaaaccactttc

SEQ ID NO: 78400 - DNA, 20 bp, Artificial Sequence
  Description of Artificial Sequence: Synthetic oligonucleotide
  Target: ATXN2; (-) strand; PAM type: YTN; PAM sequence: TTC
accaggtgtagattccatct

SEQ ID NO: 78401 - DNA, 20 bp, Artificial Sequence
  Description of Artificial Sequence: Synthetic oligonucleotide
  Target: ATXN2; (-) strand; PAM type: YTN; PAM sequence: CTT
caccaggtgtagattccatc

SEQ ID NO: 78402 - DNA, 20 bp, Artificial Sequence
  Description of Artificial Sequence: Synthetic oligonucleotide
  Target: ATXN2; (-) strand; PAM type: YTN; PAM sequence: CTC
acagcagcttcaccaggtgt

SEQ ID NO: 78403 - DNA, 20 bp, Artificial Sequence
  Description of Artificial Sequence: Synthetic oligonucleotide
  Target: ATXN2; (-) strand; PAM type: YTN; PAM sequence: TTC
aacagtgctcacagcagctt

SEQ ID NO: 78404 - DNA, 20 bp, Artificial Sequence
  Description of Artificial Sequence: Synthetic oligonucleotide
  Target: ATXN2; (-) strand; PAM type: YTN; PAM sequence: TTT
caacagtgctcacagcagct

SEQ ID NO: 78405 - DNA, 20 bp, Artificial Sequence
  Description of Artificial Sequence: Synthetic oligonucleotide
  Target: ATXN2; (-) strand; PAM type: YTN; PAM sequence: TTG
tcatttcaacagtgctcaca

SEQ ID NO: 78406 - DNA, 20 bp, Artificial Sequence
  Description of Artificial Sequence: Synthetic oligonucleotide
  Target: ATXN2; (-) strand; PAM type: YTN; PAM sequence: TTG
ttgtcatttcaacagtgctc

SEQ ID NO: 78407 - DNA, 20 bp, Artificial Sequence
  Description of Artificial Sequence: Synthetic oligonucleotide
  Target: ATXN2; (-) strand; PAM type: YTN; PAM sequence: TTT
gttgtcatttcaacagtgct

SEQ ID NO: 78408 - DNA, 20 bp, Artificial Sequence
  Description of Artificial Sequence: Synthetic oligonucleotide
  Target: ATXN2; (-) strand; PAM type: YTN; PAM sequence: TTT
tgttgtcatttcaacagtgc

SEQ ID NO: 78409 - DNA, 20 bp, Artificial Sequence
  Description of Artificial Sequence: Synthetic oligonucleotide
  Target: ATXN2; (-) strand; PAM type: YTN; PAM sequence: CTT
ttgttgtcatttcaacagtg

SEQ ID NO: 78410 - DNA, 20 bp, Artificial Sequence
  Description of Artificial Sequence: Synthetic oligonucleotide
  Target: ATXN2; (-) strand; PAM type: YTN; PAM sequence: TTC
ataatcttttgttgtcattt

SEQ ID NO: 78411 - DNA, 20 bp, Artificial Sequence
  Description of Artificial Sequence: Synthetic oligonucleotide
  Target: ATXN2; (-) strand; PAM type: YTN; PAM sequence: CTG
gaatattcataatcttttgt

SEQ ID NO: 78412 - DNA, 20 bp, Artificial Sequence
  Description of Artificial Sequence: Synthetic oligonucleotide
  Target: ATXN2; (-) strand; PAM type: YTN; PAM sequence: TTC
tggaatattcataatctttt

SEQ ID NO: 78413 - DNA, 20 bp, Artificial Sequence
  Description of Artificial Sequence: Synthetic oligonucleotide
  Target: ATXN2; (-) strand; PAM type: YTN; PAM sequence: TTT
ctggaatattcataatcttt

SEQ ID NO: 78414 - DNA, 20 bp, Artificial Sequence
  Description of Artificial Sequence: Synthetic oligonucleotide
  Target: ATXN2; (-) strand; PAM type: YTN; PAM sequence: CTG
tttctggaatattcataatc

SEQ ID NO: 78415 - DNA, 20 bp, Artificial Sequence
  Description of Artificial Sequence: Synthetic oligonucleotide
  Target: ATXN2; (-) strand; PAM type: YTN; PAM sequence: TTA
caagtgtgagccaccacgcc

SEQ ID NO: 78416 - DNA, 20 bp, Artificial Sequence
  Description of Artificial Sequence: Synthetic oligonucleotide
  Target: ATXN2; (-) strand; PAM type: YTN; PAM sequence: CTG
ggattacaagtgtgagccac

SEQ ID NO: 78417 - DNA, 20 bp, Artificial Sequence
  Description of Artificial Sequence: Synthetic oligonucleotide
  Target: ATXN2; (-) strand; PAM type: YTN; PAM sequence: TTC
gcaaagtgctgggattacaa

SEQ ID NO: 78418 - DNA, 20 bp, Artificial Sequence
  Description of Artificial Sequence: Synthetic oligonucleotide
  Target: ATXN2; (-) strand; PAM type: YTN; PAM sequence: CTT
cgcaaagtgctgggattaca

SEQ ID NO: 78419 - DNA, 20 bp, Artificial Sequence
  Description of Artificial Sequence: Synthetic oligonucleotide
  Target: ATXN2; (-) strand; PAM type: YTN; PAM sequence: CTC
aacttcgcaaagtgctggga

SEQ ID NO: 78420 - DNA, 20 bp, Artificial Sequence
  Description of Artificial Sequence: Synthetic oligonucleotide
  Target: ATXN2; (-) strand; PAM type: YTN; PAM sequence: CTG
cccgcctcaacttcgcaaag

SEQ ID NO: 78421 - DNA, 20 bp, Artificial Sequence
  Description of Artificial Sequence: Synthetic oligonucleotide
  Target: ATXN2; (-) strand; PAM type: YTN; PAM sequence: TTC
gtgatctgcccgcctcaact

SEQ ID NO: 78422 - DNA, 20 bp, Artificial Sequence
  Description of Artificial Sequence: Synthetic oligonucleotide
  Target: ATXN2; (-) strand; PAM type: YTN; PAM sequence: CTT
cgtgatctgcccgcctcaac

SEQ ID NO: 78423 - DNA, 20 bp, Artificial Sequence
  Description of Artificial Sequence: Synthetic oligonucleotide
  Target: ATXN2; (-) strand; PAM type: YTN; PAM sequence: CTG
gcttcgtgatctgcccgcct

SEQ ID NO: 78424 - DNA, 20 bp, Artificial Sequence
  Description of Artificial Sequence: Synthetic oligonucleotide
  Target: ATXN2; (-) strand; PAM type: YTN; PAM sequence: CTC
ctggcttcgtgatctgcccg

SEQ ID NO: 78425 - DNA, 20 bp, Artificial Sequence
  Description of Artificial Sequence: Synthetic oligonucleotide
  Target: ATXN2; (-) strand; PAM type: YTN; PAM sequence: TTG
aactcctggcttcgtgatct

SEQ ID NO: 78426 - DNA, 20 bp, Artificial Sequence
  Description of Artificial Sequence: Synthetic oligonucleotide
  Target: ATXN2; (-) strand; PAM type: YTN; PAM sequence: CTT
gaactcctggcttcgtgatc

SEQ ID NO: 78427 - DNA, 20 bp, Artificial Sequence
  Description of Artificial Sequence: Synthetic oligonucleotide
  Target: ATXN2; (-) strand; PAM type: YTN; PAM sequence: CTG
gtcttgaactcctggcttcg

SEQ ID NO: 78428 - DNA, 20 bp, Artificial Sequence
  Description of Artificial Sequence: Synthetic oligonucleotide
  Target: ATXN2; (-) strand; PAM type: YTN; PAM sequence: TTG
gtgaggctggtcttgaactc

SEQ ID NO: 78429 - DNA, 20 bp, Artificial Sequence
  Description of Artificial Sequence: Synthetic oligonucleotide
  Target: ATXN2; (-) strand; PAM type: YTN; PAM sequence: TTC
accatattggtgaggctggt

SEQ ID NO: 78430 - DNA, 20 bp, Artificial Sequence
  Description of Artificial Sequence: Synthetic oligonucleotide
  Target: ATXN2; (-) strand; PAM type: YTN; PAM sequence: TTT
caccatattggtgaggctgg

SEQ ID NO: 78431 - DNA, 20 bp, Artificial Sequence
  Description of Artificial Sequence: Synthetic oligonucleotide
  Target: ATXN2; (-) strand; PAM type: YTN; PAM sequence: TTA
gtagagacggggtttcacca

SEQ ID NO: 78432 - DNA, 20 bp, Artificial Sequence
  Description of Artificial Sequence: Synthetic oligonucleotide
  Target: ATXN2; (-) strand; PAM type: YTN; PAM sequence: TTT
agtagagacggggtttcacc

SEQ ID NO: 78433 - DNA, 20 bp, Artificial Sequence
  Description of Artificial Sequence: Synthetic oligonucleotide
  Target: ATXN2; (-) strand; PAM type: YTN; PAM sequence: TTT
tagtagagacggggtttcac

SEQ ID NO: 78434 - DNA, 20 bp, Artificial Sequence
  Description of Artificial Sequence: Synthetic oligonucleotide
  Target: ATXN2; (-) strand; PAM type: YTN; PAM sequence: TTT
ttagtagagacggggtttca

SEQ ID NO: 78435 - DNA, 20 bp, Artificial Sequence
  Description of Artificial Sequence: Synthetic oligonucleotide
  Target: ATXN2; (-) strand; PAM type: YTN; PAM sequence: TTG
tatttttagtagagacgggg

SEQ ID NO: 78436 - DNA, 20 bp, Artificial Sequence
  Description of Artificial Sequence: Synthetic oligonucleotide
  Target: ATXN2; (-) strand; PAM type: YTN; PAM sequence: TTT
gtatttttagtagagacggg

SEQ ID NO: 78437 - DNA, 20 bp, Artificial Sequence
  Description of Artificial Sequence: Synthetic oligonucleotide
  Target: ATXN2; (-) strand; PAM type: YTN; PAM sequence: TTT
tgtatttttagtagagacgg

SEQ ID NO: 78438 - DNA, 20 bp, Artificial Sequence
  Description of Artificial Sequence: Synthetic oligonucleotide
  Target: ATXN2; (-) strand; PAM type: YTN; PAM sequence: TTT
ttgtatttttagtagagacg

SEQ ID NO: 78439 - DNA, 20 bp, Artificial Sequence
  Description of Artificial Sequence: Synthetic oligonucleotide
  Target: ATXN2; (-) strand; PAM type: YTN; PAM sequence: CTA
atttttgtatttttagtaga

SEQ ID NO: 78440 - DNA, 20 bp, Artificial Sequence
  Description of Artificial Sequence: Synthetic oligonucleotide
  Target: ATXN2; (-) strand; PAM type: YTN; PAM sequence: CTA
caggtgcatgccaccacgcc

SEQ ID NO: 78441 - DNA, 20 bp, Artificial Sequence
  Description of Artificial Sequence: Synthetic oligonucleotide
  Target: ATXN2; (-) strand; PAM type: YTN; PAM sequence: CTG
ggactacaggtgcatgccac

SEQ ID NO: 78442 - DNA, 20 bp, Artificial Sequence
  Description of Artificial Sequence: Synthetic oligonucleotide
  Target: ATXN2; (-) strand; PAM type: YTN; PAM sequence: CTG
agtatctgggactacaggtg

SEQ ID NO: 78443 - DNA, 20 bp, Artificial Sequence
  Description of Artificial Sequence: Synthetic oligonucleotide
  Target: ATXN2; (-) strand; PAM type: YTN; PAM sequence: CTC
ctgagtatctgggactacag

SEQ ID NO: 78444 - DNA, 20 bp, Artificial Sequence
  Description of Artificial Sequence: Synthetic oligonucleotide
  Target: ATXN2; (-) strand; PAM type: YTN; PAM sequence: CTC
agcctcctgagtatctggga

SEQ ID NO: 78445 - DNA, 20 bp, Artificial Sequence
  Description of Artificial Sequence: Synthetic oligonucleotide
  Target: ATXN2; (-) strand; PAM type: YTN; PAM sequence: CTG
cctcagcctcctgagtatct

SEQ ID NO: 78446 - DNA, 20 bp, Artificial Sequence
  Description of Artificial Sequence: Synthetic oligonucleotide
  Target: ATXN2; (-) strand; PAM type: YTN; PAM sequence: CTC
ctgcctcagcctcctgagta

SEQ ID NO: 78447 - DNA, 20 bp, Artificial Sequence
  Description of Artificial Sequence: Synthetic oligonucleotide
  Target: ATXN2; (-) strand; PAM type: YTN; PAM sequence: TTC
tcctgcctcagcctcctgag

SEQ ID NO: 78448 - DNA, 20 bp, Artificial Sequence
  Description of Artificial Sequence: Synthetic oligonucleotide
  Target: ATXN2; (-) strand; PAM type: YTN; PAM sequence: TTC
aagtgattctcctgcctcag

SEQ ID NO: 78449 - DNA, 20 bp, Artificial Sequence
  Description of Artificial Sequence: Synthetic oligonucleotide
  Target: ATXN2; (-) strand; PAM type: YTN; PAM sequence: TTC
cgggttcaagtgattctcct

SEQ ID NO: 78450 - DNA, 20 bp, Artificial Sequence
  Description of Artificial Sequence: Synthetic oligonucleotide
  Target: ATXN2; (-) strand; PAM type: YTN; PAM sequence: CTT
ccgggttcaagtgattctcc

SEQ ID NO: 78451 - DNA, 20 bp, Artificial Sequence
  Description of Artificial Sequence: Synthetic oligonucleotide
  Target: ATXN2; (-) strand; PAM type: YTN; PAM sequence: CTG
ccttccgggttcaagtgatt

SEQ ID NO: 78452 - DNA, 20 bp, Artificial Sequence
  Description of Artificial Sequence: Synthetic oligonucleotide
  Target: ATXN2; (-) strand; PAM type: YTN; PAM sequence: CTC
tgccttccgggttcaagtga

SEQ ID NO: 78453 - DNA, 20 bp, Artificial Sequence
  Description of Artificial Sequence: Synthetic oligonucleotide
  Target: ATXN2; (-) strand; PAM type: YTN; PAM sequence: CTG
caacctctgccttccgggtt

SEQ ID NO: 78454 - DNA, 20 bp, Artificial Sequence
  Description of Artificial Sequence: Synthetic oligonucleotide
  Target: ATXN2; (-) strand; PAM type: YTN; PAM sequence: TTA
ctgcaacctctgccttccgg

SEQ ID NO: 78455 - DNA, 20 bp, Artificial Sequence
  Description of Artificial Sequence: Synthetic oligonucleotide
  Target: ATXN2; (-) strand; PAM type: YTN; PAM sequence: CTT
actgcaacctctgccttccg

SEQ ID NO: 78456 - DNA, 20 bp, Artificial Sequence
  Description of Artificial Sequence: Synthetic oligonucleotide
  Target: ATXN2; (-) strand; PAM type: YTN; PAM sequence: CTC
agcttactgcaacctctgcc

SEQ ID NO: 78457 - DNA, 20 bp, Artificial Sequence
  Description of Artificial Sequence: Synthetic oligonucleotide
  Target: ATXN2; (-) strand; PAM type: YTN; PAM sequence: CTC
aatctcagcttactgcaacc

SEQ ID NO: 78458 - DNA, 20 bp, Artificial Sequence
  Description of Artificial Sequence: Synthetic oligonucleotide
  Target: ATXN2; (-) strand; PAM type: YTN; PAM sequence: CTG
gagtgcagtggctcaatctc

SEQ ID NO: 78459 - DNA, 20 bp, Artificial Sequence
  Description of Artificial Sequence: Synthetic oligonucleotide
  Target: ATXN2; (-) strand; PAM type: YTN; PAM sequence: CTC
ccaggctggagtgcagtggc

SEQ ID NO: 78460 - DNA, 20 bp, Artificial Sequence
  Description of Artificial Sequence: Synthetic oligonucleotide
  Target: ATXN2; (-) strand; PAM type: YTN; PAM sequence: CTG
tctcccaggctggagtgcag

SEQ ID NO: 78461 - DNA, 20 bp, Artificial Sequence
  Description of Artificial Sequence: Synthetic oligonucleotide
  Target: ATXN2; (-) strand; PAM type: YTN; PAM sequence: CTC
tgtctcccaggctggagtgc

SEQ ID NO: 78462 - DNA, 20 bp, Artificial Sequence
  Description of Artificial Sequence: Synthetic oligonucleotide
  Target: ATXN2; (-) strand; PAM type: YTN; PAM sequence: CTC
gctctgtctcccaggctgga

SEQ ID NO: 78463 - DNA, 20 bp, Artificial Sequence
  Description of Artificial Sequence: Synthetic oligonucleotide
  Target: ATXN2; (-) strand; PAM type: YTN; PAM sequence: TTG
aaatggggtctcgctctgtc

SEQ ID NO: 78464 - DNA, 20 bp, Artificial Sequence
  Description of Artificial Sequence: Synthetic oligonucleotide
  Target: ATXN2; (-) strand; PAM type: YTN; PAM sequence: TTT
gaaatggggtctcgctctgt

SEQ ID NO: 78465 - DNA, 20 bp, Artificial Sequence
  Description of Artificial Sequence: Synthetic oligonucleotide
  Target: ATXN2; (-) strand; PAM type: YTN; PAM sequence: TTT
tgaaatggggtctcgctctg

SEQ ID NO: 78466 - DNA, 20 bp, Artificial Sequence
  Description of Artificial Sequence: Synthetic oligonucleotide
  Target: ATXN2; (-) strand; PAM type: YTN; PAM sequence: TTT
ttgaaatggggtctcgctct

SEQ ID NO: 78467 - DNA, 20 bp, Artificial Sequence
  Description of Artificial Sequence: Synthetic oligonucleotide
  Target: ATXN2; (-) strand; PAM type: YTN; PAM sequence: TTT
tttgaaatggggtctcgctc

SEQ ID NO: 78468 - DNA, 20 bp, Artificial Sequence
  Description of Artificial Sequence: Synthetic oligonucleotide
  Target: ATXN2; (-) strand; PAM type: YTN; PAM sequence: TTT
ttttgaaatggggtctcgct

SEQ ID NO: 78469 - DNA, 20 bp, Artificial Sequence
  Description of Artificial Sequence: Synthetic oligonucleotide
  Target: ATXN2; (-) strand; PAM type: YTN; PAM sequence: TTT
tttttgaaatggggtctcgc

SEQ ID NO: 78470 - DNA, 20 bp, Artificial Sequence
  Description of Artificial Sequence: Synthetic oligonucleotide
  Target: ATXN2; (-) strand; PAM type: YTN; PAM sequence: TTT
ttttttgaaatggggtctcg

SEQ ID NO: 78471 - DNA, 20 bp, Artificial Sequence
  Description of Artificial Sequence: Synthetic oligonucleotide
  Target: ATXN2; (-) strand; PAM type: YTN; PAM sequence: TTT
tttttttgaaatggggtctc

SEQ ID NO: 78472 - DNA, 20 bp, Artificial Sequence
  Description of Artificial Sequence: Synthetic oligonucleotide
  Target: ATXN2; (-) strand; PAM type: YTN; PAM sequence: TTT
ttttttttgaaatggggtct

SEQ ID NO: 78473 - DNA, 20 bp, Artificial Sequence
  Description of Artificial Sequence: Synthetic oligonucleotide
  Target: ATXN2; (-) strand; PAM type: YTN; PAM sequence: TTT
tttttttttgaaatggggtc

SEQ ID NO: 78474 - DNA, 20 bp, Artificial Sequence
  Description of Artificial Sequence: Synthetic oligonucleotide
  Target: ATXN2; (-) strand; PAM type: YTN; PAM sequence: CTT
ttttttttttgaaatggggt

SEQ ID NO: 78475 - DNA, 20 bp, Artificial Sequence
  Description of Artificial Sequence: Synthetic oligonucleotide
  Target: ATXN2; (-) strand; PAM type: YTN; PAM sequence: TTC
ttttttttttttgaaatggg

SEQ ID NO: 78476 - DNA, 20 bp, Artificial Sequence
  Description of Artificial Sequence: Synthetic oligonucleotide
  Target: ATXN2; (-) strand; PAM type: YTN; PAM sequence: TTG
gaacgttctttttttttttt

SEQ ID NO: 78477 - DNA, 20 bp, Artificial Sequence
  Description of Artificial Sequence: Synthetic oligonucleotide
  Target: ATXN2; (-) strand; PAM type: YTN; PAM sequence: TTT
ggaacgttcttttttttttt

SEQ ID NO: 78478 - DNA, 20 bp, Artificial Sequence
  Description of Artificial Sequence: Synthetic oligonucleotide
  Target: ATXN2; (-) strand; PAM type: YTN; PAM sequence: TTT
tggaacgttctttttttttt

SEQ ID NO: 78479 - DNA, 20 bp, Artificial Sequence
  Description of Artificial Sequence: Synthetic oligonucleotide
  Target: ATXN2; (-) strand; PAM type: YTN; PAM sequence: TTT
ttggaacgttcttttttttt

SEQ ID NO: 78480 - DNA, 20 bp, Artificial Sequence
  Description of Artificial Sequence: Synthetic oligonucleotide
  Target: ATXN2; (-) strand; PAM type: YTN; PAM sequence: TTC
atttttggaacgttcttttt

SEQ ID NO: 78481 - DNA, 20 bp, Artificial Sequence
  Description of Artificial Sequence: Synthetic oligonucleotide
  Target: ATXN2; (-) strand; PAM type: YTN; PAM sequence: TTT
catttttggaacgttctttt

SEQ ID NO: 78482 - DNA, 20 bp, Artificial Sequence
  Description of Artificial Sequence: Synthetic oligonucleotide
  Target: ATXN2; (-) strand; PAM type: YTN; PAM sequence: CTG
tgccaggccatttcattttt

SEQ ID NO: 78483 - DNA, 20 bp, Artificial Sequence
  Description of Artificial Sequence: Synthetic oligonucleotide
  Target: ATXN2; (-) strand; PAM type: YTN; PAM sequence: CTA
caggcatgagccactgtgcc

SEQ ID NO: 78484 - DNA, 20 bp, Artificial Sequence
  Description of Artificial Sequence: Synthetic oligonucleotide
  Target: ATXN2; (-) strand; PAM type: YTN; PAM sequence: CTG
ggactacaggcatgagccac

SEQ ID NO: 78485 - DNA, 20 bp, Artificial Sequence
  Description of Artificial Sequence: Synthetic oligonucleotide
  Target: ATXN2; (-) strand; PAM type: YTN; PAM sequence: CTC
ccaaagtgctgggactacag

SEQ ID NO: 78486 - DNA, 20 bp, Artificial Sequence
  Description of Artificial Sequence: Synthetic oligonucleotide
  Target: ATXN2; (-) strand; PAM type: YTN; PAM sequence: TTG
gtctcccaaagtgctgggac

SEQ ID NO: 78487 - DNA, 20 bp, Artificial Sequence
  Description of Artificial Sequence: Synthetic oligonucleotide
  Target: ATXN2; (-) strand; PAM type: YTN; PAM sequence: CTT
ggtctcccaaagtgctggga

SEQ ID NO: 78488 - DNA, 20 bp, Artificial Sequence
  Description of Artificial Sequence: Synthetic oligonucleotide
  Target: ATXN2; (-) strand; PAM type: YTN; PAM sequence: CTG
cccgccttggtctcccaaag

SEQ ID NO: 78489 - DNA, 20 bp, Artificial Sequence
  Description of Artificial Sequence: Synthetic oligonucleotide
  Target: ATXN2; (-) strand; PAM type: YTN; PAM sequence: CTC
aggtgatctgcccgccttgg

SEQ ID NO: 78490 - DNA, 20 bp, Artificial Sequence
  Description of Artificial Sequence: Synthetic oligonucleotide
  Target: ATXN2; (-) strand; PAM type: YTN; PAM sequence: CTG
acctcaggtgatctgcccgc

SEQ ID NO: 78491 - DNA, 20 bp, Artificial Sequence
  Description of Artificial Sequence: Synthetic oligonucleotide
  Target: ATXN2; (-) strand; PAM type: YTN; PAM sequence: TTC
ctgacctcaggtgatctgcc

SEQ ID NO: 78492 - DNA, 20 bp, Artificial Sequence
  Description of Artificial Sequence: Synthetic oligonucleotide
  Target: ATXN2; (-) strand; PAM type: YTN; PAM sequence: CTC
gaattcctgacctcaggtga

SEQ ID NO: 78493 - DNA, 20 bp, Artificial Sequence
  Description of Artificial Sequence: Synthetic oligonucleotide
  Target: ATXN2; (-) strand; PAM type: YTN; PAM sequence: CTG
gtctcgaattcctgacctca

SEQ ID NO: 78494 - DNA, 20 bp, Artificial Sequence
  Description of Artificial Sequence: Synthetic oligonucleotide
  Target: ATXN2; (-) strand; PAM type: YTN; PAM sequence: TTG
gccaggctggtctcgaattc

SEQ ID NO: 78495 - DNA, 20 bp, Artificial Sequence
  Description of Artificial Sequence: Synthetic oligonucleotide
  Target: ATXN2; (-) strand; PAM type: YTN; PAM sequence: TTC
accatattggccaggctggt

SEQ ID NO: 78496 - DNA, 20 bp, Artificial Sequence
  Description of Artificial Sequence: Synthetic oligonucleotide
  Target: ATXN2; (-) strand; PAM type: YTN; PAM sequence: TTT
caccatattggccaggctgg

SEQ ID NO: 78497 - DNA, 20 bp, Artificial Sequence
  Description of Artificial Sequence: Synthetic oligonucleotide
  Target: ATXN2; (-) strand; PAM type: YTN; PAM sequence: TTA
gtagagatggggtttcacca

SEQ ID NO: 78498 - DNA, 20 bp, Artificial Sequence
  Description of Artificial Sequence: Synthetic oligonucleotide
  Target: ATXN2; (-) strand; PAM type: YTN; PAM sequence: TTT
agtagagatggggtttcacc

SEQ ID NO: 78499 - DNA, 20 bp, Artificial Sequence
  Description of Artificial Sequence: Synthetic oligonucleotide
  Target: ATXN2; (-) strand; PAM type: YTN; PAM sequence: TTT
tagtagagatggggtttcac

SEQ ID NO: 78500 - DNA, 20 bp, Artificial Sequence
  Description of Artificial Sequence: Synthetic oligonucleotide
  Target: ATXN2; (-) strand; PAM type: YTN; PAM sequence: TTT
ttagtagagatggggtttca

SEQ ID NO: 78501 - DNA, 20 bp, Artificial Sequence
  Description of Artificial Sequence: Synthetic oligonucleotide
  Target: ATXN2; (-) strand; PAM type: YTN; PAM sequence: TTA
tatttttagtagagatgggg

SEQ ID NO: 78502 - DNA, 20 bp, Artificial Sequence
  Description of Artificial Sequence: Synthetic oligonucleotide
  Target: ATXN2; (-) strand; PAM type: YTN; PAM sequence: TTT
atatttttagtagagatggg

SEQ ID NO: 78503 - DNA, 20 bp, Artificial Sequence
  Description of Artificial Sequence: Synthetic oligonucleotide
  Target: ATXN2; (-) strand; PAM type: YTN; PAM sequence: TTT
tatatttttagtagagatgg

SEQ ID NO: 78504 - DNA, 20 bp, Artificial Sequence
  Description of Artificial Sequence: Synthetic oligonucleotide
  Target: ATXN2; (-) strand; PAM type: YTN; PAM sequence: TTT
ttatatttttagtagagatg

SEQ ID NO: 78505 - DNA, 20 bp, Artificial Sequence
  Description of Artificial Sequence: Synthetic oligonucleotide
  Target: ATXN2; (-) strand; PAM type: YTN; PAM sequence: CTA
atttttatatttttagtaga

SEQ ID NO: 78506 - DNA, 20 bp, Artificial Sequence
  Description of Artificial Sequence: Synthetic oligonucleotide
  Target: ATXN2; (-) strand; PAM type: YTN; PAM sequence: CTG
gggccatgggtgcacgccac

SEQ ID NO: 78507 - DNA, 20 bp, Artificial Sequence
  Description of Artificial Sequence: Synthetic oligonucleotide
  Target: ATXN2; (-) strand; PAM type: YTN; PAM sequence: CTC
atgagtagctggggccatgg

SEQ ID NO: 78508 - DNA, 20 bp, Artificial Sequence
  Description of Artificial Sequence: Synthetic oligonucleotide
  Target: ATXN2; (-) strand; PAM type: YTN; PAM sequence: TTG
tgtcagcctcatgagtagct

SEQ ID NO: 78509 - DNA, 20 bp, Artificial Sequence
  Description of Artificial Sequence: Synthetic oligonucleotide
  Target: ATXN2; (-) strand; PAM type: YTN; PAM sequence: CTT
gtgtcagcctcatgagtagc

SEQ ID NO: 78510 - DNA, 20 bp, Artificial Sequence
  Description of Artificial Sequence: Synthetic oligonucleotide
  Target: ATXN2; (-) strand; PAM type: YTN; PAM sequence: CTC
ttgtgtcagcctcatgagta

SEQ ID NO: 78511 - DNA, 20 bp, Artificial Sequence
  Description of Artificial Sequence: Synthetic oligonucleotide
  Target: ATXN2; (-) strand; PAM type: YTN; PAM sequence: TTC
tcttgtgtcagcctcatgag

SEQ ID NO: 78512 - DNA, 20 bp, Artificial Sequence
  Description of Artificial Sequence: Synthetic oligonucleotide
  Target: ATXN2; (-) strand; PAM type: YTN; PAM sequence: TTG
aagcgattctcttgtgtcag

SEQ ID NO: 78513 - DNA, 20 bp, Artificial Sequence
  Description of Artificial Sequence: Synthetic oligonucleotide
  Target: ATXN2; (-) strand; PAM type: YTN; PAM sequence: CTG
agttgaagcgattctcttgt

SEQ ID NO: 78514 - DNA, 20 bp, Artificial Sequence
  Description of Artificial Sequence: Synthetic oligonucleotide
  Target: ATXN2; (-) strand; PAM type: YTN; PAM sequence: CTC
ctgagttgaagcgattctct

SEQ ID NO: 78515 - DNA, 20 bp, Artificial Sequence
  Description of Artificial Sequence: Synthetic oligonucleotide
  Target: ATXN2; (-) strand; PAM type: YTN; PAM sequence: CTG
cctcctgagttgaagcgatt

SEQ ID NO: 78516 - DNA, 20 bp, Artificial Sequence
  Description of Artificial Sequence: Synthetic oligonucleotide
  Target: ATXN2; (-) strand; PAM type: YTN; PAM sequence: CTC
tgcctcctgagttgaagcga

SEQ ID NO: 78517 - DNA, 20 bp, Artificial Sequence
  Description of Artificial Sequence: Synthetic oligonucleotide
  Target: ATXN2; (-) strand; PAM type: YTN; PAM sequence: CTG
caacctctgcctcctgagtt

SEQ ID NO: 78518 - DNA, 20 bp, Artificial Sequence
  Description of Artificial Sequence: Synthetic oligonucleotide
  Target: ATXN2; (-) strand; PAM type: YTN; PAM sequence: CTC
ggcccactgcaacctctgcc

SEQ ID NO: 78519 - DNA, 20 bp, Artificial Sequence
  Description of Artificial Sequence: Synthetic oligonucleotide
  Target: ATXN2; (-) strand; PAM type: YTN; PAM sequence: CTG
gagtgcagtggcccaatctc

SEQ ID NO: 78520 - DNA, 20 bp, Artificial Sequence
  Description of Artificial Sequence: Synthetic oligonucleotide
  Target: ATXN2; (-) strand; PAM type: YTN; PAM sequence: TTG
cccaggctggagtgcagtgg

SEQ ID NO: 78521 - DNA, 20 bp, Artificial Sequence
  Description of Artificial Sequence: Synthetic oligonucleotide
  Target: ATXN2; (-) strand; PAM type: YTN; PAM sequence: CTG
ttgcccaggctggagtgcag

SEQ ID NO: 78522 - DNA, 20 bp, Artificial Sequence
  Description of Artificial Sequence: Synthetic oligonucleotide
  Target: ATXN2; (-) strand; PAM type: YTN; PAM sequence: TTG
agacagtctgttgcccaggc

SEQ ID NO: 78523 - DNA, 20 bp, Artificial Sequence
  Description of Artificial Sequence: Synthetic oligonucleotide
  Target: ATXN2; (-) strand; PAM type: YTN; PAM sequence: TTT
gagacagtctgttgcccagg

SEQ ID NO: 78524 - DNA, 20 bp, Artificial Sequence
  Description of Artificial Sequence: Synthetic oligonucleotide
  Target: ATXN2; (-) strand; PAM type: YTN; PAM sequence: TTT
tgagacagtctgttgcccag

SEQ ID NO: 78525 - DNA, 20 bp, Artificial Sequence
  Description of Artificial Sequence: Synthetic oligonucleotide
  Target: ATXN2; (-) strand; PAM type: YTN; PAM sequence: TTT
ttgagacagtctgttgccca

SEQ ID NO: 78526 - DNA, 20 bp, Artificial Sequence
  Description of Artificial Sequence: Synthetic oligonucleotide
  Target: ATXN2; (-) strand; PAM type: YTN; PAM sequence: TTT
tttgagacagtctgttgccc

SEQ ID NO: 78527 - DNA, 20 bp, Artificial Sequence
  Description of Artificial Sequence: Synthetic oligonucleotide
  Target: ATXN2; (-) strand; PAM type: YTN; PAM sequence: TTT
ttttgagacagtctgttgcc

SEQ ID NO: 78528 - DNA, 20 bp, Artificial Sequence
  Description of Artificial Sequence: Synthetic oligonucleotide
  Target: ATXN2; (-) strand; PAM type: YTN; PAM sequence: TTA
tttttttgagacagtctgtt

SEQ ID NO: 78529 - DNA, 20 bp, Artificial Sequence
  Description of Artificial Sequence: Synthetic oligonucleotide
  Target: ATXN2; (-) strand; PAM type: YTN; PAM sequence: TTT
atttttttgagacagtctgt

SEQ ID NO: 78530 - DNA, 20 bp, Artificial Sequence
  Description of Artificial Sequence: Synthetic oligonucleotide
  Target: ATXN2; (-) strand; PAM type: YTN; PAM sequence: TTT
tatttttttgagacagtctg

SEQ ID NO: 78531 - DNA, 20 bp, Artificial Sequence
  Description of Artificial Sequence: Synthetic oligonucleotide
  Target: ATXN2; (-) strand; PAM type: YTN; PAM sequence: TTA
ttttatttttttgagacagt

SEQ ID NO: 78532 - DNA, 20 bp, Artificial Sequence
  Description of Artificial Sequence: Synthetic oligonucleotide
  Target: ATXN2; (-) strand; PAM type: YTN; PAM sequence: TTT
attttatttttttgagacag

SEQ ID NO: 78533 - DNA, 20 bp, Artificial Sequence
  Description of Artificial Sequence: Synthetic oligonucleotide
  Target: ATXN2; (-) strand; PAM type: YTN; PAM sequence: TTA
agtaacacagtgaataagac

SEQ ID NO: 78534 - DNA, 20 bp, Artificial Sequence
  Description of Artificial Sequence: Synthetic oligonucleotide
  Target: ATXN2; (-) strand; PAM type: YTN; PAM sequence: TTA
attaagtaacacagtgaata

SEQ ID NO: 78535 - DNA, 20 bp, Artificial Sequence
  Description of Artificial Sequence: Synthetic oligonucleotide
  Target: ATXN2; (-) strand; PAM type: YTN; PAM sequence: TTG
ttaattaagtaacacagtga

SEQ ID NO: 78536 - DNA, 20 bp, Artificial Sequence
  Description of Artificial Sequence: Synthetic oligonucleotide
  Target: ATXN2; (-) strand; PAM type: YTN; PAM sequence: CTT
gttaattaagtaacacagtg

SEQ ID NO: 78537 - DNA, 20 bp, Artificial Sequence
  Description of Artificial Sequence: Synthetic oligonucleotide
  Target: ATXN2; (-) strand; PAM type: YTN; PAM sequence: TTG
cttgttaattaagtaacaca

SEQ ID NO: 78538 - DNA, 20 bp, Artificial Sequence
  Description of Artificial Sequence: Synthetic oligonucleotide
  Target: ATXN2; (-) strand; PAM type: YTN; PAM sequence: TTT
gcttgttaattaagtaacac

SEQ ID NO: 78539 - DNA, 20 bp, Artificial Sequence
  Description of Artificial Sequence: Synthetic oligonucleotide
  Target: ATXN2; (-) strand; PAM type: YTN; PAM sequence: TTT
tgcttgttaattaagtaaca

SEQ ID NO: 78540 - DNA, 20 bp, Artificial Sequence
  Description of Artificial Sequence: Synthetic oligonucleotide
  Target: ATXN2; (-) strand; PAM type: YTN; PAM sequence: TTG
ttttgcttgttaattaagta

SEQ ID NO: 78541 - DNA, 20 bp, Artificial Sequence
  Description of Artificial Sequence: Synthetic oligonucleotide
  Target: ATXN2; (-) strand; PAM type: YTN; PAM sequence: TTG
tgtatattgttttgcttgtt

SEQ ID NO: 78542 - DNA, 20 bp, Artificial Sequence
  Description of Artificial Sequence: Synthetic oligonucleotide
  Target: ATXN2; (-) strand; PAM type: YTN; PAM sequence: TTT
gtgtatattgttttgcttgt

SEQ ID NO: 78543 - DNA, 20 bp, Artificial Sequence
  Description of Artificial Sequence: Synthetic oligonucleotide
  Target: ATXN2; (-) strand; PAM type: YTN; PAM sequence: TTG
tttgtgtatattgttttgct

SEQ ID NO: 78544 - DNA, 20 bp, Artificial Sequence
  Description of Artificial Sequence: Synthetic oligonucleotide
  Target: ATXN2; (-) strand; PAM type: YTN; PAM sequence: TTA
gattgtttgtgtatattgtt

SEQ ID NO: 78545 - DNA, 20 bp, Artificial Sequence
  Description of Artificial Sequence: Synthetic oligonucleotide
  Target: ATXN2; (-) strand; PAM type: YTN; PAM sequence: TTA
tcaggatgtgttagattgtt

SEQ ID NO: 78546 - DNA, 20 bp, Artificial Sequence
  Description of Artificial Sequence: Synthetic oligonucleotide
  Target: ATXN2; (-) strand; PAM type: YTN; PAM sequence: TTC
agttatcaggatgtgttaga

SEQ ID NO: 78547 - DNA, 20 bp, Artificial Sequence
  Description of Artificial Sequence: Synthetic oligonucleotide
  Target: ATXN2; (-) strand; PAM type: YTN; PAM sequence: TTT
cagttatcaggatgtgttag

SEQ ID NO: 78548 - DNA, 20 bp, Artificial Sequence
  Description of Artificial Sequence: Synthetic oligonucleotide
  Target: ATXN2; (-) strand; PAM type: YTN; PAM sequence: TTT
tcagttatcaggatgtgtta

SEQ ID NO: 78549 - DNA, 20 bp, Artificial Sequence
  Description of Artificial Sequence: Synthetic oligonucleotide
  Target: ATXN2; (-) strand; PAM type: YTN; PAM sequence: TTT
ttcagttatcaggatgtgtt

SEQ ID NO: 78550 - DNA, 20 bp, Artificial Sequence
  Description of Artificial Sequence: Synthetic oligonucleotide
  Target: ATXN2; (-) strand; PAM type: YTN; PAM sequence: TTA
atgtttttcagttatcagga

SEQ ID NO: 78551 - DNA, 20 bp, Artificial Sequence
  Description of Artificial Sequence: Synthetic oligonucleotide
  Target: ATXN2; (-) strand; PAM type: YTN; PAM sequence: TTT
aatgtttttcagttatcagg

SEQ ID NO: 78552 - DNA, 20 bp, Artificial Sequence
  Description of Artificial Sequence: Synthetic oligonucleotide
  Target: ATXN2; (-) strand; PAM type: YTN; PAM sequence: TTA
tttaatgtttttcagttatc

SEQ ID NO: 78553 - DNA, 20 bp, Artificial Sequence
  Description of Artificial Sequence: Synthetic oligonucleotide
  Target: ATXN2; (-) strand; PAM type: YTN; PAM sequence: TTA
gattatttaatgtttttcag

SEQ ID NO: 78554 - DNA, 20 bp, Artificial Sequence
  Description of Artificial Sequence: Synthetic oligonucleotide
  Target: ATXN2; (-) strand; PAM type: YTN; PAM sequence: CTT
agattatttaatgtttttca

SEQ ID NO: 78555 - DNA, 20 bp, Artificial Sequence
  Description of Artificial Sequence: Synthetic oligonucleotide
  Target: ATXN2; (-) strand; PAM type: YTN; PAM sequence: TTC
ttagattatttaatgttttt

SEQ ID NO: 78556 - DNA, 20 bp, Artificial Sequence
  Description of Artificial Sequence: Synthetic oligonucleotide
  Target: ATXN2; (-) strand; PAM type: YTN; PAM sequence: TTA
ttcttagattatttaatgtt

SEQ ID NO: 78557 - DNA, 20 bp, Artificial Sequence
  Description of Artificial Sequence: Synthetic oligonucleotide
  Target: ATXN2; (-) strand; PAM type: YTN; PAM sequence: TTT
attcttagattatttaatgt

SEQ ID NO: 78558 - DNA, 20 bp, Artificial Sequence
  Description of Artificial Sequence: Synthetic oligonucleotide
  Target: ATXN2; (-) strand; PAM type: YTN; PAM sequence: TTT
tattcttagattatttaatg

SEQ ID NO: 78559 - DNA, 20 bp, Artificial Sequence
  Description of Artificial Sequence: Synthetic oligonucleotide
  Target: ATXN2; (-) strand; PAM type: YTN; PAM sequence: TTG
aaacaataatggaaggtaat

SEQ ID NO: 78560 - DNA, 20 bp, Artificial Sequence
  Description of Artificial Sequence: Synthetic oligonucleotide
  Target: ATXN2; (-) strand; PAM type: YTN; PAM sequence: TTG
ttgaaacaataatggaaggt

SEQ ID NO: 78561 - DNA, 20 bp, Artificial Sequence
  Description of Artificial Sequence: Synthetic oligonucleotide
  Target: ATXN2; (-) strand; PAM type: YTN; PAM sequence: CTC
ccccagttgttgaaacaata

SEQ ID NO: 78562 - DNA, 20 bp, Artificial Sequence
  Description of Artificial Sequence: Synthetic oligonucleotide
  Target: ATXN2; (-) strand; PAM type: YTN; PAM sequence: CTG
cgcccggcctcccccagttg

SEQ ID NO: 78563 - DNA, 20 bp, Artificial Sequence
  Description of Artificial Sequence: Synthetic oligonucleotide
  Target: ATXN2; (-) strand; PAM type: YTN; PAM sequence: TTA
caggtgtgagccactgcgcc

SEQ ID NO: 78564 - DNA, 20 bp, Artificial Sequence
  Description of Artificial Sequence: Synthetic oligonucleotide
  Target: ATXN2; (-) strand; PAM type: YTN; PAM sequence: CTC
ccaaagtgccgggattacag

SEQ ID NO: 78565 - DNA, 20 bp, Artificial Sequence
  Description of Artificial Sequence: Synthetic oligonucleotide
  Target: ATXN2; (-) strand; PAM type: YTN; PAM sequence: CTC
agcctcccaaagtgccggga

SEQ ID NO: 78566 - DNA, 20 bp, Artificial Sequence
  Description of Artificial Sequence: Synthetic oligonucleotide
  Target: ATXN2; (-) strand; PAM type: YTN; PAM sequence: CTG
cctcagcctcccaaagtgcc

SEQ ID NO: 78567 - DNA, 20 bp, Artificial Sequence
  Description of Artificial Sequence: Synthetic oligonucleotide
  Target: ATXN2; (-) strand; PAM type: YTN; PAM sequence: CTC
agataatccacctgcctcag

SEQ ID NO: 78568 - DNA, 20 bp, Artificial Sequence
  Description of Artificial Sequence: Synthetic oligonucleotide
  Target: ATXN2; (-) strand; PAM type: YTN; PAM sequence: CTG
acctcagataatccacctgc

SEQ ID NO: 78569 - DNA, 20 bp, Artificial Sequence
  Description of Artificial Sequence: Synthetic oligonucleotide
  Target: ATXN2; (-) strand; PAM type: YTN; PAM sequence: TTC
ctgacctcagataatccacc

SEQ ID NO: 78570 - DNA, 20 bp, Artificial Sequence
  Description of Artificial Sequence: Synthetic oligonucleotide
  Target: ATXN2; (-) strand; PAM type: YTN; PAM sequence: TTG
agttcctgacctcagataat

SEQ ID NO: 78571 - DNA, 20 bp, Artificial Sequence
  Description of Artificial Sequence: Synthetic oligonucleotide
  Target: ATXN2; (-) strand; PAM type: YTN; PAM sequence: CTT
gagttcctgacctcagataa

SEQ ID NO: 78572 - DNA, 20 bp, Artificial Sequence
  Description of Artificial Sequence: Synthetic oligonucleotide
  Target: ATXN2; (-) strand; PAM type: YTN; PAM sequence: CTG
gtcttgagttcctgacctca

SEQ ID NO: 78573 - DNA, 20 bp, Artificial Sequence
  Description of Artificial Sequence: Synthetic oligonucleotide
  Target: ATXN2; (-) strand; PAM type: YTN; PAM sequence: TTG
gcaaggctggtcttgagttc

SEQ ID NO: 78574 - DNA, 20 bp, Artificial Sequence
  Description of Artificial Sequence: Synthetic oligonucleotide
  Target: ATXN2; (-) strand; PAM type: YTN; PAM sequence: TTC
accatgttggcaaggctggt

SEQ ID NO: 78575 - DNA, 20 bp, Artificial Sequence
  Description of Artificial Sequence: Synthetic oligonucleotide
  Target: ATXN2; (-) strand; PAM type: YTN; PAM sequence: TTT
caccatgttggcaaggctgg

SEQ ID NO: 78576 - DNA, 20 bp, Artificial Sequence
  Description of Artificial Sequence: Synthetic oligonucleotide
  Target: ATXN2; (-) strand; PAM type: YTN; PAM sequence: TTG
agaggggatttcaccatgtt

SEQ ID NO: 78577 - DNA, 20 bp, Artificial Sequence
  Description of Artificial Sequence: Synthetic oligonucleotide
  Target: ATXN2; (-) strand; PAM type: YTN; PAM sequence: TTT
gagaggggatttcaccatgt

SEQ ID NO: 78578 - DNA, 20 bp, Artificial Sequence
  Description of Artificial Sequence: Synthetic oligonucleotide
  Target: ATXN2; (-) strand; PAM type: YTN; PAM sequence: TTA
tttgagaggggatttcacca

SEQ ID NO: 78579 - DNA, 20 bp, Artificial Sequence
  Description of Artificial Sequence: Synthetic oligonucleotide
  Target: ATXN2; (-) strand; PAM type: YTN; PAM sequence: TTT
atttgagaggggatttcacc

SEQ ID NO: 78580 - DNA, 20 bp, Artificial Sequence
  Description of Artificial Sequence: Synthetic oligonucleotide
  Target: ATXN2; (-) strand; PAM type: YTN; PAM sequence: TTT
tatttgagaggggatttcac

SEQ ID NO: 78581 - DNA, 20 bp, Artificial Sequence
  Description of Artificial Sequence: Synthetic oligonucleotide
  Target: ATXN2; (-) strand; PAM type: YTN; PAM sequence: TTT
ttatttgagaggggatttca

SEQ ID NO: 78582 - DNA, 20 bp, Artificial Sequence
  Description of Artificial Sequence: Synthetic oligonucleotide
  Target: ATXN2; (-) strand; PAM type: YTN; PAM sequence: TTG
tatttttatttgagagggga

SEQ ID NO: 78583 - DNA, 20 bp, Artificial Sequence
  Description of Artificial Sequence: Synthetic oligonucleotide
  Target: ATXN2; (-) strand; PAM type: YTN; PAM sequence: TTT
gtatttttatttgagagggg

SEQ ID NO: 78584 - DNA, 20 bp, Artificial Sequence
  Description of Artificial Sequence: Synthetic oligonucleotide
  Target: ATXN2; (-) strand; PAM type: YTN; PAM sequence: TTT
tgtatttttatttgagaggg

SEQ ID NO: 78585 - DNA, 20 bp, Artificial Sequence
  Description of Artificial Sequence: Synthetic oligonucleotide
  Target: ATXN2; (-) strand; PAM type: YTN; PAM sequence: TTT
ttgtatttttatttgagagg

SEQ ID NO: 78586 - DNA, 20 bp, Artificial Sequence
  Description of Artificial Sequence: Synthetic oligonucleotide
  Target: ATXN2; (-) strand; PAM type: YTN; PAM sequence: CTA
atttttgtatttttatttga

SEQ ID NO: 78587 - DNA, 20 bp, Artificial Sequence
  Description of Artificial Sequence: Synthetic oligonucleotide
  Target: ATXN2; (-) strand; PAM type: YTN; PAM sequence: TTA
caggcatgtgccaccacgcc

SEQ ID NO: 78588 - DNA, 20 bp, Artificial Sequence
  Description of Artificial Sequence: Synthetic oligonucleotide
  Target: ATXN2; (-) strand; PAM type: YTN; PAM sequence: CTG
ggattacaggcatgtgccac

SEQ ID NO: 78589 - DNA, 20 bp, Artificial Sequence
  Description of Artificial Sequence: Synthetic oligonucleotide
  Target: ATXN2; (-) strand; PAM type: YTN; PAM sequence: CTG
agtagctgggattacaggca

SEQ ID NO: 78590 - DNA, 20 bp, Artificial Sequence
  Description of Artificial Sequence: Synthetic oligonucleotide
  Target: ATXN2; (-) strand; PAM type: YTN; PAM sequence: CTC
ctgagtagctgggattacag

SEQ ID NO: 78591 - DNA, 20 bp, Artificial Sequence
  Description of Artificial Sequence: Synthetic oligonucleotide
  Target: ATXN2; (-) strand; PAM type: YTN; PAM sequence: CTC
agcctcctgagtagctggga

SEQ ID NO: 78592 - DNA, 20 bp, Artificial Sequence
  Description of Artificial Sequence: Synthetic oligonucleotide
  Target: ATXN2; (-) strand; PAM type: YTN; PAM sequence: CTG
cctcagcctcctgagtagct

SEQ ID NO: 78593 - DNA, 20 bp, Artificial Sequence
  Description of Artificial Sequence: Synthetic oligonucleotide
  Target: ATXN2; (-) strand; PAM type: YTN; PAM sequence: CTC
ctgcctcagcctcctgagta

SEQ ID NO: 78594 - DNA, 20 bp, Artificial Sequence
  Description of Artificial Sequence: Synthetic oligonucleotide
  Target: ATXN2; (-) strand; PAM type: YTN; PAM sequence: TTC
tcctgcctcagcctcctgag

SEQ ID NO: 78595 - DNA, 20 bp, Artificial Sequence
  Description of Artificial Sequence: Synthetic oligonucleotide
  Target: ATXN2; (-) strand; PAM type: YTN; PAM sequence: TTC
aagcgattctcctgcctcag

SEQ ID NO: 78596 - DNA, 20 bp, Artificial Sequence
  Description of Artificial Sequence: Synthetic oligonucleotide
  Target: ATXN2; (-) strand; PAM type: YTN; PAM sequence: CTG
ggttcaagcgattctcctgc

SEQ ID NO: 78597 - DNA, 20 bp, Artificial Sequence
  Description of Artificial Sequence: Synthetic oligonucleotide
  Target: ATXN2; (-) strand; PAM type: YTN; PAM sequence: TTC
ctgggttcaagcgattctcc

SEQ ID NO: 78598 - DNA, 20 bp, Artificial Sequence
  Description of Artificial Sequence: Synthetic oligonucleotide
  Target: ATXN2; (-) strand; PAM type: YTN; PAM sequence: CTT
cctgggttcaagcgattctc

SEQ ID NO: 78599 - DNA, 20 bp, Artificial Sequence
  Description of Artificial Sequence: Synthetic oligonucleotide
  Target: ATXN2; (-) strand; PAM type: YTN; PAM sequence: CTG
cttcctgggttcaagcgatt

SEQ ID NO: 78600 - DNA, 20 bp, Artificial Sequence
  Description of Artificial Sequence: Synthetic oligonucleotide
  Target: ATXN2; (-) strand; PAM type: YTN; PAM sequence: CTC
tgcttcctgggttcaagcga

SEQ ID NO: 78601 - DNA, 20 bp, Artificial Sequence
  Description of Artificial Sequence: Synthetic oligonucleotide
  Target: ATXN2; (-) strand; PAM type: YTN; PAM sequence: CTG
caacctctgcttcctgggtt

SEQ ID NO: 78602 - DNA, 20 bp, Artificial Sequence
  Description of Artificial Sequence: Synthetic oligonucleotide
  Target: ATXN2; (-) strand; PAM type: YTN; PAM sequence: TTA
ctgcaacctctgcttcctgg

SEQ ID NO: 78603 - DNA, 20 bp, Artificial Sequence
  Description of Artificial Sequence: Synthetic oligonucleotide
  Target: ATXN2; (-) strand; PAM type: YTN; PAM sequence: CTT
actgcaacctctgcttcctg

SEQ ID NO: 78604 - DNA, 20 bp, Artificial Sequence
  Description of Artificial Sequence: Synthetic oligonucleotide
  Target: ATXN2; (-) strand; PAM type: YTN; PAM sequence: TTG
gcttactgcaacctctgctt

SEQ ID NO: 78605 - DNA, 20 bp, Artificial Sequence
  Description of Artificial Sequence: Synthetic oligonucleotide
  Target: ATXN2; (-) strand; PAM type: YTN; PAM sequence: TTG
tcgtgatattggcttactgc

SEQ ID NO: 78606 - DNA, 20 bp, Artificial Sequence
  Description of Artificial Sequence: Synthetic oligonucleotide
  Target: ATXN2; (-) strand; PAM type: YTN; PAM sequence: CTG
gagtgcattgtcgtgatatt

SEQ ID NO: 78607 - DNA, 20 bp, Artificial Sequence
  Description of Artificial Sequence: Synthetic oligonucleotide
  Target: ATXN2; (-) strand; PAM type: YTN; PAM sequence: CTC
aggctggagtgcattgtcgt

SEQ ID NO: 78608 - DNA, 20 bp, Artificial Sequence
  Description of Artificial Sequence: Synthetic oligonucleotide
  Target: ATXN2; (-) strand; PAM type: YTN; PAM sequence: CTG
tgtcactcaggctggagtgc

SEQ ID NO: 78609 - DNA, 20 bp, Artificial Sequence
  Description of Artificial Sequence: Synthetic oligonucleotide
  Target: ATXN2; (-) strand; PAM type: YTN; PAM sequence: CTC
actgtgtcactcaggctgga

SEQ ID NO: 78610 - DNA, 20 bp, Artificial Sequence
  Description of Artificial Sequence: Synthetic oligonucleotide
  Target: ATXN2; (-) strand; PAM type: YTN; PAM sequence: TTG
agacagagtctcactgtgtc

SEQ ID NO: 78611 - DNA, 20 bp, Artificial Sequence
  Description of Artificial Sequence: Synthetic oligonucleotide
  Target: ATXN2; (-) strand; PAM type: YTN; PAM sequence: TTT
gagacagagtctcactgtgt

SEQ ID NO: 78612 - DNA, 20 bp, Artificial Sequence
  Description of Artificial Sequence: Synthetic oligonucleotide
  Target: ATXN2; (-) strand; PAM type: YTN; PAM sequence: TTT
tgagacagagtctcactgtg

SEQ ID NO: 78613 - DNA, 20 bp, Artificial Sequence
  Description of Artificial Sequence: Synthetic oligonucleotide
  Target: ATXN2; (-) strand; PAM type: YTN; PAM sequence: TTT
ttgagacagagtctcactgt

SEQ ID NO: 78614 - DNA, 20 bp, Artificial Sequence
  Description of Artificial Sequence: Synthetic oligonucleotide
  Target: ATXN2; (-) strand; PAM type: YTN; PAM sequence: TTG
tttttgagacagagtctcac

SEQ ID NO: 78615 - DNA, 20 bp, Artificial Sequence
  Description of Artificial Sequence: Synthetic oligonucleotide
  Target: ATXN2; (-) strand; PAM type: YTN; PAM sequence: TTT
gtttttgagacagagtctca

SEQ ID NO: 78616 - DNA, 20 bp, Artificial Sequence
  Description of Artificial Sequence: Synthetic oligonucleotide
  Target: ATXN2; (-) strand; PAM type: YTN; PAM sequence: TTT
tgtttttgagacagagtctc

SEQ ID NO: 78617 - DNA, 20 bp, Artificial Sequence
  Description of Artificial Sequence: Synthetic oligonucleotide
  Target: ATXN2; (-) strand; PAM type: YTN; PAM sequence: TTT
ttgtttttgagacagagtct

SEQ ID NO: 78618 - DNA, 20 bp, Artificial Sequence
  Description of Artificial Sequence: Synthetic oligonucleotide
  Target: ATXN2; (-) strand; PAM type: YTN; PAM sequence: TTT
tttgtttttgagacagagtc

SEQ ID NO: 78619 - DNA, 20 bp, Artificial Sequence
  Description of Artificial Sequence: Synthetic oligonucleotide
  Target: ATXN2; (-) strand; PAM type: YTN; PAM sequence: TTG
ttttttgtttttgagacaga

SEQ ID NO: 78620 - DNA, 20 bp, Artificial Sequence
  Description of Artificial Sequence: Synthetic oligonucleotide
  Target: ATXN2; (-) strand; PAM type: YTN; PAM sequence: TTT
gttttttgtttttgagacag

SEQ ID NO: 78621 - DNA, 20 bp, Artificial Sequence
  Description of Artificial Sequence: Synthetic oligonucleotide
  Target: ATXN2; (-) strand; PAM type: YTN; PAM sequence: TTT
tgttttttgtttttgagaca

SEQ ID NO: 78622 - DNA, 20 bp, Artificial Sequence
  Description of Artificial Sequence: Synthetic oligonucleotide
  Target: ATXN2; (-) strand; PAM type: YTN; PAM sequence: TTG
ttttgttttttgtttttgag

SEQ ID NO: 78623 - DNA, 20 bp, Artificial Sequence
  Description of Artificial Sequence: Synthetic oligonucleotide
  Target: ATXN2; (-) strand; PAM type: YTN; PAM sequence: TTT
gttttgttttttgtttttga

SEQ ID NO: 78624 - DNA, 20 bp, Artificial Sequence
  Description of Artificial Sequence: Synthetic oligonucleotide
  Target: ATXN2; (-) strand; PAM type: YTN; PAM sequence: TTT
tgttttgttttttgtttttg

SEQ ID NO: 78625 - DNA, 20 bp, Artificial Sequence
  Description of Artificial Sequence: Synthetic oligonucleotide
  Target: ATXN2; (-) strand; PAM type: YTN; PAM sequence: TTT
ttgttttgttttttgttttt

SEQ ID NO: 78626 - DNA, 20 bp, Artificial Sequence
  Description of Artificial Sequence: Synthetic oligonucleotide
  Target: ATXN2; (-) strand; PAM type: YTN; PAM sequence: TTT
tttgttttgttttttgtttt

SEQ ID NO: 78627 - DNA, 20 bp, Artificial Sequence
  Description of Artificial Sequence: Synthetic oligonucleotide
  Target: ATXN2; (-) strand; PAM type: YTN; PAM sequence: TTT
ttttgttttgttttttgttt

SEQ ID NO: 78628 - DNA, 20 bp, Artificial Sequence
  Description of Artificial Sequence: Synthetic oligonucleotide
  Target: ATXN2; (-) strand; PAM type: YTN; PAM sequence: TTT
tttttgttttgttttttgtt

SEQ ID NO: 78629 - DNA, 20 bp, Artificial Sequence
  Description of Artificial Sequence: Synthetic oligonucleotide
  Target: ATXN2; (-) strand; PAM type: YTN; PAM sequence: TTT
ttttttgttttgttttttgt

SEQ ID NO: 78630 - DNA, 20 bp, Artificial Sequence
  Description of Artificial Sequence: Synthetic oligonucleotide
  Target: ATXN2; (-) strand; PAM type: YTN; PAM sequence: TTT
tttttttgttttgttttttg

SEQ ID NO: 78631 - DNA, 20 bp, Artificial Sequence
  Description of Artificial Sequence: Synthetic oligonucleotide
  Target: ATXN2; (-) strand; PAM type: YTN; PAM sequence: TTT
ttttttttgttttgtttttt

SEQ ID NO: 78632 - DNA, 20 bp, Artificial Sequence
  Description of Artificial Sequence: Synthetic oligonucleotide
  Target: ATXN2; (-) strand; PAM type: YTN; PAM sequence: CTC
cccagtttttttttttgttt

SEQ ID NO: 78633 - DNA, 20 bp, Artificial Sequence
  Description of Artificial Sequence: Synthetic oligonucleotide
  Target: ATXN2; (-) strand; PAM type: YTN; PAM sequence: TTC
tccccagtttttttttttgt

SEQ ID NO: 78634 - DNA, 20 bp, Artificial Sequence
  Description of Artificial Sequence: Synthetic oligonucleotide
  Target: ATXN2; (-) strand; PAM type: YTN; PAM sequence: TTT
ctccccagtttttttttttg

SEQ ID NO: 78635 - DNA, 20 bp, Artificial Sequence
  Description of Artificial Sequence: Synthetic oligonucleotide
  Target: ATXN2; (-) strand; PAM type: YTN; PAM sequence: TTT
tctccccagttttttttttt

SEQ ID NO: 78636 - DNA, 20 bp, Artificial Sequence
  Description of Artificial Sequence: Synthetic oligonucleotide
  Target: ATXN2; (-) strand; PAM type: YTN; PAM sequence: TTT
ttctccccagtttttttttt

SEQ ID NO: 78637 - DNA, 20 bp, Artificial Sequence
  Description of Artificial Sequence: Synthetic oligonucleotide
  Target: ATXN2; (-) strand; PAM type: YTN; PAM sequence: TTT
tttctccccagttttttttt

SEQ ID NO: 78638 - DNA, 20 bp, Artificial Sequence
  Description of Artificial Sequence: Synthetic oligonucleotide
  Target: ATXN2; (-) strand; PAM type: YTN; PAM sequence: TTG
catgttttttctccccagtt

SEQ ID NO: 78639 - DNA, 20 bp, Artificial Sequence
  Description of Artificial Sequence: Synthetic oligonucleotide
  Target: ATXN2; (-) strand; PAM type: YTN; PAM sequence: TTG
tatggtgacagtaccaatag

SEQ ID NO: 78640 - DNA, 20 bp, Artificial Sequence
  Description of Artificial Sequence: Synthetic oligonucleotide
  Target: ATXN2; (-) strand; PAM type: YTN; PAM sequence: TTA
tattgtatggtgacagtacc

SEQ ID NO: 78641 - DNA, 20 bp, Artificial Sequence
  Description of Artificial Sequence: Synthetic oligonucleotide
  Target: ATXN2; (-) strand; PAM type: YTN; PAM sequence: CTA
taattatattgtatggtgac

SEQ ID NO: 78642 - DNA, 20 bp, Artificial Sequence
  Description of Artificial Sequence: Synthetic oligonucleotide
  Target: ATXN2; (-) strand; PAM type: YTN; PAM sequence: CTC
tataattatattgtatggtg

SEQ ID NO: 78643 - DNA, 20 bp, Artificial Sequence
  Description of Artificial Sequence: Synthetic oligonucleotide
  Target: ATXN2; (-) strand; PAM type: YTN; PAM sequence: TTG
aaaaatggtgatggatgagc

SEQ ID NO: 78644 - DNA, 20 bp, Artificial Sequence
  Description of Artificial Sequence: Synthetic oligonucleotide
  Target: ATXN2; (-) strand; PAM type: YTN; PAM sequence: CTG
aaggacatatagaggaggag

SEQ ID NO: 78645 - DNA, 20 bp, Artificial Sequence
  Description of Artificial Sequence: Synthetic oligonucleotide
  Target: ATXN2; (-) strand; PAM type: YTN; PAM sequence: CTA
ctgaaggacatatagaggag

SEQ ID NO: 78646 - DNA, 20 bp, Artificial Sequence
  Description of Artificial Sequence: Synthetic oligonucleotide
  Target: ATXN2; (-) strand; PAM type: YTN; PAM sequence: TTA
gaaactactgaaggacatat

SEQ ID NO: 78647 - DNA, 20 bp, Artificial Sequence
  Description of Artificial Sequence: Synthetic oligonucleotide
  Target: ATXN2; (-) strand; PAM type: YTN; PAM sequence: TTG
aaatagcattagaaactact

SEQ ID NO: 78648 - DNA, 20 bp, Artificial Sequence
  Description of Artificial Sequence: Synthetic oligonucleotide
  Target: ATXN2; (-) strand; PAM type: YTN; PAM sequence: TTG
ttgaaatagcattagaaact

SEQ ID NO: 78649 - DNA, 20 bp, Artificial Sequence
  Description of Artificial Sequence: Synthetic oligonucleotide
  Target: ATXN2; (-) strand; PAM type: YTN; PAM sequence: CTT
gttgaaatagcattagaaac

SEQ ID NO: 78650 - DNA, 20 bp, Artificial Sequence
  Description of Artificial Sequence: Synthetic oligonucleotide
  Target: ATXN2; (-) strand; PAM type: YTN; PAM sequence: TTA
cccaggtcttgttgaaatag

SEQ ID NO: 78651 - DNA, 20 bp, Artificial Sequence
  Description of Artificial Sequence: Synthetic oligonucleotide
  Target: ATXN2; (-) strand; PAM type: YTN; PAM sequence: CTG
ttacccaggtcttgttgaaa

SEQ ID NO: 78652 - DNA, 20 bp, Artificial Sequence
  Description of Artificial Sequence: Synthetic oligonucleotide
  Target: ATXN2; (-) strand; PAM type: YTN; PAM sequence: TTA
tataaaaaaatctgttaccc

SEQ ID NO: 78653 - DNA, 20 bp, Artificial Sequence
  Description of Artificial Sequence: Synthetic oligonucleotide
  Target: ATXN2; (-) strand; PAM type: YTN; PAM sequence: TTG
attatataaaaaaatctgtt

SEQ ID NO: 78654 - DNA, 20 bp, Artificial Sequence
  Description of Artificial Sequence: Synthetic oligonucleotide
  Target: ATXN2; (-) strand; PAM type: YTN; PAM sequence: TTT
gattatataaaaaaatctgt

SEQ ID NO: 78655 - DNA, 20 bp, Artificial Sequence
  Description of Artificial Sequence: Synthetic oligonucleotide
  Target: ATXN2; (-) strand; PAM type: YTN; PAM sequence: TTT
tgattatataaaaaaatctg

SEQ ID NO: 78656 - DNA, 20 bp, Artificial Sequence
  Description of Artificial Sequence: Synthetic oligonucleotide
  Target: ATXN2; (-) strand; PAM type: YTN; PAM sequence: CTG
gatcaatgaaatattttgat

SEQ ID NO: 78657 - DNA, 20 bp, Artificial Sequence
  Description of Artificial Sequence: Synthetic oligonucleotide
  Target: ATXN2; (-) strand; PAM type: YTN; PAM sequence: CTA
gaaacctggatcaatgaaat

SEQ ID NO: 78658 - DNA, 20 bp, Artificial Sequence
  Description of Artificial Sequence: Synthetic oligonucleotide
  Target: ATXN2; (-) strand; PAM type: YTN; PAM sequence: TTC
tagaaacctggatcaatgaa

SEQ ID NO: 78659 - DNA, 20 bp, Artificial Sequence
  Description of Artificial Sequence: Synthetic oligonucleotide
  Target: ATXN2; (-) strand; PAM type: YTN; PAM sequence: CTG
attctagaaacctggatcaa

SEQ ID NO: 78660 - DNA, 20 bp, Artificial Sequence
  Description of Artificial Sequence: Synthetic oligonucleotide
  Target: ATXN2; (-) strand; PAM type: YTN; PAM sequence: CTA
tacaaccagtctgattctag

SEQ ID NO: 78661 - DNA, 20 bp, Artificial Sequence
  Description of Artificial Sequence: Synthetic oligonucleotide
  Target: ATXN2; (-) strand; PAM type: YTN; PAM sequence: TTC
tatacaaccagtctgattct

SEQ ID NO: 78662 - DNA, 20 bp, Artificial Sequence
  Description of Artificial Sequence: Synthetic oligonucleotide
  Target: ATXN2; (-) strand; PAM type: YTN; PAM sequence: CTT
ctatacaaccagtctgattc

SEQ ID NO: 78663 - DNA, 20 bp, Artificial Sequence
  Description of Artificial Sequence: Synthetic oligonucleotide
  Target: ATXN2; (-) strand; PAM type: YTN; PAM sequence: TTA
cttctatacaaccagtctga

SEQ ID NO: 78664 - DNA, 20 bp, Artificial Sequence
  Description of Artificial Sequence: Synthetic oligonucleotide
  Target: ATXN2; (-) strand; PAM type: YTN; PAM sequence: TTA
gttacttctatacaaccagt

SEQ ID NO: 78665 - DNA, 20 bp, Artificial Sequence
  Description of Artificial Sequence: Synthetic oligonucleotide
  Target: ATXN2; (-) strand; PAM type: YTN; PAM sequence: TTA
tgccaaagaaaattagttac

SEQ ID NO: 78666 - DNA, 20 bp, Artificial Sequence
  Description of Artificial Sequence: Synthetic oligonucleotide
  Target: ATXN2; (-) strand; PAM type: YTN; PAM sequence: CTT
atgccaaagaaaattagtta

SEQ ID NO: 78667 - DNA, 20 bp, Artificial Sequence
  Description of Artificial Sequence: Synthetic oligonucleotide
  Target: ATXN2; (-) strand; PAM type: YTN; PAM sequence: TTA
gaggtatgtggtacccttat

SEQ ID NO: 78668 - DNA, 20 bp, Artificial Sequence
  Description of Artificial Sequence: Synthetic oligonucleotide
  Target: ATXN2; (-) strand; PAM type: YTN; PAM sequence: CTG
gaagggggttagaggtatgt

SEQ ID NO: 78669 - DNA, 20 bp, Artificial Sequence
  Description of Artificial Sequence: Synthetic oligonucleotide
  Target: ATXN2; (-) strand; PAM type: YTN; PAM sequence: TTA
ctggaagggggttagaggta

SEQ ID NO: 78670 - DNA, 20 bp, Artificial Sequence
  Description of Artificial Sequence: Synthetic oligonucleotide
  Target: ATXN2; (-) strand; PAM type: YTN; PAM sequence: TTT
actggaagggggttagaggt

SEQ ID NO: 78671 - DNA, 20 bp, Artificial Sequence
  Description of Artificial Sequence: Synthetic oligonucleotide
  Target: ATXN2; (-) strand; PAM type: YTN; PAM sequence: TTT
tactggaagggggttagagg

SEQ ID NO: 78672 - DNA, 20 bp, Artificial Sequence
  Description of Artificial Sequence: Synthetic oligonucleotide
  Target: ATXN2; (-) strand; PAM type: YTN; PAM sequence: TTA
cagttttactggaagggggt

SEQ ID NO: 78673 - DNA, 20 bp, Artificial Sequence
  Description of Artificial Sequence: Synthetic oligonucleotide
  Target: ATXN2; (-) strand; PAM type: YTN; PAM sequence: CTT
acagttttactggaaggggg

SEQ ID NO: 78674 - DNA, 20 bp, Artificial Sequence
  Description of Artificial Sequence: Synthetic oligonucleotide
  Target: ATXN2; (-) strand; PAM type: YTN; PAM sequence: TTC
ttacagttttactggaaggg

SEQ ID NO: 78675 - DNA, 20 bp, Artificial Sequence
  Description of Artificial Sequence: Synthetic oligonucleotide
  Target: ATXN2; (-) strand; PAM type: YTN; PAM sequence: CTG
gagggaagagcattcttaca

SEQ ID NO: 78676 - DNA, 20 bp, Artificial Sequence
  Description of Artificial Sequence: Synthetic oligonucleotide
  Target: ATXN2; (-) strand; PAM type: YTN; PAM sequence: CTA
acaagaaaggggcagccatg

SEQ ID NO: 78677 - DNA, 20 bp, Artificial Sequence
  Description of Artificial Sequence: Synthetic oligonucleotide
  Target: ATXN2; (-) strand; PAM type: YTN; PAM sequence: TTG
gtaactaacaagaaaggggc

SEQ ID NO: 78678 - DNA, 20 bp, Artificial Sequence
  Description of Artificial Sequence: Synthetic oligonucleotide
  Target: ATXN2; (-) strand; PAM type: YTN; PAM sequence: TTA
agttggtaactaacaagaaa

SEQ ID NO: 78679 - DNA, 20 bp, Artificial Sequence
  Description of Artificial Sequence: Synthetic oligonucleotide
  Target: ATXN2; (-) strand; PAM type: YTN; PAM sequence: TTT
aagttggtaactaacaagaa

SEQ ID NO: 78680 - DNA, 20 bp, Artificial Sequence
  Description of Artificial Sequence: Synthetic oligonucleotide
  Target: ATXN2; (-) strand; PAM type: YTN; PAM sequence: TTC
aggaggtgacatttaagttg

SEQ ID NO: 78681 - DNA, 20 bp, Artificial Sequence
  Description of Artificial Sequence: Synthetic oligonucleotide
  Target: ATXN2; (-) strand; PAM type: YTN; PAM sequence: TTT
caggaggtgacatttaagtt

SEQ ID NO: 78682 - DNA, 20 bp, Artificial Sequence
  Description of Artificial Sequence: Synthetic oligonucleotide
  Target: ATXN2; (-) strand; PAM type: YTN; PAM sequence: CTT
tcaggaggtgacatttaagt

SEQ ID NO: 78683 - DNA, 20 bp, Artificial Sequence
  Description of Artificial Sequence: Synthetic oligonucleotide
  Target: ATXN2; (-) strand; PAM type: YTN; PAM sequence: TTC
tttcaggaggtgacatttaa

SEQ ID NO: 78684 - DNA, 20 bp, Artificial Sequence
  Description of Artificial Sequence: Synthetic oligonucleotide
  Target: ATXN2; (-) strand; PAM type: YTN; PAM sequence: CTT
ctttcaggaggtgacattta

SEQ ID NO: 78685 - DNA, 20 bp, Artificial Sequence
  Description of Artificial Sequence: Synthetic oligonucleotide
  Target: ATXN2; (-) strand; PAM type: YTN; PAM sequence: TTG
agaaggcttctttcaggagg

SEQ ID NO: 78686 - DNA, 20 bp, Artificial Sequence
  Description of Artificial Sequence: Synthetic oligonucleotide
  Target: ATXN2; (-) strand; PAM type: YTN; PAM sequence: TTT
gagaaggcttctttcaggag

SEQ ID NO: 78687 - DNA, 20 bp, Artificial Sequence
  Description of Artificial Sequence: Synthetic oligonucleotide
  Target: ATXN2; (-) strand; PAM type: YTN; PAM sequence: CTG
tagagggggtagtttgagaa

SEQ ID NO: 78688 - DNA, 20 bp, Artificial Sequence
  Description of Artificial Sequence: Synthetic oligonucleotide
  Target: ATXN2; (-) strand; PAM type: YTN; PAM sequence: CTG
ctgtagagggggtagtttga

SEQ ID NO: 78689 - DNA, 20 bp, Artificial Sequence
  Description of Artificial Sequence: Synthetic oligonucleotide
  Target: ATXN2; (-) strand; PAM type: YTN; PAM sequence: TTG
gggagctgctgtagaggggg

SEQ ID NO: 78690 - DNA, 20 bp, Artificial Sequence
  Description of Artificial Sequence: Synthetic oligonucleotide
  Target: ATXN2; (-) strand; PAM type: YTN; PAM sequence: TTA
aaacgggtagacataatagt

SEQ ID NO: 78691 - DNA, 20 bp, Artificial Sequence
  Description of Artificial Sequence: Synthetic oligonucleotide
  Target: ATXN2; (-) strand; PAM type: YTN; PAM sequence: TTA
agtattaaaacgggtagaca

SEQ ID NO: 78692 - DNA, 20 bp, Artificial Sequence
  Description of Artificial Sequence: Synthetic oligonucleotide
  Target: ATXN2; (-) strand; PAM type: YTN; PAM sequence: CTT
aagtattaaaacgggtagac

SEQ ID NO: 78693 - DNA, 20 bp, Artificial Sequence
  Description of Artificial Sequence: Synthetic oligonucleotide
  Target: ATXN2; (-) strand; PAM type: YTN; PAM sequence: TTA
cttaagtattaaaacgggta

SEQ ID NO: 78694 - DNA, 20 bp, Artificial Sequence
  Description of Artificial Sequence: Synthetic oligonucleotide
  Target: ATXN2; (-) strand; PAM type: YTN; PAM sequence: TTA
gttacttaagtattaaaacg

SEQ ID NO: 78695 - DNA, 20 bp, Artificial Sequence
  Description of Artificial Sequence: Synthetic oligonucleotide
  Target: ATXN2; (-) strand; PAM type: YTN; PAM sequence: CTA
aatattagttacttaagtat

SEQ ID NO: 78696 - DNA, 20 bp, Artificial Sequence
  Description of Artificial Sequence: Synthetic oligonucleotide
  Target: ATXN2; (-) strand; PAM type: YTN; PAM sequence: CTG
atgtactaaatattagttac

SEQ ID NO: 78697 - DNA, 20 bp, Artificial Sequence
  Description of Artificial Sequence: Synthetic oligonucleotide
  Target: ATXN2; (-) strand; PAM type: YTN; PAM sequence: CTA
actgatgtactaaatattag

SEQ ID NO: 78698 - DNA, 20 bp, Artificial Sequence
  Description of Artificial Sequence: Synthetic oligonucleotide
  Target: ATXN2; (-) strand; PAM type: YTN; PAM sequence: TTG
tctaactgatgtactaaata

SEQ ID NO: 78699 - DNA, 20 bp, Artificial Sequence
  Description of Artificial Sequence: Synthetic oligonucleotide
  Target: ATXN2; (-) strand; PAM type: YTN; PAM sequence: TTA
attgtctaactgatgtacta

SEQ ID NO: 78700 - DNA, 20 bp, Artificial Sequence
  Description of Artificial Sequence: Synthetic oligonucleotide
  Target: ATXN2; (-) strand; PAM type: YTN; PAM sequence: TTA
gttaattgtctaactgatgt

SEQ ID NO: 78701 - DNA, 20 bp, Artificial Sequence
  Description of Artificial Sequence: Synthetic oligonucleotide
  Target: ATXN2; (-) strand; PAM type: YTN; PAM sequence: TTT
agttaattgtctaactgatg

SEQ ID NO: 78702 - DNA, 20 bp, Artificial Sequence
  Description of Artificial Sequence: Synthetic oligonucleotide
  Target: ATXN2; (-) strand; PAM type: YTN; PAM sequence: TTT
tagttaattgtctaactgat

SEQ ID NO: 78703 - DNA, 20 bp, Artificial Sequence
  Description of Artificial Sequence: Synthetic oligonucleotide
  Target: ATXN2; (-) strand; PAM type: YTN; PAM sequence: CTA
gattttagttaattgtctaa

SEQ ID NO: 78704 - DNA, 20 bp, Artificial Sequence
  Description of Artificial Sequence: Synthetic oligonucleotide
  Target: ATXN2; (-) strand; PAM type: YTN; PAM sequence: TTC
tagattttagttaattgtct

SEQ ID NO: 78705 - DNA, 20 bp, Artificial Sequence
  Description of Artificial Sequence: Synthetic oligonucleotide
  Target: ATXN2; (-) strand; PAM type: YTN; PAM sequence: TTT
ctagattttagttaattgtc

SEQ ID NO: 78706 - DNA, 20 bp, Artificial Sequence
  Description of Artificial Sequence: Synthetic oligonucleotide
  Target: ATXN2; (-) strand; PAM type: YTN; PAM sequence: TTG
atttctagattttagttaat

SEQ ID NO: 78707 - DNA, 20 bp, Artificial Sequence
  Description of Artificial Sequence: Synthetic oligonucleotide
  Target: ATXN2; (-) strand; PAM type: YTN; PAM sequence: CTT
gatttctagattttagttaa

SEQ ID NO: 78708 - DNA, 20 bp, Artificial Sequence
  Description of Artificial Sequence: Synthetic oligonucleotide
  Target: ATXN2; (-) strand; PAM type: YTN; PAM sequence: TTA
agaggtggaacttgatttct

SEQ ID NO: 78709 - DNA, 20 bp, Artificial Sequence
  Description of Artificial Sequence: Synthetic oligonucleotide
  Target: ATXN2; (-) strand; PAM type: YTN; PAM sequence: CTT
aagaggtggaacttgatttc

SEQ ID NO: 78710 - DNA, 20 bp, Artificial Sequence
  Description of Artificial Sequence: Synthetic oligonucleotide
  Target: ATXN2; (-) strand; PAM type: YTN; PAM sequence: TTA
accttaagaggtggaacttg

SEQ ID NO: 78711 - DNA, 20 bp, Artificial Sequence
  Description of Artificial Sequence: Synthetic oligonucleotide
  Target: ATXN2; (-) strand; PAM type: YTN; PAM sequence: CTA
agtgagttaaccttaagagg

SEQ ID NO: 78712 - DNA, 20 bp, Artificial Sequence
  Description of Artificial Sequence: Synthetic oligonucleotide
  Target: ATXN2; (-) strand; PAM type: YTN; PAM sequence: CTC
acctaagtgagttaacctta

SEQ ID NO: 78713 - DNA, 20 bp, Artificial Sequence
  Description of Artificial Sequence: Synthetic oligonucleotide
  Target: ATXN2; (-) strand; PAM type: YTN; PAM sequence: TTG
gaagaacaaaatgactcacc

SEQ ID NO: 78714 - DNA, 20 bp, Artificial Sequence
  Description of Artificial Sequence: Synthetic oligonucleotide
  Target: ATXN2; (-) strand; PAM type: YTN; PAM sequence: CTG
aaattggaagaacaaaatga

SEQ ID NO: 78715 - DNA, 20 bp, Artificial Sequence
  Description of Artificial Sequence: Synthetic oligonucleotide
  Target: ATXN2; (-) strand; PAM type: YTN; PAM sequence: CTA
ataataatgtaaacaacaac

SEQ ID NO: 78716 - DNA, 20 bp, Artificial Sequence
  Description of Artificial Sequence: Synthetic oligonucleotide
  Target: ATXN2; (-) strand; PAM type: YTN; PAM sequence: TTC
taataataatgtaaacaaca

SEQ ID NO: 78717 - DNA, 20 bp, Artificial Sequence
  Description of Artificial Sequence: Synthetic oligonucleotide
  Target: ATXN2; (-) strand; PAM type: YTN; PAM sequence: TTT
ctaataataatgtaaacaac

SEQ ID NO: 78718 - DNA, 20 bp, Artificial Sequence
  Description of Artificial Sequence: Synthetic oligonucleotide
  Target: ATXN2; (-) strand; PAM type: YTN; PAM sequence: CTT
tctaataataatgtaaacaa

SEQ ID NO: 78719 - DNA, 20 bp, Artificial Sequence
  Description of Artificial Sequence: Synthetic oligonucleotide
  Target: ATXN2; (-) strand; PAM type: YTN; PAM sequence: TTC
cctttctaataataatgtaa

SEQ ID NO: 78720 - DNA, 20 bp, Artificial Sequence
  Description of Artificial Sequence: Synthetic oligonucleotide
  Target: ATXN2; (-) strand; PAM type: YTN; PAM sequence: TTT
ccctttctaataataatgta

SEQ ID NO: 78721 - DNA, 20 bp, Artificial Sequence
  Description of Artificial Sequence: Synthetic oligonucleotide
  Target: ATXN2; (-) strand; PAM type: YTN; PAM sequence: TTC
aatacgtggtataggatttc

SEQ ID NO: 78722 - DNA, 20 bp, Artificial Sequence
  Description of Artificial Sequence: Synthetic oligonucleotide
  Target: ATXN2; (-) strand; PAM type: YTN; PAM sequence: TTA
gggagaaaatattcaatacg

SEQ ID NO: 78723 - DNA, 20 bp, Artificial Sequence
  Description of Artificial Sequence: Synthetic oligonucleotide
  Target: ATXN2; (-) strand; PAM type: YTN; PAM sequence: TTT
agggagaaaatattcaatac

SEQ ID NO: 78724 - DNA, 20 bp, Artificial Sequence
  Description of Artificial Sequence: Synthetic oligonucleotide
  Target: ATXN2; (-) strand; PAM type: YTN; PAM sequence: TTT
tagggagaaaatattcaata

SEQ ID NO: 78725 - DNA, 20 bp, Artificial Sequence
  Description of Artificial Sequence: Synthetic oligonucleotide
  Target: ATXN2; (-) strand; PAM type: YTN; PAM sequence: TTT
ttagggagaaaatattcaat

SEQ ID NO: 78726 - DNA, 20 bp, Artificial Sequence
  Description of Artificial Sequence: Synthetic oligonucleotide
  Target: ATXN2; (-) strand; PAM type: YTN; PAM sequence: CTT
tttagggagaaaatattcaa

SEQ ID NO: 78727 - DNA, 20 bp, Artificial Sequence
  Description of Artificial Sequence: Synthetic oligonucleotide
  Target: ATXN2; (-) strand; PAM type: YTN; PAM sequence: CTC
aactttttagggagaaaata

SEQ ID NO: 78728 - DNA, 20 bp, Artificial Sequence
  Description of Artificial Sequence: Synthetic oligonucleotide
  Target: ATXN2; (-) strand; PAM type: YTN; PAM sequence: TTG
actcaactttttagggagaa

SEQ ID NO: 78729 - DNA, 20 bp, Artificial Sequence
  Description of Artificial Sequence: Synthetic oligonucleotide
  Target: ATXN2; (-) strand; PAM type: YTN; PAM sequence: TTT
gactcaactttttagggaga

SEQ ID NO: 78730 - DNA, 20 bp, Artificial Sequence
  Description of Artificial Sequence: Synthetic oligonucleotide
  Target: ATXN2; (-) strand; PAM type: YTN; PAM sequence: CTC
atttgactcaactttttagg

SEQ ID NO: 78731 - DNA, 20 bp, Artificial Sequence
  Description of Artificial Sequence: Synthetic oligonucleotide
  Target: ATXN2; (-) strand; PAM type: YTN; PAM sequence: TTG
ccacctcatttgactcaact

SEQ ID NO: 78732 - DNA, 20 bp, Artificial Sequence
  Description of Artificial Sequence: Synthetic oligonucleotide
  Target: ATXN2; (-) strand; PAM type: YTN; PAM sequence: CTT
gccacctcatttgactcaac

SEQ ID NO: 78733 - DNA, 20 bp, Artificial Sequence
  Description of Artificial Sequence: Synthetic oligonucleotide
  Target: ATXN2; (-) strand; PAM type: YTN; PAM sequence: CTC
ttgccacctcatttgactca

SEQ ID NO: 78734 - DNA, 20 bp, Artificial Sequence
  Description of Artificial Sequence: Synthetic oligonucleotide
  Target: ATXN2; (-) strand; PAM type: YTN; PAM sequence: CTA
ccccctcttgccacctcatt

SEQ ID NO: 78735 - DNA, 20 bp, Artificial Sequence
  Description of Artificial Sequence: Synthetic oligonucleotide
  Target: ATXN2; (-) strand; PAM type: YTN; PAM sequence: TTG
tcatggcctaccccctcttg

SEQ ID NO: 78736 - DNA, 20 bp, Artificial Sequence
  Description of Artificial Sequence: Synthetic oligonucleotide
  Target: ATXN2; (-) strand; PAM type: YTN; PAM sequence: TTG
ggttgtcatggcctaccccc

SEQ ID NO: 78737 - DNA, 20 bp, Artificial Sequence
  Description of Artificial Sequence: Synthetic oligonucleotide
  Target: ATXN2; (-) strand; PAM type: YTN; PAM sequence: TTT
gggttgtcatggcctacccc

SEQ ID NO: 78738 - DNA, 20 bp, Artificial Sequence
  Description of Artificial Sequence: Synthetic oligonucleotide
  Target: ATXN2; (-) strand; PAM type: YTN; PAM sequence: CTG
tgtttgggttgtcatggcct

SEQ ID NO: 78739 - DNA, 20 bp, Artificial Sequence
  Description of Artificial Sequence: Synthetic oligonucleotide
  Target: ATXN2; (-) strand; PAM type: YTN; PAM sequence: TTC
actgtgtttgggttgtcatg

SEQ ID NO: 78740 - DNA, 20 bp, Artificial Sequence
  Description of Artificial Sequence: Synthetic oligonucleotide
  Target: ATXN2; (-) strand; PAM type: YTN; PAM sequence: CTT
cactgtgtttgggttgtcat

SEQ ID NO: 78741 - DNA, 20 bp, Artificial Sequence
  Description of Artificial Sequence: Synthetic oligonucleotide
  Target: ATXN2; (-) strand; PAM type: YTN; PAM sequence: CTA
gcttcactgtgtttgggttg

SEQ ID NO: 78742 - DNA, 20 bp, Artificial Sequence
  Description of Artificial Sequence: Synthetic oligonucleotide
  Target: ATXN2; (-) strand; PAM type: YTN; PAM sequence: CTC
tagcttcactgtgtttgggt

SEQ ID NO: 78743 - DNA, 20 bp, Artificial Sequence
  Description of Artificial Sequence: Synthetic oligonucleotide
  Target: ATXN2; (-) strand; PAM type: YTN; PAM sequence: CTA
aaaacaaaacaaaacaaaac

SEQ ID NO: 78744 - DNA, 20 bp, Artificial Sequence
  Description of Artificial Sequence: Synthetic oligonucleotide
  Target: ATXN2; (-) strand; PAM type: YTN; PAM sequence: TTC
ctaaaaacaaaacaaaacaa

SEQ ID NO: 78745 - DNA, 20 bp, Artificial Sequence
  Description of Artificial Sequence: Synthetic oligonucleotide
  Target: ATXN2; (-) strand; PAM type: YTN; PAM sequence: TTT
cctaaaaacaaaacaaaaca

SEQ ID NO: 78746 - DNA, 20 bp, Artificial Sequence
  Description of Artificial Sequence: Synthetic oligonucleotide
  Target: ATXN2; (-) strand; PAM type: YTN; PAM sequence: CTC
agtttcctaaaaacaaaaca

SEQ ID NO: 78747 - DNA, 20 bp, Artificial Sequence
  Description of Artificial Sequence: Synthetic oligonucleotide
  Target: ATXN2; (-) strand; PAM type: YTN; PAM sequence: TTC
ccacctcagtttcctaaaaa

SEQ ID NO: 78748 - DNA, 20 bp, Artificial Sequence
  Description of Artificial Sequence: Synthetic oligonucleotide
  Target: ATXN2; (-) strand; PAM type: YTN; PAM sequence: CTT
cccacctcagtttcctaaaa

SEQ ID NO: 78749 - DNA, 20 bp, Artificial Sequence
  Description of Artificial Sequence: Synthetic oligonucleotide
  Target: ATXN2; (-) strand; PAM type: YTN; PAM sequence: TTG
ccttcccacctcagtttcct

SEQ ID NO: 78750 - DNA, 20 bp, Artificial Sequence
  Description of Artificial Sequence: Synthetic oligonucleotide
  Target: ATXN2; (-) strand; PAM type: YTN; PAM sequence: TTA
gagttgccttcccacctcag

SEQ ID NO: 78751 - DNA, 20 bp, Artificial Sequence
  Description of Artificial Sequence: Synthetic oligonucleotide
  Target: ATXN2; (-) strand; PAM type: YTN; PAM sequence: TTT
agagttgccttcccacctca

SEQ ID NO: 78752 - DNA, 20 bp, Artificial Sequence
  Description of Artificial Sequence: Synthetic oligonucleotide
  Target: ATXN2; (-) strand; PAM type: YTN; PAM sequence: CTG
tgtgaatttagagttgcctt

SEQ ID NO: 78753 - DNA, 20 bp, Artificial Sequence
  Description of Artificial Sequence: Synthetic oligonucleotide
  Target: ATXN2; (-) strand; PAM type: YTN; PAM sequence: TTC
tgtgtgaatttagagttgcc

SEQ ID NO: 78754 - DNA, 20 bp, Artificial Sequence
  Description of Artificial Sequence: Synthetic oligonucleotide
  Target: ATXN2; (-) strand; PAM type: YTN; PAM sequence: TTG
ttctgtgtgaatttagagtt

SEQ ID NO: 78755 - DNA, 20 bp, Artificial Sequence
  Description of Artificial Sequence: Synthetic oligonucleotide
  Target: ATXN2; (-) strand; PAM type: YTN; PAM sequence: CTG
gcagttgttctgtgtgaatt

SEQ ID NO: 78756 - DNA, 20 bp, Artificial Sequence
  Description of Artificial Sequence: Synthetic oligonucleotide
  Target: ATXN2; (-) strand; PAM type: YTN; PAM sequence: TTA
atctggcagttgttctgtgt

SEQ ID NO: 78757 - DNA, 20 bp, Artificial Sequence
  Description of Artificial Sequence: Synthetic oligonucleotide
  Target: ATXN2; (-) strand; PAM type: YTN; PAM sequence: TTA
tatgaccggattaatctggc

SEQ ID NO: 78758 - DNA, 20 bp, Artificial Sequence
  Description of Artificial Sequence: Synthetic oligonucleotide
  Target: ATXN2; (-) strand; PAM type: YTN; PAM sequence: CTA
gatgattatatgaccggatt

SEQ ID NO: 78759 - DNA, 20 bp, Artificial Sequence
  Description of Artificial Sequence: Synthetic oligonucleotide
  Target: ATXN2; (-) strand; PAM type: YTN; PAM sequence: TTG
aaacaatgatcctagatgat

SEQ ID NO: 78760 - DNA, 20 bp, Artificial Sequence
  Description of Artificial Sequence: Synthetic oligonucleotide
  Target: ATXN2; (-) strand; PAM type: YTN; PAM sequence: TTT
gaaacaatgatcctagatga

SEQ ID NO: 78761 - DNA, 20 bp, Artificial Sequence
  Description of Artificial Sequence: Synthetic oligonucleotide
  Target: ATXN2; (-) strand; PAM type: YTN; PAM sequence: TTT
tgaaacaatgatcctagatg

SEQ ID NO: 78762 - DNA, 20 bp, Artificial Sequence
  Description of Artificial Sequence: Synthetic oligonucleotide
  Target: ATXN2; (-) strand; PAM type: YTN; PAM sequence: TTG
ttttgaaacaatgatcctag

SEQ ID NO: 78763 - DNA, 20 bp, Artificial Sequence
  Description of Artificial Sequence: Synthetic oligonucleotide
  Target: ATXN2; (-) strand; PAM type: YTN; PAM sequence: TTG
tgtgaatggtaattgttttg

SEQ ID NO: 78764 - DNA, 20 bp, Artificial Sequence
  Description of Artificial Sequence: Synthetic oligonucleotide
  Target: ATXN2; (-) strand; PAM type: YTN; PAM sequence: CTT
gtgtgaatggtaattgtttt

SEQ ID NO: 78765 - DNA, 20 bp, Artificial Sequence
  Description of Artificial Sequence: Synthetic oligonucleotide
  Target: ATXN2; (-) strand; PAM type: YTN; PAM sequence: TTC
ttgtgtgaatggtaattgtt

SEQ ID NO: 78766 - DNA, 20 bp, Artificial Sequence
  Description of Artificial Sequence: Synthetic oligonucleotide
  Target: ATXN2; (-) strand; PAM type: YTN; PAM sequence: TTA
gttcttgtgtgaatggtaat

SEQ ID NO: 78767 - DNA, 20 bp, Artificial Sequence
  Description of Artificial Sequence: Synthetic oligonucleotide
  Target: ATXN2; (-) strand; PAM type: YTN; PAM sequence: CTG
atattagttcttgtgtgaat

SEQ ID NO: 78768 - DNA, 20 bp, Artificial Sequence
  Description of Artificial Sequence: Synthetic oligonucleotide
  Target: ATXN2; (-) strand; PAM type: YTN; PAM sequence: TTA
atgctgatattagttcttgt

SEQ ID NO: 78769 - DNA, 20 bp, Artificial Sequence
  Description of Artificial Sequence: Synthetic oligonucleotide
  Target: ATXN2; (-) strand; PAM type: YTN; PAM sequence: TTG
aacccaagcaattaatgctg

SEQ ID NO: 78770 - DNA, 20 bp, Artificial Sequence
  Description of Artificial Sequence: Synthetic oligonucleotide
  Target: ATXN2; (-) strand; PAM type: YTN; PAM sequence: TTT
gaacccaagcaattaatgct

SEQ ID NO: 78771 - DNA, 20 bp, Artificial Sequence
  Description of Artificial Sequence: Synthetic oligonucleotide
  Target: ATXN2; (-) strand; PAM type: YTN; PAM sequence: CTG
agaagtgatggagccggaat

SEQ ID NO: 78772 - DNA, 20 bp, Artificial Sequence
  Description of Artificial Sequence: Synthetic oligonucleotide
  Target: ATXN2; (-) strand; PAM type: YTN; PAM sequence: TTA
aggccacagagctgagaagt

SEQ ID NO: 78773 - DNA, 20 bp, Artificial Sequence
  Description of Artificial Sequence: Synthetic oligonucleotide
  Target: ATXN2; (-) strand; PAM type: YTN; PAM sequence: CTG
aagtcacaggattaaggcca

SEQ ID NO: 78774 - DNA, 20 bp, Artificial Sequence
  Description of Artificial Sequence: Synthetic oligonucleotide
  Target: ATXN2; (-) strand; PAM type: YTN; PAM sequence: TTG
aaacacagagagctgaagtc

SEQ ID NO: 78775 - DNA, 20 bp, Artificial Sequence
  Description of Artificial Sequence: Synthetic oligonucleotide
  Target: ATXN2; (-) strand; PAM type: YTN; PAM sequence: TTG
aaattgaaacacagagagct

SEQ ID NO: 78776 - DNA, 20 bp, Artificial Sequence
  Description of Artificial Sequence: Synthetic oligonucleotide
  Target: ATXN2; (-) strand; PAM type: YTN; PAM sequence: TTC
atagatgttgaaattgaaac

SEQ ID NO: 78777 - DNA, 20 bp, Artificial Sequence
  Description of Artificial Sequence: Synthetic oligonucleotide
  Target: ATXN2; (-) strand; PAM type: YTN; PAM sequence: TTT
catagatgttgaaattgaaa

SEQ ID NO: 78778 - DNA, 20 bp, Artificial Sequence
  Description of Artificial Sequence: Synthetic oligonucleotide
  Target: ATXN2; (-) strand; PAM type: YTN; PAM sequence: TTC
atttcatagatgttgaaatt

SEQ ID NO: 78779 - DNA, 20 bp, Artificial Sequence
  Description of Artificial Sequence: Synthetic oligonucleotide
  Target: ATXN2; (-) strand; PAM type: YTN; PAM sequence: CTT
catttcatagatgttgaaat

SEQ ID NO: 78780 - DNA, 20 bp, Artificial Sequence
  Description of Artificial Sequence: Synthetic oligonucleotide
  Target: ATXN2; (-) strand; PAM type: YTN; PAM sequence: TTC
atcttcatttcatagatgtt

SEQ ID NO: 78781 - DNA, 20 bp, Artificial Sequence
  Description of Artificial Sequence: Synthetic oligonucleotide
  Target: ATXN2; (-) strand; PAM type: YTN; PAM sequence: TTT
catcttcatttcatagatgt

SEQ ID NO: 78782 - DNA, 20 bp, Artificial Sequence
  Description of Artificial Sequence: Synthetic oligonucleotide
  Target: ATXN2; (-) strand; PAM type: YTN; PAM sequence: TTT
tcatcttcatttcatagatg

SEQ ID NO: 78783 - DNA, 20 bp, Artificial Sequence
  Description of Artificial Sequence: Synthetic oligonucleotide
  Target: ATXN2; (-) strand; PAM type: YTN; PAM sequence: CTA
ttttcatcttcatttcatag

SEQ ID NO: 78784 - DNA, 20 bp, Artificial Sequence
  Description of Artificial Sequence: Synthetic oligonucleotide
  Target: ATXN2; (-) strand; PAM type: YTN; PAM sequence: TTG
agaaggtactattttcatct

SEQ ID NO: 78785 - DNA, 20 bp, Artificial Sequence
  Description of Artificial Sequence: Synthetic oligonucleotide
  Target: ATXN2; (-) strand; PAM type: YTN; PAM sequence: TTT
gagaaggtactattttcatc

SEQ ID NO: 78786 - DNA, 20 bp, Artificial Sequence
  Description of Artificial Sequence: Synthetic oligonucleotide
  Target: ATXN2; (-) strand; PAM type: YTN; PAM sequence: TTT
tgagaaggtactattttcat

SEQ ID NO: 78787 - DNA, 20 bp, Artificial Sequence
  Description of Artificial Sequence: Synthetic oligonucleotide
  Target: ATXN2; (-) strand; PAM type: YTN; PAM sequence: CTT
ttgagaaggtactattttca

SEQ ID NO: 78788 - DNA, 20 bp, Artificial Sequence
  Description of Artificial Sequence: Synthetic oligonucleotide
  Target: ATXN2; (-) strand; PAM type: YTN; PAM sequence: TTC
ttttgagaaggtactatttt

SEQ ID NO: 78789 - DNA, 20 bp, Artificial Sequence
  Description of Artificial Sequence: Synthetic oligonucleotide
  Target: ATXN2; (-) strand; PAM type: YTN; PAM sequence: TTT
cttttgagaaggtactattt

SEQ ID NO: 78790 - DNA, 20 bp, Artificial Sequence
  Description of Artificial Sequence: Synthetic oligonucleotide
  Target: ATXN2; (-) strand; PAM type: YTN; PAM sequence: TTT
tcttttgagaaggtactatt

SEQ ID NO: 78791 - DNA, 20 bp, Artificial Sequence
  Description of Artificial Sequence: Synthetic oligonucleotide
  Target: ATXN2; (-) strand; PAM type: YTN; PAM sequence: TTT
ttcttttgagaaggtactat

SEQ ID NO: 78792 - DNA, 20 bp, Artificial Sequence
  Description of Artificial Sequence: Synthetic oligonucleotide
  Target: ATXN2; (-) strand; PAM type: YTN; PAM sequence: TTT
tttcttttgagaaggtacta

SEQ ID NO: 78793 - DNA, 20 bp, Artificial Sequence
  Description of Artificial Sequence: Synthetic oligonucleotide
  Target: ATXN2; (-) strand; PAM type: YTN; PAM sequence: TTT
ttttcttttgagaaggtact

SEQ ID NO: 78794 - DNA, 20 bp, Artificial Sequence
  Description of Artificial Sequence: Synthetic oligonucleotide
  Target: ATXN2; (-) strand; PAM type: YTN; PAM sequence: TTT
tttttcttttgagaaggtac

SEQ ID NO: 78795 - DNA, 20 bp, Artificial Sequence
  Description of Artificial Sequence: Synthetic oligonucleotide
  Target: ATXN2; (-) strand; PAM type: YTN; PAM sequence: CTA
ttttttttcttttgagaagg

SEQ ID NO: 78796 - DNA, 20 bp, Artificial Sequence
  Description of Artificial Sequence: Synthetic oligonucleotide
  Target: ATXN2; (-) strand; PAM type: YTN; PAM sequence: TTA
tgaaaagatactattttttt

SEQ ID NO: 78797 - DNA, 20 bp, Artificial Sequence
  Description of Artificial Sequence: Synthetic oligonucleotide
  Target: ATXN2; (-) strand; PAM type: YTN; PAM sequence: CTT
atgaaaagatactatttttt

SEQ ID NO: 78798 - DNA, 20 bp, Artificial Sequence
  Description of Artificial Sequence: Synthetic oligonucleotide
  Target: ATXN2; (-) strand; PAM type: YTN; PAM sequence: TTC
cacaaccttatgaaaagata

SEQ ID NO: 78799 - DNA, 20 bp, Artificial Sequence
  Description of Artificial Sequence: Synthetic oligonucleotide
  Target: ATXN2; (-) strand; PAM type: YTN; PAM sequence: TTT
ccacaaccttatgaaaagat

SEQ ID NO: 78800 - DNA, 20 bp, Artificial Sequence
  Description of Artificial Sequence: Synthetic oligonucleotide
  Target: ATXN2; (-) strand; PAM type: YTN; PAM sequence: TTA
atttccacaaccttatgaaa

SEQ ID NO: 78801 - DNA, 20 bp, Artificial Sequence
  Description of Artificial Sequence: Synthetic oligonucleotide
  Target: ATXN2; (-) strand; PAM type: YTN; PAM sequence: CTT
aatttccacaaccttatgaa

SEQ ID NO: 78802 - DNA, 20 bp, Artificial Sequence
  Description of Artificial Sequence: Synthetic oligonucleotide
  Target: ATXN2; (-) strand; PAM type: YTN; PAM sequence: TTA
cttaatttccacaaccttat

SEQ ID NO: 78803 - DNA, 20 bp, Artificial Sequence
  Description of Artificial Sequence: Synthetic oligonucleotide
  Target: ATXN2; (-) strand; PAM type: YTN; PAM sequence: CTG
tatggaatattacttaattt

SEQ ID NO: 78804 - DNA, 20 bp, Artificial Sequence
  Description of Artificial Sequence: Synthetic oligonucleotide
  Target: ATXN2; (-) strand; PAM type: YTN; PAM sequence: CTA
tgcgatctgtatggaatatt

SEQ ID NO: 78805 - DNA, 20 bp, Artificial Sequence
  Description of Artificial Sequence: Synthetic oligonucleotide
  Target: ATXN2; (-) strand; PAM type: YTN; PAM sequence: TTA
agctatgcgatctgtatgga

SEQ ID NO: 78806 - DNA, 20 bp, Artificial Sequence
  Description of Artificial Sequence: Synthetic oligonucleotide
  Target: ATXN2; (-) strand; PAM type: YTN; PAM sequence: TTT
aagctatgcgatctgtatgg

SEQ ID NO: 78807 - DNA, 20 bp, Artificial Sequence
  Description of Artificial Sequence: Synthetic oligonucleotide
  Target: ATXN2; (-) strand; PAM type: YTN; PAM sequence: TTT
taagctatgcgatctgtatg

SEQ ID NO: 78808 - DNA, 20 bp, Artificial Sequence
  Description of Artificial Sequence: Synthetic oligonucleotide
  Target: ATXN2; (-) strand; PAM type: YTN; PAM sequence: CTG
ttttaagctatgcgatctgt

SEQ ID NO: 78809 - DNA, 20 bp, Artificial Sequence
  Description of Artificial Sequence: Synthetic oligonucleotide
  Target: ATXN2; (-) strand; PAM type: YTN; PAM sequence: TTA
ataacataccaggcactgtt

SEQ ID NO: 78810 - DNA, 20 bp, Artificial Sequence
  Description of Artificial Sequence: Synthetic oligonucleotide
  Target: ATXN2; (-) strand; PAM type: YTN; PAM sequence: CTT
aataacataccaggcactgt

SEQ ID NO: 78811 - DNA, 20 bp, Artificial Sequence
  Description of Artificial Sequence: Synthetic oligonucleotide
  Target: ATXN2; (-) strand; PAM type: YTN; PAM sequence: TTA
aacacttaataacataccag

SEQ ID NO: 78812 - DNA, 20 bp, Artificial Sequence
  Description of Artificial Sequence: Synthetic oligonucleotide
  Target: ATXN2; (-) strand; PAM type: YTN; PAM sequence: TTA
ttaaacacttaataacatac

SEQ ID NO: 78813 - DNA, 20 bp, Artificial Sequence
  Description of Artificial Sequence: Synthetic oligonucleotide
  Target: ATXN2; (-) strand; PAM type: YTN; PAM sequence: CTA
gcagttattaaacacttaat

SEQ ID NO: 78814 - DNA, 20 bp, Artificial Sequence
  Description of Artificial Sequence: Synthetic oligonucleotide
  Target: ATXN2; (-) strand; PAM type: YTN; PAM sequence: TTA
gctagcagttattaaacact

SEQ ID NO: 78815 - DNA, 20 bp, Artificial Sequence
  Description of Artificial Sequence: Synthetic oligonucleotide
  Target: ATXN2; (-) strand; PAM type: YTN; PAM sequence: TTA
tattagctagcagttattaa

SEQ ID NO: 78816 - DNA, 20 bp, Artificial Sequence
  Description of Artificial Sequence: Synthetic oligonucleotide
  Target: ATXN2; (-) strand; PAM type: YTN; PAM sequence: CTG
gaatatgaggaaataattat

SEQ ID NO: 78817 - DNA, 20 bp, Artificial Sequence
  Description of Artificial Sequence: Synthetic oligonucleotide
  Target: ATXN2; (-) strand; PAM type: YTN; PAM sequence: CTA
gtgtatgctggaatatgagg

SEQ ID NO: 78818 - DNA, 20 bp, Artificial Sequence
  Description of Artificial Sequence: Synthetic oligonucleotide
  Target: ATXN2; (-) strand; PAM type: YTN; PAM sequence: CTC
tagtgtatgctggaatatga

SEQ ID NO: 78819 - DNA, 20 bp, Artificial Sequence
  Description of Artificial Sequence: Synthetic oligonucleotide
  Target: ATXN2; (-) strand; PAM type: YTN; PAM sequence: CTA
ctctagtgtatgctggaata

SEQ ID NO: 78820 - DNA, 20 bp, Artificial Sequence
  Description of Artificial Sequence: Synthetic oligonucleotide
  Target: ATXN2; (-) strand; PAM type: YTN; PAM sequence: TTA
ctactctagtgtatgctgga

SEQ ID NO: 78821 - DNA, 20 bp, Artificial Sequence
  Description of Artificial Sequence: Synthetic oligonucleotide
  Target: ATXN2; (-) strand; PAM type: YTN; PAM sequence: TTT
actactctagtgtatgctgg

SEQ ID NO: 78822 - DNA, 20 bp, Artificial Sequence
  Description of Artificial Sequence: Synthetic oligonucleotide
  Target: ATXN2; (-) strand; PAM type: YTN; PAM sequence: CTT
tactactctagtgtatgctg

SEQ ID NO: 78823 - DNA, 20 bp, Artificial Sequence
  Description of Artificial Sequence: Synthetic oligonucleotide
  Target: ATXN2; (-) strand; PAM type: YTN; PAM sequence: CTC
ctttactactctagtgtatg

SEQ ID NO: 78824 - DNA, 20 bp, Artificial Sequence
  Description of Artificial Sequence: Synthetic oligonucleotide
  Target: ATXN2; (-) strand; PAM type: YTN; PAM sequence: TTC
tcctttactactctagtgta

SEQ ID NO: 78825 - DNA, 20 bp, Artificial Sequence
  Description of Artificial Sequence: Synthetic oligonucleotide
  Target: ATXN2; (-) strand; PAM type: YTN; PAM sequence: TTT
ctcctttactactctagtgt

SEQ ID NO: 78826 - DNA, 20 bp, Artificial Sequence
  Description of Artificial Sequence: Synthetic oligonucleotide
  Target: ATXN2; (-) strand; PAM type: YTN; PAM sequence: TTT
tctcctttactactctagtg

SEQ ID NO: 78827 - DNA, 20 bp, Artificial Sequence
  Description of Artificial Sequence: Synthetic oligonucleotide
  Target: ATXN2; (-) strand; PAM type: YTN; PAM sequence: TTT
ttctcctttactactctagt

SEQ ID NO: 78828 - DNA, 20 bp, Artificial Sequence
  Description of Artificial Sequence: Synthetic oligonucleotide
  Target: ATXN2; (-) strand; PAM type: YTN; PAM sequence: TTT
tttctcctttactactctag

SEQ ID NO: 78829 - DNA, 20 bp, Artificial Sequence
  Description of Artificial Sequence: Synthetic oligonucleotide
  Target: ATXN2; (-) strand; PAM type: YTN; PAM sequence: TTT
ttttctcctttactactcta

SEQ ID NO: 78830 - DNA, 20 bp, Artificial Sequence
  Description of Artificial Sequence: Synthetic oligonucleotide
  Target: ATXN2; (-) strand; PAM type: YTN; PAM sequence: TTT
tttttctcctttactactct

SEQ ID NO: 78831 - DNA, 20 bp, Artificial Sequence
  Description of Artificial Sequence: Synthetic oligonucleotide
  Target: ATXN2; (-) strand; PAM type: YTN; PAM sequence: CTT
ttttttctcctttactactc

SEQ ID NO: 78832 - DNA, 20 bp, Artificial Sequence
  Description of Artificial Sequence: Synthetic oligonucleotide
  Target: ATXN2; (-) strand; PAM type: YTN; PAM sequence: CTG
gccttttttttctcctttac

SEQ ID NO: 78833 - DNA, 20 bp, Artificial Sequence
  Description of Artificial Sequence: Synthetic oligonucleotide
  Target: ATXN2; (-) strand; PAM type: YTN; PAM sequence: CTG
cgactggccttttttttctc

SEQ ID NO: 78834 - DNA, 20 bp, Artificial Sequence
  Description of Artificial Sequence: Synthetic oligonucleotide
  Target: ATXN2; (-) strand; PAM type: YTN; PAM sequence: TTG
caggtgtgggccactgcgac

SEQ ID NO: 78835 - DNA, 20 bp, Artificial Sequence
  Description of Artificial Sequence: Synthetic oligonucleotide
  Target: ATXN2; (-) strand; PAM type: YTN; PAM sequence: CTG
ggattgcaggtgtgggccac

SEQ ID NO: 78836 - DNA, 20 bp, Artificial Sequence
  Description of Artificial Sequence: Synthetic oligonucleotide
  Target: ATXN2; (-) strand; PAM type: YTN; PAM sequence: CTC
ccagagtgctgggattgcag

SEQ ID NO: 78837 - DNA, 20 bp, Artificial Sequence
  Description of Artificial Sequence: Synthetic oligonucleotide
  Target: ATXN2; (-) strand; PAM type: YTN; PAM sequence: TTG
gcctcccagagtgctgggat

SEQ ID NO: 78838 - DNA, 20 bp, Artificial Sequence
  Description of Artificial Sequence: Synthetic oligonucleotide
  Target: ATXN2; (-) strand; PAM type: YTN; PAM sequence: CTT
ggcctcccagagtgctggga

SEQ ID NO: 78839 - DNA, 20 bp, Artificial Sequence
  Description of Artificial Sequence: Synthetic oligonucleotide
  Target: ATXN2; (-) strand; PAM type: YTN; PAM sequence: CTC
accttggcctcccagagtgc

SEQ ID NO: 78840 - DNA, 20 bp, Artificial Sequence
  Description of Artificial Sequence: Synthetic oligonucleotide
  Target: ATXN2; (-) strand; PAM type: YTN; PAM sequence: CTG
gactcaccttggcctcccag

SEQ ID NO: 78841 - DNA, 20 bp, Artificial Sequence
  Description of Artificial Sequence: Synthetic oligonucleotide
  Target: ATXN2; (-) strand; PAM type: YTN; PAM sequence: TTC
ctggactcaccttggcctcc

SEQ ID NO: 78842 - DNA, 20 bp, Artificial Sequence
  Description of Artificial Sequence: Synthetic oligonucleotide
  Target: ATXN2; (-) strand; PAM type: YTN; PAM sequence: CTC
aaattcctggactcaccttg

SEQ ID NO: 78843 - DNA, 20 bp, Artificial Sequence
  Description of Artificial Sequence: Synthetic oligonucleotide
  Target: ATXN2; (-) strand; PAM type: YTN; PAM sequence: CTG
gtctcaaattcctggactca

SEQ ID NO: 78844 - DNA, 20 bp, Artificial Sequence
  Description of Artificial Sequence: Synthetic oligonucleotide
  Target: ATXN2; (-) strand; PAM type: YTN; PAM sequence: TTG
tccaggctggtctcaaattc

SEQ ID NO: 78845 - DNA, 20 bp, Artificial Sequence
  Description of Artificial Sequence: Synthetic oligonucleotide
  Target: ATXN2; (-) strand; PAM type: YTN; PAM sequence: TTC
gccatgttgtccaggctggt

SEQ ID NO: 78846 - DNA, 20 bp, Artificial Sequence
  Description of Artificial Sequence: Synthetic oligonucleotide
  Target: ATXN2; (-) strand; PAM type: YTN; PAM sequence: TTT
cgccatgttgtccaggctgg

SEQ ID NO: 78847 - DNA, 20 bp, Artificial Sequence
  Description of Artificial Sequence: Synthetic oligonucleotide
  Target: ATXN2; (-) strand; PAM type: YTN; PAM sequence: CTG
tagagacgagatttcgccat

SEQ ID NO: 78848 - DNA, 20 bp, Artificial Sequence
  Description of Artificial Sequence: Synthetic oligonucleotide
  Target: ATXN2; (-) strand; PAM type: YTN; PAM sequence: TTC
tgtagagacgagatttcgcc

SEQ ID NO: 78849 - DNA, 20 bp, Artificial Sequence
  Description of Artificial Sequence: Synthetic oligonucleotide
  Target: ATXN2; (-) strand; PAM type: YTN; PAM sequence: TTT
ctgtagagacgagatttcgc

SEQ ID NO: 78850 - DNA, 20 bp, Artificial Sequence
  Description of Artificial Sequence: Synthetic oligonucleotide
  Target: ATXN2; (-) strand; PAM type: YTN; PAM sequence: CTT
tctgtagagacgagatttcg

SEQ ID NO: 78851 - DNA, 20 bp, Artificial Sequence
  Description of Artificial Sequence: Synthetic oligonucleotide
  Target: ATXN2; (-) strand; PAM type: YTN; PAM sequence: TTA
aaactttctgtagagacgag

SEQ ID NO: 78852 - DNA, 20 bp, Artificial Sequence
  Description of Artificial Sequence: Synthetic oligonucleotide
  Target: ATXN2; (-) strand; PAM type: YTN; PAM sequence: TTT
aaaactttctgtagagacga

SEQ ID NO: 78853 - DNA, 20 bp, Artificial Sequence
  Description of Artificial Sequence: Synthetic oligonucleotide
  Target: ATXN2; (-) strand; PAM type: YTN; PAM sequence: TTT
taaaactttctgtagagacg

SEQ ID NO: 78854 - DNA, 20 bp, Artificial Sequence
  Description of Artificial Sequence: Synthetic oligonucleotide
  Target: ATXN2; (-) strand; PAM type: YTN; PAM sequence: TTT
ttaaaactttctgtagagac

SEQ ID NO: 78855 - DNA, 20 bp, Artificial Sequence
  Description of Artificial Sequence: Synthetic oligonucleotide
  Target: ATXN2; (-) strand; PAM type: YTN; PAM sequence: CTA
atttttaaaactttctgtag

SEQ ID NO: 78856 - DNA, 20 bp, Artificial Sequence
  Description of Artificial Sequence: Synthetic oligonucleotide
  Target: ATXN2; (-) strand; PAM type: YTN; PAM sequence: CTG
cctaatttttaaaactttct

SEQ ID NO: 78857 - DNA, 20 bp, Artificial Sequence
  Description of Artificial Sequence: Synthetic oligonucleotide
  Target: ATXN2; (-) strand; PAM type: YTN; PAM sequence: CTG
taggcatgagccaccacacc

SEQ ID NO: 78858 - DNA, 20 bp, Artificial Sequence
  Description of Artificial Sequence: Synthetic oligonucleotide
  Target: ATXN2; (-) strand; PAM type: YTN; PAM sequence: CTG
gaactgtaggcatgagccac

SEQ ID NO: 78859 - DNA, 20 bp, Artificial Sequence
  Description of Artificial Sequence: Synthetic oligonucleotide
  Target: ATXN2; (-) strand; PAM type: YTN; PAM sequence: CTC
ccaagtaactggaactgtag

SEQ ID NO: 78860 - DNA, 20 bp, Artificial Sequence
  Description of Artificial Sequence: Synthetic oligonucleotide
  Target: ATXN2; (-) strand; PAM type: YTN; PAM sequence: CTC
agctcccaagtaactggaac

SEQ ID NO: 78861 - DNA, 20 bp, Artificial Sequence
  Description of Artificial Sequence: Synthetic oligonucleotide
  Target: ATXN2; (-) strand; PAM type: YTN; PAM sequence: CTC
ccacctcagctcccaagtaa

SEQ ID NO: 78862 - DNA, 20 bp, Artificial Sequence
  Description of Artificial Sequence: Synthetic oligonucleotide
  Target: ATXN2; (-) strand; PAM type: YTN; PAM sequence: TTA
agtgatcctcccacctcagc

SEQ ID NO: 78863 - DNA, 20 bp, Artificial Sequence
  Description of Artificial Sequence: Synthetic oligonucleotide
  Target: ATXN2; (-) strand; PAM type: YTN; PAM sequence: CTT
aagtgatcctcccacctcag

SEQ ID NO: 78864 - DNA, 20 bp, Artificial Sequence
  Description of Artificial Sequence: Synthetic oligonucleotide
  Target: ATXN2; (-) strand; PAM type: YTN; PAM sequence: CTG
ggcttaagtgatcctcccac

SEQ ID NO: 78865 - DNA, 20 bp, Artificial Sequence
  Description of Artificial Sequence: Synthetic oligonucleotide
  Target: ATXN2; (-) strand; PAM type: YTN; PAM sequence: TTC
ctgggcttaagtgatcctcc

SEQ ID NO: 78866 - DNA, 20 bp, Artificial Sequence
  Description of Artificial Sequence: Synthetic oligonucleotide
  Target: ATXN2; (-) strand; PAM type: YTN; PAM sequence: CTT
cctgggcttaagtgatcctc

SEQ ID NO: 78867 - DNA, 20 bp, Artificial Sequence
  Description of Artificial Sequence: Synthetic oligonucleotide
  Target: ATXN2; (-) strand; PAM type: YTN; PAM sequence: CTC
gacttcctgggcttaagtga

SEQ ID NO: 78868 - DNA, 20 bp, Artificial Sequence
  Description of Artificial Sequence: Synthetic oligonucleotide
  Target: ATXN2; (-) strand; PAM type: YTN; PAM sequence: CTG
cagcctcgacttcctgggct

SEQ ID NO: 78869 - DNA, 20 bp, Artificial Sequence
  Description of Artificial Sequence: Synthetic oligonucleotide
  Target: ATXN2; (-) strand; PAM type: YTN; PAM sequence: CTC
actgcagcctcgacttcctg

SEQ ID NO: 78870 - DNA, 20 bp, Artificial Sequence
  Description of Artificial Sequence: Synthetic oligonucleotide
  Target: ATXN2; (-) strand; PAM type: YTN; PAM sequence: CTG
gctcactgcagcctcgactt

SEQ ID NO: 78871 - DNA, 20 bp, Artificial Sequence
  Description of Artificial Sequence: Synthetic oligonucleotide
  Target: ATXN2; (-) strand; PAM type: YTN; PAM sequence: CTG
gagtccagtggcatgatcct

SEQ ID NO: 78872 - DNA, 20 bp, Artificial Sequence
  Description of Artificial Sequence: Synthetic oligonucleotide
  Target: ATXN2; (-) strand; PAM type: YTN; PAM sequence: CTC
aggctggagtccagtggcat

SEQ ID NO: 78873 - DNA, 20 bp, Artificial Sequence
  Description of Artificial Sequence: Synthetic oligonucleotide
  Target: ATXN2; (-) strand; PAM type: YTN; PAM sequence: CTG
tcactcaggctggagtccag

SEQ ID NO: 78874 - DNA, 20 bp, Artificial Sequence
  Description of Artificial Sequence: Synthetic oligonucleotide
  Target: ATXN2; (-) strand; PAM type: YTN; PAM sequence: CTC
tgtcactcaggctggagtcc

SEQ ID NO: 78875 - DNA, 20 bp, Artificial Sequence
  Description of Artificial Sequence: Synthetic oligonucleotide
  Target: ATXN2; (-) strand; PAM type: YTN; PAM sequence: CTC
gctctgtcactcaggctgga

SEQ ID NO: 78876 - DNA, 20 bp, Artificial Sequence
  Description of Artificial Sequence: Synthetic oligonucleotide
  Target: ATXN2; (-) strand; PAM type: YTN; PAM sequence: TTA
agacagggtctcgctctgtc

SEQ ID NO: 78877 - DNA, 20 bp, Artificial Sequence
  Description of Artificial Sequence: Synthetic oligonucleotide
  Target: ATXN2; (-) strand; PAM type: YTN; PAM sequence: TTT
aagacagggtctcgctctgt

SEQ ID NO: 78878 - DNA, 20 bp, Artificial Sequence
  Description of Artificial Sequence: Synthetic oligonucleotide
  Target: ATXN2; (-) strand; PAM type: YTN; PAM sequence: TTT
taagacagggtctcgctctg

SEQ ID NO: 78879 - DNA, 20 bp, Artificial Sequence
  Description of Artificial Sequence: Synthetic oligonucleotide
  Target: ATXN2; (-) strand; PAM type: YTN; PAM sequence: TTC
atatgaagagtgtggtggtg

SEQ ID NO: 78880 - DNA, 20 bp, Artificial Sequence
  Description of Artificial Sequence: Synthetic oligonucleotide
  Target: ATXN2; (-) strand; PAM type: YTN; PAM sequence: CTT
catatgaagagtgtggtggt

SEQ ID NO: 78881 - DNA, 20 bp, Artificial Sequence
  Description of Artificial Sequence: Synthetic oligonucleotide
  Target: ATXN2; (-) strand; PAM type: YTN; PAM sequence: CTG
aaggggtaaaacttcatatg

SEQ ID NO: 78882 - DNA, 20 bp, Artificial Sequence
  Description of Artificial Sequence: Synthetic oligonucleotide
  Target: ATXN2; (-) strand; PAM type: YTN; PAM sequence: CTC
aaggggtaaaggcactgaag

SEQ ID NO: 78883 - DNA, 20 bp, Artificial Sequence
  Description of Artificial Sequence: Synthetic oligonucleotide
  Target: ATXN2; (-) strand; PAM type: YTN; PAM sequence: CTA
gagggactcaaggggtaaag

SEQ ID NO: 78884 - DNA, 20 bp, Artificial Sequence
  Description of Artificial Sequence: Synthetic oligonucleotide
  Target: ATXN2; (-) strand; PAM type: YTN; PAM sequence: CTC
tagagggactcaaggggtaa

SEQ ID NO: 78885 - DNA, 20 bp, Artificial Sequence
  Description of Artificial Sequence: Synthetic oligonucleotide
  Target: ATXN2; (-) strand; PAM type: YTN; PAM sequence: TTC
tctagagggactcaaggggt

SEQ ID NO: 78886 - DNA, 20 bp, Artificial Sequence
  Description of Artificial Sequence: Synthetic oligonucleotide
  Target: ATXN2; (-) strand; PAM type: YTN; PAM sequence: TTT
ctctagagggactcaagggg

SEQ ID NO: 78887 - DNA, 20 bp, Artificial Sequence
  Description of Artificial Sequence: Synthetic oligonucleotide
  Target: ATXN2; (-) strand; PAM type: YTN; PAM sequence: CTT
tctctagagggactcaaggg

SEQ ID NO: 78888 - DNA, 20 bp, Artificial Sequence
  Description of Artificial Sequence: Synthetic oligonucleotide
  Target: ATXN2; (-) strand; PAM type: YTN; PAM sequence: TTA
tccctttctctagagggact

SEQ ID NO: 78889 - DNA, 20 bp, Artificial Sequence
  Description of Artificial Sequence: Synthetic oligonucleotide
  Target: ATXN2; (-) strand; PAM type: YTN; PAM sequence: TTT
atccctttctctagagggac

SEQ ID NO: 78890 - DNA, 20 bp, Artificial Sequence
  Description of Artificial Sequence: Synthetic oligonucleotide
  Target: ATXN2; (-) strand; PAM type: YTN; PAM sequence: TTT
tatccctttctctagaggga

SEQ ID NO: 78891 - DNA, 20 bp, Artificial Sequence
  Description of Artificial Sequence: Synthetic oligonucleotide
  Target: ATXN2; (-) strand; PAM type: YTN; PAM sequence: CTT
ttatccctttctctagaggg

SEQ ID NO: 78892 - DNA, 20 bp, Artificial Sequence
  Description of Artificial Sequence: Synthetic oligonucleotide
  Target: ATXN2; (-) strand; PAM type: YTN; PAM sequence: TTC
atgaccaagccttttatccc

SEQ ID NO: 78893 - DNA, 20 bp, Artificial Sequence
  Description of Artificial Sequence: Synthetic oligonucleotide
  Target: ATXN2; (-) strand; PAM type: YTN; PAM sequence: CTT
catgaccaagccttttatcc

SEQ ID NO: 78894 - DNA, 20 bp, Artificial Sequence
  Description of Artificial Sequence: Synthetic oligonucleotide
  Target: ATXN2; (-) strand; PAM type: YTN; PAM sequence: TTC
atggcttcatgaccaagcct

SEQ ID NO: 78895 - DNA, 20 bp, Artificial Sequence
  Description of Artificial Sequence: Synthetic oligonucleotide
  Target: ATXN2; (-) strand; PAM type: YTN; PAM sequence: TTG
ttcatggcttcatgaccaag

SEQ ID NO: 78896 - DNA, 20 bp, Artificial Sequence
  Description of Artificial Sequence: Synthetic oligonucleotide
  Target: ATXN2; (-) strand; PAM type: YTN; PAM sequence: CTA
gttgttcatggcttcatgac

SEQ ID NO: 78897 - DNA, 20 bp, Artificial Sequence
  Description of Artificial Sequence: Synthetic oligonucleotide
  Target: ATXN2; (-) strand; PAM type: YTN; PAM sequence: TTG
gatctagttgttcatggctt

SEQ ID NO: 78898 - DNA, 20 bp, Artificial Sequence
  Description of Artificial Sequence: Synthetic oligonucleotide
  Target: ATXN2; (-) strand; PAM type: YTN; PAM sequence: CTA
ggttggatctagttgttcat

SEQ ID NO: 78899 - DNA, 20 bp, Artificial Sequence
  Description of Artificial Sequence: Synthetic oligonucleotide
  Target: ATXN2; (-) strand; PAM type: YTN; PAM sequence: TTG
gtgtgtctaggttggatcta

SEQ ID NO: 78900 - DNA, 20 bp, Artificial Sequence
  Description of Artificial Sequence: Synthetic oligonucleotide
  Target: ATXN2; (-) strand; PAM type: YTN; PAM sequence: TTT
ggtgtgtctaggttggatct

SEQ ID NO: 78901 - DNA, 20 bp, Artificial Sequence
  Description of Artificial Sequence: Synthetic oligonucleotide
  Target: ATXN2; (-) strand; PAM type: YTN; PAM sequence: TTT
tggtgtgtctaggttggatc

SEQ ID NO: 78902 - DNA, 20 bp, Artificial Sequence
  Description of Artificial Sequence: Synthetic oligonucleotide
  Target: ATXN2; (-) strand; PAM type: YTN; PAM sequence: TTT
ttggtgtgtctaggttggat

SEQ ID NO: 78903 - DNA, 20 bp, Artificial Sequence
  Description of Artificial Sequence: Synthetic oligonucleotide
  Target: ATXN2; (-) strand; PAM type: YTN; PAM sequence: TTT
tttggtgtgtctaggttgga

SEQ ID NO: 78904 - DNA, 20 bp, Artificial Sequence
  Description of Artificial Sequence: Synthetic oligonucleotide
  Target: ATXN2; (-) strand; PAM type: YTN; PAM sequence: TTG
gattttttggtgtgtctagg

SEQ ID NO: 78905 - DNA, 20 bp, Artificial Sequence
  Description of Artificial Sequence: Synthetic oligonucleotide
  Target: ATXN2; (-) strand; PAM type: YTN; PAM sequence: TTT
ggattttttggtgtgtctag

SEQ ID NO: 78906 - DNA, 20 bp, Artificial Sequence
  Description of Artificial Sequence: Synthetic oligonucleotide
  Target: ATXN2; (-) strand; PAM type: YTN; PAM sequence: TTG
tttggattttttggtgtgtc

SEQ ID NO: 78907 - DNA, 20 bp, Artificial Sequence
  Description of Artificial Sequence: Synthetic oligonucleotide
  Target: ATXN2; (-) strand; PAM type: YTN; PAM sequence: CTG
agttgtttggattttttggt

SEQ ID NO: 78908 - DNA, 20 bp, Artificial Sequence
  Description of Artificial Sequence: Synthetic oligonucleotide
  Target: ATXN2; (-) strand; PAM type: YTN; PAM sequence: CTA
cctgagttgtttggattttt

SEQ ID NO: 78909 - DNA, 20 bp, Artificial Sequence
  Description of Artificial Sequence: Synthetic oligonucleotide
  Target: ATXN2; (-) strand; PAM type: YTN; PAM sequence: TTC
tacctgagttgtttggattt

SEQ ID NO: 78910 - DNA, 20 bp, Artificial Sequence
  Description of Artificial Sequence: Synthetic oligonucleotide
  Target: ATXN2; (-) strand; PAM type: YTN; PAM sequence: TTT
ctacctgagttgtttggatt

SEQ ID NO: 78911 - DNA, 20 bp, Artificial Sequence
  Description of Artificial Sequence: Synthetic oligonucleotide
  Target: ATXN2; (-) strand; PAM type: YTN; PAM sequence: TTT
tctacctgagttgtttggat

SEQ ID NO: 78912 - DNA, 20 bp, Artificial Sequence
  Description of Artificial Sequence: Synthetic oligonucleotide
  Target: ATXN2; (-) strand; PAM type: YTN; PAM sequence: CTT
ttctacctgagttgtttgga

SEQ ID NO: 78913 - DNA, 20 bp, Artificial Sequence
  Description of Artificial Sequence: Synthetic oligonucleotide
  Target: ATXN2; (-) strand; PAM type: YTN; PAM sequence: CTA
agatccttttctacctgagt

SEQ ID NO: 78914 - DNA, 20 bp, Artificial Sequence
  Description of Artificial Sequence: Synthetic oligonucleotide
  Target: ATXN2; (-) strand; PAM type: YTN; PAM sequence: CTA
gagccctaagatccttttct

SEQ ID NO: 78915 - DNA, 20 bp, Artificial Sequence
  Description of Artificial Sequence: Synthetic oligonucleotide
  Target: ATXN2; (-) strand; PAM type: YTN; PAM sequence: TTG
gacagcatgggactagagcc

SEQ ID NO: 78916 - DNA, 20 bp, Artificial Sequence
  Description of Artificial Sequence: Synthetic oligonucleotide
  Target: ATXN2; (-) strand; PAM type: YTN; PAM sequence: CTT
ggacagcatgggactagagc

SEQ ID NO: 78917 - DNA, 20 bp, Artificial Sequence
  Description of Artificial Sequence: Synthetic oligonucleotide
  Target: ATXN2; (-) strand; PAM type: YTN; PAM sequence: CTC
ttggacagcatgggactaga

SEQ ID NO: 78918 - DNA, 20 bp, Artificial Sequence
  Description of Artificial Sequence: Synthetic oligonucleotide
  Target: ATXN2; (-) strand; PAM type: YTN; PAM sequence: TTC
tcttggacagcatgggacta

SEQ ID NO: 78919 - DNA, 20 bp, Artificial Sequence
  Description of Artificial Sequence: Synthetic oligonucleotide
  Target: ATXN2; (-) strand; PAM type: YTN; PAM sequence: TTG
tacaaagttctcttggacag

SEQ ID NO: 78920 - DNA, 20 bp, Artificial Sequence
  Description of Artificial Sequence: Synthetic oligonucleotide
  Target: ATXN2; (-) strand; PAM type: YTN; PAM sequence: TTC
atcattgtacaaagttctct

SEQ ID NO: 78921 - DNA, 20 bp, Artificial Sequence
  Description of Artificial Sequence: Synthetic oligonucleotide
  Target: ATXN2; (-) strand; PAM type: YTN; PAM sequence: CTT
catcattgtacaaagttctc

SEQ ID NO: 78922 - DNA, 20 bp, Artificial Sequence
  Description of Artificial Sequence: Synthetic oligonucleotide
  Target: ATXN2; (-) strand; PAM type: YTN; PAM sequence: TTG
gacagcatgacataggacat

SEQ ID NO: 78923 - DNA, 20 bp, Artificial Sequence
  Description of Artificial Sequence: Synthetic oligonucleotide
  Target: ATXN2; (-) strand; PAM type: YTN; PAM sequence: CTG
caatattggacagcatgaca

SEQ ID NO: 78924 - DNA, 20 bp, Artificial Sequence
  Description of Artificial Sequence: Synthetic oligonucleotide
  Target: ATXN2; (-) strand; PAM type: YTN; PAM sequence: CTA
atggctgcaatattggacag

SEQ ID NO: 78925 - DNA, 20 bp, Artificial Sequence
  Description of Artificial Sequence: Synthetic oligonucleotide
  Target: ATXN2; (-) strand; PAM type: YTN; PAM sequence: CTG
ccacatgtgcctaatggctg

SEQ ID NO: 78926 - DNA, 20 bp, Artificial Sequence
  Description of Artificial Sequence: Synthetic oligonucleotide
  Target: ATXN2; (-) strand; PAM type: YTN; PAM sequence: TTA
gctgccacatgtgcctaatg

SEQ ID NO: 78927 - DNA, 20 bp, Artificial Sequence
  Description of Artificial Sequence: Synthetic oligonucleotide
  Target: ATXN2; (-) strand; PAM type: YTN; PAM sequence: CTT
agctgccacatgtgcctaat

SEQ ID NO: 78928 - DNA, 20 bp, Artificial Sequence
  Description of Artificial Sequence: Synthetic oligonucleotide
  Target: ATXN2; (-) strand; PAM type: YTN; PAM sequence: TTC
aagtgcttagctgccacatg

SEQ ID NO: 78929 - DNA, 20 bp, Artificial Sequence
  Description of Artificial Sequence: Synthetic oligonucleotide
  Target: ATXN2; (-) strand; PAM type: YTN; PAM sequence: TTT
caagtgcttagctgccacat

SEQ ID NO: 78930 - DNA, 20 bp, Artificial Sequence
  Description of Artificial Sequence: Synthetic oligonucleotide
  Target: ATXN2; (-) strand; PAM type: YTN; PAM sequence: CTA
atcgtatttcaagtgcttag

SEQ ID NO: 78931 - DNA, 20 bp, Artificial Sequence
  Description of Artificial Sequence: Synthetic oligonucleotide
  Target: ATXN2; (-) strand; PAM type: YTN; PAM sequence: CTC
agccatactaatcgtatttc

SEQ ID NO: 78932 - DNA, 20 bp, Artificial Sequence
  Description of Artificial Sequence: Synthetic oligonucleotide
  Target: ATXN2; (-) strand; PAM type: YTN; PAM sequence: TTC
ctcagccatactaatcgtat

SEQ ID NO: 78933 - DNA, 20 bp, Artificial Sequence
  Description of Artificial Sequence: Synthetic oligonucleotide
  Target: ATXN2; (-) strand; PAM type: YTN; PAM sequence: TTC
agttcctcagccatactaat

SEQ ID NO: 78934 - DNA, 20 bp, Artificial Sequence
  Description of Artificial Sequence: Synthetic oligonucleotide
  Target: ATXN2; (-) strand; PAM type: YTN; PAM sequence: TTT
cagttcctcagccatactaa

SEQ ID NO: 78935 - DNA, 20 bp, Artificial Sequence
  Description of Artificial Sequence: Synthetic oligonucleotide
  Target: ATXN2; (-) strand; PAM type: YTN; PAM sequence: TTA
aatatttcagttcctcagcc

SEQ ID NO: 78936 - DNA, 20 bp, Artificial Sequence
  Description of Artificial Sequence: Synthetic oligonucleotide
  Target: ATXN2; (-) strand; PAM type: YTN; PAM sequence: TTT
aaatatttcagttcctcagc

SEQ ID NO: 78937 - DNA, 20 bp, Artificial Sequence
  Description of Artificial Sequence: Synthetic oligonucleotide
  Target: ATXN2; (-) strand; PAM type: YTN; PAM sequence: TTA
aaatttaaatatttcagttc

SEQ ID NO: 78938 - DNA, 20 bp, Artificial Sequence
  Description of Artificial Sequence: Synthetic oligonucleotide
  Target: ATXN2; (-) strand; PAM type: YTN; PAM sequence: TTG
attaaaatttaaatatttca

SEQ ID NO: 78939 - DNA, 20 bp, Artificial Sequence
  Description of Artificial Sequence: Synthetic oligonucleotide
  Target: ATXN2; (-) strand; PAM type: YTN; PAM sequence: TTA
tgttgattaaaatttaaata

SEQ ID NO: 78940 - DNA, 20 bp, Artificial Sequence
  Description of Artificial Sequence: Synthetic oligonucleotide
  Target: ATXN2; (-) strand; PAM type: YTN; PAM sequence: TTA
aaattatgttgattaaaatt

SEQ ID NO: 78941 - DNA, 20 bp, Artificial Sequence
  Description of Artificial Sequence: Synthetic oligonucleotide
  Target: ATXN2; (-) strand; PAM type: YTN; PAM sequence: TTT
aaaattatgttgattaaaat

SEQ ID NO: 78942 - DNA, 20 bp, Artificial Sequence
  Description of Artificial Sequence: Synthetic oligonucleotide
  Target: ATXN2; (-) strand; PAM type: YTN; PAM sequence: TTA
aatttaaaattatgttgatt

SEQ ID NO: 78943 - DNA, 20 bp, Artificial Sequence
  Description of Artificial Sequence: Synthetic oligonucleotide
  Target: ATXN2; (-) strand; PAM type: YTN; PAM sequence: TTT
aaatttaaaattatgttgat

SEQ ID NO: 78944 - DNA, 20 bp, Artificial Sequence
  Description of Artificial Sequence: Synthetic oligonucleotide
  Target: ATXN2; (-) strand; PAM type: YTN; PAM sequence: CTT
taaatttaaaattatgttga

SEQ ID NO: 78945 - DNA, 20 bp, Artificial Sequence
  Description of Artificial Sequence: Synthetic oligonucleotide
  Target: ATXN2; (-) strand; PAM type: YTN; PAM sequence: TTC
tttaaatttaaaattatgtt

SEQ ID NO: 78946 - DNA, 20 bp, Artificial Sequence
  Description of Artificial Sequence: Synthetic oligonucleotide
  Target: ATXN2; (-) strand; PAM type: YTN; PAM sequence: TTC
cacacatggttctttaaatt

SEQ ID NO: 78947 - DNA, 20 bp, Artificial Sequence
  Description of Artificial Sequence: Synthetic oligonucleotide
  Target: ATXN2; (-) strand; PAM type: YTN; PAM sequence: CTT
ccacacatggttctttaaat

SEQ ID NO: 78948 - DNA, 20 bp, Artificial Sequence
  Description of Artificial Sequence: Synthetic oligonucleotide
  Target: ATXN2; (-) strand; PAM type: YTN; PAM sequence: CTA
cttccacacatggttcttta

SEQ ID NO: 78949 - DNA, 20 bp, Artificial Sequence
  Description of Artificial Sequence: Synthetic oligonucleotide
  Target: ATXN2; (-) strand; PAM type: YTN; PAM sequence: TTG
tggctacttccacacatggt

SEQ ID NO: 78950 - DNA, 20 bp, Artificial Sequence
  Description of Artificial Sequence: Synthetic oligonucleotide
  Target: ATXN2; (-) strand; PAM type: YTN; PAM sequence: CTG
tccagtattgtggctacttc

SEQ ID NO: 78951 - DNA, 20 bp, Artificial Sequence
  Description of Artificial Sequence: Synthetic oligonucleotide
  Target: ATXN2; (-) strand; PAM type: YTN; PAM sequence: CTC
gagaagatgggaatgggcac

SEQ ID NO: 78952 - DNA, 20 bp, Artificial Sequence
  Description of Artificial Sequence: Synthetic oligonucleotide
  Target: ATXN2; (-) strand; PAM type: YTN; PAM sequence: CTG
gagaactcgagaagatggga

SEQ ID NO: 78953 - DNA, 20 bp, Artificial Sequence
  Description of Artificial Sequence: Synthetic oligonucleotide
  Target: ATXN2; (-) strand; PAM type: YTN; PAM sequence: CTG
tctggagaactcgagaagat

SEQ ID NO: 78954 - DNA, 20 bp, Artificial Sequence
  Description of Artificial Sequence: Synthetic oligonucleotide
  Target: ATXN2; (-) strand; PAM type: YTN; PAM sequence: TTA
ctgtctggagaactcgagaa

SEQ ID NO: 78955 - DNA, 20 bp, Artificial Sequence
  Description of Artificial Sequence: Synthetic oligonucleotide
  Target: ATXN2; (-) strand; PAM type: YTN; PAM sequence: CTT
actgtctggagaactcgaga

SEQ ID NO: 78956 - DNA, 20 bp, Artificial Sequence
  Description of Artificial Sequence: Synthetic oligonucleotide
  Target: ATXN2; (-) strand; PAM type: YTN; PAM sequence: TTG
gtgcataagtcagaggtgat

SEQ ID NO: 78957 - DNA, 20 bp, Artificial Sequence
  Description of Artificial Sequence: Synthetic oligonucleotide
  Target: ATXN2; (-) strand; PAM type: YTN; PAM sequence: CTT
ggtgcataagtcagaggtga

SEQ ID NO: 78958 - DNA, 20 bp, Artificial Sequence
  Description of Artificial Sequence: Synthetic oligonucleotide
  Target: ATXN2; (-) strand; PAM type: YTN; PAM sequence: TTC
ttggtgcataagtcagaggt

SEQ ID NO: 78959 - DNA, 20 bp, Artificial Sequence
  Description of Artificial Sequence: Synthetic oligonucleotide
  Target: ATXN2; (-) strand; PAM type: YTN; PAM sequence: CTG
tcaggaagcattcttggtgc

SEQ ID NO: 78960 - DNA, 20 bp, Artificial Sequence
  Description of Artificial Sequence: Synthetic oligonucleotide
  Target: ATXN2; (-) strand; PAM type: YTN; PAM sequence: TTC
ctgtcaggaagcattcttgg

SEQ ID NO: 78961 - DNA, 20 bp, Artificial Sequence
  Description of Artificial Sequence: Synthetic oligonucleotide
  Target: ATXN2; (-) strand; PAM type: YTN; PAM sequence: TTT
cctgtcaggaagcattcttg

SEQ ID NO: 78962 - DNA, 20 bp, Artificial Sequence
  Description of Artificial Sequence: Synthetic oligonucleotide
  Target: ATXN2; (-) strand; PAM type: YTN; PAM sequence: TTG
agtttcctgtcaggaagcat

SEQ ID NO: 78963 - DNA, 20 bp, Artificial Sequence
  Description of Artificial Sequence: Synthetic oligonucleotide
  Target: ATXN2; (-) strand; PAM type: YTN; PAM sequence: CTT
gagtttcctgtcaggaagca

SEQ ID NO: 78964 - DNA, 20 bp, Artificial Sequence
  Description of Artificial Sequence: Synthetic oligonucleotide
  Target: ATXN2; (-) strand; PAM type: YTN; PAM sequence: TTG
ggagagacttgagtttcctg

SEQ ID NO: 78965 - DNA, 20 bp, Artificial Sequence
  Description of Artificial Sequence: Synthetic oligonucleotide
  Target: ATXN2; (-) strand; PAM type: YTN; PAM sequence: TTA
tgagcaacgggtagatcgtt

SEQ ID NO: 78966 - DNA, 20 bp, Artificial Sequence
  Description of Artificial Sequence: Synthetic oligonucleotide
  Target: ATXN2; (-) strand; PAM type: YTN; PAM sequence: TTT
atgagcaacgggtagatcgt

SEQ ID NO: 78967 - DNA, 20 bp, Artificial Sequence
  Description of Artificial Sequence: Synthetic oligonucleotide
  Target: ATXN2; (-) strand; PAM type: YTN; PAM sequence: CTC
cagaaagggataagtttatg

SEQ ID NO: 78968 - DNA, 20 bp, Artificial Sequence
  Description of Artificial Sequence: Synthetic oligonucleotide
  Target: ATXN2; (-) strand; PAM type: YTN; PAM sequence: TTG
tggcctccagaaagggataa

SEQ ID NO: 78969 - DNA, 20 bp, Artificial Sequence
  Description of Artificial Sequence: Synthetic oligonucleotide
  Target: ATXN2; (-) strand; PAM type: YTN; PAM sequence: TTT
gtggcctccagaaagggata

SEQ ID NO: 78970 - DNA, 20 bp, Artificial Sequence
  Description of Artificial Sequence: Synthetic oligonucleotide
  Target: ATXN2; (-) strand; PAM type: YTN; PAM sequence: TTT
tgtggcctccagaaagggat

SEQ ID NO: 78971 - DNA, 20 bp, Artificial Sequence
  Description of Artificial Sequence: Synthetic oligonucleotide
  Target: ATXN2; (-) strand; PAM type: YTN; PAM sequence: TTG
ttttgtggcctccagaaagg

SEQ ID NO: 78972 - DNA, 20 bp, Artificial Sequence
  Description of Artificial Sequence: Synthetic oligonucleotide
  Target: ATXN2; (-) strand; PAM type: YTN; PAM sequence: TTG
aaggggaatacaattgtttt

SEQ ID NO: 78973 - DNA, 20 bp, Artificial Sequence
  Description of Artificial Sequence: Synthetic oligonucleotide
  Target: ATXN2; (-) strand; PAM type: YTN; PAM sequence: TTT
gaaggggaatacaattgttt

SEQ ID NO: 78974 - DNA, 20 bp, Artificial Sequence
  Description of Artificial Sequence: Synthetic oligonucleotide
  Target: ATXN2; (-) strand; PAM type: YTN; PAM sequence: TTT
tgaaggggaatacaattgtt

SEQ ID NO: 78975 - DNA, 20 bp, Artificial Sequence
  Description of Artificial Sequence: Synthetic oligonucleotide
  Target: ATXN2; (-) strand; PAM type: YTN; PAM sequence: CTT
ttgaaggggaatacaattgt

SEQ ID NO: 78976 - DNA, 20 bp, Artificial Sequence
  Description of Artificial Sequence: Synthetic oligonucleotide
  Target: ATXN2; (-) strand; PAM type: YTN; PAM sequence: CTG
atagtcttttgaaggggaat

SEQ ID NO: 78977 - DNA, 20 bp, Artificial Sequence
  Description of Artificial Sequence: Synthetic oligonucleotide
  Target: ATXN2; (-) strand; PAM type: YTN; PAM sequence: CTC
cactgatagtcttttgaagg

SEQ ID NO: 78978 - DNA, 20 bp, Artificial Sequence
  Description of Artificial Sequence: Synthetic oligonucleotide
  Target: ATXN2; (-) strand; PAM type: YTN; PAM sequence: CTC
ctccactgatagtcttttga

SEQ ID NO: 78979 - DNA, 20 bp, Artificial Sequence
  Description of Artificial Sequence: Synthetic oligonucleotide
  Target: ATXN2; (-) strand; PAM type: YTN; PAM sequence: CTC
tcctccactgatagtctttt

SEQ ID NO: 78980 - DNA, 20 bp, Artificial Sequence
  Description of Artificial Sequence: Synthetic oligonucleotide
  Target: ATXN2; (-) strand; PAM type: YTN; PAM sequence: CTC
ccctctcctccactgatagt

SEQ ID NO: 78981 - DNA, 20 bp, Artificial Sequence
  Description of Artificial Sequence: Synthetic oligonucleotide
  Target: ATXN2; (-) strand; PAM type: YTN; PAM sequence: CTA
tactcccctctcctccactg

SEQ ID NO: 78982 - DNA, 20 bp, Artificial Sequence
  Description of Artificial Sequence: Synthetic oligonucleotide
  Target: ATXN2; (-) strand; PAM type: YTN; PAM sequence: TTC
agctatactcccctctcctc

SEQ ID NO: 78983 - DNA, 20 bp, Artificial Sequence
  Description of Artificial Sequence: Synthetic oligonucleotide
  Target: ATXN2; (-) strand; PAM type: YTN; PAM sequence: TTT
cagctatactcccctctcct

SEQ ID NO: 78984 - DNA, 20 bp, Artificial Sequence
  Description of Artificial Sequence: Synthetic oligonucleotide
  Target: ATXN2; (-) strand; PAM type: YTN; PAM sequence: TTG
tttcagctatactcccctct

SEQ ID NO: 78985 - DNA, 20 bp, Artificial Sequence
  Description of Artificial Sequence: Synthetic oligonucleotide
  Target: ATXN2; (-) strand; PAM type: YTN; PAM sequence: TTA
tcagtaaatggccaacgttg

SEQ ID NO: 78986 - DNA, 20 bp, Artificial Sequence
  Description of Artificial Sequence: Synthetic oligonucleotide
  Target: ATXN2; (-) strand; PAM type: YTN; PAM sequence: TTA
gcagttatcagtaaatggcc

SEQ ID NO: 78987 - DNA, 20 bp, Artificial Sequence
  Description of Artificial Sequence: Synthetic oligonucleotide
  Target: ATXN2; (-) strand; PAM type: YTN; PAM sequence: TTT
agcagttatcagtaaatggc

SEQ ID NO: 78988 - DNA, 20 bp, Artificial Sequence
  Description of Artificial Sequence: Synthetic oligonucleotide
  Target: ATXN2; (-) strand; PAM type: YTN; PAM sequence: CTT
tagcagttatcagtaaatgg

SEQ ID NO: 78989 - DNA, 20 bp, Artificial Sequence
  Description of Artificial Sequence: Synthetic oligonucleotide
  Target: ATXN2; (-) strand; PAM type: YTN; PAM sequence: CTC
agctttagcagttatcagta

SEQ ID NO: 78990 - DNA, 20 bp, Artificial Sequence
  Description of Artificial Sequence: Synthetic oligonucleotide
  Target: ATXN2; (-) strand; PAM type: YTN; PAM sequence: CTG
tcactcagctttagcagtta

SEQ ID NO: 78991 - DNA, 20 bp, Artificial Sequence
  Description of Artificial Sequence: Synthetic oligonucleotide
  Target: ATXN2; (-) strand; PAM type: YTN; PAM sequence: TTA
tgtacctgtcactcagcttt

SEQ ID NO: 78992 - DNA, 20 bp, Artificial Sequence
  Description of Artificial Sequence: Synthetic oligonucleotide
  Target: ATXN2; (-) strand; PAM type: YTN; PAM sequence: CTT
atgtacctgtcactcagctt

SEQ ID NO: 78993 - DNA, 20 bp, Artificial Sequence
  Description of Artificial Sequence: Synthetic oligonucleotide
  Target: ATXN2; (-) strand; PAM type: YTN; PAM sequence: CTG
gatgaatcttatgtacctgt

SEQ ID NO: 78994 - DNA, 20 bp, Artificial Sequence
  Description of Artificial Sequence: Synthetic oligonucleotide
  Target: ATXN2; (-) strand; PAM type: YTN; PAM sequence: TTA
gaaagagaacagctggatga

SEQ ID NO: 78995 - DNA, 20 bp, Artificial Sequence
  Description of Artificial Sequence: Synthetic oligonucleotide
  Target: ATXN2; (-) strand; PAM type: YTN; PAM sequence: TTT
agaaagagaacagctggatg

SEQ ID NO: 78996 - DNA, 20 bp, Artificial Sequence
  Description of Artificial Sequence: Synthetic oligonucleotide
  Target: ATXN2; (-) strand; PAM type: YTN; PAM sequence: TTC
aacgtatttagaaagagaac

SEQ ID NO: 78997 - DNA, 20 bp, Artificial Sequence
  Description of Artificial Sequence: Synthetic oligonucleotide
  Target: ATXN2; (-) strand; PAM type: YTN; PAM sequence: TTT
caacgtatttagaaagagaa

SEQ ID NO: 78998 - DNA, 20 bp, Artificial Sequence
  Description of Artificial Sequence: Synthetic oligonucleotide
  Target: ATXN2; (-) strand; PAM type: YTN; PAM sequence: TTA
aaatgtaaaatttcaacgta

SEQ ID NO: 78999 - DNA, 20 bp, Artificial Sequence
  Description of Artificial Sequence: Synthetic oligonucleotide
  Target: ATXN2; (-) strand; PAM type: YTN; PAM sequence: TTT
aaaatgtaaaatttcaacgt

SEQ ID NO: 79000 - DNA, 20 bp, Artificial Sequence
  Description of Artificial Sequence: Synthetic oligonucleotide
  Target: ATXN2; (-) strand; PAM type: YTN; PAM sequence: TTT
taaaatgtaaaatttcaacg

SEQ ID NO: 79001 - DNA, 20 bp, Artificial Sequence
  Description of Artificial Sequence: Synthetic oligonucleotide
  Target: ATXN2; (-) strand; PAM type: YTN; PAM sequence: TTT
ttaaaatgtaaaatttcaac

SEQ ID NO: 79002 - DNA, 20 bp, Artificial Sequence
  Description of Artificial Sequence: Synthetic oligonucleotide
  Target: ATXN2; (-) strand; PAM type: YTN; PAM sequence: CTA
ataaggtttttaaaatgtaa

SEQ ID NO: 79003 - DNA, 20 bp, Artificial Sequence
  Description of Artificial Sequence: Synthetic oligonucleotide
  Target: ATXN2; (-) strand; PAM type: YTN; PAM sequence: TTA
aagtaaacgctaataaggtt

SEQ ID NO: 79004 - DNA, 20 bp, Artificial Sequence
  Description of Artificial Sequence: Synthetic oligonucleotide
  Target: ATXN2; (-) strand; PAM type: YTN; PAM sequence: CTT
aaagtaaacgctaataaggt

SEQ ID NO: 79005 - DNA, 20 bp, Artificial Sequence
  Description of Artificial Sequence: Synthetic oligonucleotide
  Target: ATXN2; (-) strand; PAM type: YTN; PAM sequence: TTA
gaaaatgaaatgagcttaaa

SEQ ID NO: 79006 - DNA, 20 bp, Artificial Sequence
  Description of Artificial Sequence: Synthetic oligonucleotide
  Target: ATXN2; (-) strand; PAM type: YTN; PAM sequence: TTC
agttagaaaatgaaatgagc

SEQ ID NO: 79007 - DNA, 20 bp, Artificial Sequence
  Description of Artificial Sequence: Synthetic oligonucleotide
  Target: ATXN2; (-) strand; PAM type: YTN; PAM sequence: TTT
cagttagaaaatgaaatgag

SEQ ID NO: 79008 - DNA, 20 bp, Artificial Sequence
  Description of Artificial Sequence: Synthetic oligonucleotide
  Target: ATXN2; (-) strand; PAM type: YTN; PAM sequence: TTG
gaagaatatgtttcagttag

SEQ ID NO: 79009 - DNA, 20 bp, Artificial Sequence
  Description of Artificial Sequence: Synthetic oligonucleotide
  Target: ATXN2; (-) strand; PAM type: YTN; PAM sequence: TTT
ggaagaatatgtttcagtta

SEQ ID NO: 79010 - DNA, 20 bp, Artificial Sequence
  Description of Artificial Sequence: Synthetic oligonucleotide
  Target: ATXN2; (-) strand; PAM type: YTN; PAM sequence: CTG
aaagtaaggaaacacatttg

SEQ ID NO: 79011 - DNA, 20 bp, Artificial Sequence
  Description of Artificial Sequence: Synthetic oligonucleotide
  Target: ATXN2; (-) strand; PAM type: YTN; PAM sequence: CTC
actgaaagtaaggaaacaca

SEQ ID NO: 79012 - DNA, 20 bp, Artificial Sequence
  Description of Artificial Sequence: Synthetic oligonucleotide
  Target: ATXN2; (-) strand; PAM type: YTN; PAM sequence: TTG
gagggggtcctcactgaaag

SEQ ID NO: 79013 - DNA, 20 bp, Artificial Sequence
  Description of Artificial Sequence: Synthetic oligonucleotide
  Target: ATXN2; (-) strand; PAM type: YTN; PAM sequence: TTC
acagtgtgatagaagaattg

SEQ ID NO: 79014 - DNA, 20 bp, Artificial Sequence
  Description of Artificial Sequence: Synthetic oligonucleotide
  Target: ATXN2; (-) strand; PAM type: YTN; PAM sequence: TTG
gttcacagtgtgatagaaga

SEQ ID NO: 79015 - DNA, 20 bp, Artificial Sequence
  Description of Artificial Sequence: Synthetic oligonucleotide
  Target: ATXN2; (-) strand; PAM type: YTN; PAM sequence: TTT
ggttcacagtgtgatagaag

SEQ ID NO: 79016 - DNA, 20 bp, Artificial Sequence
  Description of Artificial Sequence: Synthetic oligonucleotide
  Target: ATXN2; (-) strand; PAM type: YTN; PAM sequence: CTA
tacacatggtgtatgtagaa

SEQ ID NO: 79017 - DNA, 20 bp, Artificial Sequence
  Description of Artificial Sequence: Synthetic oligonucleotide
  Target: ATXN2; (-) strand; PAM type: YTN; PAM sequence: TTG
ctatacacatggtgtatgta

SEQ ID NO: 79018 - DNA, 20 bp, Artificial Sequence
  Description of Artificial Sequence: Synthetic oligonucleotide
  Target: ATXN2; (-) strand; PAM type: YTN; PAM sequence: CTA
aagtacagggattgctatac

SEQ ID NO: 79019 - DNA, 20 bp, Artificial Sequence
  Description of Artificial Sequence: Synthetic oligonucleotide
  Target: ATXN2; (-) strand; PAM type: YTN; PAM sequence: TTG
tgctaaagtacagggattgc

SEQ ID NO: 79020 - DNA, 20 bp, Artificial Sequence
  Description of Artificial Sequence: Synthetic oligonucleotide
  Target: ATXN2; (-) strand; PAM type: YTN; PAM sequence: TTT
gtgctaaagtacagggattg

SEQ ID NO: 79021 - DNA, 20 bp, Artificial Sequence
  Description of Artificial Sequence: Synthetic oligonucleotide
  Target: ATXN2; (-) strand; PAM type: YTN; PAM sequence: TTC
caggcgggaagagtttgtgc

SEQ ID NO: 79022 - DNA, 20 bp, Artificial Sequence
  Description of Artificial Sequence: Synthetic oligonucleotide
  Target: ATXN2; (-) strand; PAM type: YTN; PAM sequence: TTC
agtaaggccatgaagagagg

SEQ ID NO: 79023 - DNA, 20 bp, Artificial Sequence
  Description of Artificial Sequence: Synthetic oligonucleotide
  Target: ATXN2; (-) strand; PAM type: YTN; PAM sequence: TTT
cagtaaggccatgaagagag

SEQ ID NO: 79024 - DNA, 20 bp, Artificial Sequence
  Description of Artificial Sequence: Synthetic oligonucleotide
  Target: ATXN2; (-) strand; PAM type: YTN; PAM sequence: TTT
tcagtaaggccatgaagaga

SEQ ID NO: 79025 - DNA, 20 bp, Artificial Sequence
  Description of Artificial Sequence: Synthetic oligonucleotide
  Target: ATXN2; (-) strand; PAM type: YTN; PAM sequence: TTC
aaggaagataagcagttttc

SEQ ID NO: 79026 - DNA, 20 bp, Artificial Sequence
  Description of Artificial Sequence: Synthetic oligonucleotide
  Target: ATXN2; (-) strand; PAM type: YTN; PAM sequence: CTT
caaggaagataagcagtttt

SEQ ID NO: 79027 - DNA, 20 bp, Artificial Sequence
  Description of Artificial Sequence: Synthetic oligonucleotide
  Target: ATXN2; (-) strand; PAM type: YTN; PAM sequence: TTG
agatggatcttcaaggaaga

SEQ ID NO: 79028 - DNA, 20 bp, Artificial Sequence
  Description of Artificial Sequence: Synthetic oligonucleotide
  Target: ATXN2; (-) strand; PAM type: YTN; PAM sequence: TTC
aaaataatgagagttgagat

SEQ ID NO: 79029 - DNA, 20 bp, Artificial Sequence
  Description of Artificial Sequence: Synthetic oligonucleotide
  Target: ATXN2; (-) strand; PAM type: YTN; PAM sequence: CTT
caaaataatgagagttgaga

SEQ ID NO: 79030 - DNA, 20 bp, Artificial Sequence
  Description of Artificial Sequence: Synthetic oligonucleotide
  Target: ATXN2; (-) strand; PAM type: YTN; PAM sequence: CTG
ccatgggtgggcagtgaaga

SEQ ID NO: 79031 - DNA, 20 bp, Artificial Sequence
  Description of Artificial Sequence: Synthetic oligonucleotide
  Target: ATXN2; (-) strand; PAM type: YTN; PAM sequence: CTG
ggaggggactgccatgggtg

SEQ ID NO: 79032 - DNA, 20 bp, Artificial Sequence
  Description of Artificial Sequence: Synthetic oligonucleotide
  Target: ATXN2; (-) strand; PAM type: YTN; PAM sequence: TTG
gtagcactgggaggggactg

SEQ ID NO: 79033 - DNA, 20 bp, Artificial Sequence
  Description of Artificial Sequence: Synthetic oligonucleotide
  Target: ATXN2; (-) strand; PAM type: YTN; PAM sequence: TTA
aattggtagcactgggaggg

SEQ ID NO: 79034 - DNA, 20 bp, Artificial Sequence
  Description of Artificial Sequence: Synthetic oligonucleotide
  Target: ATXN2; (-) strand; PAM type: YTN; PAM sequence: TTT
aaattggtagcactgggagg

SEQ ID NO: 79035 - DNA, 20 bp, Artificial Sequence
  Description of Artificial Sequence: Synthetic oligonucleotide
  Target: ATXN2; (-) strand; PAM type: YTN; PAM sequence: TTA
cccagtgtagtagagaaggc

SEQ ID NO: 79036 - DNA, 20 bp, Artificial Sequence
  Description of Artificial Sequence: Synthetic oligonucleotide
  Target: ATXN2; (-) strand; PAM type: YTN; PAM sequence: TTC
caggttacccagtgtagtag

SEQ ID NO: 79037 - DNA, 20 bp, Artificial Sequence
  Description of Artificial Sequence: Synthetic oligonucleotide
  Target: ATXN2; (-) strand; PAM type: YTN; PAM sequence: CTT
ccaggttacccagtgtagta

SEQ ID NO: 79038 - DNA, 20 bp, Artificial Sequence
  Description of Artificial Sequence: Synthetic oligonucleotide
  Target: ATXN2; (-) strand; PAM type: YTN; PAM sequence: CTG
cttccaggttacccagtgta

SEQ ID NO: 79039 - DNA, 20 bp, Artificial Sequence
  Description of Artificial Sequence: Synthetic oligonucleotide
  Target: ATXN2; (-) strand; PAM type: YTN; PAM sequence: CTC
tgcttccaggttacccagtg

SEQ ID NO: 79040 - DNA, 20 bp, Artificial Sequence
  Description of Artificial Sequence: Synthetic oligonucleotide
  Target: ATXN2; (-) strand; PAM type: YTN; PAM sequence: TTA
tctctgcttccaggttaccc

SEQ ID NO: 79041 - DNA, 20 bp, Artificial Sequence
  Description of Artificial Sequence: Synthetic oligonucleotide
  Target: ATXN2; (-) strand; PAM type: YTN; PAM sequence: CTA
ggacagagacaaagatgaat

SEQ ID NO: 79042 - DNA, 20 bp, Artificial Sequence
  Description of Artificial Sequence: Synthetic oligonucleotide
  Target: ATXN2; (-) strand; PAM type: YTN; PAM sequence: CTG
tcagactaggacagagacaa

SEQ ID NO: 79043 - DNA, 20 bp, Artificial Sequence
  Description of Artificial Sequence: Synthetic oligonucleotide
  Target: ATXN2; (-) strand; PAM type: YTN; PAM sequence: TTG
atgctgtcagactaggacag

SEQ ID NO: 79044 - DNA, 20 bp, Artificial Sequence
  Description of Artificial Sequence: Synthetic oligonucleotide
  Target: ATXN2; (-) strand; PAM type: YTN; PAM sequence: TTT
gatgctgtcagactaggaca

SEQ ID NO: 79045 - DNA, 20 bp, Artificial Sequence
  Description of Artificial Sequence: Synthetic oligonucleotide
  Target: ATXN2; (-) strand; PAM type: YTN; PAM sequence: TTA
cacatttgatgctgtcagac

SEQ ID NO: 79046 - DNA, 20 bp, Artificial Sequence
  Description of Artificial Sequence: Synthetic oligonucleotide
  Target: ATXN2; (-) strand; PAM type: YTN; PAM sequence: TTC
attacacatttgatgctgtc

SEQ ID NO: 79047 - DNA, 20 bp, Artificial Sequence
  Description of Artificial Sequence: Synthetic oligonucleotide
  Target: ATXN2; (-) strand; PAM type: YTN; PAM sequence: TTA
attcattacacatttgatgc

SEQ ID NO: 79048 - DNA, 20 bp, Artificial Sequence
  Description of Artificial Sequence: Synthetic oligonucleotide
  Target: ATXN2; (-) strand; PAM type: YTN; PAM sequence: TTC
attaattcattacacatttg

SEQ ID NO: 79049 - DNA, 20 bp, Artificial Sequence
  Description of Artificial Sequence: Synthetic oligonucleotide
  Target: ATXN2; (-) strand; PAM type: YTN; PAM sequence: TTG
tatattcattaattcattac

SEQ ID NO: 79050 - DNA, 20 bp, Artificial Sequence
  Description of Artificial Sequence: Synthetic oligonucleotide
  Target: ATXN2; (-) strand; PAM type: YTN; PAM sequence: TTT
gtatattcattaattcatta

SEQ ID NO: 79051 - DNA, 20 bp, Artificial Sequence
  Description of Artificial Sequence: Synthetic oligonucleotide
  Target: ATXN2; (-) strand; PAM type: YTN; PAM sequence: TTA
agtttgtatattcattaatt

SEQ ID NO: 79052 - DNA, 20 bp, Artificial Sequence
  Description of Artificial Sequence: Synthetic oligonucleotide
  Target: ATXN2; (-) strand; PAM type: YTN; PAM sequence: TTC
attaagtttgtatattcatt

SEQ ID NO: 79053 - DNA, 20 bp, Artificial Sequence
  Description of Artificial Sequence: Synthetic oligonucleotide
  Target: ATXN2; (-) strand; PAM type: YTN; PAM sequence: TTT
cattaagtttgtatattcat

SEQ ID NO: 79054 - DNA, 20 bp, Artificial Sequence
  Description of Artificial Sequence: Synthetic oligonucleotide
  Target: ATXN2; (-) strand; PAM type: YTN; PAM sequence: TTA
gcgtttcattaagtttgtat

SEQ ID NO: 79055 - DNA, 20 bp, Artificial Sequence
  Description of Artificial Sequence: Synthetic oligonucleotide
  Target: ATXN2; (-) strand; PAM type: YTN; PAM sequence: TTT
agcgtttcattaagtttgta

SEQ ID NO: 79056 - DNA, 20 bp, Artificial Sequence
  Description of Artificial Sequence: Synthetic oligonucleotide
  Target: ATXN2; (-) strand; PAM type: YTN; PAM sequence: CTA
cagtttagcgtttcattaag

SEQ ID NO: 79057 - DNA, 20 bp, Artificial Sequence
  Description of Artificial Sequence: Synthetic oligonucleotide
  Target: ATXN2; (-) strand; PAM type: YTN; PAM sequence: TTG
gggtagtacagtatgaatgg

SEQ ID NO: 79058 - DNA, 20 bp, Artificial Sequence
  Description of Artificial Sequence: Synthetic oligonucleotide
  Target: ATXN2; (-) strand; PAM type: YTN; PAM sequence: CTT
ggggtagtacagtatgaatg

SEQ ID NO: 79059 - DNA, 20 bp, Artificial Sequence
  Description of Artificial Sequence: Synthetic oligonucleotide
  Target: ATXN2; (-) strand; PAM type: YTN; PAM sequence: TTG
atgggcttggggtagtacag

SEQ ID NO: 79060 - DNA, 20 bp, Artificial Sequence
  Description of Artificial Sequence: Synthetic oligonucleotide
  Target: ATXN2; (-) strand; PAM type: YTN; PAM sequence: TTG
aaaagtggtattgatgggct

SEQ ID NO: 79061 - DNA, 20 bp, Artificial Sequence
  Description of Artificial Sequence: Synthetic oligonucleotide
  Target: ATXN2; (-) strand; PAM type: YTN; PAM sequence: TTA
aggttgaaaagtggtattga

SEQ ID NO: 79062 - DNA, 20 bp, Artificial Sequence
  Description of Artificial Sequence: Synthetic oligonucleotide
  Target: ATXN2; (-) strand; PAM type: YTN; PAM sequence: CTA
caccagcaagttaaggttga

SEQ ID NO: 79063 - DNA, 20 bp, Artificial Sequence
  Description of Artificial Sequence: Synthetic oligonucleotide
  Target: ATXN2; (-) strand; PAM type: YTN; PAM sequence: TTG
gaaaccagtagaaactacac

SEQ ID NO: 79064 - DNA, 20 bp, Artificial Sequence
  Description of Artificial Sequence: Synthetic oligonucleotide
  Target: ATXN2; (-) strand; PAM type: YTN; PAM sequence: TTT
ggaaaccagtagaaactaca

SEQ ID NO: 79065 - DNA, 20 bp, Artificial Sequence
  Description of Artificial Sequence: Synthetic oligonucleotide
  Target: ATXN2; (-) strand; PAM type: YTN; PAM sequence: TTA
gcatgtttggaaaccagtag

SEQ ID NO: 79066 - DNA, 20 bp, Artificial Sequence
  Description of Artificial Sequence: Synthetic oligonucleotide
  Target: ATXN2; (-) strand; PAM type: YTN; PAM sequence: TTA
ttagcatgtttggaaaccag

SEQ ID NO: 79067 - DNA, 20 bp, Artificial Sequence
  Description of Artificial Sequence: Synthetic oligonucleotide
  Target: ATXN2; (-) strand; PAM type: YTN; PAM sequence: CTT
attagcatgtttggaaacca

SEQ ID NO: 79068 - DNA, 20 bp, Artificial Sequence
  Description of Artificial Sequence: Synthetic oligonucleotide
  Target: ATXN2; (-) strand; PAM type: YTN; PAM sequence: TTC
ttattagcatgtttggaaac

SEQ ID NO: 79069 - DNA, 20 bp, Artificial Sequence
  Description of Artificial Sequence: Synthetic oligonucleotide
  Target: ATXN2; (-) strand; PAM type: YTN; PAM sequence: CTG
ttcttattagcatgtttgga

SEQ ID NO: 79070 - DNA, 20 bp, Artificial Sequence
  Description of Artificial Sequence: Synthetic oligonucleotide
  Target: ATXN2; (-) strand; PAM type: YTN; PAM sequence: TTA
gctgttcttattagcatgtt

SEQ ID NO: 79071 - DNA, 20 bp, Artificial Sequence
  Description of Artificial Sequence: Synthetic oligonucleotide
  Target: ATXN2; (-) strand; PAM type: YTN; PAM sequence: TTT
agctgttcttattagcatgt

SEQ ID NO: 79072 - DNA, 20 bp, Artificial Sequence
  Description of Artificial Sequence: Synthetic oligonucleotide
  Target: ATXN2; (-) strand; PAM type: YTN; PAM sequence: TTT
tagctgttcttattagcatg

SEQ ID NO: 79073 - DNA, 20 bp, Artificial Sequence
  Description of Artificial Sequence: Synthetic oligonucleotide
  Target: ATXN2; (-) strand; PAM type: YTN; PAM sequence: CTT
ttagctgttcttattagcat

SEQ ID NO: 79074 - DNA, 20 bp, Artificial Sequence
  Description of Artificial Sequence: Synthetic oligonucleotide
  Target: ATXN2; (-) strand; PAM type: YTN; PAM sequence: CTC
agtaacttttagctgttctt

SEQ ID NO: 79075 - DNA, 20 bp, Artificial Sequence
  Description of Artificial Sequence: Synthetic oligonucleotide
  Target: ATXN2; (-) strand; PAM type: YTN; PAM sequence: CTG
gcaagtaataagtgctcagt

SEQ ID NO: 79076 - DNA, 20 bp, Artificial Sequence
  Description of Artificial Sequence: Synthetic oligonucleotide
  Target: ATXN2; (-) strand; PAM type: YTN; PAM sequence: TTA
aagcaatgcctggcaagtaa

SEQ ID NO: 79077 - DNA, 20 bp, Artificial Sequence
  Description of Artificial Sequence: Synthetic oligonucleotide
  Target: ATXN2; (-) strand; PAM type: YTN; PAM sequence: CTT
aaagcaatgcctggcaagta

SEQ ID NO: 79078 - DNA, 20 bp, Artificial Sequence
  Description of Artificial Sequence: Synthetic oligonucleotide
  Target: ATXN2; (-) strand; PAM type: YTN; PAM sequence: TTA
aacatgtaacacgcttaaag

SEQ ID NO: 79079 - DNA, 20 bp, Artificial Sequence
  Description of Artificial Sequence: Synthetic oligonucleotide
  Target: ATXN2; (-) strand; PAM type: YTN; PAM sequence: TTA
aatgaattaaacatgtaaca

SEQ ID NO: 79080 - DNA, 20 bp, Artificial Sequence
  Description of Artificial Sequence: Synthetic oligonucleotide
  Target: ATXN2; (-) strand; PAM type: YTN; PAM sequence: CTG
taaaaaggggatggaagagg

SEQ ID NO: 79081 - DNA, 20 bp, Artificial Sequence
  Description of Artificial Sequence: Synthetic oligonucleotide
  Target: ATXN2; (-) strand; PAM type: YTN; PAM sequence: TTC
ccctgtaaaaaggggatgga

SEQ ID NO: 79082 - DNA, 20 bp, Artificial Sequence
  Description of Artificial Sequence: Synthetic oligonucleotide
  Target: ATXN2; (-) strand; PAM type: YTN; PAM sequence: CTT
cccctgtaaaaaggggatgg

SEQ ID NO: 79083 - DNA, 20 bp, Artificial Sequence
  Description of Artificial Sequence: Synthetic oligonucleotide
  Target: ATXN2; (-) strand; PAM type: YTN; PAM sequence: TTC
ttcccctgtaaaaaggggat

SEQ ID NO: 79084 - DNA, 20 bp, Artificial Sequence
  Description of Artificial Sequence: Synthetic oligonucleotide
  Target: ATXN2; (-) strand; PAM type: YTN; PAM sequence: TTT
cttcccctgtaaaaagggga

SEQ ID NO: 79085 - DNA, 20 bp, Artificial Sequence
  Description of Artificial Sequence: Synthetic oligonucleotide
  Target: ATXN2; (-) strand; PAM type: YTN; PAM sequence: TTA
agtttcttcccctgtaaaaa

SEQ ID NO: 79086 - DNA, 20 bp, Artificial Sequence
  Description of Artificial Sequence: Synthetic oligonucleotide
  Target: ATXN2; (-) strand; PAM type: YTN; PAM sequence: CTT
aagtttcttcccctgtaaaa

SEQ ID NO: 79087 - DNA, 20 bp, Artificial Sequence
  Description of Artificial Sequence: Synthetic oligonucleotide
  Target: ATXN2; (-) strand; PAM type: YTN; PAM sequence: TTA
tgcttaagtttcttcccctg

SEQ ID NO: 79088 - DNA, 20 bp, Artificial Sequence
  Description of Artificial Sequence: Synthetic oligonucleotide
  Target: ATXN2; (-) strand; PAM type: YTN; PAM sequence: CTT
atgcttaagtttcttcccct

SEQ ID NO: 79089 - DNA, 20 bp, Artificial Sequence
  Description of Artificial Sequence: Synthetic oligonucleotide
  Target: ATXN2; (-) strand; PAM type: YTN; PAM sequence: TTC
acttatgcttaagtttcttc

SEQ ID NO: 79090 - DNA, 20 bp, Artificial Sequence
  Description of Artificial Sequence: Synthetic oligonucleotide
  Target: ATXN2; (-) strand; PAM type: YTN; PAM sequence: TTT
cacttatgcttaagtttctt

SEQ ID NO: 79091 - DNA, 20 bp, Artificial Sequence
  Description of Artificial Sequence: Synthetic oligonucleotide
  Target: ATXN2; (-) strand; PAM type: YTN; PAM sequence: TTT
tcacttatgcttaagtttct

SEQ ID NO: 79092 - DNA, 20 bp, Artificial Sequence
  Description of Artificial Sequence: Synthetic oligonucleotide
  Target: ATXN2; (-) strand; PAM type: YTN; PAM sequence: TTA
ttttcacttatgcttaagtt

SEQ ID NO: 79093 - DNA, 20 bp, Artificial Sequence
  Description of Artificial Sequence: Synthetic oligonucleotide
  Target: ATXN2; (-) strand; PAM type: YTN; PAM sequence: TTC
gtgatgtaaggcaagttatt

SEQ ID NO: 79094 - DNA, 20 bp, Artificial Sequence
  Description of Artificial Sequence: Synthetic oligonucleotide
  Target: ATXN2; (-) strand; PAM type: YTN; PAM sequence: CTT
cgtgatgtaaggcaagttat

SEQ ID NO: 79095 - DNA, 20 bp, Artificial Sequence
  Description of Artificial Sequence: Synthetic oligonucleotide
  Target: ATXN2; (-) strand; PAM type: YTN; PAM sequence: TTC
atacttcgtgatgtaaggca

SEQ ID NO: 79096 - DNA, 20 bp, Artificial Sequence
  Description of Artificial Sequence: Synthetic oligonucleotide
  Target: ATXN2; (-) strand; PAM type: YTN; PAM sequence: CTT
catacttcgtgatgtaaggc

SEQ ID NO: 79097 - DNA, 20 bp, Artificial Sequence
  Description of Artificial Sequence: Synthetic oligonucleotide
  Target: ATXN2; (-) strand; PAM type: YTN; PAM sequence: CTC
cttcatacttcgtgatgtaa

SEQ ID NO: 79098 - DNA, 20 bp, Artificial Sequence
  Description of Artificial Sequence: Synthetic oligonucleotide
  Target: ATXN2; (-) strand; PAM type: YTN; PAM sequence: CTG
ctccttcatacttcgtgatg

SEQ ID NO: 79099 - DNA, 20 bp, Artificial Sequence
  Description of Artificial Sequence: Synthetic oligonucleotide
  Target: ATXN2; (-) strand; PAM type: YTN; PAM sequence: TTC
gcatccctgctccttcatac

SEQ ID NO: 79100 - DNA, 20 bp, Artificial Sequence
  Description of Artificial Sequence: Synthetic oligonucleotide
  Target: ATXN2; (-) strand; PAM type: YTN; PAM sequence: TTA
gtattcgcatccctgctcct

SEQ ID NO: 79101 - DNA, 20 bp, Artificial Sequence
  Description of Artificial Sequence: Synthetic oligonucleotide
  Target: ATXN2; (-) strand; PAM type: YTN; PAM sequence: TTA
caattagtattcgcatccct

SEQ ID NO: 79102 - DNA, 20 bp, Artificial Sequence
  Description of Artificial Sequence: Synthetic oligonucleotide
  Target: ATXN2; (-) strand; PAM type: YTN; PAM sequence: TTT
acaattagtattcgcatccc

SEQ ID NO: 79103 - DNA, 20 bp, Artificial Sequence
  Description of Artificial Sequence: Synthetic oligonucleotide
  Target: ATXN2; (-) strand; PAM type: YTN; PAM sequence: CTT
tacaattagtattcgcatcc

SEQ ID NO: 79104 - DNA, 20 bp, Artificial Sequence
  Description of Artificial Sequence: Synthetic oligonucleotide
  Target: ATXN2; (-) strand; PAM type: YTN; PAM sequence: TTG
tacacaggagcagggacttt

SEQ ID NO: 79105 - DNA, 20 bp, Artificial Sequence
  Description of Artificial Sequence: Synthetic oligonucleotide
  Target: ATXN2; (-) strand; PAM type: YTN; PAM sequence: TTG
ttgtacacaggagcagggac

SEQ ID NO: 79106 - DNA, 20 bp, Artificial Sequence
  Description of Artificial Sequence: Synthetic oligonucleotide
  Target: ATXN2; (-) strand; PAM type: YTN; PAM sequence: CTT
gttgtacacaggagcaggga

SEQ ID NO: 79107 - DNA, 20 bp, Artificial Sequence
  Description of Artificial Sequence: Synthetic oligonucleotide
  Target: ATXN2; (-) strand; PAM type: YTN; PAM sequence: TTC
cttgttgtacacaggagcag

SEQ ID NO: 79108 - DNA, 20 bp, Artificial Sequence
  Description of Artificial Sequence: Synthetic oligonucleotide
  Target: ATXN2; (-) strand; PAM type: YTN; PAM sequence: CTT
ccttgttgtacacaggagca

SEQ ID NO: 79109 - DNA, 20 bp, Artificial Sequence
  Description of Artificial Sequence: Synthetic oligonucleotide
  Target: ATXN2; (-) strand; PAM type: YTN; PAM sequence: TTG
tcttccttgttgtacacagg

SEQ ID NO: 79110 - DNA, 20 bp, Artificial Sequence
  Description of Artificial Sequence: Synthetic oligonucleotide
  Target: ATXN2; (-) strand; PAM type: YTN; PAM sequence: TTT
gtcttccttgttgtacacag

SEQ ID NO: 79111 - DNA, 20 bp, Artificial Sequence
  Description of Artificial Sequence: Synthetic oligonucleotide
  Target: ATXN2; (-) strand; PAM type: YTN; PAM sequence: TTA
tgatttgtcttccttgttgt

SEQ ID NO: 79112 - DNA, 20 bp, Artificial Sequence
  Description of Artificial Sequence: Synthetic oligonucleotide
  Target: ATXN2; (-) strand; PAM type: YTN; PAM sequence: TTG
agattatgatttgtcttcct

SEQ ID NO: 79113 - DNA, 20 bp, Artificial Sequence
  Description of Artificial Sequence: Synthetic oligonucleotide
  Target: ATXN2; (-) strand; PAM type: YTN; PAM sequence: TTT
gagattatgatttgtcttcc

SEQ ID NO: 79114 - DNA, 20 bp, Artificial Sequence
  Description of Artificial Sequence: Synthetic oligonucleotide
  Target: ATXN2; (-) strand; PAM type: YTN; PAM sequence: TTG
catttgagattatgatttgt

SEQ ID NO: 79115 - DNA, 20 bp, Artificial Sequence
  Description of Artificial Sequence: Synthetic oligonucleotide
  Target: ATXN2; (-) strand; PAM type: YTN; PAM sequence: CTT
gcatttgagattatgatttg

SEQ ID NO: 79116 - DNA, 20 bp, Artificial Sequence
  Description of Artificial Sequence: Synthetic oligonucleotide
  Target: ATXN2; (-) strand; PAM type: YTN; PAM sequence: TTG
aagcttgcatttgagattat

SEQ ID NO: 79117 - DNA, 20 bp, Artificial Sequence
  Description of Artificial Sequence: Synthetic oligonucleotide
  Target: ATXN2; (-) strand; PAM type: YTN; PAM sequence: TTT
gaagcttgcatttgagatta

SEQ ID NO: 79118 - DNA, 20 bp, Artificial Sequence
  Description of Artificial Sequence: Synthetic oligonucleotide
  Target: ATXN2; (-) strand; PAM type: YTN; PAM sequence: TTG
ggatttgaagcttgcatttg

SEQ ID NO: 79119 - DNA, 20 bp, Artificial Sequence
  Description of Artificial Sequence: Synthetic oligonucleotide
  Target: ATXN2; (-) strand; PAM type: YTN; PAM sequence: TTT
gggatttgaagcttgcattt

SEQ ID NO: 79120 - DNA, 20 bp, Artificial Sequence
  Description of Artificial Sequence: Synthetic oligonucleotide
  Target: ATXN2; (-) strand; PAM type: YTN; PAM sequence: TTT
tgggatttgaagcttgcatt

SEQ ID NO: 79121 - DNA, 20 bp, Artificial Sequence
  Description of Artificial Sequence: Synthetic oligonucleotide
  Target: ATXN2; (-) strand; PAM type: YTN; PAM sequence: CTG
aattttgggatttgaagctt

SEQ ID NO: 79122 - DNA, 20 bp, Artificial Sequence
  Description of Artificial Sequence: Synthetic oligonucleotide
  Target: ATXN2; (-) strand; PAM type: YTN; PAM sequence: TTC
ccaaatctgaattttgggat

SEQ ID NO: 79123 - DNA, 20 bp, Artificial Sequence
  Description of Artificial Sequence: Synthetic oligonucleotide
  Target: ATXN2; (-) strand; PAM type: YTN; PAM sequence: TTT
cccaaatctgaattttggga

SEQ ID NO: 79124 - DNA, 20 bp, Artificial Sequence
  Description of Artificial Sequence: Synthetic oligonucleotide
  Target: ATXN2; (-) strand; PAM type: YTN; PAM sequence: CTT
tcccaaatctgaattttggg

SEQ ID NO: 79125 - DNA, 20 bp, Artificial Sequence
  Description of Artificial Sequence: Synthetic oligonucleotide
  Target: ATXN2; (-) strand; PAM type: YTN; PAM sequence: CTA
atcccctttcccaaatctga

SEQ ID NO: 79126 - DNA, 20 bp, Artificial Sequence
  Description of Artificial Sequence: Synthetic oligonucleotide
  Target: ATXN2; (-) strand; PAM type: YTN; PAM sequence: TTG
gcatcctaatcccctttccc

SEQ ID NO: 79127 - DNA, 20 bp, Artificial Sequence
  Description of Artificial Sequence: Synthetic oligonucleotide
  Target: ATXN2; (-) strand; PAM type: YTN; PAM sequence: TTT
ggcatcctaatcccctttcc

SEQ ID NO: 79128 - DNA, 20 bp, Artificial Sequence
  Description of Artificial Sequence: Synthetic oligonucleotide
  Target: ATXN2; (-) strand; PAM type: YTN; PAM sequence: CTA
tttggcatcctaatcccctt

SEQ ID NO: 79129 - DNA, 20 bp, Artificial Sequence
  Description of Artificial Sequence: Synthetic oligonucleotide
  Target: ATXN2; (-) strand; PAM type: YTN; PAM sequence: TTC
ctatttggcatcctaatccc

SEQ ID NO: 79130 - DNA, 20 bp, Artificial Sequence
  Description of Artificial Sequence: Synthetic oligonucleotide
  Target: ATXN2; (-) strand; PAM type: YTN; PAM sequence: TTA
caggtcagtattcctatttg

SEQ ID NO: 79131 - DNA, 20 bp, Artificial Sequence
  Description of Artificial Sequence: Synthetic oligonucleotide
  Target: ATXN2; (-) strand; PAM type: YTN; PAM sequence: TTT
acaggtcagtattcctattt

SEQ ID NO: 79132 - DNA, 20 bp, Artificial Sequence
  Description of Artificial Sequence: Synthetic oligonucleotide
  Target: ATXN2; (-) strand; PAM type: YTN; PAM sequence: TTT
tacaggtcagtattcctatt

SEQ ID NO: 79133 - DNA, 20 bp, Artificial Sequence
  Description of Artificial Sequence: Synthetic oligonucleotide
  Target: ATXN2; (-) strand; PAM type: YTN; PAM sequence: TTT
ttacaggtcagtattcctat

SEQ ID NO: 79134 - DNA, 20 bp, Artificial Sequence
  Description of Artificial Sequence: Synthetic oligonucleotide
  Target: ATXN2; (-) strand; PAM type: YTN; PAM sequence: CTT
tttacaggtcagtattccta

SEQ ID NO: 79135 - DNA, 20 bp, Artificial Sequence
  Description of Artificial Sequence: Synthetic oligonucleotide
  Target: ATXN2; (-) strand; PAM type: YTN; PAM sequence: TTC
tttttacaggtcagtattcc

SEQ ID NO: 79136 - DNA, 20 bp, Artificial Sequence
  Description of Artificial Sequence: Synthetic oligonucleotide
  Target: ATXN2; (-) strand; PAM type: YTN; PAM sequence: TTT
ctttttacaggtcagtattc

SEQ ID NO: 79137 - DNA, 20 bp, Artificial Sequence
  Description of Artificial Sequence: Synthetic oligonucleotide
  Target: ATXN2; (-) strand; PAM type: YTN; PAM sequence: TTT
tctttttacaggtcagtatt

SEQ ID NO: 79138 - DNA, 20 bp, Artificial Sequence
  Description of Artificial Sequence: Synthetic oligonucleotide
  Target: ATXN2; (-) strand; PAM type: YTN; PAM sequence: TTT
ttctttttacaggtcagtat

SEQ ID NO: 79139 - DNA, 20 bp, Artificial Sequence
  Description of Artificial Sequence: Synthetic oligonucleotide
  Target: ATXN2; (-) strand; PAM type: YTN; PAM sequence: CTT
tttctttttacaggtcagta

SEQ ID NO: 79140 - DNA, 20 bp, Artificial Sequence
  Description of Artificial Sequence: Synthetic oligonucleotide
  Target: ATXN2; (-) strand; PAM type: YTN; PAM sequence: TTA
ctttttctttttacaggtca

SEQ ID NO: 79141 - DNA, 20 bp, Artificial Sequence
  Description of Artificial Sequence: Synthetic oligonucleotide
  Target: ATXN2; (-) strand; PAM type: YTN; PAM sequence: CTA
aagttactttttctttttac

SEQ ID NO: 79142 - DNA, 20 bp, Artificial Sequence
  Description of Artificial Sequence: Synthetic oligonucleotide
  Target: ATXN2; (-) strand; PAM type: YTN; PAM sequence: TTG
tggagaatgcctaaagttac

SEQ ID NO: 79143 - DNA, 20 bp, Artificial Sequence
  Description of Artificial Sequence: Synthetic oligonucleotide
  Target: ATXN2; (-) strand; PAM type: YTN; PAM sequence: TTT
gtggagaatgcctaaagtta

SEQ ID NO: 79144 - DNA, 20 bp, Artificial Sequence
  Description of Artificial Sequence: Synthetic oligonucleotide
  Target: ATXN2; (-) strand; PAM type: YTN; PAM sequence: TTT
tgtggagaatgcctaaagtt

SEQ ID NO: 79145 - DNA, 20 bp, Artificial Sequence
  Description of Artificial Sequence: Synthetic oligonucleotide
  Target: ATXN2; (-) strand; PAM type: YTN; PAM sequence: CTG
ttttgtggagaatgcctaaa

SEQ ID NO: 79146 - DNA, 20 bp, Artificial Sequence
  Description of Artificial Sequence: Synthetic oligonucleotide
  Target: ATXN2; (-) strand; PAM type: YTN; PAM sequence: CTC
acactgttttgtggagaatg

SEQ ID NO: 79147 - DNA, 20 bp, Artificial Sequence
  Description of Artificial Sequence: Synthetic oligonucleotide
  Target: ATXN2; (-) strand; PAM type: YTN; PAM sequence: TTC
cctcacactgttttgtggag

SEQ ID NO: 79148 - DNA, 20 bp, Artificial Sequence
  Description of Artificial Sequence: Synthetic oligonucleotide
  Target: ATXN2; (-) strand; PAM type: YTN; PAM sequence: TTT
ccctcacactgttttgtgga

SEQ ID NO: 79149 - DNA, 20 bp, Artificial Sequence
  Description of Artificial Sequence: Synthetic oligonucleotide
  Target: ATXN2; (-) strand; PAM type: YTN; PAM sequence: TTT
tccctcacactgttttgtgg

SEQ ID NO: 79150 - DNA, 20 bp, Artificial Sequence
  Description of Artificial Sequence: Synthetic oligonucleotide
  Target: ATXN2; (-) strand; PAM type: YTN; PAM sequence: TTA
ccattttccctcacactgtt

SEQ ID NO: 79151 - DNA, 20 bp, Artificial Sequence
  Description of Artificial Sequence: Synthetic oligonucleotide
  Target: ATXN2; (-) strand; PAM type: YTN; PAM sequence: TTA
caagaataaaaagattacca

SEQ ID NO: 79152 - DNA, 20 bp, Artificial Sequence
  Description of Artificial Sequence: Synthetic oligonucleotide
  Target: ATXN2; (-) strand; PAM type: YTN; PAM sequence: CTA
taaattacaagaataaaaag

SEQ ID NO: 79153 - DNA, 20 bp, Artificial Sequence
  Description of Artificial Sequence: Synthetic oligonucleotide
  Target: ATXN2; (-) strand; PAM type: YTN; PAM sequence: TTA
ctataaattacaagaataaa

SEQ ID NO: 79154 - DNA, 20 bp, Artificial Sequence
  Description of Artificial Sequence: Synthetic oligonucleotide
  Target: ATXN2; (-) strand; PAM type: YTN; PAM sequence: CTT
actataaattacaagaataa

SEQ ID NO: 79155 - DNA, 20 bp, Artificial Sequence
  Description of Artificial Sequence: Synthetic oligonucleotide
  Target: ATXN2; (-) strand; PAM type: YTN; PAM sequence: TTC
agtagtagcttactataaat

SEQ ID NO: 79156 - DNA, 20 bp, Artificial Sequence
  Description of Artificial Sequence: Synthetic oligonucleotide
  Target: ATXN2; (-) strand; PAM type: YTN; PAM sequence: TTA
ttcagtagtagcttactata

SEQ ID NO: 79157 - DNA, 20 bp, Artificial Sequence
  Description of Artificial Sequence: Synthetic oligonucleotide
  Target: ATXN2; (-) strand; PAM type: YTN; PAM sequence: CTT
attcagtagtagcttactat

SEQ ID NO: 79158 - DNA, 20 bp, Artificial Sequence
  Description of Artificial Sequence: Synthetic oligonucleotide
  Target: ATXN2; (-) strand; PAM type: YTN; PAM sequence: TTC
ttattcagtagtagcttact

SEQ ID NO: 79159 - DNA, 20 bp, Artificial Sequence
  Description of Artificial Sequence: Synthetic oligonucleotide
  Target: ATXN2; (-) strand; PAM type: YTN; PAM sequence: TTT
cttattcagtagtagcttac

SEQ ID NO: 79160 - DNA, 20 bp, Artificial Sequence
  Description of Artificial Sequence: Synthetic oligonucleotide
  Target: ATXN2; (-) strand; PAM type: YTN; PAM sequence: CTT
tcttattcagtagtagctta

SEQ ID NO: 79161 - DNA, 20 bp, Artificial Sequence
  Description of Artificial Sequence: Synthetic oligonucleotide
  Target: ATXN2; (-) strand; PAM type: YTN; PAM sequence: TTA
gctttcttattcagtagtag

SEQ ID NO: 79162 - DNA, 20 bp, Artificial Sequence
  Description of Artificial Sequence: Synthetic oligonucleotide
  Target: ATXN2; (-) strand; PAM type: YTN; PAM sequence: CTA
gtacaagttagctttcttat

SEQ ID NO: 79163 - DNA, 20 bp, Artificial Sequence
  Description of Artificial Sequence: Synthetic oligonucleotide
  Target: ATXN2; (-) strand; PAM type: YTN; PAM sequence: TTG
tctagtacaagttagctttc

SEQ ID NO: 79164 - DNA, 20 bp, Artificial Sequence
  Description of Artificial Sequence: Synthetic oligonucleotide
  Target: ATXN2; (-) strand; PAM type: YTN; PAM sequence: TTT
gtctagtacaagttagcttt

SEQ ID NO: 79165 - DNA, 20 bp, Artificial Sequence
  Description of Artificial Sequence: Synthetic oligonucleotide
  Target: ATXN2; (-) strand; PAM type: YTN; PAM sequence: CTT
tgtctagtacaagttagctt

SEQ ID NO: 79166 - DNA, 20 bp, Artificial Sequence
  Description of Artificial Sequence: Synthetic oligonucleotide
  Target: ATXN2; (-) strand; PAM type: YTN; PAM sequence: TTA
actttgtctagtacaagtta

SEQ ID NO: 79167 - DNA, 20 bp, Artificial Sequence
  Description of Artificial Sequence: Synthetic oligonucleotide
  Target: ATXN2; (-) strand; PAM type: YTN; PAM sequence: CTT
aactttgtctagtacaagtt

SEQ ID NO: 79168 - DNA, 20 bp, Artificial Sequence
  Description of Artificial Sequence: Synthetic oligonucleotide
  Target: ATXN2; (-) strand; PAM type: YTN; PAM sequence: CTG
tagaacttaactttgtctag

SEQ ID NO: 79169 - DNA, 20 bp, Artificial Sequence
  Description of Artificial Sequence: Synthetic oligonucleotide
  Target: ATXN2; (-) strand; PAM type: YTN; PAM sequence: TTC
ctgtagaacttaactttgtc

SEQ ID NO: 79170 - DNA, 20 bp, Artificial Sequence
  Description of Artificial Sequence: Synthetic oligonucleotide
  Target: ATXN2; (-) strand; PAM type: YTN; PAM sequence: CTT
cctgtagaacttaactttgt

SEQ ID NO: 79171 - DNA, 20 bp, Artificial Sequence
  Description of Artificial Sequence: Synthetic oligonucleotide
  Target: ATXN2; (-) strand; PAM type: YTN; PAM sequence: TTA
aaaacttcctgtagaactta

SEQ ID NO: 79172 - DNA, 20 bp, Artificial Sequence
  Description of Artificial Sequence: Synthetic oligonucleotide
  Target: ATXN2; (-) strand; PAM type: YTN; PAM sequence: CTA
ataattaaaaacttcctgta

SEQ ID NO: 79173 - DNA, 20 bp, Artificial Sequence
  Description of Artificial Sequence: Synthetic oligonucleotide
  Target: ATXN2; (-) strand; PAM type: YTN; PAM sequence: TTC
taataattaaaaacttcctg

SEQ ID NO: 79174 - DNA, 20 bp, Artificial Sequence
  Description of Artificial Sequence: Synthetic oligonucleotide
  Target: ATXN2; (-) strand; PAM type: YTN; PAM sequence: CTA
attctaataattaaaaactt

SEQ ID NO: 79175 - DNA, 20 bp, Artificial Sequence
  Description of Artificial Sequence: Synthetic oligonucleotide
  Target: ATXN2; (-) strand; PAM type: YTN; PAM sequence: TTC
catgaaactaattctaataa

SEQ ID NO: 79176 - DNA, 20 bp, Artificial Sequence
  Description of Artificial Sequence: Synthetic oligonucleotide
  Target: ATXN2; (-) strand; PAM type: YTN; PAM sequence: TTT
ccatgaaactaattctaata

SEQ ID NO: 79177 - DNA, 20 bp, Artificial Sequence
  Description of Artificial Sequence: Synthetic oligonucleotide
  Target: ATXN2; (-) strand; PAM type: YTN; PAM sequence: TTT
tccatgaaactaattctaat

SEQ ID NO: 79178 - DNA, 20 bp, Artificial Sequence
  Description of Artificial Sequence: Synthetic oligonucleotide
  Target: ATXN2; (-) strand; PAM type: YTN; PAM sequence: CTA
gcccaaattttccatgaaac

SEQ ID NO: 79179 - DNA, 20 bp, Artificial Sequence
  Description of Artificial Sequence: Synthetic oligonucleotide
  Target: ATXN2; (-) strand; PAM type: YTN; PAM sequence: TTA
agatctagcccaaattttcc

SEQ ID NO: 79180 - DNA, 20 bp, Artificial Sequence
  Description of Artificial Sequence: Synthetic oligonucleotide
  Target: ATXN2; (-) strand; PAM type: YTN; PAM sequence: TTT
aagatctagcccaaattttc

SEQ ID NO: 79181 - DNA, 20 bp, Artificial Sequence
  Description of Artificial Sequence: Synthetic oligonucleotide
  Target: ATXN2; (-) strand; PAM type: YTN; PAM sequence: CTT
taagatctagcccaaatttt

SEQ ID NO: 79182 - DNA, 20 bp, Artificial Sequence
  Description of Artificial Sequence: Synthetic oligonucleotide
  Target: ATXN2; (-) strand; PAM type: YTN; PAM sequence: TTA
ccctttaagatctagcccaa

SEQ ID NO: 79183 - DNA, 20 bp, Artificial Sequence
  Description of Artificial Sequence: Synthetic oligonucleotide
  Target: ATXN2; (-) strand; PAM type: YTN; PAM sequence: CTT
accctttaagatctagccca

SEQ ID NO: 79184 - DNA, 20 bp, Artificial Sequence
  Description of Artificial Sequence: Synthetic oligonucleotide
  Target: ATXN2; (-) strand; PAM type: YTN; PAM sequence: CTC
atacttaccctttaagatct

SEQ ID NO: 79185 - DNA, 20 bp, Artificial Sequence
  Description of Artificial Sequence: Synthetic oligonucleotide
  Target: ATXN2; (-) strand; PAM type: YTN; PAM sequence: TTC
gagatcctcatacttaccct

SEQ ID NO: 79186 - DNA, 20 bp, Artificial Sequence
  Description of Artificial Sequence: Synthetic oligonucleotide
  Target: ATXN2; (-) strand; PAM type: YTN; PAM sequence: CTG
ccattcgagatcctcatact

SEQ ID NO: 79187 - DNA, 20 bp, Artificial Sequence
  Description of Artificial Sequence: Synthetic oligonucleotide
  Target: ATXN2; (-) strand; PAM type: YTN; PAM sequence: TTC
tgccattcgagatcctcata

SEQ ID NO: 79188 - DNA, 20 bp, Artificial Sequence
  Description of Artificial Sequence: Synthetic oligonucleotide
  Target: ATXN2; (-) strand; PAM type: YTN; PAM sequence: TTG
ttctgccattcgagatcctc

SEQ ID NO: 79189 - DNA, 20 bp, Artificial Sequence
  Description of Artificial Sequence: Synthetic oligonucleotide
  Target: ATXN2; (-) strand; PAM type: YTN; PAM sequence: CTC
catcattgttctgccattcg

SEQ ID NO: 79190 - DNA, 20 bp, Artificial Sequence
  Description of Artificial Sequence: Synthetic oligonucleotide
  Target: ATXN2; (-) strand; PAM type: YTN; PAM sequence: CTC
ctccatcattgttctgccat

SEQ ID NO: 79191 - DNA, 20 bp, Artificial Sequence
  Description of Artificial Sequence: Synthetic oligonucleotide
  Target: ATXN2; (-) strand; PAM type: YTN; PAM sequence: TTG
ctcctccatcattgttctgc

SEQ ID NO: 79192 - DNA, 20 bp, Artificial Sequence
  Description of Artificial Sequence: Synthetic oligonucleotide
  Target: ATXN2; (-) strand; PAM type: YTN; PAM sequence: CTT
gctcctccatcattgttctg

SEQ ID NO: 79193 - DNA, 20 bp, Artificial Sequence
  Description of Artificial Sequence: Synthetic oligonucleotide
  Target: ATXN2; (-) strand; PAM type: YTN; PAM sequence: TTG
cttgctcctccatcattgtt

SEQ ID NO: 79194 - DNA, 20 bp, Artificial Sequence
  Description of Artificial Sequence: Synthetic oligonucleotide
  Target: ATXN2; (-) strand; PAM type: YTN; PAM sequence: CTT
gcttgctcctccatcattgt

SEQ ID NO: 79195 - DNA, 20 bp, Artificial Sequence
  Description of Artificial Sequence: Synthetic oligonucleotide
  Target: ATXN2; (-) strand; PAM type: YTN; PAM sequence: CTC
ttgcttgctcctccatcatt

SEQ ID NO: 79196 - DNA, 20 bp, Artificial Sequence
  Description of Artificial Sequence: Synthetic oligonucleotide
  Target: ATXN2; (-) strand; PAM type: YTN; PAM sequence: CTG
cctcttgcttgctcctccat

SEQ ID NO: 79197 - DNA, 20 bp, Artificial Sequence
  Description of Artificial Sequence: Synthetic oligonucleotide
  Target: ATXN2; (-) strand; PAM type: YTN; PAM sequence: TTG
tggaggtccagtgcccagtg

SEQ ID NO: 79198 - DNA, 20 bp, Artificial Sequence
  Description of Artificial Sequence: Synthetic oligonucleotide
  Target: ATXN2; (-) strand; PAM type: YTN; PAM sequence: CTT
gtggaggtccagtgcccagt

SEQ ID NO: 79199 - DNA, 20 bp, Artificial Sequence
  Description of Artificial Sequence: Synthetic oligonucleotide
  Target: ATXN2; (-) strand; PAM type: YTN; PAM sequence: CTG
cttgtggaggtccagtgccc

SEQ ID NO: 79200 - DNA, 20 bp, Artificial Sequence
  Description of Artificial Sequence: Synthetic oligonucleotide
  Target: ATXN2; (-) strand; PAM type: YTN; PAM sequence: CTC
actgcttgtggaggtccagt

SEQ ID NO: 79201 - DNA, 20 bp, Artificial Sequence
  Description of Artificial Sequence: Synthetic oligonucleotide
  Target: ATXN2; (-) strand; PAM type: YTN; PAM sequence: TTC
ctcactgcttgtggaggtcc

SEQ ID NO: 79202 - DNA, 20 bp, Artificial Sequence
  Description of Artificial Sequence: Synthetic oligonucleotide
  Target: ATXN2; (-) strand; PAM type: YTN; PAM sequence: CTT
cctcactgcttgtggaggtc

SEQ ID NO: 79203 - DNA, 20 bp, Artificial Sequence
  Description of Artificial Sequence: Synthetic oligonucleotide
  Target: ATXN2; (-) strand; PAM type: YTN; PAM sequence: CTC
cttcctcactgcttgtggag

SEQ ID NO: 79204 - DNA, 20 bp, Artificial Sequence
  Description of Artificial Sequence: Synthetic oligonucleotide
  Target: ATXN2; (-) strand; PAM type: YTN; PAM sequence: TTA
aatcaagatggtctccttcc

SEQ ID NO: 79205 - DNA, 20 bp, Artificial Sequence
  Description of Artificial Sequence: Synthetic oligonucleotide
  Target: ATXN2; (-) strand; PAM type: YTN; PAM sequence: TTT
aaatcaagatggtctccttc

SEQ ID NO: 79206 - DNA, 20 bp, Artificial Sequence
  Description of Artificial Sequence: Synthetic oligonucleotide
  Target: ATXN2; (-) strand; PAM type: YTN; PAM sequence: CTC
catttaaatcaagatggtct

SEQ ID NO: 79207 - DNA, 20 bp, Artificial Sequence
  Description of Artificial Sequence: Synthetic oligonucleotide
  Target: ATXN2; (-) strand; PAM type: YTN; PAM sequence: TTC
aaaaatatgacctccattta

SEQ ID NO: 79208 - DNA, 20 bp, Artificial Sequence
  Description of Artificial Sequence: Synthetic oligonucleotide
  Target: ATXN2; (-) strand; PAM type: YTN; PAM sequence: CTT
caaaaatatgacctccattt

SEQ ID NO: 79209 - DNA, 20 bp, Artificial Sequence
  Description of Artificial Sequence: Synthetic oligonucleotide
  Target: ATXN2; (-) strand; PAM type: YTN; PAM sequence: CTC
ttcaaaaatatgacctccat

SEQ ID NO: 79210 - DNA, 20 bp, Artificial Sequence
  Description of Artificial Sequence: Synthetic oligonucleotide
  Target: ATXN2; (-) strand; PAM type: YTN; PAM sequence: TTA
actcttcaaaaatatgacct

SEQ ID NO: 79211 - DNA, 20 bp, Artificial Sequence
  Description of Artificial Sequence: Synthetic oligonucleotide
  Target: ATXN2; (-) strand; PAM type: YTN; PAM sequence: TTC
ccattaactcttcaaaaata

SEQ ID NO: 79212 - DNA, 20 bp, Artificial Sequence
  Description of Artificial Sequence: Synthetic oligonucleotide
  Target: ATXN2; (-) strand; PAM type: YTN; PAM sequence: TTT
cccattaactcttcaaaaat

SEQ ID NO: 79213 - DNA, 20 bp, Artificial Sequence
  Description of Artificial Sequence: Synthetic oligonucleotide
  Target: ATXN2; (-) strand; PAM type: YTN; PAM sequence: CTG
atcatgtttcccattaactc

SEQ ID NO: 79214 - DNA, 20 bp, Artificial Sequence
  Description of Artificial Sequence: Synthetic oligonucleotide
  Target: ATXN2; (-) strand; PAM type: YTN; PAM sequence: TTC
tgatcatgtttcccattaac

SEQ ID NO: 79215 - DNA, 20 bp, Artificial Sequence
  Description of Artificial Sequence: Synthetic oligonucleotide
  Target: ATXN2; (-) strand; PAM type: YTN; PAM sequence: TTT
ctgatcatgtttcccattaa

SEQ ID NO: 79216 - DNA, 20 bp, Artificial Sequence
  Description of Artificial Sequence: Synthetic oligonucleotide
  Target: ATXN2; (-) strand; PAM type: YTN; PAM sequence: CTT
tctgatcatgtttcccatta

SEQ ID NO: 79217 - DNA, 20 bp, Artificial Sequence
  Description of Artificial Sequence: Synthetic oligonucleotide
  Target: ATXN2; (-) strand; PAM type: YTN; PAM sequence: TTA
cctttctgatcatgtttccc

SEQ ID NO: 79218 - DNA, 20 bp, Artificial Sequence
  Description of Artificial Sequence: Synthetic oligonucleotide
  Target: ATXN2; (-) strand; PAM type: YTN; PAM sequence: TTT
acctttctgatcatgtttcc

SEQ ID NO: 79219 - DNA, 20 bp, Artificial Sequence
  Description of Artificial Sequence: Synthetic oligonucleotide
  Target: ATXN2; (-) strand; PAM type: YTN; PAM sequence: TTT
tacctttctgatcatgtttc

SEQ ID NO: 79220 - DNA, 20 bp, Artificial Sequence
  Description of Artificial Sequence: Synthetic oligonucleotide
  Target: ATXN2; (-) strand; PAM type: YTN; PAM sequence: CTC
cattttacctttctgatcat

SEQ ID NO: 79221 - DNA, 20 bp, Artificial Sequence
  Description of Artificial Sequence: Synthetic oligonucleotide
  Target: ATXN2; (-) strand; PAM type: YTN; PAM sequence: CTA
atagaactccattttacctt

SEQ ID NO: 79222 - DNA, 20 bp, Artificial Sequence
  Description of Artificial Sequence: Synthetic oligonucleotide
  Target: ATXN2; (-) strand; PAM type: YTN; PAM sequence: CTG
acccctaatagaactccatt

SEQ ID NO: 79223 - DNA, 20 bp, Artificial Sequence
  Description of Artificial Sequence: Synthetic oligonucleotide
  Target: ATXN2; (-) strand; PAM type: YTN; PAM sequence: TTG
ctgacccctaatagaactcc

SEQ ID NO: 79224 - DNA, 20 bp, Artificial Sequence
  Description of Artificial Sequence: Synthetic oligonucleotide
  Target: ATXN2; (-) strand; PAM type: YTN; PAM sequence: TTT
gctgacccctaatagaactc

SEQ ID NO: 79225 - DNA, 20 bp, Artificial Sequence
  Description of Artificial Sequence: Synthetic oligonucleotide
  Target: ATXN2; (-) strand; PAM type: YTN; PAM sequence: TTA
agccatgtgaaaataggcca

SEQ ID NO: 79226 - DNA, 20 bp, Artificial Sequence
  Description of Artificial Sequence: Synthetic oligonucleotide
  Target: ATXN2; (-) strand; PAM type: YTN; PAM sequence: TTT
aagccatgtgaaaataggcc

SEQ ID NO: 79227 - DNA, 20 bp, Artificial Sequence
  Description of Artificial Sequence: Synthetic oligonucleotide
  Target: ATXN2; (-) strand; PAM type: YTN; PAM sequence: CTT
taagccatgtgaaaataggc

SEQ ID NO: 79228 - DNA, 20 bp, Artificial Sequence
  Description of Artificial Sequence: Synthetic oligonucleotide
  Target: ATXN2; (-) strand; PAM type: YTN; PAM sequence: CTG
agctttaagccatgtgaaaa

SEQ ID NO: 79229 - DNA, 20 bp, Artificial Sequence
  Description of Artificial Sequence: Synthetic oligonucleotide
  Target: ATXN2; (-) strand; PAM type: YTN; PAM sequence: TTC
tgagctttaagccatgtgaa

SEQ ID NO: 79230 - DNA, 20 bp, Artificial Sequence
  Description of Artificial Sequence: Synthetic oligonucleotide
  Target: ATXN2; (-) strand; PAM type: YTN; PAM sequence: TTA
cagtgtaaaaaatattctga

SEQ ID NO: 79231 - DNA, 20 bp, Artificial Sequence
  Description of Artificial Sequence: Synthetic oligonucleotide
  Target: ATXN2; (-) strand; PAM type: YTN; PAM sequence: TTT
acagtgtaaaaaatattctg

SEQ ID NO: 79232 - DNA, 20 bp, Artificial Sequence
  Description of Artificial Sequence: Synthetic oligonucleotide
  Target: ATXN2; (-) strand; PAM type: YTN; PAM sequence: CTT
tacagtgtaaaaaatattct

SEQ ID NO: 79233 - DNA, 20 bp, Artificial Sequence
  Description of Artificial Sequence: Synthetic oligonucleotide
  Target: ATXN2; (-) strand; PAM type: YTN; PAM sequence: CTC
tttacagtgtaaaaaatatt

SEQ ID NO: 79234 - DNA, 20 bp, Artificial Sequence
  Description of Artificial Sequence: Synthetic oligonucleotide
  Target: ATXN2; (-) strand; PAM type: YTN; PAM sequence: CTA
aaagctctttacagtgtaaa

SEQ ID NO: 79235 - DNA, 20 bp, Artificial Sequence
  Description of Artificial Sequence: Synthetic oligonucleotide
  Target: ATXN2; (-) strand; PAM type: YTN; PAM sequence: CTG
acctaaaagctctttacagt

SEQ ID NO: 79236 - DNA, 20 bp, Artificial Sequence
  Description of Artificial Sequence: Synthetic oligonucleotide
  Target: ATXN2; (-) strand; PAM type: YTN; PAM sequence: TTA
caggtgtgagccaccgtgcc

SEQ ID NO: 79237 - DNA, 20 bp, Artificial Sequence
  Description of Artificial Sequence: Synthetic oligonucleotide
  Target: ATXN2; (-) strand; PAM type: YTN; PAM sequence: CTG
ggattacaggtgtgagccac

SEQ ID NO: 79238 - DNA, 20 bp, Artificial Sequence
  Description of Artificial Sequence: Synthetic oligonucleotide
  Target: ATXN2; (-) strand; PAM type: YTN; PAM sequence: CTC
ccaaagtgctgggattacag

SEQ ID NO: 79239 - DNA, 20 bp, Artificial Sequence
  Description of Artificial Sequence: Synthetic oligonucleotide
  Target: ATXN2; (-) strand; PAM type: YTN; PAM sequence: CTG
cctcccaaagtgctgggatt

SEQ ID NO: 79240 - DNA, 20 bp, Artificial Sequence
  Description of Artificial Sequence: Synthetic oligonucleotide
  Target: ATXN2; (-) strand; PAM type: YTN; PAM sequence: CTC
tgcctcccaaagtgctggga

SEQ ID NO: 79241 - DNA, 20 bp, Artificial Sequence
  Description of Artificial Sequence: Synthetic oligonucleotide
  Target: ATXN2; (-) strand; PAM type: YTN; PAM sequence: CTG
cccacctctgcctcccaaag

SEQ ID NO: 79242 - DNA, 20 bp, Artificial Sequence
  Description of Artificial Sequence: Synthetic oligonucleotide
  Target: ATXN2; (-) strand; PAM type: YTN; PAM sequence: CTC
aggtgatctgcccacctctg

SEQ ID NO: 79243 - DNA, 20 bp, Artificial Sequence
  Description of Artificial Sequence: Synthetic oligonucleotide
  Target: ATXN2; (-) strand; PAM type: YTN; PAM sequence: CTG
atctcaggtgatctgcccac

SEQ ID NO: 79244 - DNA, 20 bp, Artificial Sequence
  Description of Artificial Sequence: Synthetic oligonucleotide
  Target: ATXN2; (-) strand; PAM type: YTN; PAM sequence: CTC
ctgatctcaggtgatctgcc

SEQ ID NO: 79245 - DNA, 20 bp, Artificial Sequence
  Description of Artificial Sequence: Synthetic oligonucleotide
  Target: ATXN2; (-) strand; PAM type: YTN; PAM sequence: CTG
gtctcctgatctcaggtgat

SEQ ID NO: 79246 - DNA, 20 bp, Artificial Sequence
  Description of Artificial Sequence: Synthetic oligonucleotide
  Target: ATXN2; (-) strand; PAM type: YTN; PAM sequence: TTG
gccaggctggtctcctgatc

SEQ ID NO: 79247 - DNA, 20 bp, Artificial Sequence
  Description of Artificial Sequence: Synthetic oligonucleotide
  Target: ATXN2; (-) strand; PAM type: YTN; PAM sequence: TTC
gccacattggccaggctggt

SEQ ID NO: 79248 - DNA, 20 bp, Artificial Sequence
  Description of Artificial Sequence: Synthetic oligonucleotide
  Target: ATXN2; (-) strand; PAM type: YTN; PAM sequence: TTT
cgccacattggccaggctgg

SEQ ID NO: 79249 - DNA, 20 bp, Artificial Sequence
  Description of Artificial Sequence: Synthetic oligonucleotide
  Target: ATXN2; (-) strand; PAM type: YTN; PAM sequence: TTA
gtaaagatggggtttcgcca

SEQ ID NO: 79250 - DNA, 20 bp, Artificial Sequence
  Description of Artificial Sequence: Synthetic oligonucleotide
  Target: ATXN2; (-) strand; PAM type: YTN; PAM sequence: TTT
agtaaagatggggtttcgcc

SEQ ID NO: 79251 - DNA, 20 bp, Artificial Sequence
  Description of Artificial Sequence: Synthetic oligonucleotide
  Target: ATXN2; (-) strand; PAM type: YTN; PAM sequence: TTT
tagtaaagatggggtttcgc

SEQ ID NO: 79252 - DNA, 20 bp, Artificial Sequence
  Description of Artificial Sequence: Synthetic oligonucleotide
  Target: ATXN2; (-) strand; PAM type: YTN; PAM sequence: TTT
ttagtaaagatggggtttcg

SEQ ID NO: 79253 - DNA, 20 bp, Artificial Sequence
  Description of Artificial Sequence: Synthetic oligonucleotide
  Target: ATXN2; (-) strand; PAM type: YTN; PAM sequence: TTG
tatttttagtaaagatgggg

SEQ ID NO: 79254 - DNA, 20 bp, Artificial Sequence
  Description of Artificial Sequence: Synthetic oligonucleotide
  Target: ATXN2; (-) strand; PAM type: YTN; PAM sequence: TTT
gtatttttagtaaagatggg

SEQ ID NO: 79255 - DNA, 20 bp, Artificial Sequence
  Description of Artificial Sequence: Synthetic oligonucleotide
  Target: ATXN2; (-) strand; PAM type: YTN; PAM sequence: TTT
tgtatttttagtaaagatgg

SEQ ID NO: 79256 - DNA, 20 bp, Artificial Sequence
  Description of Artificial Sequence: Synthetic oligonucleotide
  Target: ATXN2; (-) strand; PAM type: YTN; PAM sequence: TTT
ttgtatttttagtaaagatg

SEQ ID NO: 79257 - DNA, 20 bp, Artificial Sequence
  Description of Artificial Sequence: Synthetic oligonucleotide
  Target: ATXN2; (-) strand; PAM type: YTN; PAM sequence: CTA
atttttgtatttttagtaaa

SEQ ID NO: 79258 - DNA, 20 bp, Artificial Sequence
  Description of Artificial Sequence: Synthetic oligonucleotide
  Target: ATXN2; (-) strand; PAM type: YTN; PAM sequence: CTG
ccacgcccagctaatttttg

SEQ ID NO: 79259 - DNA, 20 bp, Artificial Sequence
  Description of Artificial Sequence: Synthetic oligonucleotide
  Target: ATXN2; (-) strand; PAM type: YTN; PAM sequence: TTA
caggcacatgctgccacgcc

SEQ ID NO: 79260 - DNA, 20 bp, Artificial Sequence
  Description of Artificial Sequence: Synthetic oligonucleotide
  Target: ATXN2; (-) strand; PAM type: YTN; PAM sequence: CTG
ggattacaggcacatgctgc

SEQ ID NO: 79261 - DNA, 20 bp, Artificial Sequence
  Description of Artificial Sequence: Synthetic oligonucleotide
  Target: ATXN2; (-) strand; PAM type: YTN; PAM sequence: TTC
ccgagtaactgggattacag

SEQ ID NO: 79262 - DNA, 20 bp, Artificial Sequence
  Description of Artificial Sequence: Synthetic oligonucleotide
  Target: ATXN2; (-) strand; PAM type: YTN; PAM sequence: CTT
cccgagtaactgggattaca

SEQ ID NO: 79263 - DNA, 20 bp, Artificial Sequence
  Description of Artificial Sequence: Synthetic oligonucleotide
  Target: ATXN2; (-) strand; PAM type: YTN; PAM sequence: CTC
agcttcccgagtaactggga

SEQ ID NO: 79264 - DNA, 20 bp, Artificial Sequence
  Description of Artificial Sequence: Synthetic oligonucleotide
  Target: ATXN2; (-) strand; PAM type: YTN; PAM sequence: CTG
tctcagcttcccgagtaact

SEQ ID NO: 79265 - DNA, 20 bp, Artificial Sequence
  Description of Artificial Sequence: Synthetic oligonucleotide
  Target: ATXN2; (-) strand; PAM type: YTN; PAM sequence: CTC
ctgtctcagcttcccgagta

SEQ ID NO: 79266 - DNA, 20 bp, Artificial Sequence
  Description of Artificial Sequence: Synthetic oligonucleotide
  Target: ATXN2; (-) strand; PAM type: YTN; PAM sequence: TTC
tcctgtctcagcttcccgag

SEQ ID NO: 79267 - DNA, 20 bp, Artificial Sequence
  Description of Artificial Sequence: Synthetic oligonucleotide
  Target: ATXN2; (-) strand; PAM type: YTN; PAM sequence: TTC
aggcgattctcctgtctcag

SEQ ID NO: 79268 - DNA, 20 bp, Artificial Sequence
  Description of Artificial Sequence: Synthetic oligonucleotide
  Target: ATXN2; (-) strand; PAM type: YTN; PAM sequence: CTG
ggttcaggcgattctcctgt

SEQ ID NO: 79269 - DNA, 20 bp, Artificial Sequence
  Description of Artificial Sequence: Synthetic oligonucleotide
  Target: ATXN2; (-) strand; PAM type: YTN; PAM sequence: CTC
ctgggttcaggcgattctcc

SEQ ID NO: 79270 - DNA, 20 bp, Artificial Sequence
  Description of Artificial Sequence: Synthetic oligonucleotide
  Target: ATXN2; (-) strand; PAM type: YTN; PAM sequence: CTG
cctcctgggttcaggcgatt

SEQ ID NO: 79271 - DNA, 20 bp, Artificial Sequence
  Description of Artificial Sequence: Synthetic oligonucleotide
  Target: ATXN2; (-) strand; PAM type: YTN; PAM sequence: CTC
tgcctcctgggttcaggcga

SEQ ID NO: 79272 - DNA, 20 bp, Artificial Sequence
  Description of Artificial Sequence: Synthetic oligonucleotide
  Target: ATXN2; (-) strand; PAM type: YTN; PAM sequence: CTG
caacctctgcctcctgggtt

SEQ ID NO: 79273 - DNA, 20 bp, Artificial Sequence
  Description of Artificial Sequence: Synthetic oligonucleotide
  Target: ATXN2; (-) strand; PAM type: YTN; PAM sequence: CTC
actgcaacctctgcctcctg

SEQ ID NO: 79274 - DNA, 20 bp, Artificial Sequence
  Description of Artificial Sequence: Synthetic oligonucleotide
  Target: ATXN2; (-) strand; PAM type: YTN; PAM sequence: TTG
gctcactgcaacctctgcct

SEQ ID NO: 79275 - DNA, 20 bp, Artificial Sequence
  Description of Artificial Sequence: Synthetic oligonucleotide
  Target: ATXN2; (-) strand; PAM type: YTN; PAM sequence: CTT
ggctcactgcaacctctgcc

SEQ ID NO: 79276 - DNA, 20 bp, Artificial Sequence
  Description of Artificial Sequence: Synthetic oligonucleotide
  Target: ATXN2; (-) strand; PAM type: YTN; PAM sequence: CTG
gagtgcagtggtgcaatctt

SEQ ID NO: 79277 - DNA, 20 bp, Artificial Sequence
  Description of Artificial Sequence: Synthetic oligonucleotide
  Target: ATXN2; (-) strand; PAM type: YTN; PAM sequence: CTC
aggctggagtgcagtggtgc

SEQ ID NO: 79278 - DNA, 20 bp, Artificial Sequence
  Description of Artificial Sequence: Synthetic oligonucleotide
  Target: ATXN2; (-) strand; PAM type: YTN; PAM sequence: TTG
ctcaggctggagtgcagtgg

SEQ ID NO: 79279 - DNA, 20 bp, Artificial Sequence
  Description of Artificial Sequence: Synthetic oligonucleotide
  Target: ATXN2; (-) strand; PAM type: YTN; PAM sequence: CTG
tgttgctcaggctggagtgc

SEQ ID NO: 79280 - DNA, 20 bp, Artificial Sequence
  Description of Artificial Sequence: Synthetic oligonucleotide
  Target: ATXN2; (-) strand; PAM type: YTN; PAM sequence: TTG
ctgtgttgctcaggctggag

SEQ ID NO: 79281 - DNA, 20 bp, Artificial Sequence
  Description of Artificial Sequence: Synthetic oligonucleotide
  Target: ATXN2; (-) strand; PAM type: YTN; PAM sequence: CTT
gctgtgttgctcaggctgga

SEQ ID NO: 79282 - DNA, 20 bp, Artificial Sequence
  Description of Artificial Sequence: Synthetic oligonucleotide
  Target: ATXN2; (-) strand; PAM type: YTN; PAM sequence: TTG
agacagagtcttgctgtgtt

SEQ ID NO: 79283 - DNA, 20 bp, Artificial Sequence
  Description of Artificial Sequence: Synthetic oligonucleotide
  Target: ATXN2; (-) strand; PAM type: YTN; PAM sequence: TTT
gagacagagtcttgctgtgt

SEQ ID NO: 79284 - DNA, 20 bp, Artificial Sequence
  Description of Artificial Sequence: Synthetic oligonucleotide
  Target: ATXN2; (-) strand; PAM type: YTN; PAM sequence: TTT
tgagacagagtcttgctgtg

SEQ ID NO: 79285 - DNA, 20 bp, Artificial Sequence
  Description of Artificial Sequence: Synthetic oligonucleotide
  Target: ATXN2; (-) strand; PAM type: YTN; PAM sequence: TTT
ttgagacagagtcttgctgt

SEQ ID NO: 79286 - DNA, 20 bp, Artificial Sequence
  Description of Artificial Sequence: Synthetic oligonucleotide
  Target: ATXN2; (-) strand; PAM type: YTN; PAM sequence: TTT
tttgagacagagtcttgctg

SEQ ID NO: 79287 - DNA, 20 bp, Artificial Sequence
  Description of Artificial Sequence: Synthetic oligonucleotide
  Target: ATXN2; (-) strand; PAM type: YTN; PAM sequence: TTT
ttttgagacagagtcttgct

SEQ ID NO: 79288 - DNA, 20 bp, Artificial Sequence
  Description of Artificial Sequence: Synthetic oligonucleotide
  Target: ATXN2; (-) strand; PAM type: YTN; PAM sequence: TTT
tttttgagacagagtcttgc

SEQ ID NO: 79289 - DNA, 20 bp, Artificial Sequence
  Description of Artificial Sequence: Synthetic oligonucleotide
  Target: ATXN2; (-) strand; PAM type: YTN; PAM sequence: TTT
ttttttgagacagagtcttg

SEQ ID NO: 79290 - DNA, 20 bp, Artificial Sequence
  Description of Artificial Sequence: Synthetic oligonucleotide
  Target: ATXN2; (-) strand; PAM type: YTN; PAM sequence: TTT
tttttttgagacagagtctt

SEQ ID NO: 79291 - DNA, 20 bp, Artificial Sequence
  Description of Artificial Sequence: Synthetic oligonucleotide
  Target: ATXN2; (-) strand; PAM type: YTN; PAM sequence: TTT
ttttttttgagacagagtct

SEQ ID NO: 79292 - DNA, 20 bp, Artificial Sequence
  Description of Artificial Sequence: Synthetic oligonucleotide
  Target: ATXN2; (-) strand; PAM type: YTN; PAM sequence: TTT
tttttttttgagacagagtc

SEQ ID NO: 79293 - DNA, 20 bp, Artificial Sequence
  Description of Artificial Sequence: Synthetic oligonucleotide
  Target: ATXN2; (-) strand; PAM type: YTN; PAM sequence: TTT
ttttttttttgagacagagt

SEQ ID NO: 79294 - DNA, 20 bp, Artificial Sequence
  Description of Artificial Sequence: Synthetic oligonucleotide
  Target: ATXN2; (-) strand; PAM type: YTN; PAM sequence: TTT
tttttttttttgagacagag

SEQ ID NO: 79295 - DNA, 20 bp, Artificial Sequence
  Description of Artificial Sequence: Synthetic oligonucleotide
  Target: ATXN2; (-) strand; PAM type: YTN; PAM sequence: TTT
ttttttttttttgagacaga

SEQ ID NO: 79296 - DNA, 20 bp, Artificial Sequence
  Description of Artificial Sequence: Synthetic oligonucleotide
  Target: ATXN2; (-) strand; PAM type: YTN; PAM sequence: CTT
tttttttttttttgagacag

SEQ ID NO: 79297 - DNA, 20 bp, Artificial Sequence
  Description of Artificial Sequence: Synthetic oligonucleotide
  Target: ATXN2; (-) strand; PAM type: YTN; PAM sequence: TTA
aaagcccctttttttttttt

SEQ ID NO: 79298 - DNA, 20 bp, Artificial Sequence
  Description of Artificial Sequence: Synthetic oligonucleotide
  Target: ATXN2; (-) strand; PAM type: YTN; PAM sequence: TTT
aaaagccccttttttttttt

SEQ ID NO: 79299 - DNA, 20 bp, Artificial Sequence
  Description of Artificial Sequence: Synthetic oligonucleotide
  Target: ATXN2; (-) strand; PAM type: YTN; PAM sequence: TTT
taaaagcccctttttttttt

SEQ ID NO: 79300 - DNA, 20 bp, Artificial Sequence
  Description of Artificial Sequence: Synthetic oligonucleotide
  Target: ATXN2; (-) strand; PAM type: YTN; PAM sequence: TTA
catattttaaaagccccttt

SEQ ID NO: 79301 - DNA, 20 bp, Artificial Sequence
  Description of Artificial Sequence: Synthetic oligonucleotide
  Target: ATXN2; (-) strand; PAM type: YTN; PAM sequence: TTT
acatattttaaaagcccctt

SEQ ID NO: 79302 - DNA, 20 bp, Artificial Sequence
  Description of Artificial Sequence: Synthetic oligonucleotide
  Target: ATXN2; (-) strand; PAM type: YTN; PAM sequence: CTT
tacatattttaaaagcccct

SEQ ID NO: 79303 - DNA, 20 bp, Artificial Sequence
  Description of Artificial Sequence: Synthetic oligonucleotide
  Target: ATXN2; (-) strand; PAM type: YTN; PAM sequence: TTC
tttacatattttaaaagccc

SEQ ID NO: 79304 - DNA, 20 bp, Artificial Sequence
  Description of Artificial Sequence: Synthetic oligonucleotide
  Target: ATXN2; (-) strand; PAM type: YTN; PAM sequence: TTT
ctttacatattttaaaagcc

SEQ ID NO: 79305 - DNA, 20 bp, Artificial Sequence
  Description of Artificial Sequence: Synthetic oligonucleotide
  Target: ATXN2; (-) strand; PAM type: YTN; PAM sequence: TTT
tctttacatattttaaaagc

SEQ ID NO: 79306 - DNA, 20 bp, Artificial Sequence
  Description of Artificial Sequence: Synthetic oligonucleotide
  Target: ATXN2; (-) strand; PAM type: YTN; PAM sequence: TTG
cacgttttctttacatattt

SEQ ID NO: 79307 - DNA, 20 bp, Artificial Sequence
  Description of Artificial Sequence: Synthetic oligonucleotide
  Target: ATXN2; (-) strand; PAM type: YTN; PAM sequence: TTT
gcacgttttctttacatatt

SEQ ID NO: 79308 - DNA, 20 bp, Artificial Sequence
  Description of Artificial Sequence: Synthetic oligonucleotide
  Target: ATXN2; (-) strand; PAM type: YTN; PAM sequence: TTG
tgtatgtttgcacgttttct

SEQ ID NO: 79309 - DNA, 20 bp, Artificial Sequence
  Description of Artificial Sequence: Synthetic oligonucleotide
  Target: ATXN2; (-) strand; PAM type: YTN; PAM sequence: TTT
gtgtatgtttgcacgttttc

SEQ ID NO: 79310 - DNA, 20 bp, Artificial Sequence
  Description of Artificial Sequence: Synthetic oligonucleotide
  Target: ATXN2; (-) strand; PAM type: YTN; PAM sequence: TTT
tgtgtatgtttgcacgtttt

SEQ ID NO: 79311 - DNA, 20 bp, Artificial Sequence
  Description of Artificial Sequence: Synthetic oligonucleotide
  Target: ATXN2; (-) strand; PAM type: YTN; PAM sequence: TTT
ttgtgtatgtttgcacgttt

SEQ ID NO: 79312 - DNA, 20 bp, Artificial Sequence
  Description of Artificial Sequence: Synthetic oligonucleotide
  Target: ATXN2; (-) strand; PAM type: YTN; PAM sequence: TTT
tttgtgtatgtttgcacgtt

SEQ ID NO: 79313 - DNA, 20 bp, Artificial Sequence
  Description of Artificial Sequence: Synthetic oligonucleotide
  Target: ATXN2; (-) strand; PAM type: YTN; PAM sequence: TTT
ttttgtgtatgtttgcacgt

SEQ ID NO: 79314 - DNA, 20 bp, Artificial Sequence
  Description of Artificial Sequence: Synthetic oligonucleotide
  Target: ATXN2; (-) strand; PAM type: YTN; PAM sequence: TTG
cagtccatatacagtcccat

SEQ ID NO: 79315 - DNA, 20 bp, Artificial Sequence
  Description of Artificial Sequence: Synthetic oligonucleotide
  Target: ATXN2; (-) strand; PAM type: YTN; PAM sequence: TTT
gcagtccatatacagtccca

SEQ ID NO: 79316 - DNA, 20 bp, Artificial Sequence
  Description of Artificial Sequence: Synthetic oligonucleotide
  Target: ATXN2; (-) strand; PAM type: YTN; PAM sequence: CTT
tgcagtccatatacagtccc

SEQ ID NO: 79317 - DNA, 20 bp, Artificial Sequence
  Description of Artificial Sequence: Synthetic oligonucleotide
  Target: ATXN2; (-) strand; PAM type: YTN; PAM sequence: TTA
ggctttgcagtccatataca

SEQ ID NO: 79318 - DNA, 20 bp, Artificial Sequence
  Description of Artificial Sequence: Synthetic oligonucleotide
  Target: ATXN2; (-) strand; PAM type: YTN; PAM sequence: TTT
aggctttgcagtccatatac

SEQ ID NO: 79319 - DNA, 20 bp, Artificial Sequence
  Description of Artificial Sequence: Synthetic oligonucleotide
  Target: ATXN2; (-) strand; PAM type: YTN; PAM sequence: TTT
taggctttgcagtccatata

SEQ ID NO: 79320 - DNA, 20 bp, Artificial Sequence
  Description of Artificial Sequence: Synthetic oligonucleotide
  Target: ATXN2; (-) strand; PAM type: YTN; PAM sequence: TTA
ccagtgtgaaccaccgtgcc

SEQ ID NO: 79321 - DNA, 20 bp, Artificial Sequence
  Description of Artificial Sequence: Synthetic oligonucleotide
  Target: ATXN2; (-) strand; PAM type: YTN; PAM sequence: CTG
ggattaccagtgtgaaccac

SEQ ID NO: 79322 - DNA, 20 bp, Artificial Sequence
  Description of Artificial Sequence: Synthetic oligonucleotide
  Target: ATXN2; (-) strand; PAM type: YTN; PAM sequence: CTC
ccaaagtgctgggattacca

SEQ ID NO: 79323 - DNA, 20 bp, Artificial Sequence
  Description of Artificial Sequence: Synthetic oligonucleotide
  Target: ATXN2; (-) strand; PAM type: YTN; PAM sequence: CTG
cggcctcccaaagtgctggg

SEQ ID NO: 79324 - DNA, 20 bp, Artificial Sequence
  Description of Artificial Sequence: Synthetic oligonucleotide
  Target: ATXN2; (-) strand; PAM type: YTN; PAM sequence: CTG
ctgcggcctcccaaagtgct

SEQ ID NO: 79325 - DNA, 20 bp, Artificial Sequence
  Description of Artificial Sequence: Synthetic oligonucleotide
  Target: ATXN2; (-) strand; PAM type: YTN; PAM sequence: CTC
aggtgatccacctgctgcgg

SEQ ID NO: 79326 - DNA, 20 bp, Artificial Sequence
  Description of Artificial Sequence: Synthetic oligonucleotide
  Target: ATXN2; (-) strand; PAM type: YTN; PAM sequence: CTG
acctcaggtgatccacctgc

SEQ ID NO: 79327 - DNA, 20 bp, Artificial Sequence
  Description of Artificial Sequence: Synthetic oligonucleotide
  Target: ATXN2; (-) strand; PAM type: YTN; PAM sequence: CTC
ctgacctcaggtgatccacc

SEQ ID NO: 79328 - DNA, 20 bp, Artificial Sequence
  Description of Artificial Sequence: Synthetic oligonucleotide
  Target: ATXN2; (-) strand; PAM type: YTN; PAM sequence: CTC
gaactcctgacctcaggtga

SEQ ID NO: 79329 - DNA, 20 bp, Artificial Sequence
  Description of Artificial Sequence: Synthetic oligonucleotide
  Target: ATXN2; (-) strand; PAM type: YTN; PAM sequence: CTG
gtctcgaactcctgacctca

SEQ ID NO: 79330 - DNA, 20 bp, Artificial Sequence
  Description of Artificial Sequence: Synthetic oligonucleotide
  Target: ATXN2; (-) strand; PAM type: YTN; PAM sequence: TTG
gtcaggctggtctcgaactc

SEQ ID NO: 79331 - DNA, 20 bp, Artificial Sequence
  Description of Artificial Sequence: Synthetic oligonucleotide
  Target: ATXN2; (-) strand; PAM type: YTN; PAM sequence: TTT
ggtcaggctggtctcgaact

SEQ ID NO: 79332 - DNA, 20 bp, Artificial Sequence
  Description of Artificial Sequence: Synthetic oligonucleotide
  Target: ATXN2; (-) strand; PAM type: YTN; PAM sequence: TTT
tggtcaggctggtctcgaac

SEQ ID NO: 79333 - DNA, 20 bp, Artificial Sequence
  Description of Artificial Sequence: Synthetic oligonucleotide
  Target: ATXN2; (-) strand; PAM type: YTN; PAM sequence: TTC
accattttggtcaggctggt

SEQ ID NO: 79334 - DNA, 20 bp, Artificial Sequence
  Description of Artificial Sequence: Synthetic oligonucleotide
  Target: ATXN2; (-) strand; PAM type: YTN; PAM sequence: TTT
caccattttggtcaggctgg

SEQ ID NO: 79335 - DNA, 20 bp, Artificial Sequence
  Description of Artificial Sequence: Synthetic oligonucleotide
  Target: ATXN2; (-) strand; PAM type: YTN; PAM sequence: TTA
gtagagatgggggtttcacc

SEQ ID NO: 79336 - DNA, 20 bp, Artificial Sequence
  Description of Artificial Sequence: Synthetic oligonucleotide
  Target: ATXN2; (-) strand; PAM type: YTN; PAM sequence: TTT
agtagagatgggggtttcac

SEQ ID NO: 79337 - DNA, 20 bp, Artificial Sequence
  Description of Artificial Sequence: Synthetic oligonucleotide
  Target: ATXN2; (-) strand; PAM type: YTN; PAM sequence: TTG
tatttagtagagatgggggt

SEQ ID NO: 79338 - DNA, 20 bp, Artificial Sequence
  Description of Artificial Sequence: Synthetic oligonucleotide
  Target: ATXN2; (-) strand; PAM type: YTN; PAM sequence: TTT
gtatttagtagagatggggg

SEQ ID NO: 79339 - DNA, 20 bp, Artificial Sequence
  Description of Artificial Sequence: Synthetic oligonucleotide
  Target: ATXN2; (-) strand; PAM type: YTN; PAM sequence: CTT
tgtatttagtagagatgggg

SEQ ID NO: 79340 - DNA, 20 bp, Artificial Sequence
  Description of Artificial Sequence: Synthetic oligonucleotide
  Target: ATXN2; (-) strand; PAM type: YTN; PAM sequence: TTC
tttgtatttagtagagatgg

SEQ ID NO: 79341 - DNA, 20 bp, Artificial Sequence
  Description of Artificial Sequence: Synthetic oligonucleotide
  Target: ATXN2; (-) strand; PAM type: YTN; PAM sequence: TTT
ctttgtatttagtagagatg

SEQ ID NO: 79342 - DNA, 20 bp, Artificial Sequence
  Description of Artificial Sequence: Synthetic oligonucleotide
  Target: ATXN2; (-) strand; PAM type: YTN; PAM sequence: CTA
atttctttgtatttagtaga

SEQ ID NO: 79343 - DNA, 20 bp, Artificial Sequence
  Description of Artificial Sequence: Synthetic oligonucleotide
  Target: ATXN2; (-) strand; PAM type: YTN; PAM sequence: CTC
ggctaatttctttgtattta

SEQ ID NO: 79344 - DNA, 20 bp, Artificial Sequence
  Description of Artificial Sequence: Synthetic oligonucleotide
  Target: ATXN2; (-) strand; PAM type: YTN; PAM sequence: TTA
taggcatgtgccaccacgct

SEQ ID NO: 79345 - DNA, 20 bp, Artificial Sequence
  Description of Artificial Sequence: Synthetic oligonucleotide
  Target: ATXN2; (-) strand; PAM type: YTN; PAM sequence: CTG
gggttataggcatgtgccac

SEQ ID NO: 79346 - DNA, 20 bp, Artificial Sequence
  Description of Artificial Sequence: Synthetic oligonucleotide
  Target: ATXN2; (-) strand; PAM type: YTN; PAM sequence: CTC
aagtagctggggttataggc

SEQ ID NO: 79347 - DNA, 20 bp, Artificial Sequence
  Description of Artificial Sequence: Synthetic oligonucleotide
  Target: ATXN2; (-) strand; PAM type: YTN; PAM sequence: CTC
tcaagtagctggggttatag

SEQ ID NO: 79348 - DNA, 20 bp, Artificial Sequence
  Description of Artificial Sequence: Synthetic oligonucleotide
  Target: ATXN2; (-) strand; PAM type: YTN; PAM sequence: CTC
agcctctcaagtagctgggg

SEQ ID NO: 79349 - DNA, 20 bp, Artificial Sequence
  Description of Artificial Sequence: Synthetic oligonucleotide
  Target: ATXN2; (-) strand; PAM type: YTN; PAM sequence: CTG
cctcagcctctcaagtagct

SEQ ID NO: 79350 - DNA, 20 bp, Artificial Sequence
  Description of Artificial Sequence: Synthetic oligonucleotide
  Target: ATXN2; (-) strand; PAM type: YTN; PAM sequence: CTC
ctgcctcagcctctcaagta

SEQ ID NO: 79351 - DNA, 20 bp, Artificial Sequence
  Description of Artificial Sequence: Synthetic oligonucleotide
  Target: ATXN2; (-) strand; PAM type: YTN; PAM sequence: TTC
tcctgcctcagcctctcaag

SEQ ID NO: 79352 - DNA, 20 bp, Artificial Sequence
  Description of Artificial Sequence: Synthetic oligonucleotide
  Target: ATXN2; (-) strand; PAM type: YTN; PAM sequence: TTC
aagtgattctcctgcctcag

SEQ ID NO: 79353 - DNA, 20 bp, Artificial Sequence
  Description of Artificial Sequence: Synthetic oligonucleotide
  Target: ATXN2; (-) strand; PAM type: YTN; PAM sequence: CTC
ccaggttcaagtgattctcc

SEQ ID NO: 79354 - DNA, 20 bp, Artificial Sequence
  Description of Artificial Sequence: Synthetic oligonucleotide
  Target: ATXN2; (-) strand; PAM type: YTN; PAM sequence: CTG
cctcccaggttcaagtgatt

SEQ ID NO: 79355 - DNA, 20 bp, Artificial Sequence
  Description of Artificial Sequence: Synthetic oligonucleotide
  Target: ATXN2; (-) strand; PAM type: YTN; PAM sequence: CTC
tgcctcccaggttcaagtga

SEQ ID NO: 79356 - DNA, 20 bp, Artificial Sequence
  Description of Artificial Sequence: Synthetic oligonucleotide
  Target: ATXN2; (-) strand; PAM type: YTN; PAM sequence: CTG
caacctctgcctcccaggtt

SEQ ID NO: 79357 - DNA, 20 bp, Artificial Sequence
  Description of Artificial Sequence: Synthetic oligonucleotide
  Target: ATXN2; (-) strand; PAM type: YTN; PAM sequence: CTC
actgcaacctctgcctccca

SEQ ID NO: 79358 - DNA, 20 bp, Artificial Sequence
  Description of Artificial Sequence: Synthetic oligonucleotide
  Target: ATXN2; (-) strand; PAM type: YTN; PAM sequence: TTG
gctcactgcaacctctgcct

SEQ ID NO: 79359 - DNA, 20 bp, Artificial Sequence
  Description of Artificial Sequence: Synthetic oligonucleotide
  Target: ATXN2; (-) strand; PAM type: YTN; PAM sequence: CTT
ggctcactgcaacctctgcc

SEQ ID NO: 79360 - DNA, 20 bp, Artificial Sequence
  Description of Artificial Sequence: Synthetic oligonucleotide
  Target: ATXN2; (-) strand; PAM type: YTN; PAM sequence: CTG
gagtgcaatggtgccatctt

SEQ ID NO: 79361 - DNA, 20 bp, Artificial Sequence
  Description of Artificial Sequence: Synthetic oligonucleotide
  Target: ATXN2; (-) strand; PAM type: YTN; PAM sequence: TTG
tcacccaggctggagtgcaa

SEQ ID NO: 79362 - DNA, 20 bp, Artificial Sequence
  Description of Artificial Sequence: Synthetic oligonucleotide
  Target: ATXN2; (-) strand; PAM type: YTN; PAM sequence: CTT
gtcacccaggctggagtgca

SEQ ID NO: 79363 - DNA, 20 bp, Artificial Sequence
  Description of Artificial Sequence: Synthetic oligonucleotide
  Target: ATXN2; (-) strand; PAM type: YTN; PAM sequence: CTC
ttgtcacccaggctggagtg

SEQ ID NO: 79364 - DNA, 20 bp, Artificial Sequence
  Description of Artificial Sequence: Synthetic oligonucleotide
  Target: ATXN2; (-) strand; PAM type: YTN; PAM sequence: TTG
ctcttgtcacccaggctgga

SEQ ID NO: 79365 - DNA, 20 bp, Artificial Sequence
  Description of Artificial Sequence: Synthetic oligonucleotide
  Target: ATXN2; (-) strand; PAM type: YTN; PAM sequence: TTT
gctcttgtcacccaggctgg

SEQ ID NO: 79366 - DNA, 20 bp, Artificial Sequence
  Description of Artificial Sequence: Synthetic oligonucleotide
  Target: ATXN2; (-) strand; PAM type: YTN; PAM sequence: TTT
tgctcttgtcacccaggctg

SEQ ID NO: 79367 - DNA, 20 bp, Artificial Sequence
  Description of Artificial Sequence: Synthetic oligonucleotide
  Target: ATXN2; (-) strand; PAM type: YTN; PAM sequence: TTG
agatggagttttgctcttgt

SEQ ID NO: 79368 - DNA, 20 bp, Artificial Sequence
  Description of Artificial Sequence: Synthetic oligonucleotide
  Target: ATXN2; (-) strand; PAM type: YTN; PAM sequence: TTT
gagatggagttttgctcttg

SEQ ID NO: 79369 - DNA, 20 bp, Artificial Sequence
  Description of Artificial Sequence: Synthetic oligonucleotide
  Target: ATXN2; (-) strand; PAM type: YTN; PAM sequence: TTT
tgagatggagttttgctctt

SEQ ID NO: 79370 - DNA, 20 bp, Artificial Sequence
  Description of Artificial Sequence: Synthetic oligonucleotide
  Target: ATXN2; (-) strand; PAM type: YTN; PAM sequence: TTT
ttgagatggagttttgctct

SEQ ID NO: 79371 - DNA, 20 bp, Artificial Sequence
  Description of Artificial Sequence: Synthetic oligonucleotide
  Target: ATXN2; (-) strand; PAM type: YTN; PAM sequence: TTT
tttgagatggagttttgctc

SEQ ID NO: 79372 - DNA, 20 bp, Artificial Sequence
  Description of Artificial Sequence: Synthetic oligonucleotide
  Target: ATXN2; (-) strand; PAM type: YTN; PAM sequence: TTT
ttttgagatggagttttgct

SEQ ID NO: 79373 - DNA, 20 bp, Artificial Sequence
  Description of Artificial Sequence: Synthetic oligonucleotide
  Target: ATXN2; (-) strand; PAM type: YTN; PAM sequence: TTT
tttttgagatggagttttgc

SEQ ID NO: 79374 - DNA, 20 bp, Artificial Sequence
  Description of Artificial Sequence: Synthetic oligonucleotide
  Target: ATXN2; (-) strand; PAM type: YTN; PAM sequence: TTT
ttttttgagatggagttttg

SEQ ID NO: 79375 - DNA, 20 bp, Artificial Sequence
  Description of Artificial Sequence: Synthetic oligonucleotide
  Target: ATXN2; (-) strand; PAM type: YTN; PAM sequence: TTT
tttttttgagatggagtttt

SEQ ID NO: 79376 - DNA, 20 bp, Artificial Sequence
  Description of Artificial Sequence: Synthetic oligonucleotide
  Target: ATXN2; (-) strand; PAM type: YTN; PAM sequence: TTT
ttttttttgagatggagttt

SEQ ID NO: 79377 - DNA, 20 bp, Artificial Sequence
  Description of Artificial Sequence: Synthetic oligonucleotide
  Target: ATXN2; (-) strand; PAM type: YTN; PAM sequence: TTT
tttttttttgagatggagtt

SEQ ID NO: 79378 - DNA, 20 bp, Artificial Sequence
  Description of Artificial Sequence: Synthetic oligonucleotide
  Target: ATXN2; (-) strand; PAM type: YTN; PAM sequence: TTG
ttttttttttttgagatgga

SEQ ID NO: 79379 - DNA, 20 bp, Artificial Sequence
  Description of Artificial Sequence: Synthetic oligonucleotide
  Target: ATXN2; (-) strand; PAM type: YTN; PAM sequence: TTT
gttttttttttttgagatgg

SEQ ID NO: 79380 - DNA, 20 bp, Artificial Sequence
  Description of Artificial Sequence: Synthetic oligonucleotide
  Target: ATXN2; (-) strand; PAM type: YTN; PAM sequence: TTC
gtaaagggccagatagtaaa

SEQ ID NO: 79381 - DNA, 20 bp, Artificial Sequence
  Description of Artificial Sequence: Synthetic oligonucleotide
  Target: ATXN2; (-) strand; PAM type: YTN; PAM sequence: CTT
cgtaaagggccagatagtaa

SEQ ID NO: 79382 - DNA, 20 bp, Artificial Sequence
  Description of Artificial Sequence: Synthetic oligonucleotide
  Target: ATXN2; (-) strand; PAM type: YTN; PAM sequence: CTG
tcaaacttcgtaaagggcca

SEQ ID NO: 79383 - DNA, 20 bp, Artificial Sequence
  Description of Artificial Sequence: Synthetic oligonucleotide
  Target: ATXN2; (-) strand; PAM type: YTN; PAM sequence: CTA
atccaaggcctgtcaaactt

SEQ ID NO: 79384 - DNA, 20 bp, Artificial Sequence
  Description of Artificial Sequence: Synthetic oligonucleotide
  Target: ATXN2; (-) strand; PAM type: YTN; PAM sequence: CTA
tgacctaatccaaggcctgt

SEQ ID NO: 79385 - DNA, 20 bp, Artificial Sequence
  Description of Artificial Sequence: Synthetic oligonucleotide
  Target: ATXN2; (-) strand; PAM type: YTN; PAM sequence: TTC
tatgacctaatccaaggcct

SEQ ID NO: 79386 - DNA, 20 bp, Artificial Sequence
  Description of Artificial Sequence: Synthetic oligonucleotide
  Target: ATXN2; (-) strand; PAM type: YTN; PAM sequence: TTT
ctatgacctaatccaaggcc

SEQ ID NO: 79387 - DNA, 20 bp, Artificial Sequence
  Description of Artificial Sequence: Synthetic oligonucleotide
  Target: ATXN2; (-) strand; PAM type: YTN; PAM sequence: CTT
tctatgacctaatccaaggc

SEQ ID NO: 79388 - DNA, 20 bp, Artificial Sequence
  Description of Artificial Sequence: Synthetic oligonucleotide
  Target: ATXN2; (-) strand; PAM type: YTN; PAM sequence: TTC
aaagctttctatgacctaat

SEQ ID NO: 79389 - DNA, 20 bp, Artificial Sequence
  Description of Artificial Sequence: Synthetic oligonucleotide
  Target: ATXN2; (-) strand; PAM type: YTN; PAM sequence: CTT
caaagctttctatgacctaa

SEQ ID NO: 79390 - DNA, 20 bp, Artificial Sequence
  Description of Artificial Sequence: Synthetic oligonucleotide
  Target: ATXN2; (-) strand; PAM type: YTN; PAM sequence: CTA
ccttcaaagctttctatgac

SEQ ID NO: 79391 - DNA, 20 bp, Artificial Sequence
  Description of Artificial Sequence: Synthetic oligonucleotide
  Target: ATXN2; (-) strand; PAM type: YTN; PAM sequence: CTG
agggagtctaccttcaaagc

SEQ ID NO: 79392 - DNA, 20 bp, Artificial Sequence
  Description of Artificial Sequence: Synthetic oligonucleotide
  Target: ATXN2; (-) strand; PAM type: YTN; PAM sequence: TTC
ccaagcctgagggagtctac

SEQ ID NO: 79393 - DNA, 20 bp, Artificial Sequence
  Description of Artificial Sequence: Synthetic oligonucleotide
  Target: ATXN2; (-) strand; PAM type: YTN; PAM sequence: CTA
ttcccaagcctgagggagtc

SEQ ID NO: 79394 - DNA, 20 bp, Artificial Sequence
  Description of Artificial Sequence: Synthetic oligonucleotide
  Target: ATXN2; (-) strand; PAM type: YTN; PAM sequence: TTA
aaaatcaccctattcccaag

SEQ ID NO: 79395 - DNA, 20 bp, Artificial Sequence
  Description of Artificial Sequence: Synthetic oligonucleotide
  Target: ATXN2; (-) strand; PAM type: YTN; PAM sequence: CTT
aaaaatcaccctattcccaa

SEQ ID NO: 79396 - DNA, 20 bp, Artificial Sequence
  Description of Artificial Sequence: Synthetic oligonucleotide
  Target: ATXN2; (-) strand; PAM type: YTN; PAM sequence: CTG
cttaaaaatcaccctattcc

SEQ ID NO: 79397 - DNA, 20 bp, Artificial Sequence
  Description of Artificial Sequence: Synthetic oligonucleotide
  Target: ATXN2; (-) strand; PAM type: YTN; PAM sequence: CTC
tgcttaaaaatcaccctatt

SEQ ID NO: 79398 - DNA, 20 bp, Artificial Sequence
  Description of Artificial Sequence: Synthetic oligonucleotide
  Target: ATXN2; (-) strand; PAM type: YTN; PAM sequence: TTA
cccctctgcttaaaaatcac

SEQ ID NO: 79399 - DNA, 20 bp, Artificial Sequence
  Description of Artificial Sequence: Synthetic oligonucleotide
  Target: ATXN2; (-) strand; PAM type: YTN; PAM sequence: TTG
ggttacccctctgcttaaaa

SEQ ID NO: 79400 - DNA, 20 bp, Artificial Sequence
  Description of Artificial Sequence: Synthetic oligonucleotide
  Target: ATXN2; (-) strand; PAM type: YTN; PAM sequence: TTG
tgttgggttacccctctgct

SEQ ID NO: 79401 - DNA, 20 bp, Artificial Sequence
  Description of Artificial Sequence: Synthetic oligonucleotide
  Target: ATXN2; (-) strand; PAM type: YTN; PAM sequence: CTT
gtgttgggttacccctctgc

SEQ ID NO: 79402 - DNA, 20 bp, Artificial Sequence
  Description of Artificial Sequence: Synthetic oligonucleotide
  Target: ATXN2; (-) strand; PAM type: YTN; PAM sequence: CTA
cttgtgttgggttacccctc

SEQ ID NO: 79403 - DNA, 20 bp, Artificial Sequence
  Description of Artificial Sequence: Synthetic oligonucleotide
  Target: ATXN2; (-) strand; PAM type: YTN; PAM sequence: CTC
tacttgtgttgggttacccc

SEQ ID NO: 79404 - DNA, 20 bp, Artificial Sequence
  Description of Artificial Sequence: Synthetic oligonucleotide
  Target: ATXN2; (-) strand; PAM type: YTN; PAM sequence: TTC
aactctacttgtgttgggtt

SEQ ID NO: 79405 - DNA, 20 bp, Artificial Sequence
  Description of Artificial Sequence: Synthetic oligonucleotide
  Target: ATXN2; (-) strand; PAM type: YTN; PAM sequence: CTT
caactctacttgtgttgggt

SEQ ID NO: 79406 - DNA, 20 bp, Artificial Sequence
  Description of Artificial Sequence: Synthetic oligonucleotide
  Target: ATXN2; (-) strand; PAM type: YTN; PAM sequence: TTA
gacttcaactctacttgtgt

SEQ ID NO: 79407 - DNA, 20 bp, Artificial Sequence
  Description of Artificial Sequence: Synthetic oligonucleotide
  Target: ATXN2; (-) strand; PAM type: YTN; PAM sequence: CTG
ttagacttcaactctacttg

SEQ ID NO: 79408 - DNA, 20 bp, Artificial Sequence
  Description of Artificial Sequence: Synthetic oligonucleotide
  Target: ATXN2; (-) strand; PAM type: YTN; PAM sequence: TTG
ctgttagacttcaactctac

SEQ ID NO: 79409 - DNA, 20 bp, Artificial Sequence
  Description of Artificial Sequence: Synthetic oligonucleotide
  Target: ATXN2; (-) strand; PAM type: YTN; PAM sequence: TTT
gctgttagacttcaactcta

SEQ ID NO: 79410 - DNA, 20 bp, Artificial Sequence
  Description of Artificial Sequence: Synthetic oligonucleotide
  Target: ATXN2; (-) strand; PAM type: YTN; PAM sequence: TTT
tgctgttagacttcaactct

SEQ ID NO: 79411 - DNA, 20 bp, Artificial Sequence
  Description of Artificial Sequence: Synthetic oligonucleotide
  Target: ATXN2; (-) strand; PAM type: YTN; PAM sequence: CTT
ttgctgttagacttcaactc

SEQ ID NO: 79412 - DNA, 20 bp, Artificial Sequence
  Description of Artificial Sequence: Synthetic oligonucleotide
  Target: ATXN2; (-) strand; PAM type: YTN; PAM sequence: CTA
ccttttgctgttagacttca

SEQ ID NO: 79413 - DNA, 20 bp, Artificial Sequence
  Description of Artificial Sequence: Synthetic oligonucleotide
  Target: ATXN2; (-) strand; PAM type: YTN; PAM sequence: CTA
gcctaccttttgctgttaga

SEQ ID NO: 79414 - DNA, 20 bp, Artificial Sequence
  Description of Artificial Sequence: Synthetic oligonucleotide
  Target: ATXN2; (-) strand; PAM type: YTN; PAM sequence: TTA
acctagcctaccttttgctg

SEQ ID NO: 79415 - DNA, 20 bp, Artificial Sequence
  Description of Artificial Sequence: Synthetic oligonucleotide
  Target: ATXN2; (-) strand; PAM type: YTN; PAM sequence: TTT
aacctagcctaccttttgct

SEQ ID NO: 79416 - DNA, 20 bp, Artificial Sequence
  Description of Artificial Sequence: Synthetic oligonucleotide
  Target: ATXN2; (-) strand; PAM type: YTN; PAM sequence: TTA
tccatgggtttaacctagcc

SEQ ID NO: 79417 - DNA, 20 bp, Artificial Sequence
  Description of Artificial Sequence: Synthetic oligonucleotide
  Target: ATXN2; (-) strand; PAM type: YTN; PAM sequence: TTT
atccatgggtttaacctagc

SEQ ID NO: 79418 - DNA, 20 bp, Artificial Sequence
  Description of Artificial Sequence: Synthetic oligonucleotide
  Target: ATXN2; (-) strand; PAM type: YTN; PAM sequence: TTT
tatccatgggtttaacctag

SEQ ID NO: 79419 - DNA, 20 bp, Artificial Sequence
  Description of Artificial Sequence: Synthetic oligonucleotide
  Target: ATXN2; (-) strand; PAM type: YTN; PAM sequence: TTA
attttatccatgggtttaac

SEQ ID NO: 79420 - DNA, 20 bp, Artificial Sequence
  Description of Artificial Sequence: Synthetic oligonucleotide
  Target: ATXN2; (-) strand; PAM type: YTN; PAM sequence: CTG
cgatacattaattttatcca

SEQ ID NO: 79421 - DNA, 20 bp, Artificial Sequence
  Description of Artificial Sequence: Synthetic oligonucleotide
  Target: ATXN2; (-) strand; PAM type: YTN; PAM sequence: TTA
ctgcgatacattaattttat

SEQ ID NO: 79422 - DNA, 20 bp, Artificial Sequence
  Description of Artificial Sequence: Synthetic oligonucleotide
  Target: ATXN2; (-) strand; PAM type: YTN; PAM sequence: TTA
attactgcgatacattaatt

SEQ ID NO: 79423 - DNA, 20 bp, Artificial Sequence
  Description of Artificial Sequence: Synthetic oligonucleotide
  Target: ATXN2; (-) strand; PAM type: YTN; PAM sequence: CTT
aattactgcgatacattaat

SEQ ID NO: 79424 - DNA, 20 bp, Artificial Sequence
  Description of Artificial Sequence: Synthetic oligonucleotide
  Target: ATXN2; (-) strand; PAM type: YTN; PAM sequence: TTC
ttaattactgcgatacatta

SEQ ID NO: 79425 - DNA, 20 bp, Artificial Sequence
  Description of Artificial Sequence: Synthetic oligonucleotide
  Target: ATXN2; (-) strand; PAM type: YTN; PAM sequence: TTA
ttcttaattactgcgataca

SEQ ID NO: 79426 - DNA, 20 bp, Artificial Sequence
  Description of Artificial Sequence: Synthetic oligonucleotide
  Target: ATXN2; (-) strand; PAM type: YTN; PAM sequence: TTT
attcttaattactgcgatac

SEQ ID NO: 79427 - DNA, 20 bp, Artificial Sequence
  Description of Artificial Sequence: Synthetic oligonucleotide
  Target: ATXN2; (-) strand; PAM type: YTN; PAM sequence: TTT
tattcttaattactgcgata

SEQ ID NO: 79428 - DNA, 20 bp, Artificial Sequence
  Description of Artificial Sequence: Synthetic oligonucleotide
  Target: ATXN2; (-) strand; PAM type: YTN; PAM sequence: TTG
tacattttattcttaattac

SEQ ID NO: 79429 - DNA, 20 bp, Artificial Sequence
  Description of Artificial Sequence: Synthetic oligonucleotide
  Target: ATXN2; (-) strand; PAM type: YTN; PAM sequence: TTG
ggccaaacaatatcaggagg

SEQ ID NO: 79430 - DNA, 20 bp, Artificial Sequence
  Description of Artificial Sequence: Synthetic oligonucleotide
  Target: ATXN2; (-) strand; PAM type: YTN; PAM sequence: TTT
gggccaaacaatatcaggag

SEQ ID NO: 79431 - DNA, 20 bp, Artificial Sequence
  Description of Artificial Sequence: Synthetic oligonucleotide
  Target: ATXN2; (-) strand; PAM type: YTN; PAM sequence: TTA
tttgggccaaacaatatcag

SEQ ID NO: 79432 - DNA, 20 bp, Artificial Sequence
  Description of Artificial Sequence: Synthetic oligonucleotide
  Target: ATXN2; (-) strand; PAM type: YTN; PAM sequence: TTT
atttgggccaaacaatatca

SEQ ID NO: 79433 - DNA, 20 bp, Artificial Sequence
  Description of Artificial Sequence: Synthetic oligonucleotide
  Target: ATXN2; (-) strand; PAM type: YTN; PAM sequence: TTA
tttatttgggccaaacaata

SEQ ID NO: 79434 - DNA, 20 bp, Artificial Sequence
  Description of Artificial Sequence: Synthetic oligonucleotide
  Target: ATXN2; (-) strand; PAM type: YTN; PAM sequence: CTG
ttatttatttgggccaaaca

SEQ ID NO: 79435 - DNA, 20 bp, Artificial Sequence
  Description of Artificial Sequence: Synthetic oligonucleotide
  Target: ATXN2; (-) strand; PAM type: YTN; PAM sequence: CTA
tgctgttatttatttgggcc

SEQ ID NO: 79436 - DNA, 20 bp, Artificial Sequence
  Description of Artificial Sequence: Synthetic oligonucleotide
  Target: ATXN2; (-) strand; PAM type: YTN; PAM sequence: TTG
gctatgctgttatttatttg

SEQ ID NO: 79437 - DNA, 20 bp, Artificial Sequence
  Description of Artificial Sequence: Synthetic oligonucleotide
  Target: ATXN2; (-) strand; PAM type: YTN; PAM sequence: CTT
ggctatgctgttatttattt

SEQ ID NO: 79438 - DNA, 20 bp, Artificial Sequence
  Description of Artificial Sequence: Synthetic oligonucleotide
  Target: ATXN2; (-) strand; PAM type: YTN; PAM sequence: TTC
ttggctatgctgttatttat

SEQ ID NO: 79439 - DNA, 20 bp, Artificial Sequence
  Description of Artificial Sequence: Synthetic oligonucleotide
  Target: ATXN2; (-) strand; PAM type: YTN; PAM sequence: TTA
ggcaaattcttggctatgct

SEQ ID NO: 79440 - DNA, 20 bp, Artificial Sequence
  Description of Artificial Sequence: Synthetic oligonucleotide
  Target: ATXN2; (-) strand; PAM type: YTN; PAM sequence: TTT
aggcaaattcttggctatgc

SEQ ID NO: 79441 - DNA, 20 bp, Artificial Sequence
  Description of Artificial Sequence: Synthetic oligonucleotide
  Target: ATXN2; (-) strand; PAM type: YTN; PAM sequence: CTT
taggcaaattcttggctatg

SEQ ID NO: 79442 - DNA, 20 bp, Artificial Sequence
  Description of Artificial Sequence: Synthetic oligonucleotide
  Target: ATXN2; (-) strand; PAM type: YTN; PAM sequence: CTG
tgactttaggcaaattcttg

SEQ ID NO: 79443 - DNA, 20 bp, Artificial Sequence
  Description of Artificial Sequence: Synthetic oligonucleotide
  Target: ATXN2; (-) strand; PAM type: YTN; PAM sequence: CTC
tgtgactttaggcaaattct

SEQ ID NO: 79444 - DNA, 20 bp, Artificial Sequence
  Description of Artificial Sequence: Synthetic oligonucleotide
  Target: ATXN2; (-) strand; PAM type: YTN; PAM sequence: TTC
ctctgtgactttaggcaaat

SEQ ID NO: 79445 - DNA, 20 bp, Artificial Sequence
  Description of Artificial Sequence: Synthetic oligonucleotide
  Target: ATXN2; (-) strand; PAM type: YTN; PAM sequence: TTT
cctctgtgactttaggcaaa

SEQ ID NO: 79446 - DNA, 20 bp, Artificial Sequence
  Description of Artificial Sequence: Synthetic oligonucleotide
  Target: ATXN2; (-) strand; PAM type: YTN; PAM sequence: CTT
tcctctgtgactttaggcaa

SEQ ID NO: 79447 - DNA, 20 bp, Artificial Sequence
  Description of Artificial Sequence: Synthetic oligonucleotide
  Target: ATXN2; (-) strand; PAM type: YTN; PAM sequence: TTC
ctttcctctgtgactttagg

SEQ ID NO: 79448 - DNA, 20 bp, Artificial Sequence
  Description of Artificial Sequence: Synthetic oligonucleotide
  Target: ATXN2; (-) strand; PAM type: YTN; PAM sequence: TTG
agagaataattcctttcctc

SEQ ID NO: 79449 - DNA, 20 bp, Artificial Sequence
  Description of Artificial Sequence: Synthetic oligonucleotide
  Target: ATXN2; (-) strand; PAM type: YTN; PAM sequence: TTC
cagagggaaggaatataata

SEQ ID NO: 79450 - DNA, 20 bp, Artificial Sequence
  Description of Artificial Sequence: Synthetic oligonucleotide
  Target: ATXN2; (-) strand; PAM type: YTN; PAM sequence: CTT
ccagagggaaggaatataat

SEQ ID NO: 79451 - DNA, 20 bp, Artificial Sequence
  Description of Artificial Sequence: Synthetic oligonucleotide
  Target: ATXN2; (-) strand; PAM type: YTN; PAM sequence: TTA
gtcttccagagggaaggaat

SEQ ID NO: 79452 - DNA, 20 bp, Artificial Sequence
  Description of Artificial Sequence: Synthetic oligonucleotide
  Target: ATXN2; (-) strand; PAM type: YTN; PAM sequence: TTC
agcagtacatgttagtcttc

SEQ ID NO: 79453 - DNA, 20 bp, Artificial Sequence
  Description of Artificial Sequence: Synthetic oligonucleotide
  Target: ATXN2; (-) strand; PAM type: YTN; PAM sequence: CTT
cagcagtacatgttagtctt

SEQ ID NO: 79454 - DNA, 20 bp, Artificial Sequence
  Description of Artificial Sequence: Synthetic oligonucleotide
  Target: ATXN2; (-) strand; PAM type: YTN; PAM sequence: CTG
aacaagacttcagcagtaca

SEQ ID NO: 79455 - DNA, 20 bp, Artificial Sequence
  Description of Artificial Sequence: Synthetic oligonucleotide
  Target: ATXN2; (-) strand; PAM type: YTN; PAM sequence: CTA
gaaggacactgaacaagact

SEQ ID NO: 79456 - DNA, 20 bp, Artificial Sequence
  Description of Artificial Sequence: Synthetic oligonucleotide
  Target: ATXN2; (-) strand; PAM type: YTN; PAM sequence: CTG
gggctagaaggacactgaac

SEQ ID NO: 79457 - DNA, 20 bp, Artificial Sequence
  Description of Artificial Sequence: Synthetic oligonucleotide
  Target: ATXN2; (-) strand; PAM type: YTN; PAM sequence: CTG
caaagtctggggctagaagg

SEQ ID NO: 79458 - DNA, 20 bp, Artificial Sequence
  Description of Artificial Sequence: Synthetic oligonucleotide
  Target: ATXN2; (-) strand; PAM type: YTN; PAM sequence: TTG
gtaggctgcaaagtctgggg

SEQ ID NO: 79459 - DNA, 20 bp, Artificial Sequence
  Description of Artificial Sequence: Synthetic oligonucleotide
  Target: ATXN2; (-) strand; PAM type: YTN; PAM sequence: CTC
agtccatgttggtaggctgc

SEQ ID NO: 79460 - DNA, 20 bp, Artificial Sequence
  Description of Artificial Sequence: Synthetic oligonucleotide
  Target: ATXN2; (-) strand; PAM type: YTN; PAM sequence: CTG
tctcagtccatgttggtagg

SEQ ID NO: 79461 - DNA, 20 bp, Artificial Sequence
  Description of Artificial Sequence: Synthetic oligonucleotide
  Target: ATXN2; (-) strand; PAM type: YTN; PAM sequence: TTC
cctgtctcagtccatgttgg

SEQ ID NO: 79462 - DNA, 20 bp, Artificial Sequence
  Description of Artificial Sequence: Synthetic oligonucleotide
  Target: ATXN2; (-) strand; PAM type: YTN; PAM sequence: TTT
ccctgtctcagtccatgttg

SEQ ID NO: 79463 - DNA, 20 bp, Artificial Sequence
  Description of Artificial Sequence: Synthetic oligonucleotide
  Target: ATXN2; (-) strand; PAM type: YTN; PAM sequence: CTT
tccctgtctcagtccatgtt

SEQ ID NO: 79464 - DNA, 20 bp, Artificial Sequence
  Description of Artificial Sequence: Synthetic oligonucleotide
  Target: ATXN2; (-) strand; PAM type: YTN; PAM sequence: TTG
cccacgctttccctgtctca

SEQ ID NO: 79465 - DNA, 20 bp, Artificial Sequence
  Description of Artificial Sequence: Synthetic oligonucleotide
  Target: ATXN2; (-) strand; PAM type: YTN; PAM sequence: CTT
gcccacgctttccctgtctc

SEQ ID NO: 79466 - DNA, 20 bp, Artificial Sequence
  Description of Artificial Sequence: Synthetic oligonucleotide
  Target: ATXN2; (-) strand; PAM type: YTN; PAM sequence: CTC
acttgcccacgctttccctg

SEQ ID NO: 79467 - DNA, 20 bp, Artificial Sequence
  Description of Artificial Sequence: Synthetic oligonucleotide
  Target: ATXN2; (-) strand; PAM type: YTN; PAM sequence: TTA
gagtatggaactcacttgcc

SEQ ID NO: 79468 - DNA, 20 bp, Artificial Sequence
  Description of Artificial Sequence: Synthetic oligonucleotide
  Target: ATXN2; (-) strand; PAM type: YTN; PAM sequence: CTG
taggaaaattagagtatgga

SEQ ID NO: 79469 - DNA, 20 bp, Artificial Sequence
  Description of Artificial Sequence: Synthetic oligonucleotide
  Target: ATXN2; (-) strand; PAM type: YTN; PAM sequence: TTC
tgtaggaaaattagagtatg

SEQ ID NO: 79470 - DNA, 20 bp, Artificial Sequence
  Description of Artificial Sequence: Synthetic oligonucleotide
  Target: ATXN2; (-) strand; PAM type: YTN; PAM sequence: CTT
ctgtaggaaaattagagtat

SEQ ID NO: 79471 - DNA, 20 bp, Artificial Sequence
  Description of Artificial Sequence: Synthetic oligonucleotide
  Target: ATXN2; (-) strand; PAM type: YTN; PAM sequence: TTA
ggatgcttctgtaggaaaat

SEQ ID NO: 79472 - DNA, 20 bp, Artificial Sequence
  Description of Artificial Sequence: Synthetic oligonucleotide
  Target: ATXN2; (-) strand; PAM type: YTN; PAM sequence: CTT
aggatgcttctgtaggaaaa

SEQ ID NO: 79473 - DNA, 20 bp, Artificial Sequence
  Description of Artificial Sequence: Synthetic oligonucleotide
  Target: ATXN2; (-) strand; PAM type: YTN; PAM sequence: CTG
agaacccacacaccacttag

SEQ ID NO: 79474 - DNA, 20 bp, Artificial Sequence
  Description of Artificial Sequence: Synthetic oligonucleotide
  Target: ATXN2; (-) strand; PAM type: YTN; PAM sequence: TTG
atctgagaacccacacacca

SEQ ID NO: 79475 - DNA, 20 bp, Artificial Sequence
  Description of Artificial Sequence: Synthetic oligonucleotide
  Target: ATXN2; (-) strand; PAM type: YTN; PAM sequence: CTT
gatctgagaacccacacacc

SEQ ID NO: 79476 - DNA, 20 bp, Artificial Sequence
  Description of Artificial Sequence: Synthetic oligonucleotide
  Target: ATXN2; (-) strand; PAM type: YTN; PAM sequence: TTG
tgacttgatctgagaaccca

SEQ ID NO: 79477 - DNA, 20 bp, Artificial Sequence
  Description of Artificial Sequence: Synthetic oligonucleotide
  Target: ATXN2; (-) strand; PAM type: YTN; PAM sequence: TTT
gtgacttgatctgagaaccc

SEQ ID NO: 79478 - DNA, 20 bp, Artificial Sequence
  Description of Artificial Sequence: Synthetic oligonucleotide
  Target: ATXN2; (-) strand; PAM type: YTN; PAM sequence: CTG
tgaatgtgtttgtgacttga

SEQ ID NO: 79479 - DNA, 20 bp, Artificial Sequence
  Description of Artificial Sequence: Synthetic oligonucleotide
  Target: ATXN2; (-) strand; PAM type: YTN; PAM sequence: TTG
tacgatatcatgggctgtga

SEQ ID NO: 79480 - DNA, 20 bp, Artificial Sequence
  Description of Artificial Sequence: Synthetic oligonucleotide
  Target: ATXN2; (-) strand; PAM type: YTN; PAM sequence: CTA
aaaagtagtgttgtacgata

SEQ ID NO: 79481 - DNA, 20 bp, Artificial Sequence
  Description of Artificial Sequence: Synthetic oligonucleotide
  Target: ATXN2; (-) strand; PAM type: YTN; PAM sequence: TTG
aactaaaaagtagtgttgta

SEQ ID NO: 79482 - DNA, 20 bp, Artificial Sequence
  Description of Artificial Sequence: Synthetic oligonucleotide
  Target: ATXN2; (-) strand; PAM type: YTN; PAM sequence: TTT
gaactaaaaagtagtgttgt

SEQ ID NO: 79483 - DNA, 20 bp, Artificial Sequence
  Description of Artificial Sequence: Synthetic oligonucleotide
  Target: ATXN2; (-) strand; PAM type: YTN; PAM sequence: TTA
atttgaactaaaaagtagtg

SEQ ID NO: 79484 - DNA, 20 bp, Artificial Sequence
  Description of Artificial Sequence: Synthetic oligonucleotide
  Target: ATXN2; (-) strand; PAM type: YTN; PAM sequence: CTC
ataattaatttgaactaaaa

SEQ ID NO: 79485 - DNA, 20 bp, Artificial Sequence
  Description of Artificial Sequence: Synthetic oligonucleotide
  Target: ATXN2; (-) strand; PAM type: YTN; PAM sequence: TTA
ctcataattaatttgaacta

SEQ ID NO: 79486 - DNA, 20 bp, Artificial Sequence
  Description of Artificial Sequence: Synthetic oligonucleotide
  Target: ATXN2; (-) strand; PAM type: YTN; PAM sequence: TTG
ttactcataattaatttgaa

SEQ ID NO: 79487 - DNA, 20 bp, Artificial Sequence
  Description of Artificial Sequence: Synthetic oligonucleotide
  Target: ATXN2; (-) strand; PAM type: YTN; PAM sequence: CTG
ttgttactcataattaattt

SEQ ID NO: 79488 - DNA, 20 bp, Artificial Sequence
  Description of Artificial Sequence: Synthetic oligonucleotide
  Target: ATXN2; (-) strand; PAM type: YTN; PAM sequence: TTG
gcagatagtctgttgttact

SEQ ID NO: 79489 - DNA, 20 bp, Artificial Sequence
  Description of Artificial Sequence: Synthetic oligonucleotide
  Target: ATXN2; (-) strand; PAM type: YTN; PAM sequence: TTT
ggcagatagtctgttgttac

SEQ ID NO: 79490 - DNA, 20 bp, Artificial Sequence
  Description of Artificial Sequence: Synthetic oligonucleotide
  Target: ATXN2; (-) strand; PAM type: YTN; PAM sequence: TTT
tggcagatagtctgttgtta

SEQ ID NO: 79491 - DNA, 20 bp, Artificial Sequence
  Description of Artificial Sequence: Synthetic oligonucleotide
  Target: ATXN2; (-) strand; PAM type: YTN; PAM sequence: CTA
ttttggcagatagtctgttg

SEQ ID NO: 79492 - DNA, 20 bp, Artificial Sequence
  Description of Artificial Sequence: Synthetic oligonucleotide
  Target: ATXN2; (-) strand; PAM type: YTN; PAM sequence: CTC
cctattttggcagatagtct

SEQ ID NO: 79493 - DNA, 20 bp, Artificial Sequence
  Description of Artificial Sequence: Synthetic oligonucleotide
  Target: ATXN2; (-) strand; PAM type: YTN; PAM sequence: CTG
cagctccctattttggcaga

SEQ ID NO: 79494 - DNA, 20 bp, Artificial Sequence
  Description of Artificial Sequence: Synthetic oligonucleotide
  Target: ATXN2; (-) strand; PAM type: YTN; PAM sequence: TTC
tgcagctccctattttggca

SEQ ID NO: 79495 - DNA, 20 bp, Artificial Sequence
  Description of Artificial Sequence: Synthetic oligonucleotide
  Target: ATXN2; (-) strand; PAM type: YTN; PAM sequence: TTT
ctgcagctccctattttggc

SEQ ID NO: 79496 - DNA, 20 bp, Artificial Sequence
  Description of Artificial Sequence: Synthetic oligonucleotide
  Target: ATXN2; (-) strand; PAM type: YTN; PAM sequence: TTT
tctgcagctccctattttgg

SEQ ID NO: 79497 - DNA, 20 bp, Artificial Sequence
  Description of Artificial Sequence: Synthetic oligonucleotide
  Target: ATXN2; (-) strand; PAM type: YTN; PAM sequence: TTA
gttttctgcagctccctatt

SEQ ID NO: 79498 - DNA, 20 bp, Artificial Sequence
  Description of Artificial Sequence: Synthetic oligonucleotide
  Target: ATXN2; (-) strand; PAM type: YTN; PAM sequence: TTG
gaaacaacatcataaatgat

SEQ ID NO: 79499 - DNA, 20 bp, Artificial Sequence
  Description of Artificial Sequence: Synthetic oligonucleotide
  Target: ATXN2; (-) strand; PAM type: YTN; PAM sequence: TTT
ggaaacaacatcataaatga

SEQ ID NO: 79500 - DNA, 20 bp, Artificial Sequence
  Description of Artificial Sequence: Synthetic oligonucleotide
  Target: ATXN2; (-) strand; PAM type: YTN; PAM sequence: TTG
aaatttggaaacaacatcat

SEQ ID NO: 79501 - DNA, 20 bp, Artificial Sequence
  Description of Artificial Sequence: Synthetic oligonucleotide
  Target: ATXN2; (-) strand; PAM type: YTN; PAM sequence: TTT
gaaatttggaaacaacatca

SEQ ID NO: 79502 - DNA, 20 bp, Artificial Sequence
  Description of Artificial Sequence: Synthetic oligonucleotide
  Target: ATXN2; (-) strand; PAM type: YTN; PAM sequence: TTT
tgaaatttggaaacaacatc

SEQ ID NO: 79503 - DNA, 20 bp, Artificial Sequence
  Description of Artificial Sequence: Synthetic oligonucleotide
  Target: ATXN2; (-) strand; PAM type: YTN; PAM sequence: TTA
aaattttgaaatttggaaac

SEQ ID NO: 79504 - DNA, 20 bp, Artificial Sequence
  Description of Artificial Sequence: Synthetic oligonucleotide
  Target: ATXN2; (-) strand; PAM type: YTN; PAM sequence: TTT
aaaattttgaaatttggaaa

SEQ ID NO: 79505 - DNA, 20 bp, Artificial Sequence
  Description of Artificial Sequence: Synthetic oligonucleotide
  Target: ATXN2; (-) strand; PAM type: YTN; PAM sequence: TTT
taaaattttgaaatttggaa

SEQ ID NO: 79506 - DNA, 20 bp, Artificial Sequence
  Description of Artificial Sequence: Synthetic oligonucleotide
  Target: ATXN2; (-) strand; PAM type: YTN; PAM sequence: TTT
ttaaaattttgaaatttgga

SEQ ID NO: 79507 - DNA, 20 bp, Artificial Sequence
  Description of Artificial Sequence: Synthetic oligonucleotide
  Target: ATXN2; (-) strand; PAM type: YTN; PAM sequence: TTT
tttaaaattttgaaatttgg

SEQ ID NO: 79508 - DNA, 20 bp, Artificial Sequence
  Description of Artificial Sequence: Synthetic oligonucleotide
  Target: ATXN2; (-) strand; PAM type: YTN; PAM sequence: TTT
ttttaaaattttgaaatttg

SEQ ID NO: 79509 - DNA, 20 bp, Artificial Sequence
  Description of Artificial Sequence: Synthetic oligonucleotide
  Target: ATXN2; (-) strand; PAM type: YTN; PAM sequence: TTT
tttttaaaattttgaaattt

SEQ ID NO: 79510 - DNA, 20 bp, Artificial Sequence
  Description of Artificial Sequence: Synthetic oligonucleotide
  Target: ATXN2; (-) strand; PAM type: YTN; PAM sequence: TTT
ttttttaaaattttgaaatt

SEQ ID NO: 79511 - DNA, 20 bp, Artificial Sequence
  Description of Artificial Sequence: Synthetic oligonucleotide
  Target: ATXN2; (-) strand; PAM type: YTN; PAM sequence: TTT
tttttttaaaattttgaaat

SEQ ID NO: 79512 - DNA, 20 bp, Artificial Sequence
  Description of Artificial Sequence: Synthetic oligonucleotide
  Target: ATXN2; (-) strand; PAM type: YTN; PAM sequence: TTT
ttttttttaaaattttgaaa

SEQ ID NO: 79513 - DNA, 20 bp, Artificial Sequence
  Description of Artificial Sequence: Synthetic oligonucleotide
  Target: ATXN2; (-) strand; PAM type: YTN; PAM sequence: TTT
tttttttttaaaattttgaa

SEQ ID NO: 79514 - DNA, 20 bp, Artificial Sequence
  Description of Artificial Sequence: Synthetic oligonucleotide
  Target: ATXN2; (-) strand; PAM type: YTN; PAM sequence: TTT
ttttttttttaaaattttga

SEQ ID NO: 79515 - DNA, 20 bp, Artificial Sequence
  Description of Artificial Sequence: Synthetic oligonucleotide
  Target: ATXN2; (-) strand; PAM type: YTN; PAM sequence: TTA
taatttttttttttttaaaa

SEQ ID NO: 79516 - DNA, 20 bp, Artificial Sequence
  Description of Artificial Sequence: Synthetic oligonucleotide
  Target: ATXN2; (-) strand; PAM type: YTN; PAM sequence: TTT
ataatttttttttttttaaa

SEQ ID NO: 79517 - DNA, 20 bp, Artificial Sequence
  Description of Artificial Sequence: Synthetic oligonucleotide
  Target: ATXN2; (-) strand; PAM type: YTN; PAM sequence: TTG
tttataattttttttttttt

SEQ ID NO: 79518 - DNA, 20 bp, Artificial Sequence
  Description of Artificial Sequence: Synthetic oligonucleotide
  Target: ATXN2; (-) strand; PAM type: YTN; PAM sequence: TTT
gtttataatttttttttttt

SEQ ID NO: 79519 - DNA, 20 bp, Artificial Sequence
  Description of Artificial Sequence: Synthetic oligonucleotide
  Target: ATXN2; (-) strand; PAM type: YTN; PAM sequence: TTC
aatcaaaaagtttgtttata

SEQ ID NO: 79520 - DNA, 20 bp, Artificial Sequence
  Description of Artificial Sequence: Synthetic oligonucleotide
  Target: ATXN2; (-) strand; PAM type: YTN; PAM sequence: TTT
caatcaaaaagtttgtttat

SEQ ID NO: 79521 - DNA, 20 bp, Artificial Sequence
  Description of Artificial Sequence: Synthetic oligonucleotide
  Target: ATXN2; (-) strand; PAM type: YTN; PAM sequence: CTA
tcagtgagtttcaatcaaaa

SEQ ID NO: 79522 - DNA, 20 bp, Artificial Sequence
  Description of Artificial Sequence: Synthetic oligonucleotide
  Target: ATXN2; (-) strand; PAM type: YTN; PAM sequence: CTC
tatcagtgagtttcaatcaa

SEQ ID NO: 79523 - DNA, 20 bp, Artificial Sequence
  Description of Artificial Sequence: Synthetic oligonucleotide
  Target: ATXN2; (-) strand; PAM type: YTN; PAM sequence: TTC
tctatcagtgagtttcaatc

SEQ ID NO: 79524 - DNA, 20 bp, Artificial Sequence
  Description of Artificial Sequence: Synthetic oligonucleotide
  Target: ATXN2; (-) strand; PAM type: YTN; PAM sequence: CTG
gcagttctctatcagtgagt

SEQ ID NO: 79525 - DNA, 20 bp, Artificial Sequence
  Description of Artificial Sequence: Synthetic oligonucleotide
  Target: ATXN2; (-) strand; PAM type: YTN; PAM sequence: TTA
gtcctggcagttctctatca

SEQ ID NO: 79526 - DNA, 20 bp, Artificial Sequence
  Description of Artificial Sequence: Synthetic oligonucleotide
  Target: ATXN2; (-) strand; PAM type: YTN; PAM sequence: TTT
agtcctggcagttctctatc

SEQ ID NO: 79527 - DNA, 20 bp, Artificial Sequence
  Description of Artificial Sequence: Synthetic oligonucleotide
  Target: ATXN2; (-) strand; PAM type: YTN; PAM sequence: CTT
tagtcctggcagttctctat

SEQ ID NO: 79528 - DNA, 20 bp, Artificial Sequence
  Description of Artificial Sequence: Synthetic oligonucleotide
  Target: ATXN2; (-) strand; PAM type: YTN; PAM sequence: TTC
aatcaaccatgctttagtcc

SEQ ID NO: 79529 - DNA, 20 bp, Artificial Sequence
  Description of Artificial Sequence: Synthetic oligonucleotide
  Target: ATXN2; (-) strand; PAM type: YTN; PAM sequence: CTT
caatcaaccatgctttagtc

SEQ ID NO: 79530 - DNA, 20 bp, Artificial Sequence
  Description of Artificial Sequence: Synthetic oligonucleotide
  Target: ATXN2; (-) strand; PAM type: YTN; PAM sequence: TTC
ttcaatcaaccatgctttag

SEQ ID NO: 79531 - DNA, 20 bp, Artificial Sequence
  Description of Artificial Sequence: Synthetic oligonucleotide
  Target: ATXN2; (-) strand; PAM type: YTN; PAM sequence: TTT
cttcaatcaaccatgcttta

SEQ ID NO: 79532 - DNA, 20 bp, Artificial Sequence
  Description of Artificial Sequence: Synthetic oligonucleotide
  Target: ATXN2; (-) strand; PAM type: YTN; PAM sequence: TTG
tcagcaataaaatttcttca

SEQ ID NO: 79533 - DNA, 20 bp, Artificial Sequence
  Description of Artificial Sequence: Synthetic oligonucleotide
  Target: ATXN2; (-) strand; PAM type: YTN; PAM sequence: TTA
ttgtcagcaataaaatttct

SEQ ID NO: 79534 - DNA, 20 bp, Artificial Sequence
  Description of Artificial Sequence: Synthetic oligonucleotide
  Target: ATXN2; (-) strand; PAM type: YTN; PAM sequence: CTC
aaaaaataaataaataaata

SEQ ID NO: 79535 - DNA, 20 bp, Artificial Sequence
  Description of Artificial Sequence: Synthetic oligonucleotide
  Target: ATXN2; (-) strand; PAM type: YTN; PAM sequence: CTC
cgtctcaaaaaataaataaa

SEQ ID NO: 79536 - DNA, 20 bp, Artificial Sequence
  Description of Artificial Sequence: Synthetic oligonucleotide
  Target: ATXN2; (-) strand; PAM type: YTN; PAM sequence: CTC
cagcgtaggcaacaaagcaa

SEQ ID NO: 79537 - DNA, 20 bp, Artificial Sequence
  Description of Artificial Sequence: Synthetic oligonucleotide
  Target: ATXN2; (-) strand; PAM type: YTN; PAM sequence: TTG
cactccagcgtaggcaacaa

SEQ ID NO: 79538 - DNA, 20 bp, Artificial Sequence
  Description of Artificial Sequence: Synthetic oligonucleotide
  Target: ATXN2; (-) strand; PAM type: YTN; PAM sequence: CTC
cattgcactccagcgtaggc

SEQ ID NO: 79539 - DNA, 20 bp, Artificial Sequence
  Description of Artificial Sequence: Synthetic oligonucleotide
  Target: ATXN2; (-) strand; PAM type: YTN; PAM sequence: CTG
agatcgctccattgcactcc

SEQ ID NO: 79540 - DNA, 20 bp, Artificial Sequence
  Description of Artificial Sequence: Synthetic oligonucleotide
  Target: ATXN2; (-) strand; PAM type: YTN; PAM sequence: TTG
cagtgagctgagatcgctcc

SEQ ID NO: 79541 - DNA, 20 bp, Artificial Sequence
  Description of Artificial Sequence: Synthetic oligonucleotide
  Target: ATXN2; (-) strand; PAM type: YTN; PAM sequence: CTG
ggaggtggaggttgcagtga

SEQ ID NO: 79542 - DNA, 20 bp, Artificial Sequence
  Description of Artificial Sequence: Synthetic oligonucleotide
  Target: ATXN2; (-) strand; PAM type: YTN; PAM sequence: TTG
aacctgggaggtggaggttg

SEQ ID NO: 79543 - DNA, 20 bp, Artificial Sequence
  Description of Artificial Sequence: Synthetic oligonucleotide
  Target: ATXN2; (-) strand; PAM type: YTN; PAM sequence: CTT
gaacctgggaggtggaggtt

SEQ ID NO: 79544 - DNA, 20 bp, Artificial Sequence
  Description of Artificial Sequence: Synthetic oligonucleotide
  Target: ATXN2; (-) strand; PAM type: YTN; PAM sequence: CTG
aggcaaggagaatcgcttga

SEQ ID NO: 79545 - DNA, 20 bp, Artificial Sequence
  Description of Artificial Sequence: Synthetic oligonucleotide
  Target: ATXN2; (-) strand; PAM type: YTN; PAM sequence: CTC
agtaggctgaggcaaggaga

SEQ ID NO: 79546 - DNA, 20 bp, Artificial Sequence
  Description of Artificial Sequence: Synthetic oligonucleotide
  Target: ATXN2; (-) strand; PAM type: YTN; PAM sequence: CTA
ctcagtaggctgaggcaagg

SEQ ID NO: 79547 - DNA, 20 bp, Artificial Sequence
  Description of Artificial Sequence: Synthetic oligonucleotide
  Target: ATXN2; (-) strand; PAM type: YTN; PAM sequence: CTG
taatcccagctactcagtag

SEQ ID NO: 79548 - DNA, 20 bp, Artificial Sequence
  Description of Artificial Sequence: Synthetic oligonucleotide
  Target: ATXN2; (-) strand; PAM type: YTN; PAM sequence: TTA
gccaggcgtggtgacaagca

SEQ ID NO: 79549 - DNA, 20 bp, Artificial Sequence
  Description of Artificial Sequence: Synthetic oligonucleotide
  Target: ATXN2; (-) strand; PAM type: YTN; PAM sequence: CTA
aaaatacaaaaaagttagcc

SEQ ID NO: 79550 - DNA, 20 bp, Artificial Sequence
  Description of Artificial Sequence: Synthetic oligonucleotide
  Target: ATXN2; (-) strand; PAM type: YTN; PAM sequence: CTA
ctaaaaatacaaaaaagtta

SEQ ID NO: 79551 - DNA, 20 bp, Artificial Sequence
  Description of Artificial Sequence: Synthetic oligonucleotide
  Target: ATXN2; (-) strand; PAM type: YTN; PAM sequence: CTC
tactaaaaatacaaaaaagt

SEQ ID NO: 79552 - DNA, 20 bp, Artificial Sequence
  Description of Artificial Sequence: Synthetic oligonucleotide
  Target: ATXN2; (-) strand; PAM type: YTN; PAM sequence: CTC
cgtctctactaaaaatacaa

SEQ ID NO: 79553 - DNA, 20 bp, Artificial Sequence
  Description of Artificial Sequence: Synthetic oligonucleotide
  Target: ATXN2; (-) strand; PAM type: YTN; PAM sequence: CTG
gccaacatgacaaaactccg

SEQ ID NO: 79554 - DNA, 20 bp, Artificial Sequence
  Description of Artificial Sequence: Synthetic oligonucleotide
  Target: ATXN2; (-) strand; PAM type: YTN; PAM sequence: TTG
agaccagcctggccaacatg

SEQ ID NO: 79555 - DNA, 20 bp, Artificial Sequence
  Description of Artificial Sequence: Synthetic oligonucleotide
  Target: ATXN2; (-) strand; PAM type: YTN; PAM sequence: TTT
gagaccagcctggccaacat

SEQ ID NO: 79556 - DNA, 20 bp, Artificial Sequence
  Description of Artificial Sequence: Synthetic oligonucleotide
  Target: ATXN2; (-) strand; PAM type: YTN; PAM sequence: CTG
aggtcaggaatttgagacca

SEQ ID NO: 79557 - DNA, 20 bp, Artificial Sequence
  Description of Artificial Sequence: Synthetic oligonucleotide
  Target: ATXN2; (-) strand; PAM type: YTN; PAM sequence: TTG
ggaggccgaggcgtgtggat

SEQ ID NO: 79558 - DNA, 20 bp, Artificial Sequence
  Description of Artificial Sequence: Synthetic oligonucleotide
  Target: ATXN2; (-) strand; PAM type: YTN; PAM sequence: TTT
gggaggccgaggcgtgtgga

SEQ ID NO: 79559 - DNA, 20 bp, Artificial Sequence
  Description of Artificial Sequence: Synthetic oligonucleotide
  Target: ATXN2; (-) strand; PAM type: YTN; PAM sequence: CTG
taatcccagcagtttgggag

SEQ ID NO: 79560 - DNA, 20 bp, Artificial Sequence
  Description of Artificial Sequence: Synthetic oligonucleotide
  Target: ATXN2; (-) strand; PAM type: YTN; PAM sequence: TTA
tgcctgtaatcccagcagtt

SEQ ID NO: 79561 - DNA, 20 bp, Artificial Sequence
  Description of Artificial Sequence: Synthetic oligonucleotide
  Target: ATXN2; (-) strand; PAM type: YTN; PAM sequence: CTT
atgcctgtaatcccagcagt

SEQ ID NO: 79562 - DNA, 20 bp, Artificial Sequence
  Description of Artificial Sequence: Synthetic oligonucleotide
  Target: ATXN2; (-) strand; PAM type: YTN; PAM sequence: CTG
ggagcagtcgcttatgcctg

SEQ ID NO: 79563 - DNA, 20 bp, Artificial Sequence
  Description of Artificial Sequence: Synthetic oligonucleotide
  Target: ATXN2; (-) strand; PAM type: YTN; PAM sequence: CTA
atatagagatatgacaaaaa

SEQ ID NO: 79564 - DNA, 20 bp, Artificial Sequence
  Description of Artificial Sequence: Synthetic oligonucleotide
  Target: ATXN2; (-) strand; PAM type: YTN; PAM sequence: TTC
taatatagagatatgacaaa

SEQ ID NO: 79565 - DNA, 20 bp, Artificial Sequence
  Description of Artificial Sequence: Synthetic oligonucleotide
  Target: ATXN2; (-) strand; PAM type: YTN; PAM sequence: CTT
ctaatatagagatatgacaa

SEQ ID NO: 79566 - DNA, 20 bp, Artificial Sequence
  Description of Artificial Sequence: Synthetic oligonucleotide
  Target: ATXN2; (-) strand; PAM type: YTN; PAM sequence: TTG
cttctaatatagagatatga

SEQ ID NO: 79567 - DNA, 20 bp, Artificial Sequence
  Description of Artificial Sequence: Synthetic oligonucleotide
  Target: ATXN2; (-) strand; PAM type: YTN; PAM sequence: TTC
cattgcttctaatatagaga

SEQ ID NO: 79568 - DNA, 20 bp, Artificial Sequence
  Description of Artificial Sequence: Synthetic oligonucleotide
  Target: ATXN2; (-) strand; PAM type: YTN; PAM sequence: CTG
ttccattgcttctaatatag

SEQ ID NO: 79569 - DNA, 20 bp, Artificial Sequence
  Description of Artificial Sequence: Synthetic oligonucleotide
  Target: ATXN2; (-) strand; PAM type: YTN; PAM sequence: TTA
ataactgttccattgcttct

SEQ ID NO: 79570 - DNA, 20 bp, Artificial Sequence
  Description of Artificial Sequence: Synthetic oligonucleotide
  Target: ATXN2; (-) strand; PAM type: YTN; PAM sequence: TTT
aataactgttccattgcttc

SEQ ID NO: 79571 - DNA, 20 bp, Artificial Sequence
  Description of Artificial Sequence: Synthetic oligonucleotide
  Target: ATXN2; (-) strand; PAM type: YTN; PAM sequence: TTT
taataactgttccattgctt

SEQ ID NO: 79572 - DNA, 20 bp, Artificial Sequence
  Description of Artificial Sequence: Synthetic oligonucleotide
  Target: ATXN2; (-) strand; PAM type: YTN; PAM sequence: TTT
ttaataactgttccattgct

SEQ ID NO: 79573 - DNA, 20 bp, Artificial Sequence
  Description of Artificial Sequence: Synthetic oligonucleotide
  Target: ATXN2; (-) strand; PAM type: YTN; PAM sequence: CTT
tttaataactgttccattgc

SEQ ID NO: 79574 - DNA, 20 bp, Artificial Sequence
  Description of Artificial Sequence: Synthetic oligonucleotide
  Target: ATXN2; (-) strand; PAM type: YTN; PAM sequence: TTG
ctttttaataactgttccat

SEQ ID NO: 79575 - DNA, 20 bp, Artificial Sequence
  Description of Artificial Sequence: Synthetic oligonucleotide
  Target: ATXN2; (-) strand; PAM type: YTN; PAM sequence: TTT
gctttttaataactgttcca

SEQ ID NO: 79576 - DNA, 20 bp, Artificial Sequence
  Description of Artificial Sequence: Synthetic oligonucleotide
  Target: ATXN2; (-) strand; PAM type: YTN; PAM sequence: CTT
tgctttttaataactgttcc

SEQ ID NO: 79577 - DNA, 20 bp, Artificial Sequence
  Description of Artificial Sequence: Synthetic oligonucleotide
  Target: ATXN2; (-) strand; PAM type: YTN; PAM sequence: TTC
aaagtctttgctttttaata

SEQ ID NO: 79578 - DNA, 20 bp, Artificial Sequence
  Description of Artificial Sequence: Synthetic oligonucleotide
  Target: ATXN2; (-) strand; PAM type: YTN; PAM sequence: TTT
caaagtctttgctttttaat

SEQ ID NO: 79579 - DNA, 20 bp, Artificial Sequence
  Description of Artificial Sequence: Synthetic oligonucleotide
  Target: ATXN2; (-) strand; PAM type: YTN; PAM sequence: TTG
tgagatttcaaagtctttgc

SEQ ID NO: 79580 - DNA, 20 bp, Artificial Sequence
  Description of Artificial Sequence: Synthetic oligonucleotide
  Target: ATXN2; (-) strand; PAM type: YTN; PAM sequence: CTT
gtgagatttcaaagtctttg

SEQ ID NO: 79581 - DNA, 20 bp, Artificial Sequence
  Description of Artificial Sequence: Synthetic oligonucleotide
  Target: ATXN2; (-) strand; PAM type: YTN; PAM sequence: TTA
accttgtgagatttcaaagt

SEQ ID NO: 79582 - DNA, 20 bp, Artificial Sequence
  Description of Artificial Sequence: Synthetic oligonucleotide
  Target: ATXN2; (-) strand; PAM type: YTN; PAM sequence: TTT
aaccttgtgagatttcaaag

SEQ ID NO: 79583 - DNA, 20 bp, Artificial Sequence
  Description of Artificial Sequence: Synthetic oligonucleotide
  Target: ATXN2; (-) strand; PAM type: YTN; PAM sequence: TTT
taaccttgtgagatttcaaa

SEQ ID NO: 79584 - DNA, 20 bp, Artificial Sequence
  Description of Artificial Sequence: Synthetic oligonucleotide
  Target: ATXN2; (-) strand; PAM type: YTN; PAM sequence: TTT
ttaaccttgtgagatttcaa

SEQ ID NO: 79585 - DNA, 20 bp, Artificial Sequence
  Description of Artificial Sequence: Synthetic oligonucleotide
  Target: ATXN2; (-) strand; PAM type: YTN; PAM sequence: CTG
agatttttaaccttgtgaga

SEQ ID NO: 79586 - DNA, 20 bp, Artificial Sequence
  Description of Artificial Sequence: Synthetic oligonucleotide
  Target: ATXN2; (-) strand; PAM type: YTN; PAM sequence: TTA
ggtcaaagagataggaagtg

SEQ ID NO: 79587 - DNA, 20 bp, Artificial Sequence
  Description of Artificial Sequence: Synthetic oligonucleotide
  Target: ATXN2; (-) strand; PAM type: YTN; PAM sequence: TTT
aggtcaaagagataggaagt

SEQ ID NO: 79588 - DNA, 20 bp, Artificial Sequence
  Description of Artificial Sequence: Synthetic oligonucleotide
  Target: ATXN2; (-) strand; PAM type: YTN; PAM sequence: CTT
taggtcaaagagataggaag

SEQ ID NO: 79589 - DNA, 20 bp, Artificial Sequence
  Description of Artificial Sequence: Synthetic oligonucleotide
  Target: ATXN2; (-) strand; PAM type: YTN; PAM sequence: TTG
cctttaggtcaaagagatag

SEQ ID NO: 79590 - DNA, 20 bp, Artificial Sequence
  Description of Artificial Sequence: Synthetic oligonucleotide
  Target: ATXN2; (-) strand; PAM type: YTN; PAM sequence: TTA
aggaaattgcctttaggtca

SEQ ID NO: 79591 - DNA, 20 bp, Artificial Sequence
  Description of Artificial Sequence: Synthetic oligonucleotide
  Target: ATXN2; (-) strand; PAM type: YTN; PAM sequence: TTG
gagaaattaaggaaattgcc

SEQ ID NO: 79592 - DNA, 20 bp, Artificial Sequence
  Description of Artificial Sequence: Synthetic oligonucleotide
  Target: ATXN2; (-) strand; PAM type: YTN; PAM sequence: TTA
cagatgaggaagtgatggat

SEQ ID NO: 79593 - DNA, 20 bp, Artificial Sequence
  Description of Artificial Sequence: Synthetic oligonucleotide
  Target: ATXN2; (-) strand; PAM type: YTN; PAM sequence: TTT
acagatgaggaagtgatgga

SEQ ID NO: 79594 - DNA, 20 bp, Artificial Sequence
  Description of Artificial Sequence: Synthetic oligonucleotide
  Target: ATXN2; (-) strand; PAM type: YTN; PAM sequence: TTT
tacagatgaggaagtgatgg

SEQ ID NO: 79595 - DNA, 20 bp, Artificial Sequence
  Description of Artificial Sequence: Synthetic oligonucleotide
  Target: ATXN2; (-) strand; PAM type: YTN; PAM sequence: CTG
ttttacagatgaggaagtga

SEQ ID NO: 79596 - DNA, 20 bp, Artificial Sequence
  Description of Artificial Sequence: Synthetic oligonucleotide
  Target: ATXN2; (-) strand; PAM type: YTN; PAM sequence: CTG
gtagtgccatatctgtttta

SEQ ID NO: 79597 - DNA, 20 bp, Artificial Sequence
  Description of Artificial Sequence: Synthetic oligonucleotide
  Target: ATXN2; (-) strand; PAM type: YTN; PAM sequence: CTG
tcaggctggtagtgccatat

SEQ ID NO: 79598 - DNA, 20 bp, Artificial Sequence
  Description of Artificial Sequence: Synthetic oligonucleotide
  Target: ATXN2; (-) strand; PAM type: YTN; PAM sequence: TTA
caacagcccagcctgtcagg

SEQ ID NO: 79599 - DNA, 20 bp, Artificial Sequence
  Description of Artificial Sequence: Synthetic oligonucleotide
  Target: ATXN2; (-) strand; PAM type: YTN; PAM sequence: CTT
acaacagcccagcctgtcag

SEQ ID NO: 79600 - DNA, 20 bp, Artificial Sequence
  Description of Artificial Sequence: Synthetic oligonucleotide
  Target: ATXN2; (-) strand; PAM type: YTN; PAM sequence: TTA
agccttacaacagcccagcc

SEQ ID NO: 79601 - DNA, 20 bp, Artificial Sequence
  Description of Artificial Sequence: Synthetic oligonucleotide
  Target: ATXN2; (-) strand; PAM type: YTN; PAM sequence: TTT
aagccttacaacagcccagc

SEQ ID NO: 79602 - DNA, 20 bp, Artificial Sequence
  Description of Artificial Sequence: Synthetic oligonucleotide
  Target: ATXN2; (-) strand; PAM type: YTN; PAM sequence: TTT
taagccttacaacagcccag

SEQ ID NO: 79603 - DNA, 20 bp, Artificial Sequence
  Description of Artificial Sequence: Synthetic oligonucleotide
  Target: ATXN2; (-) strand; PAM type: YTN; PAM sequence: CTT
ttaagccttacaacagccca

SEQ ID NO: 79604 - DNA, 20 bp, Artificial Sequence
  Description of Artificial Sequence: Synthetic oligonucleotide
  Target: ATXN2; (-) strand; PAM type: YTN; PAM sequence: TTG
tatatcttttaagccttaca

SEQ ID NO: 79605 - DNA, 20 bp, Artificial Sequence
  Description of Artificial Sequence: Synthetic oligonucleotide
  Target: ATXN2; (-) strand; PAM type: YTN; PAM sequence: CTT
gtatatcttttaagccttac

SEQ ID NO: 79606 - DNA, 20 bp, Artificial Sequence
  Description of Artificial Sequence: Synthetic oligonucleotide
  Target: ATXN2; (-) strand; PAM type: YTN; PAM sequence: TTA
cttgtatatcttttaagcct

SEQ ID NO: 79607 - DNA, 20 bp, Artificial Sequence
  Description of Artificial Sequence: Synthetic oligonucleotide
  Target: ATXN2; (-) strand; PAM type: YTN; PAM sequence: CTG
tgccaagagcattacttgta

SEQ ID NO: 79608 - DNA, 20 bp, Artificial Sequence
  Description of Artificial Sequence: Synthetic oligonucleotide
  Target: ATXN2; (-) strand; PAM type: YTN; PAM sequence: TTC
aggagagctgtgccaagagc

SEQ ID NO: 79609 - DNA, 20 bp, Artificial Sequence
  Description of Artificial Sequence: Synthetic oligonucleotide
  Target: ATXN2; (-) strand; PAM type: YTN; PAM sequence: TTT
caggagagctgtgccaagag

SEQ ID NO: 79610 - DNA, 20 bp, Artificial Sequence
  Description of Artificial Sequence: Synthetic oligonucleotide
  Target: ATXN2; (-) strand; PAM type: YTN; PAM sequence: TTA
ggtttcaggagagctgtgcc

SEQ ID NO: 79611 - DNA, 20 bp, Artificial Sequence
  Description of Artificial Sequence: Synthetic oligonucleotide
  Target: ATXN2; (-) strand; PAM type: YTN; PAM sequence: CTA
ttaggtttcaggagagctgt

SEQ ID NO: 79612 - DNA, 20 bp, Artificial Sequence
  Description of Artificial Sequence: Synthetic oligonucleotide
  Target: ATXN2; (-) strand; PAM type: YTN; PAM sequence: TTG
tgtgcctattaggtttcagg

SEQ ID NO: 79613 - DNA, 20 bp, Artificial Sequence
  Description of Artificial Sequence: Synthetic oligonucleotide
  Target: ATXN2; (-) strand; PAM type: YTN; PAM sequence: TTA
ttgtgtgcctattaggtttc

SEQ ID NO: 79614 - DNA, 20 bp, Artificial Sequence
  Description of Artificial Sequence: Synthetic oligonucleotide
  Target: ATXN2; (-) strand; PAM type: YTN; PAM sequence: TTT
attgtgtgcctattaggttt

SEQ ID NO: 79615 - DNA, 20 bp, Artificial Sequence
  Description of Artificial Sequence: Synthetic oligonucleotide
  Target: ATXN2; (-) strand; PAM type: YTN; PAM sequence: TTA
tgtcataaaataccatttat

SEQ ID NO: 79616 - DNA, 20 bp, Artificial Sequence
  Description of Artificial Sequence: Synthetic oligonucleotide
  Target: ATXN2; (-) strand; PAM type: YTN; PAM sequence: TTA
ggtaataaatgttatgtcat

SEQ ID NO: 79617 - DNA, 20 bp, Artificial Sequence
  Description of Artificial Sequence: Synthetic oligonucleotide
  Target: ATXN2; (-) strand; PAM type: YTN; PAM sequence: TTT
aggtaataaatgttatgtca

SEQ ID NO: 79618 - DNA, 20 bp, Artificial Sequence
  Description of Artificial Sequence: Synthetic oligonucleotide
  Target: ATXN2; (-) strand; PAM type: YTN; PAM sequence: TTA
tttaggtaataaatgttatg

SEQ ID NO: 79619 - DNA, 20 bp, Artificial Sequence
  Description of Artificial Sequence: Synthetic oligonucleotide
  Target: ATXN2; (-) strand; PAM type: YTN; PAM sequence: TTT
atttaggtaataaatgttat

SEQ ID NO: 79620 - DNA, 20 bp, Artificial Sequence
  Description of Artificial Sequence: Synthetic oligonucleotide
  Target: ATXN2; (-) strand; PAM type: YTN; PAM sequence: TTT
tatttaggtaataaatgtta

SEQ ID NO: 79621 - DNA, 20 bp, Artificial Sequence
  Description of Artificial Sequence: Synthetic oligonucleotide
  Target: ATXN2; (-) strand; PAM type: YTN; PAM sequence: CTA
tgatgtgaaaagatgaacat

SEQ ID NO: 79622 - DNA, 20 bp, Artificial Sequence
  Description of Artificial Sequence: Synthetic oligonucleotide
  Target: ATXN2; (-) strand; PAM type: YTN; PAM sequence: CTA
tctatgatgtgaaaagatga

SEQ ID NO: 79623 - DNA, 20 bp, Artificial Sequence
  Description of Artificial Sequence: Synthetic oligonucleotide
  Target: ATXN2; (-) strand; PAM type: YTN; PAM sequence: TTA
gctatctatgatgtgaaaag

SEQ ID NO: 79624 - DNA, 20 bp, Artificial Sequence
  Description of Artificial Sequence: Synthetic oligonucleotide
  Target: ATXN2; (-) strand; PAM type: YTN; PAM sequence: TTT
agctatctatgatgtgaaaa

SEQ ID NO: 79625 - DNA, 20 bp, Artificial Sequence
  Description of Artificial Sequence: Synthetic oligonucleotide
  Target: ATXN2; (-) strand; PAM type: YTN; PAM sequence: CTG
gaaaaaaaaaaaaaaagaaa

SEQ ID NO: 79626 - DNA, 20 bp, Artificial Sequence
  Description of Artificial Sequence: Synthetic oligonucleotide
  Target: ATXN2; (-) strand; PAM type: YTN; PAM sequence: TTC
tggaaaaaaaaaaaaaaaga

SEQ ID NO: 79627 - DNA, 20 bp, Artificial Sequence
  Description of Artificial Sequence: Synthetic oligonucleotide
  Target: ATXN2; (-) strand; PAM type: YTN; PAM sequence: TTT
ctggaaaaaaaaaaaaaaag

SEQ ID NO: 79628 - DNA, 20 bp, Artificial Sequence
  Description of Artificial Sequence: Synthetic oligonucleotide
  Target: ATXN2; (-) strand; PAM type: YTN; PAM sequence: TTT
tctggaaaaaaaaaaaaaaa

SEQ ID NO: 79629 - DNA, 20 bp, Artificial Sequence
  Description of Artificial Sequence: Synthetic oligonucleotide
  Target: ATXN2; (-) strand; PAM type: YTN; PAM sequence: TTT
ttctggaaaaaaaaaaaaaa

SEQ ID NO: 79630 - DNA, 20 bp, Artificial Sequence
  Description of Artificial Sequence: Synthetic oligonucleotide
  Target: ATXN2; (-) strand; PAM type: YTN; PAM sequence: TTT
tttctggaaaaaaaaaaaaa

SEQ ID NO: 79631 - DNA, 20 bp, Artificial Sequence
  Description of Artificial Sequence: Synthetic oligonucleotide
  Target: ATXN2; (-) strand; PAM type: YTN; PAM sequence: CTG
agccaagtggtagtagtggc

SEQ ID NO: 79632 - DNA, 20 bp, Artificial Sequence
  Description of Artificial Sequence: Synthetic oligonucleotide
  Target: ATXN2; (-) strand; PAM type: YTN; PAM sequence: TTC
tgagccaagtggtagtagtg

SEQ ID NO: 79633 - DNA, 20 bp, Artificial Sequence
  Description of Artificial Sequence: Synthetic oligonucleotide
  Target: ATXN2; (-) strand; PAM type: YTN; PAM sequence: TTT
ctgagccaagtggtagtagt

SEQ ID NO: 79634 - DNA, 20 bp, Artificial Sequence
  Description of Artificial Sequence: Synthetic oligonucleotide
  Target: ATXN2; (-) strand; PAM type: YTN; PAM sequence: CTA
gcatttctgagccaagtggt

SEQ ID NO: 79635 - DNA, 20 bp, Artificial Sequence
  Description of Artificial Sequence: Synthetic oligonucleotide
  Target: ATXN2; (-) strand; PAM type: YTN; PAM sequence: TTC
agaaaataaagactagcatt

SEQ ID NO: 79636 - DNA, 20 bp, Artificial Sequence
  Description of Artificial Sequence: Synthetic oligonucleotide
  Target: ATXN2; (-) strand; PAM type: YTN; PAM sequence: TTT
cagaaaataaagactagcat

SEQ ID NO: 79637 - DNA, 20 bp, Artificial Sequence
  Description of Artificial Sequence: Synthetic oligonucleotide
  Target: ATXN2; (-) strand; PAM type: YTN; PAM sequence: CTA
tataaaacatttcagaaaat

SEQ ID NO: 79638 - DNA, 20 bp, Artificial Sequence
  Description of Artificial Sequence: Synthetic oligonucleotide
  Target: ATXN2; (-) strand; PAM type: YTN; PAM sequence: TTC
tatataaaacatttcagaaa

SEQ ID NO: 79639 - DNA, 20 bp, Artificial Sequence
  Description of Artificial Sequence: Synthetic oligonucleotide
  Target: ATXN2; (-) strand; PAM type: YTN; PAM sequence: TTT
ctatataaaacatttcagaa

SEQ ID NO: 79640 - DNA, 20 bp, Artificial Sequence
  Description of Artificial Sequence: Synthetic oligonucleotide
  Target: ATXN2; (-) strand; PAM type: YTN; PAM sequence: TTT
tctatataaaacatttcaga

SEQ ID NO: 79641 - DNA, 20 bp, Artificial Sequence
  Description of Artificial Sequence: Synthetic oligonucleotide
  Target: ATXN2; (-) strand; PAM type: YTN; PAM sequence: TTT
ttctatataaaacatttcag

SEQ ID NO: 79642 - DNA, 20 bp, Artificial Sequence
  Description of Artificial Sequence: Synthetic oligonucleotide
  Target: ATXN2; (-) strand; PAM type: YTN; PAM sequence: TTT
tttctatataaaacatttca

SEQ ID NO: 79643 - DNA, 20 bp, Artificial Sequence
  Description of Artificial Sequence: Synthetic oligonucleotide
  Target: ATXN2; (-) strand; PAM type: YTN; PAM sequence: TTA
aattttttctatataaaaca

SEQ ID NO: 79644 - DNA, 20 bp, Artificial Sequence
  Description of Artificial Sequence: Synthetic oligonucleotide
  Target: ATXN2; (-) strand; PAM type: YTN; PAM sequence: TTA
ttaaattttttctatataaa

SEQ ID NO: 79645 - DNA, 20 bp, Artificial Sequence
  Description of Artificial Sequence: Synthetic oligonucleotide
  Target: ATXN2; (-) strand; PAM type: YTN; PAM sequence: TTA
ttattaaattttttctatat

SEQ ID NO: 79646 - DNA, 20 bp, Artificial Sequence
  Description of Artificial Sequence: Synthetic oligonucleotide
  Target: ATXN2; (-) strand; PAM type: YTN; PAM sequence: TTT
attattaaattttttctata

SEQ ID NO: 79647 - DNA, 20 bp, Artificial Sequence
  Description of Artificial Sequence: Synthetic oligonucleotide
  Target: ATXN2; (-) strand; PAM type: YTN; PAM sequence: CTA
tttattattaaattttttct

SEQ ID NO: 79648 - DNA, 20 bp, Artificial Sequence
  Description of Artificial Sequence: Synthetic oligonucleotide
  Target: ATXN2; (-) strand; PAM type: YTN; PAM sequence: CTA
aaatggtaaggaaatatata

SEQ ID NO: 79649 - DNA, 20 bp, Artificial Sequence
  Description of Artificial Sequence: Synthetic oligonucleotide
  Target: ATXN2; (-) strand; PAM type: YTN; PAM sequence: TTA
acccaatctaaaatggtaag

SEQ ID NO: 79650 - DNA, 20 bp, Artificial Sequence
  Description of Artificial Sequence: Synthetic oligonucleotide
  Target: ATXN2; (-) strand; PAM type: YTN; PAM sequence: TTT
aacccaatctaaaatggtaa

SEQ ID NO: 79651 - DNA, 20 bp, Artificial Sequence
  Description of Artificial Sequence: Synthetic oligonucleotide
  Target: ATXN2; (-) strand; PAM type: YTN; PAM sequence: TTT
taacccaatctaaaatggta

SEQ ID NO: 79652 - DNA, 20 bp, Artificial Sequence
  Description of Artificial Sequence: Synthetic oligonucleotide
  Target: ATXN2; (-) strand; PAM type: YTN; PAM sequence: TTT
ttaacccaatctaaaatggt

SEQ ID NO: 79653 - DNA, 20 bp, Artificial Sequence
  Description of Artificial Sequence: Synthetic oligonucleotide
  Target: ATXN2; (-) strand; PAM type: YTN; PAM sequence: CTT
tttaacccaatctaaaatgg

SEQ ID NO: 79654 - DNA, 20 bp, Artificial Sequence
  Description of Artificial Sequence: Synthetic oligonucleotide
  Target: ATXN2; (-) strand; PAM type: YTN; PAM sequence: CTC
catactttttaacccaatct

SEQ ID NO: 79655 - DNA, 20 bp, Artificial Sequence
  Description of Artificial Sequence: Synthetic oligonucleotide
  Target: ATXN2; (-) strand; PAM type: YTN; PAM sequence: TTG
aatcaccgcacccggccgga

SEQ ID NO: 79656 - DNA, 20 bp, Artificial Sequence
  Description of Artificial Sequence: Synthetic oligonucleotide
  Target: ATXN2; (-) strand; PAM type: YTN; PAM sequence: CTT
gaatcaccgcacccggccgg

SEQ ID NO: 79657 - DNA, 20 bp, Artificial Sequence
  Description of Artificial Sequence: Synthetic oligonucleotide
  Target: ATXN2; (-) strand; PAM type: YTN; PAM sequence: TTG
caggcttgaatcaccgcacc

SEQ ID NO: 79658 - DNA, 20 bp, Artificial Sequence
  Description of Artificial Sequence: Synthetic oligonucleotide
  Target: ATXN2; (-) strand; PAM type: YTN; PAM sequence: CTG
ggattgcaggcttgaatcac

SEQ ID NO: 79659 - DNA, 20 bp, Artificial Sequence
  Description of Artificial Sequence: Synthetic oligonucleotide
  Target: ATXN2; (-) strand; PAM type: YTN; PAM sequence: CTC
ccaaagtgctgggattgcag

SEQ ID NO: 79660 - DNA, 20 bp, Artificial Sequence
  Description of Artificial Sequence: Synthetic oligonucleotide
  Target: ATXN2; (-) strand; PAM type: YTN; PAM sequence: CTC
agcctcccaaagtgctggga

SEQ ID NO: 79661 - DNA, 20 bp, Artificial Sequence
  Description of Artificial Sequence: Synthetic oligonucleotide
  Target: ATXN2; (-) strand; PAM type: YTN; PAM sequence: CTG
cctcagcctcccaaagtgct

SEQ ID NO: 79662 - DNA, 20 bp, Artificial Sequence
  Description of Artificial Sequence: Synthetic oligonucleotide
  Target: ATXN2; (-) strand; PAM type: YTN; PAM sequence: CTG
tctgcctcagcctcccaaag

SEQ ID NO: 79663 - DNA, 20 bp, Artificial Sequence
  Description of Artificial Sequence: Synthetic oligonucleotide
  Target: ATXN2; (-) strand; PAM type: YTN; PAM sequence: CTC
atgatctgtctgcctcagcc

SEQ ID NO: 79664 - DNA, 20 bp, Artificial Sequence
  Description of Artificial Sequence: Synthetic oligonucleotide
  Target: ATXN2; (-) strand; PAM type: YTN; PAM sequence: TTA
gccacagatcccgacctcat

SEQ ID NO: 79665 - DNA, 20 bp, Artificial Sequence
  Description of Artificial Sequence: Synthetic oligonucleotide
  Target: ATXN2; (-) strand; PAM type: YTN; PAM sequence: CTG
tgttagccacagatcccgac

SEQ ID NO: 79666 - DNA, 20 bp, Artificial Sequence
  Description of Artificial Sequence: Synthetic oligonucleotide
  Target: ATXN2; (-) strand; PAM type: YTN; PAM sequence: TTC
actgtgttagccacagatcc

SEQ ID NO: 79667 - DNA, 20 bp, Artificial Sequence
  Description of Artificial Sequence: Synthetic oligonucleotide
  Target: ATXN2; (-) strand; PAM type: YTN; PAM sequence: TTT
cactgtgttagccacagatc

SEQ ID NO: 79668 - DNA, 20 bp, Artificial Sequence
  Description of Artificial Sequence: Synthetic oligonucleotide
  Target: ATXN2; (-) strand; PAM type: YTN; PAM sequence: TTG
gtagagatgaggtttcactg

SEQ ID NO: 79669 - DNA, 20 bp, Artificial Sequence
  Description of Artificial Sequence: Synthetic oligonucleotide
  Target: ATXN2; (-) strand; PAM type: YTN; PAM sequence: TTT
ggtagagatgaggtttcact

SEQ ID NO: 79670 - DNA, 20 bp, Artificial Sequence
  Description of Artificial Sequence: Synthetic oligonucleotide
  Target: ATXN2; (-) strand; PAM type: YTN; PAM sequence: TTT
tggtagagatgaggtttcac

SEQ ID NO: 79671 - DNA, 20 bp, Artificial Sequence
  Description of Artificial Sequence: Synthetic oligonucleotide
  Target: ATXN2; (-) strand; PAM type: YTN; PAM sequence: TTT
ttggtagagatgaggtttca

SEQ ID NO: 79672 - DNA, 20 bp, Artificial Sequence
  Description of Artificial Sequence: Synthetic oligonucleotide
  Target: ATXN2; (-) strand; PAM type: YTN; PAM sequence: TTG
tatttttggtagagatgagg

SEQ ID NO: 79673 - DNA, 20 bp, Artificial Sequence
  Description of Artificial Sequence: Synthetic oligonucleotide
  Target: ATXN2; (-) strand; PAM type: YTN; PAM sequence: TTT
gtatttttggtagagatgag

SEQ ID NO: 79674 - DNA, 20 bp, Artificial Sequence
  Description of Artificial Sequence: Synthetic oligonucleotide
  Target: ATXN2; (-) strand; PAM type: YTN; PAM sequence: TTT
tgtatttttggtagagatga

SEQ ID NO: 79675 - DNA, 20 bp, Artificial Sequence
  Description of Artificial Sequence: Synthetic oligonucleotide
  Target: ATXN2; (-) strand; PAM type: YTN; PAM sequence: TTT
ttgtatttttggtagagatg

SEQ ID NO: 79676 - DNA, 20 bp, Artificial Sequence
  Description of Artificial Sequence: Synthetic oligonucleotide
  Target: ATXN2; (-) strand; PAM type: YTN; PAM sequence: TTT
tttgtatttttggtagagat

SEQ ID NO: 79677 - DNA, 20 bp, Artificial Sequence
  Description of Artificial Sequence: Synthetic oligonucleotide
  Target: ATXN2; (-) strand; PAM type: YTN; PAM sequence: TTT
ttttgtatttttggtagaga

SEQ ID NO: 79678 - DNA, 20 bp, Artificial Sequence
  Description of Artificial Sequence: Synthetic oligonucleotide
  Target: ATXN2; (-) strand; PAM type: YTN; PAM sequence: CTA
atttttttgtatttttggta

SEQ ID NO: 79679 - DNA, 20 bp, Artificial Sequence
  Description of Artificial Sequence: Synthetic oligonucleotide
  Target: ATXN2; (-) strand; PAM type: YTN; PAM sequence: CTA
caggtgcccgccaccacgcc

SEQ ID NO: 79680 - DNA, 20 bp, Artificial Sequence
  Description of Artificial Sequence: Synthetic oligonucleotide
  Target: ATXN2; (-) strand; PAM type: YTN; PAM sequence: CTG
ggactacaggtgcccgccac

SEQ ID NO: 79681 - DNA, 20 bp, Artificial Sequence
  Description of Artificial Sequence: Synthetic oligonucleotide
  Target: ATXN2; (-) strand; PAM type: YTN; PAM sequence: CTC
ccgagtagctgggactacag

SEQ ID NO: 79682 - DNA, 20 bp, Artificial Sequence
  Description of Artificial Sequence: Synthetic oligonucleotide
  Target: ATXN2; (-) strand; PAM type: YTN; PAM sequence: CTC
cacctcccgagtagctggga

SEQ ID NO: 79683 - DNA, 20 bp, Artificial Sequence
  Description of Artificial Sequence: Synthetic oligonucleotide
  Target: ATXN2; (-) strand; PAM type: YTN; PAM sequence: CTG
cctccacctcccgagtagct

SEQ ID NO: 79684 - DNA, 20 bp, Artificial Sequence
  Description of Artificial Sequence: Synthetic oligonucleotide
  Target: ATXN2; (-) strand; PAM type: YTN; PAM sequence: CTC
ctgcctccacctcccgagta

SEQ ID NO: 79685 - DNA, 20 bp, Artificial Sequence
  Description of Artificial Sequence: Synthetic oligonucleotide
  Target: ATXN2; (-) strand; PAM type: YTN; PAM sequence: TTC
tcctgcctccacctcccgag

SEQ ID NO: 79686 - DNA, 20 bp, Artificial Sequence
  Description of Artificial Sequence: Synthetic oligonucleotide
  Target: ATXN2; (-) strand; PAM type: YTN; PAM sequence: TTC
acgccattctcctgcctcca

SEQ ID NO: 79687 - DNA, 20 bp, Artificial Sequence
  Description of Artificial Sequence: Synthetic oligonucleotide
  Target: ATXN2; (-) strand; PAM type: YTN; PAM sequence: CTC
gggttcacgccattctcctg

SEQ ID NO: 79688 - DNA, 20 bp, Artificial Sequence
  Description of Artificial Sequence: Synthetic oligonucleotide
  Target: ATXN2; (-) strand; PAM type: YTN; PAM sequence: CTC
tcgggttcacgccattctcc

SEQ ID NO: 79689 - DNA, 20 bp, Artificial Sequence
  Description of Artificial Sequence: Synthetic oligonucleotide
  Target: ATXN2; (-) strand; PAM type: YTN; PAM sequence: CTG
cctctcgggttcacgccatt

SEQ ID NO: 79690 - DNA, 20 bp, Artificial Sequence
  Description of Artificial Sequence: Synthetic oligonucleotide
  Target: ATXN2; (-) strand; PAM type: YTN; PAM sequence: CTC
tgcctctcgggttcacgcca

SEQ ID NO: 79691 - DNA, 20 bp, Artificial Sequence
  Description of Artificial Sequence: Synthetic oligonucleotide
  Target: ATXN2; (-) strand; PAM type: YTN; PAM sequence: CTA
caagctctgcctctcgggtt

SEQ ID NO: 79692 - DNA, 20 bp, Artificial Sequence
  Description of Artificial Sequence: Synthetic oligonucleotide
  Target: ATXN2; (-) strand; PAM type: YTN; PAM sequence: CTC
actacaagctctgcctctcg

SEQ ID NO: 79693 - DNA, 20 bp, Artificial Sequence
  Description of Artificial Sequence: Synthetic oligonucleotide
  Target: ATXN2; (-) strand; PAM type: YTN; PAM sequence: TTG
gctcactacaagctctgcct

SEQ ID NO: 79694 - DNA, 20 bp, Artificial Sequence
  Description of Artificial Sequence: Synthetic oligonucleotide
  Target: ATXN2; (-) strand; PAM type: YTN; PAM sequence: CTT
ggctcactacaagctctgcc

SEQ ID NO: 79695 - DNA, 20 bp, Artificial Sequence
  Description of Artificial Sequence: Synthetic oligonucleotide
  Target: ATXN2; (-) strand; PAM type: YTN; PAM sequence: CTG
gagtgcagtggtgcgatctt

SEQ ID NO: 79696 - DNA, 20 bp, Artificial Sequence
  Description of Artificial Sequence: Synthetic oligonucleotide
  Target: ATXN2; (-) strand; PAM type: YTN; PAM sequence: CTG
tcgcccaggctggagtgcag

SEQ ID NO: 79697 - DNA, 20 bp, Artificial Sequence
  Description of Artificial Sequence: Synthetic oligonucleotide
  Target: ATXN2; (-) strand; PAM type: YTN; PAM sequence: CTC
tgtcgcccaggctggagtgc

SEQ ID NO: 79698 - DNA, 20 bp, Artificial Sequence
  Description of Artificial Sequence: Synthetic oligonucleotide
  Target: ATXN2; (-) strand; PAM type: YTN; PAM sequence: TTG
ctctgtcgcccaggctggag

SEQ ID NO: 79699 - DNA, 20 bp, Artificial Sequence
  Description of Artificial Sequence: Synthetic oligonucleotide
  Target: ATXN2; (-) strand; PAM type: YTN; PAM sequence: CTT
gctctgtcgcccaggctgga

SEQ ID NO: 79700 - DNA, 20 bp, Artificial Sequence
  Description of Artificial Sequence: Synthetic oligonucleotide
  Target: ATXN2; (-) strand; PAM type: YTN; PAM sequence: TTG
gagacagagtcttgctctgt

SEQ ID NO: 79701 - DNA, 20 bp, Artificial Sequence
  Description of Artificial Sequence: Synthetic oligonucleotide
  Target: ATXN2; (-) strand; PAM type: YTN; PAM sequence: TTT
ggagacagagtcttgctctg

SEQ ID NO: 79702 - DNA, 20 bp, Artificial Sequence
  Description of Artificial Sequence: Synthetic oligonucleotide
  Target: ATXN2; (-) strand; PAM type: YTN; PAM sequence: TTT
tggagacagagtcttgctct

SEQ ID NO: 79703 - DNA, 20 bp, Artificial Sequence
  Description of Artificial Sequence: Synthetic oligonucleotide
  Target: ATXN2; (-) strand; PAM type: YTN; PAM sequence: TTT
ttggagacagagtcttgctc

SEQ ID NO: 79704 - DNA, 20 bp, Artificial Sequence
  Description of Artificial Sequence: Synthetic oligonucleotide
  Target: ATXN2; (-) strand; PAM type: YTN; PAM sequence: TTT
tttggagacagagtcttgct

SEQ ID NO: 79705 - DNA, 20 bp, Artificial Sequence
  Description of Artificial Sequence: Synthetic oligonucleotide
  Target: ATXN2; (-) strand; PAM type: YTN; PAM sequence: TTT
ttttggagacagagtcttgc

SEQ ID NO: 79706 - DNA, 20 bp, Artificial Sequence
  Description of Artificial Sequence: Synthetic oligonucleotide
  Target: ATXN2; (-) strand; PAM type: YTN; PAM sequence: TTT
tttttggagacagagtcttg

SEQ ID NO: 79707 - DNA, 20 bp, Artificial Sequence
  Description of Artificial Sequence: Synthetic oligonucleotide
  Target: ATXN2; (-) strand; PAM type: YTN; PAM sequence: TTT
ttttttggagacagagtctt

SEQ ID NO: 79708 - DNA, 20 bp, Artificial Sequence
  Description of Artificial Sequence: Synthetic oligonucleotide
  Target: ATXN2; (-) strand; PAM type: YTN; PAM sequence: TTT
tttttttggagacagagtct

SEQ ID NO: 79709 - DNA, 20 bp, Artificial Sequence
  Description of Artificial Sequence: Synthetic oligonucleotide
  Target: ATXN2; (-) strand; PAM type: YTN; PAM sequence: TTT
ttttttttggagacagagtc

SEQ ID NO: 79710 - DNA, 20 bp, Artificial Sequence
  Description of Artificial Sequence: Synthetic oligonucleotide
  Target: ATXN2; (-) strand; PAM type: YTN; PAM sequence: TTT
tttttttttggagacagagt

SEQ ID NO: 79711 - DNA, 20 bp, Artificial Sequence
  Description of Artificial Sequence: Synthetic oligonucleotide
  Target: ATXN2; (-) strand; PAM type: YTN; PAM sequence: TTT
ttttttttttggagacagag

SEQ ID NO: 79712 - DNA, 20 bp, Artificial Sequence
  Description of Artificial Sequence: Synthetic oligonucleotide
  Target: ATXN2; (-) strand; PAM type: YTN; PAM sequence: TTT
tttttttttttggagacaga

SEQ ID NO: 79713 - DNA, 20 bp, Artificial Sequence
  Description of Artificial Sequence: Synthetic oligonucleotide
  Target: ATXN2; (-) strand; PAM type: YTN; PAM sequence: TTT
ttttttttttttggagacag

SEQ ID NO: 79714 - DNA, 20 bp, Artificial Sequence
  Description of Artificial Sequence: Synthetic oligonucleotide
  Target: ATXN2; (-) strand; PAM type: YTN; PAM sequence: TTT
tttttttttttttggagaca

SEQ ID NO: 79715 - DNA, 20 bp, Artificial Sequence
  Description of Artificial Sequence: Synthetic oligonucleotide
  Target: ATXN2; (-) strand; PAM type: YTN; PAM sequence: TTT
ttttttttttttttggagac

SEQ ID NO: 79716 - DNA, 20 bp, Artificial Sequence
  Description of Artificial Sequence: Synthetic oligonucleotide
  Target: ATXN2; (-) strand; PAM type: YTN; PAM sequence: TTT
tttttttttttttttggaga

SEQ ID NO: 79717 - DNA, 20 bp, Artificial Sequence
  Description of Artificial Sequence: Synthetic oligonucleotide
  Target: ATXN2; (-) strand; PAM type: YTN; PAM sequence: TTT
ttttttttttttttttggag

SEQ ID NO: 79718 - DNA, 20 bp, Artificial Sequence
  Description of Artificial Sequence: Synthetic oligonucleotide
  Target: ATXN2; (-) strand; PAM type: YTN; PAM sequence: TTT
tttttttttttttttttgga

SEQ ID NO: 79719 - DNA, 20 bp, Artificial Sequence
  Description of Artificial Sequence: Synthetic oligonucleotide
  Target: ATXN2; (-) strand; PAM type: YTN; PAM sequence: TTT
ttttttttttttttttttgg

SEQ ID NO: 79720 - DNA, 20 bp, Artificial Sequence
  Description of Artificial Sequence: Synthetic oligonucleotide
  Target: ATXN2; (-) strand; PAM type: YTN; PAM sequence: TTT
tttttttttttttttttttg

SEQ ID NO: 79721 - DNA, 20 bp, Artificial Sequence
  Description of Artificial Sequence: Synthetic oligonucleotide
  Target: ATXN2; (-) strand; PAM type: YTN; PAM sequence: TTT
tttttttttttttttttttt

SEQ ID NO: 79722 - DNA, 20 bp, Artificial Sequence
  Description of Artificial Sequence: Synthetic oligonucleotide
  Target: ATXN2; (-) strand; PAM type: YTN; PAM sequence: TTT
tttttttttttttttttttt

SEQ ID NO: 79723 - DNA, 20 bp, Artificial Sequence
  Description of Artificial Sequence: Synthetic oligonucleotide
  Target: ATXN2; (-) strand; PAM type: YTN; PAM sequence: TTT
tttttttttttttttttttt

SEQ ID NO: 79724 - DNA, 20 bp, Artificial Sequence
  Description of Artificial Sequence: Synthetic oligonucleotide
  Target: ATXN2; (-) strand; PAM type: YTN; PAM sequence: CTT
tttttttttttttttttttt

SEQ ID NO: 79725 - DNA, 20 bp, Artificial Sequence
  Description of Artificial Sequence: Synthetic oligonucleotide
  Target: ATXN2; (-) strand; PAM type: YTN; PAM sequence: CTC
catacctttttttttttttt

SEQ ID NO: 79726 - DNA, 20 bp, Artificial Sequence
  Description of Artificial Sequence: Synthetic oligonucleotide
  Target: ATXN2; (-) strand; PAM type: YTN; PAM sequence: CTA
taagaagtctccataccttt

SEQ ID NO: 79727 - DNA, 20 bp, Artificial Sequence
  Description of Artificial Sequence: Synthetic oligonucleotide
  Target: ATXN2; (-) strand; PAM type: YTN; PAM sequence: CTA
taaatgctataagaagtctc

SEQ ID NO: 79728 - DNA, 20 bp, Artificial Sequence
  Description of Artificial Sequence: Synthetic oligonucleotide
  Target: ATXN2; (-) strand; PAM type: YTN; PAM sequence: TTC
atagtctataaatgctataa

SEQ ID NO: 79729 - DNA, 20 bp, Artificial Sequence
  Description of Artificial Sequence: Synthetic oligonucleotide
  Target: ATXN2; (-) strand; PAM type: YTN; PAM sequence: TTG
ttcatagtctataaatgcta

SEQ ID NO: 79730 - DNA, 20 bp, Artificial Sequence
  Description of Artificial Sequence: Synthetic oligonucleotide
  Target: ATXN2; (-) strand; PAM type: YTN; PAM sequence: TTA
gttgttcatagtctataaat

SEQ ID NO: 79731 - DNA, 20 bp, Artificial Sequence
  Description of Artificial Sequence: Synthetic oligonucleotide
  Target: ATXN2; (-) strand; PAM type: YTN; PAM sequence: TTT
agttgttcatagtctataaa

SEQ ID NO: 79732 - DNA, 20 bp, Artificial Sequence
  Description of Artificial Sequence: Synthetic oligonucleotide
  Target: ATXN2; (-) strand; PAM type: YTN; PAM sequence: TTC
agggaatttagttgttcata

SEQ ID NO: 79733 - DNA, 20 bp, Artificial Sequence
  Description of Artificial Sequence: Synthetic oligonucleotide
  Target: ATXN2; (-) strand; PAM type: YTN; PAM sequence: TTG
tgacagatacggaattcagg

SEQ ID NO: 79734 - DNA, 20 bp, Artificial Sequence
  Description of Artificial Sequence: Synthetic oligonucleotide
  Target: ATXN2; (-) strand; PAM type: YTN; PAM sequence: TTT
gtgacagatacggaattcag

SEQ ID NO: 79735 - DNA, 20 bp, Artificial Sequence
  Description of Artificial Sequence: Synthetic oligonucleotide
  Target: ATXN2; (-) strand; PAM type: YTN; PAM sequence: TTA
catttgtgacagatacggaa

SEQ ID NO: 79736 - DNA, 20 bp, Artificial Sequence
  Description of Artificial Sequence: Synthetic oligonucleotide
  Target: ATXN2; (-) strand; PAM type: YTN; PAM sequence: TTT
acatttgtgacagatacgga

SEQ ID NO: 79737 - DNA, 20 bp, Artificial Sequence
  Description of Artificial Sequence: Synthetic oligonucleotide
  Target: ATXN2; (-) strand; PAM type: YTN; PAM sequence: CTA
tccccccaccgccaaaaaaa

SEQ ID NO: 79738 - DNA, 20 bp, Artificial Sequence
  Description of Artificial Sequence: Synthetic oligonucleotide
  Target: ATXN2; (-) strand; PAM type: YTN; PAM sequence: CTG
tataccatcccaggcgacag

SEQ ID NO: 79739 - DNA, 20 bp, Artificial Sequence
  Description of Artificial Sequence: Synthetic oligonucleotide
  Target: ATXN2; (-) strand; PAM type: YTN; PAM sequence: TTG
cgccactgtataccatccca

SEQ ID NO: 79740 - DNA, 20 bp, Artificial Sequence
  Description of Artificial Sequence: Synthetic oligonucleotide
  Target: ATXN2; (-) strand; PAM type: YTN; PAM sequence: CTA
tgattgcgccactgtatacc

SEQ ID NO: 79741 - DNA, 20 bp, Artificial Sequence
  Description of Artificial Sequence: Synthetic oligonucleotide
  Target: ATXN2; (-) strand; PAM type: YTN; PAM sequence: TTG
cagtgagctatgattgcgcc

SEQ ID NO: 79742 - DNA, 20 bp, Artificial Sequence
  Description of Artificial Sequence: Synthetic oligonucleotide
  Target: ATXN2; (-) strand; PAM type: YTN; PAM sequence: TTG
gaggttgcagtgagctatga

SEQ ID NO: 79743 - DNA, 20 bp, Artificial Sequence
  Description of Artificial Sequence: Synthetic oligonucleotide
  Target: ATXN2; (-) strand; PAM type: YTN; PAM sequence: TTA
aacccaggaattggaggttg

SEQ ID NO: 79744 - DNA, 20 bp, Artificial Sequence
  Description of Artificial Sequence: Synthetic oligonucleotide
  Target: ATXN2; (-) strand; PAM type: YTN; PAM sequence: CTT
aaacccaggaattggaggtt

SEQ ID NO: 79745 - DNA, 20 bp, Artificial Sequence
  Description of Artificial Sequence: Synthetic oligonucleotide
  Target: ATXN2; (-) strand; PAM type: YTN; PAM sequence: CTC
aggagggtcacttaaaccca

SEQ ID NO: 79746 - DNA, 20 bp, Artificial Sequence
  Description of Artificial Sequence: Synthetic oligonucleotide
  Target: ATXN2; (-) strand; PAM type: YTN; PAM sequence: CTG
actcaggagggtcacttaaa

SEQ ID NO: 79747 - DNA, 20 bp, Artificial Sequence
  Description of Artificial Sequence: Synthetic oligonucleotide
  Target: ATXN2; (-) strand; PAM type: YTN; PAM sequence: TTG
ggaggctgactcaggagggt

SEQ ID NO: 79748 - DNA, 20 bp, Artificial Sequence
  Description of Artificial Sequence: Synthetic oligonucleotide
  Target: ATXN2; (-) strand; PAM type: YTN; PAM sequence: CTT
gggaggctgactcaggaggg

SEQ ID NO: 79749 - DNA, 20 bp, Artificial Sequence
  Description of Artificial Sequence: Synthetic oligonucleotide
  Target: ATXN2; (-) strand; PAM type: YTN; PAM sequence: CTA
cttgggaggctgactcagga

SEQ ID NO: 79750 - DNA, 20 bp, Artificial Sequence
  Description of Artificial Sequence: Synthetic oligonucleotide
  Target: ATXN2; (-) strand; PAM type: YTN; PAM sequence: CTC
agctacttgggaggctgact

SEQ ID NO: 79751 - DNA, 20 bp, Artificial Sequence
  Description of Artificial Sequence: Synthetic oligonucleotide
  Target: ATXN2; (-) strand; PAM type: YTN; PAM sequence: CTG
ggcatggtggtgcatgcgta

SEQ ID NO: 79752 - DNA, 20 bp, Artificial Sequence
  Description of Artificial Sequence: Synthetic oligonucleotide
  Target: ATXN2; (-) strand; PAM type: YTN; PAM sequence: TTA
gctgggcatggtggtgcatg

SEQ ID NO: 79753 - DNA, 20 bp, Artificial Sequence
  Description of Artificial Sequence: Synthetic oligonucleotide
  Target: ATXN2; (-) strand; PAM type: YTN; PAM sequence: CTA
caaaaataaattagctgggc

SEQ ID NO: 79754 - DNA, 20 bp, Artificial Sequence
  Description of Artificial Sequence: Synthetic oligonucleotide
  Target: ATXN2; (-) strand; PAM type: YTN; PAM sequence: CTC
tacaaaaataaattagctgg

SEQ ID NO: 79755 - DNA, 20 bp, Artificial Sequence
  Description of Artificial Sequence: Synthetic oligonucleotide
  Target: ATXN2; (-) strand; PAM type: YTN; PAM sequence: CTA
ggcaacatagtgaggcccca

SEQ ID NO: 79756 - DNA, 20 bp, Artificial Sequence
  Description of Artificial Sequence: Synthetic oligonucleotide
  Target: ATXN2; (-) strand; PAM type: YTN; PAM sequence: TTC
aagatcagcctaggcaacat

SEQ ID NO: 79757 - DNA, 20 bp, Artificial Sequence
  Description of Artificial Sequence: Synthetic oligonucleotide
  Target: ATXN2; (-) strand; PAM type: YTN; PAM sequence: CTC
aggaattcaagatcagccta

SEQ ID NO: 79758 - DNA, 20 bp, Artificial Sequence
  Description of Artificial Sequence: Synthetic oligonucleotide
  Target: ATXN2; (-) strand; PAM type: YTN; PAM sequence: TTG
agctcaggaattcaagatca

SEQ ID NO: 79759 - DNA, 20 bp, Artificial Sequence
  Description of Artificial Sequence: Synthetic oligonucleotide
  Target: ATXN2; (-) strand; PAM type: YTN; PAM sequence: CTT
gagctcaggaattcaagatc

SEQ ID NO: 79760 - DNA, 20 bp, Artificial Sequence
  Description of Artificial Sequence: Synthetic oligonucleotide
  Target: ATXN2; (-) strand; PAM type: YTN; PAM sequence: TTG
ggaagccaagggaggagggt

SEQ ID NO: 79761 - DNA, 20 bp, Artificial Sequence
  Description of Artificial Sequence: Synthetic oligonucleotide
  Target: ATXN2; (-) strand; PAM type: YTN; PAM sequence: TTT
gggaagccaagggaggaggg

SEQ ID NO: 79762 - DNA, 20 bp, Artificial Sequence
  Description of Artificial Sequence: Synthetic oligonucleotide
  Target: ATXN2; (-) strand; PAM type: YTN; PAM sequence: CTT
tgggaagccaagggaggagg

SEQ ID NO: 79763 - DNA, 20 bp, Artificial Sequence
  Description of Artificial Sequence: Synthetic oligonucleotide
  Target: ATXN2; (-) strand; PAM type: YTN; PAM sequence: CTA
gcactttgggaagccaaggg

SEQ ID NO: 79764 - DNA, 20 bp, Artificial Sequence
  Description of Artificial Sequence: Synthetic oligonucleotide
  Target: ATXN2; (-) strand; PAM type: YTN; PAM sequence: TTC
tagcactttgggaagccaag

SEQ ID NO: 79765 - DNA, 20 bp, Artificial Sequence
  Description of Artificial Sequence: Synthetic oligonucleotide
  Target: ATXN2; (-) strand; PAM type: YTN; PAM sequence: CTG
taattctagcactttgggaa

SEQ ID NO: 79766 - DNA, 20 bp, Artificial Sequence
  Description of Artificial Sequence: Synthetic oligonucleotide
  Target: ATXN2; (-) strand; PAM type: YTN; PAM sequence: CTC
acacctgtaattctagcact

SEQ ID NO: 79767 - DNA, 20 bp, Artificial Sequence
  Description of Artificial Sequence: Synthetic oligonucleotide
  Target: ATXN2; (-) strand; PAM type: YTN; PAM sequence: CTG
ggcacagtggctcacacctg

SEQ ID NO: 79768 - DNA, 20 bp, Artificial Sequence
  Description of Artificial Sequence: Synthetic oligonucleotide
  Target: ATXN2; (-) strand; PAM type: YTN; PAM sequence: TTG
gctgggcacagtggctcaca

SEQ ID NO: 79769 - DNA, 20 bp, Artificial Sequence
  Description of Artificial Sequence: Synthetic oligonucleotide
  Target: ATXN2; (-) strand; PAM type: YTN; PAM sequence: TTT
ggctgggcacagtggctcac

SEQ ID NO: 79770 - DNA, 20 bp, Artificial Sequence
  Description of Artificial Sequence: Synthetic oligonucleotide
  Target: ATXN2; (-) strand; PAM type: YTN; PAM sequence: TTT
tggctgggcacagtggctca

SEQ ID NO: 79771 - DNA, 20 bp, Artificial Sequence
  Description of Artificial Sequence: Synthetic oligonucleotide
  Target: ATXN2; (-) strand; PAM type: YTN; PAM sequence: TTC
aacagtatgaaaaacggaaa

SEQ ID NO: 79772 - DNA, 20 bp, Artificial Sequence
  Description of Artificial Sequence: Synthetic oligonucleotide
  Target: ATXN2; (-) strand; PAM type: YTN; PAM sequence: CTT
caacagtatgaaaaacggaa

SEQ ID NO: 79773 - DNA, 20 bp, Artificial Sequence
  Description of Artificial Sequence: Synthetic oligonucleotide
  Target: ATXN2; (-) strand; PAM type: YTN; PAM sequence: CTA
tacttcaacagtatgaaaaa

SEQ ID NO: 79774 - DNA, 20 bp, Artificial Sequence
  Description of Artificial Sequence: Synthetic oligonucleotide
  Target: ATXN2; (-) strand; PAM type: YTN; PAM sequence: CTG
ggtgaaggactatacttcaa

SEQ ID NO: 79775 - DNA, 20 bp, Artificial Sequence
  Description of Artificial Sequence: Synthetic oligonucleotide
  Target: ATXN2; (-) strand; PAM type: YTN; PAM sequence: CTC
tgggtgaaggactatacttc

SEQ ID NO: 79776 - DNA, 20 bp, Artificial Sequence
  Description of Artificial Sequence: Synthetic oligonucleotide
  Target: ATXN2; (-) strand; PAM type: YTN; PAM sequence: TTC
tctgggtgaaggactatact

SEQ ID NO: 79777 - DNA, 20 bp, Artificial Sequence
  Description of Artificial Sequence: Synthetic oligonucleotide
  Target: ATXN2; (-) strand; PAM type: YTN; PAM sequence: CTT
ctctgggtgaaggactatac

SEQ ID NO: 79778 - DNA, 20 bp, Artificial Sequence
  Description of Artificial Sequence: Synthetic oligonucleotide
  Target: ATXN2; (-) strand; PAM type: YTN; PAM sequence: CTA
gcttctctgggtgaaggact

SEQ ID NO: 79779 - DNA, 20 bp, Artificial Sequence
  Description of Artificial Sequence: Synthetic oligonucleotide
  Target: ATXN2; (-) strand; PAM type: YTN; PAM sequence: TTG
agtcactagcttctctgggt

SEQ ID NO: 79780 - DNA, 20 bp, Artificial Sequence
  Description of Artificial Sequence: Synthetic oligonucleotide
  Target: ATXN2; (-) strand; PAM type: YTN; PAM sequence: CTT
gagtcactagcttctctggg

SEQ ID NO: 79781 - DNA, 20 bp, Artificial Sequence
  Description of Artificial Sequence: Synthetic oligonucleotide
  Target: ATXN2; (-) strand; PAM type: YTN; PAM sequence: TTA
atcaaccaggaacttgagtc

SEQ ID NO: 79782 - DNA, 20 bp, Artificial Sequence
  Description of Artificial Sequence: Synthetic oligonucleotide
  Target: ATXN2; (-) strand; PAM type: YTN; PAM sequence: TTT
aatcaaccaggaacttgagt

SEQ ID NO: 79783 - DNA, 20 bp, Artificial Sequence
  Description of Artificial Sequence: Synthetic oligonucleotide
  Target: ATXN2; (-) strand; PAM type: YTN; PAM sequence: TTT
taatcaaccaggaacttgag

SEQ ID NO: 79784 - DNA, 20 bp, Artificial Sequence
  Description of Artificial Sequence: Synthetic oligonucleotide
  Target: ATXN2; (-) strand; PAM type: YTN; PAM sequence: CTT
ttaatcaaccaggaacttga

SEQ ID NO: 79785 - DNA, 20 bp, Artificial Sequence
  Description of Artificial Sequence: Synthetic oligonucleotide
  Target: ATXN2; (-) strand; PAM type: YTN; PAM sequence: TTC
ttttaatcaaccaggaactt

SEQ ID NO: 79786 - DNA, 20 bp, Artificial Sequence
  Description of Artificial Sequence: Synthetic oligonucleotide
  Target: ATXN2; (-) strand; PAM type: YTN; PAM sequence: TTT
cttttaatcaaccaggaact

SEQ ID NO: 79787 - DNA, 20 bp, Artificial Sequence
  Description of Artificial Sequence: Synthetic oligonucleotide
  Target: ATXN2; (-) strand; PAM type: YTN; PAM sequence: TTA
atagtttcttttaatcaacc

SEQ ID NO: 79788 - DNA, 20 bp, Artificial Sequence
  Description of Artificial Sequence: Synthetic oligonucleotide
  Target: ATXN2; (-) strand; PAM type: YTN; PAM sequence: TTA
ttaatagtttcttttaatca

SEQ ID NO: 79789 - DNA, 20 bp, Artificial Sequence
  Description of Artificial Sequence: Synthetic oligonucleotide
  Target: ATXN2; (-) strand; PAM type: YTN; PAM sequence: TTA
aaaaatgttattaatagttt

SEQ ID NO: 79790 - DNA, 20 bp, Artificial Sequence
  Description of Artificial Sequence: Synthetic oligonucleotide
  Target: ATXN2; (-) strand; PAM type: YTN; PAM sequence: CTA
gtgatggtattaaaaaatgt

SEQ ID NO: 79791 - DNA, 20 bp, Artificial Sequence
  Description of Artificial Sequence: Synthetic oligonucleotide
  Target: ATXN2; (-) strand; PAM type: YTN; PAM sequence: CTG
gaaagaaagaaaactagtga

SEQ ID NO: 79792 - DNA, 20 bp, Artificial Sequence
  Description of Artificial Sequence: Synthetic oligonucleotide
  Target: ATXN2; (-) strand; PAM type: YTN; PAM sequence: CTC
tggaaagaaagaaaactagt

SEQ ID NO: 79793 - DNA, 20 bp, Artificial Sequence
  Description of Artificial Sequence: Synthetic oligonucleotide
  Target: ATXN2; (-) strand; PAM type: YTN; PAM sequence: TTG
gatctctggaaagaaagaaa

SEQ ID NO: 79794 - DNA, 20 bp, Artificial Sequence
  Description of Artificial Sequence: Synthetic oligonucleotide
  Target: ATXN2; (-) strand; PAM type: YTN; PAM sequence: TTT
ggatctctggaaagaaagaa

SEQ ID NO: 79795 - DNA, 20 bp, Artificial Sequence
  Description of Artificial Sequence: Synthetic oligonucleotide
  Target: ATXN2; (-) strand; PAM type: YTN; PAM sequence: TTT
tggatctctggaaagaaaga

SEQ ID NO: 79796 - DNA, 20 bp, Artificial Sequence
  Description of Artificial Sequence: Synthetic oligonucleotide
  Target: ATXN2; (-) strand; PAM type: YTN; PAM sequence: TTG
tattttggatctctggaaag

SEQ ID NO: 79797 - DNA, 20 bp, Artificial Sequence
  Description of Artificial Sequence: Synthetic oligonucleotide
  Target: ATXN2; (-) strand; PAM type: YTN; PAM sequence: CTA
tcattgtattttggatctct

SEQ ID NO: 79798 - DNA, 20 bp, Artificial Sequence
  Description of Artificial Sequence: Synthetic oligonucleotide
  Target: ATXN2; (-) strand; PAM type: YTN; PAM sequence: TTA
ctatcattgtattttggatc

SEQ ID NO: 79799 - DNA, 20 bp, Artificial Sequence
  Description of Artificial Sequence: Synthetic oligonucleotide
  Target: ATXN2; (-) strand; PAM type: YTN; PAM sequence: CTC
agaaggtggcagagatgagt

SEQ ID NO: 79800 - DNA, 20 bp, Artificial Sequence
  Description of Artificial Sequence: Synthetic oligonucleotide
  Target: ATXN2; (-) strand; PAM type: YTN; PAM sequence: TTC
actcagaaggtggcagagat

SEQ ID NO: 79801 - DNA, 20 bp, Artificial Sequence
  Description of Artificial Sequence: Synthetic oligonucleotide
  Target: ATXN2; (-) strand; PAM type: YTN; PAM sequence: TTC
aaattcactcagaaggtggc

SEQ ID NO: 79802 - DNA, 20 bp, Artificial Sequence
  Description of Artificial Sequence: Synthetic oligonucleotide
  Target: ATXN2; (-) strand; PAM type: YTN; PAM sequence: CTA
ttcaaattcactcagaaggt

SEQ ID NO: 79803 - DNA, 20 bp, Artificial Sequence
  Description of Artificial Sequence: Synthetic oligonucleotide
  Target: ATXN2; (-) strand; PAM type: YTN; PAM sequence: TTA
aatgacctattcaaattcac

SEQ ID NO: 79804 - DNA, 20 bp, Artificial Sequence
  Description of Artificial Sequence: Synthetic oligonucleotide
  Target: ATXN2; (-) strand; PAM type: YTN; PAM sequence: TTA
cccatgaggaaatgaaggcc

SEQ ID NO: 79805 - DNA, 20 bp, Artificial Sequence
  Description of Artificial Sequence: Synthetic oligonucleotide
  Target: ATXN2; (-) strand; PAM type: YTN; PAM sequence: TTT
acccatgaggaaatgaaggc

SEQ ID NO: 79806 - DNA, 20 bp, Artificial Sequence
  Description of Artificial Sequence: Synthetic oligonucleotide
  Target: ATXN2; (-) strand; PAM type: YTN; PAM sequence: TTT
tacccatgaggaaatgaagg

SEQ ID NO: 79807 - DNA, 20 bp, Artificial Sequence
  Description of Artificial Sequence: Synthetic oligonucleotide
  Target: ATXN2; (-) strand; PAM type: YTN; PAM sequence: CTC
attttacccatgaggaaatg

SEQ ID NO: 79808 - DNA, 20 bp, Artificial Sequence
  Description of Artificial Sequence: Synthetic oligonucleotide
  Target: ATXN2; (-) strand; PAM type: YTN; PAM sequence: CTG
tcctcattttacccatgagg

SEQ ID NO: 79809 - DNA, 20 bp, Artificial Sequence
  Description of Artificial Sequence: Synthetic oligonucleotide
  Target: ATXN2; (-) strand; PAM type: YTN; PAM sequence: TTA
tcctgtcctcattttaccca

SEQ ID NO: 79810 - DNA, 20 bp, Artificial Sequence
  Description of Artificial Sequence: Synthetic oligonucleotide
  Target: ATXN2; (-) strand; PAM type: YTN; PAM sequence: CTG
ttatcctgtcctcattttac

SEQ ID NO: 79811 - DNA, 20 bp, Artificial Sequence
  Description of Artificial Sequence: Synthetic oligonucleotide
  Target: ATXN2; (-) strand; PAM type: YTN; PAM sequence: TTA
gataatctgttatcctgtcc

SEQ ID NO: 79812 - DNA, 20 bp, Artificial Sequence
  Description of Artificial Sequence: Synthetic oligonucleotide
  Target: ATXN2; (-) strand; PAM type: YTN; PAM sequence: CTG
ttagataatctgttatcctg

SEQ ID NO: 79813 - DNA, 20 bp, Artificial Sequence
  Description of Artificial Sequence: Synthetic oligonucleotide
  Target: ATXN2; (-) strand; PAM type: YTN; PAM sequence: TTA
ccacatagccctgttagata

SEQ ID NO: 79814 - DNA, 20 bp, Artificial Sequence
  Description of Artificial Sequence: Synthetic oligonucleotide
  Target: ATXN2; (-) strand; PAM type: YTN; PAM sequence: CTC
atgtgattaccacatagccc

SEQ ID NO: 79815 - DNA, 20 bp, Artificial Sequence
  Description of Artificial Sequence: Synthetic oligonucleotide
  Target: ATXN2; (-) strand; PAM type: YTN; PAM sequence: CTC
ccagggcatacataatctca

SEQ ID NO: 79816 - DNA, 20 bp, Artificial Sequence
  Description of Artificial Sequence: Synthetic oligonucleotide
  Target: ATXN2; (-) strand; PAM type: YTN; PAM sequence: TTC
tcccagggcatacataatct

SEQ ID NO: 79817 - DNA, 20 bp, Artificial Sequence
  Description of Artificial Sequence: Synthetic oligonucleotide
  Target: ATXN2; (-) strand; PAM type: YTN; PAM sequence: TTA
ttctcccagggcatacataa

SEQ ID NO: 79818 - DNA, 20 bp, Artificial Sequence
  Description of Artificial Sequence: Synthetic oligonucleotide
  Target: ATXN2; (-) strand; PAM type: YTN; PAM sequence: TTT
attctcccagggcatacata

SEQ ID NO: 79819 - DNA, 20 bp, Artificial Sequence
  Description of Artificial Sequence: Synthetic oligonucleotide
  Target: ATXN2; (-) strand; PAM type: YTN; PAM sequence: CTA
ccgtgagtttattctcccag

SEQ ID NO: 79820 - DNA, 20 bp, Artificial Sequence
  Description of Artificial Sequence: Synthetic oligonucleotide
  Target: ATXN2; (-) strand; PAM type: YTN; PAM sequence: TTG
agtgaaccggacgctaccgt

SEQ ID NO: 79821 - DNA, 20 bp, Artificial Sequence
  Description of Artificial Sequence: Synthetic oligonucleotide
  Target: ATXN2; (-) strand; PAM type: YTN; PAM sequence: TTA
aaaagggagggaaacaggat

SEQ ID NO: 79822 - DNA, 20 bp, Artificial Sequence
  Description of Artificial Sequence: Synthetic oligonucleotide
  Target: ATXN2; (-) strand; PAM type: YTN; PAM sequence: TTA
gggtcataattaaaaaggga

SEQ ID NO: 79823 - DNA, 20 bp, Artificial Sequence
  Description of Artificial Sequence: Synthetic oligonucleotide
  Target: ATXN2; (-) strand; PAM type: YTN; PAM sequence: TTG
attagggtcataattaaaaa

SEQ ID NO: 79824 - DNA, 20 bp, Artificial Sequence
  Description of Artificial Sequence: Synthetic oligonucleotide
  Target: ATXN2; (-) strand; PAM type: YTN; PAM sequence: TTG
aaaaattgattagggtcata

SEQ ID NO: 79825 - DNA, 20 bp, Artificial Sequence
  Description of Artificial Sequence: Synthetic oligonucleotide
  Target: ATXN2; (-) strand; PAM type: YTN; PAM sequence: CTT
gaaaaattgattagggtcat

SEQ ID NO: 79826 - DNA, 20 bp, Artificial Sequence
  Description of Artificial Sequence: Synthetic oligonucleotide
  Target: ATXN2; (-) strand; PAM type: YTN; PAM sequence: CTC
agcttgaaaaattgattagg

SEQ ID NO: 79827 - DNA, 20 bp, Artificial Sequence
  Description of Artificial Sequence: Synthetic oligonucleotide
  Target: ATXN2; (-) strand; PAM type: YTN; PAM sequence: CTG
acctcagcttgaaaaattga

SEQ ID NO: 79828 - DNA, 20 bp, Artificial Sequence
  Description of Artificial Sequence: Synthetic oligonucleotide
  Target: ATXN2; (-) strand; PAM type: YTN; PAM sequence: TTC
tgacctcagcttgaaaaatt

SEQ ID NO: 79829 - DNA, 20 bp, Artificial Sequence
  Description of Artificial Sequence: Synthetic oligonucleotide
  Target: ATXN2; (-) strand; PAM type: YTN; PAM sequence: TTT
ctgacctcagcttgaaaaat

SEQ ID NO: 79830 - DNA, 20 bp, Artificial Sequence
  Description of Artificial Sequence: Synthetic oligonucleotide
  Target: ATXN2; (-) strand; PAM type: YTN; PAM sequence: CTT
tctgacctcagcttgaaaaa

SEQ ID NO: 79831 - DNA, 20 bp, Artificial Sequence
  Description of Artificial Sequence: Synthetic oligonucleotide
  Target: ATXN2; (-) strand; PAM type: YTN; PAM sequence: TTG
agaagctttctgacctcagc

SEQ ID NO: 79832 - DNA, 20 bp, Artificial Sequence
  Description of Artificial Sequence: Synthetic oligonucleotide
  Target: ATXN2; (-) strand; PAM type: YTN; PAM sequence: TTT
gagaagctttctgacctcag

SEQ ID NO: 79833 - DNA, 20 bp, Artificial Sequence
  Description of Artificial Sequence: Synthetic oligonucleotide
  Target: ATXN2; (-) strand; PAM type: YTN; PAM sequence: CTA
tgcccagaaataagtatgtt

SEQ ID NO: 79834 - DNA, 20 bp, Artificial Sequence
  Description of Artificial Sequence: Synthetic oligonucleotide
  Target: ATXN2; (-) strand; PAM type: YTN; PAM sequence: CTG
gctatgcccagaaataagta

SEQ ID NO: 79835 - DNA, 20 bp, Artificial Sequence
  Description of Artificial Sequence: Synthetic oligonucleotide
  Target: ATXN2; (-) strand; PAM type: YTN; PAM sequence: TTC
agggacagccactggctatg

SEQ ID NO: 79836 - DNA, 20 bp, Artificial Sequence
  Description of Artificial Sequence: Synthetic oligonucleotide
  Target: ATXN2; (-) strand; PAM type: YTN; PAM sequence: CTT
cagggacagccactggctat

SEQ ID NO: 79837 - DNA, 20 bp, Artificial Sequence
  Description of Artificial Sequence: Synthetic oligonucleotide
  Target: ATXN2; (-) strand; PAM type: YTN; PAM sequence: TTA
gtgcttcagggacagccact

SEQ ID NO: 79838 - DNA, 20 bp, Artificial Sequence
  Description of Artificial Sequence: Synthetic oligonucleotide
  Target: ATXN2; (-) strand; PAM type: YTN; PAM sequence: TTT
agtgcttcagggacagccac

SEQ ID NO: 79839 - DNA, 20 bp, Artificial Sequence
  Description of Artificial Sequence: Synthetic oligonucleotide
  Target: ATXN2; (-) strand; PAM type: YTN; PAM sequence: TTT
tagtgcttcagggacagcca

SEQ ID NO: 79840 - DNA, 20 bp, Artificial Sequence
  Description of Artificial Sequence: Synthetic oligonucleotide
  Target: ATXN2; (-) strand; PAM type: YTN; PAM sequence: TTT
ttagtgcttcagggacagcc

SEQ ID NO: 79841 - DNA, 20 bp, Artificial Sequence
  Description of Artificial Sequence: Synthetic oligonucleotide
  Target: ATXN2; (-) strand; PAM type: YTN; PAM sequence: CTT
tttagtgcttcagggacagc

SEQ ID NO: 79842 - DNA, 20 bp, Artificial Sequence
  Description of Artificial Sequence: Synthetic oligonucleotide
  Target: ATXN2; (-) strand; PAM type: YTN; PAM sequence: TTC
tttttagtgcttcagggaca

SEQ ID NO: 79843 - DNA, 20 bp, Artificial Sequence
  Description of Artificial Sequence: Synthetic oligonucleotide
  Target: ATXN2; (-) strand; PAM type: YTN; PAM sequence: TTG
ttctttttagtgcttcaggg

SEQ ID NO: 79844 - DNA, 20 bp, Artificial Sequence
  Description of Artificial Sequence: Synthetic oligonucleotide
  Target: ATXN2; (-) strand; PAM type: YTN; PAM sequence: CTT
gttctttttagtgcttcagg

SEQ ID NO: 79845 - DNA, 20 bp, Artificial Sequence
  Description of Artificial Sequence: Synthetic oligonucleotide
  Target: ATXN2; (-) strand; PAM type: YTN; PAM sequence: CTA
agggtcttgttctttttagt

SEQ ID NO: 79846 - DNA, 20 bp, Artificial Sequence
  Description of Artificial Sequence: Synthetic oligonucleotide
  Target: ATXN2; (-) strand; PAM type: YTN; PAM sequence: TTG
ctaagggtcttgttcttttt

SEQ ID NO: 79847 - DNA, 20 bp, Artificial Sequence
  Description of Artificial Sequence: Synthetic oligonucleotide
  Target: ATXN2; (-) strand; PAM type: YTN; PAM sequence: CTG
gtatgttgctaagggtcttg

SEQ ID NO: 79848 - DNA, 20 bp, Artificial Sequence
  Description of Artificial Sequence: Synthetic oligonucleotide
  Target: ATXN2; (-) strand; PAM type: YTN; PAM sequence: TTA
tcagcagtctggtatgttgc

SEQ ID NO: 79849 - DNA, 20 bp, Artificial Sequence
  Description of Artificial Sequence: Synthetic oligonucleotide
  Target: ATXN2; (-) strand; PAM type: YTN; PAM sequence: CTT
atcagcagtctggtatgttg

SEQ ID NO: 79850 - DNA, 20 bp, Artificial Sequence
  Description of Artificial Sequence: Synthetic oligonucleotide
  Target: ATXN2; (-) strand; PAM type: YTN; PAM sequence: CTC
ttatcagcagtctggtatgt

SEQ ID NO: 79851 - DNA, 20 bp, Artificial Sequence
  Description of Artificial Sequence: Synthetic oligonucleotide
  Target: ATXN2; (-) strand; PAM type: YTN; PAM sequence: CTC
cagcccctcttatcagcagt

SEQ ID NO: 79852 - DNA, 20 bp, Artificial Sequence
  Description of Artificial Sequence: Synthetic oligonucleotide
  Target: ATXN2; (-) strand; PAM type: YTN; PAM sequence: CTG
cgctccagcccctcttatca

SEQ ID NO: 79853 - DNA, 20 bp, Artificial Sequence
  Description of Artificial Sequence: Synthetic oligonucleotide
  Target: ATXN2; (-) strand; PAM type: YTN; PAM sequence: CTA
tgatcacagcactgcgctcc

SEQ ID NO: 79854 - DNA, 20 bp, Artificial Sequence
  Description of Artificial Sequence: Synthetic oligonucleotide
  Target: ATXN2; (-) strand; PAM type: YTN; PAM sequence: TTG
caggagctatgatcacagca

SEQ ID NO: 79855 - DNA, 20 bp, Artificial Sequence
  Description of Artificial Sequence: Synthetic oligonucleotide
  Target: ATXN2; (-) strand; PAM type: YTN; PAM sequence: TTA
aagattgcaggagctatgat

SEQ ID NO: 79856 - DNA, 20 bp, Artificial Sequence
  Description of Artificial Sequence: Synthetic oligonucleotide
  Target: ATXN2; (-) strand; PAM type: YTN; PAM sequence: CTC
aggagttaaagattgcagga

SEQ ID NO: 79857 - DNA, 20 bp, Artificial Sequence
  Description of Artificial Sequence: Synthetic oligonucleotide
  Target: ATXN2; (-) strand; PAM type: YTN; PAM sequence: TTG
agctcaggagttaaagattg

SEQ ID NO: 79858 - DNA, 20 bp, Artificial Sequence
  Description of Artificial Sequence: Synthetic oligonucleotide
  Target: ATXN2; (-) strand; PAM type: YTN; PAM sequence: CTT
gagctcaggagttaaagatt

SEQ ID NO: 79859 - DNA, 20 bp, Artificial Sequence
  Description of Artificial Sequence: Synthetic oligonucleotide
  Target: ATXN2; (-) strand; PAM type: YTN; PAM sequence: TTG
cttgagctcaggagttaaag

SEQ ID NO: 79860 - DNA, 20 bp, Artificial Sequence
  Description of Artificial Sequence: Synthetic oligonucleotide
  Target: ATXN2; (-) strand; PAM type: YTN; PAM sequence: CTG
aagcgagaggattgcttgag

SEQ ID NO: 79861 - DNA, 20 bp, Artificial Sequence
  Description of Artificial Sequence: Synthetic oligonucleotide
  Target: ATXN2; (-) strand; PAM type: YTN; PAM sequence: CTA
cgaggctgaagcgagaggat

SEQ ID NO: 79862 - DNA, 20 bp, Artificial Sequence
  Description of Artificial Sequence: Synthetic oligonucleotide
  Target: ATXN2; (-) strand; PAM type: YTN; PAM sequence: CTA
ctacgaggctgaagcgagag

SEQ ID NO: 79863 - DNA, 20 bp, Artificial Sequence
  Description of Artificial Sequence: Synthetic oligonucleotide
  Target: ATXN2; (-) strand; PAM type: YTN; PAM sequence: CTG
tagtcgcagctactacgagg

SEQ ID NO: 79864 - DNA, 20 bp, Artificial Sequence
  Description of Artificial Sequence: Synthetic oligonucleotide
  Target: ATXN2; (-) strand; PAM type: YTN; PAM sequence: TTA
atgggggatggcagcacaca

SEQ ID NO: 79865 - DNA, 20 bp, Artificial Sequence
  Description of Artificial Sequence: Synthetic oligonucleotide
  Target: ATXN2; (-) strand; PAM type: YTN; PAM sequence: TTA
attaatgggggatggcagca

SEQ ID NO: 79866 - DNA, 20 bp, Artificial Sequence
  Description of Artificial Sequence: Synthetic oligonucleotide
  Target: ATXN2; (-) strand; PAM type: YTN; PAM sequence: TTT
aattaatgggggatggcagc

SEQ ID NO: 79867 - DNA, 20 bp, Artificial Sequence
  Description of Artificial Sequence: Synthetic oligonucleotide
  Target: ATXN2; (-) strand; PAM type: YTN; PAM sequence: TTT
taattaatgggggatggcag

SEQ ID NO: 79868 - DNA, 20 bp, Artificial Sequence
  Description of Artificial Sequence: Synthetic oligonucleotide
  Target: ATXN2; (-) strand; PAM type: YTN; PAM sequence: TTT
ttaattaatgggggatggca

SEQ ID NO: 79869 - DNA, 20 bp, Artificial Sequence
  Description of Artificial Sequence: Synthetic oligonucleotide
  Target: ATXN2; (-) strand; PAM type: YTN; PAM sequence: TTT
tttaattaatgggggatggc

SEQ ID NO: 79870 - DNA, 20 bp, Artificial Sequence
  Description of Artificial Sequence: Synthetic oligonucleotide
  Target: ATXN2; (-) strand; PAM type: YTN; PAM sequence: CTA
caaaaaatattttttaatta

SEQ ID NO: 79871 - DNA, 20 bp, Artificial Sequence
  Description of Artificial Sequence: Synthetic oligonucleotide
  Target: ATXN2; (-) strand; PAM type: YTN; PAM sequence: CTC
tacaaaaaatattttttaat

SEQ ID NO: 79872 - DNA, 20 bp, Artificial Sequence
  Description of Artificial Sequence: Synthetic oligonucleotide
  Target: ATXN2; (-) strand; PAM type: YTN; PAM sequence: CTG
agaaacataacaagacccca

SEQ ID NO: 79873 - DNA, 20 bp, Artificial Sequence
  Description of Artificial Sequence: Synthetic oligonucleotide
  Target: ATXN2; (-) strand; PAM type: YTN; PAM sequence: TTC
aagaccaggctgagaaacat

SEQ ID NO: 79874 - DNA, 20 bp, Artificial Sequence
  Description of Artificial Sequence: Synthetic oligonucleotide
  Target: ATXN2; (-) strand; PAM type: YTN; PAM sequence: CTG
aaatgggaagggccaggagt

SEQ ID NO: 79875 - DNA, 20 bp, Artificial Sequence
  Description of Artificial Sequence: Synthetic oligonucleotide
  Target: ATXN2; (-) strand; PAM type: YTN; PAM sequence: CTC
cccacgtcatggggaggctg

SEQ ID NO: 79876 - DNA, 20 bp, Artificial Sequence
  Description of Artificial Sequence: Synthetic oligonucleotide
  Target: ATXN2; (-) strand; PAM type: YTN; PAM sequence: CTG
taaacctccccacgtcatgg

SEQ ID NO: 79877 - DNA, 20 bp, Artificial Sequence
  Description of Artificial Sequence: Synthetic oligonucleotide
  Target: ATXN2; (-) strand; PAM type: YTN; PAM sequence: CTG
ggtcatgtctgtaaacctcc

SEQ ID NO: 79878 - DNA, 20 bp, Artificial Sequence
  Description of Artificial Sequence: Synthetic oligonucleotide
  Target: ATXN2; (-) strand; PAM type: YTN; PAM sequence: TTA
gatgaagaggaaaacaaaat

SEQ ID NO: 79879 - DNA, 20 bp, Artificial Sequence
  Description of Artificial Sequence: Synthetic oligonucleotide
  Target: ATXN2; (-) strand; PAM type: YTN; PAM sequence: TTT
agatgaagaggaaaacaaaa

SEQ ID NO: 79880 - DNA, 20 bp, Artificial Sequence
  Description of Artificial Sequence: Synthetic oligonucleotide
  Target: ATXN2; (-) strand; PAM type: YTN; PAM sequence: TTT
tagatgaagaggaaaacaaa

SEQ ID NO: 79881 - DNA, 20 bp, Artificial Sequence
  Description of Artificial Sequence: Synthetic oligonucleotide
  Target: ATXN2; (-) strand; PAM type: YTN; PAM sequence: CTT
ttagatgaagaggaaaacaa

SEQ ID NO: 79882 - DNA, 20 bp, Artificial Sequence
  Description of Artificial Sequence: Synthetic oligonucleotide
  Target: ATXN2; (-) strand; PAM type: YTN; PAM sequence: TTC
ttttagatgaagaggaaaac

SEQ ID NO: 79883 - DNA, 20 bp, Artificial Sequence
  Description of Artificial Sequence: Synthetic oligonucleotide
  Target: ATXN2; (-) strand; PAM type: YTN; PAM sequence: TTG
aaaggagttcttttagatga

SEQ ID NO: 79884 - DNA, 20 bp, Artificial Sequence
  Description of Artificial Sequence: Synthetic oligonucleotide
  Target: ATXN2; (-) strand; PAM type: YTN; PAM sequence: CTT
gaaaggagttcttttagatg

SEQ ID NO: 79885 - DNA, 20 bp, Artificial Sequence
  Description of Artificial Sequence: Synthetic oligonucleotide
  Target: ATXN2; (-) strand; PAM type: YTN; PAM sequence: CTC
ataaaatcttgaaaggagtt

SEQ ID NO: 79886 - DNA, 20 bp, Artificial Sequence
  Description of Artificial Sequence: Synthetic oligonucleotide
  Target: ATXN2; (-) strand; PAM type: YTN; PAM sequence: CTG
tctcataaaatcttgaaagg

SEQ ID NO: 79887 - DNA, 20 bp, Artificial Sequence
  Description of Artificial Sequence: Synthetic oligonucleotide
  Target: ATXN2; (-) strand; PAM type: YTN; PAM sequence: TTC
tgtctcataaaatcttgaaa

SEQ ID NO: 79888 - DNA, 20 bp, Artificial Sequence
  Description of Artificial Sequence: Synthetic oligonucleotide
  Target: ATXN2; (-) strand; PAM type: YTN; PAM sequence: CTT
ctgtctcataaaatcttgaa

SEQ ID NO: 79889 - DNA, 20 bp, Artificial Sequence
  Description of Artificial Sequence: Synthetic oligonucleotide
  Target: ATXN2; (-) strand; PAM type: YTN; PAM sequence: TTA
cttctgtctcataaaatctt

SEQ ID NO: 79890 - DNA, 20 bp, Artificial Sequence
  Description of Artificial Sequence: Synthetic oligonucleotide
  Target: ATXN2; (-) strand; PAM type: YTN; PAM sequence: TTT
acttctgtctcataaaatct

SEQ ID NO: 79891 - DNA, 20 bp, Artificial Sequence
  Description of Artificial Sequence: Synthetic oligonucleotide
  Target: ATXN2; (-) strand; PAM type: YTN; PAM sequence: CTG
atgtttacttctgtctcata

SEQ ID NO: 79892 - DNA, 20 bp, Artificial Sequence
  Description of Artificial Sequence: Synthetic oligonucleotide
  Target: ATXN2; (-) strand; PAM type: YTN; PAM sequence: TTG
agatgctgatgtttacttct

SEQ ID NO: 79893 - DNA, 20 bp, Artificial Sequence
  Description of Artificial Sequence: Synthetic oligonucleotide
  Target: ATXN2; (-) strand; PAM type: YTN; PAM sequence: TTT
gagatgctgatgtttacttc

SEQ ID NO: 79894 - DNA, 20 bp, Artificial Sequence
  Description of Artificial Sequence: Synthetic oligonucleotide
  Target: ATXN2; (-) strand; PAM type: YTN; PAM sequence: TTG
aggtgtttgagatgctgatg

SEQ ID NO: 79895 - DNA, 20 bp, Artificial Sequence
  Description of Artificial Sequence: Synthetic oligonucleotide
  Target: ATXN2; (-) strand; PAM type: YTN; PAM sequence: TTA
tggcattgaggtgtttgaga

SEQ ID NO: 79896 - DNA, 20 bp, Artificial Sequence
  Description of Artificial Sequence: Synthetic oligonucleotide
  Target: ATXN2; (-) strand; PAM type: YTN; PAM sequence: CTT
atggcattgaggtgtttgag

SEQ ID NO: 79897 - DNA, 20 bp, Artificial Sequence
  Description of Artificial Sequence: Synthetic oligonucleotide
  Target: ATXN2; (-) strand; PAM type: YTN; PAM sequence: CTG
ccaccttatggcattgaggt

SEQ ID NO: 79898 - DNA, 20 bp, Artificial Sequence
  Description of Artificial Sequence: Synthetic oligonucleotide
  Target: ATXN2; (-) strand; PAM type: YTN; PAM sequence: TTG
cccctgccaccttatggcat

SEQ ID NO: 79899 - DNA, 20 bp, Artificial Sequence
  Description of Artificial Sequence: Synthetic oligonucleotide
  Target: ATXN2; (-) strand; PAM type: YTN; PAM sequence: CTC
attgcccctgccaccttatg

SEQ ID NO: 79900 - DNA, 20 bp, Artificial Sequence
  Description of Artificial Sequence: Synthetic oligonucleotide
  Target: ATXN2; (-) strand; PAM type: YTN; PAM sequence: TTC
tcattgcccctgccacctta

SEQ ID NO: 79901 - DNA, 20 bp, Artificial Sequence
  Description of Artificial Sequence: Synthetic oligonucleotide
  Target: ATXN2; (-) strand; PAM type: YTN; PAM sequence: CTA
ggcagaaagttctcattgcc

SEQ ID NO: 79902 - DNA, 20 bp, Artificial Sequence
  Description of Artificial Sequence: Synthetic oligonucleotide
  Target: ATXN2; (-) strand; PAM type: YTN; PAM sequence: TTA
tgtggtagtatagactaggc

SEQ ID NO: 79903 - DNA, 20 bp, Artificial Sequence
  Description of Artificial Sequence: Synthetic oligonucleotide
  Target: ATXN2; (-) strand; PAM type: YTN; PAM sequence: CTT
atgtggtagtatagactagg

SEQ ID NO: 79904 - DNA, 20 bp, Artificial Sequence
  Description of Artificial Sequence: Synthetic oligonucleotide
  Target: ATXN2; (-) strand; PAM type: YTN; PAM sequence: TTG
gagcttatgtggtagtatag

SEQ ID NO: 79905 - DNA, 20 bp, Artificial Sequence
  Description of Artificial Sequence: Synthetic oligonucleotide
  Target: ATXN2; (-) strand; PAM type: YTN; PAM sequence: TTT
ggagcttatgtggtagtata

SEQ ID NO: 79906 - DNA, 20 bp, Artificial Sequence
  Description of Artificial Sequence: Synthetic oligonucleotide
  Target: ATXN2; (-) strand; PAM type: YTN; PAM sequence: TTT
tggagcttatgtggtagtat

SEQ ID NO: 79907 - DNA, 20 bp, Artificial Sequence
  Description of Artificial Sequence: Synthetic oligonucleotide
  Target: ATXN2; (-) strand; PAM type: YTN; PAM sequence: TTT
ttggagcttatgtggtagta

SEQ ID NO: 79908 - DNA, 20 bp, Artificial Sequence
  Description of Artificial Sequence: Synthetic oligonucleotide
  Target: ATXN2; (-) strand; PAM type: YTN; PAM sequence: CTT
tttggagcttatgtggtagt

SEQ ID NO: 79909 - DNA, 20 bp, Artificial Sequence
  Description of Artificial Sequence: Synthetic oligonucleotide
  Target: ATXN2; (-) strand; PAM type: YTN; PAM sequence: CTC
tttttggagcttatgtggta

SEQ ID NO: 79910 - DNA, 20 bp, Artificial Sequence
  Description of Artificial Sequence: Synthetic oligonucleotide
  Target: ATXN2; (-) strand; PAM type: YTN; PAM sequence: CTC
tctttttggagcttatgtgg

SEQ ID NO: 79911 - DNA, 20 bp, Artificial Sequence
  Description of Artificial Sequence: Synthetic oligonucleotide
  Target: ATXN2; (-) strand; PAM type: YTN; PAM sequence: CTC
tctctttttggagcttatgt

SEQ ID NO: 79912 - DNA, 20 bp, Artificial Sequence
  Description of Artificial Sequence: Synthetic oligonucleotide
  Target: ATXN2; (-) strand; PAM type: YTN; PAM sequence: TTG
ggaatacagtagtgaataag

SEQ ID NO: 79913 - DNA, 20 bp, Artificial Sequence
  Description of Artificial Sequence: Synthetic oligonucleotide
  Target: ATXN2; (-) strand; PAM type: YTN; PAM sequence: CTT
gggaatacagtagtgaataa

SEQ ID NO: 79914 - DNA, 20 bp, Artificial Sequence
  Description of Artificial Sequence: Synthetic oligonucleotide
  Target: ATXN2; (-) strand; PAM type: YTN; PAM sequence: TTG
tgaggcttgggaatacagta

SEQ ID NO: 79915 - DNA, 20 bp, Artificial Sequence
  Description of Artificial Sequence: Synthetic oligonucleotide
  Target: ATXN2; (-) strand; PAM type: YTN; PAM sequence: CTT
gtgaggcttgggaatacagt

SEQ ID NO: 79916 - DNA, 20 bp, Artificial Sequence
  Description of Artificial Sequence: Synthetic oligonucleotide
  Target: ATXN2; (-) strand; PAM type: YTN; PAM sequence: CTG
cttgtgaggcttgggaatac

SEQ ID NO: 79917 - DNA, 20 bp, Artificial Sequence
  Description of Artificial Sequence: Synthetic oligonucleotide
  Target: ATXN2; (-) strand; PAM type: YTN; PAM sequence: CTC
ctgcttgtgaggcttgggaa

SEQ ID NO: 79918 - DNA, 20 bp, Artificial Sequence
  Description of Artificial Sequence: Synthetic oligonucleotide
  Target: ATXN2; (-) strand; PAM type: YTN; PAM sequence: TTG
gagtacctcctgcttgtgag

SEQ ID NO: 79919 - DNA, 20 bp, Artificial Sequence
  Description of Artificial Sequence: Synthetic oligonucleotide
  Target: ATXN2; (-) strand; PAM type: YTN; PAM sequence: TTT
ggagtacctcctgcttgtga

SEQ ID NO: 79920 - DNA, 20 bp, Artificial Sequence
  Description of Artificial Sequence: Synthetic oligonucleotide
  Target: ATXN2; (-) strand; PAM type: YTN; PAM sequence: TTT
tggagtacctcctgcttgtg

SEQ ID NO: 79921 - DNA, 20 bp, Artificial Sequence
  Description of Artificial Sequence: Synthetic oligonucleotide
  Target: ATXN2; (-) strand; PAM type: YTN; PAM sequence: TTT
ttggagtacctcctgcttgt

SEQ ID NO: 79922 - DNA, 20 bp, Artificial Sequence
  Description of Artificial Sequence: Synthetic oligonucleotide
  Target: ATXN2; (-) strand; PAM type: YTN; PAM sequence: TTA
tttttggagtacctcctgct

SEQ ID NO: 79923 - DNA, 20 bp, Artificial Sequence
  Description of Artificial Sequence: Synthetic oligonucleotide
  Target: ATXN2; (-) strand; PAM type: YTN; PAM sequence: TTT
atttttggagtacctcctgc

SEQ ID NO: 79924 - DNA, 20 bp, Artificial Sequence
  Description of Artificial Sequence: Synthetic oligonucleotide
  Target: ATXN2; (-) strand; PAM type: YTN; PAM sequence: TTT
tatttttggagtacctcctg

SEQ ID NO: 79925 - DNA, 20 bp, Artificial Sequence
  Description of Artificial Sequence: Synthetic oligonucleotide
  Target: ATXN2; (-) strand; PAM type: YTN; PAM sequence: TTT
ttatttttggagtacctcct

SEQ ID NO: 79926 - DNA, 20 bp, Artificial Sequence
  Description of Artificial Sequence: Synthetic oligonucleotide
  Target: ATXN2; (-) strand; PAM type: YTN; PAM sequence: TTT
tttatttttggagtacctcc

SEQ ID NO: 79927 - DNA, 20 bp, Artificial Sequence
  Description of Artificial Sequence: Synthetic oligonucleotide
  Target: ATXN2; (-) strand; PAM type: YTN; PAM sequence: TTT
ttttatttttggagtacctc

SEQ ID NO: 79928 - DNA, 20 bp, Artificial Sequence
  Description of Artificial Sequence: Synthetic oligonucleotide
  Target: ATXN2; (-) strand; PAM type: YTN; PAM sequence: CTT
tttttatttttggagtacct

SEQ ID NO: 79929 - DNA, 20 bp, Artificial Sequence
  Description of Artificial Sequence: Synthetic oligonucleotide
  Target: ATXN2; (-) strand; PAM type: YTN; PAM sequence: CTC
ccctttttttatttttggag

SEQ ID NO: 79930 - DNA, 20 bp, Artificial Sequence
  Description of Artificial Sequence: Synthetic oligonucleotide
  Target: ATXN2; (-) strand; PAM type: YTN; PAM sequence: TTC
ctcccctttttttatttttg

SEQ ID NO: 79931 - DNA, 20 bp, Artificial Sequence
  Description of Artificial Sequence: Synthetic oligonucleotide
  Target: ATXN2; (-) strand; PAM type: YTN; PAM sequence: TTT
cctcccctttttttattttt

SEQ ID NO: 79932 - DNA, 20 bp, Artificial Sequence
  Description of Artificial Sequence: Synthetic oligonucleotide
  Target: ATXN2; (-) strand; PAM type: YTN; PAM sequence: TTA
atttcctcccctttttttat

SEQ ID NO: 79933 - DNA, 20 bp, Artificial Sequence
  Description of Artificial Sequence: Synthetic oligonucleotide
  Target: ATXN2; (-) strand; PAM type: YTN; PAM sequence: TTT
aatttcctccccttttttta

SEQ ID NO: 79934 - DNA, 20 bp, Artificial Sequence
  Description of Artificial Sequence: Synthetic oligonucleotide
  Target: ATXN2; (-) strand; PAM type: YTN; PAM sequence: TTA
taggcataccacgtttaatt

SEQ ID NO: 79935 - DNA, 20 bp, Artificial Sequence
  Description of Artificial Sequence: Synthetic oligonucleotide
  Target: ATXN2; (-) strand; PAM type: YTN; PAM sequence: TTT
ataggcataccacgtttaat

SEQ ID NO: 79936 - DNA, 20 bp, Artificial Sequence
  Description of Artificial Sequence: Synthetic oligonucleotide
  Target: ATXN2; (-) strand; PAM type: YTN; PAM sequence: CTG
tcatgtagaaagcatggcat

SEQ ID NO: 79937 - DNA, 20 bp, Artificial Sequence
  Description of Artificial Sequence: Synthetic oligonucleotide
  Target: ATXN2; (-) strand; PAM type: YTN; PAM sequence: TTG
accctgtcatgtagaaagca

SEQ ID NO: 79938 - DNA, 20 bp, Artificial Sequence
  Description of Artificial Sequence: Synthetic oligonucleotide
  Target: ATXN2; (-) strand; PAM type: YTN; PAM sequence: TTA
agcagtagtagttgaccctg

SEQ ID NO: 79939 - DNA, 20 bp, Artificial Sequence
  Description of Artificial Sequence: Synthetic oligonucleotide
  Target: ATXN2; (-) strand; PAM type: YTN; PAM sequence: TTA
ttaagcagtagtagttgacc

SEQ ID NO: 79940 - DNA, 20 bp, Artificial Sequence
  Description of Artificial Sequence: Synthetic oligonucleotide
  Target: ATXN2; (-) strand; PAM type: YTN; PAM sequence: TTA
ttattaagcagtagtagttg

SEQ ID NO: 79941 - DNA, 20 bp, Artificial Sequence
  Description of Artificial Sequence: Synthetic oligonucleotide
  Target: ATXN2; (-) strand; PAM type: YTN; PAM sequence: TTT
attattaagcagtagtagtt

SEQ ID NO: 79942 - DNA, 20 bp, Artificial Sequence
  Description of Artificial Sequence: Synthetic oligonucleotide
  Target: ATXN2; (-) strand; PAM type: YTN; PAM sequence: TTT
tattattaagcagtagtagt

SEQ ID NO: 79943 - DNA, 20 bp, Artificial Sequence
  Description of Artificial Sequence: Synthetic oligonucleotide
  Target: ATXN2; (-) strand; PAM type: YTN; PAM sequence: TTG
gttttattattaagcagtag

SEQ ID NO: 79944 - DNA, 20 bp, Artificial Sequence
  Description of Artificial Sequence: Synthetic oligonucleotide
  Target: ATXN2; (-) strand; PAM type: YTN; PAM sequence: CTA
ttggttttattattaagcag

SEQ ID NO: 79945 - DNA, 20 bp, Artificial Sequence
  Description of Artificial Sequence: Synthetic oligonucleotide
  Target: ATXN2; (-) strand; PAM type: YTN; PAM sequence: CTG
actattggttttattattaa

SEQ ID NO: 79946 - DNA, 20 bp, Artificial Sequence
  Description of Artificial Sequence: Synthetic oligonucleotide
  Target: ATXN2; (-) strand; PAM type: YTN; PAM sequence: CTG
gctgactattggttttatta

SEQ ID NO: 79947 - DNA, 20 bp, Artificial Sequence
  Description of Artificial Sequence: Synthetic oligonucleotide
  Target: ATXN2; (-) strand; PAM type: YTN; PAM sequence: CTG
cgcctggctgactattggtt

SEQ ID NO: 79948 - DNA, 20 bp, Artificial Sequence
  Description of Artificial Sequence: Synthetic oligonucleotide
  Target: ATXN2; (-) strand; PAM type: YTN; PAM sequence: TTA
caggcgtgagccactgcgcc

SEQ ID NO: 79949 - DNA, 20 bp, Artificial Sequence
  Description of Artificial Sequence: Synthetic oligonucleotide
  Target: ATXN2; (-) strand; PAM type: YTN; PAM sequence: CTG
ggattacaggcgtgagccac

SEQ ID NO: 79950 - DNA, 20 bp, Artificial Sequence
  Description of Artificial Sequence: Synthetic oligonucleotide
  Target: ATXN2; (-) strand; PAM type: YTN; PAM sequence: CTC
ccaaagtgctgggattacag

SEQ ID NO: 79951 - DNA, 20 bp, Artificial Sequence
  Description of Artificial Sequence: Synthetic oligonucleotide
  Target: ATXN2; (-) strand; PAM type: YTN; PAM sequence: TTG
gcctcccaaagtgctgggat

SEQ ID NO: 79952 - DNA, 20 bp, Artificial Sequence
  Description of Artificial Sequence: Synthetic oligonucleotide
  Target: ATXN2; (-) strand; PAM type: YTN; PAM sequence: CTT
ggcctcccaaagtgctggga

SEQ ID NO: 79953 - DNA, 20 bp, Artificial Sequence
  Description of Artificial Sequence: Synthetic oligonucleotide
  Target: ATXN2; (-) strand; PAM type: YTN; PAM sequence: CTC
atgatccacccgccttggcc

SEQ ID NO: 79954 - DNA, 20 bp, Artificial Sequence
  Description of Artificial Sequence: Synthetic oligonucleotide
  Target: ATXN2; (-) strand; PAM type: YTN; PAM sequence: CTG
acctcatgatccacccgcct

SEQ ID NO: 79955 - DNA, 20 bp, Artificial Sequence
  Description of Artificial Sequence: Synthetic oligonucleotide
  Target: ATXN2; (-) strand; PAM type: YTN; PAM sequence: CTC
ctgacctcatgatccacccg

SEQ ID NO: 79956 - DNA, 20 bp, Artificial Sequence
  Description of Artificial Sequence: Synthetic oligonucleotide
  Target: ATXN2; (-) strand; PAM type: YTN; PAM sequence: CTG
gaactcctgacctcatgatc

SEQ ID NO: 79957 - DNA, 20 bp, Artificial Sequence
  Description of Artificial Sequence: Synthetic oligonucleotide
  Target: ATXN2; (-) strand; PAM type: YTN; PAM sequence: TTC
tggaactcctgacctcatga

SEQ ID NO: 79958 - DNA, 20 bp, Artificial Sequence
  Description of Artificial Sequence: Synthetic oligonucleotide
  Target: ATXN2; (-) strand; PAM type: YTN; PAM sequence: CTG
ttctggaactcctgacctca

SEQ ID NO: 79959 - DNA, 20 bp, Artificial Sequence
  Description of Artificial Sequence: Synthetic oligonucleotide
  Target: ATXN2; (-) strand; PAM type: YTN; PAM sequence: TTG
gccaggctgttctggaactc

SEQ ID NO: 79960 - DNA, 20 bp, Artificial Sequence
  Description of Artificial Sequence: Synthetic oligonucleotide
  Target: ATXN2; (-) strand; PAM type: YTN; PAM sequence: CTT
ggccaggctgttctggaact

SEQ ID NO: 79961 - DNA, 20 bp, Artificial Sequence
  Description of Artificial Sequence: Synthetic oligonucleotide
  Target: ATXN2; (-) strand; PAM type: YTN; PAM sequence: TTC
accatcttggccaggctgtt

SEQ ID NO: 79962 - DNA, 20 bp, Artificial Sequence
  Description of Artificial Sequence: Synthetic oligonucleotide
  Target: ATXN2; (-) strand; PAM type: YTN; PAM sequence: TTT
caccatcttggccaggctgt

SEQ ID NO: 79963 - DNA, 20 bp, Artificial Sequence
  Description of Artificial Sequence: Synthetic oligonucleotide
  Target: ATXN2; (-) strand; PAM type: YTN; PAM sequence: TTA
gtagagacagggtttcacca

SEQ ID NO: 79964 - DNA, 20 bp, Artificial Sequence
  Description of Artificial Sequence: Synthetic oligonucleotide
  Target: ATXN2; (-) strand; PAM type: YTN; PAM sequence: TTT
agtagagacagggtttcacc

SEQ ID NO: 79965 - DNA, 20 bp, Artificial Sequence
  Description of Artificial Sequence: Synthetic oligonucleotide
  Target: ATXN2; (-) strand; PAM type: YTN; PAM sequence: TTT
tagtagagacagggtttcac

SEQ ID NO: 79966 - DNA, 20 bp, Artificial Sequence
  Description of Artificial Sequence: Synthetic oligonucleotide
  Target: ATXN2; (-) strand; PAM type: YTN; PAM sequence: TTT
ttagtagagacagggtttca

SEQ ID NO: 79967 - DNA, 20 bp, Artificial Sequence
  Description of Artificial Sequence: Synthetic oligonucleotide
  Target: ATXN2; (-) strand; PAM type: YTN; PAM sequence: TTG
tatttttagtagagacaggg

SEQ ID NO: 79968 - DNA, 20 bp, Artificial Sequence
  Description of Artificial Sequence: Synthetic oligonucleotide
  Target: ATXN2; (-) strand; PAM type: YTN; PAM sequence: TTT
gtatttttagtagagacagg

SEQ ID NO: 79969 - DNA, 20 bp, Artificial Sequence
  Description of Artificial Sequence: Synthetic oligonucleotide
  Target: ATXN2; (-) strand; PAM type: YTN; PAM sequence: TTT
tgtatttttagtagagacag

SEQ ID NO: 79970 - DNA, 20 bp, Artificial Sequence
  Description of Artificial Sequence: Synthetic oligonucleotide
  Target: ATXN2; (-) strand; PAM type: YTN; PAM sequence: TTT
ttgtatttttagtagagaca

SEQ ID NO: 79971 - DNA, 20 bp, Artificial Sequence
  Description of Artificial Sequence: Synthetic oligonucleotide
  Target: ATXN2; (-) strand; PAM type: YTN; PAM sequence: CTA
atttttgtatttttagtaga

SEQ ID NO: 79972 - DNA, 20 bp, Artificial Sequence
  Description of Artificial Sequence: Synthetic oligonucleotide
  Target: ATXN2; (-) strand; PAM type: YTN; PAM sequence: CTG
gctaatttttgtatttttag

SEQ ID NO: 79973 - DNA, 20 bp, Artificial Sequence
  Description of Artificial Sequence: Synthetic oligonucleotide
  Target: ATXN2; (-) strand; PAM type: YTN; PAM sequence: TTA
caggcgcccaccaccgtgcc

SEQ ID NO: 79974 - DNA, 20 bp, Artificial Sequence
  Description of Artificial Sequence: Synthetic oligonucleotide
  Target: ATXN2; (-) strand; PAM type: YTN; PAM sequence: CTG
ggattacaggcgcccaccac

SEQ ID NO: 79975 - DNA, 20 bp, Artificial Sequence
  Description of Artificial Sequence: Synthetic oligonucleotide
  Target: ATXN2; (-) strand; PAM type: YTN; PAM sequence: CTC
ccaagtagctgggattacag

SEQ ID NO: 79976 - DNA, 20 bp, Artificial Sequence
  Description of Artificial Sequence: Synthetic oligonucleotide
  Target: ATXN2; (-) strand; PAM type: YTN; PAM sequence: TTA
gcctcccaagtagctgggat

SEQ ID NO: 79977 - DNA, 20 bp, Artificial Sequence
  Description of Artificial Sequence: Synthetic oligonucleotide
  Target: ATXN2; (-) strand; PAM type: YTN; PAM sequence: CTT
agcctcccaagtagctggga

SEQ ID NO: 79978 - DNA, 20 bp, Artificial Sequence
  Description of Artificial Sequence: Synthetic oligonucleotide
  Target: ATXN2; (-) strand; PAM type: YTN; PAM sequence: CTG
tcttagcctcccaagtagct

SEQ ID NO: 79979 - DNA, 20 bp, Artificial Sequence
  Description of Artificial Sequence: Synthetic oligonucleotide
  Target: ATXN2; (-) strand; PAM type: YTN; PAM sequence: CTC
ctgtcttagcctcccaagta

SEQ ID NO: 79980 - DNA, 20 bp, Artificial Sequence
  Description of Artificial Sequence: Synthetic oligonucleotide
  Target: ATXN2; (-) strand; PAM type: YTN; PAM sequence: TTC
tcctgtcttagcctcccaag

SEQ ID NO: 79981 - DNA, 20 bp, Artificial Sequence
  Description of Artificial Sequence: Synthetic oligonucleotide
  Target: ATXN2; (-) strand; PAM type: YTN; PAM sequence: TTC
aagtgattctcctgtcttag

SEQ ID NO: 79982 - DNA, 20 bp, Artificial Sequence
  Description of Artificial Sequence: Synthetic oligonucleotide
  Target: ATXN2; (-) strand; PAM type: YTN; PAM sequence: CTC
ccaggttcaagtgattctcc

SEQ ID NO: 79983 - DNA, 20 bp, Artificial Sequence
  Description of Artificial Sequence: Synthetic oligonucleotide
  Target: ATXN2; (-) strand; PAM type: YTN; PAM sequence: CTC
cgcctcccaggttcaagtga

SEQ ID NO: 79984 - DNA, 20 bp, Artificial Sequence
  Description of Artificial Sequence: Synthetic oligonucleotide
  Target: ATXN2; (-) strand; PAM type: YTN; PAM sequence: CTG
caacctccgcctcccaggtt

SEQ ID NO: 79985 - DNA, 20 bp, Artificial Sequence
  Description of Artificial Sequence: Synthetic oligonucleotide
  Target: ATXN2; (-) strand; PAM type: YTN; PAM sequence: TTA
ctgcaacctccgcctcccag

SEQ ID NO: 79986 - DNA, 20 bp, Artificial Sequence
  Description of Artificial Sequence: Synthetic oligonucleotide
  Target: ATXN2; (-) strand; PAM type: YTN; PAM sequence: CTT
actgcaacctccgcctccca

SEQ ID NO: 79987 - DNA, 20 bp, Artificial Sequence
  Description of Artificial Sequence: Synthetic oligonucleotide
  Target: ATXN2; (-) strand; PAM type: YTN; PAM sequence: CTC
ggcttactgcaacctccgcc

SEQ ID NO: 79988 - DNA, 20 bp, Artificial Sequence
  Description of Artificial Sequence: Synthetic oligonucleotide
  Target: ATXN2; (-) strand; PAM type: YTN; PAM sequence: CTG
gagtgcagcggcatgatctc

SEQ ID NO: 79989 - DNA, 20 bp, Artificial Sequence
  Description of Artificial Sequence: Synthetic oligonucleotide
  Target: ATXN2; (-) strand; PAM type: YTN; PAM sequence: TTG
tcgcccaggctggagtgcag

SEQ ID NO: 79990 - DNA, 20 bp, Artificial Sequence
  Description of Artificial Sequence: Synthetic oligonucleotide
  Target: ATXN2; (-) strand; PAM type: YTN; PAM sequence: CTT
gtcgcccaggctggagtgca

SEQ ID NO: 79991 - DNA, 20 bp, Artificial Sequence
  Description of Artificial Sequence: Synthetic oligonucleotide
  Target: ATXN2; (-) strand; PAM type: YTN; PAM sequence: CTC
ttgtcgcccaggctggagtg

SEQ ID NO: 79992 - DNA, 20 bp, Artificial Sequence
  Description of Artificial Sequence: Synthetic oligonucleotide
  Target: ATXN2; (-) strand; PAM type: YTN; PAM sequence: TTG
tctcttgtcgcccaggctgg

SEQ ID NO: 79993 - DNA, 20 bp, Artificial Sequence
  Description of Artificial Sequence: Synthetic oligonucleotide
  Target: ATXN2; (-) strand; PAM type: YTN; PAM sequence: TTT
gtctcttgtcgcccaggctg

SEQ ID NO: 79994 - DNA, 20 bp, Artificial Sequence
  Description of Artificial Sequence: Synthetic oligonucleotide
  Target: ATXN2; (-) strand; PAM type: YTN; PAM sequence: TTA
agacagagtttgtctcttgt

SEQ ID NO: 79995 - DNA, 20 bp, Artificial Sequence
  Description of Artificial Sequence: Synthetic oligonucleotide
  Target: ATXN2; (-) strand; PAM type: YTN; PAM sequence: TTT
aagacagagtttgtctcttg

SEQ ID NO: 79996 - DNA, 20 bp, Artificial Sequence
  Description of Artificial Sequence: Synthetic oligonucleotide
  Target: ATXN2; (-) strand; PAM type: YTN; PAM sequence: TTT
taagacagagtttgtctctt

SEQ ID NO: 79997 - DNA, 20 bp, Artificial Sequence
  Description of Artificial Sequence: Synthetic oligonucleotide
  Target: ATXN2; (-) strand; PAM type: YTN; PAM sequence: TTA
ttttaagacagagtttgtct

SEQ ID NO: 79998 - DNA, 20 bp, Artificial Sequence
  Description of Artificial Sequence: Synthetic oligonucleotide
  Target: ATXN2; (-) strand; PAM type: YTN; PAM sequence: TTA
tgttattttaagacagagtt

SEQ ID NO: 79999 - DNA, 20 bp, Artificial Sequence
  Description of Artificial Sequence: Synthetic oligonucleotide
  Target: ATXN2; (-) strand; PAM type: YTN; PAM sequence: TTA
tgttatgttattttaagaca

SEQ ID NO: 80000 - DNA, 20 bp, Artificial Sequence
  Description of Artificial Sequence: Synthetic oligonucleotide
  Target: ATXN2; (-) strand; PAM type: YTN; PAM sequence: TTA
tgttatgttatgttatttta

SEQ ID NO: 80001 - DNA, 20 bp, Artificial Sequence
  Description of Artificial Sequence: Synthetic oligonucleotide
  Target: ATXN2; (-) strand; PAM type: YTN; PAM sequence: TTA
tgttatgttatgttatgtta

SEQ ID NO: 80002 - DNA, 20 bp, Artificial Sequence
  Description of Artificial Sequence: Synthetic oligonucleotide
  Target: ATXN2; (-) strand; PAM type: YTN; PAM sequence: TTA
tgttatgttatgttatgtta

SEQ ID NO: 80003 - DNA, 20 bp, Artificial Sequence
  Description of Artificial Sequence: Synthetic oligonucleotide
  Target: ATXN2; (-) strand; PAM type: YTN; PAM sequence: TTA
tgttatgttatgttatgtta

SEQ ID NO: 80004 - DNA, 20 bp, Artificial Sequence
  Description of Artificial Sequence: Synthetic oligonucleotide
  Target: ATXN2; (-) strand; PAM type: YTN; PAM sequence: TTA
tgttatgttatgttatgtta

SEQ ID NO: 80005 - DNA, 20 bp, Artificial Sequence
  Description of Artificial Sequence: Synthetic oligonucleotide
  Target: ATXN2; (-) strand; PAM type: YTN; PAM sequence: TTA
tgttatgttatgttatgtta

SEQ ID NO: 80006 - DNA, 20 bp, Artificial Sequence
  Description of Artificial Sequence: Synthetic oligonucleotide
  Target: ATXN2; (-) strand; PAM type: YTN; PAM sequence: TTA
tgttatgttatgttatgtta

SEQ ID NO: 80007 - DNA, 20 bp, Artificial Sequence
  Description of Artificial Sequence: Synthetic oligonucleotide
  Target: ATXN2; (-) strand; PAM type: YTN; PAM sequence: TTG
gtgtgatgttatgttatgtt

SEQ ID NO: 80008 - DNA, 20 bp, Artificial Sequence
  Description of Artificial Sequence: Synthetic oligonucleotide
  Target: ATXN2; (-) strand; PAM type: YTN; PAM sequence: TTT
ggtgtgatgttatgttatgt

SEQ ID NO: 80009 - DNA, 20 bp, Artificial Sequence
  Description of Artificial Sequence: Synthetic oligonucleotide
  Target: ATXN2; (-) strand; PAM type: YTN; PAM sequence: TTG
gtttggtgtgatgttatgtt

SEQ ID NO: 80010 - DNA, 20 bp, Artificial Sequence
  Description of Artificial Sequence: Synthetic oligonucleotide
  Target: ATXN2; (-) strand; PAM type: YTN; PAM sequence: TTT
ggtttggtgtgatgttatgt

SEQ ID NO: 80011 - DNA, 20 bp, Artificial Sequence
  Description of Artificial Sequence: Synthetic oligonucleotide
  Target: ATXN2; (-) strand; PAM type: YTN; PAM sequence: TTG
gtttggtttggtgtgatgtt

SEQ ID NO: 80012 - DNA, 20 bp, Artificial Sequence
  Description of Artificial Sequence: Synthetic oligonucleotide
  Target: ATXN2; (-) strand; PAM type: YTN; PAM sequence: CTA
ttggtttggtttggtgtgat

SEQ ID NO: 80013 - DNA, 20 bp, Artificial Sequence
  Description of Artificial Sequence: Synthetic oligonucleotide
  Target: ATXN2; (-) strand; PAM type: YTN; PAM sequence: TTA
taggtgtgagccgtggtgcc

SEQ ID NO: 80014 - DNA, 20 bp, Artificial Sequence
  Description of Artificial Sequence: Synthetic oligonucleotide
  Target: ATXN2; (-) strand; PAM type: YTN; PAM sequence: TTC
caaagtggcggaattatagg

SEQ ID NO: 80015 - DNA, 20 bp, Artificial Sequence
  Description of Artificial Sequence: Synthetic oligonucleotide
  Target: ATXN2; (-) strand; PAM type: YTN; PAM sequence: CTT
ccaaagtggcggaattatag

SEQ ID NO: 80016 - DNA, 20 bp, Artificial Sequence
  Description of Artificial Sequence: Synthetic oligonucleotide
  Target: ATXN2; (-) strand; PAM type: YTN; PAM sequence: CTC
gaccttccaaagtggcggaa

SEQ ID NO: 80017 - DNA, 20 bp, Artificial Sequence
  Description of Artificial Sequence: Synthetic oligonucleotide
  Target: ATXN2; (-) strand; PAM type: YTN; PAM sequence: CTA
cctcgaccttccaaagtggc

SEQ ID NO: 80018 - DNA, 20 bp, Artificial Sequence
  Description of Artificial Sequence: Synthetic oligonucleotide
  Target: ATXN2; (-) strand; PAM type: YTN; PAM sequence: CTC
aagtgatccgcctacctcga

SEQ ID NO: 80019 - DNA, 20 bp, Artificial Sequence
  Description of Artificial Sequence: Synthetic oligonucleotide
  Target: ATXN2; (-) strand; PAM type: YTN; PAM sequence: TTC
tcaagtgatccgcctacctc

SEQ ID NO: 80020 - DNA, 20 bp, Artificial Sequence
  Description of Artificial Sequence: Synthetic oligonucleotide
  Target: ATXN2; (-) strand; PAM type: YTN; PAM sequence: CTA
ttctcaagtgatccgcctac

SEQ ID NO: 80021 - DNA, 20 bp, Artificial Sequence
  Description of Artificial Sequence: Synthetic oligonucleotide
  Target: ATXN2; (-) strand; PAM type: YTN; PAM sequence: CTC
ctattctcaagtgatccgcc

SEQ ID NO: 80022 - DNA, 20 bp, Artificial Sequence
  Description of Artificial Sequence: Synthetic oligonucleotide
  Target: ATXN2; (-) strand; PAM type: YTN; PAM sequence: CTC
aaactcctattctcaagtga

SEQ ID NO: 80023 - DNA, 20 bp, Artificial Sequence
  Description of Artificial Sequence: Synthetic oligonucleotide
  Target: ATXN2; (-) strand; PAM type: YTN; PAM sequence: CTG
gtctcaaactcctattctca

SEQ ID NO: 80024 - DNA, 20 bp, Artificial Sequence
  Description of Artificial Sequence: Synthetic oligonucleotide
  Target: ATXN2; (-) strand; PAM type: YTN; PAM sequence: TTG
gtcagcctggtctcaaactc

SEQ ID NO: 80025 - DNA, 20 bp, Artificial Sequence
  Description of Artificial Sequence: Synthetic oligonucleotide
  Target: ATXN2; (-) strand; PAM type: YTN; PAM sequence: TTC
accatgttggtcagcctggt

SEQ ID NO: 80026 - DNA, 20 bp, Artificial Sequence
  Description of Artificial Sequence: Synthetic oligonucleotide
  Target: ATXN2; (-) strand; PAM type: YTN; PAM sequence: TTT
caccatgttggtcagcctgg

SEQ ID NO: 80027 - DNA, 20 bp, Artificial Sequence
  Description of Artificial Sequence: Synthetic oligonucleotide
  Target: ATXN2; (-) strand; PAM type: YTN; PAM sequence: TTA
gtagaaatggggtttcacca

SEQ ID NO: 80028 - DNA, 20 bp, Artificial Sequence
  Description of Artificial Sequence: Synthetic oligonucleotide
  Target: ATXN2; (-) strand; PAM type: YTN; PAM sequence: TTT
agtagaaatggggtttcacc

SEQ ID NO: 80029 - DNA, 20 bp, Artificial Sequence
  Description of Artificial Sequence: Synthetic oligonucleotide
  Target: ATXN2; (-) strand; PAM type: YTN; PAM sequence: TTT
tagtagaaatggggtttcac

SEQ ID NO: 80030 - DNA, 20 bp, Artificial Sequence
  Description of Artificial Sequence: Synthetic oligonucleotide
  Target: ATXN2; (-) strand; PAM type: YTN; PAM sequence: TTT
ttagtagaaatggggtttca

SEQ ID NO: 80031 - DNA, 20 bp, Artificial Sequence
  Description of Artificial Sequence: Synthetic oligonucleotide
  Target: ATXN2; (-) strand; PAM type: YTN; PAM sequence: TTG
tatttttagtagaaatgggg

SEQ ID NO: 80032 - DNA, 20 bp, Artificial Sequence
  Description of Artificial Sequence: Synthetic oligonucleotide
  Target: ATXN2; (-) strand; PAM type: YTN; PAM sequence: TTT
gtatttttagtagaaatggg

SEQ ID NO: 80033 - DNA, 20 bp, Artificial Sequence
  Description of Artificial Sequence: Synthetic oligonucleotide
  Target: ATXN2; (-) strand; PAM type: YTN; PAM sequence: TTT
tgtatttttagtagaaatgg

SEQ ID NO: 80034 - DNA, 20 bp, Artificial Sequence
  Description of Artificial Sequence: Synthetic oligonucleotide
  Target: ATXN2; (-) strand; PAM type: YTN; PAM sequence: TTT
ttgtatttttagtagaaatg

SEQ ID NO: 80035 - DNA, 20 bp, Artificial Sequence
  Description of Artificial Sequence: Synthetic oligonucleotide
  Target: ATXN2; (-) strand; PAM type: YTN; PAM sequence: CTA
atttttgtatttttagtaga

SEQ ID NO: 80036 - DNA, 20 bp, Artificial Sequence
  Description of Artificial Sequence: Synthetic oligonucleotide
  Target: ATXN2; (-) strand; PAM type: YTN; PAM sequence: CTG
actaatttttgtatttttag

SEQ ID NO: 80037 - DNA, 20 bp, Artificial Sequence
  Description of Artificial Sequence: Synthetic oligonucleotide
  Target: ATXN2; (-) strand; PAM type: YTN; PAM sequence: CTA
ccgtgcctgactaatttttg

SEQ ID NO: 80038 - DNA, 20 bp, Artificial Sequence
  Description of Artificial Sequence: Synthetic oligonucleotide
  Target: ATXN2; (-) strand; PAM type: YTN; PAM sequence: CTA
cagacgtgcactaccgtgcc

SEQ ID NO: 80039 - DNA, 20 bp, Artificial Sequence
  Description of Artificial Sequence: Synthetic oligonucleotide
  Target: ATXN2; (-) strand; PAM type: YTN; PAM sequence: CTG
agactacagacgtgcactac

SEQ ID NO: 80040 - DNA, 20 bp, Artificial Sequence
  Description of Artificial Sequence: Synthetic oligonucleotide
  Target: ATXN2; (-) strand; PAM type: YTN; PAM sequence: CTC
ccaagtacctgagactacag

SEQ ID NO: 80041 - DNA, 20 bp, Artificial Sequence
  Description of Artificial Sequence: Synthetic oligonucleotide
  Target: ATXN2; (-) strand; PAM type: YTN; PAM sequence: TTC
agcctcccaagtacctgaga

SEQ ID NO: 80042 - DNA, 20 bp, Artificial Sequence
  Description of Artificial Sequence: Synthetic oligonucleotide
  Target: ATXN2; (-) strand; PAM type: YTN; PAM sequence: TTC
aggtgattcagcctcccaag

SEQ ID NO: 80043 - DNA, 20 bp, Artificial Sequence
  Description of Artificial Sequence: Synthetic oligonucleotide
  Target: ATXN2; (-) strand; PAM type: YTN; PAM sequence: CTG
tgttcaggtgattcagcctc

SEQ ID NO: 80044 - DNA, 20 bp, Artificial Sequence
  Description of Artificial Sequence: Synthetic oligonucleotide
  Target: ATXN2; (-) strand; PAM type: YTN; PAM sequence: CTC
ctgtgttcaggtgattcagc

SEQ ID NO: 80045 - DNA, 20 bp, Artificial Sequence
  Description of Artificial Sequence: Synthetic oligonucleotide
  Target: ATXN2; (-) strand; PAM type: YTN; PAM sequence: CTC
cgcctcctgtgttcaggtga

SEQ ID NO: 80046 - DNA, 20 bp, Artificial Sequence
  Description of Artificial Sequence: Synthetic oligonucleotide
  Target: ATXN2; (-) strand; PAM type: YTN; PAM sequence: CTG
caacctccgcctcctgtgtt

SEQ ID NO: 80047 - DNA, 20 bp, Artificial Sequence
  Description of Artificial Sequence: Synthetic oligonucleotide
  Target: ATXN2; (-) strand; PAM type: YTN; PAM sequence: CTC
actgcaacctccgcctcctg

SEQ ID NO: 80048 - DNA, 20 bp, Artificial Sequence
  Description of Artificial Sequence: Synthetic oligonucleotide
  Target: ATXN2; (-) strand; PAM type: YTN; PAM sequence: TTA
gctcactgcaacctccgcct

SEQ ID NO: 80049 - DNA, 20 bp, Artificial Sequence
  Description of Artificial Sequence: Synthetic oligonucleotide
  Target: ATXN2; (-) strand; PAM type: YTN; PAM sequence: CTT
agctcactgcaacctccgcc

SEQ ID NO: 80050 - DNA, 20 bp, Artificial Sequence
  Description of Artificial Sequence: Synthetic oligonucleotide
  Target: ATXN2; (-) strand; PAM type: YTN; PAM sequence: TTG
gagtacagtggcgtgcagtg

SEQ ID NO: 80051 - DNA, 20 bp, Artificial Sequence
  Description of Artificial Sequence: Synthetic oligonucleotide
  Target: ATXN2; (-) strand; PAM type: YTN; PAM sequence: TTG
cccaggttggagtacagtgg

SEQ ID NO: 80052 - DNA, 20 bp, Artificial Sequence
  Description of Artificial Sequence: Synthetic oligonucleotide
  Target: ATXN2; (-) strand; PAM type: YTN; PAM sequence: CTG
ttgcccaggttggagtacag

SEQ ID NO: 80053 - DNA, 20 bp, Artificial Sequence
  Description of Artificial Sequence: Synthetic oligonucleotide
  Target: ATXN2; (-) strand; PAM type: YTN; PAM sequence: CTC
tgttgcccaggttggagtac

SEQ ID NO: 80054 - DNA, 20 bp, Artificial Sequence
  Description of Artificial Sequence: Synthetic oligonucleotide
  Target: ATXN2; (-) strand; PAM type: YTN; PAM sequence: CTC
actctgttgcccaggttgga

SEQ ID NO: 80055 - DNA, 20 bp, Artificial Sequence
  Description of Artificial Sequence: Synthetic oligonucleotide
  Target: ATXN2; (-) strand; PAM type: YTN; PAM sequence: TTA
tgagatggagtctcactctg

SEQ ID NO: 80056 - DNA, 20 bp, Artificial Sequence
  Description of Artificial Sequence: Synthetic oligonucleotide
  Target: ATXN2; (-) strand; PAM type: YTN; PAM sequence: TTT
atgagatggagtctcactct

SEQ ID NO: 80057 - DNA, 20 bp, Artificial Sequence
  Description of Artificial Sequence: Synthetic oligonucleotide
  Target: ATXN2; (-) strand; PAM type: YTN; PAM sequence: TTT
tatgagatggagtctcactc

SEQ ID NO: 80058 - DNA, 20 bp, Artificial Sequence
  Description of Artificial Sequence: Synthetic oligonucleotide
  Target: ATXN2; (-) strand; PAM type: YTN; PAM sequence: TTT
ttatgagatggagtctcact

SEQ ID NO: 80059 - DNA, 20 bp, Artificial Sequence
  Description of Artificial Sequence: Synthetic oligonucleotide
  Target: ATXN2; (-) strand; PAM type: YTN; PAM sequence: TTA
tttttatgagatggagtctc

SEQ ID NO: 80060 - DNA, 20 bp, Artificial Sequence
  Description of Artificial Sequence: Synthetic oligonucleotide
  Target: ATXN2; (-) strand; PAM type: YTN; PAM sequence: TTT
atttttatgagatggagtct

SEQ ID NO: 80061 - DNA, 20 bp, Artificial Sequence
  Description of Artificial Sequence: Synthetic oligonucleotide
  Target: ATXN2; (-) strand; PAM type: YTN; PAM sequence: TTT
tatttttatgagatggagtc

SEQ ID NO: 80062 - DNA, 20 bp, Artificial Sequence
  Description of Artificial Sequence: Synthetic oligonucleotide
  Target: ATXN2; (-) strand; PAM type: YTN; PAM sequence: TTT
ttatttttatgagatggagt

SEQ ID NO: 80063 - DNA, 20 bp, Artificial Sequence
  Description of Artificial Sequence: Synthetic oligonucleotide
  Target: ATXN2; (-) strand; PAM type: YTN; PAM sequence: TTA
atttttatttttatgagatg

SEQ ID NO: 80064 - DNA, 20 bp, Artificial Sequence
  Description of Artificial Sequence: Synthetic oligonucleotide
  Target: ATXN2; (-) strand; PAM type: YTN; PAM sequence: TTT
aatttttatttttatgagat

SEQ ID NO: 80065 - DNA, 20 bp, Artificial Sequence
  Description of Artificial Sequence: Synthetic oligonucleotide
  Target: ATXN2; (-) strand; PAM type: YTN; PAM sequence: TTG
gtttaatttttatttttatg

SEQ ID NO: 80066 - DNA, 20 bp, Artificial Sequence
  Description of Artificial Sequence: Synthetic oligonucleotide
  Target: ATXN2; (-) strand; PAM type: YTN; PAM sequence: CTG
ttggtttaatttttattttt

SEQ ID NO: 80067 - DNA, 20 bp, Artificial Sequence
  Description of Artificial Sequence: Synthetic oligonucleotide
  Target: ATXN2; (-) strand; PAM type: YTN; PAM sequence: TTG
aatatgtgactgttggttta

SEQ ID NO: 80068 - DNA, 20 bp, Artificial Sequence
  Description of Artificial Sequence: Synthetic oligonucleotide
  Target: ATXN2; (-) strand; PAM type: YTN; PAM sequence: TTG
ttgaatatgtgactgttggt

SEQ ID NO: 80069 - DNA, 20 bp, Artificial Sequence
  Description of Artificial Sequence: Synthetic oligonucleotide
  Target: ATXN2; (-) strand; PAM type: YTN; PAM sequence: TTT
gttgaatatgtgactgttgg

SEQ ID NO: 80070 - DNA, 20 bp, Artificial Sequence
  Description of Artificial Sequence: Synthetic oligonucleotide
  Target: ATXN2; (-) strand; PAM type: YTN; PAM sequence: CTC
aaaataataataataatttg

SEQ ID NO: 80071 - DNA, 20 bp, Artificial Sequence
  Description of Artificial Sequence: Synthetic oligonucleotide
  Target: ATXN2; (-) strand; PAM type: YTN; PAM sequence: CTG
tgtctcaaaataataataat

SEQ ID NO: 80072 - DNA, 20 bp, Artificial Sequence
  Description of Artificial Sequence: Synthetic oligonucleotide
  Target: ATXN2; (-) strand; PAM type: YTN; PAM sequence: CTG
ggtgacagagtgagactgtg

SEQ ID NO: 80073 - DNA, 20 bp, Artificial Sequence
  Description of Artificial Sequence: Synthetic oligonucleotide
  Target: ATXN2; (-) strand; PAM type: YTN; PAM sequence: TTC
agcctgggtgacagagtgag

SEQ ID NO: 80074 - DNA, 20 bp, Artificial Sequence
  Description of Artificial Sequence: Synthetic oligonucleotide
  Target: ATXN2; (-) strand; PAM type: YTN; PAM sequence: CTT
cagcctgggtgacagagtga

SEQ ID NO: 80075 - DNA, 20 bp, Artificial Sequence
  Description of Artificial Sequence: Synthetic oligonucleotide
  Target: ATXN2; (-) strand; PAM type: YTN; PAM sequence: CTG
tacttcagcctgggtgacag

SEQ ID NO: 80076 - DNA, 20 bp, Artificial Sequence
  Description of Artificial Sequence: Synthetic oligonucleotide
  Target: ATXN2; (-) strand; PAM type: YTN; PAM sequence: TTG
cagtgagcagagatcgtgcc

SEQ ID NO: 80077 - DNA, 20 bp, Artificial Sequence
  Description of Artificial Sequence: Synthetic oligonucleotide
  Target: ATXN2; (-) strand; PAM type: YTN; PAM sequence: TTG
aacccgggaggcagaggttg

SEQ ID NO: 80078 - DNA, 20 bp, Artificial Sequence
  Description of Artificial Sequence: Synthetic oligonucleotide
  Target: ATXN2; (-) strand; PAM type: YTN; PAM sequence: CTT
gaacccgggaggcagaggtt

SEQ ID NO: 80079 - DNA, 20 bp, Artificial Sequence
  Description of Artificial Sequence: Synthetic oligonucleotide
  Target: ATXN2; (-) strand; PAM type: YTN; PAM sequence: CTC
ttgaacccgggaggcagagg

SEQ ID NO: 80080 - DNA, 20 bp, Artificial Sequence
  Description of Artificial Sequence: Synthetic oligonucleotide
  Target: ATXN2; (-) strand; PAM type: YTN; PAM sequence: CTG
aggcaggagaatctcttgaa

SEQ ID NO: 80081 - DNA, 20 bp, Artificial Sequence
  Description of Artificial Sequence: Synthetic oligonucleotide
  Target: ATXN2; (-) strand; PAM type: YTN; PAM sequence: CTC
agaaggctgaggcaggagaa

SEQ ID NO: 80082 - DNA, 20 bp, Artificial Sequence
  Description of Artificial Sequence: Synthetic oligonucleotide
  Target: ATXN2; (-) strand; PAM type: YTN; PAM sequence: CTC
agtgactcagaaggctgagg

SEQ ID NO: 80083 - DNA, 20 bp, Artificial Sequence
  Description of Artificial Sequence: Synthetic oligonucleotide
  Target: ATXN2; (-) strand; PAM type: YTN; PAM sequence: CTA
cagtctcagtgactcagaag

SEQ ID NO: 80084 - DNA, 20 bp, Artificial Sequence
  Description of Artificial Sequence: Synthetic oligonucleotide
  Target: ATXN2; (-) strand; PAM type: YTN; PAM sequence: CTC
atctacagtctcagtgactc

SEQ ID NO: 80085 - DNA, 20 bp, Artificial Sequence
  Description of Artificial Sequence: Synthetic oligonucleotide
  Target: ATXN2; (-) strand; PAM type: YTN; PAM sequence: TTG
tgcgtggctcatctacagtc

SEQ ID NO: 80086 - DNA, 20 bp, Artificial Sequence
  Description of Artificial Sequence: Synthetic oligonucleotide
  Target: ATXN2; (-) strand; PAM type: YTN; PAM sequence: TTT
gtgcgtggctcatctacagt

SEQ ID NO: 80087 - DNA, 20 bp, Artificial Sequence
  Description of Artificial Sequence: Synthetic oligonucleotide
  Target: ATXN2; (-) strand; PAM type: YTN; PAM sequence: TTG
gccatttgtgcgtggctcat

SEQ ID NO: 80088 - DNA, 20 bp, Artificial Sequence
  Description of Artificial Sequence: Synthetic oligonucleotide
  Target: ATXN2; (-) strand; PAM type: YTN; PAM sequence: TTA
caaatacacaaattggccat

SEQ ID NO: 80089 - DNA, 20 bp, Artificial Sequence
  Description of Artificial Sequence: Synthetic oligonucleotide
  Target: ATXN2; (-) strand; PAM type: YTN; PAM sequence: TTA
ttacaaatacacaaattggc

SEQ ID NO: 80090 - DNA, 20 bp, Artificial Sequence
  Description of Artificial Sequence: Synthetic oligonucleotide
  Target: ATXN2; (-) strand; PAM type: YTN; PAM sequence: TTT
attacaaatacacaaattgg

SEQ ID NO: 80091 - DNA, 20 bp, Artificial Sequence
  Description of Artificial Sequence: Synthetic oligonucleotide
  Target: ATXN2; (-) strand; PAM type: YTN; PAM sequence: CTG
tgtttattacaaatacacaa

SEQ ID NO: 80092 - DNA, 20 bp, Artificial Sequence
  Description of Artificial Sequence: Synthetic oligonucleotide
  Target: ATXN2; (-) strand; PAM type: YTN; PAM sequence: CTA
ccctgtgtttattacaaata

SEQ ID NO: 80093 - DNA, 20 bp, Artificial Sequence
  Description of Artificial Sequence: Synthetic oligonucleotide
  Target: ATXN2; (-) strand; PAM type: YTN; PAM sequence: CTG
gcctaccctgtgtttattac

SEQ ID NO: 80094 - DNA, 20 bp, Artificial Sequence
  Description of Artificial Sequence: Synthetic oligonucleotide
  Target: ATXN2; (-) strand; PAM type: YTN; PAM sequence: TTA
caggcgtgagccaccacacc

SEQ ID NO: 80095 - DNA, 20 bp, Artificial Sequence
  Description of Artificial Sequence: Synthetic oligonucleotide
  Target: ATXN2; (-) strand; PAM type: YTN; PAM sequence: CTG
ggattacaggcgtgagccac

SEQ ID NO: 80096 - DNA, 20 bp, Artificial Sequence
  Description of Artificial Sequence: Synthetic oligonucleotide
  Target: ATXN2; (-) strand; PAM type: YTN; PAM sequence: TTC
tgggattacaggcgtgagcc

SEQ ID NO: 80097 - DNA, 20 bp, Artificial Sequence
  Description of Artificial Sequence: Synthetic oligonucleotide
  Target: ATXN2; (-) strand; PAM type: YTN; PAM sequence: CTC
ccaaagttctgggattacag

SEQ ID NO: 80098 - DNA, 20 bp, Artificial Sequence
  Description of Artificial Sequence: Synthetic oligonucleotide
  Target: ATXN2; (-) strand; PAM type: YTN; PAM sequence: CTC
ggcctcccaaagttctggga

SEQ ID NO: 80099 - DNA, 20 bp, Artificial Sequence
  Description of Artificial Sequence: Synthetic oligonucleotide
  Target: ATXN2; (-) strand; PAM type: YTN; PAM sequence: TTG
tgatccgcccgcctcggcct

SEQ ID NO: 80100 - DNA, 20 bp, Artificial Sequence
  Description of Artificial Sequence: Synthetic oligonucleotide
  Target: ATXN2; (-) strand; PAM type: YTN; PAM sequence: TTT
gtgatccgcccgcctcggcc

SEQ ID NO: 80101 - DNA, 20 bp, Artificial Sequence
  Description of Artificial Sequence: Synthetic oligonucleotide
  Target: ATXN2; (-) strand; PAM type: YTN; PAM sequence: CTT
tgtgatccgcccgcctcggc

SEQ ID NO: 80102 - DNA, 20 bp, Artificial Sequence
  Description of Artificial Sequence: Synthetic oligonucleotide
  Target: ATXN2; (-) strand; PAM type: YTN; PAM sequence: CTG
actttgtgatccgcccgcct

SEQ ID NO: 80103 - DNA, 20 bp, Artificial Sequence
  Description of Artificial Sequence: Synthetic oligonucleotide
  Target: ATXN2; (-) strand; PAM type: YTN; PAM sequence: CTC
ctgactttgtgatccgcccg

SEQ ID NO: 80104 - DNA, 20 bp, Artificial Sequence
  Description of Artificial Sequence: Synthetic oligonucleotide
  Target: ATXN2; (-) strand; PAM type: YTN; PAM sequence: CTC
gaactcctgactttgtgatc

SEQ ID NO: 80105 - DNA, 20 bp, Artificial Sequence
  Description of Artificial Sequence: Synthetic oligonucleotide
  Target: ATXN2; (-) strand; PAM type: YTN; PAM sequence: CTG
ggatggtctcgaactcctga

SEQ ID NO: 80106 - DNA, 20 bp, Artificial Sequence
  Description of Artificial Sequence: Synthetic oligonucleotide
  Target: ATXN2; (-) strand; PAM type: YTN; PAM sequence: TTA
tctgggatggtctcgaactc

SEQ ID NO: 80107 - DNA, 20 bp, Artificial Sequence
  Description of Artificial Sequence: Synthetic oligonucleotide
  Target: ATXN2; (-) strand; PAM type: YTN; PAM sequence: TTC
gccgtgttatctgggatggt

SEQ ID NO: 80108 - DNA, 20 bp, Artificial Sequence
  Description of Artificial Sequence: Synthetic oligonucleotide
  Target: ATXN2; (-) strand; PAM type: YTN; PAM sequence: TTT
cgccgtgttatctgggatgg

SEQ ID NO: 80109 - DNA, 20 bp, Artificial Sequence
  Description of Artificial Sequence: Synthetic oligonucleotide
  Target: ATXN2; (-) strand; PAM type: YTN; PAM sequence: TTA
gtagagatggggtttcgccg

SEQ ID NO: 80110 - DNA, 20 bp, Artificial Sequence
  Description of Artificial Sequence: Synthetic oligonucleotide
  Target: ATXN2; (-) strand; PAM type: YTN; PAM sequence: TTT
agtagagatggggtttcgcc

SEQ ID NO: 80111 - DNA, 20 bp, Artificial Sequence
  Description of Artificial Sequence: Synthetic oligonucleotide
  Target: ATXN2; (-) strand; PAM type: YTN; PAM sequence: TTT
tagtagagatggggtttcgc

SEQ ID NO: 80112 - DNA, 20 bp, Artificial Sequence
  Description of Artificial Sequence: Synthetic oligonucleotide
  Target: ATXN2; (-) strand; PAM type: YTN; PAM sequence: TTT
ttagtagagatggggtttcg

SEQ ID NO: 80113 - DNA, 20 bp, Artificial Sequence
  Description of Artificial Sequence: Synthetic oligonucleotide
  Target: ATXN2; (-) strand; PAM type: YTN; PAM sequence: TTA
tttttagtagagatggggtt

SEQ ID NO: 80114 - DNA, 20 bp, Artificial Sequence
  Description of Artificial Sequence: Synthetic oligonucleotide
  Target: ATXN2; (-) strand; PAM type: YTN; PAM sequence: TTT
atttttagtagagatggggt

SEQ ID NO: 80115 - DNA, 20 bp, Artificial Sequence
  Description of Artificial Sequence: Synthetic oligonucleotide
  Target: ATXN2; (-) strand; PAM type: YTN; PAM sequence: TTT
tatttttagtagagatgggg

SEQ ID NO: 80116 - DNA, 20 bp, Artificial Sequence
  Description of Artificial Sequence: Synthetic oligonucleotide
  Target: ATXN2; (-) strand; PAM type: YTN; PAM sequence: TTT
ttatttttagtagagatggg

SEQ ID NO: 80117 - DNA, 20 bp, Artificial Sequence
  Description of Artificial Sequence: Synthetic oligonucleotide
  Target: ATXN2; (-) strand; PAM type: YTN; PAM sequence: TTT
tttatttttagtagagatgg

SEQ ID NO: 80118 - DNA, 20 bp, Artificial Sequence
  Description of Artificial Sequence: Synthetic oligonucleotide
  Target: ATXN2; (-) strand; PAM type: YTN; PAM sequence: TTT
ttttatttttagtagagatg

SEQ ID NO: 80119 - DNA, 20 bp, Artificial Sequence
  Description of Artificial Sequence: Synthetic oligonucleotide
  Target: ATXN2; (-) strand; PAM type: YTN; PAM sequence: CTA
atttttttatttttagtaga

SEQ ID NO: 80120 - DNA, 20 bp, Artificial Sequence
  Description of Artificial Sequence: Synthetic oligonucleotide
  Target: ATXN2; (-) strand; PAM type: YTN; PAM sequence: CTG
gctaatttttttatttttag

SEQ ID NO: 80121 - DNA, 20 bp, Artificial Sequence
  Description of Artificial Sequence: Synthetic oligonucleotide
  Target: ATXN2; (-) strand; PAM type: YTN; PAM sequence: CTA
caggagcccgccaccatgcc

SEQ ID NO: 80122 - DNA, 20 bp, Artificial Sequence
  Description of Artificial Sequence: Synthetic oligonucleotide
  Target: ATXN2; (-) strand; PAM type: YTN; PAM sequence: CTG
ggactacaggagcccgccac

SEQ ID NO: 80123 - DNA, 20 bp, Artificial Sequence
  Description of Artificial Sequence: Synthetic oligonucleotide
  Target: ATXN2; (-) strand; PAM type: YTN; PAM sequence: CTC
ccaagtagctgggactacag

SEQ ID NO: 80124 - DNA, 20 bp, Artificial Sequence
  Description of Artificial Sequence: Synthetic oligonucleotide
  Target: ATXN2; (-) strand; PAM type: YTN; PAM sequence: CTC
agcctcccaagtagctggga

SEQ ID NO: 80125 - DNA, 20 bp, Artificial Sequence
  Description of Artificial Sequence: Synthetic oligonucleotide
  Target: ATXN2; (-) strand; PAM type: YTN; PAM sequence: CTG
cctcagcctcccaagtagct

SEQ ID NO: 80126 - DNA, 20 bp, Artificial Sequence
  Description of Artificial Sequence: Synthetic oligonucleotide
  Target: ATXN2; (-) strand; PAM type: YTN; PAM sequence: CTC
ctgcctcagcctcccaagta

SEQ ID NO: 80127 - DNA, 20 bp, Artificial Sequence
  Description of Artificial Sequence: Synthetic oligonucleotide
  Target: ATXN2; (-) strand; PAM type: YTN; PAM sequence: TTC
tcctgcctcagcctcccaag

SEQ ID NO: 80128 - DNA, 20 bp, Artificial Sequence
  Description of Artificial Sequence: Synthetic oligonucleotide
  Target: ATXN2; (-) strand; PAM type: YTN; PAM sequence: TTC
atgccattctcctgcctcag

SEQ ID NO: 80129 - DNA, 20 bp, Artificial Sequence
  Description of Artificial Sequence: Synthetic oligonucleotide
  Target: ATXN2; (-) strand; PAM type: YTN; PAM sequence: CTC
ccaggttcatgccattctcc

SEQ ID NO: 80130 - DNA, 20 bp, Artificial Sequence
  Description of Artificial Sequence: Synthetic oligonucleotide
  Target: ATXN2; (-) strand; PAM type: YTN; PAM sequence: CTC
cgactcccaggttcatgcca

SEQ ID NO: 80131 - DNA, 20 bp, Artificial Sequence
  Description of Artificial Sequence: Synthetic oligonucleotide
  Target: ATXN2; (-) strand; PAM type: YTN; PAM sequence: CTG
caacctccgactcccaggtt

SEQ ID NO: 80132 - DNA, 20 bp, Artificial Sequence
  Description of Artificial Sequence: Synthetic oligonucleotide
  Target: ATXN2; (-) strand; PAM type: YTN; PAM sequence: CTC
actgcaacctccgactccca

SEQ ID NO: 80133 - DNA, 20 bp, Artificial Sequence
  Description of Artificial Sequence: Synthetic oligonucleotide
  Target: ATXN2; (-) strand; PAM type: YTN; PAM sequence: CTC
ggctcactgcaacctccgac

SEQ ID NO: 80134 - DNA, 20 bp, Artificial Sequence
  Description of Artificial Sequence: Synthetic oligonucleotide
  Target: ATXN2; (-) strand; PAM type: YTN; PAM sequence: CTG
gagtgcagtggcgtgatctc

SEQ ID NO: 80135 - DNA, 20 bp, Artificial Sequence
  Description of Artificial Sequence: Synthetic oligonucleotide
  Target: ATXN2; (-) strand; PAM type: YTN; PAM sequence: CTG
tcgcccaggctggagtgcag

SEQ ID NO: 80136 - DNA, 20 bp, Artificial Sequence
  Description of Artificial Sequence: Synthetic oligonucleotide
  Target: ATXN2; (-) strand; PAM type: YTN; PAM sequence: CTC
tgtcgcccaggctggagtgc

SEQ ID NO: 80137 - DNA, 20 bp, Artificial Sequence
  Description of Artificial Sequence: Synthetic oligonucleotide
  Target: ATXN2; (-) strand; PAM type: YTN; PAM sequence: CTC
gctctgtcgcccaggctgga

SEQ ID NO: 80138 - DNA, 20 bp, Artificial Sequence
  Description of Artificial Sequence: Synthetic oligonucleotide
  Target: ATXN2; (-) strand; PAM type: YTN; PAM sequence: TTG
gagacggagtctcgctctgt

SEQ ID NO: 80139 - DNA, 20 bp, Artificial Sequence
  Description of Artificial Sequence: Synthetic oligonucleotide
  Target: ATXN2; (-) strand; PAM type: YTN; PAM sequence: TTT
ggagacggagtctcgctctg

SEQ ID NO: 80140 - DNA, 20 bp, Artificial Sequence
  Description of Artificial Sequence: Synthetic oligonucleotide
  Target: ATXN2; (-) strand; PAM type: YTN; PAM sequence: TTT
tggagacggagtctcgctct

SEQ ID NO: 80141 - DNA, 20 bp, Artificial Sequence
  Description of Artificial Sequence: Synthetic oligonucleotide
  Target: ATXN2; (-) strand; PAM type: YTN; PAM sequence: TTT
ttggagacggagtctcgctc

SEQ ID NO: 80142 - DNA, 20 bp, Artificial Sequence
  Description of Artificial Sequence: Synthetic oligonucleotide
  Target: ATXN2; (-) strand; PAM type: YTN; PAM sequence: TTT
tttggagacggagtctcgct

SEQ ID NO: 80143 - DNA, 20 bp, Artificial Sequence
  Description of Artificial Sequence: Synthetic oligonucleotide
  Target: ATXN2; (-) strand; PAM type: YTN; PAM sequence: TTA
ttttttggagacggagtctc

SEQ ID NO: 80144 - DNA, 20 bp, Artificial Sequence
  Description of Artificial Sequence: Synthetic oligonucleotide
  Target: ATXN2; (-) strand; PAM type: YTN; PAM sequence: TTT
attttttggagacggagtct

SEQ ID NO: 80145 - DNA, 20 bp, Artificial Sequence
  Description of Artificial Sequence: Synthetic oligonucleotide
  Target: ATXN2; (-) strand; PAM type: YTN; PAM sequence: TTA
tttattttttggagacggag

SEQ ID NO: 80146 - DNA, 20 bp, Artificial Sequence
  Description of Artificial Sequence: Synthetic oligonucleotide
  Target: ATXN2; (-) strand; PAM type: YTN; PAM sequence: TTT
atttattttttggagacgga

SEQ ID NO: 80147 - DNA, 20 bp, Artificial Sequence
  Description of Artificial Sequence: Synthetic oligonucleotide
  Target: ATXN2; (-) strand; PAM type: YTN; PAM sequence: TTA
tttatttattttttggagac

SEQ ID NO: 80148 - DNA, 20 bp, Artificial Sequence
  Description of Artificial Sequence: Synthetic oligonucleotide
  Target: ATXN2; (-) strand; PAM type: YTN; PAM sequence: TTT
atttatttattttttggaga

SEQ ID NO: 80149 - DNA, 20 bp, Artificial Sequence
  Description of Artificial Sequence: Synthetic oligonucleotide
  Target: ATXN2; (-) strand; PAM type: YTN; PAM sequence: TTA
tttatttatttattttttgg

SEQ ID NO: 80150 - DNA, 20 bp, Artificial Sequence
  Description of Artificial Sequence: Synthetic oligonucleotide
  Target: ATXN2; (-) strand; PAM type: YTN; PAM sequence: TTT
atttatttatttattttttg

SEQ ID NO: 80151 - DNA, 20 bp, Artificial Sequence
  Description of Artificial Sequence: Synthetic oligonucleotide
  Target: ATXN2; (-) strand; PAM type: YTN; PAM sequence: TTG
tttatttatttatttatttt

SEQ ID NO: 80152 - DNA, 20 bp, Artificial Sequence
  Description of Artificial Sequence: Synthetic oligonucleotide
  Target: ATXN2; (-) strand; PAM type: YTN; PAM sequence: TTT
gtttatttatttatttattt

SEQ ID NO: 80153 - DNA, 20 bp, Artificial Sequence
  Description of Artificial Sequence: Synthetic oligonucleotide
  Target: ATXN2; (-) strand; PAM type: YTN; PAM sequence: TTG
tttgtttatttatttattta

SEQ ID NO: 80154 - DNA, 20 bp, Artificial Sequence
  Description of Artificial Sequence: Synthetic oligonucleotide
  Target: ATXN2; (-) strand; PAM type: YTN; PAM sequence: TTT
gtttgtttatttatttattt

SEQ ID NO: 80155 - DNA, 20 bp, Artificial Sequence
  Description of Artificial Sequence: Synthetic oligonucleotide
  Target: ATXN2; (-) strand; PAM type: YTN; PAM sequence: TTG
tttgtttgtttatttattta

SEQ ID NO: 80156 - DNA, 20 bp, Artificial Sequence
  Description of Artificial Sequence: Synthetic oligonucleotide
  Target: ATXN2; (-) strand; PAM type: YTN; PAM sequence: TTT
gtttgtttgtttatttattt

SEQ ID NO: 80157 - DNA, 20 bp, Artificial Sequence
  Description of Artificial Sequence: Synthetic oligonucleotide
  Target: ATXN2; (-) strand; PAM type: YTN; PAM sequence: CTG
ggtttgtttgtttgtttatt

SEQ ID NO: 80158 - DNA, 20 bp, Artificial Sequence
  Description of Artificial Sequence: Synthetic oligonucleotide
  Target: ATXN2; (-) strand; PAM type: YTN; PAM sequence: TTC
gagaccagcgtggccaacgt

SEQ ID NO: 80159 - DNA, 20 bp, Artificial Sequence
  Description of Artificial Sequence: Synthetic oligonucleotide
  Target: ATXN2; (-) strand; PAM type: YTN; PAM sequence: CTG
aggtcaggagttcgagacca

SEQ ID NO: 80160 - DNA, 20 bp, Artificial Sequence
  Description of Artificial Sequence: Synthetic oligonucleotide
  Target: ATXN2; (-) strand; PAM type: YTN; PAM sequence: TTG
ggaggccgaggcgggcagat

SEQ ID NO: 80161 - DNA, 20 bp, Artificial Sequence
  Description of Artificial Sequence: Synthetic oligonucleotide
  Target: ATXN2; (-) strand; PAM type: YTN; PAM sequence: TTT
gggaggccgaggcgggcaga

SEQ ID NO: 80162 - DNA, 20 bp, Artificial Sequence
  Description of Artificial Sequence: Synthetic oligonucleotide
  Target: ATXN2; (-) strand; PAM type: YTN; PAM sequence: CTT
tgggaggccgaggcgggcag

SEQ ID NO: 80163 - DNA, 20 bp, Artificial Sequence
  Description of Artificial Sequence: Synthetic oligonucleotide
  Target: ATXN2; (-) strand; PAM type: YTN; PAM sequence: CTG
taatcccagcactttgggag

SEQ ID NO: 80164 - DNA, 20 bp, Artificial Sequence
  Description of Artificial Sequence: Synthetic oligonucleotide
  Target: ATXN2; (-) strand; PAM type: YTN; PAM sequence: CTC
acgactgtaatcccagcact

SEQ ID NO: 80165 - DNA, 20 bp, Artificial Sequence
  Description of Artificial Sequence: Synthetic oligonucleotide
  Target: ATXN2; (-) strand; PAM type: YTN; PAM sequence: TTG
tcgtggccaggcgcagtggc

SEQ ID NO: 80166 - DNA, 20 bp, Artificial Sequence
  Description of Artificial Sequence: Synthetic oligonucleotide
  Target: ATXN2; (-) strand; PAM type: YTN; PAM sequence: CTT
gtcgtggccaggcgcagtgg

SEQ ID NO: 80167 - DNA, 20 bp, Artificial Sequence
  Description of Artificial Sequence: Synthetic oligonucleotide
  Target: ATXN2; (-) strand; PAM type: YTN; PAM sequence: TTA
acttgtcgtggccaggcgca

SEQ ID NO: 80168 - DNA, 20 bp, Artificial Sequence
  Description of Artificial Sequence: Synthetic oligonucleotide
  Target: ATXN2; (-) strand; PAM type: YTN; PAM sequence: TTA
tcaattaacttgtcgtggcc

SEQ ID NO: 80169 - DNA, 20 bp, Artificial Sequence
  Description of Artificial Sequence: Synthetic oligonucleotide
  Target: ATXN2; (-) strand; PAM type: YTN; PAM sequence: TTA
gtaagttatcaattaacttg

SEQ ID NO: 80170 - DNA, 20 bp, Artificial Sequence
  Description of Artificial Sequence: Synthetic oligonucleotide
  Target: ATXN2; (-) strand; PAM type: YTN; PAM sequence: CTT
agtaagttatcaattaactt

SEQ ID NO: 80171 - DNA, 20 bp, Artificial Sequence
  Description of Artificial Sequence: Synthetic oligonucleotide
  Target: ATXN2; (-) strand; PAM type: YTN; PAM sequence: TTG
tatgcttagtaagttatcaa

SEQ ID NO: 80172 - DNA, 20 bp, Artificial Sequence
  Description of Artificial Sequence: Synthetic oligonucleotide
  Target: ATXN2; (-) strand; PAM type: YTN; PAM sequence: TTT
gtatgcttagtaagttatca

SEQ ID NO: 80173 - DNA, 20 bp, Artificial Sequence
  Description of Artificial Sequence: Synthetic oligonucleotide
  Target: ATXN2; (-) strand; PAM type: YTN; PAM sequence: CTT
tgtatgcttagtaagttatc

SEQ ID NO: 80174 - DNA, 20 bp, Artificial Sequence
  Description of Artificial Sequence: Synthetic oligonucleotide
  Target: ATXN2; (-) strand; PAM type: YTN; PAM sequence: TTG
tacaactttgtatgcttagt

SEQ ID NO: 80175 - DNA, 20 bp, Artificial Sequence
  Description of Artificial Sequence: Synthetic oligonucleotide
  Target: ATXN2; (-) strand; PAM type: YTN; PAM sequence: TTT
gtacaactttgtatgcttag

SEQ ID NO: 80176 - DNA, 20 bp, Artificial Sequence
  Description of Artificial Sequence: Synthetic oligonucleotide
  Target: ATXN2; (-) strand; PAM type: YTN; PAM sequence: TTT
tgtacaactttgtatgctta

SEQ ID NO: 80177 - DNA, 20 bp, Artificial Sequence
  Description of Artificial Sequence: Synthetic oligonucleotide
  Target: ATXN2; (-) strand; PAM type: YTN; PAM sequence: TTG
acagtaggaacaagtgtttt

SEQ ID NO: 80178 - DNA, 20 bp, Artificial Sequence
  Description of Artificial Sequence: Synthetic oligonucleotide
  Target: ATXN2; (-) strand; PAM type: YTN; PAM sequence: CTT
gacagtaggaacaagtgttt

SEQ ID NO: 80179 - DNA, 20 bp, Artificial Sequence
  Description of Artificial Sequence: Synthetic oligonucleotide
  Target: ATXN2; (-) strand; PAM type: YTN; PAM sequence: TTA
gagcatcttgacagtaggaa

SEQ ID NO: 80180 - DNA, 20 bp, Artificial Sequence
  Description of Artificial Sequence: Synthetic oligonucleotide
  Target: ATXN2; (-) strand; PAM type: YTN; PAM sequence: TTT
agagcatcttgacagtagga

SEQ ID NO: 80181 - DNA, 20 bp, Artificial Sequence
  Description of Artificial Sequence: Synthetic oligonucleotide
  Target: ATXN2; (-) strand; PAM type: YTN; PAM sequence: CTA
gatttagagcatcttgacag

SEQ ID NO: 80182 - DNA, 20 bp, Artificial Sequence
  Description of Artificial Sequence: Synthetic oligonucleotide
  Target: ATXN2; (-) strand; PAM type: YTN; PAM sequence: TTC
tagatttagagcatcttgac

SEQ ID NO: 80183 - DNA, 20 bp, Artificial Sequence
  Description of Artificial Sequence: Synthetic oligonucleotide
  Target: ATXN2; (-) strand; PAM type: YTN; PAM sequence: CTT
ctagatttagagcatcttga

SEQ ID NO: 80184 - DNA, 20 bp, Artificial Sequence
  Description of Artificial Sequence: Synthetic oligonucleotide
  Target: ATXN2; (-) strand; PAM type: YTN; PAM sequence: TTC
cttctagatttagagcatct

SEQ ID NO: 80185 - DNA, 20 bp, Artificial Sequence
  Description of Artificial Sequence: Synthetic oligonucleotide
  Target: ATXN2; (-) strand; PAM type: YTN; PAM sequence: CTT
ccttctagatttagagcatc

SEQ ID NO: 80186 - DNA, 20 bp, Artificial Sequence
  Description of Artificial Sequence: Synthetic oligonucleotide
  Target: ATXN2; (-) strand; PAM type: YTN; PAM sequence: TTA
tcttccttctagatttagag

SEQ ID NO: 80187 - DNA, 20 bp, Artificial Sequence
  Description of Artificial Sequence: Synthetic oligonucleotide
  Target: ATXN2; (-) strand; PAM type: YTN; PAM sequence: TTG
cattatcttccttctagatt

SEQ ID NO: 80188 - DNA, 20 bp, Artificial Sequence
  Description of Artificial Sequence: Synthetic oligonucleotide
  Target: ATXN2; (-) strand; PAM type: YTN; PAM sequence: TTT
gcattatcttccttctagat

SEQ ID NO: 80189 - DNA, 20 bp, Artificial Sequence
  Description of Artificial Sequence: Synthetic oligonucleotide
  Target: ATXN2; (-) strand; PAM type: YTN; PAM sequence: TTG
gaaatatttgcattatcttc

SEQ ID NO: 80190 - DNA, 20 bp, Artificial Sequence
  Description of Artificial Sequence: Synthetic oligonucleotide
  Target: ATXN2; (-) strand; PAM type: YTN; PAM sequence: TTT
ggaaatatttgcattatctt

SEQ ID NO: 80191 - DNA, 20 bp, Artificial Sequence
  Description of Artificial Sequence: Synthetic oligonucleotide
  Target: ATXN2; (-) strand; PAM type: YTN; PAM sequence: TTG
tttggaaatatttgcattat

SEQ ID NO: 80192 - DNA, 20 bp, Artificial Sequence
  Description of Artificial Sequence: Synthetic oligonucleotide
  Target: ATXN2; (-) strand; PAM type: YTN; PAM sequence: CTT
gtttggaaatatttgcatta

SEQ ID NO: 80193 - DNA, 20 bp, Artificial Sequence
  Description of Artificial Sequence: Synthetic oligonucleotide
  Target: ATXN2; (-) strand; PAM type: YTN; PAM sequence: CTG
acttgtttggaaatatttgc

SEQ ID NO: 80194 - DNA, 20 bp, Artificial Sequence
  Description of Artificial Sequence: Synthetic oligonucleotide
  Target: ATXN2; (-) strand; PAM type: YTN; PAM sequence: TTG
cgatctgacttgtttggaaa

SEQ ID NO: 80195 - DNA, 20 bp, Artificial Sequence
  Description of Artificial Sequence: Synthetic oligonucleotide
  Target: ATXN2; (-) strand; PAM type: YTN; PAM sequence: TTT
gcgatctgacttgtttggaa

SEQ ID NO: 80196 - DNA, 20 bp, Artificial Sequence
  Description of Artificial Sequence: Synthetic oligonucleotide
  Target: ATXN2; (-) strand; PAM type: YTN; PAM sequence: TTA
tttgcgatctgacttgtttg

SEQ ID NO: 80197 - DNA, 20 bp, Artificial Sequence
  Description of Artificial Sequence: Synthetic oligonucleotide
  Target: ATXN2; (-) strand; PAM type: YTN; PAM sequence: TTT
atttgcgatctgacttgttt

SEQ ID NO: 80198 - DNA, 20 bp, Artificial Sequence
  Description of Artificial Sequence: Synthetic oligonucleotide
  Target: ATXN2; (-) strand; PAM type: YTN; PAM sequence: TTG
aaacatgcggtgcatgtgtt

SEQ ID NO: 80199 - DNA, 20 bp, Artificial Sequence
  Description of Artificial Sequence: Synthetic oligonucleotide
  Target: ATXN2; (-) strand; PAM type: YTN; PAM sequence: CTC
aaaataaataaataaataaa

SEQ ID NO: 80200 - DNA, 20 bp, Artificial Sequence
  Description of Artificial Sequence: Synthetic oligonucleotide
  Target: ATXN2; (-) strand; PAM type: YTN; PAM sequence: CTG
tctcaaaataaataaataaa

SEQ ID NO: 80201 - DNA, 20 bp, Artificial Sequence
  Description of Artificial Sequence: Synthetic oligonucleotide
  Target: ATXN2; (-) strand; PAM type: YTN; PAM sequence: CTC
tgtctcaaaataaataaata

SEQ ID NO: 80202 - DNA, 20 bp, Artificial Sequence
  Description of Artificial Sequence: Synthetic oligonucleotide
  Target: ATXN2; (-) strand; PAM type: YTN; PAM sequence: CTG
ggcaacagagcgagactctg

SEQ ID NO: 80203 - DNA, 20 bp, Artificial Sequence
  Description of Artificial Sequence: Synthetic oligonucleotide
  Target: ATXN2; (-) strand; PAM type: YTN; PAM sequence: CTC
cagcctgggcaacagagcga

SEQ ID NO: 80204 - DNA, 20 bp, Artificial Sequence
  Description of Artificial Sequence: Synthetic oligonucleotide
  Target: ATXN2; (-) strand; PAM type: YTN; PAM sequence: CTG
cactccagcctgggcaacag

SEQ ID NO: 80205 - DNA, 20 bp, Artificial Sequence
  Description of Artificial Sequence: Synthetic oligonucleotide
  Target: ATXN2; (-) strand; PAM type: YTN; PAM sequence: TTG
cagtgagccgagatcgtgcc

SEQ ID NO: 80206 - DNA, 20 bp, Artificial Sequence
  Description of Artificial Sequence: Synthetic oligonucleotide
  Target: ATXN2; (-) strand; PAM type: YTN; PAM sequence: CTT
gcagtgagccgagatcgtgc

SEQ ID NO: 80207 - DNA, 20 bp, Artificial Sequence
  Description of Artificial Sequence: Synthetic oligonucleotide
  Target: ATXN2; (-) strand; PAM type: YTN; PAM sequence: CTG
aggcaggagaatggcgtgaa

SEQ ID NO: 80208 - DNA, 20 bp, Artificial Sequence
  Description of Artificial Sequence: Synthetic oligonucleotide
  Target: ATXN2; (-) strand; PAM type: YTN; PAM sequence: CTC
gggaggctgaggcaggagaa

SEQ ID NO: 80209 - DNA, 20 bp, Artificial Sequence
  Description of Artificial Sequence: Synthetic oligonucleotide
  Target: ATXN2; (-) strand; PAM type: YTN; PAM sequence: CTA
ctcgggaggctgaggcagga

SEQ ID NO: 80210 - DNA, 20 bp, Artificial Sequence
  Description of Artificial Sequence: Synthetic oligonucleotide
  Target: ATXN2; (-) strand; PAM type: YTN; PAM sequence: CTG
taatcccagctactcgggag

SEQ ID NO: 80211 - DNA, 20 bp, Artificial Sequence
  Description of Artificial Sequence: Synthetic oligonucleotide
  Target: ATXN2; (-) strand; PAM type: YTN; PAM sequence: TTA
accgggtgtggtggcgggcg

SEQ ID NO: 80212 - DNA, 20 bp, Artificial Sequence
  Description of Artificial Sequence: Synthetic oligonucleotide
  Target: ATXN2; (-) strand; PAM type: YTN; PAM sequence: CTA
aaaattaaccgggtgtggtg

SEQ ID NO: 80213 - DNA, 20 bp, Artificial Sequence
  Description of Artificial Sequence: Synthetic oligonucleotide
  Target: ATXN2; (-) strand; PAM type: YTN; PAM sequence: CTA
aaaatactaaaaattaaccg

SEQ ID NO: 80214 - DNA, 20 bp, Artificial Sequence
  Description of Artificial Sequence: Synthetic oligonucleotide
  Target: ATXN2; (-) strand; PAM type: YTN; PAM sequence: CTA
ctaaaaatactaaaaattaa

SEQ ID NO: 80215 - DNA, 20 bp, Artificial Sequence
  Description of Artificial Sequence: Synthetic oligonucleotide
  Target: ATXN2; (-) strand; PAM type: YTN; PAM sequence: CTC
tactaaaaatactaaaaatt

SEQ ID NO: 80216 - DNA, 20 bp, Artificial Sequence
  Description of Artificial Sequence: Synthetic oligonucleotide
  Target: ATXN2; (-) strand; PAM type: YTN; PAM sequence: CTA
acacggtgaaaccccgtctc

SEQ ID NO: 80217 - DNA, 20 bp, Artificial Sequence
  Description of Artificial Sequence: Synthetic oligonucleotide
  Target: ATXN2; (-) strand; PAM type: YTN; PAM sequence: CTG
gctaacacggtgaaaccccg

SEQ ID NO: 80218 - DNA, 20 bp, Artificial Sequence
  Description of Artificial Sequence: Synthetic oligonucleotide
  Target: ATXN2; (-) strand; PAM type: YTN; PAM sequence: TTG
ggaggccgaggcgggtggat

SEQ ID NO: 80219 - DNA, 20 bp, Artificial Sequence
  Description of Artificial Sequence: Synthetic oligonucleotide
  Target: ATXN2; (-) strand; PAM type: YTN; PAM sequence: TTT
gggaggccgaggcgggtgga

SEQ ID NO: 80220 - DNA, 20 bp, Artificial Sequence
  Description of Artificial Sequence: Synthetic oligonucleotide
  Target: ATXN2; (-) strand; PAM type: YTN; PAM sequence: CTT
tgggaggccgaggcgggtgg

SEQ ID NO: 80221 - DNA, 20 bp, Artificial Sequence
  Description of Artificial Sequence: Synthetic oligonucleotide
  Target: ATXN2; (-) strand; PAM type: YTN; PAM sequence: CTG
taatcccagcactttgggag

SEQ ID NO: 80222 - DNA, 20 bp, Artificial Sequence
  Description of Artificial Sequence: Synthetic oligonucleotide
  Target: ATXN2; (-) strand; PAM type: YTN; PAM sequence: CTC
atgcctgtaatcccagcact

SEQ ID NO: 80223 - DNA, 20 bp, Artificial Sequence
  Description of Artificial Sequence: Synthetic oligonucleotide
  Target: ATXN2; (-) strand; PAM type: YTN; PAM sequence: TTG
aaacatgcgggccgggcccg

SEQ ID NO: 80224 - DNA, 20 bp, Artificial Sequence
  Description of Artificial Sequence: Synthetic oligonucleotide
  Target: ATXN2; (-) strand; PAM type: YTN; PAM sequence: TTA
attgaaacatgcgggccggg

SEQ ID NO: 80225 - DNA, 20 bp, Artificial Sequence
  Description of Artificial Sequence: Synthetic oligonucleotide
  Target: ATXN2; (-) strand; PAM type: YTN; PAM sequence: TTG
ttaattgaaacatgcgggcc

SEQ ID NO: 80226 - DNA, 20 bp, Artificial Sequence
  Description of Artificial Sequence: Synthetic oligonucleotide
  Target: ATXN2; (-) strand; PAM type: YTN; PAM sequence: CTG
ttgttaattgaaacatgcgg

SEQ ID NO: 80227 - DNA, 20 bp, Artificial Sequence
  Description of Artificial Sequence: Synthetic oligonucleotide
  Target: ATXN2; (-) strand; PAM type: YTN; PAM sequence: TTG
tatataggtctgttgttaat

SEQ ID NO: 80228 - DNA, 20 bp, Artificial Sequence
  Description of Artificial Sequence: Synthetic oligonucleotide
  Target: ATXN2; (-) strand; PAM type: YTN; PAM sequence: TTG
atcattgtatataggtctgt

SEQ ID NO: 80229 - DNA, 20 bp, Artificial Sequence
  Description of Artificial Sequence: Synthetic oligonucleotide
  Target: ATXN2; (-) strand; PAM type: YTN; PAM sequence: CTG
gttgatcattgtatataggt

SEQ ID NO: 80230 - DNA, 20 bp, Artificial Sequence
  Description of Artificial Sequence: Synthetic oligonucleotide
  Target: ATXN2; (-) strand; PAM type: YTN; PAM sequence: TTA
ctggttgatcattgtatata

SEQ ID NO: 80231 - DNA, 20 bp, Artificial Sequence
  Description of Artificial Sequence: Synthetic oligonucleotide
  Target: ATXN2; (-) strand; PAM type: YTN; PAM sequence: CTT
actggttgatcattgtatat

SEQ ID NO: 80232 - DNA, 20 bp, Artificial Sequence
  Description of Artificial Sequence: Synthetic oligonucleotide
  Target: ATXN2; (-) strand; PAM type: YTN; PAM sequence: TTA
acttactggttgatcattgt

SEQ ID NO: 80233 - DNA, 20 bp, Artificial Sequence
  Description of Artificial Sequence: Synthetic oligonucleotide
  Target: ATXN2; (-) strand; PAM type: YTN; PAM sequence: CTT
aacttactggttgatcattg

SEQ ID NO: 80234 - DNA, 20 bp, Artificial Sequence
  Description of Artificial Sequence: Synthetic oligonucleotide
  Target: ATXN2; (-) strand; PAM type: YTN; PAM sequence: TTA
ccttaacttactggttgatc

SEQ ID NO: 80235 - DNA, 20 bp, Artificial Sequence
  Description of Artificial Sequence: Synthetic oligonucleotide
  Target: ATXN2; (-) strand; PAM type: YTN; PAM sequence: TTT
accttaacttactggttgat

SEQ ID NO: 80236 - DNA, 20 bp, Artificial Sequence
  Description of Artificial Sequence: Synthetic oligonucleotide
  Target: ATXN2; (-) strand; PAM type: YTN; PAM sequence: TTA
agagtaaatttaccttaact

SEQ ID NO: 80237 - DNA, 20 bp, Artificial Sequence
  Description of Artificial Sequence: Synthetic oligonucleotide
  Target: ATXN2; (-) strand; PAM type: YTN; PAM sequence: TTT
aagagtaaatttaccttaac

SEQ ID NO: 80238 - DNA, 20 bp, Artificial Sequence
  Description of Artificial Sequence: Synthetic oligonucleotide
  Target: ATXN2; (-) strand; PAM type: YTN; PAM sequence: CTT
taagagtaaatttaccttaa

SEQ ID NO: 80239 - DNA, 20 bp, Artificial Sequence
  Description of Artificial Sequence: Synthetic oligonucleotide
  Target: ATXN2; (-) strand; PAM type: YTN; PAM sequence: TTC
tttaagagtaaatttacctt

SEQ ID NO: 80240 - DNA, 20 bp, Artificial Sequence
  Description of Artificial Sequence: Synthetic oligonucleotide
  Target: ATXN2; (-) strand; PAM type: YTN; PAM sequence: TTT
ctttaagagtaaatttacct

SEQ ID NO: 80241 - DNA, 20 bp, Artificial Sequence
  Description of Artificial Sequence: Synthetic oligonucleotide
  Target: ATXN2; (-) strand; PAM type: YTN; PAM sequence: CTT
tctttaagagtaaatttacc

SEQ ID NO: 80242 - DNA, 20 bp, Artificial Sequence
  Description of Artificial Sequence: Synthetic oligonucleotide
  Target: ATXN2; (-) strand; PAM type: YTN; PAM sequence: CTG
gtcaaaaatatctttcttta

SEQ ID NO: 80243 - DNA, 20 bp, Artificial Sequence
  Description of Artificial Sequence: Synthetic oligonucleotide
  Target: ATXN2; (-) strand; PAM type: YTN; PAM sequence: TTA
caggtgtgagccatcacgcc

SEQ ID NO: 80244 - DNA, 20 bp, Artificial Sequence
  Description of Artificial Sequence: Synthetic oligonucleotide
  Target: ATXN2; (-) strand; PAM type: YTN; PAM sequence: CTG
ggattacaggtgtgagccat

SEQ ID NO: 80245 - DNA, 20 bp, Artificial Sequence
  Description of Artificial Sequence: Synthetic oligonucleotide
  Target: ATXN2; (-) strand; PAM type: YTN; PAM sequence: CTC
ccaaagtgctgggattacag

SEQ ID NO: 80246 - DNA, 20 bp, Artificial Sequence
  Description of Artificial Sequence: Synthetic oligonucleotide
  Target: ATXN2; (-) strand; PAM type: YTN; PAM sequence: TTG
acctcccaaagtgctgggat

SEQ ID NO: 80247 - DNA, 20 bp, Artificial Sequence
  Description of Artificial Sequence: Synthetic oligonucleotide
  Target: ATXN2; (-) strand; PAM type: YTN; PAM sequence: CTT
gacctcccaaagtgctggga

SEQ ID NO: 80248 - DNA, 20 bp, Artificial Sequence
  Description of Artificial Sequence: Synthetic oligonucleotide
  Target: ATXN2; (-) strand; PAM type: YTN; PAM sequence: CTG
cccaccttgacctcccaaag

SEQ ID NO: 80249 - DNA, 20 bp, Artificial Sequence
  Description of Artificial Sequence: Synthetic oligonucleotide
  Target: ATXN2; (-) strand; PAM type: YTN; PAM sequence: CTC
aagtgatctgcccaccttga

SEQ ID NO: 80250 - DNA, 20 bp, Artificial Sequence
  Description of Artificial Sequence: Synthetic oligonucleotide
  Target: ATXN2; (-) strand; PAM type: YTN; PAM sequence: CTG
acctcaagtgatctgcccac

SEQ ID NO: 80251 - DNA, 20 bp, Artificial Sequence
  Description of Artificial Sequence: Synthetic oligonucleotide
  Target: ATXN2; (-) strand; PAM type: YTN; PAM sequence: CTC
tgacctcaagtgatctgccc

SEQ ID NO: 80252 - DNA, 20 bp, Artificial Sequence
  Description of Artificial Sequence: Synthetic oligonucleotide
  Target: ATXN2; (-) strand; PAM type: YTN; PAM sequence: TTA
acctctgacctcaagtgatc

SEQ ID NO: 80253 - DNA, 20 bp, Artificial Sequence
  Description of Artificial Sequence: Synthetic oligonucleotide
  Target: ATXN2; (-) strand; PAM type: YTN; PAM sequence: TTT
aacctctgacctcaagtgat

SEQ ID NO: 80254 - DNA, 20 bp, Artificial Sequence
  Description of Artificial Sequence: Synthetic oligonucleotide
  Target: ATXN2; (-) strand; PAM type: YTN; PAM sequence: TTT
taacctctgacctcaagtga

SEQ ID NO: 80255 - DNA, 20 bp, Artificial Sequence
  Description of Artificial Sequence: Synthetic oligonucleotide
  Target: ATXN2; (-) strand; PAM type: YTN; PAM sequence: CTT
ttaacctctgacctcaagtg

SEQ ID NO: 80256 - DNA, 20 bp, Artificial Sequence
  Description of Artificial Sequence: Synthetic oligonucleotide
  Target: ATXN2; (-) strand; PAM type: YTN; PAM sequence: TTA
agacttttaacctctgacct

SEQ ID NO: 80257 - DNA, 20 bp, Artificial Sequence
  Description of Artificial Sequence: Synthetic oligonucleotide
  Target: ATXN2; (-) strand; PAM type: YTN; PAM sequence: TTA
ggagttaagacttttaacct

SEQ ID NO: 80258 - DNA, 20 bp, Artificial Sequence
  Description of Artificial Sequence: Synthetic oligonucleotide
  Target: ATXN2; (-) strand; PAM type: YTN; PAM sequence: CTG
tggttaggagttaagacttt

SEQ ID NO: 80259 - DNA, 20 bp, Artificial Sequence
  Description of Artificial Sequence: Synthetic oligonucleotide
  Target: ATXN2; (-) strand; PAM type: YTN; PAM sequence: TTC
actgtggttaggagttaaga

SEQ ID NO: 80260 - DNA, 20 bp, Artificial Sequence
  Description of Artificial Sequence: Synthetic oligonucleotide
  Target: ATXN2; (-) strand; PAM type: YTN; PAM sequence: CTG
cagacagaaagttcactgtg

SEQ ID NO: 80261 - DNA, 20 bp, Artificial Sequence
  Description of Artificial Sequence: Synthetic oligonucleotide
  Target: ATXN2; (-) strand; PAM type: YTN; PAM sequence: TTC
tgcagacagaaagttcactg

SEQ ID NO: 80262 - DNA, 20 bp, Artificial Sequence
  Description of Artificial Sequence: Synthetic oligonucleotide
  Target: ATXN2; (-) strand; PAM type: YTN; PAM sequence: TTT
ctgcagacagaaagttcact

SEQ ID NO: 80263 - DNA, 20 bp, Artificial Sequence
  Description of Artificial Sequence: Synthetic oligonucleotide
  Target: ATXN2; (-) strand; PAM type: YTN; PAM sequence: TTT
tctgcagacagaaagttcac

SEQ ID NO: 80264 - DNA, 20 bp, Artificial Sequence
  Description of Artificial Sequence: Synthetic oligonucleotide
  Target: ATXN2; (-) strand; PAM type: YTN; PAM sequence: CTT
ttctgcagacagaaagttca

SEQ ID NO: 80265 - DNA, 20 bp, Artificial Sequence
  Description of Artificial Sequence: Synthetic oligonucleotide
  Target: ATXN2; (-) strand; PAM type: YTN; PAM sequence: CTC
ttttctgcagacagaaagtt

SEQ ID NO: 80266 - DNA, 20 bp, Artificial Sequence
  Description of Artificial Sequence: Synthetic oligonucleotide
  Target: ATXN2; (-) strand; PAM type: YTN; PAM sequence: TTG
accaatgctcttttctgcag

SEQ ID NO: 80267 - DNA, 20 bp, Artificial Sequence
  Description of Artificial Sequence: Synthetic oligonucleotide
  Target: ATXN2; (-) strand; PAM type: YTN; PAM sequence: CTG
ttgaccaatgctcttttctg

SEQ ID NO: 80268 - DNA, 20 bp, Artificial Sequence
  Description of Artificial Sequence: Synthetic oligonucleotide
  Target: ATXN2; (-) strand; PAM type: YTN; PAM sequence: TTG
tgaactgttgaccaatgctc

SEQ ID NO: 80269 - DNA, 20 bp, Artificial Sequence
  Description of Artificial Sequence: Synthetic oligonucleotide
  Target: ATXN2; (-) strand; PAM type: YTN; PAM sequence: TTT
gtgaactgttgaccaatgct

SEQ ID NO: 80270 - DNA, 20 bp, Artificial Sequence
  Description of Artificial Sequence: Synthetic oligonucleotide
  Target: ATXN2; (-) strand; PAM type: YTN; PAM sequence: TTT
tgtgaactgttgaccaatgc

SEQ ID NO: 80271 - DNA, 20 bp, Artificial Sequence
  Description of Artificial Sequence: Synthetic oligonucleotide
  Target: ATXN2; (-) strand; PAM type: YTN; PAM sequence: CTA
gccgttttgtgaactgttga

SEQ ID NO: 80272 - DNA, 20 bp, Artificial Sequence
  Description of Artificial Sequence: Synthetic oligonucleotide
  Target: ATXN2; (-) strand; PAM type: YTN; PAM sequence: CTG
tgggtgcacgccatcatgcc

SEQ ID NO: 80273 - DNA, 20 bp, Artificial Sequence
  Description of Artificial Sequence: Synthetic oligonucleotide
  Target: ATXN2; (-) strand; PAM type: YTN; PAM sequence: CTG
ggactgtgggtgcacgccat

SEQ ID NO: 80274 - DNA, 20 bp, Artificial Sequence
  Description of Artificial Sequence: Synthetic oligonucleotide
  Target: ATXN2; (-) strand; PAM type: YTN; PAM sequence: TTC
ccacgtagctgggactgtgg

SEQ ID NO: 80275 - DNA, 20 bp, Artificial Sequence
  Description of Artificial Sequence: Synthetic oligonucleotide
  Target: ATXN2; (-) strand; PAM type: YTN; PAM sequence: CTT
cccacgtagctgggactgtg

SEQ ID NO: 80276 - DNA, 20 bp, Artificial Sequence
  Description of Artificial Sequence: Synthetic oligonucleotide
  Target: ATXN2; (-) strand; PAM type: YTN; PAM sequence: CTC
agcttcccacgtagctggga

SEQ ID NO: 80277 - DNA, 20 bp, Artificial Sequence
  Description of Artificial Sequence: Synthetic oligonucleotide
  Target: ATXN2; (-) strand; PAM type: YTN; PAM sequence: CTC
ccacctcagcttcccacgta

SEQ ID NO: 80278 - DNA, 20 bp, Artificial Sequence
  Description of Artificial Sequence: Synthetic oligonucleotide
  Target: ATXN2; (-) strand; PAM type: YTN; PAM sequence: CTC
cagcaatcctcccacctcag

SEQ ID NO: 80279 - DNA, 20 bp, Artificial Sequence
  Description of Artificial Sequence: Synthetic oligonucleotide
  Target: ATXN2; (-) strand; PAM type: YTN; PAM sequence: CTG
ggctccagcaatcctcccac

SEQ ID NO: 80280 - DNA, 20 bp, Artificial Sequence
  Description of Artificial Sequence: Synthetic oligonucleotide
  Target: ATXN2; (-) strand; PAM type: YTN; PAM sequence: CTC
ctgggctccagcaatcctcc

SEQ ID NO: 80281 - DNA, 20 bp, Artificial Sequence
  Description of Artificial Sequence: Synthetic oligonucleotide
  Target: ATXN2; (-) strand; PAM type: YTN; PAM sequence: TTG
aactcctgggctccagcaat

SEQ ID NO: 80282 - DNA, 20 bp, Artificial Sequence
  Description of Artificial Sequence: Synthetic oligonucleotide
  Target: ATXN2; (-) strand; PAM type: YTN; PAM sequence: TTG
cccagggcgttgaactcctg

SEQ ID NO: 80283 - DNA, 20 bp, Artificial Sequence
  Description of Artificial Sequence: Synthetic oligonucleotide
  Target: ATXN2; (-) strand; PAM type: YTN; PAM sequence: CTG
tattgcccagggcgttgaac

SEQ ID NO: 80284 - DNA, 20 bp, Artificial Sequence
  Description of Artificial Sequence: Synthetic oligonucleotide
  Target: ATXN2; (-) strand; PAM type: YTN; PAM sequence: TTG
ctgtattgcccagggcgttg

SEQ ID NO: 80285 - DNA, 20 bp, Artificial Sequence
  Description of Artificial Sequence: Synthetic oligonucleotide
  Target: ATXN2; (-) strand; PAM type: YTN; PAM sequence: CTT
gctgtattgcccagggcgtt

SEQ ID NO: 80286 - DNA, 20 bp, Artificial Sequence
  Description of Artificial Sequence: Synthetic oligonucleotide
  Target: ATXN2; (-) strand; PAM type: YTN; PAM sequence: CTG
gccagagatgaggtcttgct

SEQ ID NO: 80287 - DNA, 20 bp, Artificial Sequence
  Description of Artificial Sequence: Synthetic oligonucleotide
  Target: ATXN2; (-) strand; PAM type: YTN; PAM sequence: TTA
cagatgtgagccaccgcacc

SEQ ID NO: 80288 - DNA, 20 bp, Artificial Sequence
  Description of Artificial Sequence: Synthetic oligonucleotide
  Target: ATXN2; (-) strand; PAM type: YTN; PAM sequence: CTG
ggattacagatgtgagccac

SEQ ID NO: 80289 - DNA, 20 bp, Artificial Sequence
  Description of Artificial Sequence: Synthetic oligonucleotide
  Target: ATXN2; (-) strand; PAM type: YTN; PAM sequence: CTC
ccaaagtgctgggattacag

SEQ ID NO: 80290 - DNA, 20 bp, Artificial Sequence
  Description of Artificial Sequence: Synthetic oligonucleotide
  Target: ATXN2; (-) strand; PAM type: YTN; PAM sequence: CTC
aggtgatccacccgccgtgg

SEQ ID NO: 80291 - DNA, 20 bp, Artificial Sequence
  Description of Artificial Sequence: Synthetic oligonucleotide
  Target: ATXN2; (-) strand; PAM type: YTN; PAM sequence: CTG
acctcaggtgatccacccgc

SEQ ID NO: 80292 - DNA, 20 bp, Artificial Sequence
  Description of Artificial Sequence: Synthetic oligonucleotide
  Target: ATXN2; (-) strand; PAM type: YTN; PAM sequence: CTC
ctgacctcaggtgatccacc

SEQ ID NO: 80293 - DNA, 20 bp, Artificial Sequence
  Description of Artificial Sequence: Synthetic oligonucleotide
  Target: ATXN2; (-) strand; PAM type: YTN; PAM sequence: CTC
gaactcctgacctcaggtga

SEQ ID NO: 80294 - DNA, 20 bp, Artificial Sequence
  Description of Artificial Sequence: Synthetic oligonucleotide
  Target: ATXN2; (-) strand; PAM type: YTN; PAM sequence: CTG
gtctcgaactcctgacctca

SEQ ID NO: 80295 - DNA, 20 bp, Artificial Sequence
  Description of Artificial Sequence: Synthetic oligonucleotide
  Target: ATXN2; (-) strand; PAM type: YTN; PAM sequence: TTG
gccaggctggtctcgaactc

SEQ ID NO: 80296 - DNA, 20 bp, Artificial Sequence
  Description of Artificial Sequence: Synthetic oligonucleotide
  Target: ATXN2; (-) strand; PAM type: YTN; PAM sequence: TTC
accatgttggccaggctggt

SEQ ID NO: 80297 - DNA, 20 bp, Artificial Sequence
  Description of Artificial Sequence: Synthetic oligonucleotide
  Target: ATXN2; (-) strand; PAM type: YTN; PAM sequence: TTT
caccatgttggccaggctgg

SEQ ID NO: 80298 - DNA, 20 bp, Artificial Sequence
  Description of Artificial Sequence: Synthetic oligonucleotide
  Target: ATXN2; (-) strand; PAM type: YTN; PAM sequence: TTA
gtagagacgggggtttcacc

SEQ ID NO: 80299 - DNA, 20 bp, Artificial Sequence
  Description of Artificial Sequence: Synthetic oligonucleotide
  Target: ATXN2; (-) strand; PAM type: YTN; PAM sequence: TTT
agtagagacgggggtttcac

SEQ ID NO: 80300 - DNA, 20 bp, Artificial Sequence
  Description of Artificial Sequence: Synthetic oligonucleotide
  Target: ATXN2; (-) strand; PAM type: YTN; PAM sequence: TTT
tagtagagacgggggtttca

SEQ ID NO: 80301 - DNA, 20 bp, Artificial Sequence
  Description of Artificial Sequence: Synthetic oligonucleotide
  Target: ATXN2; (-) strand; PAM type: YTN; PAM sequence: TTT
ttagtagagacgggggtttc

SEQ ID NO: 80302 - DNA, 20 bp, Artificial Sequence
  Description of Artificial Sequence: Synthetic oligonucleotide
  Target: ATXN2; (-) strand; PAM type: YTN; PAM sequence: TTG
tatttttagtagagacgggg

SEQ ID NO: 80303 - DNA, 20 bp, Artificial Sequence
  Description of Artificial Sequence: Synthetic oligonucleotide
  Target: ATXN2; (-) strand; PAM type: YTN; PAM sequence: TTT
gtatttttagtagagacggg

SEQ ID NO: 80304 - DNA, 20 bp, Artificial Sequence
  Description of Artificial Sequence: Synthetic oligonucleotide
  Target: ATXN2; (-) strand; PAM type: YTN; PAM sequence: TTT
tgtatttttagtagagacgg

SEQ ID NO: 80305 - DNA, 20 bp, Artificial Sequence
  Description of Artificial Sequence: Synthetic oligonucleotide
  Target: ATXN2; (-) strand; PAM type: YTN; PAM sequence: TTT
ttgtatttttagtagagacg

SEQ ID NO: 80306 - DNA, 20 bp, Artificial Sequence
  Description of Artificial Sequence: Synthetic oligonucleotide
  Target: ATXN2; (-) strand; PAM type: YTN; PAM sequence: CTA
atttttgtatttttagtaga

SEQ ID NO: 80307 - DNA, 20 bp, Artificial Sequence
  Description of Artificial Sequence: Synthetic oligonucleotide
  Target: ATXN2; (-) strand; PAM type: YTN; PAM sequence: CTG
gctaatttttgtatttttag

SEQ ID NO: 80308 - DNA, 20 bp, Artificial Sequence
  Description of Artificial Sequence: Synthetic oligonucleotide
  Target: ATXN2; (-) strand; PAM type: YTN; PAM sequence: TTA
caggtgcgtgccaccacacc

SEQ ID NO: 80309 - DNA, 20 bp, Artificial Sequence
  Description of Artificial Sequence: Synthetic oligonucleotide
  Target: ATXN2; (-) strand; PAM type: YTN; PAM sequence: CTG
ggattacaggtgcgtgccac

SEQ ID NO: 80310 - DNA, 20 bp, Artificial Sequence
  Description of Artificial Sequence: Synthetic oligonucleotide
  Target: ATXN2; (-) strand; PAM type: YTN; PAM sequence: CTG
aatagctgggattacaggtg

SEQ ID NO: 80311 - DNA, 20 bp, Artificial Sequence
  Description of Artificial Sequence: Synthetic oligonucleotide
  Target: ATXN2; (-) strand; PAM type: YTN; PAM sequence: CTC
ctgaatagctgggattacag

SEQ ID NO: 80312 - DNA, 20 bp, Artificial Sequence
  Description of Artificial Sequence: Synthetic oligonucleotide
  Target: ATXN2; (-) strand; PAM type: YTN; PAM sequence: CTC
aacctcctgaatagctggga

SEQ ID NO: 80313 - DNA, 20 bp, Artificial Sequence
  Description of Artificial Sequence: Synthetic oligonucleotide
  Target: ATXN2; (-) strand; PAM type: YTN; PAM sequence: CTG
cctcaacctcctgaatagct

SEQ ID NO: 80314 - DNA, 20 bp, Artificial Sequence
  Description of Artificial Sequence: Synthetic oligonucleotide
  Target: ATXN2; (-) strand; PAM type: YTN; PAM sequence: CTC
ctgcctcaacctcctgaata

SEQ ID NO: 80315 - DNA, 20 bp, Artificial Sequence
  Description of Artificial Sequence: Synthetic oligonucleotide
  Target: ATXN2; (-) strand; PAM type: YTN; PAM sequence: TTC
tcctgcctcaacctcctgaa

SEQ ID NO: 80316 - DNA, 20 bp, Artificial Sequence
  Description of Artificial Sequence: Synthetic oligonucleotide
  Target: ATXN2; (-) strand; PAM type: YTN; PAM sequence: TTC
aagcgattctcctgcctcaa

SEQ ID NO: 80317 - DNA, 20 bp, Artificial Sequence
  Description of Artificial Sequence: Synthetic oligonucleotide
  Target: ATXN2; (-) strand; PAM type: YTN; PAM sequence: CTG
ggttcaagcgattctcctgc

SEQ ID NO: 80318 - DNA, 20 bp, Artificial Sequence
  Description of Artificial Sequence: Synthetic oligonucleotide
  Target: ATXN2; (-) strand; PAM type: YTN; PAM sequence: TTC
tgggttcaagcgattctcct

SEQ ID NO: 80319 - DNA, 20 bp, Artificial Sequence
  Description of Artificial Sequence: Synthetic oligonucleotide
  Target: ATXN2; (-) strand; PAM type: YTN; PAM sequence: CTT
ctgggttcaagcgattctcc

SEQ ID NO: 80320 - DNA, 20 bp, Artificial Sequence
  Description of Artificial Sequence: Synthetic oligonucleotide
  Target: ATXN2; (-) strand; PAM type: YTN; PAM sequence: CTG
ccttctgggttcaagcgatt

SEQ ID NO: 80321 - DNA, 20 bp, Artificial Sequence
  Description of Artificial Sequence: Synthetic oligonucleotide
  Target: ATXN2; (-) strand; PAM type: YTN; PAM sequence: CTC
tgccttctgggttcaagcga

SEQ ID NO: 80322 - DNA, 20 bp, Artificial Sequence
  Description of Artificial Sequence: Synthetic oligonucleotide
  Target: ATXN2; (-) strand; PAM type: YTN; PAM sequence: CTG
cagtctctgccttctgggtt

SEQ ID NO: 80323 - DNA, 20 bp, Artificial Sequence
  Description of Artificial Sequence: Synthetic oligonucleotide
  Target: ATXN2; (-) strand; PAM type: YTN; PAM sequence: CTC
actgcagtctctgccttctg

SEQ ID NO: 80324 - DNA, 20 bp, Artificial Sequence
  Description of Artificial Sequence: Synthetic oligonucleotide
  Target: ATXN2; (-) strand; PAM type: YTN; PAM sequence: TTG
gctcactgcagtctctgcct

SEQ ID NO: 80325 - DNA, 20 bp, Artificial Sequence
  Description of Artificial Sequence: Synthetic oligonucleotide
  Target: ATXN2; (-) strand; PAM type: YTN; PAM sequence: CTG
gagtgtagtggcgtgatgtt

SEQ ID NO: 80326 - DNA, 20 bp, Artificial Sequence
  Description of Artificial Sequence: Synthetic oligonucleotide
  Target: ATXN2; (-) strand; PAM type: YTN; PAM sequence: CTA
tcgcccaggctggagtgtag

SEQ ID NO: 80327 - DNA, 20 bp, Artificial Sequence
  Description of Artificial Sequence: Synthetic oligonucleotide
  Target: ATXN2; (-) strand; PAM type: YTN; PAM sequence: CTC
tatcgcccaggctggagtgt

SEQ ID NO: 80328 - DNA, 20 bp, Artificial Sequence
  Description of Artificial Sequence: Synthetic oligonucleotide
  Target: ATXN2; (-) strand; PAM type: YTN; PAM sequence: CTC
gctctatcgcccaggctgga

SEQ ID NO: 80329 - DNA, 20 bp, Artificial Sequence
  Description of Artificial Sequence: Synthetic oligonucleotide
  Target: ATXN2; (-) strand; PAM type: YTN; PAM sequence: TTG
agatggagtctcgctctatc

SEQ ID NO: 80330 - DNA, 20 bp, Artificial Sequence
  Description of Artificial Sequence: Synthetic oligonucleotide
  Target: ATXN2; (-) strand; PAM type: YTN; PAM sequence: TTT
gagatggagtctcgctctat

SEQ ID NO: 80331 - DNA, 20 bp, Artificial Sequence
  Description of Artificial Sequence: Synthetic oligonucleotide
  Target: ATXN2; (-) strand; PAM type: YTN; PAM sequence: TTT
tgagatggagtctcgctcta

SEQ ID NO: 80332 - DNA, 20 bp, Artificial Sequence
  Description of Artificial Sequence: Synthetic oligonucleotide
  Target: ATXN2; (-) strand; PAM type: YTN; PAM sequence: TTT
ttgagatggagtctcgctct

SEQ ID NO: 80333 - DNA, 20 bp, Artificial Sequence
  Description of Artificial Sequence: Synthetic oligonucleotide
  Target: ATXN2; (-) strand; PAM type: YTN; PAM sequence: TTT
tttgagatggagtctcgctc

SEQ ID NO: 80334 - DNA, 20 bp, Artificial Sequence
  Description of Artificial Sequence: Synthetic oligonucleotide
  Target: ATXN2; (-) strand; PAM type: YTN; PAM sequence: TTG
ttttttgagatggagtctcg

SEQ ID NO: 80335 - DNA, 20 bp, Artificial Sequence
  Description of Artificial Sequence: Synthetic oligonucleotide
  Target: ATXN2; (-) strand; PAM type: YTN; PAM sequence: TTT
gttttttgagatggagtctc

SEQ ID NO: 80336 - DNA, 20 bp, Artificial Sequence
  Description of Artificial Sequence: Synthetic oligonucleotide
  Target: ATXN2; (-) strand; PAM type: YTN; PAM sequence: TTT
tgttttttgagatggagtct

SEQ ID NO: 80337 - DNA, 20 bp, Artificial Sequence
  Description of Artificial Sequence: Synthetic oligonucleotide
  Target: ATXN2; (-) strand; PAM type: YTN; PAM sequence: TTA
ttttgttttttgagatggag

SEQ ID NO: 80338 - DNA, 20 bp, Artificial Sequence
  Description of Artificial Sequence: Synthetic oligonucleotide
  Target: ATXN2; (-) strand; PAM type: YTN; PAM sequence: CTT
attttgttttttgagatgga

SEQ ID NO: 80339 - DNA, 20 bp, Artificial Sequence
  Description of Artificial Sequence: Synthetic oligonucleotide
  Target: ATXN2; (-) strand; PAM type: YTN; PAM sequence: TTC
ttattttgttttttgagatg

SEQ ID NO: 80340 - DNA, 20 bp, Artificial Sequence
  Description of Artificial Sequence: Synthetic oligonucleotide
  Target: ATXN2; (-) strand; PAM type: YTN; PAM sequence: TTT
cttattttgttttttgagat

SEQ ID NO: 80341 - DNA, 20 bp, Artificial Sequence
  Description of Artificial Sequence: Synthetic oligonucleotide
  Target: ATXN2; (-) strand; PAM type: YTN; PAM sequence: CTT
tcttattttgttttttgaga

SEQ ID NO: 80342 - DNA, 20 bp, Artificial Sequence
  Description of Artificial Sequence: Synthetic oligonucleotide
  Target: ATXN2; (-) strand; PAM type: YTN; PAM sequence: TTG
ataaatatctttcttatttt

SEQ ID NO: 80343 - DNA, 20 bp, Artificial Sequence
  Description of Artificial Sequence: Synthetic oligonucleotide
  Target: ATXN2; (-) strand; PAM type: YTN; PAM sequence: CTA
aattgataaatatctttctt

SEQ ID NO: 80344 - DNA, 20 bp, Artificial Sequence
  Description of Artificial Sequence: Synthetic oligonucleotide
  Target: ATXN2; (-) strand; PAM type: YTN; PAM sequence: TTA
ggatacactaaattgataaa

SEQ ID NO: 80345 - DNA, 20 bp, Artificial Sequence
  Description of Artificial Sequence: Synthetic oligonucleotide
  Target: ATXN2; (-) strand; PAM type: YTN; PAM sequence: CTG
aacagttaggatacactaaa

SEQ ID NO: 80346 - DNA, 20 bp, Artificial Sequence
  Description of Artificial Sequence: Synthetic oligonucleotide
  Target: ATXN2; (-) strand; PAM type: YTN; PAM sequence: CTG
tagacaaacactgaacagtt

SEQ ID NO: 80347 - DNA, 20 bp, Artificial Sequence
  Description of Artificial Sequence: Synthetic oligonucleotide
  Target: ATXN2; (-) strand; PAM type: YTN; PAM sequence: CTA
ctgtagacaaacactgaaca

SEQ ID NO: 80348 - DNA, 20 bp, Artificial Sequence
  Description of Artificial Sequence: Synthetic oligonucleotide
  Target: ATXN2; (-) strand; PAM type: YTN; PAM sequence: CTG
tatgctactgtagacaaaca

SEQ ID NO: 80349 - DNA, 20 bp, Artificial Sequence
  Description of Artificial Sequence: Synthetic oligonucleotide
  Target: ATXN2; (-) strand; PAM type: YTN; PAM sequence: TTA
ctgtatgctactgtagacaa

SEQ ID NO: 80350 - DNA, 20 bp, Artificial Sequence
  Description of Artificial Sequence: Synthetic oligonucleotide
  Target: ATXN2; (-) strand; PAM type: YTN; PAM sequence: CTA
ggacattactgtatgctact

SEQ ID NO: 80351 - DNA, 20 bp, Artificial Sequence
  Description of Artificial Sequence: Synthetic oligonucleotide
  Target: ATXN2; (-) strand; PAM type: YTN; PAM sequence: TTA
tcagtggtgtgtgaatgtgc

SEQ ID NO: 80352 - DNA, 20 bp, Artificial Sequence
  Description of Artificial Sequence: Synthetic oligonucleotide
  Target: ATXN2; (-) strand; PAM type: YTN; PAM sequence: TTT
atcagtggtgtgtgaatgtg

SEQ ID NO: 80353 - DNA, 20 bp, Artificial Sequence
  Description of Artificial Sequence: Synthetic oligonucleotide
  Target: ATXN2; (-) strand; PAM type: YTN; PAM sequence: TTG
ggatgagtcatttatcagtg

SEQ ID NO: 80354 - DNA, 20 bp, Artificial Sequence
  Description of Artificial Sequence: Synthetic oligonucleotide
  Target: ATXN2; (-) strand; PAM type: YTN; PAM sequence: CTT
gggatgagtcatttatcagt

SEQ ID NO: 80355 - DNA, 20 bp, Artificial Sequence
  Description of Artificial Sequence: Synthetic oligonucleotide
  Target: ATXN2; (-) strand; PAM type: YTN; PAM sequence: TTG
cttgggatgagtcatttatc

SEQ ID NO: 80356 - DNA, 20 bp, Artificial Sequence
  Description of Artificial Sequence: Synthetic oligonucleotide
  Target: ATXN2; (-) strand; PAM type: YTN; PAM sequence: TTG
caggacaggaagttgcttgg

SEQ ID NO: 80357 - DNA, 20 bp, Artificial Sequence
  Description of Artificial Sequence: Synthetic oligonucleotide
  Target: ATXN2; (-) strand; PAM type: YTN; PAM sequence: CTT
gcaggacaggaagttgcttg

SEQ ID NO: 80358 - DNA, 20 bp, Artificial Sequence
  Description of Artificial Sequence: Synthetic oligonucleotide
  Target: ATXN2; (-) strand; PAM type: YTN; PAM sequence: TTA
ccatgaatggagcttgcagg

SEQ ID NO: 80359 - DNA, 20 bp, Artificial Sequence
  Description of Artificial Sequence: Synthetic oligonucleotide
  Target: ATXN2; (-) strand; PAM type: YTN; PAM sequence: CTT
accatgaatggagcttgcag

SEQ ID NO: 80360 - DNA, 20 bp, Artificial Sequence
  Description of Artificial Sequence: Synthetic oligonucleotide
  Target: ATXN2; (-) strand; PAM type: YTN; PAM sequence: CTG
aataggtcacttaccatgaa

SEQ ID NO: 80361 - DNA, 20 bp, Artificial Sequence
  Description of Artificial Sequence: Synthetic oligonucleotide
  Target: ATXN2; (-) strand; PAM type: YTN; PAM sequence: CTA
aacatagaaaaggtgagtaa

SEQ ID NO: 80362 - DNA, 20 bp, Artificial Sequence
  Description of Artificial Sequence: Synthetic oligonucleotide
  Target: ATXN2; (-) strand; PAM type: YTN; PAM sequence: CTA
aacatatctaaacatagaaa

SEQ ID NO: 80363 - DNA, 20 bp, Artificial Sequence
  Description of Artificial Sequence: Synthetic oligonucleotide
  Target: ATXN2; (-) strand; PAM type: YTN; PAM sequence: TTG
tgaatctaaacatatctaaa

SEQ ID NO: 80364 - DNA, 20 bp, Artificial Sequence
  Description of Artificial Sequence: Synthetic oligonucleotide
  Target: ATXN2; (-) strand; PAM type: YTN; PAM sequence: TTT
gtgaatctaaacatatctaa

SEQ ID NO: 80365 - DNA, 20 bp, Artificial Sequence
  Description of Artificial Sequence: Synthetic oligonucleotide
  Target: ATXN2; (-) strand; PAM type: YTN; PAM sequence: TTA
agtatttgtgaatctaaaca

SEQ ID NO: 80366 - DNA, 20 bp, Artificial Sequence
  Description of Artificial Sequence: Synthetic oligonucleotide
  Target: ATXN2; (-) strand; PAM type: YTN; PAM sequence: TTG
gcagatgtaacataatgtta

SEQ ID NO: 80367 - DNA, 20 bp, Artificial Sequence
  Description of Artificial Sequence: Synthetic oligonucleotide
  Target: ATXN2; (-) strand; PAM type: YTN; PAM sequence: CTG
ttggcagatgtaacataatg

SEQ ID NO: 80368 - DNA, 20 bp, Artificial Sequence
  Description of Artificial Sequence: Synthetic oligonucleotide
  Target: ATXN2; (-) strand; PAM type: YTN; PAM sequence: CTG
aacactgttggcagatgtaa

SEQ ID NO: 80369 - DNA, 20 bp, Artificial Sequence
  Description of Artificial Sequence: Synthetic oligonucleotide
  Target: ATXN2; (-) strand; PAM type: YTN; PAM sequence: TTG
cggtactgaacactgttggc

SEQ ID NO: 80370 - DNA, 20 bp, Artificial Sequence
  Description of Artificial Sequence: Synthetic oligonucleotide
  Target: ATXN2; (-) strand; PAM type: YTN; PAM sequence: CTG
tatagcatgttgcggtactg

SEQ ID NO: 80371 - DNA, 20 bp, Artificial Sequence
  Description of Artificial Sequence: Synthetic oligonucleotide
  Target: ATXN2; (-) strand; PAM type: YTN; PAM sequence: CTA
caaatctgtatagcatgttg

SEQ ID NO: 80372 - DNA, 20 bp, Artificial Sequence
  Description of Artificial Sequence: Synthetic oligonucleotide
  Target: ATXN2; (-) strand; PAM type: YTN; PAM sequence: TTA
ggctacaaatctgtatagca

SEQ ID NO: 80373 - DNA, 20 bp, Artificial Sequence
  Description of Artificial Sequence: Synthetic oligonucleotide
  Target: ATXN2; (-) strand; PAM type: YTN; PAM sequence: CTT
aggctacaaatctgtatagc

SEQ ID NO: 80374 - DNA, 20 bp, Artificial Sequence
  Description of Artificial Sequence: Synthetic oligonucleotide
  Target: ATXN2; (-) strand; PAM type: YTN; PAM sequence: CTC
ttaggctacaaatctgtata

SEQ ID NO: 80375 - DNA, 20 bp, Artificial Sequence
  Description of Artificial Sequence: Synthetic oligonucleotide
  Target: ATXN2; (-) strand; PAM type: YTN; PAM sequence: TTA
ctcttaggctacaaatctgt

SEQ ID NO: 80376 - DNA, 20 bp, Artificial Sequence
  Description of Artificial Sequence: Synthetic oligonucleotide
  Target: ATXN2; (-) strand; PAM type: YTN; PAM sequence: CTG
tcgtacagagtattactctt

SEQ ID NO: 80377 - DNA, 20 bp, Artificial Sequence
  Description of Artificial Sequence: Synthetic oligonucleotide
  Target: ATXN2; (-) strand; PAM type: YTN; PAM sequence: CTA
gacacataggctgtcgtaca

SEQ ID NO: 80378 - DNA, 20 bp, Artificial Sequence
  Description of Artificial Sequence: Synthetic oligonucleotide
  Target: ATXN2; (-) strand; PAM type: YTN; PAM sequence: CTA
ctagacacataggctgtcgt

SEQ ID NO: 80379 - DNA, 20 bp, Artificial Sequence
  Description of Artificial Sequence: Synthetic oligonucleotide
  Target: ATXN2; (-) strand; PAM type: YTN; PAM sequence: CTA
gatggtatacctactagaca

SEQ ID NO: 80380 - DNA, 20 bp, Artificial Sequence
  Description of Artificial Sequence: Synthetic oligonucleotide
  Target: ATXN2; (-) strand; PAM type: YTN; PAM sequence: TTA
cacaagcctagatggtatac

SEQ ID NO: 80381 - DNA, 20 bp, Artificial Sequence
  Description of Artificial Sequence: Synthetic oligonucleotide
  Target: ATXN2; (-) strand; PAM type: YTN; PAM sequence: CTT
acacaagcctagatggtata

SEQ ID NO: 80382 - DNA, 20 bp, Artificial Sequence
  Description of Artificial Sequence: Synthetic oligonucleotide
  Target: ATXN2; (-) strand; PAM type: YTN; PAM sequence: TTA
cttacacaagcctagatggt

SEQ ID NO: 80383 - DNA, 20 bp, Artificial Sequence
  Description of Artificial Sequence: Synthetic oligonucleotide
  Target: ATXN2; (-) strand; PAM type: YTN; PAM sequence: TTT
acttacacaagcctagatgg

SEQ ID NO: 80384 - DNA, 20 bp, Artificial Sequence
  Description of Artificial Sequence: Synthetic oligonucleotide
  Target: ATXN2; (-) strand; PAM type: YTN; PAM sequence: TTG
tacaaatatagagtttactt

SEQ ID NO: 80385 - DNA, 20 bp, Artificial Sequence
  Description of Artificial Sequence: Synthetic oligonucleotide
  Target: ATXN2; (-) strand; PAM type: YTN; PAM sequence: TTA
tcattgtacaaatatagagt

SEQ ID NO: 80386 - DNA, 20 bp, Artificial Sequence
  Description of Artificial Sequence: Synthetic oligonucleotide
  Target: ATXN2; (-) strand; PAM type: YTN; PAM sequence: CTT
atcattgtacaaatatagag

SEQ ID NO: 80387 - DNA, 20 bp, Artificial Sequence
  Description of Artificial Sequence: Synthetic oligonucleotide
  Target: ATXN2; (-) strand; PAM type: YTN; PAM sequence: TTC
ggtgatcttatcattgtaca

SEQ ID NO: 80388 - DNA, 20 bp, Artificial Sequence
  Description of Artificial Sequence: Synthetic oligonucleotide
  Target: ATXN2; (-) strand; PAM type: YTN; PAM sequence: TTT
cggtgatcttatcattgtac

SEQ ID NO: 80389 - DNA, 20 bp, Artificial Sequence
  Description of Artificial Sequence: Synthetic oligonucleotide
  Target: ATXN2; (-) strand; PAM type: YTN; PAM sequence: TTT
tcggtgatcttatcattgta

SEQ ID NO: 80390 - DNA, 20 bp, Artificial Sequence
  Description of Artificial Sequence: Synthetic oligonucleotide
  Target: ATXN2; (-) strand; PAM type: YTN; PAM sequence: TTT
ttcggtgatcttatcattgt

SEQ ID NO: 80391 - DNA, 20 bp, Artificial Sequence
  Description of Artificial Sequence: Synthetic oligonucleotide
  Target: ATXN2; (-) strand; PAM type: YTN; PAM sequence: TTT
tttcggtgatcttatcattg

SEQ ID NO: 80392 - DNA, 20 bp, Artificial Sequence
  Description of Artificial Sequence: Synthetic oligonucleotide
  Target: ATXN2; (-) strand; PAM type: YTN; PAM sequence: TTG
agaaattttttcggtgatct

SEQ ID NO: 80393 - DNA, 20 bp, Artificial Sequence
  Description of Artificial Sequence: Synthetic oligonucleotide
  Target: ATXN2; (-) strand; PAM type: YTN; PAM sequence: TTT
gagaaattttttcggtgatc

SEQ ID NO: 80394 - DNA, 20 bp, Artificial Sequence
  Description of Artificial Sequence: Synthetic oligonucleotide
  Target: ATXN2; (-) strand; PAM type: YTN; PAM sequence: TTT
tgagaaattttttcggtgat

SEQ ID NO: 80395 - DNA, 20 bp, Artificial Sequence
  Description of Artificial Sequence: Synthetic oligonucleotide
  Target: ATXN2; (-) strand; PAM type: YTN; PAM sequence: TTA
atgatggggatgtgttttga

SEQ ID NO: 80396 - DNA, 20 bp, Artificial Sequence
  Description of Artificial Sequence: Synthetic oligonucleotide
  Target: ATXN2; (-) strand; PAM type: YTN; PAM sequence: CTT
aatgatggggatgtgttttg

SEQ ID NO: 80397 - DNA, 20 bp, Artificial Sequence
  Description of Artificial Sequence: Synthetic oligonucleotide
  Target: ATXN2; (-) strand; PAM type: YTN; PAM sequence: TTG
cttaatgatggggatgtgtt

SEQ ID NO: 80398 - DNA, 20 bp, Artificial Sequence
  Description of Artificial Sequence: Synthetic oligonucleotide
  Target: ATXN2; (-) strand; PAM type: YTN; PAM sequence: TTA
tgcattgcttaatgatgggg

SEQ ID NO: 80399 - DNA, 20 bp, Artificial Sequence
  Description of Artificial Sequence: Synthetic oligonucleotide
  Target: ATXN2; (-) strand; PAM type: YTN; PAM sequence: TTT
atgcattgcttaatgatggg

SEQ ID NO: 80400 - DNA, 20 bp, Artificial Sequence
  Description of Artificial Sequence: Synthetic oligonucleotide
  Target: ATXN2; (-) strand; PAM type: YTN; PAM sequence: CTA
tgtttatgcattgcttaatg

SEQ ID NO: 80401 - DNA, 20 bp, Artificial Sequence
  Description of Artificial Sequence: Synthetic oligonucleotide
  Target: ATXN2; (-) strand; PAM type: YTN; PAM sequence: TTG
gtgatgagaaactatgttta

SEQ ID NO: 80402 - DNA, 20 bp, Artificial Sequence
  Description of Artificial Sequence: Synthetic oligonucleotide
  Target: ATXN2; (-) strand; PAM type: YTN; PAM sequence: TTT
ggtgatgagaaactatgttt

SEQ ID NO: 80403 - DNA, 20 bp, Artificial Sequence
  Description of Artificial Sequence: Synthetic oligonucleotide
  Target: ATXN2; (-) strand; PAM type: YTN; PAM sequence: CTT
tggtgatgagaaactatgtt

SEQ ID NO: 80404 - DNA, 20 bp, Artificial Sequence
  Description of Artificial Sequence: Synthetic oligonucleotide
  Target: ATXN2; (-) strand; PAM type: YTN; PAM sequence: TTC
ataccatctttggtgatgag

SEQ ID NO: 80405 - DNA, 20 bp, Artificial Sequence
  Description of Artificial Sequence: Synthetic oligonucleotide
  Target: ATXN2; (-) strand; PAM type: YTN; PAM sequence: TTG
acattcataccatctttggt

SEQ ID NO: 80406 - DNA, 20 bp, Artificial Sequence
  Description of Artificial Sequence: Synthetic oligonucleotide
  Target: ATXN2; (-) strand; PAM type: YTN; PAM sequence: TTT
gacattcataccatctttgg

SEQ ID NO: 80407 - DNA, 20 bp, Artificial Sequence
  Description of Artificial Sequence: Synthetic oligonucleotide
  Target: ATXN2; (-) strand; PAM type: YTN; PAM sequence: TTA
tttgacattcataccatctt

SEQ ID NO: 80408 - DNA, 20 bp, Artificial Sequence
  Description of Artificial Sequence: Synthetic oligonucleotide
  Target: ATXN2; (-) strand; PAM type: YTN; PAM sequence: TTT
atttgacattcataccatct

SEQ ID NO: 80409 - DNA, 20 bp, Artificial Sequence
  Description of Artificial Sequence: Synthetic oligonucleotide
  Target: ATXN2; (-) strand; PAM type: YTN; PAM sequence: TTC
atgtgtttatttgacattca

SEQ ID NO: 80410 - DNA, 20 bp, Artificial Sequence
  Description of Artificial Sequence: Synthetic oligonucleotide
  Target: ATXN2; (-) strand; PAM type: YTN; PAM sequence: TTT
catgtgtttatttgacattc

SEQ ID NO: 80411 - DNA, 20 bp, Artificial Sequence
  Description of Artificial Sequence: Synthetic oligonucleotide
  Target: ATXN2; (-) strand; PAM type: YTN; PAM sequence: TTT
tcatgtgtttatttgacatt

SEQ ID NO: 80412 - DNA, 20 bp, Artificial Sequence
  Description of Artificial Sequence: Synthetic oligonucleotide
  Target: ATXN2; (-) strand; PAM type: YTN; PAM sequence: TTT
ttcatgtgtttatttgacat

SEQ ID NO: 80413 - DNA, 20 bp, Artificial Sequence
  Description of Artificial Sequence: Synthetic oligonucleotide
  Target: ATXN2; (-) strand; PAM type: YTN; PAM sequence: TTT
tttcatgtgtttatttgaca

SEQ ID NO: 80414 - DNA, 20 bp, Artificial Sequence
  Description of Artificial Sequence: Synthetic oligonucleotide
  Target: ATXN2; (-) strand; PAM type: YTN; PAM sequence: TTG
agcattttttcatgtgttta

SEQ ID NO: 80415 - DNA, 20 bp, Artificial Sequence
  Description of Artificial Sequence: Synthetic oligonucleotide
  Target: ATXN2; (-) strand; PAM type: YTN; PAM sequence: CTA
atgcccagtgatattgagca

SEQ ID NO: 80416 - DNA, 20 bp, Artificial Sequence
  Description of Artificial Sequence: Synthetic oligonucleotide
  Target: ATXN2; (-) strand; PAM type: YTN; PAM sequence: TTC
cctaatgcccagtgatattg

SEQ ID NO: 80417 - DNA, 20 bp, Artificial Sequence
  Description of Artificial Sequence: Synthetic oligonucleotide
  Target: ATXN2; (-) strand; PAM type: YTN; PAM sequence: TTT
ccctaatgcccagtgatatt

SEQ ID NO: 80418 - DNA, 20 bp, Artificial Sequence
  Description of Artificial Sequence: Synthetic oligonucleotide
  Target: ATXN2; (-) strand; PAM type: YTN; PAM sequence: TTG
catttccctaatgcccagtg

SEQ ID NO: 80419 - DNA, 20 bp, Artificial Sequence
  Description of Artificial Sequence: Synthetic oligonucleotide
  Target: ATXN2; (-) strand; PAM type: YTN; PAM sequence: TTT
gcatttccctaatgcccagt

SEQ ID NO: 80420 - DNA, 20 bp, Artificial Sequence
  Description of Artificial Sequence: Synthetic oligonucleotide
  Target: ATXN2; (-) strand; PAM type: YTN; PAM sequence: TTA
atttgcatttccctaatgcc

SEQ ID NO: 80421 - DNA, 20 bp, Artificial Sequence
  Description of Artificial Sequence: Synthetic oligonucleotide
  Target: ATXN2; (-) strand; PAM type: YTN; PAM sequence: TTT
aatttgcatttccctaatgc

SEQ ID NO: 80422 - DNA, 20 bp, Artificial Sequence
  Description of Artificial Sequence: Synthetic oligonucleotide
  Target: ATXN2; (-) strand; PAM type: YTN; PAM sequence: TTT
taatttgcatttccctaatg

SEQ ID NO: 80423 - DNA, 20 bp, Artificial Sequence
  Description of Artificial Sequence: Synthetic oligonucleotide
  Target: ATXN2; (-) strand; PAM type: YTN; PAM sequence: TTG
tggttttaatttgcatttcc

SEQ ID NO: 80424 - DNA, 20 bp, Artificial Sequence
  Description of Artificial Sequence: Synthetic oligonucleotide
  Target: ATXN2; (-) strand; PAM type: YTN; PAM sequence: CTC
attgtggttttaatttgcat

SEQ ID NO: 80425 - DNA, 20 bp, Artificial Sequence
  Description of Artificial Sequence: Synthetic oligonucleotide
  Target: ATXN2; (-) strand; PAM type: YTN; PAM sequence: CTG
gcctcattgtggttttaatt

SEQ ID NO: 80426 - DNA, 20 bp, Artificial Sequence
  Description of Artificial Sequence: Synthetic oligonucleotide
  Target: ATXN2; (-) strand; PAM type: YTN; PAM sequence: CTG
tgcctggcctcattgtggtt

SEQ ID NO: 80427 - DNA, 20 bp, Artificial Sequence
  Description of Artificial Sequence: Synthetic oligonucleotide
  Target: ATXN2; (-) strand; PAM type: YTN; PAM sequence: TTA
tagatatgagcccctgtgcc

SEQ ID NO: 80428 - DNA, 20 bp, Artificial Sequence
  Description of Artificial Sequence: Synthetic oligonucleotide
  Target: ATXN2; (-) strand; PAM type: YTN; PAM sequence: CTG
ggattatagatatgagcccc

SEQ ID NO: 80429 - DNA, 20 bp, Artificial Sequence
  Description of Artificial Sequence: Synthetic oligonucleotide
  Target: ATXN2; (-) strand; PAM type: YTN; PAM sequence: CTC
ccaaagtgctgggattatag

SEQ ID NO: 80430 - DNA, 20 bp, Artificial Sequence
  Description of Artificial Sequence: Synthetic oligonucleotide
  Target: ATXN2; (-) strand; PAM type: YTN; PAM sequence: CTC
agcctcccaaagtgctggga

SEQ ID NO: 80431 - DNA, 20 bp, Artificial Sequence
  Description of Artificial Sequence: Synthetic oligonucleotide
  Target: ATXN2; (-) strand; PAM type: YTN; PAM sequence: CTA
cctcagcctcccaaagtgct

SEQ ID NO: 80432 - DNA, 20 bp, Artificial Sequence
  Description of Artificial Sequence: Synthetic oligonucleotide
  Target: ATXN2; (-) strand; PAM type: YTN; PAM sequence: TTC
atctacctcagcctcccaaa

SEQ ID NO: 80433 - DNA, 20 bp, Artificial Sequence
  Description of Artificial Sequence: Synthetic oligonucleotide
  Target: ATXN2; (-) strand; PAM type: YTN; PAM sequence: CTC
aagtgattcatctacctcag

SEQ ID NO: 80434 - DNA, 20 bp, Artificial Sequence
  Description of Artificial Sequence: Synthetic oligonucleotide
  Target: ATXN2; (-) strand; PAM type: YTN; PAM sequence: CTG
ggctcaagtgattcatctac

SEQ ID NO: 80435 - DNA, 20 bp, Artificial Sequence
  Description of Artificial Sequence: Synthetic oligonucleotide
  Target: ATXN2; (-) strand; PAM type: YTN; PAM sequence: CTC
ctgggctcaagtgattcatc

SEQ ID NO: 80436 - DNA, 20 bp, Artificial Sequence
  Description of Artificial Sequence: Synthetic oligonucleotide
  Target: ATXN2; (-) strand; PAM type: YTN; PAM sequence: TTG
aactcctgggctcaagtgat

SEQ ID NO: 80437 - DNA, 20 bp, Artificial Sequence
  Description of Artificial Sequence: Synthetic oligonucleotide
  Target: ATXN2; (-) strand; PAM type: YTN; PAM sequence: CTG
ggtggtgttgaactcctggg

SEQ ID NO: 80438 - DNA, 20 bp, Artificial Sequence
  Description of Artificial Sequence: Synthetic oligonucleotide
  Target: ATXN2; (-) strand; PAM type: YTN; PAM sequence: TTG
ccctgggtggtgttgaactc

SEQ ID NO: 80439 - DNA, 20 bp, Artificial Sequence
  Description of Artificial Sequence: Synthetic oligonucleotide
  Target: ATXN2; (-) strand; PAM type: YTN; PAM sequence: CTA
tgttgccctgggtggtgttg

SEQ ID NO: 80440 - DNA, 20 bp, Artificial Sequence
  Description of Artificial Sequence: Synthetic oligonucleotide
  Target: ATXN2; (-) strand; PAM type: YTN; PAM sequence: CTC
actatgttgccctgggtggt

SEQ ID NO: 80441 - DNA, 20 bp, Artificial Sequence
  Description of Artificial Sequence: Synthetic oligonucleotide
  Target: ATXN2; (-) strand; PAM type: YTN; PAM sequence: TTA
gtagagaagaggtctcacta

SEQ ID NO: 80442 - DNA, 20 bp, Artificial Sequence
  Description of Artificial Sequence: Synthetic oligonucleotide
  Target: ATXN2; (-) strand; PAM type: YTN; PAM sequence: TTT
agtagagaagaggtctcact

SEQ ID NO: 80443 - DNA, 20 bp, Artificial Sequence
  Description of Artificial Sequence: Synthetic oligonucleotide
  Target: ATXN2; (-) strand; PAM type: YTN; PAM sequence: TTT
tagtagagaagaggtctcac

SEQ ID NO: 80444 - DNA, 20 bp, Artificial Sequence
  Description of Artificial Sequence: Synthetic oligonucleotide
  Target: ATXN2; (-) strand; PAM type: YTN; PAM sequence: TTT
ttagtagagaagaggtctca

SEQ ID NO: 80445 - DNA, 20 bp, Artificial Sequence
  Description of Artificial Sequence: Synthetic oligonucleotide
  Target: ATXN2; (-) strand; PAM type: YTN; PAM sequence: TTG
atttttagtagagaagaggt

SEQ ID NO: 80446 - DNA, 20 bp, Artificial Sequence
  Description of Artificial Sequence: Synthetic oligonucleotide
  Target: ATXN2; (-) strand; PAM type: YTN; PAM sequence: TTT
gatttttagtagagaagagg

SEQ ID NO: 80447 - DNA, 20 bp, Artificial Sequence
  Description of Artificial Sequence: Synthetic oligonucleotide
  Target: ATXN2; (-) strand; PAM type: YTN; PAM sequence: CTT
tgatttttagtagagaagag

SEQ ID NO: 80448 - DNA, 20 bp, Artificial Sequence
  Description of Artificial Sequence: Synthetic oligonucleotide
  Target: ATXN2; (-) strand; PAM type: YTN; PAM sequence: TTG
ctttgatttttagtagagaa

SEQ ID NO: 80449 - DNA, 20 bp, Artificial Sequence
  Description of Artificial Sequence: Synthetic oligonucleotide
  Target: ATXN2; (-) strand; PAM type: YTN; PAM sequence: TTT
gctttgatttttagtagaga

SEQ ID NO: 80450 - DNA, 20 bp, Artificial Sequence
  Description of Artificial Sequence: Synthetic oligonucleotide
  Target: ATXN2; (-) strand; PAM type: YTN; PAM sequence: CTG
gtagtttgctttgattttta

SEQ ID NO: 80451 - DNA, 20 bp, Artificial Sequence
  Description of Artificial Sequence: Synthetic oligonucleotide
  Target: ATXN2; (-) strand; PAM type: YTN; PAM sequence: CTG
ggaccacaggcatgtaccac

SEQ ID NO: 80452 - DNA, 20 bp, Artificial Sequence
  Description of Artificial Sequence: Synthetic oligonucleotide
  Target: ATXN2; (-) strand; PAM type: YTN; PAM sequence: CTG
gctgggaccacaggcatgta

SEQ ID NO: 80453 - DNA, 20 bp, Artificial Sequence
  Description of Artificial Sequence: Synthetic oligonucleotide
  Target: ATXN2; (-) strand; PAM type: YTN; PAM sequence: CTC
ctggctgggaccacaggcat

SEQ ID NO: 80454 - DNA, 20 bp, Artificial Sequence
  Description of Artificial Sequence: Synthetic oligonucleotide
  Target: ATXN2; (-) strand; PAM type: YTN; PAM sequence: CTC
agcctcctggctgggaccac

SEQ ID NO: 80455 - DNA, 20 bp, Artificial Sequence
  Description of Artificial Sequence: Synthetic oligonucleotide
  Target: ATXN2; (-) strand; PAM type: YTN; PAM sequence: CTG
cctcagcctcctggctggga

SEQ ID NO: 80456 - DNA, 20 bp, Artificial Sequence
  Description of Artificial Sequence: Synthetic oligonucleotide
  Target: ATXN2; (-) strand; PAM type: YTN; PAM sequence: CTC
ctgcctcagcctcctggctg

SEQ ID NO: 80457 - DNA, 20 bp, Artificial Sequence
  Description of Artificial Sequence: Synthetic oligonucleotide
  Target: ATXN2; (-) strand; PAM type: YTN; PAM sequence: CTC
aagtgatcctcctgcctcag

SEQ ID NO: 80458 - DNA, 20 bp, Artificial Sequence
  Description of Artificial Sequence: Synthetic oligonucleotide
  Target: ATXN2; (-) strand; PAM type: YTN; PAM sequence: CTG
ggctcaagtgatcctcctgc

SEQ ID NO: 80459 - DNA, 20 bp, Artificial Sequence
  Description of Artificial Sequence: Synthetic oligonucleotide
  Target: ATXN2; (-) strand; PAM type: YTN; PAM sequence: CTC
ctgggctcaagtgatcctcc

SEQ ID NO: 80460 - DNA, 20 bp, Artificial Sequence
  Description of Artificial Sequence: Synthetic oligonucleotide
  Target: ATXN2; (-) strand; PAM type: YTN; PAM sequence: TTG
acctcctgggctcaagtgat

SEQ ID NO: 80461 - DNA, 20 bp, Artificial Sequence
  Description of Artificial Sequence: Synthetic oligonucleotide
  Target: ATXN2; (-) strand; PAM type: YTN; PAM sequence: CTG
caacattgacctcctgggct

SEQ ID NO: 80462 - DNA, 20 bp, Artificial Sequence
  Description of Artificial Sequence: Synthetic oligonucleotide
  Target: ATXN2; (-) strand; PAM type: YTN; PAM sequence: CTG
actgcaacattgacctcctg

SEQ ID NO: 80463 - DNA, 20 bp, Artificial Sequence
  Description of Artificial Sequence: Synthetic oligonucleotide
  Target: ATXN2; (-) strand; PAM type: YTN; PAM sequence: TTG
tctgactgcaacattgacct

SEQ ID NO: 80464 - DNA, 20 bp, Artificial Sequence
  Description of Artificial Sequence: Synthetic oligonucleotide
  Target: ATXN2; (-) strand; PAM type: YTN; PAM sequence: CTG
tcacccagggtggagtgcag

SEQ ID NO: 80465 - DNA, 20 bp, Artificial Sequence
  Description of Artificial Sequence: Synthetic oligonucleotide
  Target: ATXN2; (-) strand; PAM type: YTN; PAM sequence: CTC
tgtcacccagggtggagtgc

SEQ ID NO: 80466 - DNA, 20 bp, Artificial Sequence
  Description of Artificial Sequence: Synthetic oligonucleotide
  Target: ATXN2; (-) strand; PAM type: YTN; PAM sequence: TTG
ctctgtcacccagggtggag

SEQ ID NO: 80467 - DNA, 20 bp, Artificial Sequence
  Description of Artificial Sequence: Synthetic oligonucleotide
  Target: ATXN2; (-) strand; PAM type: YTN; PAM sequence: CTT
gctctgtcacccagggtgga

SEQ ID NO: 80468 - DNA, 20 bp, Artificial Sequence
  Description of Artificial Sequence: Synthetic oligonucleotide
  Target: ATXN2; (-) strand; PAM type: YTN; PAM sequence: TTG
aggcagggtcttgctctgtc

SEQ ID NO: 80469 - DNA, 20 bp, Artificial Sequence
  Description of Artificial Sequence: Synthetic oligonucleotide
  Target: ATXN2; (-) strand; PAM type: YTN; PAM sequence: TTT
gaggcagggtcttgctctgt

SEQ ID NO: 80470 - DNA, 20 bp, Artificial Sequence
  Description of Artificial Sequence: Synthetic oligonucleotide
  Target: ATXN2; (-) strand; PAM type: YTN; PAM sequence: TTT
tgaggcagggtcttgctctg

SEQ ID NO: 80471 - DNA, 20 bp, Artificial Sequence
  Description of Artificial Sequence: Synthetic oligonucleotide
  Target: ATXN2; (-) strand; PAM type: YTN; PAM sequence: TTT
ttgaggcagggtcttgctct

SEQ ID NO: 80472 - DNA, 20 bp, Artificial Sequence
  Description of Artificial Sequence: Synthetic oligonucleotide
  Target: ATXN2; (-) strand; PAM type: YTN; PAM sequence: TTT
tttgaggcagggtcttgctc

SEQ ID NO: 80473 - DNA, 20 bp, Artificial Sequence
  Description of Artificial Sequence: Synthetic oligonucleotide
  Target: ATXN2; (-) strand; PAM type: YTN; PAM sequence: TTT
ttttgaggcagggtcttgct

SEQ ID NO: 80474 - DNA, 20 bp, Artificial Sequence
  Description of Artificial Sequence: Synthetic oligonucleotide
  Target: ATXN2; (-) strand; PAM type: YTN; PAM sequence: TTT
tttttgaggcagggtcttgc

SEQ ID NO: 80475 - DNA, 20 bp, Artificial Sequence
  Description of Artificial Sequence: Synthetic oligonucleotide
  Target: ATXN2; (-) strand; PAM type: YTN; PAM sequence: TTT
ttttttgaggcagggtcttg

SEQ ID NO: 80476 - DNA, 20 bp, Artificial Sequence
  Description of Artificial Sequence: Synthetic oligonucleotide
  Target: ATXN2; (-) strand; PAM type: YTN; PAM sequence: CTA
gcagtgtatgaatttttttt

SEQ ID NO: 80477 - DNA, 20 bp, Artificial Sequence
  Description of Artificial Sequence: Synthetic oligonucleotide
  Target: ATXN2; (-) strand; PAM type: YTN; PAM sequence: TTC
cctagcagtgtatgaatttt

SEQ ID NO: 80478 - DNA, 20 bp, Artificial Sequence
  Description of Artificial Sequence: Synthetic oligonucleotide
  Target: ATXN2; (-) strand; PAM type: YTN; PAM sequence: TTT
ccctagcagtgtatgaattt

SEQ ID NO: 80479 - DNA, 20 bp, Artificial Sequence
  Description of Artificial Sequence: Synthetic oligonucleotide
  Target: ATXN2; (-) strand; PAM type: YTN; PAM sequence: CTT
tccctagcagtgtatgaatt

SEQ ID NO: 80480 - DNA, 20 bp, Artificial Sequence
  Description of Artificial Sequence: Synthetic oligonucleotide
  Target: ATXN2; (-) strand; PAM type: YTN; PAM sequence: TTC
tttccctagcagtgtatgaa

SEQ ID NO: 80481 - DNA, 20 bp, Artificial Sequence
  Description of Artificial Sequence: Synthetic oligonucleotide
  Target: ATXN2; (-) strand; PAM type: YTN; PAM sequence: TTT
ctttccctagcagtgtatga

SEQ ID NO: 80482 - DNA, 20 bp, Artificial Sequence
  Description of Artificial Sequence: Synthetic oligonucleotide
  Target: ATXN2; (-) strand; PAM type: YTN; PAM sequence: TTT
tctttccctagcagtgtatg

SEQ ID NO: 80483 - DNA, 20 bp, Artificial Sequence
  Description of Artificial Sequence: Synthetic oligonucleotide
  Target: ATXN2; (-) strand; PAM type: YTN; PAM sequence: CTA
tattttctttccctagcagt

SEQ ID NO: 80484 - DNA, 20 bp, Artificial Sequence
  Description of Artificial Sequence: Synthetic oligonucleotide
  Target: ATXN2; (-) strand; PAM type: YTN; PAM sequence: CTG
ctatattttctttccctagc

SEQ ID NO: 80485 - DNA, 20 bp, Artificial Sequence
  Description of Artificial Sequence: Synthetic oligonucleotide
  Target: ATXN2; (-) strand; PAM type: YTN; PAM sequence: CTA
aagtgactgctatattttct

SEQ ID NO: 80486 - DNA, 20 bp, Artificial Sequence
  Description of Artificial Sequence: Synthetic oligonucleotide
  Target: ATXN2; (-) strand; PAM type: YTN; PAM sequence: TTG
ctaaagtgactgctatattt

SEQ ID NO: 80487 - DNA, 20 bp, Artificial Sequence
  Description of Artificial Sequence: Synthetic oligonucleotide
  Target: ATXN2; (-) strand; PAM type: YTN; PAM sequence: TTT
gctaaagtgactgctatatt

SEQ ID NO: 80488 - DNA, 20 bp, Artificial Sequence
  Description of Artificial Sequence: Synthetic oligonucleotide
  Target: ATXN2; (-) strand; PAM type: YTN; PAM sequence: CTG
tttgctaaagtgactgctat

SEQ ID NO: 80489 - DNA, 20 bp, Artificial Sequence
  Description of Artificial Sequence: Synthetic oligonucleotide
  Target: ATXN2; (-) strand; PAM type: YTN; PAM sequence: CTA
aactgtttgctaaagtgact

SEQ ID NO: 80490 - DNA, 20 bp, Artificial Sequence
  Description of Artificial Sequence: Synthetic oligonucleotide
  Target: ATXN2; (-) strand; PAM type: YTN; PAM sequence: TTG
ctaaactgtttgctaaagtg

SEQ ID NO: 80491 - DNA, 20 bp, Artificial Sequence
  Description of Artificial Sequence: Synthetic oligonucleotide
  Target: ATXN2; (-) strand; PAM type: YTN; PAM sequence: TTA
aaagtaattgctaaactgtt

SEQ ID NO: 80492 - DNA, 20 bp, Artificial Sequence
  Description of Artificial Sequence: Synthetic oligonucleotide
  Target: ATXN2; (-) strand; PAM type: YTN; PAM sequence: TTT
aaaagtaattgctaaactgt

SEQ ID NO: 80493 - DNA, 20 bp, Artificial Sequence
  Description of Artificial Sequence: Synthetic oligonucleotide
  Target: ATXN2; (-) strand; PAM type: YTN; PAM sequence: TTT
taaaagtaattgctaaactg

SEQ ID NO: 80494 - DNA, 20 bp, Artificial Sequence
  Description of Artificial Sequence: Synthetic oligonucleotide
  Target: ATXN2; (-) strand; PAM type: YTN; PAM sequence: TTA
attttaaaagtaattgctaa

SEQ ID NO: 80495 - DNA, 20 bp, Artificial Sequence
  Description of Artificial Sequence: Synthetic oligonucleotide
  Target: ATXN2; (-) strand; PAM type: YTN; PAM sequence: TTT
aattttaaaagtaattgcta

SEQ ID NO: 80496 - DNA, 20 bp, Artificial Sequence
  Description of Artificial Sequence: Synthetic oligonucleotide
  Target: ATXN2; (-) strand; PAM type: YTN; PAM sequence: TTA
tttaattttaaaagtaattg

SEQ ID NO: 80497 - DNA, 20 bp, Artificial Sequence
  Description of Artificial Sequence: Synthetic oligonucleotide
  Target: ATXN2; (-) strand; PAM type: YTN; PAM sequence: TTT
atttaattttaaaagtaatt

SEQ ID NO: 80498 - DNA, 20 bp, Artificial Sequence
  Description of Artificial Sequence: Synthetic oligonucleotide
  Target: ATXN2; (-) strand; PAM type: YTN; PAM sequence: CTG
tgagtgtttatttaatttta

SEQ ID NO: 80499 - DNA, 20 bp, Artificial Sequence
  Description of Artificial Sequence: Synthetic oligonucleotide
  Target: ATXN2; (-) strand; PAM type: YTN; PAM sequence: TTC
cagggtacatataatcctgt

SEQ ID NO: 80500 - DNA, 20 bp, Artificial Sequence
  Description of Artificial Sequence: Synthetic oligonucleotide
  Target: ATXN2; (-) strand; PAM type: YTN; PAM sequence: TTT
ccagggtacatataatcctg

SEQ ID NO: 80501 - DNA, 20 bp, Artificial Sequence
  Description of Artificial Sequence: Synthetic oligonucleotide
  Target: ATXN2; (-) strand; PAM type: YTN; PAM sequence: TTT
tccagggtacatataatcct

SEQ ID NO: 80502 - DNA, 20 bp, Artificial Sequence
  Description of Artificial Sequence: Synthetic oligonucleotide
  Target: ATXN2; (-) strand; PAM type: YTN; PAM sequence: TTT
ttccagggtacatataatcc

SEQ ID NO: 80503 - DNA, 20 bp, Artificial Sequence
  Description of Artificial Sequence: Synthetic oligonucleotide
  Target: ATXN2; (-) strand; PAM type: YTN; PAM sequence: TTA
tttttccagggtacatataa

SEQ ID NO: 80504 - DNA, 20 bp, Artificial Sequence
  Description of Artificial Sequence: Synthetic oligonucleotide
  Target: ATXN2; (-) strand; PAM type: YTN; PAM sequence: TTT
atttttccagggtacatata

SEQ ID NO: 80505 - DNA, 20 bp, Artificial Sequence
  Description of Artificial Sequence: Synthetic oligonucleotide
  Target: ATXN2; (-) strand; PAM type: YTN; PAM sequence: TTG
tggcaagtgtttatttttcc

SEQ ID NO: 80506 - DNA, 20 bp, Artificial Sequence
  Description of Artificial Sequence: Synthetic oligonucleotide
  Target: ATXN2; (-) strand; PAM type: YTN; PAM sequence: TTT
gtggcaagtgtttatttttc

SEQ ID NO: 80507 - DNA, 20 bp, Artificial Sequence
  Description of Artificial Sequence: Synthetic oligonucleotide
  Target: ATXN2; (-) strand; PAM type: YTN; PAM sequence: TTT
tgtggcaagtgtttattttt

SEQ ID NO: 80508 - DNA, 20 bp, Artificial Sequence
  Description of Artificial Sequence: Synthetic oligonucleotide
  Target: ATXN2; (-) strand; PAM type: YTN; PAM sequence: CTG
ggttttgtggcaagtgttta

SEQ ID NO: 80509 - DNA, 20 bp, Artificial Sequence
  Description of Artificial Sequence: Synthetic oligonucleotide
  Target: ATXN2; (-) strand; PAM type: YTN; PAM sequence: TTG
ctgggttttgtggcaagtgt

SEQ ID NO: 80510 - DNA, 20 bp, Artificial Sequence
  Description of Artificial Sequence: Synthetic oligonucleotide
  Target: ATXN2; (-) strand; PAM type: YTN; PAM sequence: TTG
gaatgcatagaaatgagatt

SEQ ID NO: 80511 - DNA, 20 bp, Artificial Sequence
  Description of Artificial Sequence: Synthetic oligonucleotide
  Target: ATXN2; (-) strand; PAM type: YTN; PAM sequence: TTG
gttggaatgcatagaaatga

SEQ ID NO: 80512 - DNA, 20 bp, Artificial Sequence
  Description of Artificial Sequence: Synthetic oligonucleotide
  Target: ATXN2; (-) strand; PAM type: YTN; PAM sequence: CTT
ggttggaatgcatagaaatg

SEQ ID NO: 80513 - DNA, 20 bp, Artificial Sequence
  Description of Artificial Sequence: Synthetic oligonucleotide
  Target: ATXN2; (-) strand; PAM type: YTN; PAM sequence: CTC
ttggttggaatgcatagaaa

SEQ ID NO: 80514 - DNA, 20 bp, Artificial Sequence
  Description of Artificial Sequence: Synthetic oligonucleotide
  Target: ATXN2; (-) strand; PAM type: YTN; PAM sequence: TTC
tcttggttggaatgcataga

SEQ ID NO: 80515 - DNA, 20 bp, Artificial Sequence
  Description of Artificial Sequence: Synthetic oligonucleotide
  Target: ATXN2; (-) strand; PAM type: YTN; PAM sequence: TTT
ctcttggttggaatgcatag

SEQ ID NO: 80516 - DNA, 20 bp, Artificial Sequence
  Description of Artificial Sequence: Synthetic oligonucleotide
  Target: ATXN2; (-) strand; PAM type: YTN; PAM sequence: TTA
tttctcttggttggaatgca

SEQ ID NO: 80517 - DNA, 20 bp, Artificial Sequence
  Description of Artificial Sequence: Synthetic oligonucleotide
  Target: ATXN2; (-) strand; PAM type: YTN; PAM sequence: TTT
atttctcttggttggaatgc

SEQ ID NO: 80518 - DNA, 20 bp, Artificial Sequence
  Description of Artificial Sequence: Synthetic oligonucleotide
  Target: ATXN2; (-) strand; PAM type: YTN; PAM sequence: TTT
tatttctcttggttggaatg

SEQ ID NO: 80519 - DNA, 20 bp, Artificial Sequence
  Description of Artificial Sequence: Synthetic oligonucleotide
  Target: ATXN2; (-) strand; PAM type: YTN; PAM sequence: TTG
tgtgaacatatgattttatt

SEQ ID NO: 80520 - DNA, 20 bp, Artificial Sequence
  Description of Artificial Sequence: Synthetic oligonucleotide
  Target: ATXN2; (-) strand; PAM type: YTN; PAM sequence: TTT
gtgtgaacatatgattttat

SEQ ID NO: 80521 - DNA, 20 bp, Artificial Sequence
  Description of Artificial Sequence: Synthetic oligonucleotide
  Target: ATXN2; (-) strand; PAM type: YTN; PAM sequence: TTT
tgtgtgaacatatgatttta

SEQ ID NO: 80522 - DNA, 20 bp, Artificial Sequence
  Description of Artificial Sequence: Synthetic oligonucleotide
  Target: ATXN2; (-) strand; PAM type: YTN; PAM sequence: TTA
tgtacaggttttgtgtgaac

SEQ ID NO: 80523 - DNA, 20 bp, Artificial Sequence
  Description of Artificial Sequence: Synthetic oligonucleotide
  Target: ATXN2; (-) strand; PAM type: YTN; PAM sequence: TTT
atgtacaggttttgtgtgaa

SEQ ID NO: 80524 - DNA, 20 bp, Artificial Sequence
  Description of Artificial Sequence: Synthetic oligonucleotide
  Target: ATXN2; (-) strand; PAM type: YTN; PAM sequence: CTG
gtatgaatatttatgtacag

SEQ ID NO: 80525 - DNA, 20 bp, Artificial Sequence
  Description of Artificial Sequence: Synthetic oligonucleotide
  Target: ATXN2; (-) strand; PAM type: YTN; PAM sequence: CTC
aaaaaaataaataaataaag

SEQ ID NO: 80526 - DNA, 20 bp, Artificial Sequence
  Description of Artificial Sequence: Synthetic oligonucleotide
  Target: ATXN2; (-) strand; PAM type: YTN; PAM sequence: CTC
cgtctcaaaaaaataaataa

SEQ ID NO: 80527 - DNA, 20 bp, Artificial Sequence
  Description of Artificial Sequence: Synthetic oligonucleotide
  Target: ATXN2; (-) strand; PAM type: YTN; PAM sequence: CTG
ggcatcaagagtgaaactcc

SEQ ID NO: 80528 - DNA, 20 bp, Artificial Sequence
  Description of Artificial Sequence: Synthetic oligonucleotide
  Target: ATXN2; (-) strand; PAM type: YTN; PAM sequence: CTC
cagcctgggcatcaagagtg

SEQ ID NO: 80529 - DNA, 20 bp, Artificial Sequence
  Description of Artificial Sequence: Synthetic oligonucleotide
  Target: ATXN2; (-) strand; PAM type: YTN; PAM sequence: TTG
cactccagcctgggcatcaa

SEQ ID NO: 80530 - DNA, 20 bp, Artificial Sequence
  Description of Artificial Sequence: Synthetic oligonucleotide
  Target: ATXN2; (-) strand; PAM type: YTN; PAM sequence: TTG
caccattgcactccagcctg

SEQ ID NO: 80531 - DNA, 20 bp, Artificial Sequence
  Description of Artificial Sequence: Synthetic oligonucleotide
  Target: ATXN2; (-) strand; PAM type: YTN; PAM sequence: TTG
tggtgagccaagattgcacc

SEQ ID NO: 80532 - DNA, 20 bp, Artificial Sequence
  Description of Artificial Sequence: Synthetic oligonucleotide
  Target: ATXN2; (-) strand; PAM type: YTN; PAM sequence: TTG
aacccgggaggcagaggttg

SEQ ID NO: 80533 - DNA, 20 bp, Artificial Sequence
  Description of Artificial Sequence: Synthetic oligonucleotide
  Target: ATXN2; (-) strand; PAM type: YTN; PAM sequence: CTT
gaacccgggaggcagaggtt

SEQ ID NO: 80534 - DNA, 20 bp, Artificial Sequence
  Description of Artificial Sequence: Synthetic oligonucleotide
  Target: ATXN2; (-) strand; PAM type: YTN; PAM sequence: CTG
aggcaggagaatcgcttgaa

SEQ ID NO: 80535 - DNA, 20 bp, Artificial Sequence
  Description of Artificial Sequence: Synthetic oligonucleotide
  Target: ATXN2; (-) strand; PAM type: YTN; PAM sequence: CTC
aggaggctgaggcaggagaa

SEQ ID NO: 80536 - DNA, 20 bp, Artificial Sequence
  Description of Artificial Sequence: Synthetic oligonucleotide
  Target: ATXN2; (-) strand; PAM type: YTN; PAM sequence: CTA
ctcaggaggctgaggcagga

SEQ ID NO: 80537 - DNA, 20 bp, Artificial Sequence
  Description of Artificial Sequence: Synthetic oligonucleotide
  Target: ATXN2; (-) strand; PAM type: YTN; PAM sequence: CTA
gctactcaggaggctgaggc

SEQ ID NO: 80538 - DNA, 20 bp, Artificial Sequence
  Description of Artificial Sequence: Synthetic oligonucleotide
  Target: ATXN2; (-) strand; PAM type: YTN; PAM sequence: CTG
taatcctagctactcaggag

SEQ ID NO: 80539 - DNA, 20 bp, Artificial Sequence
  Description of Artificial Sequence: Synthetic oligonucleotide
  Target: ATXN2; (-) strand; PAM type: YTN; PAM sequence: TTA
gccaggcgtggtggcgcatg

SEQ ID NO: 80540 - DNA, 20 bp, Artificial Sequence
  Description of Artificial Sequence: Synthetic oligonucleotide
  Target: ATXN2; (-) strand; PAM type: YTN; PAM sequence: CTA
aaaatacaaaattagccagg

SEQ ID NO: 80541 - DNA, 20 bp, Artificial Sequence
  Description of Artificial Sequence: Synthetic oligonucleotide
  Target: ATXN2; (-) strand; PAM type: YTN; PAM sequence: CTA
ctaaaaatacaaaattagcc

SEQ ID NO: 80542 - DNA, 20 bp, Artificial Sequence
  Description of Artificial Sequence: Synthetic oligonucleotide
  Target: ATXN2; (-) strand; PAM type: YTN; PAM sequence: CTC
tactaaaaatacaaaattag

SEQ ID NO: 80543 - DNA, 20 bp, Artificial Sequence
  Description of Artificial Sequence: Synthetic oligonucleotide
  Target: ATXN2; (-) strand; PAM type: YTN; PAM sequence: CTG
accaacatggagaaacccca

SEQ ID NO: 80544 - DNA, 20 bp, Artificial Sequence
  Description of Artificial Sequence: Synthetic oligonucleotide
  Target: ATXN2; (-) strand; PAM type: YTN; PAM sequence: TTG
agaccagcctgaccaacatg

SEQ ID NO: 80545 - DNA, 20 bp, Artificial Sequence
  Description of Artificial Sequence: Synthetic oligonucleotide
  Target: ATXN2; (-) strand; PAM type: YTN; PAM sequence: TTT
gagaccagcctgaccaacat

SEQ ID NO: 80546 - DNA, 20 bp, Artificial Sequence
  Description of Artificial Sequence: Synthetic oligonucleotide
  Target: ATXN2; (-) strand; PAM type: YTN; PAM sequence: TTG
ggagtttgagaccagcctga

SEQ ID NO: 80547 - DNA, 20 bp, Artificial Sequence
  Description of Artificial Sequence: Synthetic oligonucleotide
  Target: ATXN2; (-) strand; PAM type: YTN; PAM sequence: CTA
aggttgggagtttgagacca

SEQ ID NO: 80548 - DNA, 20 bp, Artificial Sequence
  Description of Artificial Sequence: Synthetic oligonucleotide
  Target: ATXN2; (-) strand; PAM type: YTN; PAM sequence: TTG
gaaggccgaggcaggcggat

SEQ ID NO: 80549 - DNA, 20 bp, Artificial Sequence
  Description of Artificial Sequence: Synthetic oligonucleotide
  Target: ATXN2; (-) strand; PAM type: YTN; PAM sequence: TTT
ggaaggccgaggcaggcgga

SEQ ID NO: 80550 - DNA, 20 bp, Artificial Sequence
  Description of Artificial Sequence: Synthetic oligonucleotide
  Target: ATXN2; (-) strand; PAM type: YTN; PAM sequence: TTT
tggaaggccgaggcaggcgg

SEQ ID NO: 80551 - DNA, 20 bp, Artificial Sequence
  Description of Artificial Sequence: Synthetic oligonucleotide
  Target: ATXN2; (-) strand; PAM type: YTN; PAM sequence: CTG
taatcccagcattttggaag

SEQ ID NO: 80552 - DNA, 20 bp, Artificial Sequence
  Description of Artificial Sequence: Synthetic oligonucleotide
  Target: ATXN2; (-) strand; PAM type: YTN; PAM sequence: CTC
acgcctgtaatcccagcatt

SEQ ID NO: 80553 - DNA, 20 bp, Artificial Sequence
  Description of Artificial Sequence: Synthetic oligonucleotide
  Target: ATXN2; (-) strand; PAM type: YTN; PAM sequence: CTG
gaggccgggtgcgatgtctc

SEQ ID NO: 80554 - DNA, 20 bp, Artificial Sequence
  Description of Artificial Sequence: Synthetic oligonucleotide
  Target: ATXN2; (-) strand; PAM type: YTN; PAM sequence: TTA
aaaataaagctggaggccgg

SEQ ID NO: 80555 - DNA, 20 bp, Artificial Sequence
  Description of Artificial Sequence: Synthetic oligonucleotide
  Target: ATXN2; (-) strand; PAM type: YTN; PAM sequence: CTA
ttaaaaataaagctggaggc

SEQ ID NO: 80556 - DNA, 20 bp, Artificial Sequence
  Description of Artificial Sequence: Synthetic oligonucleotide
  Target: ATXN2; (-) strand; PAM type: YTN; PAM sequence: TTG
gctattaaaaataaagctgg

SEQ ID NO: 80557 - DNA, 20 bp, Artificial Sequence
  Description of Artificial Sequence: Synthetic oligonucleotide
  Target: ATXN2; (-) strand; PAM type: YTN; PAM sequence: TTT
ggctattaaaaataaagctg

SEQ ID NO: 80558 - DNA, 20 bp, Artificial Sequence
  Description of Artificial Sequence: Synthetic oligonucleotide
  Target: ATXN2; (-) strand; PAM type: YTN; PAM sequence: TTT
tggctattaaaaataaagct

SEQ ID NO: 80559 - DNA, 20 bp, Artificial Sequence
  Description of Artificial Sequence: Synthetic oligonucleotide
  Target: ATXN2; (-) strand; PAM type: YTN; PAM sequence: TTA
gcaggttttggctattaaaa

SEQ ID NO: 80560 - DNA, 20 bp, Artificial Sequence
  Description of Artificial Sequence: Synthetic oligonucleotide
  Target: ATXN2; (-) strand; PAM type: YTN; PAM sequence: TTG
agttagcaggttttggctat

SEQ ID NO: 80561 - DNA, 20 bp, Artificial Sequence
  Description of Artificial Sequence: Synthetic oligonucleotide
  Target: ATXN2; (-) strand; PAM type: YTN; PAM sequence: CTA
gtggtggacattgagttagc

SEQ ID NO: 80562 - DNA, 20 bp, Artificial Sequence
  Description of Artificial Sequence: Synthetic oligonucleotide
  Target: ATXN2; (-) strand; PAM type: YTN; PAM sequence: TTC
atctagtggtggacattgag

SEQ ID NO: 80563 - DNA, 20 bp, Artificial Sequence
  Description of Artificial Sequence: Synthetic oligonucleotide
  Target: ATXN2; (-) strand; PAM type: YTN; PAM sequence: TTG
ttcatctagtggtggacatt

SEQ ID NO: 80564 - DNA, 20 bp, Artificial Sequence
  Description of Artificial Sequence: Synthetic oligonucleotide
  Target: ATXN2; (-) strand; PAM type: YTN; PAM sequence: TTT
gttcatctagtggtggacat

SEQ ID NO: 80565 - DNA, 20 bp, Artificial Sequence
  Description of Artificial Sequence: Synthetic oligonucleotide
  Target: ATXN2; (-) strand; PAM type: YTN; PAM sequence: TTG
tatgcatgtaccagtttgtt

SEQ ID NO: 80566 - DNA, 20 bp, Artificial Sequence
  Description of Artificial Sequence: Synthetic oligonucleotide
  Target: ATXN2; (-) strand; PAM type: YTN; PAM sequence: CTA
ttgtatgcatgtaccagttt

SEQ ID NO: 80567 - DNA, 20 bp, Artificial Sequence
  Description of Artificial Sequence: Synthetic oligonucleotide
  Target: ATXN2; (-) strand; PAM type: YTN; PAM sequence: TTG
agtagtagtctattgtatgc

SEQ ID NO: 80568 - DNA, 20 bp, Artificial Sequence
  Description of Artificial Sequence: Synthetic oligonucleotide
  Target: ATXN2; (-) strand; PAM type: YTN; PAM sequence: TTG
ttgagtagtagtctattgta

SEQ ID NO: 80569 - DNA, 20 bp, Artificial Sequence
  Description of Artificial Sequence: Synthetic oligonucleotide
  Target: ATXN2; (-) strand; PAM type: YTN; PAM sequence: TTA
ttgttgagtagtagtctatt

SEQ ID NO: 80570 - DNA, 20 bp, Artificial Sequence
  Description of Artificial Sequence: Synthetic oligonucleotide
  Target: ATXN2; (-) strand; PAM type: YTN; PAM sequence: CTT
attgttgagtagtagtctat

SEQ ID NO: 80571 - DNA, 20 bp, Artificial Sequence
  Description of Artificial Sequence: Synthetic oligonucleotide
  Target: ATXN2; (-) strand; PAM type: YTN; PAM sequence: CTG
cttattgttgagtagtagtc

SEQ ID NO: 80572 - DNA, 20 bp, Artificial Sequence
  Description of Artificial Sequence: Synthetic oligonucleotide
  Target: ATXN2; (-) strand; PAM type: YTN; PAM sequence: TTC
tgcttattgttgagtagtag

SEQ ID NO: 80573 - DNA, 20 bp, Artificial Sequence
  Description of Artificial Sequence: Synthetic oligonucleotide
  Target: ATXN2; (-) strand; PAM type: YTN; PAM sequence: TTT
ctgcttattgttgagtagta

SEQ ID NO: 80574 - DNA, 20 bp, Artificial Sequence
  Description of Artificial Sequence: Synthetic oligonucleotide
  Target: ATXN2; (-) strand; PAM type: YTN; PAM sequence: CTT
tctgcttattgttgagtagt

SEQ ID NO: 80575 - DNA, 20 bp, Artificial Sequence
  Description of Artificial Sequence: Synthetic oligonucleotide
  Target: ATXN2; (-) strand; PAM type: YTN; PAM sequence: TTC
tttctgcttattgttgagta

SEQ ID NO: 80576 - DNA, 20 bp, Artificial Sequence
  Description of Artificial Sequence: Synthetic oligonucleotide
  Target: ATXN2; (-) strand; PAM type: YTN; PAM sequence: TTT
ctttctgcttattgttgagt

SEQ ID NO: 80577 - DNA, 20 bp, Artificial Sequence
  Description of Artificial Sequence: Synthetic oligonucleotide
  Target: ATXN2; (-) strand; PAM type: YTN; PAM sequence: TTA
gtagtttctttctgcttatt

SEQ ID NO: 80578 - DNA, 20 bp, Artificial Sequence
  Description of Artificial Sequence: Synthetic oligonucleotide
  Target: ATXN2; (-) strand; PAM type: YTN; PAM sequence: TTG
catgttagtagtttctttct

SEQ ID NO: 80579 - DNA, 20 bp, Artificial Sequence
  Description of Artificial Sequence: Synthetic oligonucleotide
  Target: ATXN2; (-) strand; PAM type: YTN; PAM sequence: CTA
ttgcatgttagtagtttctt

SEQ ID NO: 80580 - DNA, 20 bp, Artificial Sequence
  Description of Artificial Sequence: Synthetic oligonucleotide
  Target: ATXN2; (-) strand; PAM type: YTN; PAM sequence: CTG
tactattgcatgttagtagt

SEQ ID NO: 80581 - DNA, 20 bp, Artificial Sequence
  Description of Artificial Sequence: Synthetic oligonucleotide
  Target: ATXN2; (-) strand; PAM type: YTN; PAM sequence: CTC
aaaaaaaaaaaaaaaaggtc

SEQ ID NO: 80582 - DNA, 20 bp, Artificial Sequence
  Description of Artificial Sequence: Synthetic oligonucleotide
  Target: ATXN2; (-) strand; PAM type: YTN; PAM sequence: TTA
tctcaaaaaaaaaaaaaaaa

SEQ ID NO: 80583 - DNA, 20 bp, Artificial Sequence
  Description of Artificial Sequence: Synthetic oligonucleotide
  Target: ATXN2; (-) strand; PAM type: YTN; PAM sequence: CTT
atctcaaaaaaaaaaaaaaa

SEQ ID NO: 80584 - DNA, 20 bp, Artificial Sequence
  Description of Artificial Sequence: Synthetic oligonucleotide
  Target: ATXN2; (-) strand; PAM type: YTN; PAM sequence: CTC
ttatctcaaaaaaaaaaaaa

SEQ ID NO: 80585 - DNA, 20 bp, Artificial Sequence
  Description of Artificial Sequence: Synthetic oligonucleotide
  Target: ATXN2; (-) strand; PAM type: YTN; PAM sequence: CTG
ggtgacatagtgagactctt

SEQ ID NO: 80586 - DNA, 20 bp, Artificial Sequence
  Description of Artificial Sequence: Synthetic oligonucleotide
  Target: ATXN2; (-) strand; PAM type: YTN; PAM sequence: CTC
cagcctgggtgacatagtga

SEQ ID NO: 80587 - DNA, 20 bp, Artificial Sequence
  Description of Artificial Sequence: Synthetic oligonucleotide
  Target: ATXN2; (-) strand; PAM type: YTN; PAM sequence: CTG
cactccagcctgggtgacat

SEQ ID NO: 80588 - DNA, 20 bp, Artificial Sequence
  Description of Artificial Sequence: Synthetic oligonucleotide
  Target: ATXN2; (-) strand; PAM type: YTN; PAM sequence: TTG
cagtgaaccaagaacacgcc

SEQ ID NO: 80589 - DNA, 20 bp, Artificial Sequence
  Description of Artificial Sequence: Synthetic oligonucleotide
  Target: ATXN2; (-) strand; PAM type: YTN; PAM sequence: TTG
aacccaggaggaggaggttg

SEQ ID NO: 80590 - DNA, 20 bp, Artificial Sequence
  Description of Artificial Sequence: Synthetic oligonucleotide
  Target: ATXN2; (-) strand; PAM type: YTN; PAM sequence: CTT
gaacccaggaggaggaggtt

SEQ ID NO: 80591 - DNA, 20 bp, Artificial Sequence
  Description of Artificial Sequence: Synthetic oligonucleotide
  Target: ATXN2; (-) strand; PAM type: YTN; PAM sequence: CTG
agacaggagaatcacttgaa

SEQ ID NO: 80592 - DNA, 20 bp, Artificial Sequence
  Description of Artificial Sequence: Synthetic oligonucleotide
  Target: ATXN2; (-) strand; PAM type: YTN; PAM sequence: CTC
gggggggctgagacaggaga

SEQ ID NO: 80593 - DNA, 20 bp, Artificial Sequence
  Description of Artificial Sequence: Synthetic oligonucleotide
  Target: ATXN2; (-) strand; PAM type: YTN; PAM sequence: CTA
ctcgggggggctgagacagg

SEQ ID NO: 80594 - DNA, 20 bp, Artificial Sequence
  Description of Artificial Sequence: Synthetic oligonucleotide
  Target: ATXN2; (-) strand; PAM type: YTN; PAM sequence: CTG
taatcccagctactcggggg

SEQ ID NO: 80595 - DNA, 20 bp, Artificial Sequence
  Description of Artificial Sequence: Synthetic oligonucleotide
  Target: ATXN2; (-) strand; PAM type: YTN; PAM sequence: CTC
ctgtaatcccagctactcgg

SEQ ID NO: 80596 - DNA, 20 bp, Artificial Sequence
  Description of Artificial Sequence: Synthetic oligonucleotide
  Target: ATXN2; (-) strand; PAM type: YTN; PAM sequence: TTA
gccaggcacggtggcgcgct

SEQ ID NO: 80597 - DNA, 20 bp, Artificial Sequence
  Description of Artificial Sequence: Synthetic oligonucleotide
  Target: ATXN2; (-) strand; PAM type: YTN; PAM sequence: CTA
aaagtacaaaaattagccag

SEQ ID NO: 80598 - DNA, 20 bp, Artificial Sequence
  Description of Artificial Sequence: Synthetic oligonucleotide
  Target: ATXN2; (-) strand; PAM type: YTN; PAM sequence: CTA
ctaaaagtacaaaaattagc

SEQ ID NO: 80599 - DNA, 20 bp, Artificial Sequence
  Description of Artificial Sequence: Synthetic oligonucleotide
  Target: ATXN2; (-) strand; PAM type: YTN; PAM sequence: CTG
tgtctactaaaagtacaaaa

SEQ ID NO: 80600 - DNA, 20 bp, Artificial Sequence
  Description of Artificial Sequence: Synthetic oligonucleotide
  Target: ATXN2; (-) strand; PAM type: YTN; PAM sequence: CTG
gccaacatggtgagaccctg

SEQ ID NO: 80601 - DNA, 20 bp, Artificial Sequence
  Description of Artificial Sequence: Synthetic oligonucleotide
  Target: ATXN2; (-) strand; PAM type: YTN; PAM sequence: TTC
gagaccagcctggccaacat

SEQ ID NO: 80602 - DNA, 20 bp, Artificial Sequence
  Description of Artificial Sequence: Synthetic oligonucleotide
  Target: ATXN2; (-) strand; PAM type: YTN; PAM sequence: CTG
aggtcaggagttcgagacca

SEQ ID NO: 80603 - DNA, 20 bp, Artificial Sequence
  Description of Artificial Sequence: Synthetic oligonucleotide
  Target: ATXN2; (-) strand; PAM type: YTN; PAM sequence: CTG
aggtgggtggatcacctgag

SEQ ID NO: 80604 - DNA, 20 bp, Artificial Sequence
  Description of Artificial Sequence: Synthetic oligonucleotide
  Target: ATXN2; (-) strand; PAM type: YTN; PAM sequence: TTG
ggaggctgaggtgggtggat

SEQ ID NO: 80605 - DNA, 20 bp, Artificial Sequence
  Description of Artificial Sequence: Synthetic oligonucleotide
  Target: ATXN2; (-) strand; PAM type: YTN; PAM sequence: TTT
gggaggctgaggtgggtgga

SEQ ID NO: 80606 - DNA, 20 bp, Artificial Sequence
  Description of Artificial Sequence: Synthetic oligonucleotide
  Target: ATXN2; (-) strand; PAM type: YTN; PAM sequence: CTT
tgggaggctgaggtgggtgg

SEQ ID NO: 80607 - DNA, 20 bp, Artificial Sequence
  Description of Artificial Sequence: Synthetic oligonucleotide
  Target: ATXN2; (-) strand; PAM type: YTN; PAM sequence: CTG
taatcccagcactttgggag

SEQ ID NO: 80608 - DNA, 20 bp, Artificial Sequence
  Description of Artificial Sequence: Synthetic oligonucleotide
  Target: ATXN2; (-) strand; PAM type: YTN; PAM sequence: CTC
acgcctgtaatcccagcact

SEQ ID NO: 80609 - DNA, 20 bp, Artificial Sequence
  Description of Artificial Sequence: Synthetic oligonucleotide
  Target: ATXN2; (-) strand; PAM type: YTN; PAM sequence: CTG
ggcccagtggctcacgcctg

SEQ ID NO: 80610 - DNA, 20 bp, Artificial Sequence
  Description of Artificial Sequence: Synthetic oligonucleotide
  Target: ATXN2; (-) strand; PAM type: YTN; PAM sequence: CTG
gctgggcccagtggctcacg

SEQ ID NO: 80611 - DNA, 20 bp, Artificial Sequence
  Description of Artificial Sequence: Synthetic oligonucleotide
  Target: ATXN2; (-) strand; PAM type: YTN; PAM sequence: CTC
tggctgggcccagtggctca

SEQ ID NO: 80612 - DNA, 20 bp, Artificial Sequence
  Description of Artificial Sequence: Synthetic oligonucleotide
  Target: ATXN2; (-) strand; PAM type: YTN; PAM sequence: TTA
tctctggctgggcccagtgg

SEQ ID NO: 80613 - DNA, 20 bp, Artificial Sequence
  Description of Artificial Sequence: Synthetic oligonucleotide
  Target: ATXN2; (-) strand; PAM type: YTN; PAM sequence: CTT
atctctggctgggcccagtg

SEQ ID NO: 80614 - DNA, 20 bp, Artificial Sequence
  Description of Artificial Sequence: Synthetic oligonucleotide
  Target: ATXN2; (-) strand; PAM type: YTN; PAM sequence: CTG
ggcaacacagcaagacctta

SEQ ID NO: 80615 - DNA, 20 bp, Artificial Sequence
  Description of Artificial Sequence: Synthetic oligonucleotide
  Target: ATXN2; (-) strand; PAM type: YTN; PAM sequence: TTC
aaggccctgggcaacacagc

SEQ ID NO: 80616 - DNA, 20 bp, Artificial Sequence
  Description of Artificial Sequence: Synthetic oligonucleotide
  Target: ATXN2; (-) strand; PAM type: YTN; PAM sequence: CTG
gagcccaggagttcaaggcc

SEQ ID NO: 80617 - DNA, 20 bp, Artificial Sequence
  Description of Artificial Sequence: Synthetic oligonucleotide
  Target: ATXN2; (-) strand; PAM type: YTN; PAM sequence: CTG
aggtgggaggatcgctggag

SEQ ID NO: 80618 - DNA, 20 bp, Artificial Sequence
  Description of Artificial Sequence: Synthetic oligonucleotide
  Target: ATXN2; (-) strand; PAM type: YTN; PAM sequence: TTG
gggagctgaggtgggaggat

SEQ ID NO: 80619 - DNA, 20 bp, Artificial Sequence
  Description of Artificial Sequence: Synthetic oligonucleotide
  Target: ATXN2; (-) strand; PAM type: YTN; PAM sequence: CTT
ggggagctgaggtgggagga

SEQ ID NO: 80620 - DNA, 20 bp, Artificial Sequence
  Description of Artificial Sequence: Synthetic oligonucleotide
  Target: ATXN2; (-) strand; PAM type: YTN; PAM sequence: CTA
cttggggagctgaggtggga

SEQ ID NO: 80621 - DNA, 20 bp, Artificial Sequence
  Description of Artificial Sequence: Synthetic oligonucleotide
  Target: ATXN2; (-) strand; PAM type: YTN; PAM sequence: CTA
ggtgtgatggcgtgcaccca

SEQ ID NO: 80622 - DNA, 20 bp, Artificial Sequence
  Description of Artificial Sequence: Synthetic oligonucleotide
  Target: ATXN2; (-) strand; PAM type: YTN; PAM sequence: TTC
acaaaatggctaggtgtgat

SEQ ID NO: 80623 - DNA, 20 bp, Artificial Sequence
  Description of Artificial Sequence: Synthetic oligonucleotide
  Target: ATXN2; (-) strand; PAM type: YTN; PAM sequence: TTG
gtcagcagttcacaaaatgg

SEQ ID NO: 80624 - DNA, 20 bp, Artificial Sequence
  Description of Artificial Sequence: Synthetic oligonucleotide
  Target: ATXN2; (-) strand; PAM type: YTN; PAM sequence: CTG
cagagaggagcattggtcag

SEQ ID NO: 80625 - DNA, 20 bp, Artificial Sequence
  Description of Artificial Sequence: Synthetic oligonucleotide
  Target: ATXN2; (-) strand; PAM type: YTN; PAM sequence: CTG
tctgcagagaggagcattgg

SEQ ID NO: 80626 - DNA, 20 bp, Artificial Sequence
  Description of Artificial Sequence: Synthetic oligonucleotide
  Target: ATXN2; (-) strand; PAM type: YTN; PAM sequence: TTC
tgtctgcagagaggagcatt

SEQ ID NO: 80627 - DNA, 20 bp, Artificial Sequence
  Description of Artificial Sequence: Synthetic oligonucleotide
  Target: ATXN2; (-) strand; PAM type: YTN; PAM sequence: TTT
ctgtctgcagagaggagcat

SEQ ID NO: 80628 - DNA, 20 bp, Artificial Sequence
  Description of Artificial Sequence: Synthetic oligonucleotide
  Target: ATXN2; (-) strand; PAM type: YTN; PAM sequence: CTT
tctgtctgcagagaggagca

SEQ ID NO: 80629 - DNA, 20 bp, Artificial Sequence
  Description of Artificial Sequence: Synthetic oligonucleotide
  Target: ATXN2; (-) strand; PAM type: YTN; PAM sequence: CTA
accacaccgaactttctgtc

SEQ ID NO: 80630 - DNA, 20 bp, Artificial Sequence
  Description of Artificial Sequence: Synthetic oligonucleotide
  Target: ATXN2; (-) strand; PAM type: YTN; PAM sequence: CTC
ctaaccacaccgaactttct

SEQ ID NO: 80631 - DNA, 20 bp, Artificial Sequence
  Description of Artificial Sequence: Synthetic oligonucleotide
  Target: ATXN2; (-) strand; PAM type: YTN; PAM sequence: TTA
actcctaaccacaccgaact

SEQ ID NO: 80632 - DNA, 20 bp, Artificial Sequence
  Description of Artificial Sequence: Synthetic oligonucleotide
  Target: ATXN2; (-) strand; PAM type: YTN; PAM sequence: TTT
aactcctaaccacaccgaac

SEQ ID NO: 80633 - DNA, 20 bp, Artificial Sequence
  Description of Artificial Sequence: Synthetic oligonucleotide
  Target: ATXN2; (-) strand; PAM type: YTN; PAM sequence: TTC
ccatttaactcctaaccaca

SEQ ID NO: 80634 - DNA, 20 bp, Artificial Sequence
  Description of Artificial Sequence: Synthetic oligonucleotide
  Target: ATXN2; (-) strand; PAM type: YTN; PAM sequence: CTT
cccatttaactcctaaccac

SEQ ID NO: 80635 - DNA, 20 bp, Artificial Sequence
  Description of Artificial Sequence: Synthetic oligonucleotide
  Target: ATXN2; (-) strand; PAM type: YTN; PAM sequence: TTC
ttcccatttaactcctaacc

SEQ ID NO: 80636 - DNA, 20 bp, Artificial Sequence
  Description of Artificial Sequence: Synthetic oligonucleotide
  Target: ATXN2; (-) strand; PAM type: YTN; PAM sequence: TTT
cttcccatttaactcctaac

SEQ ID NO: 80637 - DNA, 20 bp, Artificial Sequence
  Description of Artificial Sequence: Synthetic oligonucleotide
  Target: ATXN2; (-) strand; PAM type: YTN; PAM sequence: CTT
tcttcccatttaactcctaa

SEQ ID NO: 80638 - DNA, 20 bp, Artificial Sequence
  Description of Artificial Sequence: Synthetic oligonucleotide
  Target: ATXN2; (-) strand; PAM type: YTN; PAM sequence: CTC
tttcttcccatttaactcct

SEQ ID NO: 80639 - DNA, 20 bp, Artificial Sequence
  Description of Artificial Sequence: Synthetic oligonucleotide
  Target: ATXN2; (-) strand; PAM type: YTN; PAM sequence: CTC
ctctttcttcccatttaact

SEQ ID NO: 80640 - DNA, 20 bp, Artificial Sequence
  Description of Artificial Sequence: Synthetic oligonucleotide
  Target: ATXN2; (-) strand; PAM type: YTN; PAM sequence: CTG
cacccagcctcctctttctt

SEQ ID NO: 80641 - DNA, 20 bp, Artificial Sequence
  Description of Artificial Sequence: Synthetic oligonucleotide
  Target: ATXN2; (-) strand; PAM type: YTN; PAM sequence: TTA
caggcatgagccactgcacc

SEQ ID NO: 80642 - DNA, 20 bp, Artificial Sequence
  Description of Artificial Sequence: Synthetic oligonucleotide
  Target: ATXN2; (-) strand; PAM type: YTN; PAM sequence: TTG
ggagggattacaggcatgag

SEQ ID NO: 80643 - DNA, 20 bp, Artificial Sequence
  Description of Artificial Sequence: Synthetic oligonucleotide
  Target: ATXN2; (-) strand; PAM type: YTN; PAM sequence: CTC
ccaaagtgttgggagggatt

SEQ ID NO: 80644 - DNA, 20 bp, Artificial Sequence
  Description of Artificial Sequence: Synthetic oligonucleotide
  Target: ATXN2; (-) strand; PAM type: YTN; PAM sequence: TTG
gcctcccaaagtgttgggag

SEQ ID NO: 80645 - DNA, 20 bp, Artificial Sequence
  Description of Artificial Sequence: Synthetic oligonucleotide
  Target: ATXN2; (-) strand; PAM type: YTN; PAM sequence: CTT
ggcctcccaaagtgttggga

SEQ ID NO: 80646 - DNA, 20 bp, Artificial Sequence
  Description of Artificial Sequence: Synthetic oligonucleotide
  Target: ATXN2; (-) strand; PAM type: YTN; PAM sequence: TTG
ccttggcctcccaaagtgtt

SEQ ID NO: 80647 - DNA, 20 bp, Artificial Sequence
  Description of Artificial Sequence: Synthetic oligonucleotide
  Target: ATXN2; (-) strand; PAM type: YTN; PAM sequence: CTT
gccttggcctcccaaagtgt

SEQ ID NO: 80648 - DNA, 20 bp, Artificial Sequence
  Description of Artificial Sequence: Synthetic oligonucleotide
  Target: ATXN2; (-) strand; PAM type: YTN; PAM sequence: CTC
ttgccttggcctcccaaagt

SEQ ID NO: 80649 - DNA, 20 bp, Artificial Sequence
  Description of Artificial Sequence: Synthetic oligonucleotide
  Target: ATXN2; (-) strand; PAM type: YTN; PAM sequence: CTC
aagtgaaactcttgccttgg

SEQ ID NO: 80650 - DNA, 20 bp, Artificial Sequence
  Description of Artificial Sequence: Synthetic oligonucleotide
  Target: ATXN2; (-) strand; PAM type: YTN; PAM sequence: CTG
ggctcaagtgaaactcttgc

SEQ ID NO: 80651 - DNA, 20 bp, Artificial Sequence
  Description of Artificial Sequence: Synthetic oligonucleotide
  Target: ATXN2; (-) strand; PAM type: YTN; PAM sequence: CTC
ctgggctcaagtgaaactct

SEQ ID NO: 80652 - DNA, 20 bp, Artificial Sequence
  Description of Artificial Sequence: Synthetic oligonucleotide
  Target: ATXN2; (-) strand; PAM type: YTN; PAM sequence: CTG
gtgtcaaactcctgggctca

SEQ ID NO: 80653 - DNA, 20 bp, Artificial Sequence
  Description of Artificial Sequence: Synthetic oligonucleotide
  Target: ATXN2; (-) strand; PAM type: YTN; PAM sequence: TTG
cccaggctggtgtcaaactc

SEQ ID NO: 80654 - DNA, 20 bp, Artificial Sequence
  Description of Artificial Sequence: Synthetic oligonucleotide
  Target: ATXN2; (-) strand; PAM type: YTN; PAM sequence: CTG
ttgcccaggctggtgtcaaa

SEQ ID NO: 80655 - DNA, 20 bp, Artificial Sequence
  Description of Artificial Sequence: Synthetic oligonucleotide
  Target: ATXN2; (-) strand; PAM type: YTN; PAM sequence: CTC
tgttgcccaggctggtgtca

SEQ ID NO: 80656 - DNA, 20 bp, Artificial Sequence
  Description of Artificial Sequence: Synthetic oligonucleotide
  Target: ATXN2; (-) strand; PAM type: YTN; PAM sequence: TTG
ctctgttgcccaggctggtg

SEQ ID NO: 80657 - DNA, 20 bp, Artificial Sequence
  Description of Artificial Sequence: Synthetic oligonucleotide
  Target: ATXN2; (-) strand; PAM type: YTN; PAM sequence: CTT
gctctgttgcccaggctggt

SEQ ID NO: 80658 - DNA, 20 bp, Artificial Sequence
  Description of Artificial Sequence: Synthetic oligonucleotide
  Target: ATXN2; (-) strand; PAM type: YTN; PAM sequence: TTC
ggagataggatcttgctctg

SEQ ID NO: 80659 - DNA, 20 bp, Artificial Sequence
  Description of Artificial Sequence: Synthetic oligonucleotide
  Target: ATXN2; (-) strand; PAM type: YTN; PAM sequence: TTT
cggagataggatcttgctct

SEQ ID NO: 80660 - DNA, 20 bp, Artificial Sequence
  Description of Artificial Sequence: Synthetic oligonucleotide
  Target: ATXN2; (-) strand; PAM type: YTN; PAM sequence: TTT
tcggagataggatcttgctc

SEQ ID NO: 80661 - DNA, 20 bp, Artificial Sequence
  Description of Artificial Sequence: Synthetic oligonucleotide
  Target: ATXN2; (-) strand; PAM type: YTN; PAM sequence: TTT
ttcggagataggatcttgct

SEQ ID NO: 80662 - DNA, 20 bp, Artificial Sequence
  Description of Artificial Sequence: Synthetic oligonucleotide
  Target: ATXN2; (-) strand; PAM type: YTN; PAM sequence: TTA
atttttcggagataggatct

SEQ ID NO: 80663 - DNA, 20 bp, Artificial Sequence
  Description of Artificial Sequence: Synthetic oligonucleotide
  Target: ATXN2; (-) strand; PAM type: YTN; PAM sequence: TTT
aatttttcggagataggatc

SEQ ID NO: 80664 - DNA, 20 bp, Artificial Sequence
  Description of Artificial Sequence: Synthetic oligonucleotide
  Target: ATXN2; (-) strand; PAM type: YTN; PAM sequence: TTT
taatttttcggagataggat

SEQ ID NO: 80665 - DNA, 20 bp, Artificial Sequence
  Description of Artificial Sequence: Synthetic oligonucleotide
  Target: ATXN2; (-) strand; PAM type: YTN; PAM sequence: TTT
ttaatttttcggagatagga

SEQ ID NO: 80666 - DNA, 20 bp, Artificial Sequence
  Description of Artificial Sequence: Synthetic oligonucleotide
  Target: ATXN2; (-) strand; PAM type: YTN; PAM sequence: TTA
tttttaatttttcggagata

SEQ ID NO: 80667 - DNA, 20 bp, Artificial Sequence
  Description of Artificial Sequence: Synthetic oligonucleotide
  Target: ATXN2; (-) strand; PAM type: YTN; PAM sequence: CTT
atttttaatttttcggagat

SEQ ID NO: 80668 - DNA, 20 bp, Artificial Sequence
  Description of Artificial Sequence: Synthetic oligonucleotide
  Target: ATXN2; (-) strand; PAM type: YTN; PAM sequence: TTC
ttatttttaatttttcggag

SEQ ID NO: 80669 - DNA, 20 bp, Artificial Sequence
  Description of Artificial Sequence: Synthetic oligonucleotide
  Target: ATXN2; (-) strand; PAM type: YTN; PAM sequence: TTT
cttatttttaatttttcgga

SEQ ID NO: 80670 - DNA, 20 bp, Artificial Sequence
  Description of Artificial Sequence: Synthetic oligonucleotide
  Target: ATXN2; (-) strand; PAM type: YTN; PAM sequence: TTT
tcttatttttaatttttcgg

SEQ ID NO: 80671 - DNA, 20 bp, Artificial Sequence
  Description of Artificial Sequence: Synthetic oligonucleotide
  Target: ATXN2; (-) strand; PAM type: YTN; PAM sequence: CTT
ttcttatttttaatttttcg

SEQ ID NO: 80672 - DNA, 20 bp, Artificial Sequence
  Description of Artificial Sequence: Synthetic oligonucleotide
  Target: ATXN2; (-) strand; PAM type: YTN; PAM sequence: TTA
cttttcttatttttaatttt

SEQ ID NO: 80673 - DNA, 20 bp, Artificial Sequence
  Description of Artificial Sequence: Synthetic oligonucleotide
  Target: ATXN2; (-) strand; PAM type: YTN; PAM sequence: CTA
attacttttcttatttttaa

SEQ ID NO: 80674 - DNA, 20 bp, Artificial Sequence
  Description of Artificial Sequence: Synthetic oligonucleotide
  Target: ATXN2; (-) strand; PAM type: YTN; PAM sequence: CTA
caggtgtgtaccaccatgtc

SEQ ID NO: 80675 - DNA, 20 bp, Artificial Sequence
  Description of Artificial Sequence: Synthetic oligonucleotide
  Target: ATXN2; (-) strand; PAM type: YTN; PAM sequence: CTG
gggctacaggtgtgtaccac

SEQ ID NO: 80676 - DNA, 20 bp, Artificial Sequence
  Description of Artificial Sequence: Synthetic oligonucleotide
  Target: ATXN2; (-) strand; PAM type: YTN; PAM sequence: CTG
agtacctggggctacaggtg

SEQ ID NO: 80677 - DNA, 20 bp, Artificial Sequence
  Description of Artificial Sequence: Synthetic oligonucleotide
  Target: ATXN2; (-) strand; PAM type: YTN; PAM sequence: TTG
ctgagtacctggggctacag

SEQ ID NO: 80678 - DNA, 20 bp, Artificial Sequence
  Description of Artificial Sequence: Synthetic oligonucleotide
  Target: ATXN2; (-) strand; PAM type: YTN; PAM sequence: CTT
gctgagtacctggggctaca

SEQ ID NO: 80679 - DNA, 20 bp, Artificial Sequence
  Description of Artificial Sequence: Synthetic oligonucleotide
  Target: ATXN2; (-) strand; PAM type: YTN; PAM sequence: CTC
agcttgctgagtacctgggg

SEQ ID NO: 80680 - DNA, 20 bp, Artificial Sequence
  Description of Artificial Sequence: Synthetic oligonucleotide
  Target: ATXN2; (-) strand; PAM type: YTN; PAM sequence: CTC
aagcaatcatcccatcatcc

SEQ ID NO: 80681 - DNA, 20 bp, Artificial Sequence
  Description of Artificial Sequence: Synthetic oligonucleotide
  Target: ATXN2; (-) strand; PAM type: YTN; PAM sequence: TTG
ggctcaagcaatcatcccat

SEQ ID NO: 80682 - DNA, 20 bp, Artificial Sequence
  Description of Artificial Sequence: Synthetic oligonucleotide
  Target: ATXN2; (-) strand; PAM type: YTN; PAM sequence: CTT
gggctcaagcaatcatccca

SEQ ID NO: 80683 - DNA, 20 bp, Artificial Sequence
  Description of Artificial Sequence: Synthetic oligonucleotide
  Target: ATXN2; (-) strand; PAM type: YTN; PAM sequence: TTC
ttgggctcaagcaatcatcc

SEQ ID NO: 80684 - DNA, 20 bp, Artificial Sequence
  Description of Artificial Sequence: Synthetic oligonucleotide
  Target: ATXN2; (-) strand; PAM type: YTN; PAM sequence: CTC
gaattcttgggctcaagcaa

SEQ ID NO: 80685 - DNA, 20 bp, Artificial Sequence
  Description of Artificial Sequence: Synthetic oligonucleotide
  Target: ATXN2; (-) strand; PAM type: YTN; PAM sequence: CTG
tgtaacctcgaattcttggg

SEQ ID NO: 80686 - DNA, 20 bp, Artificial Sequence
  Description of Artificial Sequence: Synthetic oligonucleotide
  Target: ATXN2; (-) strand; PAM type: YTN; PAM sequence: CTG
taactgtgtaacctcgaatt

SEQ ID NO: 80687 - DNA, 20 bp, Artificial Sequence
  Description of Artificial Sequence: Synthetic oligonucleotide
  Target: ATXN2; (-) strand; PAM type: YTN; PAM sequence: TTA
ctgtaactgtgtaacctcga

SEQ ID NO: 80688 - DNA, 20 bp, Artificial Sequence
  Description of Artificial Sequence: Synthetic oligonucleotide
  Target: ATXN2; (-) strand; PAM type: YTN; PAM sequence: CTT
actgtaactgtgtaacctcg

SEQ ID NO: 80689 - DNA, 20 bp, Artificial Sequence
  Description of Artificial Sequence: Synthetic oligonucleotide
  Target: ATXN2; (-) strand; PAM type: YTN; PAM sequence: CTC
agggtggagtgtagtggcac

SEQ ID NO: 80690 - DNA, 20 bp, Artificial Sequence
  Description of Artificial Sequence: Synthetic oligonucleotide
  Target: ATXN2; (-) strand; PAM type: YTN; PAM sequence: TTG
ctcagggtggagtgtagtgg

SEQ ID NO: 80691 - DNA, 20 bp, Artificial Sequence
  Description of Artificial Sequence: Synthetic oligonucleotide
  Target: ATXN2; (-) strand; PAM type: YTN; PAM sequence: CTG
ttgctcagggtggagtgtag

SEQ ID NO: 80692 - DNA, 20 bp, Artificial Sequence
  Description of Artificial Sequence: Synthetic oligonucleotide
  Target: ATXN2; (-) strand; PAM type: YTN; PAM sequence: CTC
tgttgctcagggtggagtgt

SEQ ID NO: 80693 - DNA, 20 bp, Artificial Sequence
  Description of Artificial Sequence: Synthetic oligonucleotide
  Target: ATXN2; (-) strand; PAM type: YTN; PAM sequence: TTC
ctctgttgctcagggtggag

SEQ ID NO: 80694 - DNA, 20 bp, Artificial Sequence
  Description of Artificial Sequence: Synthetic oligonucleotide
  Target: ATXN2; (-) strand; PAM type: YTN; PAM sequence: CTT
cctctgttgctcagggtgga

SEQ ID NO: 80695 - DNA, 20 bp, Artificial Sequence
  Description of Artificial Sequence: Synthetic oligonucleotide
  Target: ATXN2; (-) strand; PAM type: YTN; PAM sequence: TTG
gagacagaatcttcctctgt

SEQ ID NO: 80696 - DNA, 20 bp, Artificial Sequence
  Description of Artificial Sequence: Synthetic oligonucleotide
  Target: ATXN2; (-) strand; PAM type: YTN; PAM sequence: TTT
ggagacagaatcttcctctg

SEQ ID NO: 80697 - DNA, 20 bp, Artificial Sequence
  Description of Artificial Sequence: Synthetic oligonucleotide
  Target: ATXN2; (-) strand; PAM type: YTN; PAM sequence: TTT
tggagacagaatcttcctct

SEQ ID NO: 80698 - DNA, 20 bp, Artificial Sequence
  Description of Artificial Sequence: Synthetic oligonucleotide
  Target: ATXN2; (-) strand; PAM type: YTN; PAM sequence: TTT
ttggagacagaatcttcctc

SEQ ID NO: 80699 - DNA, 20 bp, Artificial Sequence
  Description of Artificial Sequence: Synthetic oligonucleotide
  Target: ATXN2; (-) strand; PAM type: YTN; PAM sequence: TTT
tttggagacagaatcttcct

SEQ ID NO: 80700 - DNA, 20 bp, Artificial Sequence
  Description of Artificial Sequence: Synthetic oligonucleotide
  Target: ATXN2; (-) strand; PAM type: YTN; PAM sequence: CTT
ttttggagacagaatcttcc

SEQ ID NO: 80701 - DNA, 20 bp, Artificial Sequence
  Description of Artificial Sequence: Synthetic oligonucleotide
  Target: ATXN2; (-) strand; PAM type: YTN; PAM sequence: TTC
ttttttggagacagaatctt

SEQ ID NO: 80702 - DNA, 20 bp, Artificial Sequence
  Description of Artificial Sequence: Synthetic oligonucleotide
  Target: ATXN2; (-) strand; PAM type: YTN; PAM sequence: TTT
cttttttggagacagaatct

SEQ ID NO: 80703 - DNA, 20 bp, Artificial Sequence
  Description of Artificial Sequence: Synthetic oligonucleotide
  Target: ATXN2; (-) strand; PAM type: YTN; PAM sequence: TTT
tcttttttggagacagaatc

SEQ ID NO: 80704 - DNA, 20 bp, Artificial Sequence
  Description of Artificial Sequence: Synthetic oligonucleotide
  Target: ATXN2; (-) strand; PAM type: YTN; PAM sequence: TTT
ttcttttttggagacagaat

SEQ ID NO: 80705 - DNA, 20 bp, Artificial Sequence
  Description of Artificial Sequence: Synthetic oligonucleotide
  Target: ATXN2; (-) strand; PAM type: YTN; PAM sequence: TTT
tttcttttttggagacagaa

SEQ ID NO: 80706 - DNA, 20 bp, Artificial Sequence
  Description of Artificial Sequence: Synthetic oligonucleotide
  Target: ATXN2; (-) strand; PAM type: YTN; PAM sequence: TTT
ttttcttttttggagacaga

SEQ ID NO: 80707 - DNA, 20 bp, Artificial Sequence
  Description of Artificial Sequence: Synthetic oligonucleotide
  Target: ATXN2; (-) strand; PAM type: YTN; PAM sequence: TTT
tttttcttttttggagacag

SEQ ID NO: 80708 - DNA, 20 bp, Artificial Sequence
  Description of Artificial Sequence: Synthetic oligonucleotide
  Target: ATXN2; (-) strand; PAM type: YTN; PAM sequence: TTT
ttttttcttttttggagaca

SEQ ID NO: 80709 - DNA, 20 bp, Artificial Sequence
  Description of Artificial Sequence: Synthetic oligonucleotide
  Target: ATXN2; (-) strand; PAM type: YTN; PAM sequence: TTT
tttttttcttttttggagac

SEQ ID NO: 80710 - DNA, 20 bp, Artificial Sequence
  Description of Artificial Sequence: Synthetic oligonucleotide
  Target: ATXN2; (-) strand; PAM type: YTN; PAM sequence: TTT
ttttttttcttttttggaga

SEQ ID NO: 80711 - DNA, 20 bp, Artificial Sequence
  Description of Artificial Sequence: Synthetic oligonucleotide
  Target: ATXN2; (-) strand; PAM type: YTN; PAM sequence: TTT
tttttttttcttttttggag

SEQ ID NO: 80712 - DNA, 20 bp, Artificial Sequence
  Description of Artificial Sequence: Synthetic oligonucleotide
  Target: ATXN2; (-) strand; PAM type: YTN; PAM sequence: TTT
ttttttttttcttttttgga

SEQ ID NO: 80713 - DNA, 20 bp, Artificial Sequence
  Description of Artificial Sequence: Synthetic oligonucleotide
  Target: ATXN2; (-) strand; PAM type: YTN; PAM sequence: TTT
tttttttttttcttttttgg

SEQ ID NO: 80714 - DNA, 20 bp, Artificial Sequence
  Description of Artificial Sequence: Synthetic oligonucleotide
  Target: ATXN2; (-) strand; PAM type: YTN; PAM sequence: CTT
ttttttttttttcttttttg

SEQ ID NO: 80715 - DNA, 20 bp, Artificial Sequence
  Description of Artificial Sequence: Synthetic oligonucleotide
  Target: ATXN2; (-) strand; PAM type: YTN; PAM sequence: TTG
tcatcttttttttttttttc

SEQ ID NO: 80716 - DNA, 20 bp, Artificial Sequence
  Description of Artificial Sequence: Synthetic oligonucleotide
  Target: ATXN2; (-) strand; PAM type: YTN; PAM sequence: TTC
cgttgtcatctttttttttt

SEQ ID NO: 80717 - DNA, 20 bp, Artificial Sequence
  Description of Artificial Sequence: Synthetic oligonucleotide
  Target: ATXN2; (-) strand; PAM type: YTN; PAM sequence: CTC
ccgttccgttgtcatctttt

SEQ ID NO: 80718 - DNA, 20 bp, Artificial Sequence
  Description of Artificial Sequence: Synthetic oligonucleotide
  Target: ATXN2; (-) strand; PAM type: YTN; PAM sequence: CTA
cacccacctcccgttccgtt

SEQ ID NO: 80719 - DNA, 20 bp, Artificial Sequence
  Description of Artificial Sequence: Synthetic oligonucleotide
  Target: ATXN2; (-) strand; PAM type: YTN; PAM sequence: CTG
ggactacacccacctcccgt

SEQ ID NO: 80720 - DNA, 20 bp, Artificial Sequence
  Description of Artificial Sequence: Synthetic oligonucleotide
  Target: ATXN2; (-) strand; PAM type: YTN; PAM sequence: TTA
gtagctgggactacacccac

SEQ ID NO: 80721 - DNA, 20 bp, Artificial Sequence
  Description of Artificial Sequence: Synthetic oligonucleotide
  Target: ATXN2; (-) strand; PAM type: YTN; PAM sequence: CTT
agtagctgggactacaccca

SEQ ID NO: 80722 - DNA, 20 bp, Artificial Sequence
  Description of Artificial Sequence: Synthetic oligonucleotide
  Target: ATXN2; (-) strand; PAM type: YTN; PAM sequence: CTC
cttagtagctgggactacac

SEQ ID NO: 80723 - DNA, 20 bp, Artificial Sequence
  Description of Artificial Sequence: Synthetic oligonucleotide
  Target: ATXN2; (-) strand; PAM type: YTN; PAM sequence: CTG
cctccttagtagctgggact

SEQ ID NO: 80724 - DNA, 20 bp, Artificial Sequence
  Description of Artificial Sequence: Synthetic oligonucleotide
  Target: ATXN2; (-) strand; PAM type: YTN; PAM sequence: TTC
tgcctccttagtagctggga

SEQ ID NO: 80725 - DNA, 20 bp, Artificial Sequence
  Description of Artificial Sequence: Synthetic oligonucleotide
  Target: ATXN2; (-) strand; PAM type: YTN; PAM sequence: CTG
agcccagatgattctgcctc

SEQ ID NO: 80726 - DNA, 20 bp, Artificial Sequence
  Description of Artificial Sequence: Synthetic oligonucleotide
  Target: ATXN2; (-) strand; PAM type: YTN; PAM sequence: CTC
ctgagcccagatgattctgc

SEQ ID NO: 80727 - DNA, 20 bp, Artificial Sequence
  Description of Artificial Sequence: Synthetic oligonucleotide
  Target: ATXN2; (-) strand; PAM type: YTN; PAM sequence: TTG
aactcctgagcccagatgat

SEQ ID NO: 80728 - DNA, 20 bp, Artificial Sequence
  Description of Artificial Sequence: Synthetic oligonucleotide
  Target: ATXN2; (-) strand; PAM type: YTN; PAM sequence: CTT
gaactcctgagcccagatga

SEQ ID NO: 80729 - DNA, 20 bp, Artificial Sequence
  Description of Artificial Sequence: Synthetic oligonucleotide
  Target: ATXN2; (-) strand; PAM type: YTN; PAM sequence: CTG
accttgaactcctgagccca

SEQ ID NO: 80730 - DNA, 20 bp, Artificial Sequence
  Description of Artificial Sequence: Synthetic oligonucleotide
  Target: ATXN2; (-) strand; PAM type: YTN; PAM sequence: CTG
aggctgaccttgaactcctg

SEQ ID NO: 80731 - DNA, 20 bp, Artificial Sequence
  Description of Artificial Sequence: Synthetic oligonucleotide
  Target: ATXN2; (-) strand; PAM type: YTN; PAM sequence: TTG
ctgaggctgaccttgaactc

SEQ ID NO: 80732 - DNA, 20 bp, Artificial Sequence
  Description of Artificial Sequence: Synthetic oligonucleotide
  Target: ATXN2; (-) strand; PAM type: YTN; PAM sequence: TTA
tgttgctgaggctgaccttg

SEQ ID NO: 80733 - DNA, 20 bp, Artificial Sequence
  Description of Artificial Sequence: Synthetic oligonucleotide
  Target: ATXN2; (-) strand; PAM type: YTN; PAM sequence: CTT
atgttgctgaggctgacctt

SEQ ID NO: 80734 - DNA, 20 bp, Artificial Sequence
  Description of Artificial Sequence: Synthetic oligonucleotide
  Target: ATXN2; (-) strand; PAM type: YTN; PAM sequence: CTC
cttatgttgctgaggctgac

SEQ ID NO: 80735 - DNA, 20 bp, Artificial Sequence
  Description of Artificial Sequence: Synthetic oligonucleotide
  Target: ATXN2; (-) strand; PAM type: YTN; PAM sequence: CTA
agagacagggtctccttatg

SEQ ID NO: 80736 - DNA, 20 bp, Artificial Sequence
  Description of Artificial Sequence: Synthetic oligonucleotide
  Target: ATXN2; (-) strand; PAM type: YTN; PAM sequence: TTC
ctaagagacagggtctcctt

SEQ ID NO: 80737 - DNA, 20 bp, Artificial Sequence
  Description of Artificial Sequence: Synthetic oligonucleotide
  Target: ATXN2; (-) strand; PAM type: YTN; PAM sequence: TTG
ttcctaagagacagggtctc

SEQ ID NO: 80738 - DNA, 20 bp, Artificial Sequence
  Description of Artificial Sequence: Synthetic oligonucleotide
  Target: ATXN2; (-) strand; PAM type: YTN; PAM sequence: TTT
gttcctaagagacagggtct

SEQ ID NO: 80739 - DNA, 20 bp, Artificial Sequence
  Description of Artificial Sequence: Synthetic oligonucleotide
  Target: ATXN2; (-) strand; PAM type: YTN; PAM sequence: TTT
tgttcctaagagacagggtc

SEQ ID NO: 80740 - DNA, 20 bp, Artificial Sequence
  Description of Artificial Sequence: Synthetic oligonucleotide
  Target: ATXN2; (-) strand; PAM type: YTN; PAM sequence: CTT
ttgttcctaagagacagggt

SEQ ID NO: 80741 - DNA, 20 bp, Artificial Sequence
  Description of Artificial Sequence: Synthetic oligonucleotide
  Target: ATXN2; (-) strand; PAM type: YTN; PAM sequence: CTC
cccttttgttcctaagagac

SEQ ID NO: 80742 - DNA, 20 bp, Artificial Sequence
  Description of Artificial Sequence: Synthetic oligonucleotide
  Target: ATXN2; (-) strand; PAM type: YTN; PAM sequence: CTC
cccctccccttttgttccta

SEQ ID NO: 80743 - DNA, 20 bp, Artificial Sequence
  Description of Artificial Sequence: Synthetic oligonucleotide
  Target: ATXN2; (-) strand; PAM type: YTN; PAM sequence: CTC
tccccctccccttttgttcc

SEQ ID NO: 80744 - DNA, 20 bp, Artificial Sequence
  Description of Artificial Sequence: Synthetic oligonucleotide
  Target: ATXN2; (-) strand; PAM type: YTN; PAM sequence: CTC
tctccccctccccttttgtt

SEQ ID NO: 80745 - DNA, 20 bp, Artificial Sequence
  Description of Artificial Sequence: Synthetic oligonucleotide
  Target: ATXN2; (-) strand; PAM type: YTN; PAM sequence: TTC
tctctccccctccccttttg

SEQ ID NO: 80746 - DNA, 20 bp, Artificial Sequence
  Description of Artificial Sequence: Synthetic oligonucleotide
  Target: ATXN2; (-) strand; PAM type: YTN; PAM sequence: CTT
ctctctccccctcccctttt

SEQ ID NO: 80747 - DNA, 20 bp, Artificial Sequence
  Description of Artificial Sequence: Synthetic oligonucleotide
  Target: ATXN2; (-) strand; PAM type: YTN; PAM sequence: CTC
cccttctctctccccctccc

SEQ ID NO: 80748 - DNA, 20 bp, Artificial Sequence
  Description of Artificial Sequence: Synthetic oligonucleotide
  Target: ATXN2; (-) strand; PAM type: YTN; PAM sequence: CTC
cctccccttctctctccccc

SEQ ID NO: 80749 - DNA, 20 bp, Artificial Sequence
  Description of Artificial Sequence: Synthetic oligonucleotide
  Target: ATXN2; (-) strand; PAM type: YTN; PAM sequence: CTC
cccccctccctccccttctc

SEQ ID NO: 80750 - DNA, 20 bp, Artificial Sequence
  Description of Artificial Sequence: Synthetic oligonucleotide
  Target: ATXN2; (-) strand; PAM type: YTN; PAM sequence: CTC
tccccccctccctccccttc

SEQ ID NO: 80751 - DNA, 20 bp, Artificial Sequence
  Description of Artificial Sequence: Synthetic oligonucleotide
  Target: ATXN2; (-) strand; PAM type: YTN; PAM sequence: CTC
tctccccccctccctcccct

SEQ ID NO: 80752 - DNA, 20 bp, Artificial Sequence
  Description of Artificial Sequence: Synthetic oligonucleotide
  Target: ATXN2; (-) strand; PAM type: YTN; PAM sequence: TTC
tctctccccccctccctccc

SEQ ID NO: 80753 - DNA, 20 bp, Artificial Sequence
  Description of Artificial Sequence: Synthetic oligonucleotide
  Target: ATXN2; (-) strand; PAM type: YTN; PAM sequence: CTT
ctctctccccccctccctcc

SEQ ID NO: 80754 - DNA, 20 bp, Artificial Sequence
  Description of Artificial Sequence: Synthetic oligonucleotide
  Target: ATXN2; (-) strand; PAM type: YTN; PAM sequence: CTC
cccttctctctccccccctc

SEQ ID NO: 80755 - DNA, 20 bp, Artificial Sequence
  Description of Artificial Sequence: Synthetic oligonucleotide
  Target: ATXN2; (-) strand; PAM type: YTN; PAM sequence: CTC
cctccccttctctctccccc

SEQ ID NO: 80756 - DNA, 20 bp, Artificial Sequence
  Description of Artificial Sequence: Synthetic oligonucleotide
  Target: ATXN2; (-) strand; PAM type: YTN; PAM sequence: CTC
cctccctccccttctctctc

SEQ ID NO: 80757 - DNA, 20 bp, Artificial Sequence
  Description of Artificial Sequence: Synthetic oligonucleotide
  Target: ATXN2; (-) strand; PAM type: YTN; PAM sequence: CTC
cctccctccctccccttctc

SEQ ID NO: 80758 - DNA, 20 bp, Artificial Sequence
  Description of Artificial Sequence: Synthetic oligonucleotide
  Target: ATXN2; (-) strand; PAM type: YTN; PAM sequence: CTC
tccctccctccctccccttc

SEQ ID NO: 80759 - DNA, 20 bp, Artificial Sequence
  Description of Artificial Sequence: Synthetic oligonucleotide
  Target: ATXN2; (-) strand; PAM type: YTN; PAM sequence: CTC
tctccctccctccctcccct

SEQ ID NO: 80760 - DNA, 20 bp, Artificial Sequence
  Description of Artificial Sequence: Synthetic oligonucleotide
  Target: ATXN2; (-) strand; PAM type: YTN; PAM sequence: TTC
ctctctccctccctccctcc

SEQ ID NO: 80761 - DNA, 20 bp, Artificial Sequence
  Description of Artificial Sequence: Synthetic oligonucleotide
  Target: ATXN2; (-) strand; PAM type: YTN; PAM sequence: CTT
cctctctccctccctccctc

SEQ ID NO: 80762 - DNA, 20 bp, Artificial Sequence
  Description of Artificial Sequence: Synthetic oligonucleotide
  Target: ATXN2; (-) strand; PAM type: YTN; PAM sequence: CTC
ccaacccttcctctctccct

SEQ ID NO: 80763 - DNA, 20 bp, Artificial Sequence
  Description of Artificial Sequence: Synthetic oligonucleotide
  Target: ATXN2; (-) strand; PAM type: YTN; PAM sequence: CTC
tcccaacccttcctctctcc

SEQ ID NO: 80764 - DNA, 20 bp, Artificial Sequence
  Description of Artificial Sequence: Synthetic oligonucleotide
  Target: ATXN2; (-) strand; PAM type: YTN; PAM sequence: CTG
tctctcccaacccttcctct

SEQ ID NO: 80765 - DNA, 20 bp, Artificial Sequence
  Description of Artificial Sequence: Synthetic oligonucleotide
  Target: ATXN2; (-) strand; PAM type: YTN; PAM sequence: CTC
tgtctctcccaacccttcct

SEQ ID NO: 80766 - DNA, 20 bp, Artificial Sequence
  Description of Artificial Sequence: Synthetic oligonucleotide
  Target: ATXN2; (-) strand; PAM type: YTN; PAM sequence: TTC
tctgtctctcccaacccttc

SEQ ID NO: 80767 - DNA, 20 bp, Artificial Sequence
  Description of Artificial Sequence: Synthetic oligonucleotide
  Target: ATXN2; (-) strand; PAM type: YTN; PAM sequence: TTT
ctctgtctctcccaaccctt

SEQ ID NO: 80768 - DNA, 20 bp, Artificial Sequence
  Description of Artificial Sequence: Synthetic oligonucleotide
  Target: ATXN2; (-) strand; PAM type: YTN; PAM sequence: CTT
tctctgtctctcccaaccct

SEQ ID NO: 80769 - DNA, 20 bp, Artificial Sequence
  Description of Artificial Sequence: Synthetic oligonucleotide
  Target: ATXN2; (-) strand; PAM type: YTN; PAM sequence: TTC
tttctctgtctctcccaacc

SEQ ID NO: 80770 - DNA, 20 bp, Artificial Sequence
  Description of Artificial Sequence: Synthetic oligonucleotide
  Target: ATXN2; (-) strand; PAM type: YTN; PAM sequence: TTT
ctttctctgtctctcccaac

SEQ ID NO: 80771 - DNA, 20 bp, Artificial Sequence
  Description of Artificial Sequence: Synthetic oligonucleotide
  Target: ATXN2; (-) strand; PAM type: YTN; PAM sequence: TTT
tctttctctgtctctcccaa

SEQ ID NO: 80772 - DNA, 20 bp, Artificial Sequence
  Description of Artificial Sequence: Synthetic oligonucleotide
  Target: ATXN2; (-) strand; PAM type: YTN; PAM sequence: TTT
ttctttctctgtctctccca

SEQ ID NO: 80773 - DNA, 20 bp, Artificial Sequence
  Description of Artificial Sequence: Synthetic oligonucleotide
  Target: ATXN2; (-) strand; PAM type: YTN; PAM sequence: CTT
tttctttctctgtctctccc

SEQ ID NO: 80774 - DNA, 20 bp, Artificial Sequence
  Description of Artificial Sequence: Synthetic oligonucleotide
  Target: ATXN2; (-) strand; PAM type: YTN; PAM sequence: TTC
tttttctttctctgtctctc

SEQ ID NO: 80775 - DNA, 20 bp, Artificial Sequence
  Description of Artificial Sequence: Synthetic oligonucleotide
  Target: ATXN2; (-) strand; PAM type: YTN; PAM sequence: TTT
ctttttctttctctgtctct

SEQ ID NO: 80776 - DNA, 20 bp, Artificial Sequence
  Description of Artificial Sequence: Synthetic oligonucleotide
  Target: ATXN2; (-) strand; PAM type: YTN; PAM sequence: CTT
tctttttctttctctgtctc

SEQ ID NO: 80777 - DNA, 20 bp, Artificial Sequence
  Description of Artificial Sequence: Synthetic oligonucleotide
  Target: ATXN2; (-) strand; PAM type: YTN; PAM sequence: TTC
ctttctttttctttctctgt

SEQ ID NO: 80778 - DNA, 20 bp, Artificial Sequence
  Description of Artificial Sequence: Synthetic oligonucleotide
  Target: ATXN2; (-) strand; PAM type: YTN; PAM sequence: TTT
cctttctttttctttctctg

SEQ ID NO: 80779 - DNA, 20 bp, Artificial Sequence
  Description of Artificial Sequence: Synthetic oligonucleotide
  Target: ATXN2; (-) strand; PAM type: YTN; PAM sequence: TTT
tcctttctttttctttctct

SEQ ID NO: 80780 - DNA, 20 bp, Artificial Sequence
  Description of Artificial Sequence: Synthetic oligonucleotide
  Target: ATXN2; (-) strand; PAM type: YTN; PAM sequence: TTT
ttcctttctttttctttctc

SEQ ID NO: 80781 - DNA, 20 bp, Artificial Sequence
  Description of Artificial Sequence: Synthetic oligonucleotide
  Target: ATXN2; (-) strand; PAM type: YTN; PAM sequence: TTT
tttcctttctttttctttct

SEQ ID NO: 80782 - DNA, 20 bp, Artificial Sequence
  Description of Artificial Sequence: Synthetic oligonucleotide
  Target: ATXN2; (-) strand; PAM type: YTN; PAM sequence: TTA
ttttttcctttctttttctt

SEQ ID NO: 80783 - DNA, 20 bp, Artificial Sequence
  Description of Artificial Sequence: Synthetic oligonucleotide
  Target: ATXN2; (-) strand; PAM type: YTN; PAM sequence: TTT
attttttcctttctttttct

SEQ ID NO: 80784 - DNA, 20 bp, Artificial Sequence
  Description of Artificial Sequence: Synthetic oligonucleotide
  Target: ATXN2; (-) strand; PAM type: YTN; PAM sequence: TTT
tattttttcctttctttttc

SEQ ID NO: 80785 - DNA, 20 bp, Artificial Sequence
  Description of Artificial Sequence: Synthetic oligonucleotide
  Target: ATXN2; (-) strand; PAM type: YTN; PAM sequence: TTT
ttattttttcctttcttttt

SEQ ID NO: 80786 - DNA, 20 bp, Artificial Sequence
  Description of Artificial Sequence: Synthetic oligonucleotide
  Target: ATXN2; (-) strand; PAM type: YTN; PAM sequence: CTT
tttattttttcctttctttt

SEQ ID NO: 80787 - DNA, 20 bp, Artificial Sequence
  Description of Artificial Sequence: Synthetic oligonucleotide
  Target: ATXN2; (-) strand; PAM type: YTN; PAM sequence: CTC
ctttttattttttcctttct

SEQ ID NO: 80788 - DNA, 20 bp, Artificial Sequence
  Description of Artificial Sequence: Synthetic oligonucleotide
  Target: ATXN2; (-) strand; PAM type: YTN; PAM sequence: CTC
tcctttttattttttccttt

SEQ ID NO: 80789 - DNA, 20 bp, Artificial Sequence
  Description of Artificial Sequence: Synthetic oligonucleotide
  Target: ATXN2; (-) strand; PAM type: YTN; PAM sequence: TTC
tctcctttttattttttcct

SEQ ID NO: 80790 - DNA, 20 bp, Artificial Sequence
  Description of Artificial Sequence: Synthetic oligonucleotide
  Target: ATXN2; (-) strand; PAM type: YTN; PAM sequence: TTT
ctctcctttttattttttcc

SEQ ID NO: 80791 - DNA, 20 bp, Artificial Sequence
  Description of Artificial Sequence: Synthetic oligonucleotide
  Target: ATXN2; (-) strand; PAM type: YTN; PAM sequence: CTT
tctctcctttttattttttc

SEQ ID NO: 80792 - DNA, 20 bp, Artificial Sequence
  Description of Artificial Sequence: Synthetic oligonucleotide
  Target: ATXN2; (-) strand; PAM type: YTN; PAM sequence: TTC
ctttctctcctttttatttt

SEQ ID NO: 80793 - DNA, 20 bp, Artificial Sequence
  Description of Artificial Sequence: Synthetic oligonucleotide
  Target: ATXN2; (-) strand; PAM type: YTN; PAM sequence: CTT
cctttctctcctttttattt

SEQ ID NO: 80794 - DNA, 20 bp, Artificial Sequence
  Description of Artificial Sequence: Synthetic oligonucleotide
  Target: ATXN2; (-) strand; PAM type: YTN; PAM sequence: TTC
cttcctttctctccttttta

SEQ ID NO: 80795 - DNA, 20 bp, Artificial Sequence
  Description of Artificial Sequence: Synthetic oligonucleotide
  Target: ATXN2; (-) strand; PAM type: YTN; PAM sequence: TTT
ccttcctttctctccttttt

SEQ ID NO: 80796 - DNA, 20 bp, Artificial Sequence
  Description of Artificial Sequence: Synthetic oligonucleotide
  Target: ATXN2; (-) strand; PAM type: YTN; PAM sequence: CTT
tccttcctttctctcctttt

SEQ ID NO: 80797 - DNA, 20 bp, Artificial Sequence
  Description of Artificial Sequence: Synthetic oligonucleotide
  Target: ATXN2; (-) strand; PAM type: YTN; PAM sequence: TTC
tttccttcctttctctcctt

SEQ ID NO: 80798 - DNA, 20 bp, Artificial Sequence
  Description of Artificial Sequence: Synthetic oligonucleotide
  Target: ATXN2; (-) strand; PAM type: YTN; PAM sequence: CTT
ctttccttcctttctctcct

SEQ ID NO: 80799 - DNA, 20 bp, Artificial Sequence
  Description of Artificial Sequence: Synthetic oligonucleotide
  Target: ATXN2; (-) strand; PAM type: YTN; PAM sequence: TTC
ccttctttccttcctttctc

SEQ ID NO: 80800 - DNA, 20 bp, Artificial Sequence
  Description of Artificial Sequence: Synthetic oligonucleotide
  Target: ATXN2; (-) strand; PAM type: YTN; PAM sequence: CTT
cccttctttccttcctttct

SEQ ID NO: 80801 - DNA, 20 bp, Artificial Sequence
  Description of Artificial Sequence: Synthetic oligonucleotide
  Target: ATXN2; (-) strand; PAM type: YTN; PAM sequence: CTG
tcttcccttctttccttcct

SEQ ID NO: 80802 - DNA, 20 bp, Artificial Sequence
  Description of Artificial Sequence: Synthetic oligonucleotide
  Target: ATXN2; (-) strand; PAM type: YTN; PAM sequence: CTC
ctgtcttcccttctttcctt

SEQ ID NO: 80803 - DNA, 20 bp, Artificial Sequence
  Description of Artificial Sequence: Synthetic oligonucleotide
  Target: ATXN2; (-) strand; PAM type: YTN; PAM sequence: CTC
ctcctgtcttcccttctttc

SEQ ID NO: 80804 - DNA, 20 bp, Artificial Sequence
  Description of Artificial Sequence: Synthetic oligonucleotide
  Target: ATXN2; (-) strand; PAM type: YTN; PAM sequence: CTG
cctcctcctgtcttcccttc

SEQ ID NO: 80805 - DNA, 20 bp, Artificial Sequence
  Description of Artificial Sequence: Synthetic oligonucleotide
  Target: ATXN2; (-) strand; PAM type: YTN; PAM sequence: CTC
cccgctgcctcctcctgtct

SEQ ID NO: 80806 - DNA, 20 bp, Artificial Sequence
  Description of Artificial Sequence: Synthetic oligonucleotide
  Target: ATXN2; (-) strand; PAM type: YTN; PAM sequence: TTC
ccctccccgctgcctcctcc

SEQ ID NO: 80807 - DNA, 20 bp, Artificial Sequence
  Description of Artificial Sequence: Synthetic oligonucleotide
  Target: ATXN2; (-) strand; PAM type: YTN; PAM sequence: TTT
cccctccccgctgcctcctc

SEQ ID NO: 80808 - DNA, 20 bp, Artificial Sequence
  Description of Artificial Sequence: Synthetic oligonucleotide
  Target: ATXN2; (-) strand; PAM type: YTN; PAM sequence: TTT
tcccctccccgctgcctcct

SEQ ID NO: 80809 - DNA, 20 bp, Artificial Sequence
  Description of Artificial Sequence: Synthetic oligonucleotide
  Target: ATXN2; (-) strand; PAM type: YTN; PAM sequence: TTT
ttcccctccccgctgcctcc

SEQ ID NO: 80810 - DNA, 20 bp, Artificial Sequence
  Description of Artificial Sequence: Synthetic oligonucleotide
  Target: ATXN2; (-) strand; PAM type: YTN; PAM sequence: TTT
tttcccctccccgctgcctc

SEQ ID NO: 80811 - DNA, 20 bp, Artificial Sequence
  Description of Artificial Sequence: Synthetic oligonucleotide
  Target: ATXN2; (-) strand; PAM type: YTN; PAM sequence: CTT
ttttcccctccccgctgcct

SEQ ID NO: 80812 - DNA, 20 bp, Artificial Sequence
  Description of Artificial Sequence: Synthetic oligonucleotide
  Target: ATXN2; (-) strand; PAM type: YTN; PAM sequence: CTC
cttttttcccctccccgctg

SEQ ID NO: 80813 - DNA, 20 bp, Artificial Sequence
  Description of Artificial Sequence: Synthetic oligonucleotide
  Target: ATXN2; (-) strand; PAM type: YTN; PAM sequence: CTC
tccttttttcccctccccgc

SEQ ID NO: 80814 - DNA, 20 bp, Artificial Sequence
  Description of Artificial Sequence: Synthetic oligonucleotide
  Target: ATXN2; (-) strand; PAM type: YTN; PAM sequence: CTC
ctctccttttttcccctccc

SEQ ID NO: 80815 - DNA, 20 bp, Artificial Sequence
  Description of Artificial Sequence: Synthetic oligonucleotide
  Target: ATXN2; (-) strand; PAM type: YTN; PAM sequence: TTC
atccctcctctccttttttc

SEQ ID NO: 80816 - DNA, 20 bp, Artificial Sequence
  Description of Artificial Sequence: Synthetic oligonucleotide
  Target: ATXN2; (-) strand; PAM type: YTN; PAM sequence: CTT
catccctcctctcctttttt

SEQ ID NO: 80817 - DNA, 20 bp, Artificial Sequence
  Description of Artificial Sequence: Synthetic oligonucleotide
  Target: ATXN2; (-) strand; PAM type: YTN; PAM sequence: CTC
ttcatccctcctctcctttt

SEQ ID NO: 80818 - DNA, 20 bp, Artificial Sequence
  Description of Artificial Sequence: Synthetic oligonucleotide
  Target: ATXN2; (-) strand; PAM type: YTN; PAM sequence: TTC
tcttcatccctcctctcctt

SEQ ID NO: 80819 - DNA, 20 bp, Artificial Sequence
  Description of Artificial Sequence: Synthetic oligonucleotide
  Target: ATXN2; (-) strand; PAM type: YTN; PAM sequence: TTT
ctcttcatccctcctctcct

SEQ ID NO: 80820 - DNA, 20 bp, Artificial Sequence
  Description of Artificial Sequence: Synthetic oligonucleotide
  Target: ATXN2; (-) strand; PAM type: YTN; PAM sequence: CTT
tctcttcatccctcctctcc

SEQ ID NO: 80821 - DNA, 20 bp, Artificial Sequence
  Description of Artificial Sequence: Synthetic oligonucleotide
  Target: ATXN2; (-) strand; PAM type: YTN; PAM sequence: TTC
tttctcttcatccctcctct

SEQ ID NO: 80822 - DNA, 20 bp, Artificial Sequence
  Description of Artificial Sequence: Synthetic oligonucleotide
  Target: ATXN2; (-) strand; PAM type: YTN; PAM sequence: TTT
ctttctcttcatccctcctc

SEQ ID NO: 80823 - DNA, 20 bp, Artificial Sequence
  Description of Artificial Sequence: Synthetic oligonucleotide
  Target: ATXN2; (-) strand; PAM type: YTN; PAM sequence: CTT
tctttctcttcatccctcct

SEQ ID NO: 80824 - DNA, 20 bp, Artificial Sequence
  Description of Artificial Sequence: Synthetic oligonucleotide
  Target: ATXN2; (-) strand; PAM type: YTN; PAM sequence: TTC
ctttctttctcttcatccct

SEQ ID NO: 80825 - DNA, 20 bp, Artificial Sequence
  Description of Artificial Sequence: Synthetic oligonucleotide
  Target: ATXN2; (-) strand; PAM type: YTN; PAM sequence: TTT
cctttctttctcttcatccc

SEQ ID NO: 80826 - DNA, 20 bp, Artificial Sequence
  Description of Artificial Sequence: Synthetic oligonucleotide
  Target: ATXN2; (-) strand; PAM type: YTN; PAM sequence: TTG
tcgtttcctttctttctctt

SEQ ID NO: 80827 - DNA, 20 bp, Artificial Sequence
  Description of Artificial Sequence: Synthetic oligonucleotide
  Target: ATXN2; (-) strand; PAM type: YTN; PAM sequence: TTT
gtcgtttcctttctttctct

SEQ ID NO: 80828 - DNA, 20 bp, Artificial Sequence
  Description of Artificial Sequence: Synthetic oligonucleotide
  Target: ATXN2; (-) strand; PAM type: YTN; PAM sequence: CTT
tgtcgtttcctttctttctc

SEQ ID NO: 80829 - DNA, 20 bp, Artificial Sequence
  Description of Artificial Sequence: Synthetic oligonucleotide
  Target: ATXN2; (-) strand; PAM type: YTN; PAM sequence: TTC
tttgtcgtttcctttctttc

SEQ ID NO: 80830 - DNA, 20 bp, Artificial Sequence
  Description of Artificial Sequence: Synthetic oligonucleotide
  Target: ATXN2; (-) strand; PAM type: YTN; PAM sequence: TTT
ctttgtcgtttcctttcttt

SEQ ID NO: 80831 - DNA, 20 bp, Artificial Sequence
  Description of Artificial Sequence: Synthetic oligonucleotide
  Target: ATXN2; (-) strand; PAM type: YTN; PAM sequence: CTT
tctttgtcgtttcctttctt

SEQ ID NO: 80832 - DNA, 20 bp, Artificial Sequence
  Description of Artificial Sequence: Synthetic oligonucleotide
  Target: ATXN2; (-) strand; PAM type: YTN; PAM sequence: CTG
gcctttctttgtcgtttcct

SEQ ID NO: 80833 - DNA, 20 bp, Artificial Sequence
  Description of Artificial Sequence: Synthetic oligonucleotide
  Target: ATXN2; (-) strand; PAM type: YTN; PAM sequence: TTA
taggcatgagccaccatgcc

SEQ ID NO: 80834 - DNA, 20 bp, Artificial Sequence
  Description of Artificial Sequence: Synthetic oligonucleotide
  Target: ATXN2; (-) strand; PAM type: YTN; PAM sequence: CTG
ggattataggcatgagccac

SEQ ID NO: 80835 - DNA, 20 bp, Artificial Sequence
  Description of Artificial Sequence: Synthetic oligonucleotide
  Target: ATXN2; (-) strand; PAM type: YTN; PAM sequence: CTC
ccagtgctgggattataggc

SEQ ID NO: 80836 - DNA, 20 bp, Artificial Sequence
  Description of Artificial Sequence: Synthetic oligonucleotide
  Target: ATXN2; (-) strand; PAM type: YTN; PAM sequence: CTC
ggcctcccagtgctgggatt

SEQ ID NO: 80837 - DNA, 20 bp, Artificial Sequence
  Description of Artificial Sequence: Synthetic oligonucleotide
  Target: ATXN2; (-) strand; PAM type: YTN; PAM sequence: CTG
cctcggcctcccagtgctgg

SEQ ID NO: 80838 - DNA, 20 bp, Artificial Sequence
  Description of Artificial Sequence: Synthetic oligonucleotide
  Target: ATXN2; (-) strand; PAM type: YTN; PAM sequence: CTC
aggtgatccacctgcctcgg

SEQ ID NO: 80839 - DNA, 20 bp, Artificial Sequence
  Description of Artificial Sequence: Synthetic oligonucleotide
  Target: ATXN2; (-) strand; PAM type: YTN; PAM sequence: CTC
atgacctcaggtgatccacc

SEQ ID NO: 80840 - DNA, 20 bp, Artificial Sequence
  Description of Artificial Sequence: Synthetic oligonucleotide
  Target: ATXN2; (-) strand; PAM type: YTN; PAM sequence: CTC
gaactcatgacctcaggtga

SEQ ID NO: 80841 - DNA, 20 bp, Artificial Sequence
  Description of Artificial Sequence: Synthetic oligonucleotide
  Target: ATXN2; (-) strand; PAM type: YTN; PAM sequence: CTG
gtctcgaactcatgacctca

SEQ ID NO: 80842 - DNA, 20 bp, Artificial Sequence
  Description of Artificial Sequence: Synthetic oligonucleotide
  Target: ATXN2; (-) strand; PAM type: YTN; PAM sequence: TTG
gccaggctggtctcgaactc

SEQ ID NO: 80843 - DNA, 20 bp, Artificial Sequence
  Description of Artificial Sequence: Synthetic oligonucleotide
  Target: ATXN2; (-) strand; PAM type: YTN; PAM sequence: TTA
gtagagatggggtagcacca

SEQ ID NO: 80844 - DNA, 20 bp, Artificial Sequence
  Description of Artificial Sequence: Synthetic oligonucleotide
  Target: ATXN2; (-) strand; PAM type: YTN; PAM sequence: TTT
agtagagatggggtagcacc

SEQ ID NO: 80845 - DNA, 20 bp, Artificial Sequence
  Description of Artificial Sequence: Synthetic oligonucleotide
  Target: ATXN2; (-) strand; PAM type: YTN; PAM sequence: TTT
tagtagagatggggtagcac

SEQ ID NO: 80846 - DNA, 20 bp, Artificial Sequence
  Description of Artificial Sequence: Synthetic oligonucleotide
  Target: ATXN2; (-) strand; PAM type: YTN; PAM sequence: TTG
tattttagtagagatggggt

SEQ ID NO: 80847 - DNA, 20 bp, Artificial Sequence
  Description of Artificial Sequence: Synthetic oligonucleotide
  Target: ATXN2; (-) strand; PAM type: YTN; PAM sequence: TTT
gtattttagtagagatgggg

SEQ ID NO: 80848 - DNA, 20 bp, Artificial Sequence
  Description of Artificial Sequence: Synthetic oligonucleotide
  Target: ATXN2; (-) strand; PAM type: YTN; PAM sequence: TTT
tgtattttagtagagatggg

SEQ ID NO: 80849 - DNA, 20 bp, Artificial Sequence
  Description of Artificial Sequence: Synthetic oligonucleotide
  Target: ATXN2; (-) strand; PAM type: YTN; PAM sequence: CTA
ggttttgtattttagtagag

SEQ ID NO: 80850 - DNA, 20 bp, Artificial Sequence
  Description of Artificial Sequence: Synthetic oligonucleotide
  Target: ATXN2; (-) strand; PAM type: YTN; PAM sequence: CTG
ccaccacagccggctaggtt

SEQ ID NO: 80851 - DNA, 20 bp, Artificial Sequence
  Description of Artificial Sequence: Synthetic oligonucleotide
  Target: ATXN2; (-) strand; PAM type: YTN; PAM sequence: CTA
caggcacctgccaccacagc

SEQ ID NO: 80852 - DNA, 20 bp, Artificial Sequence
  Description of Artificial Sequence: Synthetic oligonucleotide
  Target: ATXN2; (-) strand; PAM type: YTN; PAM sequence: CTG
ggactacaggcacctgccac

SEQ ID NO: 80853 - DNA, 20 bp, Artificial Sequence
  Description of Artificial Sequence: Synthetic oligonucleotide
  Target: ATXN2; (-) strand; PAM type: YTN; PAM sequence: CTC
ccaagtagctgggactacag

SEQ ID NO: 80854 - DNA, 20 bp, Artificial Sequence
  Description of Artificial Sequence: Synthetic oligonucleotide
  Target: ATXN2; (-) strand; PAM type: YTN; PAM sequence: CTC
agcctcccaagtagctggga

SEQ ID NO: 80855 - DNA, 20 bp, Artificial Sequence
  Description of Artificial Sequence: Synthetic oligonucleotide
  Target: ATXN2; (-) strand; PAM type: YTN; PAM sequence: CTG
tctcagcctcccaagtagct

SEQ ID NO: 80856 - DNA, 20 bp, Artificial Sequence
  Description of Artificial Sequence: Synthetic oligonucleotide
  Target: ATXN2; (-) strand; PAM type: YTN; PAM sequence: TTC
ctgtctcagcctcccaagta

SEQ ID NO: 80857 - DNA, 20 bp, Artificial Sequence
  Description of Artificial Sequence: Synthetic oligonucleotide
  Target: ATXN2; (-) strand; PAM type: YTN; PAM sequence: CTA
ttcctgtctcagcctcccaa

SEQ ID NO: 80858 - DNA, 20 bp, Artificial Sequence
  Description of Artificial Sequence: Synthetic oligonucleotide
  Target: ATXN2; (-) strand; PAM type: YTN; PAM sequence: TTC
aagctattcctgtctcagcc

SEQ ID NO: 80859 - DNA, 20 bp, Artificial Sequence
  Description of Artificial Sequence: Synthetic oligonucleotide
  Target: ATXN2; (-) strand; PAM type: YTN; PAM sequence: CTG
ggttcaagctattcctgtct

SEQ ID NO: 80860 - DNA, 20 bp, Artificial Sequence
  Description of Artificial Sequence: Synthetic oligonucleotide
  Target: ATXN2; (-) strand; PAM type: YTN; PAM sequence: CTC
ctgggttcaagctattcctg

SEQ ID NO: 80861 - DNA, 20 bp, Artificial Sequence
  Description of Artificial Sequence: Synthetic oligonucleotide
  Target: ATXN2; (-) strand; PAM type: YTN; PAM sequence: CTC
cacctcctgggttcaagcta

SEQ ID NO: 80862 - DNA, 20 bp, Artificial Sequence
  Description of Artificial Sequence: Synthetic oligonucleotide
  Target: ATXN2; (-) strand; PAM type: YTN; PAM sequence: TTG
caacctccacctcctgggtt

SEQ ID NO: 80863 - DNA, 20 bp, Artificial Sequence
  Description of Artificial Sequence: Synthetic oligonucleotide
  Target: ATXN2; (-) strand; PAM type: YTN; PAM sequence: CTT
gcaacctccacctcctgggt

SEQ ID NO: 80864 - DNA, 20 bp, Artificial Sequence
  Description of Artificial Sequence: Synthetic oligonucleotide
  Target: ATXN2; (-) strand; PAM type: YTN; PAM sequence: CTC
cttgcaacctccacctcctg

SEQ ID NO: 80865 - DNA, 20 bp, Artificial Sequence
  Description of Artificial Sequence: Synthetic oligonucleotide
  Target: ATXN2; (-) strand; PAM type: YTN; PAM sequence: TTG
gctccttgcaacctccacct

SEQ ID NO: 80866 - DNA, 20 bp, Artificial Sequence
  Description of Artificial Sequence: Synthetic oligonucleotide
  Target: ATXN2; (-) strand; PAM type: YTN; PAM sequence: CTT
ggctccttgcaacctccacc

SEQ ID NO: 80867 - DNA, 20 bp, Artificial Sequence
  Description of Artificial Sequence: Synthetic oligonucleotide
  Target: ATXN2; (-) strand; PAM type: YTN; PAM sequence: CTA
gagtgcagtggggcaatctt

SEQ ID NO: 80868 - DNA, 20 bp, Artificial Sequence
  Description of Artificial Sequence: Synthetic oligonucleotide
  Target: ATXN2; (-) strand; PAM type: YTN; PAM sequence: TTG
ccgagcctagagtgcagtgg

SEQ ID NO: 80869 - DNA, 20 bp, Artificial Sequence
  Description of Artificial Sequence: Synthetic oligonucleotide
  Target: ATXN2; (-) strand; PAM type: YTN; PAM sequence: CTG
ttgccgagcctagagtgcag

SEQ ID NO: 80870 - DNA, 20 bp, Artificial Sequence
  Description of Artificial Sequence: Synthetic oligonucleotide
  Target: ATXN2; (-) strand; PAM type: YTN; PAM sequence: CTC
tgttgccgagcctagagtgc

SEQ ID NO: 80871 - DNA, 20 bp, Artificial Sequence
  Description of Artificial Sequence: Synthetic oligonucleotide
  Target: ATXN2; (-) strand; PAM type: YTN; PAM sequence: CTC
gctctgttgccgagcctaga

SEQ ID NO: 80872 - DNA, 20 bp, Artificial Sequence
  Description of Artificial Sequence: Synthetic oligonucleotide
  Target: ATXN2; (-) strand; PAM type: YTN; PAM sequence: TTG
agatggagtctcgctctgtt

SEQ ID NO: 80873 - DNA, 20 bp, Artificial Sequence
  Description of Artificial Sequence: Synthetic oligonucleotide
  Target: ATXN2; (-) strand; PAM type: YTN; PAM sequence: TTT
gagatggagtctcgctctgt

SEQ ID NO: 80874 - DNA, 20 bp, Artificial Sequence
  Description of Artificial Sequence: Synthetic oligonucleotide
  Target: ATXN2; (-) strand; PAM type: YTN; PAM sequence: TTT
tgagatggagtctcgctctg

SEQ ID NO: 80875 - DNA, 20 bp, Artificial Sequence
  Description of Artificial Sequence: Synthetic oligonucleotide
  Target: ATXN2; (-) strand; PAM type: YTN; PAM sequence: TTT
ttgagatggagtctcgctct

SEQ ID NO: 80876 - DNA, 20 bp, Artificial Sequence
  Description of Artificial Sequence: Synthetic oligonucleotide
  Target: ATXN2; (-) strand; PAM type: YTN; PAM sequence: TTT
tttgagatggagtctcgctc

SEQ ID NO: 80877 - DNA, 20 bp, Artificial Sequence
  Description of Artificial Sequence: Synthetic oligonucleotide
  Target: ATXN2; (-) strand; PAM type: YTN; PAM sequence: TTT
ttttgagatggagtctcgct

SEQ ID NO: 80878 - DNA, 20 bp, Artificial Sequence
  Description of Artificial Sequence: Synthetic oligonucleotide
  Target: ATXN2; (-) strand; PAM type: YTN; PAM sequence: TTT
tttttgagatggagtctcgc

SEQ ID NO: 80879 - DNA, 20 bp, Artificial Sequence
  Description of Artificial Sequence: Synthetic oligonucleotide
  Target: ATXN2; (-) strand; PAM type: YTN; PAM sequence: TTT
ttttttgagatggagtctcg

SEQ ID NO: 80880 - DNA, 20 bp, Artificial Sequence
  Description of Artificial Sequence: Synthetic oligonucleotide
  Target: ATXN2; (-) strand; PAM type: YTN; PAM sequence: TTT
tttttttgagatggagtctc

SEQ ID NO: 80881 - DNA, 20 bp, Artificial Sequence
  Description of Artificial Sequence: Synthetic oligonucleotide
  Target: ATXN2; (-) strand; PAM type: YTN; PAM sequence: TTT
ttttttttgagatggagtct

SEQ ID NO: 80882 - DNA, 20 bp, Artificial Sequence
  Description of Artificial Sequence: Synthetic oligonucleotide
  Target: ATXN2; (-) strand; PAM type: YTN; PAM sequence: TTT
tttttttttgagatggagtc

SEQ ID NO: 80883 - DNA, 20 bp, Artificial Sequence
  Description of Artificial Sequence: Synthetic oligonucleotide
  Target: ATXN2; (-) strand; PAM type: YTN; PAM sequence: TTT
ttttttttttgagatggagt

SEQ ID NO: 80884 - DNA, 20 bp, Artificial Sequence
  Description of Artificial Sequence: Synthetic oligonucleotide
  Target: ATXN2; (-) strand; PAM type: YTN; PAM sequence: TTT
tttttttttttgagatggag

SEQ ID NO: 80885 - DNA, 20 bp, Artificial Sequence
  Description of Artificial Sequence: Synthetic oligonucleotide
  Target: ATXN2; (-) strand; PAM type: YTN; PAM sequence: TTT
ttttttttttttgagatgga

SEQ ID NO: 80886 - DNA, 20 bp, Artificial Sequence
  Description of Artificial Sequence: Synthetic oligonucleotide
  Target: ATXN2; (-) strand; PAM type: YTN; PAM sequence: TTT
tttttttttttttgagatgg

SEQ ID NO: 80887 - DNA, 20 bp, Artificial Sequence
  Description of Artificial Sequence: Synthetic oligonucleotide
  Target: ATXN2; (-) strand; PAM type: YTN; PAM sequence: TTT
ttttttttttttttgagatg

SEQ ID NO: 80888 - DNA, 20 bp, Artificial Sequence
  Description of Artificial Sequence: Synthetic oligonucleotide
  Target: ATXN2; (-) strand; PAM type: YTN; PAM sequence: TTT
tttttttttttttttgagat

SEQ ID NO: 80889 - DNA, 20 bp, Artificial Sequence
  Description of Artificial Sequence: Synthetic oligonucleotide
  Target: ATXN2; (-) strand; PAM type: YTN; PAM sequence: TTT
ttttttttttttttttgaga

SEQ ID NO: 80890 - DNA, 20 bp, Artificial Sequence
  Description of Artificial Sequence: Synthetic oligonucleotide
  Target: ATXN2; (-) strand; PAM type: YTN; PAM sequence: CTT
tttttttttttttttttgag

SEQ ID NO: 80891 - DNA, 20 bp, Artificial Sequence
  Description of Artificial Sequence: Synthetic oligonucleotide
  Target: ATXN2; (-) strand; PAM type: YTN; PAM sequence: TTC
tttttttttttttttttttg

SEQ ID NO: 80892 - DNA, 20 bp, Artificial Sequence
  Description of Artificial Sequence: Synthetic oligonucleotide
  Target: ATXN2; (-) strand; PAM type: YTN; PAM sequence: TTT
cttttttttttttttttttt

SEQ ID NO: 80893 - DNA, 20 bp, Artificial Sequence
  Description of Artificial Sequence: Synthetic oligonucleotide
  Target: ATXN2; (-) strand; PAM type: YTN; PAM sequence: CTA
atacatttcttttttttttt

SEQ ID NO: 80894 - DNA, 20 bp, Artificial Sequence
  Description of Artificial Sequence: Synthetic oligonucleotide
  Target: ATXN2; (-) strand; PAM type: YTN; PAM sequence: TTC
taatacatttcttttttttt

SEQ ID NO: 80895 - DNA, 20 bp, Artificial Sequence
  Description of Artificial Sequence: Synthetic oligonucleotide
  Target: ATXN2; (-) strand; PAM type: YTN; PAM sequence: TTT
ctaatacatttctttttttt

SEQ ID NO: 80896 - DNA, 20 bp, Artificial Sequence
  Description of Artificial Sequence: Synthetic oligonucleotide
  Target: ATXN2; (-) strand; PAM type: YTN; PAM sequence: TTA
tttctaatacatttcttttt

SEQ ID NO: 80897 - DNA, 20 bp, Artificial Sequence
  Description of Artificial Sequence: Synthetic oligonucleotide
  Target: ATXN2; (-) strand; PAM type: YTN; PAM sequence: TTT
atttctaatacatttctttt

SEQ ID NO: 80898 - DNA, 20 bp, Artificial Sequence
  Description of Artificial Sequence: Synthetic oligonucleotide
  Target: ATXN2; (-) strand; PAM type: YTN; PAM sequence: TTT
tatttctaatacatttcttt

SEQ ID NO: 80899 - DNA, 20 bp, Artificial Sequence
  Description of Artificial Sequence: Synthetic oligonucleotide
  Target: ATXN2; (-) strand; PAM type: YTN; PAM sequence: CTT
ttatttctaatacatttctt

SEQ ID NO: 80900 - DNA, 20 bp, Artificial Sequence
  Description of Artificial Sequence: Synthetic oligonucleotide
  Target: ATXN2; (-) strand; PAM type: YTN; PAM sequence: CTG
atgtacttttatttctaata

SEQ ID NO: 80901 - DNA, 20 bp, Artificial Sequence
  Description of Artificial Sequence: Synthetic oligonucleotide
  Target: ATXN2; (-) strand; PAM type: YTN; PAM sequence: TTA
gaatctgatgtacttttatt

SEQ ID NO: 80902 - DNA, 20 bp, Artificial Sequence
  Description of Artificial Sequence: Synthetic oligonucleotide
  Target: ATXN2; (-) strand; PAM type: YTN; PAM sequence: CTG
gcattagaatctgatgtact

SEQ ID NO: 80903 - DNA, 20 bp, Artificial Sequence
  Description of Artificial Sequence: Synthetic oligonucleotide
  Target: ATXN2; (-) strand; PAM type: YTN; PAM sequence: CTG
cataactggcattagaatct

SEQ ID NO: 80904 - DNA, 20 bp, Artificial Sequence
  Description of Artificial Sequence: Synthetic oligonucleotide
  Target: ATXN2; (-) strand; PAM type: YTN; PAM sequence: TTG
gctgcataactggcattaga

SEQ ID NO: 80905 - DNA, 20 bp, Artificial Sequence
  Description of Artificial Sequence: Synthetic oligonucleotide
  Target: ATXN2; (-) strand; PAM type: YTN; PAM sequence: CTC
atcattggctgcataactgg

SEQ ID NO: 80906 - DNA, 20 bp, Artificial Sequence
  Description of Artificial Sequence: Synthetic oligonucleotide
  Target: ATXN2; (-) strand; PAM type: YTN; PAM sequence: TTA
ccagagtatctcatcattgg

SEQ ID NO: 80907 - DNA, 20 bp, Artificial Sequence
  Description of Artificial Sequence: Synthetic oligonucleotide
  Target: ATXN2; (-) strand; PAM type: YTN; PAM sequence: TTT
accagagtatctcatcattg

SEQ ID NO: 80908 - DNA, 20 bp, Artificial Sequence
  Description of Artificial Sequence: Synthetic oligonucleotide
  Target: ATXN2; (-) strand; PAM type: YTN; PAM sequence: TTA
tttaccagagtatctcatca

SEQ ID NO: 80909 - DNA, 20 bp, Artificial Sequence
  Description of Artificial Sequence: Synthetic oligonucleotide
  Target: ATXN2; (-) strand; PAM type: YTN; PAM sequence: TTG
agaccaagagggttatttac

SEQ ID NO: 80910 - DNA, 20 bp, Artificial Sequence
  Description of Artificial Sequence: Synthetic oligonucleotide
  Target: ATXN2; (-) strand; PAM type: YTN; PAM sequence: TTA
cgggtgaagaaattgagacc

SEQ ID NO: 80911 - DNA, 20 bp, Artificial Sequence
  Description of Artificial Sequence: Synthetic oligonucleotide
  Target: ATXN2; (-) strand; PAM type: YTN; PAM sequence: TTT
acgggtgaagaaattgagac

SEQ ID NO: 80912 - DNA, 20 bp, Artificial Sequence
  Description of Artificial Sequence: Synthetic oligonucleotide
  Target: ATXN2; (-) strand; PAM type: YTN; PAM sequence: CTA
tttacgggtgaagaaattga

SEQ ID NO: 80913 - DNA, 20 bp, Artificial Sequence
  Description of Artificial Sequence: Synthetic oligonucleotide
  Target: ATXN2; (-) strand; PAM type: YTN; PAM sequence: TTC
tatttacgggtgaagaaatt

SEQ ID NO: 80914 - DNA, 20 bp, Artificial Sequence
  Description of Artificial Sequence: Synthetic oligonucleotide
  Target: ATXN2; (-) strand; PAM type: YTN; PAM sequence: CTC
attctatttacgggtgaaga

SEQ ID NO: 80915 - DNA, 20 bp, Artificial Sequence
  Description of Artificial Sequence: Synthetic oligonucleotide
  Target: ATXN2; (-) strand; PAM type: YTN; PAM sequence: TTA
gtactcattctatttacggg

SEQ ID NO: 80916 - DNA, 20 bp, Artificial Sequence
  Description of Artificial Sequence: Synthetic oligonucleotide
  Target: ATXN2; (-) strand; PAM type: YTN; PAM sequence: TTT
agtactcattctatttacgg

SEQ ID NO: 80917 - DNA, 20 bp, Artificial Sequence
  Description of Artificial Sequence: Synthetic oligonucleotide
  Target: ATXN2; (-) strand; PAM type: YTN; PAM sequence: TTT
tagtactcattctatttacg

SEQ ID NO: 80918 - DNA, 20 bp, Artificial Sequence
  Description of Artificial Sequence: Synthetic oligonucleotide
  Target: ATXN2; (-) strand; PAM type: YTN; PAM sequence: TTT
ttagtactcattctatttac

SEQ ID NO: 80919 - DNA, 20 bp, Artificial Sequence
  Description of Artificial Sequence: Synthetic oligonucleotide
  Target: ATXN2; (-) strand; PAM type: YTN; PAM sequence: TTT
tttagtactcattctattta

SEQ ID NO: 80920 - DNA, 20 bp, Artificial Sequence
  Description of Artificial Sequence: Synthetic oligonucleotide
  Target: ATXN2; (-) strand; PAM type: YTN; PAM sequence: CTG
gtggttttttagtactcatt

SEQ ID NO: 80921 - DNA, 20 bp, Artificial Sequence
  Description of Artificial Sequence: Synthetic oligonucleotide
  Target: ATXN2; (-) strand; PAM type: YTN; PAM sequence: CTC
tggtggttttttagtactca

SEQ ID NO: 80922 - DNA, 20 bp, Artificial Sequence
  Description of Artificial Sequence: Synthetic oligonucleotide
  Target: ATXN2; (-) strand; PAM type: YTN; PAM sequence: CTG
gctctggtggttttttagta

SEQ ID NO: 80923 - DNA, 20 bp, Artificial Sequence
  Description of Artificial Sequence: Synthetic oligonucleotide
  Target: ATXN2; (-) strand; PAM type: YTN; PAM sequence: CTC
tggctctggtggttttttag

SEQ ID NO: 80924 - DNA, 20 bp, Artificial Sequence
  Description of Artificial Sequence: Synthetic oligonucleotide
  Target: ATXN2; (-) strand; PAM type: YTN; PAM sequence: TTC
tctggctctggtggtttttt

SEQ ID NO: 80925 - DNA, 20 bp, Artificial Sequence
  Description of Artificial Sequence: Synthetic oligonucleotide
  Target: ATXN2; (-) strand; PAM type: YTN; PAM sequence: TTT
ctctggctctggtggttttt

SEQ ID NO: 80926 - DNA, 20 bp, Artificial Sequence
  Description of Artificial Sequence: Synthetic oligonucleotide
  Target: ATXN2; (-) strand; PAM type: YTN; PAM sequence: TTG
gatttctctggctctggtgg

SEQ ID NO: 80927 - DNA, 20 bp, Artificial Sequence
  Description of Artificial Sequence: Synthetic oligonucleotide
  Target: ATXN2; (-) strand; PAM type: YTN; PAM sequence: TTT
ggatttctctggctctggtg

SEQ ID NO: 80928 - DNA, 20 bp, Artificial Sequence
  Description of Artificial Sequence: Synthetic oligonucleotide
  Target: ATXN2; (-) strand; PAM type: YTN; PAM sequence: CTG
gtagtttggatttctctggc

SEQ ID NO: 80929 - DNA, 20 bp, Artificial Sequence
  Description of Artificial Sequence: Synthetic oligonucleotide
  Target: ATXN2; (-) strand; PAM type: YTN; PAM sequence: TTC
cctggtagtttggatttctc

SEQ ID NO: 80930 - DNA, 20 bp, Artificial Sequence
  Description of Artificial Sequence: Synthetic oligonucleotide
  Target: ATXN2; (-) strand; PAM type: YTN; PAM sequence: TTT
ccctggtagtttggatttct

SEQ ID NO: 80931 - DNA, 20 bp, Artificial Sequence
  Description of Artificial Sequence: Synthetic oligonucleotide
  Target: ATXN2; (-) strand; PAM type: YTN; PAM sequence: CTT
tccctggtagtttggatttc

SEQ ID NO: 80932 - DNA, 20 bp, Artificial Sequence
  Description of Artificial Sequence: Synthetic oligonucleotide
  Target: ATXN2; (-) strand; PAM type: YTN; PAM sequence: CTC
cctttccctggtagtttgga

SEQ ID NO: 80933 - DNA, 20 bp, Artificial Sequence
  Description of Artificial Sequence: Synthetic oligonucleotide
  Target: ATXN2; (-) strand; PAM type: YTN; PAM sequence: CTC
agtgggcccctccctttccc

SEQ ID NO: 80934 - DNA, 20 bp, Artificial Sequence
  Description of Artificial Sequence: Synthetic oligonucleotide
  Target: ATXN2; (-) strand; PAM type: YTN; PAM sequence: TTC
tcagtgggcccctccctttc

SEQ ID NO: 80935 - DNA, 20 bp, Artificial Sequence
  Description of Artificial Sequence: Synthetic oligonucleotide
  Target: ATXN2; (-) strand; PAM type: YTN; PAM sequence: CTG
gggtggttctcagtgggccc

SEQ ID NO: 80936 - DNA, 20 bp, Artificial Sequence
  Description of Artificial Sequence: Synthetic oligonucleotide
  Target: ATXN2; (-) strand; PAM type: YTN; PAM sequence: TTG
ctggggtggttctcagtggg

SEQ ID NO: 80937 - DNA, 20 bp, Artificial Sequence
  Description of Artificial Sequence: Synthetic oligonucleotide
  Target: ATXN2; (-) strand; PAM type: YTN; PAM sequence: CTG
tggtcgggttgctggggtgg

SEQ ID NO: 80938 - DNA, 20 bp, Artificial Sequence
  Description of Artificial Sequence: Synthetic oligonucleotide
  Target: ATXN2; (-) strand; PAM type: YTN; PAM sequence: TTC
atggtgtccagggaagacca

SEQ ID NO: 80939 - DNA, 20 bp, Artificial Sequence
  Description of Artificial Sequence: Synthetic oligonucleotide
  Target: ATXN2; (-) strand; PAM type: YTN; PAM sequence: TTG
tggttcatggtgtccaggga

SEQ ID NO: 80940 - DNA, 20 bp, Artificial Sequence
  Description of Artificial Sequence: Synthetic oligonucleotide
  Target: ATXN2; (-) strand; PAM type: YTN; PAM sequence: TTG
gacattgtggttcatggtgt

SEQ ID NO: 80941 - DNA, 20 bp, Artificial Sequence
  Description of Artificial Sequence: Synthetic oligonucleotide
  Target: ATXN2; (-) strand; PAM type: YTN; PAM sequence: TTT
ggacattgtggttcatggtg

SEQ ID NO: 80942 - DNA, 20 bp, Artificial Sequence
  Description of Artificial Sequence: Synthetic oligonucleotide
  Target: ATXN2; (-) strand; PAM type: YTN; PAM sequence: TTG
gcaggagtgaagaggtttgg

SEQ ID NO: 80943 - DNA, 20 bp, Artificial Sequence
  Description of Artificial Sequence: Synthetic oligonucleotide
  Target: ATXN2; (-) strand; PAM type: YTN; PAM sequence: TTA
gggggatggccgatgttggc

SEQ ID NO: 80944 - DNA, 20 bp, Artificial Sequence
  Description of Artificial Sequence: Synthetic oligonucleotide
  Target: ATXN2; (-) strand; PAM type: YTN; PAM sequence: CTC
atagttagggggatggccga

SEQ ID NO: 80945 - DNA, 20 bp, Artificial Sequence
  Description of Artificial Sequence: Synthetic oligonucleotide
  Target: ATXN2; (-) strand; PAM type: YTN; PAM sequence: TTG
agcatctcatagttaggggg

SEQ ID NO: 80946 - DNA, 20 bp, Artificial Sequence
  Description of Artificial Sequence: Synthetic oligonucleotide
  Target: ATXN2; (-) strand; PAM type: YTN; PAM sequence: CTT
gagcatctcatagttagggg

SEQ ID NO: 80947 - DNA, 20 bp, Artificial Sequence
  Description of Artificial Sequence: Synthetic oligonucleotide
  Target: ATXN2; (-) strand; PAM type: YTN; PAM sequence: CTC
cttgagcatctcatagttag

SEQ ID NO: 80948 - DNA, 20 bp, Artificial Sequence
  Description of Artificial Sequence: Synthetic oligonucleotide
  Target: ATXN2; (-) strand; PAM type: YTN; PAM sequence: CTC
ctccttgagcatctcatagt

SEQ ID NO: 80949 - DNA, 20 bp, Artificial Sequence
  Description of Artificial Sequence: Synthetic oligonucleotide
  Target: ATXN2; (-) strand; PAM type: YTN; PAM sequence: TTG
ctcctccttgagcatctcat

SEQ ID NO: 80950 - DNA, 20 bp, Artificial Sequence
  Description of Artificial Sequence: Synthetic oligonucleotide
  Target: ATXN2; (-) strand; PAM type: YTN; PAM sequence: CTT
gctcctccttgagcatctca

SEQ ID NO: 80951 - DNA, 20 bp, Artificial Sequence
  Description of Artificial Sequence: Synthetic oligonucleotide
  Target: ATXN2; (-) strand; PAM type: YTN; PAM sequence: CTC
ttgctcctccttgagcatct

SEQ ID NO: 80952 - DNA, 20 bp, Artificial Sequence
  Description of Artificial Sequence: Synthetic oligonucleotide
  Target: ATXN2; (-) strand; PAM type: YTN; PAM sequence: TTG
tggggtgcccccagcacagc

SEQ ID NO: 80953 - DNA, 20 bp, Artificial Sequence
  Description of Artificial Sequence: Synthetic oligonucleotide
  Target: ATXN2; (-) strand; PAM type: YTN; PAM sequence: TTG
ggggagcagggttgtggggt

SEQ ID NO: 80954 - DNA, 20 bp, Artificial Sequence
  Description of Artificial Sequence: Synthetic oligonucleotide
  Target: ATXN2; (-) strand; PAM type: YTN; PAM sequence: CTG
tggatggggatcacggtgga

SEQ ID NO: 80955 - DNA, 20 bp, Artificial Sequence
  Description of Artificial Sequence: Synthetic oligonucleotide
  Target: ATXN2; (-) strand; PAM type: YTN; PAM sequence: CTC
gctgtggatggggatcacgg

SEQ ID NO: 80956 - DNA, 20 bp, Artificial Sequence
  Description of Artificial Sequence: Synthetic oligonucleotide
  Target: ATXN2; (-) strand; PAM type: YTN; PAM sequence: TTC
tcgctgtggatggggatcac

SEQ ID NO: 80957 - DNA, 20 bp, Artificial Sequence
  Description of Artificial Sequence: Synthetic oligonucleotide
  Target: ATXN2; (-) strand; PAM type: YTN; PAM sequence: TTG
aacagggaccagacgacatg

SEQ ID NO: 80958 - DNA, 20 bp, Artificial Sequence
  Description of Artificial Sequence: Synthetic oligonucleotide
  Target: ATXN2; (-) strand; PAM type: YTN; PAM sequence: TTC
atgaagtgggtgttgaacag

SEQ ID NO: 80959 - DNA, 20 bp, Artificial Sequence
  Description of Artificial Sequence: Synthetic oligonucleotide
  Target: ATXN2; (-) strand; PAM type: YTN; PAM sequence: CTA
tgaagcccaggcagcaggag

SEQ ID NO: 80960 - DNA, 20 bp, Artificial Sequence
  Description of Artificial Sequence: Synthetic oligonucleotide
  Target: ATXN2; (-) strand; PAM type: YTN; PAM sequence: TTC
acggagtaggccaatgctat

SEQ ID NO: 80961 - DNA, 20 bp, Artificial Sequence
  Description of Artificial Sequence: Synthetic oligonucleotide
  Target: ATXN2; (-) strand; PAM type: YTN; PAM sequence: CTT
cacggagtaggccaatgcta

SEQ ID NO: 80962 - DNA, 20 bp, Artificial Sequence
  Description of Artificial Sequence: Synthetic oligonucleotide
  Target: ATXN2; (-) strand; PAM type: YTN; PAM sequence: CTA
gacttcacggagtaggccaa

SEQ ID NO: 80963 - DNA, 20 bp, Artificial Sequence
  Description of Artificial Sequence: Synthetic oligonucleotide
  Target: ATXN2; (-) strand; PAM type: YTN; PAM sequence: TTG
tccctagacttcacggagta

SEQ ID NO: 80964 - DNA, 20 bp, Artificial Sequence
  Description of Artificial Sequence: Synthetic oligonucleotide
  Target: ATXN2; (-) strand; PAM type: YTN; PAM sequence: CTT
gtccctagacttcacggagt

SEQ ID NO: 80965 - DNA, 20 bp, Artificial Sequence
  Description of Artificial Sequence: Synthetic oligonucleotide
  Target: ATXN2; (-) strand; PAM type: YTN; PAM sequence: TTC
ttgtccctagacttcacgga

SEQ ID NO: 80966 - DNA, 20 bp, Artificial Sequence
  Description of Artificial Sequence: Synthetic oligonucleotide
  Target: ATXN2; (-) strand; PAM type: YTN; PAM sequence: CTT
cttgtccctagacttcacgg

SEQ ID NO: 80967 - DNA, 20 bp, Artificial Sequence
  Description of Artificial Sequence: Synthetic oligonucleotide
  Target: ATXN2; (-) strand; PAM type: YTN; PAM sequence: CTG
atcaggtcgccaaccatctt

SEQ ID NO: 80968 - DNA, 20 bp, Artificial Sequence
  Description of Artificial Sequence: Synthetic oligonucleotide
  Target: ATXN2; (-) strand; PAM type: YTN; PAM sequence: CTG
ggccctgatcaggtcgccaa

SEQ ID NO: 80969 - DNA, 20 bp, Artificial Sequence
  Description of Artificial Sequence: Synthetic oligonucleotide
  Target: ATXN2; (-) strand; PAM type: YTN; PAM sequence: TTG
gcggtaaaggcataggcctg

SEQ ID NO: 80970 - DNA, 20 bp, Artificial Sequence
  Description of Artificial Sequence: Synthetic oligonucleotide
  Target: ATXN2; (-) strand; PAM type: YTN; PAM sequence: CTT
ggcggtaaaggcataggcct

SEQ ID NO: 80971 - DNA, 20 bp, Artificial Sequence
  Description of Artificial Sequence: Synthetic oligonucleotide
  Target: ATXN2; (-) strand; PAM type: YTN; PAM sequence: TTC
aggcacttggcggtaaaggc

SEQ ID NO: 80972 - DNA, 20 bp, Artificial Sequence
  Description of Artificial Sequence: Synthetic oligonucleotide
  Target: ATXN2; (-) strand; PAM type: YTN; PAM sequence: CTG
agcagaatggtcgtaatgat

SEQ ID NO: 80973 - DNA, 20 bp, Artificial Sequence
  Description of Artificial Sequence: Synthetic oligonucleotide
  Target: ATXN2; (-) strand; PAM type: YTN; PAM sequence: CTG
ggatgatgctgagcagaatg

SEQ ID NO: 80974 - DNA, 20 bp, Artificial Sequence
  Description of Artificial Sequence: Synthetic oligonucleotide
  Target: ATXN2; (-) strand; PAM type: YTN; PAM sequence: TTG
aaagatcaacactgggatga

SEQ ID NO: 80975 - DNA, 20 bp, Artificial Sequence
  Description of Artificial Sequence: Synthetic oligonucleotide
  Target: ATXN2; (-) strand; PAM type: YTN; PAM sequence: CTT
gaaagatcaacactgggatg

SEQ ID NO: 80976 - DNA, 20 bp, Artificial Sequence
  Description of Artificial Sequence: Synthetic oligonucleotide
  Target: ATXN2; (-) strand; PAM type: YTN; PAM sequence: TTG
atagacttgaaagatcaaca

SEQ ID NO: 80977 - DNA, 20 bp, Artificial Sequence
  Description of Artificial Sequence: Synthetic oligonucleotide
  Target: ATXN2; (-) strand; PAM type: YTN; PAM sequence: CTG
ttgatagacttgaaagatca

SEQ ID NO: 80978 - DNA, 20 bp, Artificial Sequence
  Description of Artificial Sequence: Synthetic oligonucleotide
  Target: ATXN2; (-) strand; PAM type: YTN; PAM sequence: CTG
atctgttgatagacttgaaa

SEQ ID NO: 80979 - DNA, 20 bp, Artificial Sequence
  Description of Artificial Sequence: Synthetic oligonucleotide
  Target: ATXN2; (-) strand; PAM type: YTN; PAM sequence: CTC
ctgatctgttgatagacttg

SEQ ID NO: 80980 - DNA, 20 bp, Artificial Sequence
  Description of Artificial Sequence: Synthetic oligonucleotide
  Target: ATXN2; (-) strand; PAM type: YTN; PAM sequence: CTA
gataatgcctcctgatctgt

SEQ ID NO: 80981 - DNA, 20 bp, Artificial Sequence
  Description of Artificial Sequence: Synthetic oligonucleotide
  Target: ATXN2; (-) strand; PAM type: YTN; PAM sequence: CTG
gcctagataatgcctcctga

SEQ ID NO: 80982 - DNA, 20 bp, Artificial Sequence
  Description of Artificial Sequence: Synthetic oligonucleotide
  Target: ATXN2; (-) strand; PAM type: YTN; PAM sequence: CTC
ctggcctagataatgcctcc

SEQ ID NO: 80983 - DNA, 20 bp, Artificial Sequence
  Description of Artificial Sequence: Synthetic oligonucleotide
  Target: ATXN2; (-) strand; PAM type: YTN; PAM sequence: CTG
ggggcagggcgaggaatgga

SEQ ID NO: 80984 - DNA, 20 bp, Artificial Sequence
  Description of Artificial Sequence: Synthetic oligonucleotide
  Target: ATXN2; (-) strand; PAM type: YTN; PAM sequence: CTC
tgggggcagggcgaggaatg

SEQ ID NO: 80985 - DNA, 20 bp, Artificial Sequence
  Description of Artificial Sequence: Synthetic oligonucleotide
  Target: ATXN2; (-) strand; PAM type: YTN; PAM sequence: TTG
gctctgggggcagggcgagg

SEQ ID NO: 80986 - DNA, 20 bp, Artificial Sequence
  Description of Artificial Sequence: Synthetic oligonucleotide
  Target: ATXN2; (-) strand; PAM type: YTN; PAM sequence: CTT
ggctctgggggcagggcgag

SEQ ID NO: 80987 - DNA, 20 bp, Artificial Sequence
  Description of Artificial Sequence: Synthetic oligonucleotide
  Target: ATXN2; (-) strand; PAM type: YTN; PAM sequence: CTG
atagagaacttggctctggg

SEQ ID NO: 80988 - DNA, 20 bp, Artificial Sequence
  Description of Artificial Sequence: Synthetic oligonucleotide
  Target: ATXN2; (-) strand; PAM type: YTN; PAM sequence: TTG
tagaaaagtgtgtgaggata

SEQ ID NO: 80989 - DNA, 20 bp, Artificial Sequence
  Description of Artificial Sequence: Synthetic oligonucleotide
  Target: ATXN2; (-) strand; PAM type: YTN; PAM sequence: TTG
aatgccattgtagaaaagtg

SEQ ID NO: 80990 - DNA, 20 bp, Artificial Sequence
  Description of Artificial Sequence: Synthetic oligonucleotide
  Target: ATXN2; (-) strand; PAM type: YTN; PAM sequence: TTA
ttgaatgccattgtagaaaa

SEQ ID NO: 80991 - DNA, 20 bp, Artificial Sequence
  Description of Artificial Sequence: Synthetic oligonucleotide
  Target: ATXN2; (-) strand; PAM type: YTN; PAM sequence: TTT
attgaatgccattgtagaaa

SEQ ID NO: 80992 - DNA, 20 bp, Artificial Sequence
  Description of Artificial Sequence: Synthetic oligonucleotide
  Target: ATXN2; (-) strand; PAM type: YTN; PAM sequence: TTA
aaccagaaacacgtgcagtt

SEQ ID NO: 80993 - DNA, 20 bp, Artificial Sequence
  Description of Artificial Sequence: Synthetic oligonucleotide
  Target: ATXN2; (-) strand; PAM type: YTN; PAM sequence: TTT
aaaccagaaacacgtgcagt

SEQ ID NO: 80994 - DNA, 20 bp, Artificial Sequence
  Description of Artificial Sequence: Synthetic oligonucleotide
  Target: ATXN2; (-) strand; PAM type: YTN; PAM sequence: TTT
taaaccagaaacacgtgcag

SEQ ID NO: 80995 - DNA, 20 bp, Artificial Sequence
  Description of Artificial Sequence: Synthetic oligonucleotide
  Target: ATXN2; (-) strand; PAM type: YTN; PAM sequence: TTT
ttaaaccagaaacacgtgca

SEQ ID NO: 80996 - DNA, 20 bp, Artificial Sequence
  Description of Artificial Sequence: Synthetic oligonucleotide
  Target: ATXN2; (-) strand; PAM type: YTN; PAM sequence: TTT
tttaaaccagaaacacgtgc

SEQ ID NO: 80997 - DNA, 20 bp, Artificial Sequence
  Description of Artificial Sequence: Synthetic oligonucleotide
  Target: ATXN2; (-) strand; PAM type: YTN; PAM sequence: TTT
ttttaaaccagaaacacgtg

SEQ ID NO: 80998 - DNA, 20 bp, Artificial Sequence
  Description of Artificial Sequence: Synthetic oligonucleotide
  Target: ATXN2; (-) strand; PAM type: YTN; PAM sequence: TTT
tttttaaaccagaaacacgt

SEQ ID NO: 80999 - DNA, 20 bp, Artificial Sequence
  Description of Artificial Sequence: Synthetic oligonucleotide
  Target: ATXN2; (-) strand; PAM type: YTN; PAM sequence: TTT
ttttttaaaccagaaacacg

SEQ ID NO: 81000 - DNA, 20 bp, Artificial Sequence
  Description of Artificial Sequence: Synthetic oligonucleotide
  Target: ATXN2; (-) strand; PAM type: YTN; PAM sequence: TTT
tttttttaaaccagaaacac

SEQ ID NO: 81001 - DNA, 20 bp, Artificial Sequence
  Description of Artificial Sequence: Synthetic oligonucleotide
  Target: ATXN2; (-) strand; PAM type: YTN; PAM sequence: TTT
ttttttttaaaccagaaaca

SEQ ID NO: 81002 - DNA, 20 bp, Artificial Sequence
  Description of Artificial Sequence: Synthetic oligonucleotide
  Target: ATXN2; (-) strand; PAM type: YTN; PAM sequence: TTT
tttttttttaaaccagaaac

SEQ ID NO: 81003 - DNA, 20 bp, Artificial Sequence
  Description of Artificial Sequence: Synthetic oligonucleotide
  Target: ATXN2; (-) strand; PAM type: YTN; PAM sequence: TTT
ttttttttttaaaccagaaa

SEQ ID NO: 81004 - DNA, 20 bp, Artificial Sequence
  Description of Artificial Sequence: Synthetic oligonucleotide
  Target: ATXN2; (-) strand; PAM type: YTN; PAM sequence: TTT
tttttttttttaaaccagaa

SEQ ID NO: 81005 - DNA, 20 bp, Artificial Sequence
  Description of Artificial Sequence: Synthetic oligonucleotide
  Target: ATXN2; (-) strand; PAM type: YTN; PAM sequence: TTT
ttttttttttttaaaccaga

SEQ ID NO: 81006 - DNA, 20 bp, Artificial Sequence
  Description of Artificial Sequence: Synthetic oligonucleotide
  Target: ATXN2; (-) strand; PAM type: YTN; PAM sequence: TTT
tttttttttttttaaaccag

SEQ ID NO: 81007 - DNA, 20 bp, Artificial Sequence
  Description of Artificial Sequence: Synthetic oligonucleotide
  Target: ATXN2; (-) strand; PAM type: YTN; PAM sequence: CTG
gtgtttttttttttttttta

SEQ ID NO: 81008 - DNA, 20 bp, Artificial Sequence
  Description of Artificial Sequence: Synthetic oligonucleotide
  Target: ATXN2; (-) strand; PAM type: YTN; PAM sequence: CTC
tggtgttttttttttttttt

SEQ ID NO: 81009 - DNA, 20 bp, Artificial Sequence
  Description of Artificial Sequence: Synthetic oligonucleotide
  Target: ATXN2; (-) strand; PAM type: YTN; PAM sequence: TTG
gaatggctctggtgtttttt

SEQ ID NO: 81010 - DNA, 20 bp, Artificial Sequence
  Description of Artificial Sequence: Synthetic oligonucleotide
  Target: ATXN2; (-) strand; PAM type: YTN; PAM sequence: TTG
gagttggaatggctctggtg

SEQ ID NO: 81011 - DNA, 20 bp, Artificial Sequence
  Description of Artificial Sequence: Synthetic oligonucleotide
  Target: ATXN2; (-) strand; PAM type: YTN; PAM sequence: TTT
ggagttggaatggctctggt

SEQ ID NO: 81012 - DNA, 20 bp, Artificial Sequence
  Description of Artificial Sequence: Synthetic oligonucleotide
  Target: ATXN2; (-) strand; PAM type: YTN; PAM sequence: TTC
aacaatgtagagtcaaacgc

SEQ ID NO: 81013 - DNA, 20 bp, Artificial Sequence
  Description of Artificial Sequence: Synthetic oligonucleotide
  Target: ATXN2; (-) strand; PAM type: YTN; PAM sequence: TTG
gcacatagtagatgttcaac

SEQ ID NO: 81014 - DNA, 20 bp, Artificial Sequence
  Description of Artificial Sequence: Synthetic oligonucleotide
  Target: ATXN2; (-) strand; PAM type: YTN; PAM sequence: CTT
ggcacatagtagatgttcaa

SEQ ID NO: 81015 - DNA, 20 bp, Artificial Sequence
  Description of Artificial Sequence: Synthetic oligonucleotide
  Target: ATXN2; (-) strand; PAM type: YTN; PAM sequence: TTC
ttggcacatagtagatgttc

SEQ ID NO: 81016 - DNA, 20 bp, Artificial Sequence
  Description of Artificial Sequence: Synthetic oligonucleotide
  Target: ATXN2; (-) strand; PAM type: YTN; PAM sequence: CTG
ttcttggcacatagtagatg

SEQ ID NO: 81017 - DNA, 20 bp, Artificial Sequence
  Description of Artificial Sequence: Synthetic oligonucleotide
  Target: ATXN2; (-) strand; PAM type: YTN; PAM sequence: TTC
tgttcttggcacatagtaga

SEQ ID NO: 81018 - DNA, 20 bp, Artificial Sequence
  Description of Artificial Sequence: Synthetic oligonucleotide
  Target: ATXN2; (-) strand; PAM type: YTN; PAM sequence: TTA
tgttctgttcttggcacata

SEQ ID NO: 81019 - DNA, 20 bp, Artificial Sequence
  Description of Artificial Sequence: Synthetic oligonucleotide
  Target: ATXN2; (-) strand; PAM type: YTN; PAM sequence: CTT
atgttctgttcttggcacat

SEQ ID NO: 81020 - DNA, 20 bp, Artificial Sequence
  Description of Artificial Sequence: Synthetic oligonucleotide
  Target: ATXN2; (-) strand; PAM type: YTN; PAM sequence: TTC
ttatgttctgttcttggcac

SEQ ID NO: 81021 - DNA, 20 bp, Artificial Sequence
  Description of Artificial Sequence: Synthetic oligonucleotide
  Target: ATXN2; (-) strand; PAM type: YTN; PAM sequence: CTT
cttatgttctgttcttggca

SEQ ID NO: 81022 - DNA, 20 bp, Artificial Sequence
  Description of Artificial Sequence: Synthetic oligonucleotide
  Target: ATXN2; (-) strand; PAM type: YTN; PAM sequence: TTC
ttcttatgttctgttcttgg

SEQ ID NO: 81023 - DNA, 20 bp, Artificial Sequence
  Description of Artificial Sequence: Synthetic oligonucleotide
  Target: ATXN2; (-) strand; PAM type: YTN; PAM sequence: CTA
aattcttcttatgttctgtt

SEQ ID NO: 81024 - DNA, 20 bp, Artificial Sequence
  Description of Artificial Sequence: Synthetic oligonucleotide
  Target: ATXN2; (-) strand; PAM type: YTN; PAM sequence: TTA
aggccatgaggcagcacacc

SEQ ID NO: 81025 - DNA, 20 bp, Artificial Sequence
  Description of Artificial Sequence: Synthetic oligonucleotide
  Target: ATXN2; (-) strand; PAM type: YTN; PAM sequence: TTG
aaattaaggccatgaggcag

SEQ ID NO: 81026 - DNA, 20 bp, Artificial Sequence
  Description of Artificial Sequence: Synthetic oligonucleotide
  Target: ATXN2; (-) strand; PAM type: YTN; PAM sequence: CTC
ccaaagtattgaaattaagg

SEQ ID NO: 81027 - DNA, 20 bp, Artificial Sequence
  Description of Artificial Sequence: Synthetic oligonucleotide
  Target: ATXN2; (-) strand; PAM type: YTN; PAM sequence: TTG
gcctcccaaagtattgaaat

SEQ ID NO: 81028 - DNA, 20 bp, Artificial Sequence
  Description of Artificial Sequence: Synthetic oligonucleotide
  Target: ATXN2; (-) strand; PAM type: YTN; PAM sequence: CTT
ggcctcccaaagtattgaaa

SEQ ID NO: 81029 - DNA, 20 bp, Artificial Sequence
  Description of Artificial Sequence: Synthetic oligonucleotide
  Target: ATXN2; (-) strand; PAM type: YTN; PAM sequence: TTG
ccttggcctcccaaagtatt

SEQ ID NO: 81030 - DNA, 20 bp, Artificial Sequence
  Description of Artificial Sequence: Synthetic oligonucleotide
  Target: ATXN2; (-) strand; PAM type: YTN; PAM sequence: CTT
gccttggcctcccaaagtat

SEQ ID NO: 81031 - DNA, 20 bp, Artificial Sequence
  Description of Artificial Sequence: Synthetic oligonucleotide
  Target: ATXN2; (-) strand; PAM type: YTN; PAM sequence: CTC
ttgccttggcctcccaaagt

SEQ ID NO: 81032 - DNA, 20 bp, Artificial Sequence
  Description of Artificial Sequence: Synthetic oligonucleotide
  Target: ATXN2; (-) strand; PAM type: YTN; PAM sequence: CTC
ctcttgccttggcctcccaa

SEQ ID NO: 81033 - DNA, 20 bp, Artificial Sequence
  Description of Artificial Sequence: Synthetic oligonucleotide
  Target: ATXN2; (-) strand; PAM type: YTN; PAM sequence: CTC
aagtactcctcttgccttgg

SEQ ID NO: 81034 - DNA, 20 bp, Artificial Sequence
  Description of Artificial Sequence: Synthetic oligonucleotide
  Target: ATXN2; (-) strand; PAM type: YTN; PAM sequence: CTG
ccctcaagtactcctcttgc

SEQ ID NO: 81035 - DNA, 20 bp, Artificial Sequence
  Description of Artificial Sequence: Synthetic oligonucleotide
  Target: ATXN2; (-) strand; PAM type: YTN; PAM sequence: TTC
tgccctcaagtactcctctt

SEQ ID NO: 81036 - DNA, 20 bp, Artificial Sequence
  Description of Artificial Sequence: Synthetic oligonucleotide
  Target: ATXN2; (-) strand; PAM type: YTN; PAM sequence: CTT
ctgccctcaagtactcctct

SEQ ID NO: 81037 - DNA, 20 bp, Artificial Sequence
  Description of Artificial Sequence: Synthetic oligonucleotide
  Target: ATXN2; (-) strand; PAM type: YTN; PAM sequence: TTG
aacttctgccctcaagtact

SEQ ID NO: 81038 - DNA, 20 bp, Artificial Sequence
  Description of Artificial Sequence: Synthetic oligonucleotide
  Target: ATXN2; (-) strand; PAM type: YTN; PAM sequence: TTT
gaacttctgccctcaagtac

SEQ ID NO: 81039 - DNA, 20 bp, Artificial Sequence
  Description of Artificial Sequence: Synthetic oligonucleotide
  Target: ATXN2; (-) strand; PAM type: YTN; PAM sequence: TTT
tgaacttctgccctcaagta

SEQ ID NO: 81040 - DNA, 20 bp, Artificial Sequence
  Description of Artificial Sequence: Synthetic oligonucleotide
  Target: ATXN2; (-) strand; PAM type: YTN; PAM sequence: CTG
gttttgaacttctgccctca

SEQ ID NO: 81041 - DNA, 20 bp, Artificial Sequence
  Description of Artificial Sequence: Synthetic oligonucleotide
  Target: ATXN2; (-) strand; PAM type: YTN; PAM sequence: TTA
cccgggctggttttgaactt

SEQ ID NO: 81042 - DNA, 20 bp, Artificial Sequence
  Description of Artificial Sequence: Synthetic oligonucleotide
  Target: ATXN2; (-) strand; PAM type: YTN; PAM sequence: CTG
ttacccgggctggttttgaa

SEQ ID NO: 81043 - DNA, 20 bp, Artificial Sequence
  Description of Artificial Sequence: Synthetic oligonucleotide
  Target: ATXN2; (-) strand; PAM type: YTN; PAM sequence: CTC
actgttacccgggctggttt

SEQ ID NO: 81044 - DNA, 20 bp, Artificial Sequence
  Description of Artificial Sequence: Synthetic oligonucleotide
  Target: ATXN2; (-) strand; PAM type: YTN; PAM sequence: TTG
tagagacagtctcactgtta

SEQ ID NO: 81045 - DNA, 20 bp, Artificial Sequence
  Description of Artificial Sequence: Synthetic oligonucleotide
  Target: ATXN2; (-) strand; PAM type: YTN; PAM sequence: TTT
gtagagacagtctcactgtt

SEQ ID NO: 81046 - DNA, 20 bp, Artificial Sequence
  Description of Artificial Sequence: Synthetic oligonucleotide
  Target: ATXN2; (-) strand; PAM type: YTN; PAM sequence: TTT
tgtagagacagtctcactgt

SEQ ID NO: 81047 - DNA, 20 bp, Artificial Sequence
  Description of Artificial Sequence: Synthetic oligonucleotide
  Target: ATXN2; (-) strand; PAM type: YTN; PAM sequence: TTT
ttgtagagacagtctcactg

SEQ ID NO: 81048 - DNA, 20 bp, Artificial Sequence
  Description of Artificial Sequence: Synthetic oligonucleotide
  Target: ATXN2; (-) strand; PAM type: YTN; PAM sequence: TTA
aaaaaatttttgtagagaca

SEQ ID NO: 81049 - DNA, 20 bp, Artificial Sequence
  Description of Artificial Sequence: Synthetic oligonucleotide
  Target: ATXN2; (-) strand; PAM type: YTN; PAM sequence: TTT
aaaaaaatttttgtagagac

SEQ ID NO: 81050 - DNA, 20 bp, Artificial Sequence
  Description of Artificial Sequence: Synthetic oligonucleotide
  Target: ATXN2; (-) strand; PAM type: YTN; PAM sequence: CTA
caatttaaaaaaatttttgt

SEQ ID NO: 81051 - DNA, 20 bp, Artificial Sequence
  Description of Artificial Sequence: Synthetic oligonucleotide
  Target: ATXN2; (-) strand; PAM type: YTN; PAM sequence: CTG
cgccctacaatttaaaaaaa

SEQ ID NO: 81052 - DNA, 20 bp, Artificial Sequence
  Description of Artificial Sequence: Synthetic oligonucleotide
  Target: ATXN2; (-) strand; PAM type: YTN; PAM sequence: CTC
ccaaagtgtctgcgccctac

SEQ ID NO: 81053 - DNA, 20 bp, Artificial Sequence
  Description of Artificial Sequence: Synthetic oligonucleotide
  Target: ATXN2; (-) strand; PAM type: YTN; PAM sequence: TTC
gcctcccaaagtgtctgcgc

SEQ ID NO: 81054 - DNA, 20 bp, Artificial Sequence
  Description of Artificial Sequence: Synthetic oligonucleotide
  Target: ATXN2; (-) strand; PAM type: YTN; PAM sequence: CTT
cgcctcccaaagtgtctgcg

SEQ ID NO: 81055 - DNA, 20 bp, Artificial Sequence
  Description of Artificial Sequence: Synthetic oligonucleotide
  Target: ATXN2; (-) strand; PAM type: YTN; PAM sequence: CTG
cccgccttcgcctcccaaag

SEQ ID NO: 81056 - DNA, 20 bp, Artificial Sequence
  Description of Artificial Sequence: Synthetic oligonucleotide
  Target: ATXN2; (-) strand; PAM type: YTN; PAM sequence: CTC
aagtgatctgcccgccttcg

SEQ ID NO: 81057 - DNA, 20 bp, Artificial Sequence
  Description of Artificial Sequence: Synthetic oligonucleotide
  Target: ATXN2; (-) strand; PAM type: YTN; PAM sequence: CTG
agctcaagtgatctgcccgc

SEQ ID NO: 81058 - DNA, 20 bp, Artificial Sequence
  Description of Artificial Sequence: Synthetic oligonucleotide
  Target: ATXN2; (-) strand; PAM type: YTN; PAM sequence: CTC
ctgagctcaagtgatctgcc

SEQ ID NO: 81059 - DNA, 20 bp, Artificial Sequence
  Description of Artificial Sequence: Synthetic oligonucleotide
  Target: ATXN2; (-) strand; PAM type: YTN; PAM sequence: CTC
aaactcctgagctcaagtga

SEQ ID NO: 81060 - DNA, 20 bp, Artificial Sequence
  Description of Artificial Sequence: Synthetic oligonucleotide
  Target: ATXN2; (-) strand; PAM type: YTN; PAM sequence: TTG
gtctcaaactcctgagctca

SEQ ID NO: 81061 - DNA, 20 bp, Artificial Sequence
  Description of Artificial Sequence: Synthetic oligonucleotide
  Target: ATXN2; (-) strand; PAM type: YTN; PAM sequence: TTG
cccaggttggtctcaaactc

SEQ ID NO: 81062 - DNA, 20 bp, Artificial Sequence
  Description of Artificial Sequence: Synthetic oligonucleotide
  Target: ATXN2; (-) strand; PAM type: YTN; PAM sequence: TTA
ccatgttgcccaggttggtc

SEQ ID NO: 81063 - DNA, 20 bp, Artificial Sequence
  Description of Artificial Sequence: Synthetic oligonucleotide
  Target: ATXN2; (-) strand; PAM type: YTN; PAM sequence: CTT
accatgttgcccaggttggt

SEQ ID NO: 81064 - DNA, 20 bp, Artificial Sequence
  Description of Artificial Sequence: Synthetic oligonucleotide
  Target: ATXN2; (-) strand; PAM type: YTN; PAM sequence: TTA
gtagtgacagggtcttacca

SEQ ID NO: 81065 - DNA, 20 bp, Artificial Sequence
  Description of Artificial Sequence: Synthetic oligonucleotide
  Target: ATXN2; (-) strand; PAM type: YTN; PAM sequence: TTT
agtagtgacagggtcttacc

SEQ ID NO: 81066 - DNA, 20 bp, Artificial Sequence
  Description of Artificial Sequence: Synthetic oligonucleotide
  Target: ATXN2; (-) strand; PAM type: YTN; PAM sequence: TTT
tagtagtgacagggtcttac

SEQ ID NO: 81067 - DNA, 20 bp, Artificial Sequence
  Description of Artificial Sequence: Synthetic oligonucleotide
  Target: ATXN2; (-) strand; PAM type: YTN; PAM sequence: TTT
ttagtagtgacagggtctta

SEQ ID NO: 81068 - DNA, 20 bp, Artificial Sequence
  Description of Artificial Sequence: Synthetic oligonucleotide
  Target: ATXN2; (-) strand; PAM type: YTN; PAM sequence: TTG
tatttttagtagtgacaggg

SEQ ID NO: 81069 - DNA, 20 bp, Artificial Sequence
  Description of Artificial Sequence: Synthetic oligonucleotide
  Target: ATXN2; (-) strand; PAM type: YTN; PAM sequence: TTT
gtatttttagtagtgacagg

SEQ ID NO: 81070 - DNA, 20 bp, Artificial Sequence
  Description of Artificial Sequence: Synthetic oligonucleotide
  Target: ATXN2; (-) strand; PAM type: YTN; PAM sequence: TTT
tgtatttttagtagtgacag

SEQ ID NO: 81071 - DNA, 20 bp, Artificial Sequence
  Description of Artificial Sequence: Synthetic oligonucleotide
  Target: ATXN2; (-) strand; PAM type: YTN; PAM sequence: TTT
ttgtatttttagtagtgaca

SEQ ID NO: 81072 - DNA, 20 bp, Artificial Sequence
  Description of Artificial Sequence: Synthetic oligonucleotide
  Target: ATXN2; (-) strand; PAM type: YTN; PAM sequence: TTT
tttgtatttttagtagtgac

SEQ ID NO: 81073 - DNA, 20 bp, Artificial Sequence
  Description of Artificial Sequence: Synthetic oligonucleotide
  Target: ATXN2; (-) strand; PAM type: YTN; PAM sequence: TTA
attttttgtatttttagtag

SEQ ID NO: 81074 - DNA, 20 bp, Artificial Sequence
  Description of Artificial Sequence: Synthetic oligonucleotide
  Target: ATXN2; (-) strand; PAM type: YTN; PAM sequence: CTG
gttaattttttgtattttta

SEQ ID NO: 81075 - DNA, 20 bp, Artificial Sequence
  Description of Artificial Sequence: Synthetic oligonucleotide
  Target: ATXN2; (-) strand; PAM type: YTN; PAM sequence: TTG
ggaccacatgtgtgtgccat

SEQ ID NO: 81076 - DNA, 20 bp, Artificial Sequence
  Description of Artificial Sequence: Synthetic oligonucleotide
  Target: ATXN2; (-) strand; PAM type: YTN; PAM sequence: CTT
gggaccacatgtgtgtgcca

SEQ ID NO: 81077 - DNA, 20 bp, Artificial Sequence
  Description of Artificial Sequence: Synthetic oligonucleotide
  Target: ATXN2; (-) strand; PAM type: YTN; PAM sequence: CTG
agtagcttgggaccacatgt

SEQ ID NO: 81078 - DNA, 20 bp, Artificial Sequence
  Description of Artificial Sequence: Synthetic oligonucleotide
  Target: ATXN2; (-) strand; PAM type: YTN; PAM sequence: CTC
ctgagtagcttgggaccaca

SEQ ID NO: 81079 - DNA, 20 bp, Artificial Sequence
  Description of Artificial Sequence: Synthetic oligonucleotide
  Target: ATXN2; (-) strand; PAM type: YTN; PAM sequence: CTC
agcctcctgagtagcttggg

SEQ ID NO: 81080 - DNA, 20 bp, Artificial Sequence
  Description of Artificial Sequence: Synthetic oligonucleotide
  Target: ATXN2; (-) strand; PAM type: YTN; PAM sequence: CTG
cctcagcctcctgagtagct

SEQ ID NO: 81081 - DNA, 20 bp, Artificial Sequence
  Description of Artificial Sequence: Synthetic oligonucleotide
  Target: ATXN2; (-) strand; PAM type: YTN; PAM sequence: TTC
tgcctcagcctcctgagtag

SEQ ID NO: 81082 - DNA, 20 bp, Artificial Sequence
  Description of Artificial Sequence: Synthetic oligonucleotide
  Target: ATXN2; (-) strand; PAM type: YTN; PAM sequence: TTC
aagcagttctgcctcagcct

SEQ ID NO: 81083 - DNA, 20 bp, Artificial Sequence
  Description of Artificial Sequence: Synthetic oligonucleotide
  Target: ATXN2; (-) strand; PAM type: YTN; PAM sequence: CTC
ccgagttcaagcagttctgc

SEQ ID NO: 81084 - DNA, 20 bp, Artificial Sequence
  Description of Artificial Sequence: Synthetic oligonucleotide
  Target: ATXN2; (-) strand; PAM type: YTN; PAM sequence: CTC
cacctcccgagttcaagcag

SEQ ID NO: 81085 - DNA, 20 bp, Artificial Sequence
  Description of Artificial Sequence: Synthetic oligonucleotide
  Target: ATXN2; (-) strand; PAM type: YTN; PAM sequence: CTA
acctccacctcccgagttca

SEQ ID NO: 81086 - DNA, 20 bp, Artificial Sequence
  Description of Artificial Sequence: Synthetic oligonucleotide
  Target: ATXN2; (-) strand; PAM type: YTN; PAM sequence: CTC
taacctccacctcccgagtt

SEQ ID NO: 81087 - DNA, 20 bp, Artificial Sequence
  Description of Artificial Sequence: Synthetic oligonucleotide
  Target: ATXN2; (-) strand; PAM type: YTN; PAM sequence: CTC
actctaacctccacctcccg

SEQ ID NO: 81088 - DNA, 20 bp, Artificial Sequence
  Description of Artificial Sequence: Synthetic oligonucleotide
  Target: ATXN2; (-) strand; PAM type: YTN; PAM sequence: CTG
ctcactctaacctccacctc

SEQ ID NO: 81089 - DNA, 20 bp, Artificial Sequence
  Description of Artificial Sequence: Synthetic oligonucleotide
  Target: ATXN2; (-) strand; PAM type: YTN; PAM sequence: TTC
tgctcactctaacctccacc

SEQ ID NO: 81090 - DNA, 20 bp, Artificial Sequence
  Description of Artificial Sequence: Synthetic oligonucleotide
  Target: ATXN2; (-) strand; PAM type: YTN; PAM sequence: TTT
ctgctcactctaacctccac

SEQ ID NO: 81091 - DNA, 20 bp, Artificial Sequence
  Description of Artificial Sequence: Synthetic oligonucleotide
  Target: ATXN2; (-) strand; PAM type: YTN; PAM sequence: CTG
cagtgcgtggtgcaatttct

SEQ ID NO: 81092 - DNA, 20 bp, Artificial Sequence
  Description of Artificial Sequence: Synthetic oligonucleotide
  Target: ATXN2; (-) strand; PAM type: YTN; PAM sequence: TTG
tcacccaggctgcagtgcgt

SEQ ID NO: 81093 - DNA, 20 bp, Artificial Sequence
  Description of Artificial Sequence: Synthetic oligonucleotide
  Target: ATXN2; (-) strand; PAM type: YTN; PAM sequence: TTT
gtcacccaggctgcagtgcg

SEQ ID NO: 81094 - DNA, 20 bp, Artificial Sequence
  Description of Artificial Sequence: Synthetic oligonucleotide
  Target: ATXN2; (-) strand; PAM type: YTN; PAM sequence: CTT
tgtcacccaggctgcagtgc

SEQ ID NO: 81095 - DNA, 20 bp, Artificial Sequence
  Description of Artificial Sequence: Synthetic oligonucleotide
  Target: ATXN2; (-) strand; PAM type: YTN; PAM sequence: CTC
gctttgtcacccaggctgca

SEQ ID NO: 81096 - DNA, 20 bp, Artificial Sequence
  Description of Artificial Sequence: Synthetic oligonucleotide
  Target: ATXN2; (-) strand; PAM type: YTN; PAM sequence: TTG
agacaccgtctcgctttgtc

SEQ ID NO: 81097 - DNA, 20 bp, Artificial Sequence
  Description of Artificial Sequence: Synthetic oligonucleotide
  Target: ATXN2; (-) strand; PAM type: YTN; PAM sequence: TTT
gagacaccgtctcgctttgt

SEQ ID NO: 81098 - DNA, 20 bp, Artificial Sequence
  Description of Artificial Sequence: Synthetic oligonucleotide
  Target: ATXN2; (-) strand; PAM type: YTN; PAM sequence: TTT
tgagacaccgtctcgctttg

SEQ ID NO: 81099 - DNA, 20 bp, Artificial Sequence
  Description of Artificial Sequence: Synthetic oligonucleotide
  Target: ATXN2; (-) strand; PAM type: YTN; PAM sequence: TTT
ttgagacaccgtctcgcttt

SEQ ID NO: 81100 - DNA, 20 bp, Artificial Sequence
  Description of Artificial Sequence: Synthetic oligonucleotide
  Target: ATXN2; (-) strand; PAM type: YTN; PAM sequence: TTT
tttgagacaccgtctcgctt

SEQ ID NO: 81101 - DNA, 20 bp, Artificial Sequence
  Description of Artificial Sequence: Synthetic oligonucleotide
  Target: ATXN2; (-) strand; PAM type: YTN; PAM sequence: TTT
ttttgagacaccgtctcgct

SEQ ID NO: 81102 - DNA, 20 bp, Artificial Sequence
  Description of Artificial Sequence: Synthetic oligonucleotide
  Target: ATXN2; (-) strand; PAM type: YTN; PAM sequence: TTT
tttttgagacaccgtctcgc

SEQ ID NO: 81103 - DNA, 20 bp, Artificial Sequence
  Description of Artificial Sequence: Synthetic oligonucleotide
  Target: ATXN2; (-) strand; PAM type: YTN; PAM sequence: TTT
ttttttgagacaccgtctcg

SEQ ID NO: 81104 - DNA, 20 bp, Artificial Sequence
  Description of Artificial Sequence: Synthetic oligonucleotide
  Target: ATXN2; (-) strand; PAM type: YTN; PAM sequence: TTT
tttttttgagacaccgtctc

SEQ ID NO: 81105 - DNA, 20 bp, Artificial Sequence
  Description of Artificial Sequence: Synthetic oligonucleotide
  Target: ATXN2; (-) strand; PAM type: YTN; PAM sequence: TTT
ttttttttgagacaccgtct

SEQ ID NO: 81106 - DNA, 20 bp, Artificial Sequence
  Description of Artificial Sequence: Synthetic oligonucleotide
  Target: ATXN2; (-) strand; PAM type: YTN; PAM sequence: TTT
tttttttttgagacaccgtc

SEQ ID NO: 81107 - DNA, 20 bp, Artificial Sequence
  Description of Artificial Sequence: Synthetic oligonucleotide
  Target: ATXN2; (-) strand; PAM type: YTN; PAM sequence: TTT
ttttttttttgagacaccgt

SEQ ID NO: 81108 - DNA, 20 bp, Artificial Sequence
  Description of Artificial Sequence: Synthetic oligonucleotide
  Target: ATXN2; (-) strand; PAM type: YTN; PAM sequence: CTT
tttttttttttgagacaccg

SEQ ID NO: 81109 - DNA, 20 bp, Artificial Sequence
  Description of Artificial Sequence: Synthetic oligonucleotide
  Target: ATXN2; (-) strand; PAM type: YTN; PAM sequence: TTC
tttttttttttttgagacac

SEQ ID NO: 81110 - DNA, 20 bp, Artificial Sequence
  Description of Artificial Sequence: Synthetic oligonucleotide
  Target: ATXN2; (-) strand; PAM type: YTN; PAM sequence: CTG
cagttctttttttttttttg

SEQ ID NO: 81111 - DNA, 20 bp, Artificial Sequence
  Description of Artificial Sequence: Synthetic oligonucleotide
  Target: ATXN2; (-) strand; PAM type: YTN; PAM sequence: CTG
ggaccacaggcacatgcaac

SEQ ID NO: 81112 - DNA, 20 bp, Artificial Sequence
  Description of Artificial Sequence: Synthetic oligonucleotide
  Target: ATXN2; (-) strand; PAM type: YTN; PAM sequence: CTG
agtagctgggaccacaggca

SEQ ID NO: 81113 - DNA, 20 bp, Artificial Sequence
  Description of Artificial Sequence: Synthetic oligonucleotide
  Target: ATXN2; (-) strand; PAM type: YTN; PAM sequence: CTC
ctgagtagctgggaccacag

SEQ ID NO: 81114 - DNA, 20 bp, Artificial Sequence
  Description of Artificial Sequence: Synthetic oligonucleotide
  Target: ATXN2; (-) strand; PAM type: YTN; PAM sequence: CTC
agcctcctgagtagctggga

SEQ ID NO: 81115 - DNA, 20 bp, Artificial Sequence
  Description of Artificial Sequence: Synthetic oligonucleotide
  Target: ATXN2; (-) strand; PAM type: YTN; PAM sequence: CTC
ccacctcagcctcctgagta

SEQ ID NO: 81116 - DNA, 20 bp, Artificial Sequence
  Description of Artificial Sequence: Synthetic oligonucleotide
  Target: ATXN2; (-) strand; PAM type: YTN; PAM sequence: TTC
aagtgatcctcccacctcag

SEQ ID NO: 81117 - DNA, 20 bp, Artificial Sequence
  Description of Artificial Sequence: Synthetic oligonucleotide
  Target: ATXN2; (-) strand; PAM type: YTN; PAM sequence: CTG
ggttcaagtgatcctcccac

SEQ ID NO: 81118 - DNA, 20 bp, Artificial Sequence
  Description of Artificial Sequence: Synthetic oligonucleotide
  Target: ATXN2; (-) strand; PAM type: YTN; PAM sequence: CTC
ctgggttcaagtgatcctcc

SEQ ID NO: 81119 - DNA, 20 bp, Artificial Sequence
  Description of Artificial Sequence: Synthetic oligonucleotide
  Target: ATXN2; (-) strand; PAM type: YTN; PAM sequence: TTA
actcctgggttcaagtgatc

SEQ ID NO: 81120 - DNA, 20 bp, Artificial Sequence
  Description of Artificial Sequence: Synthetic oligonucleotide
  Target: ATXN2; (-) strand; PAM type: YTN; PAM sequence: TTT
aactcctgggttcaagtgat

SEQ ID NO: 81121 - DNA, 20 bp, Artificial Sequence
  Description of Artificial Sequence: Synthetic oligonucleotide
  Target: ATXN2; (-) strand; PAM type: YTN; PAM sequence: CTT
taactcctgggttcaagtga

SEQ ID NO: 81122 - DNA, 20 bp, Artificial Sequence
  Description of Artificial Sequence: Synthetic oligonucleotide
  Target: ATXN2; (-) strand; PAM type: YTN; PAM sequence: TTG
cagcctttaactcctgggtt

SEQ ID NO: 81123 - DNA, 20 bp, Artificial Sequence
  Description of Artificial Sequence: Synthetic oligonucleotide
  Target: ATXN2; (-) strand; PAM type: YTN; PAM sequence: TTA
ttgcagcctttaactcctgg

SEQ ID NO: 81124 - DNA, 20 bp, Artificial Sequence
  Description of Artificial Sequence: Synthetic oligonucleotide
  Target: ATXN2; (-) strand; PAM type: YTN; PAM sequence: CTT
attgcagcctttaactcctg

SEQ ID NO: 81125 - DNA, 20 bp, Artificial Sequence
  Description of Artificial Sequence: Synthetic oligonucleotide
  Target: ATXN2; (-) strand; PAM type: YTN; PAM sequence: TTG
tgatcatggcttattgcagc

SEQ ID NO: 81126 - DNA, 20 bp, Artificial Sequence
  Description of Artificial Sequence: Synthetic oligonucleotide
  Target: ATXN2; (-) strand; PAM type: YTN; PAM sequence: TTG
gagtacagtattgtgatcat

SEQ ID NO: 81127 - DNA, 20 bp, Artificial Sequence
  Description of Artificial Sequence: Synthetic oligonucleotide
  Target: ATXN2; (-) strand; PAM type: YTN; PAM sequence: TTG
cccaggttggagtacagtat

SEQ ID NO: 81128 - DNA, 20 bp, Artificial Sequence
  Description of Artificial Sequence: Synthetic oligonucleotide
  Target: ATXN2; (-) strand; PAM type: YTN; PAM sequence: CTG
tattgcccaggttggagtac

SEQ ID NO: 81129 - DNA, 20 bp, Artificial Sequence
  Description of Artificial Sequence: Synthetic oligonucleotide
  Target: ATXN2; (-) strand; PAM type: YTN; PAM sequence: TTG
ctgtattgcccaggttggag

SEQ ID NO: 81130 - DNA, 20 bp, Artificial Sequence
  Description of Artificial Sequence: Synthetic oligonucleotide
  Target: ATXN2; (-) strand; PAM type: YTN; PAM sequence: CTT
gctgtattgcccaggttgga

SEQ ID NO: 81131 - DNA, 20 bp, Artificial Sequence
  Description of Artificial Sequence: Synthetic oligonucleotide
  Target: ATXN2; (-) strand; PAM type: YTN; PAM sequence: TTG
agatgggatcttgctgtatt

SEQ ID NO: 81132 - DNA, 20 bp, Artificial Sequence
  Description of Artificial Sequence: Synthetic oligonucleotide
  Target: ATXN2; (-) strand; PAM type: YTN; PAM sequence: TTT
gagatgggatcttgctgtat

SEQ ID NO: 81133 - DNA, 20 bp, Artificial Sequence
  Description of Artificial Sequence: Synthetic oligonucleotide
  Target: ATXN2; (-) strand; PAM type: YTN; PAM sequence: TTT
tgagatgggatcttgctgta

SEQ ID NO: 81134 - DNA, 20 bp, Artificial Sequence
  Description of Artificial Sequence: Synthetic oligonucleotide
  Target: ATXN2; (-) strand; PAM type: YTN; PAM sequence: TTT
ttgagatgggatcttgctgt

SEQ ID NO: 81135 - DNA, 20 bp, Artificial Sequence
  Description of Artificial Sequence: Synthetic oligonucleotide
  Target: ATXN2; (-) strand; PAM type: YTN; PAM sequence: TTT
tttgagatgggatcttgctg

SEQ ID NO: 81136 - DNA, 20 bp, Artificial Sequence
  Description of Artificial Sequence: Synthetic oligonucleotide
  Target: ATXN2; (-) strand; PAM type: YTN; PAM sequence: TTA
ttttttgagatgggatcttg

SEQ ID NO: 81137 - DNA, 20 bp, Artificial Sequence
  Description of Artificial Sequence: Synthetic oligonucleotide
  Target: ATXN2; (-) strand; PAM type: YTN; PAM sequence: TTT
attttttgagatgggatctt

SEQ ID NO: 81138 - DNA, 20 bp, Artificial Sequence
  Description of Artificial Sequence: Synthetic oligonucleotide
  Target: ATXN2; (-) strand; PAM type: YTN; PAM sequence: TTA
tgtatttattttttgagatg

SEQ ID NO: 81139 - DNA, 20 bp, Artificial Sequence
  Description of Artificial Sequence: Synthetic oligonucleotide
  Target: ATXN2; (-) strand; PAM type: YTN; PAM sequence: TTT
atgtatttattttttgagat

SEQ ID NO: 81140 - DNA, 20 bp, Artificial Sequence
  Description of Artificial Sequence: Synthetic oligonucleotide
  Target: ATXN2; (-) strand; PAM type: YTN; PAM sequence: TTT
tatgtatttattttttgaga

SEQ ID NO: 81141 - DNA, 20 bp, Artificial Sequence
  Description of Artificial Sequence: Synthetic oligonucleotide
  Target: ATXN2; (-) strand; PAM type: YTN; PAM sequence: TTT
ttatgtatttattttttgag

SEQ ID NO: 81142 - DNA, 20 bp, Artificial Sequence
  Description of Artificial Sequence: Synthetic oligonucleotide
  Target: ATXN2; (-) strand; PAM type: YTN; PAM sequence: CTG
tttttatgtatttatttttt

SEQ ID NO: 81143 - DNA, 20 bp, Artificial Sequence
  Description of Artificial Sequence: Synthetic oligonucleotide
  Target: ATXN2; (-) strand; PAM type: YTN; PAM sequence: TTC
tgtttttatgtatttatttt

SEQ ID NO: 81144 - DNA, 20 bp, Artificial Sequence
  Description of Artificial Sequence: Synthetic oligonucleotide
  Target: ATXN2; (-) strand; PAM type: YTN; PAM sequence: TTT
ctgtttttatgtatttattt

SEQ ID NO: 81145 - DNA, 20 bp, Artificial Sequence
  Description of Artificial Sequence: Synthetic oligonucleotide
  Target: ATXN2; (-) strand; PAM type: YTN; PAM sequence: TTT
tctgtttttatgtatttatt

SEQ ID NO: 81146 - DNA, 20 bp, Artificial Sequence
  Description of Artificial Sequence: Synthetic oligonucleotide
  Target: ATXN2; (-) strand; PAM type: YTN; PAM sequence: TTA
atattttctgtttttatgta

SEQ ID NO: 81147 - DNA, 20 bp, Artificial Sequence
  Description of Artificial Sequence: Synthetic oligonucleotide
  Target: ATXN2; (-) strand; PAM type: YTN; PAM sequence: CTT
aatattttctgtttttatgt

SEQ ID NO: 81148 - DNA, 20 bp, Artificial Sequence
  Description of Artificial Sequence: Synthetic oligonucleotide
  Target: ATXN2; (-) strand; PAM type: YTN; PAM sequence: CTA
aagtcttaatattttctgtt

SEQ ID NO: 81149 - DNA, 20 bp, Artificial Sequence
  Description of Artificial Sequence: Synthetic oligonucleotide
  Target: ATXN2; (-) strand; PAM type: YTN; PAM sequence: CTG
agatactaaagtcttaatat

SEQ ID NO: 81150 - DNA, 20 bp, Artificial Sequence
  Description of Artificial Sequence: Synthetic oligonucleotide
  Target: ATXN2; (-) strand; PAM type: YTN; PAM sequence: CTC
aaacaaacaaacaaacaaac

SEQ ID NO: 81151 - DNA, 20 bp, Artificial Sequence
  Description of Artificial Sequence: Synthetic oligonucleotide
  Target: ATXN2; (-) strand; PAM type: YTN; PAM sequence: CTC
cgtctcaaacaaacaaacaa

SEQ ID NO: 81152 - DNA, 20 bp, Artificial Sequence
  Description of Artificial Sequence: Synthetic oligonucleotide
  Target: ATXN2; (-) strand; PAM type: YTN; PAM sequence: CTG
ggcgacagagcgagactccg

SEQ ID NO: 81153 - DNA, 20 bp, Artificial Sequence
  Description of Artificial Sequence: Synthetic oligonucleotide
  Target: ATXN2; (-) strand; PAM type: YTN; PAM sequence: CTG
ctgggcgacagagcgagact

SEQ ID NO: 81154 - DNA, 20 bp, Artificial Sequence
  Description of Artificial Sequence: Synthetic oligonucleotide
  Target: ATXN2; (-) strand; PAM type: YTN; PAM sequence: CTC
cagcctgctgggcgacagag

SEQ ID NO: 81155 - DNA, 20 bp, Artificial Sequence
  Description of Artificial Sequence: Synthetic oligonucleotide
  Target: ATXN2; (-) strand; PAM type: YTN; PAM sequence: CTG
cactccagcctgctgggcga

SEQ ID NO: 81156 - DNA, 20 bp, Artificial Sequence
  Description of Artificial Sequence: Synthetic oligonucleotide
  Target: ATXN2; (-) strand; PAM type: YTN; PAM sequence: TTG
cagtgagcggagatggtgcc

SEQ ID NO: 81157 - DNA, 20 bp, Artificial Sequence
  Description of Artificial Sequence: Synthetic oligonucleotide
  Target: ATXN2; (-) strand; PAM type: YTN; PAM sequence: CTT
gcagtgagcggagatggtgc

SEQ ID NO: 81158 - DNA, 20 bp, Artificial Sequence
  Description of Artificial Sequence: Synthetic oligonucleotide
  Target: ATXN2; (-) strand; PAM type: YTN; PAM sequence: CTG
aggcaggagaatggcgtgaa

SEQ ID NO: 81159 - DNA, 20 bp, Artificial Sequence
  Description of Artificial Sequence: Synthetic oligonucleotide
  Target: ATXN2; (-) strand; PAM type: YTN; PAM sequence: TTG
ggaggctgaggcaggagaat

SEQ ID NO: 81160 - DNA, 20 bp, Artificial Sequence
  Description of Artificial Sequence: Synthetic oligonucleotide
  Target: ATXN2; (-) strand; PAM type: YTN; PAM sequence: CTT
gggaggctgaggcaggagaa

SEQ ID NO: 81161 - DNA, 20 bp, Artificial Sequence
  Description of Artificial Sequence: Synthetic oligonucleotide
  Target: ATXN2; (-) strand; PAM type: YTN; PAM sequence: CTA
cttgggaggctgaggcagga

SEQ ID NO: 81162 - DNA, 20 bp, Artificial Sequence
  Description of Artificial Sequence: Synthetic oligonucleotide
  Target: ATXN2; (-) strand; PAM type: YTN; PAM sequence: CTG
taatcccagctacttgggag

SEQ ID NO: 81163 - DNA, 20 bp, Artificial Sequence
  Description of Artificial Sequence: Synthetic oligonucleotide
  Target: ATXN2; (-) strand; PAM type: YTN; PAM sequence: TTA
gccaggcgtggtggcgggcg

SEQ ID NO: 81164 - DNA, 20 bp, Artificial Sequence
  Description of Artificial Sequence: Synthetic oligonucleotide
  Target: ATXN2; (-) strand; PAM type: YTN; PAM sequence: CTA
aaaatacaaaaaattagcca

SEQ ID NO: 81165 - DNA, 20 bp, Artificial Sequence
  Description of Artificial Sequence: Synthetic oligonucleotide
  Target: ATXN2; (-) strand; PAM type: YTN; PAM sequence: CTA
ctaaaaatacaaaaaattag

SEQ ID NO: 81166 - DNA, 20 bp, Artificial Sequence
  Description of Artificial Sequence: Synthetic oligonucleotide
  Target: ATXN2; (-) strand; PAM type: YTN; PAM sequence: CTC
tactaaaaatacaaaaaatt

SEQ ID NO: 81167 - DNA, 20 bp, Artificial Sequence
  Description of Artificial Sequence: Synthetic oligonucleotide
  Target: ATXN2; (-) strand; PAM type: YTN; PAM sequence: CTG
tctctactaaaaatacaaaa

SEQ ID NO: 81168 - DNA, 20 bp, Artificial Sequence
  Description of Artificial Sequence: Synthetic oligonucleotide
  Target: ATXN2; (-) strand; PAM type: YTN; PAM sequence: CTA
acatggggaaaccctgtctc

SEQ ID NO: 81169 - DNA, 20 bp, Artificial Sequence
  Description of Artificial Sequence: Synthetic oligonucleotide
  Target: ATXN2; (-) strand; PAM type: YTN; PAM sequence: CTG
cctaacatggggaaaccctg

SEQ ID NO: 81170 - DNA, 20 bp, Artificial Sequence
  Description of Artificial Sequence: Synthetic oligonucleotide
  Target: ATXN2; (-) strand; PAM type: YTN; PAM sequence: TTG
gaaggccgaggcgggtggat

SEQ ID NO: 81171 - DNA, 20 bp, Artificial Sequence
  Description of Artificial Sequence: Synthetic oligonucleotide
  Target: ATXN2; (-) strand; PAM type: YTN; PAM sequence: TTT
ggaaggccgaggcgggtgga

SEQ ID NO: 81172 - DNA, 20 bp, Artificial Sequence
  Description of Artificial Sequence: Synthetic oligonucleotide
  Target: ATXN2; (-) strand; PAM type: YTN; PAM sequence: CTT
tggaaggccgaggcgggtgg

SEQ ID NO: 81173 - DNA, 20 bp, Artificial Sequence
  Description of Artificial Sequence: Synthetic oligonucleotide
  Target: ATXN2; (-) strand; PAM type: YTN; PAM sequence: CTG
taatcccagcactttggaag

SEQ ID NO: 81174 - DNA, 20 bp, Artificial Sequence
  Description of Artificial Sequence: Synthetic oligonucleotide
  Target: ATXN2; (-) strand; PAM type: YTN; PAM sequence: CTC
gtgcctgtaatcccagcact

SEQ ID NO: 81175 - DNA, 20 bp, Artificial Sequence
  Description of Artificial Sequence: Synthetic oligonucleotide
  Target: ATXN2; (-) strand; PAM type: YTN; PAM sequence: CTG
gccgggcgcggtggctcgtg

SEQ ID NO: 81176 - DNA, 20 bp, Artificial Sequence
  Description of Artificial Sequence: Synthetic oligonucleotide
  Target: ATXN2; (-) strand; PAM type: YTN; PAM sequence: CTG
agatactggccgggcgcggt

SEQ ID NO: 81177 - DNA, 20 bp, Artificial Sequence
  Description of Artificial Sequence: Synthetic oligonucleotide
  Target: ATXN2; (-) strand; PAM type: YTN; PAM sequence: CTC
caaaaaaaaaaaaaaaacaa

SEQ ID NO: 81178 - DNA, 20 bp, Artificial Sequence
  Description of Artificial Sequence: Synthetic oligonucleotide
  Target: ATXN2; (-) strand; PAM type: YTN; PAM sequence: CTG
tctccaaaaaaaaaaaaaaa

SEQ ID NO: 81179 - DNA, 20 bp, Artificial Sequence
  Description of Artificial Sequence: Synthetic oligonucleotide
  Target: ATXN2; (-) strand; PAM type: YTN; PAM sequence: CTC
tgtctccaaaaaaaaaaaaa

SEQ ID NO: 81180 - DNA, 20 bp, Artificial Sequence
  Description of Artificial Sequence: Synthetic oligonucleotide
  Target: ATXN2; (-) strand; PAM type: YTN; PAM sequence: CTG
ggcgacagaacgagactctg

SEQ ID NO: 81181 - DNA, 20 bp, Artificial Sequence
  Description of Artificial Sequence: Synthetic oligonucleotide
  Target: ATXN2; (-) strand; PAM type: YTN; PAM sequence: CTC
cagcctgggcgacagaacga

SEQ ID NO: 81182 - DNA, 20 bp, Artificial Sequence
  Description of Artificial Sequence: Synthetic oligonucleotide
  Target: ATXN2; (-) strand; PAM type: YTN; PAM sequence: CTG
cactccagcctgggcgacag

SEQ ID NO: 81183 - DNA, 20 bp, Artificial Sequence
  Description of Artificial Sequence: Synthetic oligonucleotide
  Target: ATXN2; (-) strand; PAM type: YTN; PAM sequence: TTG
tgccactgcactccagcctg

SEQ ID NO: 81184 - DNA, 20 bp, Artificial Sequence
  Description of Artificial Sequence: Synthetic oligonucleotide
  Target: ATXN2; (-) strand; PAM type: YTN; PAM sequence: TTG
cagtgagccaagattgtgcc

SEQ ID NO: 81185 - DNA, 20 bp, Artificial Sequence
  Description of Artificial Sequence: Synthetic oligonucleotide
  Target: ATXN2; (-) strand; PAM type: YTN; PAM sequence: TTG
aacccaggaggtggaggttg

SEQ ID NO: 81186 - DNA, 20 bp, Artificial Sequence
  Description of Artificial Sequence: Synthetic oligonucleotide
  Target: ATXN2; (-) strand; PAM type: YTN; PAM sequence: CTT
gaacccaggaggtggaggtt

SEQ ID NO: 81187 - DNA, 20 bp, Artificial Sequence
  Description of Artificial Sequence: Synthetic oligonucleotide
  Target: ATXN2; (-) strand; PAM type: YTN; PAM sequence: CTG
aggcaggggaatcgcttgaa

SEQ ID NO: 81188 - DNA, 20 bp, Artificial Sequence
  Description of Artificial Sequence: Synthetic oligonucleotide
  Target: ATXN2; (-) strand; PAM type: YTN; PAM sequence: CTC
gagaggctgaggcaggggaa

SEQ ID NO: 81189 - DNA, 20 bp, Artificial Sequence
  Description of Artificial Sequence: Synthetic oligonucleotide
  Target: ATXN2; (-) strand; PAM type: YTN; PAM sequence: CTA
ctcgagaggctgaggcaggg

SEQ ID NO: 81190 - DNA, 20 bp, Artificial Sequence
  Description of Artificial Sequence: Synthetic oligonucleotide
  Target: ATXN2; (-) strand; PAM type: YTN; PAM sequence: CTG
tagtcccagctactcgagag

SEQ ID NO: 81191 - DNA, 20 bp, Artificial Sequence
  Description of Artificial Sequence: Synthetic oligonucleotide
  Target: ATXN2; (-) strand; PAM type: YTN; PAM sequence: CTG
ggcatggtggtgcgcatctg

SEQ ID NO: 81192 - DNA, 20 bp, Artificial Sequence
  Description of Artificial Sequence: Synthetic oligonucleotide
  Target: ATXN2; (-) strand; PAM type: YTN; PAM sequence: TTA
gctgggcatggtggtgcgca

SEQ ID NO: 81193 - DNA, 20 bp, Artificial Sequence
  Description of Artificial Sequence: Synthetic oligonucleotide
  Target: ATXN2; (-) strand; PAM type: YTN; PAM sequence: CTA
aaatagaaaaaattagctgg

SEQ ID NO: 81194 - DNA, 20 bp, Artificial Sequence
  Description of Artificial Sequence: Synthetic oligonucleotide
  Target: ATXN2; (-) strand; PAM type: YTN; PAM sequence: CTA
ctaaaatagaaaaaattagc

SEQ ID NO: 81195 - DNA, 20 bp, Artificial Sequence
  Description of Artificial Sequence: Synthetic oligonucleotide
  Target: ATXN2; (-) strand; PAM type: YTN; PAM sequence: CTC
tactaaaatagaaaaaatta

SEQ ID NO: 81196 - DNA, 20 bp, Artificial Sequence
  Description of Artificial Sequence: Synthetic oligonucleotide
  Target: ATXN2; (-) strand; PAM type: YTN; PAM sequence: CTC
atctctactaaaatagaaaa

SEQ ID NO: 81197 - DNA, 20 bp, Artificial Sequence
  Description of Artificial Sequence: Synthetic oligonucleotide
  Target: ATXN2; (-) strand; PAM type: YTN; PAM sequence: TTG
tgaaacctcatctctactaa

SEQ ID NO: 81198 - DNA, 20 bp, Artificial Sequence
  Description of Artificial Sequence: Synthetic oligonucleotide
  Target: ATXN2; (-) strand; PAM type: YTN; PAM sequence: CTG
ggcaacattgtgaaacctca

SEQ ID NO: 81199 - DNA, 20 bp, Artificial Sequence
  Description of Artificial Sequence: Synthetic oligonucleotide
  Target: ATXN2; (-) strand; PAM type: YTN; PAM sequence: CTG
aggcgggtggatcacgaggt

SEQ ID NO: 81200 - DNA, 20 bp, Artificial Sequence
  Description of Artificial Sequence: Synthetic oligonucleotide
  Target: ATXN2; (-) strand; PAM type: YTN; PAM sequence: TTG
ggaggctgaggcgggtggat

SEQ ID NO: 81201 - DNA, 20 bp, Artificial Sequence
  Description of Artificial Sequence: Synthetic oligonucleotide
  Target: ATXN2; (-) strand; PAM type: YTN; PAM sequence: TTT
gggaggctgaggcgggtgga

SEQ ID NO: 81202 - DNA, 20 bp, Artificial Sequence
  Description of Artificial Sequence: Synthetic oligonucleotide
  Target: ATXN2; (-) strand; PAM type: YTN; PAM sequence: CTT
tgggaggctgaggcgggtgg

SEQ ID NO: 81203 - DNA, 20 bp, Artificial Sequence
  Description of Artificial Sequence: Synthetic oligonucleotide
  Target: ATXN2; (-) strand; PAM type: YTN; PAM sequence: CTA
taatcccagcactttgggag

SEQ ID NO: 81204 - DNA, 20 bp, Artificial Sequence
  Description of Artificial Sequence: Synthetic oligonucleotide
  Target: ATXN2; (-) strand; PAM type: YTN; PAM sequence: CTC
acgcctataatcccagcact

SEQ ID NO: 81205 - DNA, 20 bp, Artificial Sequence
  Description of Artificial Sequence: Synthetic oligonucleotide
  Target: ATXN2; (-) strand; PAM type: YTN; PAM sequence: CTG
ggcgcggtggctcacgccta

SEQ ID NO: 81206 - DNA, 20 bp, Artificial Sequence
  Description of Artificial Sequence: Synthetic oligonucleotide
  Target: ATXN2; (-) strand; PAM type: YTN; PAM sequence: TTG
gctgggcgcggtggctcacg

SEQ ID NO: 81207 - DNA, 20 bp, Artificial Sequence
  Description of Artificial Sequence: Synthetic oligonucleotide
  Target: ATXN2; (-) strand; PAM type: YTN; PAM sequence: CTT
ggctgggcgcggtggctcac

SEQ ID NO: 81208 - DNA, 20 bp, Artificial Sequence
  Description of Artificial Sequence: Synthetic oligonucleotide
  Target: ATXN2; (-) strand; PAM type: YTN; PAM sequence: TTC
cttggctgggcgcggtggct

SEQ ID NO: 81209 - DNA, 20 bp, Artificial Sequence
  Description of Artificial Sequence: Synthetic oligonucleotide
  Target: ATXN2; (-) strand; PAM type: YTN; PAM sequence: CTT
ccttggctgggcgcggtggc

SEQ ID NO: 81210 - DNA, 20 bp, Artificial Sequence
  Description of Artificial Sequence: Synthetic oligonucleotide
  Target: ATXN2; (-) strand; PAM type: YTN; PAM sequence: TTA
aaagagaaagaatatcttcc

SEQ ID NO: 81211 - DNA, 20 bp, Artificial Sequence
  Description of Artificial Sequence: Synthetic oligonucleotide
  Target: ATXN2; (-) strand; PAM type: YTN; PAM sequence: CTA
ttaaaagagaaagaatatct

SEQ ID NO: 81212 - DNA, 20 bp, Artificial Sequence
  Description of Artificial Sequence: Synthetic oligonucleotide
  Target: ATXN2; (-) strand; PAM type: YTN; PAM sequence: TTA
cctattaaaagagaaagaat

SEQ ID NO: 81213 - DNA, 20 bp, Artificial Sequence
  Description of Artificial Sequence: Synthetic oligonucleotide
  Target: ATXN2; (-) strand; PAM type: YTN; PAM sequence: TTT
acctattaaaagagaaagaa

SEQ ID NO: 81214 - DNA, 20 bp, Artificial Sequence
  Description of Artificial Sequence: Synthetic oligonucleotide
  Target: ATXN2; (-) strand; PAM type: YTN; PAM sequence: TTA
tttacctattaaaagagaaa

SEQ ID NO: 81215 - DNA, 20 bp, Artificial Sequence
  Description of Artificial Sequence: Synthetic oligonucleotide
  Target: ATXN2; (-) strand; PAM type: YTN; PAM sequence: TTT
atttacctattaaaagagaa

SEQ ID NO: 81216 - DNA, 20 bp, Artificial Sequence
  Description of Artificial Sequence: Synthetic oligonucleotide
  Target: ATXN2; (-) strand; PAM type: YTN; PAM sequence: TTA
gtttatttacctattaaaag

SEQ ID NO: 81217 - DNA, 20 bp, Artificial Sequence
  Description of Artificial Sequence: Synthetic oligonucleotide
  Target: ATXN2; (-) strand; PAM type: YTN; PAM sequence: CTT
agtttatttacctattaaaa

SEQ ID NO: 81218 - DNA, 20 bp, Artificial Sequence
  Description of Artificial Sequence: Synthetic oligonucleotide
  Target: ATXN2; (-) strand; PAM type: YTN; PAM sequence: CTC
aggcttagtttatttaccta

SEQ ID NO: 81219 - DNA, 20 bp, Artificial Sequence
  Description of Artificial Sequence: Synthetic oligonucleotide
  Target: ATXN2; (-) strand; PAM type: YTN; PAM sequence: CTC
tcaggcttagtttatttacc

SEQ ID NO: 81220 - DNA, 20 bp, Artificial Sequence
  Description of Artificial Sequence: Synthetic oligonucleotide
  Target: ATXN2; (-) strand; PAM type: YTN; PAM sequence: CTC
agccactctcaggcttagtt

SEQ ID NO: 81221 - DNA, 20 bp, Artificial Sequence
  Description of Artificial Sequence: Synthetic oligonucleotide
  Target: ATXN2; (-) strand; PAM type: YTN; PAM sequence: TTA
ctcagccactctcaggctta

SEQ ID NO: 81222 - DNA, 20 bp, Artificial Sequence
  Description of Artificial Sequence: Synthetic oligonucleotide
  Target: ATXN2; (-) strand; PAM type: YTN; PAM sequence: TTG
aatgggcaagttactcagcc

SEQ ID NO: 81223 - DNA, 20 bp, Artificial Sequence
  Description of Artificial Sequence: Synthetic oligonucleotide
  Target: ATXN2; (-) strand; PAM type: YTN; PAM sequence: TTT
gaatgggcaagttactcagc

SEQ ID NO: 81224 - DNA, 20 bp, Artificial Sequence
  Description of Artificial Sequence: Synthetic oligonucleotide
  Target: ATXN2; (-) strand; PAM type: YTN; PAM sequence: TTG
gtcacatgtttgaatgggca

SEQ ID NO: 81225 - DNA, 20 bp, Artificial Sequence
  Description of Artificial Sequence: Synthetic oligonucleotide
  Target: ATXN2; (-) strand; PAM type: YTN; PAM sequence: CTT
ggtcacatgtttgaatgggc

SEQ ID NO: 81226 - DNA, 20 bp, Artificial Sequence
  Description of Artificial Sequence: Synthetic oligonucleotide
  Target: ATXN2; (-) strand; PAM type: YTN; PAM sequence: CTG
cttggtcacatgtttgaatg

SEQ ID NO: 81227 - DNA, 20 bp, Artificial Sequence
  Description of Artificial Sequence: Synthetic oligonucleotide
  Target: ATXN2; (-) strand; PAM type: YTN; PAM sequence: TTA
actgcttggtcacatgtttg

SEQ ID NO: 81228 - DNA, 20 bp, Artificial Sequence
  Description of Artificial Sequence: Synthetic oligonucleotide
  Target: ATXN2; (-) strand; PAM type: YTN; PAM sequence: CTT
aactgcttggtcacatgttt

SEQ ID NO: 81229 - DNA, 20 bp, Artificial Sequence
  Description of Artificial Sequence: Synthetic oligonucleotide
  Target: ATXN2; (-) strand; PAM type: YTN; PAM sequence: TTG
gcacttaactgcttggtcac

SEQ ID NO: 81230 - DNA, 20 bp, Artificial Sequence
  Description of Artificial Sequence: Synthetic oligonucleotide
  Target: ATXN2; (-) strand; PAM type: YTN; PAM sequence: TTG
aatggttggcacttaactgc

SEQ ID NO: 81231 - DNA, 20 bp, Artificial Sequence
  Description of Artificial Sequence: Synthetic oligonucleotide
  Target: ATXN2; (-) strand; PAM type: YTN; PAM sequence: CTT
gaatggttggcacttaactg

SEQ ID NO: 81232 - DNA, 20 bp, Artificial Sequence
  Description of Artificial Sequence: Synthetic oligonucleotide
  Target: ATXN2; (-) strand; PAM type: YTN; PAM sequence: TTC
ttgaatggttggcacttaac

SEQ ID NO: 81233 - DNA, 20 bp, Artificial Sequence
  Description of Artificial Sequence: Synthetic oligonucleotide
  Target: ATXN2; (-) strand; PAM type: YTN; PAM sequence: TTT
cttgaatggttggcacttaa

SEQ ID NO: 81234 - DNA, 20 bp, Artificial Sequence
  Description of Artificial Sequence: Synthetic oligonucleotide
  Target: ATXN2; (-) strand; PAM type: YTN; PAM sequence: CTA
tttcttgaatggttggcact

SEQ ID NO: 81235 - DNA, 20 bp, Artificial Sequence
  Description of Artificial Sequence: Synthetic oligonucleotide
  Target: ATXN2; (-) strand; PAM type: YTN; PAM sequence: TTG
tatccctatttcttgaatgg

SEQ ID NO: 81236 - DNA, 20 bp, Artificial Sequence
  Description of Artificial Sequence: Synthetic oligonucleotide
  Target: ATXN2; (-) strand; PAM type: YTN; PAM sequence: TTG
attgtatccctatttcttga

SEQ ID NO: 81237 - DNA, 20 bp, Artificial Sequence
  Description of Artificial Sequence: Synthetic oligonucleotide
  Target: ATXN2; (-) strand; PAM type: YTN; PAM sequence: CTA
ttgattgtatccctatttct

SEQ ID NO: 81238 - DNA, 20 bp, Artificial Sequence
  Description of Artificial Sequence: Synthetic oligonucleotide
  Target: ATXN2; (-) strand; PAM type: YTN; PAM sequence: TTC
actattgattgtatccctat

SEQ ID NO: 81239 - DNA, 20 bp, Artificial Sequence
  Description of Artificial Sequence: Synthetic oligonucleotide
  Target: ATXN2; (-) strand; PAM type: YTN; PAM sequence: TTG
ttcactattgattgtatccc

SEQ ID NO: 81240 - DNA, 20 bp, Artificial Sequence
  Description of Artificial Sequence: Synthetic oligonucleotide
  Target: ATXN2; (-) strand; PAM type: YTN; PAM sequence: TTT
gttcactattgattgtatcc

SEQ ID NO: 81241 - DNA, 20 bp, Artificial Sequence
  Description of Artificial Sequence: Synthetic oligonucleotide
  Target: ATXN2; (-) strand; PAM type: YTN; PAM sequence: TTT
tgttcactattgattgtatc

SEQ ID NO: 81242 - DNA, 20 bp, Artificial Sequence
  Description of Artificial Sequence: Synthetic oligonucleotide
  Target: ATXN2; (-) strand; PAM type: YTN; PAM sequence: TTG
ttttgttcactattgattgt

SEQ ID NO: 81243 - DNA, 20 bp, Artificial Sequence
  Description of Artificial Sequence: Synthetic oligonucleotide
  Target: ATXN2; (-) strand; PAM type: YTN; PAM sequence: TTT
gttttgttcactattgattg

SEQ ID NO: 81244 - DNA, 20 bp, Artificial Sequence
  Description of Artificial Sequence: Synthetic oligonucleotide
  Target: ATXN2; (-) strand; PAM type: YTN; PAM sequence: CTT
tgttttgttcactattgatt

SEQ ID NO: 81245 - DNA, 20 bp, Artificial Sequence
  Description of Artificial Sequence: Synthetic oligonucleotide
  Target: ATXN2; (-) strand; PAM type: YTN; PAM sequence: CTA
tgaaagcaggaactttgttt

SEQ ID NO: 81246 - DNA, 20 bp, Artificial Sequence
  Description of Artificial Sequence: Synthetic oligonucleotide
  Target: ATXN2; (-) strand; PAM type: YTN; PAM sequence: CTC
tatgaaagcaggaactttgt

SEQ ID NO: 81247 - DNA, 20 bp, Artificial Sequence
  Description of Artificial Sequence: Synthetic oligonucleotide
  Target: ATXN2; (-) strand; PAM type: YTN; PAM sequence: TTA
agctctatgaaagcaggaac

SEQ ID NO: 81248 - DNA, 20 bp, Artificial Sequence
  Description of Artificial Sequence: Synthetic oligonucleotide
  Target: ATXN2; (-) strand; PAM type: YTN; PAM sequence: TTT
aagctctatgaaagcaggaa

SEQ ID NO: 81249 - DNA, 20 bp, Artificial Sequence
  Description of Artificial Sequence: Synthetic oligonucleotide
  Target: ATXN2; (-) strand; PAM type: YTN; PAM sequence: CTA
aaatttaagctctatgaaag

SEQ ID NO: 81250 - DNA, 20 bp, Artificial Sequence
  Description of Artificial Sequence: Synthetic oligonucleotide
  Target: ATXN2; (-) strand; PAM type: YTN; PAM sequence: TTC
agtaactaaaatttaagctc

SEQ ID NO: 81251 - DNA, 20 bp, Artificial Sequence
  Description of Artificial Sequence: Synthetic oligonucleotide
  Target: ATXN2; (-) strand; PAM type: YTN; PAM sequence: CTT
cagtaactaaaatttaagct

SEQ ID NO: 81252 - DNA, 20 bp, Artificial Sequence
  Description of Artificial Sequence: Synthetic oligonucleotide
  Target: ATXN2; (-) strand; PAM type: YTN; PAM sequence: CTC
ttcagtaactaaaatttaag

SEQ ID NO: 81253 - DNA, 20 bp, Artificial Sequence
  Description of Artificial Sequence: Synthetic oligonucleotide
  Target: ATXN2; (-) strand; PAM type: YTN; PAM sequence: TTC
actcttcagtaactaaaatt

SEQ ID NO: 81254 - DNA, 20 bp, Artificial Sequence
  Description of Artificial Sequence: Synthetic oligonucleotide
  Target: ATXN2; (-) strand; PAM type: YTN; PAM sequence: CTG
gccatggttcactcttcagt

SEQ ID NO: 81255 - DNA, 20 bp, Artificial Sequence
  Description of Artificial Sequence: Synthetic oligonucleotide
  Target: ATXN2; (-) strand; PAM type: YTN; PAM sequence: CTA
ccgtgcctggccatggttca

SEQ ID NO: 81256 - DNA, 20 bp, Artificial Sequence
  Description of Artificial Sequence: Synthetic oligonucleotide
  Target: ATXN2; (-) strand; PAM type: YTN; PAM sequence: TTA
caggcatgatctaccgtgcc

SEQ ID NO: 81257 - DNA, 20 bp, Artificial Sequence
  Description of Artificial Sequence: Synthetic oligonucleotide
  Target: ATXN2; (-) strand; PAM type: YTN; PAM sequence: CTG
ggattacaggcatgatctac

SEQ ID NO: 81258 - DNA, 20 bp, Artificial Sequence
  Description of Artificial Sequence: Synthetic oligonucleotide
  Target: ATXN2; (-) strand; PAM type: YTN; PAM sequence: CTC
ccaacgtgctgggattacag

SEQ ID NO: 81259 - DNA, 20 bp, Artificial Sequence
  Description of Artificial Sequence: Synthetic oligonucleotide
  Target: ATXN2; (-) strand; PAM type: YTN; PAM sequence: CTG
ggcctcccaacgtgctggga

SEQ ID NO: 81260 - DNA, 20 bp, Artificial Sequence
  Description of Artificial Sequence: Synthetic oligonucleotide
  Target: ATXN2; (-) strand; PAM type: YTN; PAM sequence: CTC
aggtggtccgcccacctggg

SEQ ID NO: 81261 - DNA, 20 bp, Artificial Sequence
  Description of Artificial Sequence: Synthetic oligonucleotide
  Target: ATXN2; (-) strand; PAM type: YTN; PAM sequence: CTG
acctcaggtggtccgcccac

SEQ ID NO: 81262 - DNA, 20 bp, Artificial Sequence
  Description of Artificial Sequence: Synthetic oligonucleotide
  Target: ATXN2; (-) strand; PAM type: YTN; PAM sequence: CTC
ctgacctcaggtggtccgcc

SEQ ID NO: 81263 - DNA, 20 bp, Artificial Sequence
  Description of Artificial Sequence: Synthetic oligonucleotide
  Target: ATXN2; (-) strand; PAM type: YTN; PAM sequence: TTG
aactcctgacctcaggtggt

SEQ ID NO: 81264 - DNA, 20 bp, Artificial Sequence
  Description of Artificial Sequence: Synthetic oligonucleotide
  Target: ATXN2; (-) strand; PAM type: YTN; PAM sequence: CTT
gaactcctgacctcaggtgg

SEQ ID NO: 81265 - DNA, 20 bp, Artificial Sequence
  Description of Artificial Sequence: Synthetic oligonucleotide
  Target: ATXN2; (-) strand; PAM type: YTN; PAM sequence: CTG
gtcttgaactcctgacctca

SEQ ID NO: 81266 - DNA, 20 bp, Artificial Sequence
  Description of Artificial Sequence: Synthetic oligonucleotide
  Target: ATXN2; (-) strand; PAM type: YTN; PAM sequence: TTC
aggctggtcttgaactcctg

SEQ ID NO: 81267 - DNA, 20 bp, Artificial Sequence
  Description of Artificial Sequence: Synthetic oligonucleotide
  Target: ATXN2; (-) strand; PAM type: YTN; PAM sequence: TTG
ttcaggctggtcttgaactc

SEQ ID NO: 81268 - DNA, 20 bp, Artificial Sequence
  Description of Artificial Sequence: Synthetic oligonucleotide
  Target: ATXN2; (-) strand; PAM type: YTN; PAM sequence: TTC
gccatgttgttcaggctggt

SEQ ID NO: 81269 - DNA, 20 bp, Artificial Sequence
  Description of Artificial Sequence: Synthetic oligonucleotide
  Target: ATXN2; (-) strand; PAM type: YTN; PAM sequence: TTT
cgccatgttgttcaggctgg

SEQ ID NO: 81270 - DNA, 20 bp, Artificial Sequence
  Description of Artificial Sequence: Synthetic oligonucleotide
  Target: ATXN2; (-) strand; PAM type: YTN; PAM sequence: TTT
tcgccatgttgttcaggctg

SEQ ID NO: 81271 - DNA, 20 bp, Artificial Sequence
  Description of Artificial Sequence: Synthetic oligonucleotide
  Target: ATXN2; (-) strand; PAM type: YTN; PAM sequence: TTA
gtagagacggggttttcgcc

SEQ ID NO: 81272 - DNA, 20 bp, Artificial Sequence
  Description of Artificial Sequence: Synthetic oligonucleotide
  Target: ATXN2; (-) strand; PAM type: YTN; PAM sequence: TTT
agtagagacggggttttcgc

SEQ ID NO: 81273 - DNA, 20 bp, Artificial Sequence
  Description of Artificial Sequence: Synthetic oligonucleotide
  Target: ATXN2; (-) strand; PAM type: YTN; PAM sequence: TTT
tagtagagacggggttttcg

SEQ ID NO: 81274 - DNA, 20 bp, Artificial Sequence
  Description of Artificial Sequence: Synthetic oligonucleotide
  Target: ATXN2; (-) strand; PAM type: YTN; PAM sequence: TTT
ttagtagagacggggttttc

SEQ ID NO: 81275 - DNA, 20 bp, Artificial Sequence
  Description of Artificial Sequence: Synthetic oligonucleotide
  Target: ATXN2; (-) strand; PAM type: YTN; PAM sequence: TTA
tatttttagtagagacgggg

SEQ ID NO: 81276 - DNA, 20 bp, Artificial Sequence
  Description of Artificial Sequence: Synthetic oligonucleotide
  Target: ATXN2; (-) strand; PAM type: YTN; PAM sequence: TTT
atatttttagtagagacggg

SEQ ID NO: 81277 - DNA, 20 bp, Artificial Sequence
  Description of Artificial Sequence: Synthetic oligonucleotide
  Target: ATXN2; (-) strand; PAM type: YTN; PAM sequence: TTT
tatatttttagtagagacgg

SEQ ID NO: 81278 - DNA, 20 bp, Artificial Sequence
  Description of Artificial Sequence: Synthetic oligonucleotide
  Target: ATXN2; (-) strand; PAM type: YTN; PAM sequence: TTT
ttatatttttagtagagacg

SEQ ID NO: 81279 - DNA, 20 bp, Artificial Sequence
  Description of Artificial Sequence: Synthetic oligonucleotide
  Target: ATXN2; (-) strand; PAM type: YTN; PAM sequence: CTA
atttttatatttttagtaga

SEQ ID NO: 81280 - DNA, 20 bp, Artificial Sequence
  Description of Artificial Sequence: Synthetic oligonucleotide
  Target: ATXN2; (-) strand; PAM type: YTN; PAM sequence: TTA
caggcacccaccaccatgcc

SEQ ID NO: 81281 - DNA, 20 bp, Artificial Sequence
  Description of Artificial Sequence: Synthetic oligonucleotide
  Target: ATXN2; (-) strand; PAM type: YTN; PAM sequence: TTG
ggattacaggcacccaccac

SEQ ID NO: 81282 - DNA, 20 bp, Artificial Sequence
  Description of Artificial Sequence: Synthetic oligonucleotide
  Target: ATXN2; (-) strand; PAM type: YTN; PAM sequence: CTG
aatagttgggattacaggca

SEQ ID NO: 81283 - DNA, 20 bp, Artificial Sequence
  Description of Artificial Sequence: Synthetic oligonucleotide
  Target: ATXN2; (-) strand; PAM type: YTN; PAM sequence: CTC
ctgaatagttgggattacag

SEQ ID NO: 81284 - DNA, 20 bp, Artificial Sequence
  Description of Artificial Sequence: Synthetic oligonucleotide
  Target: ATXN2; (-) strand; PAM type: YTN; PAM sequence: CTC
agcctcctgaatagttggga

SEQ ID NO: 81285 - DNA, 20 bp, Artificial Sequence
  Description of Artificial Sequence: Synthetic oligonucleotide
  Target: ATXN2; (-) strand; PAM type: YTN; PAM sequence: CTG
cctcagcctcctgaatagtt

SEQ ID NO: 81286 - DNA, 20 bp, Artificial Sequence
  Description of Artificial Sequence: Synthetic oligonucleotide
  Target: ATXN2; (-) strand; PAM type: YTN; PAM sequence: CTC
ctgcctcagcctcctgaata

SEQ ID NO: 81287 - DNA, 20 bp, Artificial Sequence
  Description of Artificial Sequence: Synthetic oligonucleotide
  Target: ATXN2; (-) strand; PAM type: YTN; PAM sequence: TTC
tcctgcctcagcctcctgaa

SEQ ID NO: 81288 - DNA, 20 bp, Artificial Sequence
  Description of Artificial Sequence: Synthetic oligonucleotide
  Target: ATXN2; (-) strand; PAM type: YTN; PAM sequence: TTC
aagtgattctcctgcctcag

SEQ ID NO: 81289 - DNA, 20 bp, Artificial Sequence
  Description of Artificial Sequence: Synthetic oligonucleotide
  Target: ATXN2; (-) strand; PAM type: YTN; PAM sequence: CTG
tgttcaagtgattctcctgc

SEQ ID NO: 81290 - DNA, 20 bp, Artificial Sequence
  Description of Artificial Sequence: Synthetic oligonucleotide
  Target: ATXN2; (-) strand; PAM type: YTN; PAM sequence: CTC
ctgtgttcaagtgattctcc

SEQ ID NO: 81291 - DNA, 20 bp, Artificial Sequence
  Description of Artificial Sequence: Synthetic oligonucleotide
  Target: ATXN2; (-) strand; PAM type: YTN; PAM sequence: CTC
cacctcctgtgttcaagtga

SEQ ID NO: 81292 - DNA, 20 bp, Artificial Sequence
  Description of Artificial Sequence: Synthetic oligonucleotide
  Target: ATXN2; (-) strand; PAM type: YTN; PAM sequence: CTG
caacctccacctcctgtgtt

SEQ ID NO: 81293 - DNA, 20 bp, Artificial Sequence
  Description of Artificial Sequence: Synthetic oligonucleotide
  Target: ATXN2; (-) strand; PAM type: YTN; PAM sequence: CTC
actgcaacctccacctcctg

SEQ ID NO: 81294 - DNA, 20 bp, Artificial Sequence
  Description of Artificial Sequence: Synthetic oligonucleotide
  Target: ATXN2; (-) strand; PAM type: YTN; PAM sequence: TTG
gctcactgcaacctccacct

SEQ ID NO: 81295 - DNA, 20 bp, Artificial Sequence
  Description of Artificial Sequence: Synthetic oligonucleotide
  Target: ATXN2; (-) strand; PAM type: YTN; PAM sequence: CTT
ggctcactgcaacctccacc

SEQ ID NO: 81296 - DNA, 20 bp, Artificial Sequence
  Description of Artificial Sequence: Synthetic oligonucleotide
  Target: ATXN2; (-) strand; PAM type: YTN; PAM sequence: CTG
gagtgcaatggtgcgatctt

SEQ ID NO: 81297 - DNA, 20 bp, Artificial Sequence
  Description of Artificial Sequence: Synthetic oligonucleotide
  Target: ATXN2; (-) strand; PAM type: YTN; PAM sequence: TTG
cccaggctggagtgcaatgg

SEQ ID NO: 81298 - DNA, 20 bp, Artificial Sequence
  Description of Artificial Sequence: Synthetic oligonucleotide
  Target: ATXN2; (-) strand; PAM type: YTN; PAM sequence: CTG
tgttgcccaggctggagtgc

SEQ ID NO: 81299 - DNA, 20 bp, Artificial Sequence
  Description of Artificial Sequence: Synthetic oligonucleotide
  Target: ATXN2; (-) strand; PAM type: YTN; PAM sequence: TTG
ctgtgttgcccaggctggag

SEQ ID NO: 81300 - DNA, 20 bp, Artificial Sequence
  Description of Artificial Sequence: Synthetic oligonucleotide
  Target: ATXN2; (-) strand; PAM type: YTN; PAM sequence: CTT
gctgtgttgcccaggctgga

SEQ ID NO: 81301 - DNA, 20 bp, Artificial Sequence
  Description of Artificial Sequence: Synthetic oligonucleotide
  Target: ATXN2; (-) strand; PAM type: YTN; PAM sequence: TTG
agtcggagtcttgctgtgtt

SEQ ID NO: 81302 - DNA, 20 bp, Artificial Sequence
  Description of Artificial Sequence: Synthetic oligonucleotide
  Target: ATXN2; (-) strand; PAM type: YTN; PAM sequence: TTT
gagtcggagtcttgctgtgt

SEQ ID NO: 81303 - DNA, 20 bp, Artificial Sequence
  Description of Artificial Sequence: Synthetic oligonucleotide
  Target: ATXN2; (-) strand; PAM type: YTN; PAM sequence: TTT
tgagtcggagtcttgctgtg

SEQ ID NO: 81304 - DNA, 20 bp, Artificial Sequence
  Description of Artificial Sequence: Synthetic oligonucleotide
  Target: ATXN2; (-) strand; PAM type: YTN; PAM sequence: TTT
ttgagtcggagtcttgctgt

SEQ ID NO: 81305 - DNA, 20 bp, Artificial Sequence
  Description of Artificial Sequence: Synthetic oligonucleotide
  Target: ATXN2; (-) strand; PAM type: YTN; PAM sequence: TTT
tttgagtcggagtcttgctg

SEQ ID NO: 81306 - DNA, 20 bp, Artificial Sequence
  Description of Artificial Sequence: Synthetic oligonucleotide
  Target: ATXN2; (-) strand; PAM type: YTN; PAM sequence: TTT
ttttgagtcggagtcttgct

SEQ ID NO: 81307 - DNA, 20 bp, Artificial Sequence
  Description of Artificial Sequence: Synthetic oligonucleotide
  Target: ATXN2; (-) strand; PAM type: YTN; PAM sequence: TTT
tttttgagtcggagtcttgc

SEQ ID NO: 81308 - DNA, 20 bp, Artificial Sequence
  Description of Artificial Sequence: Synthetic oligonucleotide
  Target: ATXN2; (-) strand; PAM type: YTN; PAM sequence: TTT
ttttttgagtcggagtcttg

SEQ ID NO: 81309 - DNA, 20 bp, Artificial Sequence
  Description of Artificial Sequence: Synthetic oligonucleotide
  Target: ATXN2; (-) strand; PAM type: YTN; PAM sequence: TTT
tttttttgagtcggagtctt

SEQ ID NO: 81310 - DNA, 20 bp, Artificial Sequence
  Description of Artificial Sequence: Synthetic oligonucleotide
  Target: ATXN2; (-) strand; PAM type: YTN; PAM sequence: TTT
ttttttttgagtcggagtct

SEQ ID NO: 81311 - DNA, 20 bp, Artificial Sequence
  Description of Artificial Sequence: Synthetic oligonucleotide
  Target: ATXN2; (-) strand; PAM type: YTN; PAM sequence: TTT
tttttttttgagtcggagtc

SEQ ID NO: 81312 - DNA, 20 bp, Artificial Sequence
  Description of Artificial Sequence: Synthetic oligonucleotide
  Target: ATXN2; (-) strand; PAM type: YTN; PAM sequence: TTT
ttttttttttgagtcggagt

SEQ ID NO: 81313 - DNA, 20 bp, Artificial Sequence
  Description of Artificial Sequence: Synthetic oligonucleotide
  Target: ATXN2; (-) strand; PAM type: YTN; PAM sequence: TTT
tttttttttttgagtcggag

SEQ ID NO: 81314 - DNA, 20 bp, Artificial Sequence
  Description of Artificial Sequence: Synthetic oligonucleotide
  Target: ATXN2; (-) strand; PAM type: YTN; PAM sequence: TTT
ttttttttttttgagtcgga

SEQ ID NO: 81315 - DNA, 20 bp, Artificial Sequence
  Description of Artificial Sequence: Synthetic oligonucleotide
  Target: ATXN2; (-) strand; PAM type: YTN; PAM sequence: TTT
tttttttttttttgagtcgg

SEQ ID NO: 81316 - DNA, 20 bp, Artificial Sequence
  Description of Artificial Sequence: Synthetic oligonucleotide
  Target: ATXN2; (-) strand; PAM type: YTN; PAM sequence: TTT
ttttttttttttttgagtcg

SEQ ID NO: 81317 - DNA, 20 bp, Artificial Sequence
  Description of Artificial Sequence: Synthetic oligonucleotide
  Target: ATXN2; (-) strand; PAM type: YTN; PAM sequence: TTT
tttttttttttttttgagtc

SEQ ID NO: 81318 - DNA, 20 bp, Artificial Sequence
  Description of Artificial Sequence: Synthetic oligonucleotide
  Target: ATXN2; (-) strand; PAM type: YTN; PAM sequence: TTT
ttttttttttttttttgagt

SEQ ID NO: 81319 - DNA, 20 bp, Artificial Sequence
  Description of Artificial Sequence: Synthetic oligonucleotide
  Target: ATXN2; (-) strand; PAM type: YTN; PAM sequence: TTT
tttttttttttttttttgag

SEQ ID NO: 81320 - DNA, 20 bp, Artificial Sequence
  Description of Artificial Sequence: Synthetic oligonucleotide
  Target: ATXN2; (-) strand; PAM type: YTN; PAM sequence: TTT
ttttttttttttttttttga

SEQ ID NO: 81321 - DNA, 20 bp, Artificial Sequence
  Description of Artificial Sequence: Synthetic oligonucleotide
  Target: ATXN2; (-) strand; PAM type: YTN; PAM sequence: TTT
tttttttttttttttttttg

SEQ ID NO: 81322 - DNA, 20 bp, Artificial Sequence
  Description of Artificial Sequence: Synthetic oligonucleotide
  Target: ATXN2; (-) strand; PAM type: YTN; PAM sequence: TTT
tttttttttttttttttttt

SEQ ID NO: 81323 - DNA, 20 bp, Artificial Sequence
  Description of Artificial Sequence: Synthetic oligonucleotide
  Target: ATXN2; (-) strand; PAM type: YTN; PAM sequence: TTT
tttttttttttttttttttt

SEQ ID NO: 81324 - DNA, 20 bp, Artificial Sequence
  Description of Artificial Sequence: Synthetic oligonucleotide
  Target: ATXN2; (-) strand; PAM type: YTN; PAM sequence: CTG
tttttttttttttttttttt

SEQ ID NO: 81325 - DNA, 20 bp, Artificial Sequence
  Description of Artificial Sequence: Synthetic oligonucleotide
  Target: ATXN2; (-) strand; PAM type: YTN; PAM sequence: TTC
actgtttttttttttttttt

SEQ ID NO: 81326 - DNA, 20 bp, Artificial Sequence
  Description of Artificial Sequence: Synthetic oligonucleotide
  Target: ATXN2; (-) strand; PAM type: YTN; PAM sequence: CTG
gaatcatggttcactgtttt

SEQ ID NO: 81327 - DNA, 20 bp, Artificial Sequence
  Description of Artificial Sequence: Synthetic oligonucleotide
  Target: ATXN2; (-) strand; PAM type: YTN; PAM sequence: CTA
agctggaatcatggttcact

SEQ ID NO: 81328 - DNA, 20 bp, Artificial Sequence
  Description of Artificial Sequence: Synthetic oligonucleotide
  Target: ATXN2; (-) strand; PAM type: YTN; PAM sequence: CTC
cagtctaagctggaatcatg

SEQ ID NO: 81329 - DNA, 20 bp, Artificial Sequence
  Description of Artificial Sequence: Synthetic oligonucleotide
  Target: ATXN2; (-) strand; PAM type: YTN; PAM sequence: CTG
gcaactccagtctaagctgg

SEQ ID NO: 81330 - DNA, 20 bp, Artificial Sequence
  Description of Artificial Sequence: Synthetic oligonucleotide
  Target: ATXN2; (-) strand; PAM type: YTN; PAM sequence: TTA
tctggcaactccagtctaag

SEQ ID NO: 81331 - DNA, 20 bp, Artificial Sequence
  Description of Artificial Sequence: Synthetic oligonucleotide
  Target: ATXN2; (-) strand; PAM type: YTN; PAM sequence: TTT
atctggcaactccagtctaa

SEQ ID NO: 81332 - DNA, 20 bp, Artificial Sequence
  Description of Artificial Sequence: Synthetic oligonucleotide
  Target: ATXN2; (-) strand; PAM type: YTN; PAM sequence: TTT
tatctggcaactccagtcta

SEQ ID NO: 81333 - DNA, 20 bp, Artificial Sequence
  Description of Artificial Sequence: Synthetic oligonucleotide
  Target: ATXN2; (-) strand; PAM type: YTN; PAM sequence: TTG
tattttatctggcaactcca

SEQ ID NO: 81334 - DNA, 20 bp, Artificial Sequence
  Description of Artificial Sequence: Synthetic oligonucleotide
  Target: ATXN2; (-) strand; PAM type: YTN; PAM sequence: CTT
gtattttatctggcaactcc

SEQ ID NO: 81335 - DNA, 20 bp, Artificial Sequence
  Description of Artificial Sequence: Synthetic oligonucleotide
  Target: ATXN2; (-) strand; PAM type: YTN; PAM sequence: CTG
agcatcttgtattttatctg

SEQ ID NO: 81336 - DNA, 20 bp, Artificial Sequence
  Description of Artificial Sequence: Synthetic oligonucleotide
  Target: ATXN2; (-) strand; PAM type: YTN; PAM sequence: TTA
actgagcatcttgtatttta

SEQ ID NO: 81337 - DNA, 20 bp, Artificial Sequence
  Description of Artificial Sequence: Synthetic oligonucleotide
  Target: ATXN2; (-) strand; PAM type: YTN; PAM sequence: TTT
aactgagcatcttgtatttt

SEQ ID NO: 81338 - DNA, 20 bp, Artificial Sequence
  Description of Artificial Sequence: Synthetic oligonucleotide
  Target: ATXN2; (-) strand; PAM type: YTN; PAM sequence: TTG
aaatttaactgagcatcttg

SEQ ID NO: 81339 - DNA, 20 bp, Artificial Sequence
  Description of Artificial Sequence: Synthetic oligonucleotide
  Target: ATXN2; (-) strand; PAM type: YTN; PAM sequence: CTA
aagttgaaatttaactgagc

SEQ ID NO: 81340 - DNA, 20 bp, Artificial Sequence
  Description of Artificial Sequence: Synthetic oligonucleotide
  Target: ATXN2; (-) strand; PAM type: YTN; PAM sequence: TTA
tctaaagttgaaatttaact

SEQ ID NO: 81341 - DNA, 20 bp, Artificial Sequence
  Description of Artificial Sequence: Synthetic oligonucleotide
  Target: ATXN2; (-) strand; PAM type: YTN; PAM sequence: TTT
atctaaagttgaaatttaac

SEQ ID NO: 81342 - DNA, 20 bp, Artificial Sequence
  Description of Artificial Sequence: Synthetic oligonucleotide
  Target: ATXN2; (-) strand; PAM type: YTN; PAM sequence: TTA
tttatctaaagttgaaattt

SEQ ID NO: 81343 - DNA, 20 bp, Artificial Sequence
  Description of Artificial Sequence: Synthetic oligonucleotide
  Target: ATXN2; (-) strand; PAM type: YTN; PAM sequence: TTG
catagaaaaaagttatttat

SEQ ID NO: 81344 - DNA, 20 bp, Artificial Sequence
  Description of Artificial Sequence: Synthetic oligonucleotide
  Target: ATXN2; (-) strand; PAM type: YTN; PAM sequence: TTA
aattgcatagaaaaaagtta

SEQ ID NO: 81345 - DNA, 20 bp, Artificial Sequence
  Description of Artificial Sequence: Synthetic oligonucleotide
  Target: ATXN2; (-) strand; PAM type: YTN; PAM sequence: TTG
tgtattaaattgcatagaaa

SEQ ID NO: 81346 - DNA, 20 bp, Artificial Sequence
  Description of Artificial Sequence: Synthetic oligonucleotide
  Target: ATXN2; (-) strand; PAM type: YTN; PAM sequence: TTA
gtataattgtgtattaaatt

SEQ ID NO: 81347 - DNA, 20 bp, Artificial Sequence
  Description of Artificial Sequence: Synthetic oligonucleotide
  Target: ATXN2; (-) strand; PAM type: YTN; PAM sequence: TTT
agtataattgtgtattaaat

SEQ ID NO: 81348 - DNA, 20 bp, Artificial Sequence
  Description of Artificial Sequence: Synthetic oligonucleotide
  Target: ATXN2; (-) strand; PAM type: YTN; PAM sequence: TTT
tagtataattgtgtattaaa

SEQ ID NO: 81349 - DNA, 20 bp, Artificial Sequence
  Description of Artificial Sequence: Synthetic oligonucleotide
  Target: ATXN2; (-) strand; PAM type: YTN; PAM sequence: TTT
ttagtataattgtgtattaa

SEQ ID NO: 81350 - DNA, 20 bp, Artificial Sequence
  Description of Artificial Sequence: Synthetic oligonucleotide
  Target: ATXN2; (-) strand; PAM type: YTN; PAM sequence: TTT
tttagtataattgtgtatta

SEQ ID NO: 81351 - DNA, 20 bp, Artificial Sequence
  Description of Artificial Sequence: Synthetic oligonucleotide
  Target: ATXN2; (-) strand; PAM type: YTN; PAM sequence: TTG
accagttttttagtataatt

SEQ ID NO: 81352 - DNA, 20 bp, Artificial Sequence
  Description of Artificial Sequence: Synthetic oligonucleotide
  Target: ATXN2; (-) strand; PAM type: YTN; PAM sequence: TTG
atgaacattgaccagttttt

SEQ ID NO: 81353 - DNA, 20 bp, Artificial Sequence
  Description of Artificial Sequence: Synthetic oligonucleotide
  Target: ATXN2; (-) strand; PAM type: YTN; PAM sequence: TTT
gatgaacattgaccagtttt

SEQ ID NO: 81354 - DNA, 20 bp, Artificial Sequence
  Description of Artificial Sequence: Synthetic oligonucleotide
  Target: ATXN2; (-) strand; PAM type: YTN; PAM sequence: TTT
tgatgaacattgaccagttt

SEQ ID NO: 81355 - DNA, 20 bp, Artificial Sequence
  Description of Artificial Sequence: Synthetic oligonucleotide
  Target: ATXN2; (-) strand; PAM type: YTN; PAM sequence: TTT
ttgatgaacattgaccagtt

SEQ ID NO: 81356 - DNA, 20 bp, Artificial Sequence
  Description of Artificial Sequence: Synthetic oligonucleotide
  Target: ATXN2; (-) strand; PAM type: YTN; PAM sequence: TTG
aatttttgatgaacattgac

SEQ ID NO: 81357 - DNA, 20 bp, Artificial Sequence
  Description of Artificial Sequence: Synthetic oligonucleotide
  Target: ATXN2; (-) strand; PAM type: YTN; PAM sequence: TTT
gaatttttgatgaacattga

SEQ ID NO: 81358 - DNA, 20 bp, Artificial Sequence
  Description of Artificial Sequence: Synthetic oligonucleotide
  Target: ATXN2; (-) strand; PAM type: YTN; PAM sequence: TTA
aatttgaatttttgatgaac

SEQ ID NO: 81359 - DNA, 20 bp, Artificial Sequence
  Description of Artificial Sequence: Synthetic oligonucleotide
  Target: ATXN2; (-) strand; PAM type: YTN; PAM sequence: CTC
agttaaatttgaatttttga

SEQ ID NO: 81360 - DNA, 20 bp, Artificial Sequence
  Description of Artificial Sequence: Synthetic oligonucleotide
  Target: ATXN2; (-) strand; PAM type: YTN; PAM sequence: TTG
gcaaatagaaatacaggaca

SEQ ID NO: 81361 - DNA, 20 bp, Artificial Sequence
  Description of Artificial Sequence: Synthetic oligonucleotide
  Target: ATXN2; (-) strand; PAM type: YTN; PAM sequence: TTT
ggcaaatagaaatacaggac

SEQ ID NO: 81362 - DNA, 20 bp, Artificial Sequence
  Description of Artificial Sequence: Synthetic oligonucleotide
  Target: ATXN2; (-) strand; PAM type: YTN; PAM sequence: TTG
tcagatttggcaaatagaaa

SEQ ID NO: 81363 - DNA, 20 bp, Artificial Sequence
  Description of Artificial Sequence: Synthetic oligonucleotide
  Target: ATXN2; (-) strand; PAM type: YTN; PAM sequence: CTA
gggttgtcagatttggcaaa

SEQ ID NO: 81364 - DNA, 20 bp, Artificial Sequence
  Description of Artificial Sequence: Synthetic oligonucleotide
  Target: ATXN2; (-) strand; PAM type: YTN; PAM sequence: CTA
agctagggttgtcagatttg

SEQ ID NO: 81365 - DNA, 20 bp, Artificial Sequence
  Description of Artificial Sequence: Synthetic oligonucleotide
  Target: ATXN2; (-) strand; PAM type: YTN; PAM sequence: TTA
tatctaagctagggttgtca

SEQ ID NO: 81366 - DNA, 20 bp, Artificial Sequence
  Description of Artificial Sequence: Synthetic oligonucleotide
  Target: ATXN2; (-) strand; PAM type: YTN; PAM sequence: TTG
aggttatatctaagctaggg

SEQ ID NO: 81367 - DNA, 20 bp, Artificial Sequence
  Description of Artificial Sequence: Synthetic oligonucleotide
  Target: ATXN2; (-) strand; PAM type: YTN; PAM sequence: TTT
gaggttatatctaagctagg

SEQ ID NO: 81368 - DNA, 20 bp, Artificial Sequence
  Description of Artificial Sequence: Synthetic oligonucleotide
  Target: ATXN2; (-) strand; PAM type: YTN; PAM sequence: TTT
tgaggttatatctaagctag

SEQ ID NO: 81369 - DNA, 20 bp, Artificial Sequence
  Description of Artificial Sequence: Synthetic oligonucleotide
  Target: ATXN2; (-) strand; PAM type: YTN; PAM sequence: TTG
agaaagagttttgaggttat

SEQ ID NO: 81370 - DNA, 20 bp, Artificial Sequence
  Description of Artificial Sequence: Synthetic oligonucleotide
  Target: ATXN2; (-) strand; PAM type: YTN; PAM sequence: TTA
gagccagagaaacgcagtaa

SEQ ID NO: 81371 - DNA, 20 bp, Artificial Sequence
  Description of Artificial Sequence: Synthetic oligonucleotide
  Target: ATXN2; (-) strand; PAM type: YTN; PAM sequence: TTT
agagccagagaaacgcagta

SEQ ID NO: 81372 - DNA, 20 bp, Artificial Sequence
  Description of Artificial Sequence: Synthetic oligonucleotide
  Target: ATXN2; (-) strand; PAM type: YTN; PAM sequence: CTT
tagagccagagaaacgcagt

SEQ ID NO: 81373 - DNA, 20 bp, Artificial Sequence
  Description of Artificial Sequence: Synthetic oligonucleotide
  Target: ATXN2; (-) strand; PAM type: YTN; PAM sequence: CTG
ctttagagccagagaaacgc

SEQ ID NO: 81374 - DNA, 20 bp, Artificial Sequence
  Description of Artificial Sequence: Synthetic oligonucleotide
  Target: ATXN2; (-) strand; PAM type: YTN; PAM sequence: TTA
ctgctttagagccagagaaa

SEQ ID NO: 81375 - DNA, 20 bp, Artificial Sequence
  Description of Artificial Sequence: Synthetic oligonucleotide
  Target: ATXN2; (-) strand; PAM type: YTN; PAM sequence: TTG
atatagtcaaaaaagttact

SEQ ID NO: 81376 - DNA, 20 bp, Artificial Sequence
  Description of Artificial Sequence: Synthetic oligonucleotide
  Target: ATXN2; (-) strand; PAM type: YTN; PAM sequence: TTA
ttgatatagtcaaaaaagtt

SEQ ID NO: 81377 - DNA, 20 bp, Artificial Sequence
  Description of Artificial Sequence: Synthetic oligonucleotide
  Target: ATXN2; (-) strand; PAM type: YTN; PAM sequence: TTT
attgatatagtcaaaaaagt

SEQ ID NO: 81378 - DNA, 20 bp, Artificial Sequence
  Description of Artificial Sequence: Synthetic oligonucleotide
  Target: ATXN2; (-) strand; PAM type: YTN; PAM sequence: TTT
tattgatatagtcaaaaaag

SEQ ID NO: 81379 - DNA, 20 bp, Artificial Sequence
  Description of Artificial Sequence: Synthetic oligonucleotide
  Target: ATXN2; (-) strand; PAM type: YTN; PAM sequence: TTT
ttattgatatagtcaaaaaa

SEQ ID NO: 81380 - DNA, 20 bp, Artificial Sequence
  Description of Artificial Sequence: Synthetic oligonucleotide
  Target: ATXN2; (-) strand; PAM type: YTN; PAM sequence: TTT
tttattgatatagtcaaaaa

SEQ ID NO: 81381 - DNA, 20 bp, Artificial Sequence
  Description of Artificial Sequence: Synthetic oligonucleotide
  Target: ATXN2; (-) strand; PAM type: YTN; PAM sequence: TTA
agtaattttttattgatata

SEQ ID NO: 81382 - DNA, 20 bp, Artificial Sequence
  Description of Artificial Sequence: Synthetic oligonucleotide
  Target: ATXN2; (-) strand; PAM type: YTN; PAM sequence: TTT
aagtaattttttattgatat

SEQ ID NO: 81383 - DNA, 20 bp, Artificial Sequence
  Description of Artificial Sequence: Synthetic oligonucleotide
  Target: ATXN2; (-) strand; PAM type: YTN; PAM sequence: TTT
taagtaattttttattgata

SEQ ID NO: 81384 - DNA, 20 bp, Artificial Sequence
  Description of Artificial Sequence: Synthetic oligonucleotide
  Target: ATXN2; (-) strand; PAM type: YTN; PAM sequence: TTT
ttaagtaattttttattgat

SEQ ID NO: 81385 - DNA, 20 bp, Artificial Sequence
  Description of Artificial Sequence: Synthetic oligonucleotide
  Target: ATXN2; (-) strand; PAM type: YTN; PAM sequence: TTT
tttaagtaattttttattga

SEQ ID NO: 81386 - DNA, 20 bp, Artificial Sequence
  Description of Artificial Sequence: Synthetic oligonucleotide
  Target: ATXN2; (-) strand; PAM type: YTN; PAM sequence: TTT
ttttaagtaattttttattg

SEQ ID NO: 81387 - DNA, 20 bp, Artificial Sequence
  Description of Artificial Sequence: Synthetic oligonucleotide
  Target: ATXN2; (-) strand; PAM type: YTN; PAM sequence: TTT
tttttaagtaattttttatt

SEQ ID NO: 81388 - DNA, 20 bp, Artificial Sequence
  Description of Artificial Sequence: Synthetic oligonucleotide
  Target: ATXN2; (-) strand; PAM type: YTN; PAM sequence: TTT
ttttttaagtaattttttat

SEQ ID NO: 81389 - DNA, 20 bp, Artificial Sequence
  Description of Artificial Sequence: Synthetic oligonucleotide
  Target: ATXN2; (-) strand; PAM type: YTN; PAM sequence: CTA
gccaaaaatttttttttaag

SEQ ID NO: 81390 - DNA, 20 bp, Artificial Sequence
  Description of Artificial Sequence: Synthetic oligonucleotide
  Target: ATXN2; (-) strand; PAM type: YTN; PAM sequence: TTA
cagggatgagccaccgtgcc

SEQ ID NO: 81391 - DNA, 20 bp, Artificial Sequence
  Description of Artificial Sequence: Synthetic oligonucleotide
  Target: ATXN2; (-) strand; PAM type: YTN; PAM sequence: CTG
ggattacagggatgagccac

SEQ ID NO: 81392 - DNA, 20 bp, Artificial Sequence
  Description of Artificial Sequence: Synthetic oligonucleotide
  Target: ATXN2; (-) strand; PAM type: YTN; PAM sequence: TTG
gtgtccagaaatgctgggat

SEQ ID NO: 81393 - DNA, 20 bp, Artificial Sequence
  Description of Artificial Sequence: Synthetic oligonucleotide
  Target: ATXN2; (-) strand; PAM type: YTN; PAM sequence: CTT
ggtgtccagaaatgctggga

SEQ ID NO: 81394 - DNA, 20 bp, Artificial Sequence
  Description of Artificial Sequence: Synthetic oligonucleotide
  Target: ATXN2; (-) strand; PAM type: YTN; PAM sequence: CTC
agatgatccacccaccttgg

SEQ ID NO: 81395 - DNA, 20 bp, Artificial Sequence
  Description of Artificial Sequence: Synthetic oligonucleotide
  Target: ATXN2; (-) strand; PAM type: YTN; PAM sequence: CTG
gagctcagatgatccaccca

SEQ ID NO: 81396 - DNA, 20 bp, Artificial Sequence
  Description of Artificial Sequence: Synthetic oligonucleotide
  Target: ATXN2; (-) strand; PAM type: YTN; PAM sequence: CTC
tggagctcagatgatccacc

SEQ ID NO: 81397 - DNA, 20 bp, Artificial Sequence
  Description of Artificial Sequence: Synthetic oligonucleotide
  Target: ATXN2; (-) strand; PAM type: YTN; PAM sequence: TTG
aactctggagctcagatgat

SEQ ID NO: 81398 - DNA, 20 bp, Artificial Sequence
  Description of Artificial Sequence: Synthetic oligonucleotide
  Target: ATXN2; (-) strand; PAM type: YTN; PAM sequence: CTT
gaactctggagctcagatga

SEQ ID NO: 81399 - DNA, 20 bp, Artificial Sequence
  Description of Artificial Sequence: Synthetic oligonucleotide
  Target: ATXN2; (-) strand; PAM type: YTN; PAM sequence: CTA
gtcttgaactctggagctca

SEQ ID NO: 81400 - DNA, 20 bp, Artificial Sequence
  Description of Artificial Sequence: Synthetic oligonucleotide
  Target: ATXN2; (-) strand; PAM type: YTN; PAM sequence: TTC
aggctagtcttgaactctgg

SEQ ID NO: 81401 - DNA, 20 bp, Artificial Sequence
  Description of Artificial Sequence: Synthetic oligonucleotide
  Target: ATXN2; (-) strand; PAM type: YTN; PAM sequence: TTG
ttcaggctagtcttgaactc

SEQ ID NO: 81402 - DNA, 20 bp, Artificial Sequence
  Description of Artificial Sequence: Synthetic oligonucleotide
  Target: ATXN2; (-) strand; PAM type: YTN; PAM sequence: TTG
ccatgttgttcaggctagtc

SEQ ID NO: 81403 - DNA, 20 bp, Artificial Sequence
  Description of Artificial Sequence: Synthetic oligonucleotide
  Target: ATXN2; (-) strand; PAM type: YTN; PAM sequence: TTT
gccatgttgttcaggctagt

SEQ ID NO: 81404 - DNA, 20 bp, Artificial Sequence
  Description of Artificial Sequence: Synthetic oligonucleotide
  Target: ATXN2; (-) strand; PAM type: YTN; PAM sequence: TTT
tgccatgttgttcaggctag

SEQ ID NO: 81405 - DNA, 20 bp, Artificial Sequence
  Description of Artificial Sequence: Synthetic oligonucleotide
  Target: ATXN2; (-) strand; PAM type: YTN; PAM sequence: TTG
aagagatgaggttttgccat

SEQ ID NO: 81406 - DNA, 20 bp, Artificial Sequence
  Description of Artificial Sequence: Synthetic oligonucleotide
  Target: ATXN2; (-) strand; PAM type: YTN; PAM sequence: TTT
gaagagatgaggttttgcca

SEQ ID NO: 81407 - DNA, 20 bp, Artificial Sequence
  Description of Artificial Sequence: Synthetic oligonucleotide
  Target: ATXN2; (-) strand; PAM type: YTN; PAM sequence: TTT
tgaagagatgaggttttgcc

SEQ ID NO: 81408 - DNA, 20 bp, Artificial Sequence
  Description of Artificial Sequence: Synthetic oligonucleotide
  Target: ATXN2; (-) strand; PAM type: YTN; PAM sequence: TTT
ttgaagagatgaggttttgc

SEQ ID NO: 81409 - DNA, 20 bp, Artificial Sequence
  Description of Artificial Sequence: Synthetic oligonucleotide
  Target: ATXN2; (-) strand; PAM type: YTN; PAM sequence: TTT
tttgaagagatgaggttttg

SEQ ID NO: 81410 - DNA, 20 bp, Artificial Sequence
  Description of Artificial Sequence: Synthetic oligonucleotide
  Target: ATXN2; (-) strand; PAM type: YTN; PAM sequence: TTG
tattttttgaagagatgagg

SEQ ID NO: 81411 - DNA, 20 bp, Artificial Sequence
  Description of Artificial Sequence: Synthetic oligonucleotide
  Target: ATXN2; (-) strand; PAM type: YTN; PAM sequence: TTT
gtattttttgaagagatgag

SEQ ID NO: 81412 - DNA, 20 bp, Artificial Sequence
  Description of Artificial Sequence: Synthetic oligonucleotide
  Target: ATXN2; (-) strand; PAM type: YTN; PAM sequence: TTT
tgtattttttgaagagatga

SEQ ID NO: 81413 - DNA, 20 bp, Artificial Sequence
  Description of Artificial Sequence: Synthetic oligonucleotide
  Target: ATXN2; (-) strand; PAM type: YTN; PAM sequence: TTT
ttgtattttttgaagagatg

SEQ ID NO: 81414 - DNA, 20 bp, Artificial Sequence
  Description of Artificial Sequence: Synthetic oligonucleotide
  Target: ATXN2; (-) strand; PAM type: YTN; PAM sequence: CTA
atttttgtattttttgaaga

SEQ ID NO: 81415 - DNA, 20 bp, Artificial Sequence
  Description of Artificial Sequence: Synthetic oligonucleotide
  Target: ATXN2; (-) strand; PAM type: YTN; PAM sequence: CTG
gctaatttttgtattttttg

SEQ ID NO: 81416 - DNA, 20 bp, Artificial Sequence
  Description of Artificial Sequence: Synthetic oligonucleotide
  Target: ATXN2; (-) strand; PAM type: YTN; PAM sequence: CTA
ccatgcctggctaatttttg

SEQ ID NO: 81417 - DNA, 20 bp, Artificial Sequence
  Description of Artificial Sequence: Synthetic oligonucleotide
  Target: ATXN2; (-) strand; PAM type: YTN; PAM sequence: CTG
ggagtacaggagcacgctac

SEQ ID NO: 81418 - DNA, 20 bp, Artificial Sequence
  Description of Artificial Sequence: Synthetic oligonucleotide
  Target: ATXN2; (-) strand; PAM type: YTN; PAM sequence: CTG
agtagctgggagtacaggag

SEQ ID NO: 81419 - DNA, 20 bp, Artificial Sequence
  Description of Artificial Sequence: Synthetic oligonucleotide
  Target: ATXN2; (-) strand; PAM type: YTN; PAM sequence: CTC
ctgagtagctgggagtacag

SEQ ID NO: 81420 - DNA, 20 bp, Artificial Sequence
  Description of Artificial Sequence: Synthetic oligonucleotide
  Target: ATXN2; (-) strand; PAM type: YTN; PAM sequence: CTC
agcctcctgagtagctggga

SEQ ID NO: 81421 - DNA, 20 bp, Artificial Sequence
  Description of Artificial Sequence: Synthetic oligonucleotide
  Target: ATXN2; (-) strand; PAM type: YTN; PAM sequence: CTC
ccacctcagcctcctgagta

SEQ ID NO: 81422 - DNA, 20 bp, Artificial Sequence
  Description of Artificial Sequence: Synthetic oligonucleotide
  Target: ATXN2; (-) strand; PAM type: YTN; PAM sequence: CTC
aagcgatcctcccacctcag

SEQ ID NO: 81423 - DNA, 20 bp, Artificial Sequence
  Description of Artificial Sequence: Synthetic oligonucleotide
  Target: ATXN2; (-) strand; PAM type: YTN; PAM sequence: CTG
ggctcaagcgatcctcccac

SEQ ID NO: 81424 - DNA, 20 bp, Artificial Sequence
  Description of Artificial Sequence: Synthetic oligonucleotide
  Target: ATXN2; (-) strand; PAM type: YTN; PAM sequence: TTC
ctgggctcaagcgatcctcc

SEQ ID NO: 81425 - DNA, 20 bp, Artificial Sequence
  Description of Artificial Sequence: Synthetic oligonucleotide
  Target: ATXN2; (-) strand; PAM type: YTN; PAM sequence: TTT
cctgggctcaagcgatcctc

SEQ ID NO: 81426 - DNA, 20 bp, Artificial Sequence
  Description of Artificial Sequence: Synthetic oligonucleotide
  Target: ATXN2; (-) strand; PAM type: YTN; PAM sequence: CTG
tttcctgggctcaagcgatc

SEQ ID NO: 81427 - DNA, 20 bp, Artificial Sequence
  Description of Artificial Sequence: Synthetic oligonucleotide
  Target: ATXN2; (-) strand; PAM type: YTN; PAM sequence: CTC
tgtttcctgggctcaagcga

SEQ ID NO: 81428 - DNA, 20 bp, Artificial Sequence
  Description of Artificial Sequence: Synthetic oligonucleotide
  Target: ATXN2; (-) strand; PAM type: YTN; PAM sequence: CTG
caacctctgtttcctgggct

SEQ ID NO: 81429 - DNA, 20 bp, Artificial Sequence
  Description of Artificial Sequence: Synthetic oligonucleotide
  Target: ATXN2; (-) strand; PAM type: YTN; PAM sequence: CTC
actgcaacctctgtttcctg

SEQ ID NO: 81430 - DNA, 20 bp, Artificial Sequence
  Description of Artificial Sequence: Synthetic oligonucleotide
  Target: ATXN2; (-) strand; PAM type: YTN; PAM sequence: CTC
ggctcactgcaacctctgtt

SEQ ID NO: 81431 - DNA, 20 bp, Artificial Sequence
  Description of Artificial Sequence: Synthetic oligonucleotide
  Target: ATXN2; (-) strand; PAM type: YTN; PAM sequence: CTA
gaatgtagtggtgcagtctc

SEQ ID NO: 81432 - DNA, 20 bp, Artificial Sequence
  Description of Artificial Sequence: Synthetic oligonucleotide
  Target: ATXN2; (-) strand; PAM type: YTN; PAM sequence: CTG
tcaccaaggctagaatgtag

SEQ ID NO: 81433 - DNA, 20 bp, Artificial Sequence
  Description of Artificial Sequence: Synthetic oligonucleotide
  Target: ATXN2; (-) strand; PAM type: YTN; PAM sequence: CTC
tgtcaccaaggctagaatgt

SEQ ID NO: 81434 - DNA, 20 bp, Artificial Sequence
  Description of Artificial Sequence: Synthetic oligonucleotide
  Target: ATXN2; (-) strand; PAM type: YTN; PAM sequence: TTG
agacagggtctctgtcacca

SEQ ID NO: 81435 - DNA, 20 bp, Artificial Sequence
  Description of Artificial Sequence: Synthetic oligonucleotide
  Target: ATXN2; (-) strand; PAM type: YTN; PAM sequence: TTT
gagacagggtctctgtcacc

SEQ ID NO: 81436 - DNA, 20 bp, Artificial Sequence
  Description of Artificial Sequence: Synthetic oligonucleotide
  Target: ATXN2; (-) strand; PAM type: YTN; PAM sequence: TTT
tgagacagggtctctgtcac

SEQ ID NO: 81437 - DNA, 20 bp, Artificial Sequence
  Description of Artificial Sequence: Synthetic oligonucleotide
  Target: ATXN2; (-) strand; PAM type: YTN; PAM sequence: TTT
ttgagacagggtctctgtca

SEQ ID NO: 81438 - DNA, 20 bp, Artificial Sequence
  Description of Artificial Sequence: Synthetic oligonucleotide
  Target: ATXN2; (-) strand; PAM type: YTN; PAM sequence: TTT
tttgagacagggtctctgtc

SEQ ID NO: 81439 - DNA, 20 bp, Artificial Sequence
  Description of Artificial Sequence: Synthetic oligonucleotide
  Target: ATXN2; (-) strand; PAM type: YTN; PAM sequence: TTT
ttttgagacagggtctctgt

SEQ ID NO: 81440 - DNA, 20 bp, Artificial Sequence
  Description of Artificial Sequence: Synthetic oligonucleotide
  Target: ATXN2; (-) strand; PAM type: YTN; PAM sequence: TTT
tttttgagacagggtctctg

SEQ ID NO: 81441 - DNA, 20 bp, Artificial Sequence
  Description of Artificial Sequence: Synthetic oligonucleotide
  Target: ATXN2; (-) strand; PAM type: YTN; PAM sequence: TTT
ttttttgagacagggtctct

SEQ ID NO: 81442 - DNA, 20 bp, Artificial Sequence
  Description of Artificial Sequence: Synthetic oligonucleotide
  Target: ATXN2; (-) strand; PAM type: YTN; PAM sequence: TTT
tttttttgagacagggtctc

SEQ ID NO: 81443 - DNA, 20 bp, Artificial Sequence
  Description of Artificial Sequence: Synthetic oligonucleotide
  Target: ATXN2; (-) strand; PAM type: YTN; PAM sequence: TTT
ttttttttgagacagggtct

SEQ ID NO: 81444 - DNA, 20 bp, Artificial Sequence
  Description of Artificial Sequence: Synthetic oligonucleotide
  Target: ATXN2; (-) strand; PAM type: YTN; PAM sequence: TTT
tttttttttgagacagggtc

SEQ ID NO: 81445 - DNA, 20 bp, Artificial Sequence
  Description of Artificial Sequence: Synthetic oligonucleotide
  Target: ATXN2; (-) strand; PAM type: YTN; PAM sequence: TTT
ttttttttttgagacagggt

SEQ ID NO: 81446 - DNA, 20 bp, Artificial Sequence
  Description of Artificial Sequence: Synthetic oligonucleotide
  Target: ATXN2; (-) strand; PAM type: YTN; PAM sequence: TTT
tttttttttttgagacaggg

SEQ ID NO: 81447 - DNA, 20 bp, Artificial Sequence
  Description of Artificial Sequence: Synthetic oligonucleotide
  Target: ATXN2; (-) strand; PAM type: YTN; PAM sequence: TTT
ttttttttttttgagacagg

SEQ ID NO: 81448 - DNA, 20 bp, Artificial Sequence
  Description of Artificial Sequence: Synthetic oligonucleotide
  Target: ATXN2; (-) strand; PAM type: YTN; PAM sequence: TTT
tttttttttttttgagacag

SEQ ID NO: 81449 - DNA, 20 bp, Artificial Sequence
  Description of Artificial Sequence: Synthetic oligonucleotide
  Target: ATXN2; (-) strand; PAM type: YTN; PAM sequence: TTT
ttttttttttttttgagaca

SEQ ID NO: 81450 - DNA, 20 bp, Artificial Sequence
  Description of Artificial Sequence: Synthetic oligonucleotide
  Target: ATXN2; (-) strand; PAM type: YTN; PAM sequence: TTT
tttttttttttttttgagac

SEQ ID NO: 81451 - DNA, 20 bp, Artificial Sequence
  Description of Artificial Sequence: Synthetic oligonucleotide
  Target: ATXN2; (-) strand; PAM type: YTN; PAM sequence: TTT
ttttttttttttttttgaga

SEQ ID NO: 81452 - DNA, 20 bp, Artificial Sequence
  Description of Artificial Sequence: Synthetic oligonucleotide
  Target: ATXN2; (-) strand; PAM type: YTN; PAM sequence: TTT
tttttttttttttttttgag

SEQ ID NO: 81453 - DNA, 20 bp, Artificial Sequence
  Description of Artificial Sequence: Synthetic oligonucleotide
  Target: ATXN2; (-) strand; PAM type: YTN; PAM sequence: TTT
ttttttttttttttttttga

SEQ ID NO: 81454 - DNA, 20 bp, Artificial Sequence
  Description of Artificial Sequence: Synthetic oligonucleotide
  Target: ATXN2; (-) strand; PAM type: YTN; PAM sequence: TTT
tttttttttttttttttttg

SEQ ID NO: 81455 - DNA, 20 bp, Artificial Sequence
  Description of Artificial Sequence: Synthetic oligonucleotide
  Target: ATXN2; (-) strand; PAM type: YTN; PAM sequence: TTT
tttttttttttttttttttt

SEQ ID NO: 81456 - DNA, 20 bp, Artificial Sequence
  Description of Artificial Sequence: Synthetic oligonucleotide
  Target: ATXN2; (-) strand; PAM type: YTN; PAM sequence: TTT
tttttttttttttttttttt

SEQ ID NO: 81457 - DNA, 20 bp, Artificial Sequence
  Description of Artificial Sequence: Synthetic oligonucleotide
  Target: ATXN2; (-) strand; PAM type: YTN; PAM sequence: TTT
tttttttttttttttttttt

SEQ ID NO: 81458 - DNA, 20 bp, Artificial Sequence
  Description of Artificial Sequence: Synthetic oligonucleotide
  Target: ATXN2; (-) strand; PAM type: YTN; PAM sequence: TTT
tttttttttttttttttttt

SEQ ID NO: 81459 - DNA, 20 bp, Artificial Sequence
  Description of Artificial Sequence: Synthetic oligonucleotide
  Target: ATXN2; (-) strand; PAM type: YTN; PAM sequence: TTT
tttttttttttttttttttt

SEQ ID NO: 81460 - DNA, 20 bp, Artificial Sequence
  Description of Artificial Sequence: Synthetic oligonucleotide
  Target: ATXN2; (-) strand; PAM type: YTN; PAM sequence: TTT
tttttttttttttttttttt

SEQ ID NO: 81461 - DNA, 20 bp, Artificial Sequence
  Description of Artificial Sequence: Synthetic oligonucleotide
  Target: ATXN2; (-) strand; PAM type: YTN; PAM sequence: TTT
tttttttttttttttttttt

SEQ ID NO: 81462 - DNA, 20 bp, Artificial Sequence
  Description of Artificial Sequence: Synthetic oligonucleotide
  Target: ATXN2; (-) strand; PAM type: YTN; PAM sequence: TTT
tttttttttttttttttttt

SEQ ID NO: 81463 - DNA, 20 bp, Artificial Sequence
  Description of Artificial Sequence: Synthetic oligonucleotide
  Target: ATXN2; (-) strand; PAM type: YTN; PAM sequence: TTT
tttttttttttttttttttt

SEQ ID NO: 81464 - DNA, 20 bp, Artificial Sequence
  Description of Artificial Sequence: Synthetic oligonucleotide
  Target: ATXN2; (-) strand; PAM type: YTN; PAM sequence: TTT
tttttttttttttttttttt

SEQ ID NO: 81465 - DNA, 20 bp, Artificial Sequence
  Description of Artificial Sequence: Synthetic oligonucleotide
  Target: ATXN2; (-) strand; PAM type: YTN; PAM sequence: TTT
tttttttttttttttttttt

SEQ ID NO: 81466 - DNA, 20 bp, Artificial Sequence
  Description of Artificial Sequence: Synthetic oligonucleotide
  Target: ATXN2; (-) strand; PAM type: YTN; PAM sequence: TTT
tttttttttttttttttttt

SEQ ID NO: 81467 - DNA, 20 bp, Artificial Sequence
  Description of Artificial Sequence: Synthetic oligonucleotide
  Target: ATXN2; (-) strand; PAM type: YTN; PAM sequence: TTC
aatgaatttttttttttttt

SEQ ID NO: 81468 - DNA, 20 bp, Artificial Sequence
  Description of Artificial Sequence: Synthetic oligonucleotide
  Target: ATXN2; (-) strand; PAM type: YTN; PAM sequence: CTG
ccacgagcagcaacagttca

SEQ ID NO: 81469 - DNA, 20 bp, Artificial Sequence
  Description of Artificial Sequence: Synthetic oligonucleotide
  Target: ATXN2; (-) strand; PAM type: YTN; PAM sequence: CTC
tgccacgagcagcaacagtt

SEQ ID NO: 81470 - DNA, 20 bp, Artificial Sequence
  Description of Artificial Sequence: Synthetic oligonucleotide
  Target: ATXN2; (-) strand; PAM type: YTN; PAM sequence: CTG
ctctgccacgagcagcaaca

SEQ ID NO: 81471 - DNA, 20 bp, Artificial Sequence
  Description of Artificial Sequence: Synthetic oligonucleotide
  Target: ATXN2; (-) strand; PAM type: YTN; PAM sequence: CTA
gtcctgctctgccacgagca

SEQ ID NO: 81472 - DNA, 20 bp, Artificial Sequence
  Description of Artificial Sequence: Synthetic oligonucleotide
  Target: ATXN2; (-) strand; PAM type: YTN; PAM sequence: CTA
tggactagtcctgctctgcc

SEQ ID NO: 81473 - DNA, 20 bp, Artificial Sequence
  Description of Artificial Sequence: Synthetic oligonucleotide
  Target: ATXN2; (-) strand; PAM type: YTN; PAM sequence: TTG
cctatggactagtcctgctc

SEQ ID NO: 81474 - DNA, 20 bp, Artificial Sequence
  Description of Artificial Sequence: Synthetic oligonucleotide
  Target: ATXN2; (-) strand; PAM type: YTN; PAM sequence: CTG
ggcacattgcctatggacta

SEQ ID NO: 81475 - DNA, 20 bp, Artificial Sequence
  Description of Artificial Sequence: Synthetic oligonucleotide
  Target: ATXN2; (-) strand; PAM type: YTN; PAM sequence: CTC
tgggcacattgcctatggac

SEQ ID NO: 81476 - DNA, 20 bp, Artificial Sequence
  Description of Artificial Sequence: Synthetic oligonucleotide
  Target: ATXN2; (-) strand; PAM type: YTN; PAM sequence: TTG
gccaactctgggcacattgc

SEQ ID NO: 81477 - DNA, 20 bp, Artificial Sequence
  Description of Artificial Sequence: Synthetic oligonucleotide
  Target: ATXN2; (-) strand; PAM type: YTN; PAM sequence: TTT
ggccaactctgggcacattg

SEQ ID NO: 81478 - DNA, 20 bp, Artificial Sequence
  Description of Artificial Sequence: Synthetic oligonucleotide
  Target: ATXN2; (-) strand; PAM type: YTN; PAM sequence: TTT
tggccaactctgggcacatt

SEQ ID NO: 81479 - DNA, 20 bp, Artificial Sequence
  Description of Artificial Sequence: Synthetic oligonucleotide
  Target: ATXN2; (-) strand; PAM type: YTN; PAM sequence: TTT
ttggccaactctgggcacat

SEQ ID NO: 81480 - DNA, 20 bp, Artificial Sequence
  Description of Artificial Sequence: Synthetic oligonucleotide
  Target: ATXN2; (-) strand; PAM type: YTN; PAM sequence: TTC
aaaatgtaatttttggccaa

SEQ ID NO: 81481 - DNA, 20 bp, Artificial Sequence
  Description of Artificial Sequence: Synthetic oligonucleotide
  Target: ATXN2; (-) strand; PAM type: YTN; PAM sequence: TTG
taattcaaaatgtaattttt

SEQ ID NO: 81482 - DNA, 20 bp, Artificial Sequence
  Description of Artificial Sequence: Synthetic oligonucleotide
  Target: ATXN2; (-) strand; PAM type: YTN; PAM sequence: TTA
atgtatatataccgcattgt

SEQ ID NO: 81483 - DNA, 20 bp, Artificial Sequence
  Description of Artificial Sequence: Synthetic oligonucleotide
  Target: ATXN2; (-) strand; PAM type: YTN; PAM sequence: TTG
agttaatgtatatataccgc

SEQ ID NO: 81484 - DNA, 20 bp, Artificial Sequence
  Description of Artificial Sequence: Synthetic oligonucleotide
  Target: ATXN2; (-) strand; PAM type: YTN; PAM sequence: TTT
gagttaatgtatatataccg

SEQ ID NO: 81485 - DNA, 20 bp, Artificial Sequence
  Description of Artificial Sequence: Synthetic oligonucleotide
  Target: ATXN2; (-) strand; PAM type: YTN; PAM sequence: TTG
gtttgagttaatgtatatat

SEQ ID NO: 81486 - DNA, 20 bp, Artificial Sequence
  Description of Artificial Sequence: Synthetic oligonucleotide
  Target: ATXN2; (-) strand; PAM type: YTN; PAM sequence: TTT
ggtttgagttaatgtatata

SEQ ID NO: 81487 - DNA, 20 bp, Artificial Sequence
  Description of Artificial Sequence: Synthetic oligonucleotide
  Target: ATXN2; (-) strand; PAM type: YTN; PAM sequence: CTT
tggtttgagttaatgtatat

SEQ ID NO: 81488 - DNA, 20 bp, Artificial Sequence
  Description of Artificial Sequence: Synthetic oligonucleotide
  Target: ATXN2; (-) strand; PAM type: YTN; PAM sequence: TTA
agctttggtttgagttaatg

SEQ ID NO: 81489 - DNA, 20 bp, Artificial Sequence
  Description of Artificial Sequence: Synthetic oligonucleotide
  Target: ATXN2; (-) strand; PAM type: YTN; PAM sequence: TTT
aagctttggtttgagttaat

SEQ ID NO: 81490 - DNA, 20 bp, Artificial Sequence
  Description of Artificial Sequence: Synthetic oligonucleotide
  Target: ATXN2; (-) strand; PAM type: YTN; PAM sequence: TTT
taagctttggtttgagttaa

SEQ ID NO: 81491 - DNA, 20 bp, Artificial Sequence
  Description of Artificial Sequence: Synthetic oligonucleotide
  Target: ATXN2; (-) strand; PAM type: YTN; PAM sequence: TTG
ttttaagctttggtttgagt

SEQ ID NO: 81492 - DNA, 20 bp, Artificial Sequence
  Description of Artificial Sequence: Synthetic oligonucleotide
  Target: ATXN2; (-) strand; PAM type: YTN; PAM sequence: CTG
ccaagaattgttttaagctt

SEQ ID NO: 81493 - DNA, 20 bp, Artificial Sequence
  Description of Artificial Sequence: Synthetic oligonucleotide
  Target: ATXN2; (-) strand; PAM type: YTN; PAM sequence: CTG
cacccagctgccaagaattg

SEQ ID NO: 81494 - DNA, 20 bp, Artificial Sequence
  Description of Artificial Sequence: Synthetic oligonucleotide
  Target: ATXN2; (-) strand; PAM type: YTN; PAM sequence: TTA
caggtgtgagccactgcacc

SEQ ID NO: 81495 - DNA, 20 bp, Artificial Sequence
  Description of Artificial Sequence: Synthetic oligonucleotide
  Target: ATXN2; (-) strand; PAM type: YTN; PAM sequence: CTG
ggattacaggtgtgagccac

SEQ ID NO: 81496 - DNA, 20 bp, Artificial Sequence
  Description of Artificial Sequence: Synthetic oligonucleotide
  Target: ATXN2; (-) strand; PAM type: YTN; PAM sequence: CTC
ccaaagtgctgggattacag

SEQ ID NO: 81497 - DNA, 20 bp, Artificial Sequence
  Description of Artificial Sequence: Synthetic oligonucleotide
  Target: ATXN2; (-) strand; PAM type: YTN; PAM sequence: CTC
gactcccaaagtgctgggat

SEQ ID NO: 81498 - DNA, 20 bp, Artificial Sequence
  Description of Artificial Sequence: Synthetic oligonucleotide
  Target: ATXN2; (-) strand; PAM type: YTN; PAM sequence: CTG
cccacctcgactcccaaagt

SEQ ID NO: 81499 - DNA, 20 bp, Artificial Sequence
  Description of Artificial Sequence: Synthetic oligonucleotide
  Target: ATXN2; (-) strand; PAM type: YTN; PAM sequence: CTC
gtaatctgcccacctcgact

SEQ ID NO: 81500 - DNA, 20 bp, Artificial Sequence
  Description of Artificial Sequence: Synthetic oligonucleotide
  Target: ATXN2; (-) strand; PAM type: YTN; PAM sequence: TTG
acctcgtaatctgcccacct

SEQ ID NO: 81501 - DNA, 20 bp, Artificial Sequence
  Description of Artificial Sequence: Synthetic oligonucleotide
  Target: ATXN2; (-) strand; PAM type: YTN; PAM sequence: CTT
gacctcgtaatctgcccacc

SEQ ID NO: 81502 - DNA, 20 bp, Artificial Sequence
  Description of Artificial Sequence: Synthetic oligonucleotide
  Target: ATXN2; (-) strand; PAM type: YTN; PAM sequence: CTC
ttgacctcgtaatctgccca

SEQ ID NO: 81503 - DNA, 20 bp, Artificial Sequence
  Description of Artificial Sequence: Synthetic oligonucleotide
  Target: ATXN2; (-) strand; PAM type: YTN; PAM sequence: TTG
atctcttgacctcgtaatct

SEQ ID NO: 81504 - DNA, 20 bp, Artificial Sequence
  Description of Artificial Sequence: Synthetic oligonucleotide
  Target: ATXN2; (-) strand; PAM type: YTN; PAM sequence: CTT
gatctcttgacctcgtaatc

SEQ ID NO: 81505 - DNA, 20 bp, Artificial Sequence
  Description of Artificial Sequence: Synthetic oligonucleotide
  Target: ATXN2; (-) strand; PAM type: YTN; PAM sequence: TTG
gccaggatagtcttgatctc

SEQ ID NO: 81506 - DNA, 20 bp, Artificial Sequence
  Description of Artificial Sequence: Synthetic oligonucleotide
  Target: ATXN2; (-) strand; PAM type: YTN; PAM sequence: TTC
accatgttggccaggatagt

SEQ ID NO: 81507 - DNA, 20 bp, Artificial Sequence
  Description of Artificial Sequence: Synthetic oligonucleotide
  Target: ATXN2; (-) strand; PAM type: YTN; PAM sequence: TTT
caccatgttggccaggatag

SEQ ID NO: 81508 - DNA, 20 bp, Artificial Sequence
  Description of Artificial Sequence: Synthetic oligonucleotide
  Target: ATXN2; (-) strand; PAM type: YTN; PAM sequence: TTA
gtagagatggggtttcacca

SEQ ID NO: 81509 - DNA, 20 bp, Artificial Sequence
  Description of Artificial Sequence: Synthetic oligonucleotide
  Target: ATXN2; (-) strand; PAM type: YTN; PAM sequence: TTT
agtagagatggggtttcacc

SEQ ID NO: 81510 - DNA, 20 bp, Artificial Sequence
  Description of Artificial Sequence: Synthetic oligonucleotide
  Target: ATXN2; (-) strand; PAM type: YTN; PAM sequence: TTT
tagtagagatggggtttcac

SEQ ID NO: 81511 - DNA, 20 bp, Artificial Sequence
  Description of Artificial Sequence: Synthetic oligonucleotide
  Target: ATXN2; (-) strand; PAM type: YTN; PAM sequence: TTT
ttagtagagatggggtttca

SEQ ID NO: 81512 - DNA, 20 bp, Artificial Sequence
  Description of Artificial Sequence: Synthetic oligonucleotide
  Target: ATXN2; (-) strand; PAM type: YTN; PAM sequence: TTG
tatttttagtagagatgggg

SEQ ID NO: 81513 - DNA, 20 bp, Artificial Sequence
  Description of Artificial Sequence: Synthetic oligonucleotide
  Target: ATXN2; (-) strand; PAM type: YTN; PAM sequence: TTT
gtatttttagtagagatggg

SEQ ID NO: 81514 - DNA, 20 bp, Artificial Sequence
  Description of Artificial Sequence: Synthetic oligonucleotide
  Target: ATXN2; (-) strand; PAM type: YTN; PAM sequence: TTT
tgtatttttagtagagatgg

SEQ ID NO: 81515 - DNA, 20 bp, Artificial Sequence
  Description of Artificial Sequence: Synthetic oligonucleotide
  Target: ATXN2; (-) strand; PAM type: YTN; PAM sequence: TTT
ttgtatttttagtagagatg

SEQ ID NO: 81516 - DNA, 20 bp, Artificial Sequence
  Description of Artificial Sequence: Synthetic oligonucleotide
  Target: ATXN2; (-) strand; PAM type: YTN; PAM sequence: CTA
atttttgtatttttagtaga

SEQ ID NO: 81517 - DNA, 20 bp, Artificial Sequence
  Description of Artificial Sequence: Synthetic oligonucleotide
  Target: ATXN2; (-) strand; PAM type: YTN; PAM sequence: CTG
tgcccggcctaatttttgta

SEQ ID NO: 81518 - DNA, 20 bp, Artificial Sequence
  Description of Artificial Sequence: Synthetic oligonucleotide
  Target: ATXN2; (-) strand; PAM type: YTN; PAM sequence: CTG
gggatacaggcatgaacccc

SEQ ID NO: 81519 - DNA, 20 bp, Artificial Sequence
  Description of Artificial Sequence: Synthetic oligonucleotide
  Target: ATXN2; (-) strand; PAM type: YTN; PAM sequence: CTC
ccaaagtgctggggatacag

SEQ ID NO: 81520 - DNA, 20 bp, Artificial Sequence
  Description of Artificial Sequence: Synthetic oligonucleotide
  Target: ATXN2; (-) strand; PAM type: YTN; PAM sequence: CTC
ggcctcccaaagtgctgggg

SEQ ID NO: 81521 - DNA, 20 bp, Artificial Sequence
  Description of Artificial Sequence: Synthetic oligonucleotide
  Target: ATXN2; (-) strand; PAM type: YTN; PAM sequence: TTG
cctcggcctcccaaagtgct

SEQ ID NO: 81522 - DNA, 20 bp, Artificial Sequence
  Description of Artificial Sequence: Synthetic oligonucleotide
  Target: ATXN2; (-) strand; PAM type: YTN; PAM sequence: CTT
gcctcggcctcccaaagtgc

SEQ ID NO: 81523 - DNA, 20 bp, Artificial Sequence
  Description of Artificial Sequence: Synthetic oligonucleotide
  Target: ATXN2; (-) strand; PAM type: YTN; PAM sequence: CTC
aggtgatccacttgcctcgg

SEQ ID NO: 81524 - DNA, 20 bp, Artificial Sequence
  Description of Artificial Sequence: Synthetic oligonucleotide
  Target: ATXN2; (-) strand; PAM type: YTN; PAM sequence: CTG
acctcaggtgatccacttgc

SEQ ID NO: 81525 - DNA, 20 bp, Artificial Sequence
  Description of Artificial Sequence: Synthetic oligonucleotide
  Target: ATXN2; (-) strand; PAM type: YTN; PAM sequence: CTC
ctgacctcaggtgatccact

SEQ ID NO: 81526 - DNA, 20 bp, Artificial Sequence
  Description of Artificial Sequence: Synthetic oligonucleotide
  Target: ATXN2; (-) strand; PAM type: YTN; PAM sequence: TTG
aactcctgacctcaggtgat

SEQ ID NO: 81527 - DNA, 20 bp, Artificial Sequence
  Description of Artificial Sequence: Synthetic oligonucleotide
  Target: ATXN2; (-) strand; PAM type: YTN; PAM sequence: CTT
gaactcctgacctcaggtga

SEQ ID NO: 81528 - DNA, 20 bp, Artificial Sequence
  Description of Artificial Sequence: Synthetic oligonucleotide
  Target: ATXN2; (-) strand; PAM type: YTN; PAM sequence: CTG
gtcttgaactcctgacctca

SEQ ID NO: 81529 - DNA, 20 bp, Artificial Sequence
  Description of Artificial Sequence: Synthetic oligonucleotide
  Target: ATXN2; (-) strand; PAM type: YTN; PAM sequence: TTG
gtcaggctggtcttgaactc

SEQ ID NO: 81530 - DNA, 20 bp, Artificial Sequence
  Description of Artificial Sequence: Synthetic oligonucleotide
  Target: ATXN2; (-) strand; PAM type: YTN; PAM sequence: CTC
catgttggtcaggctggtct

SEQ ID NO: 81531 - DNA, 20 bp, Artificial Sequence
  Description of Artificial Sequence: Synthetic oligonucleotide
  Target: ATXN2; (-) strand; PAM type: YTN; PAM sequence: TTC
tccatgttggtcaggctggt

SEQ ID NO: 81532 - DNA, 20 bp, Artificial Sequence
  Description of Artificial Sequence: Synthetic oligonucleotide
  Target: ATXN2; (-) strand; PAM type: YTN; PAM sequence: TTT
ctccatgttggtcaggctgg

SEQ ID NO: 81533 - DNA, 20 bp, Artificial Sequence
  Description of Artificial Sequence: Synthetic oligonucleotide
  Target: ATXN2; (-) strand; PAM type: YTN; PAM sequence: TTA
gtagagatggggtttctcca

SEQ ID NO: 81534 - DNA, 20 bp, Artificial Sequence
  Description of Artificial Sequence: Synthetic oligonucleotide
  Target: ATXN2; (-) strand; PAM type: YTN; PAM sequence: TTT
agtagagatggggtttctcc

SEQ ID NO: 81535 - DNA, 20 bp, Artificial Sequence
  Description of Artificial Sequence: Synthetic oligonucleotide
  Target: ATXN2; (-) strand; PAM type: YTN; PAM sequence: TTT
tagtagagatggggtttctc

SEQ ID NO: 81536 - DNA, 20 bp, Artificial Sequence
  Description of Artificial Sequence: Synthetic oligonucleotide
  Target: ATXN2; (-) strand; PAM type: YTN; PAM sequence: TTA
gttttagtagagatggggtt

SEQ ID NO: 81537 - DNA, 20 bp, Artificial Sequence
  Description of Artificial Sequence: Synthetic oligonucleotide
  Target: ATXN2; (-) strand; PAM type: YTN; PAM sequence: TTT
agttttagtagagatggggt

SEQ ID NO: 81538 - DNA, 20 bp, Artificial Sequence
  Description of Artificial Sequence: Synthetic oligonucleotide
  Target: ATXN2; (-) strand; PAM type: YTN; PAM sequence: TTG
tatttagttttagtagagat

SEQ ID NO: 81539 - DNA, 20 bp, Artificial Sequence
  Description of Artificial Sequence: Synthetic oligonucleotide
  Target: ATXN2; (-) strand; PAM type: YTN; PAM sequence: TTT
gtatttagttttagtagaga

SEQ ID NO: 81540 - DNA, 20 bp, Artificial Sequence
  Description of Artificial Sequence: Synthetic oligonucleotide
  Target: ATXN2; (-) strand; PAM type: YTN; PAM sequence: TTT
tgtatttagttttagtagag

SEQ ID NO: 81541 - DNA, 20 bp, Artificial Sequence
  Description of Artificial Sequence: Synthetic oligonucleotide
  Target: ATXN2; (-) strand; PAM type: YTN; PAM sequence: CTA
attttgtatttagttttagt

SEQ ID NO: 81542 - DNA, 20 bp, Artificial Sequence
  Description of Artificial Sequence: Synthetic oligonucleotide
  Target: ATXN2; (-) strand; PAM type: YTN; PAM sequence: CTG
gctaattttgtatttagttt

SEQ ID NO: 81543 - DNA, 20 bp, Artificial Sequence
  Description of Artificial Sequence: Synthetic oligonucleotide
  Target: ATXN2; (-) strand; PAM type: YTN; PAM sequence: CTC
caccatgcctggctaatttt

SEQ ID NO: 81544 - DNA, 20 bp, Artificial Sequence
  Description of Artificial Sequence: Synthetic oligonucleotide
  Target: ATXN2; (-) strand; PAM type: YTN; PAM sequence: TTA
cagacatgctccaccatgcc

SEQ ID NO: 81545 - DNA, 20 bp, Artificial Sequence
  Description of Artificial Sequence: Synthetic oligonucleotide
  Target: ATXN2; (-) strand; PAM type: YTN; PAM sequence: CTG
ggattacagacatgctccac

SEQ ID NO: 81546 - DNA, 20 bp, Artificial Sequence
  Description of Artificial Sequence: Synthetic oligonucleotide
  Target: ATXN2; (-) strand; PAM type: YTN; PAM sequence: CTG
agtagctgggattacagaca

SEQ ID NO: 81547 - DNA, 20 bp, Artificial Sequence
  Description of Artificial Sequence: Synthetic oligonucleotide
  Target: ATXN2; (-) strand; PAM type: YTN; PAM sequence: CTC
ctgagtagctgggattacag

SEQ ID NO: 81548 - DNA, 20 bp, Artificial Sequence
  Description of Artificial Sequence: Synthetic oligonucleotide
  Target: ATXN2; (-) strand; PAM type: YTN; PAM sequence: CTC
agcctcctgagtagctggga

SEQ ID NO: 81549 - DNA, 20 bp, Artificial Sequence
  Description of Artificial Sequence: Synthetic oligonucleotide
  Target: ATXN2; (-) strand; PAM type: YTN; PAM sequence: CTA
cctcagcctcctgagtagct

SEQ ID NO: 81550 - DNA, 20 bp, Artificial Sequence
  Description of Artificial Sequence: Synthetic oligonucleotide
  Target: ATXN2; (-) strand; PAM type: YTN; PAM sequence: CTC
ctacctcagcctcctgagta

SEQ ID NO: 81551 - DNA, 20 bp, Artificial Sequence
  Description of Artificial Sequence: Synthetic oligonucleotide
  Target: ATXN2; (-) strand; PAM type: YTN; PAM sequence: TTC
tcctacctcagcctcctgag

SEQ ID NO: 81552 - DNA, 20 bp, Artificial Sequence
  Description of Artificial Sequence: Synthetic oligonucleotide
  Target: ATXN2; (-) strand; PAM type: YTN; PAM sequence: TTC
aagtgattctcctacctcag

SEQ ID NO: 81553 - DNA, 20 bp, Artificial Sequence
  Description of Artificial Sequence: Synthetic oligonucleotide
  Target: ATXN2; (-) strand; PAM type: YTN; PAM sequence: CTC
ccgggttcaagtgattctcc

SEQ ID NO: 81554 - DNA, 20 bp, Artificial Sequence
  Description of Artificial Sequence: Synthetic oligonucleotide
  Target: ATXN2; (-) strand; PAM type: YTN; PAM sequence: CTG
cctcccgggttcaagtgatt

SEQ ID NO: 81555 - DNA, 20 bp, Artificial Sequence
  Description of Artificial Sequence: Synthetic oligonucleotide
  Target: ATXN2; (-) strand; PAM type: YTN; PAM sequence: CTG
gagtgcaatggcccgatctg

SEQ ID NO: 81556 - DNA, 20 bp, Artificial Sequence
  Description of Artificial Sequence: Synthetic oligonucleotide
  Target: ATXN2; (-) strand; PAM type: YTN; PAM sequence: TTG
ccgaggctggagtgcaatgg

SEQ ID NO: 81557 - DNA, 20 bp, Artificial Sequence
  Description of Artificial Sequence: Synthetic oligonucleotide
  Target: ATXN2; (-) strand; PAM type: YTN; PAM sequence: TTA
gttgccgaggctggagtgca

SEQ ID NO: 81558 - DNA, 20 bp, Artificial Sequence
  Description of Artificial Sequence: Synthetic oligonucleotide
  Target: ATXN2; (-) strand; PAM type: YTN; PAM sequence: CTT
agttgccgaggctggagtgc

SEQ ID NO: 81559 - DNA, 20 bp, Artificial Sequence
  Description of Artificial Sequence: Synthetic oligonucleotide
  Target: ATXN2; (-) strand; PAM type: YTN; PAM sequence: CTC
ttagttgccgaggctggagt

SEQ ID NO: 81560 - DNA, 20 bp, Artificial Sequence
  Description of Artificial Sequence: Synthetic oligonucleotide
  Target: ATXN2; (-) strand; PAM type: YTN; PAM sequence: TTC
gctcttagttgccgaggctg

SEQ ID NO: 81561 - DNA, 20 bp, Artificial Sequence
  Description of Artificial Sequence: Synthetic oligonucleotide
  Target: ATXN2; (-) strand; PAM type: YTN; PAM sequence: TTT
cgctcttagttgccgaggct

SEQ ID NO: 81562 - DNA, 20 bp, Artificial Sequence
  Description of Artificial Sequence: Synthetic oligonucleotide
  Target: ATXN2; (-) strand; PAM type: YTN; PAM sequence: TTG
agatggagtttcgctcttag

SEQ ID NO: 81563 - DNA, 20 bp, Artificial Sequence
  Description of Artificial Sequence: Synthetic oligonucleotide
  Target: ATXN2; (-) strand; PAM type: YTN; PAM sequence: TTT
gagatggagtttcgctctta

SEQ ID NO: 81564 - DNA, 20 bp, Artificial Sequence
  Description of Artificial Sequence: Synthetic oligonucleotide
  Target: ATXN2; (-) strand; PAM type: YTN; PAM sequence: TTT
tgagatggagtttcgctctt

SEQ ID NO: 81565 - DNA, 20 bp, Artificial Sequence
  Description of Artificial Sequence: Synthetic oligonucleotide
  Target: ATXN2; (-) strand; PAM type: YTN; PAM sequence: TTT
ttgagatggagtttcgctct

SEQ ID NO: 81566 - DNA, 20 bp, Artificial Sequence
  Description of Artificial Sequence: Synthetic oligonucleotide
  Target: ATXN2; (-) strand; PAM type: YTN; PAM sequence: TTG
tttttgagatggagtttcgc

SEQ ID NO: 81567 - DNA, 20 bp, Artificial Sequence
  Description of Artificial Sequence: Synthetic oligonucleotide
  Target: ATXN2; (-) strand; PAM type: YTN; PAM sequence: TTG
aaataattgtttttgagatg

SEQ ID NO: 81568 - DNA, 20 bp, Artificial Sequence
  Description of Artificial Sequence: Synthetic oligonucleotide
  Target: ATXN2; (-) strand; PAM type: YTN; PAM sequence: TTA
ttgaaataattgtttttgag

SEQ ID NO: 81569 - DNA, 20 bp, Artificial Sequence
  Description of Artificial Sequence: Synthetic oligonucleotide
  Target: ATXN2; (-) strand; PAM type: YTN; PAM sequence: TTG
cattattgaaataattgttt

SEQ ID NO: 81570 - DNA, 20 bp, Artificial Sequence
  Description of Artificial Sequence: Synthetic oligonucleotide
  Target: ATXN2; (-) strand; PAM type: YTN; PAM sequence: TTA
ggatgcattgcattattgaa

SEQ ID NO: 81571 - DNA, 20 bp, Artificial Sequence
  Description of Artificial Sequence: Synthetic oligonucleotide
  Target: ATXN2; (-) strand; PAM type: YTN; PAM sequence: TTA
gaaaaatgaaaaagaataag

SEQ ID NO: 81572 - DNA, 20 bp, Artificial Sequence
  Description of Artificial Sequence: Synthetic oligonucleotide
  Target: ATXN2; (-) strand; PAM type: YTN; PAM sequence: TTT
agaaaaatgaaaaagaataa

SEQ ID NO: 81573 - DNA, 20 bp, Artificial Sequence
  Description of Artificial Sequence: Synthetic oligonucleotide
  Target: ATXN2; (-) strand; PAM type: YTN; PAM sequence: TTT
tagaaaaatgaaaaagaata

SEQ ID NO: 81574 - DNA, 20 bp, Artificial Sequence
  Description of Artificial Sequence: Synthetic oligonucleotide
  Target: ATXN2; (-) strand; PAM type: YTN; PAM sequence: TTT
ttagaaaaatgaaaaagaat

SEQ ID NO: 81575 - DNA, 20 bp, Artificial Sequence
  Description of Artificial Sequence: Synthetic oligonucleotide
  Target: ATXN2; (-) strand; PAM type: YTN; PAM sequence: TTA
tgacaagcatttttagaaaa

SEQ ID NO: 81576 - DNA, 20 bp, Artificial Sequence
  Description of Artificial Sequence: Synthetic oligonucleotide
  Target: ATXN2; (-) strand; PAM type: YTN; PAM sequence: TTA
gtggattatgacaagcattt

SEQ ID NO: 81577 - DNA, 20 bp, Artificial Sequence
  Description of Artificial Sequence: Synthetic oligonucleotide
  Target: ATXN2; (-) strand; PAM type: YTN; PAM sequence: TTG
tgaaacacattagtggatta

SEQ ID NO: 81578 - DNA, 20 bp, Artificial Sequence
  Description of Artificial Sequence: Synthetic oligonucleotide
  Target: ATXN2; (-) strand; PAM type: YTN; PAM sequence: TTA
gtagattgtgaaacacatta

SEQ ID NO: 81579 - DNA, 20 bp, Artificial Sequence
  Description of Artificial Sequence: Synthetic oligonucleotide
  Target: ATXN2; (-) strand; PAM type: YTN; PAM sequence: CTT
agtagattgtgaaacacatt

SEQ ID NO: 81580 - DNA, 20 bp, Artificial Sequence
  Description of Artificial Sequence: Synthetic oligonucleotide
  Target: ATXN2; (-) strand; PAM type: YTN; PAM sequence: CTG
cagatcatgaccccttagta

SEQ ID NO: 81581 - DNA, 20 bp, Artificial Sequence
  Description of Artificial Sequence: Synthetic oligonucleotide
  Target: ATXN2; (-) strand; PAM type: YTN; PAM sequence: TTC
aatctgcagatcatgacccc

SEQ ID NO: 81582 - DNA, 20 bp, Artificial Sequence
  Description of Artificial Sequence: Synthetic oligonucleotide
  Target: ATXN2; (-) strand; PAM type: YTN; PAM sequence: TTT
caatctgcagatcatgaccc

SEQ ID NO: 81583 - DNA, 20 bp, Artificial Sequence
  Description of Artificial Sequence: Synthetic oligonucleotide
  Target: ATXN2; (-) strand; PAM type: YTN; PAM sequence: TTT
tcaatctgcagatcatgacc

SEQ ID NO: 81584 - DNA, 20 bp, Artificial Sequence
  Description of Artificial Sequence: Synthetic oligonucleotide
  Target: ATXN2; (-) strand; PAM type: YTN; PAM sequence: TTT
ttcaatctgcagatcatgac

SEQ ID NO: 81585 - DNA, 20 bp, Artificial Sequence
  Description of Artificial Sequence: Synthetic oligonucleotide
  Target: ATXN2; (-) strand; PAM type: YTN; PAM sequence: CTC
ccaaagaagtatttttcaat

SEQ ID NO: 81586 - DNA, 20 bp, Artificial Sequence
  Description of Artificial Sequence: Synthetic oligonucleotide
  Target: ATXN2; (-) strand; PAM type: YTN; PAM sequence: TTA
tatctcccaaagaagtattt

SEQ ID NO: 81587 - DNA, 20 bp, Artificial Sequence
  Description of Artificial Sequence: Synthetic oligonucleotide
  Target: ATXN2; (-) strand; PAM type: YTN; PAM sequence: TTT
atatctcccaaagaagtatt

SEQ ID NO: 81588 - DNA, 20 bp, Artificial Sequence
  Description of Artificial Sequence: Synthetic oligonucleotide
  Target: ATXN2; (-) strand; PAM type: YTN; PAM sequence: TTT
tatatctcccaaagaagtat

SEQ ID NO: 81589 - DNA, 20 bp, Artificial Sequence
  Description of Artificial Sequence: Synthetic oligonucleotide
  Target: ATXN2; (-) strand; PAM type: YTN; PAM sequence: TTT
ttatatctcccaaagaagta

SEQ ID NO: 81590 - DNA, 20 bp, Artificial Sequence
  Description of Artificial Sequence: Synthetic oligonucleotide
  Target: ATXN2; (-) strand; PAM type: YTN; PAM sequence: TTT
tttatatctcccaaagaagt

SEQ ID NO: 81591 - DNA, 20 bp, Artificial Sequence
  Description of Artificial Sequence: Synthetic oligonucleotide
  Target: ATXN2; (-) strand; PAM type: YTN; PAM sequence: TTA
aatgattttttatatctccc

SEQ ID NO: 81592 - DNA, 20 bp, Artificial Sequence
  Description of Artificial Sequence: Synthetic oligonucleotide
  Target: ATXN2; (-) strand; PAM type: YTN; PAM sequence: CTC
ataacaccaggttaaatgat

SEQ ID NO: 81593 - DNA, 20 bp, Artificial Sequence
  Description of Artificial Sequence: Synthetic oligonucleotide
  Target: ATXN2; (-) strand; PAM type: YTN; PAM sequence: CTC
ataatggtgactcataacac

SEQ ID NO: 81594 - DNA, 20 bp, Artificial Sequence
  Description of Artificial Sequence: Synthetic oligonucleotide
  Target: ATXN2; (-) strand; PAM type: YTN; PAM sequence: TTA
atgtgctcataatggtgact

SEQ ID NO: 81595 - DNA, 20 bp, Artificial Sequence
  Description of Artificial Sequence: Synthetic oligonucleotide
  Target: ATXN2; (-) strand; PAM type: YTN; PAM sequence: TTA
gttaatgtgctcataatggt

SEQ ID NO: 81596 - DNA, 20 bp, Artificial Sequence
  Description of Artificial Sequence: Synthetic oligonucleotide
  Target: ATXN2; (-) strand; PAM type: YTN; PAM sequence: TTA
tagcacagtgtagttagtta

SEQ ID NO: 81597 - DNA, 20 bp, Artificial Sequence
  Description of Artificial Sequence: Synthetic oligonucleotide
  Target: ATXN2; (-) strand; PAM type: YTN; PAM sequence: TTT
atagcacagtgtagttagtt

SEQ ID NO: 81598 - DNA, 20 bp, Artificial Sequence
  Description of Artificial Sequence: Synthetic oligonucleotide
  Target: ATXN2; (-) strand; PAM type: YTN; PAM sequence: TTT
tatagcacagtgtagttagt

SEQ ID NO: 81599 - DNA, 20 bp, Artificial Sequence
  Description of Artificial Sequence: Synthetic oligonucleotide
  Target: ATXN2; (-) strand; PAM type: YTN; PAM sequence: CTG
ttttatagcacagtgtagtt

SEQ ID NO: 81600 - DNA, 20 bp, Artificial Sequence
  Description of Artificial Sequence: Synthetic oligonucleotide
  Target: ATXN2; (-) strand; PAM type: YTN; PAM sequence: TTA
ctgttttatagcacagtgta

SEQ ID NO: 81601 - DNA, 20 bp, Artificial Sequence
  Description of Artificial Sequence: Synthetic oligonucleotide
  Target: ATXN2; (-) strand; PAM type: YTN; PAM sequence: CTA
agggcattactgttttatag

SEQ ID NO: 81602 - DNA, 20 bp, Artificial Sequence
  Description of Artificial Sequence: Synthetic oligonucleotide
  Target: ATXN2; (-) strand; PAM type: YTN; PAM sequence: TTA
ggccctaagggcattactgt

SEQ ID NO: 81603 - DNA, 20 bp, Artificial Sequence
  Description of Artificial Sequence: Synthetic oligonucleotide
  Target: ATXN2; (-) strand; PAM type: YTN; PAM sequence: CTT
aggccctaagggcattactg

SEQ ID NO: 81604 - DNA, 20 bp, Artificial Sequence
  Description of Artificial Sequence: Synthetic oligonucleotide
  Target: ATXN2; (-) strand; PAM type: YTN; PAM sequence: CTG
tatatcttaggccctaaggg

SEQ ID NO: 81605 - DNA, 20 bp, Artificial Sequence
  Description of Artificial Sequence: Synthetic oligonucleotide
  Target: ATXN2; (-) strand; PAM type: YTN; PAM sequence: TTA
tagctgtatatcttaggccc

SEQ ID NO: 81606 - DNA, 20 bp, Artificial Sequence
  Description of Artificial Sequence: Synthetic oligonucleotide
  Target: ATXN2; (-) strand; PAM type: YTN; PAM sequence: TTT
atagctgtatatcttaggcc

SEQ ID NO: 81607 - DNA, 20 bp, Artificial Sequence
  Description of Artificial Sequence: Synthetic oligonucleotide
  Target: ATXN2; (-) strand; PAM type: YTN; PAM sequence: CTG
taagtttatagctgtatatc

SEQ ID NO: 81608 - DNA, 20 bp, Artificial Sequence
  Description of Artificial Sequence: Synthetic oligonucleotide
  Target: ATXN2; (-) strand; PAM type: YTN; PAM sequence: TTG
actgtaagtttatagctgta

SEQ ID NO: 81609 - DNA, 20 bp, Artificial Sequence
  Description of Artificial Sequence: Synthetic oligonucleotide
  Target: ATXN2; (-) strand; PAM type: YTN; PAM sequence: TTT
gactgtaagtttatagctgt

SEQ ID NO: 81610 - DNA, 20 bp, Artificial Sequence
  Description of Artificial Sequence: Synthetic oligonucleotide
  Target: ATXN2; (-) strand; PAM type: YTN; PAM sequence: TTT
tgactgtaagtttatagctg

SEQ ID NO: 81611 - DNA, 20 bp, Artificial Sequence
  Description of Artificial Sequence: Synthetic oligonucleotide
  Target: ATXN2; (-) strand; PAM type: YTN; PAM sequence: CTG
ggagttttgactgtaagttt

SEQ ID NO: 81612 - DNA, 20 bp, Artificial Sequence
  Description of Artificial Sequence: Synthetic oligonucleotide
  Target: ATXN2; (-) strand; PAM type: YTN; PAM sequence: CTC
ccggcctgggagttttgact

SEQ ID NO: 81613 - DNA, 20 bp, Artificial Sequence
  Description of Artificial Sequence: Synthetic oligonucleotide
  Target: ATXN2; (-) strand; PAM type: YTN; PAM sequence: TTA
caggcgtgagccaccactcc

SEQ ID NO: 81614 - DNA, 20 bp, Artificial Sequence
  Description of Artificial Sequence: Synthetic oligonucleotide
  Target: ATXN2; (-) strand; PAM type: YTN; PAM sequence: CTC
ccaaagtgccgggattacag

SEQ ID NO: 81615 - DNA, 20 bp, Artificial Sequence
  Description of Artificial Sequence: Synthetic oligonucleotide
  Target: ATXN2; (-) strand; PAM type: YTN; PAM sequence: CTA
ggcctcccaaagtgccggga

SEQ ID NO: 81616 - DNA, 20 bp, Artificial Sequence
  Description of Artificial Sequence: Synthetic oligonucleotide
  Target: ATXN2; (-) strand; PAM type: YTN; PAM sequence: CTG
cctaggcctcccaaagtgcc

SEQ ID NO: 81617 - DNA, 20 bp, Artificial Sequence
  Description of Artificial Sequence: Synthetic oligonucleotide
  Target: ATXN2; (-) strand; PAM type: YTN; PAM sequence: CTC
agatgatccacctgcctagg

SEQ ID NO: 81618 - DNA, 20 bp, Artificial Sequence
  Description of Artificial Sequence: Synthetic oligonucleotide
  Target: ATXN2; (-) strand; PAM type: YTN; PAM sequence: CTG
acctcagatgatccacctgc

SEQ ID NO: 81619 - DNA, 20 bp, Artificial Sequence
  Description of Artificial Sequence: Synthetic oligonucleotide
  Target: ATXN2; (-) strand; PAM type: YTN; PAM sequence: CTC
ctgacctcagatgatccacc

SEQ ID NO: 81620 - DNA, 20 bp, Artificial Sequence
  Description of Artificial Sequence: Synthetic oligonucleotide
  Target: ATXN2; (-) strand; PAM type: YTN; PAM sequence: TTG
aactcctgacctcagatgat

SEQ ID NO: 81621 - DNA, 20 bp, Artificial Sequence
  Description of Artificial Sequence: Synthetic oligonucleotide
  Target: ATXN2; (-) strand; PAM type: YTN; PAM sequence: CTT
gaactcctgacctcagatga

SEQ ID NO: 81622 - DNA, 20 bp, Artificial Sequence
  Description of Artificial Sequence: Synthetic oligonucleotide
  Target: ATXN2; (-) strand; PAM type: YTN; PAM sequence: TTG
gccaggccggtcttgaactc

SEQ ID NO: 81623 - DNA, 20 bp, Artificial Sequence
  Description of Artificial Sequence: Synthetic oligonucleotide
  Target: ATXN2; (-) strand; PAM type: YTN; PAM sequence: TTG
ccatattggccaggccggtc

SEQ ID NO: 81624 - DNA, 20 bp, Artificial Sequence
  Description of Artificial Sequence: Synthetic oligonucleotide
  Target: ATXN2; (-) strand; PAM type: YTN; PAM sequence: TTT
gccatattggccaggccggt

SEQ ID NO: 81625 - DNA, 20 bp, Artificial Sequence
  Description of Artificial Sequence: Synthetic oligonucleotide
  Target: ATXN2; (-) strand; PAM type: YTN; PAM sequence: TTT
tgccatattggccaggccgg

SEQ ID NO: 81626 - DNA, 20 bp, Artificial Sequence
  Description of Artificial Sequence: Synthetic oligonucleotide
  Target: ATXN2; (-) strand; PAM type: YTN; PAM sequence: TTA
gtagagatggggttttgcca

SEQ ID NO: 81627 - DNA, 20 bp, Artificial Sequence
  Description of Artificial Sequence: Synthetic oligonucleotide
  Target: ATXN2; (-) strand; PAM type: YTN; PAM sequence: TTT
agtagagatggggttttgcc

SEQ ID NO: 81628 - DNA, 20 bp, Artificial Sequence
  Description of Artificial Sequence: Synthetic oligonucleotide
  Target: ATXN2; (-) strand; PAM type: YTN; PAM sequence: TTT
tagtagagatggggttttgc

SEQ ID NO: 81629 - DNA, 20 bp, Artificial Sequence
  Description of Artificial Sequence: Synthetic oligonucleotide
  Target: ATXN2; (-) strand; PAM type: YTN; PAM sequence: TTT
ttagtagagatggggttttg

SEQ ID NO: 81630 - DNA, 20 bp, Artificial Sequence
  Description of Artificial Sequence: Synthetic oligonucleotide
  Target: ATXN2; (-) strand; PAM type: YTN; PAM sequence: TTG
tatttttagtagagatgggg

SEQ ID NO: 81631 - DNA, 20 bp, Artificial Sequence
  Description of Artificial Sequence: Synthetic oligonucleotide
  Target: ATXN2; (-) strand; PAM type: YTN; PAM sequence: TTT
gtatttttagtagagatggg

SEQ ID NO: 81632 - DNA, 20 bp, Artificial Sequence
  Description of Artificial Sequence: Synthetic oligonucleotide
  Target: ATXN2; (-) strand; PAM type: YTN; PAM sequence: TTT
tgtatttttagtagagatgg

SEQ ID NO: 81633 - DNA, 20 bp, Artificial Sequence
  Description of Artificial Sequence: Synthetic oligonucleotide
  Target: ATXN2; (-) strand; PAM type: YTN; PAM sequence: TTT
ttgtatttttagtagagatg

SEQ ID NO: 81634 - DNA, 20 bp, Artificial Sequence
  Description of Artificial Sequence: Synthetic oligonucleotide
  Target: ATXN2; (-) strand; PAM type: YTN; PAM sequence: TTA
cgggtgcccgccaccacacc

SEQ ID NO: 81635 - DNA, 20 bp, Artificial Sequence
  Description of Artificial Sequence: Synthetic oligonucleotide
  Target: ATXN2; (-) strand; PAM type: YTN; PAM sequence: CTG
ggattacgggtgcccgccac

SEQ ID NO: 81636 - DNA, 20 bp, Artificial Sequence
  Description of Artificial Sequence: Synthetic oligonucleotide
  Target: ATXN2; (-) strand; PAM type: YTN; PAM sequence: CTG
agtagctgggattacgggtg

SEQ ID NO: 81637 - DNA, 20 bp, Artificial Sequence
  Description of Artificial Sequence: Synthetic oligonucleotide
  Target: ATXN2; (-) strand; PAM type: YTN; PAM sequence: CTC
ctgagtagctgggattacgg

SEQ ID NO: 81638 - DNA, 20 bp, Artificial Sequence
  Description of Artificial Sequence: Synthetic oligonucleotide
  Target: ATXN2; (-) strand; PAM type: YTN; PAM sequence: CTG
actcctgagtagctgggatt

SEQ ID NO: 81639 - DNA, 20 bp, Artificial Sequence
  Description of Artificial Sequence: Synthetic oligonucleotide
  Target: ATXN2; (-) strand; PAM type: YTN; PAM sequence: CTC
tgactcctgagtagctggga

SEQ ID NO: 81640 - DNA, 20 bp, Artificial Sequence
  Description of Artificial Sequence: Synthetic oligonucleotide
  Target: ATXN2; (-) strand; PAM type: YTN; PAM sequence: CTG
cctctgactcctgagtagct

SEQ ID NO: 81641 - DNA, 20 bp, Artificial Sequence
  Description of Artificial Sequence: Synthetic oligonucleotide
  Target: ATXN2; (-) strand; PAM type: YTN; PAM sequence: TTC
ctgcctctgactcctgagta

SEQ ID NO: 81642 - DNA, 20 bp, Artificial Sequence
  Description of Artificial Sequence: Synthetic oligonucleotide
  Target: ATXN2; (-) strand; PAM type: YTN; PAM sequence: TTT
cctgcctctgactcctgagt

SEQ ID NO: 81643 - DNA, 20 bp, Artificial Sequence
  Description of Artificial Sequence: Synthetic oligonucleotide
  Target: ATXN2; (-) strand; PAM type: YTN; PAM sequence: TTT
tcctgcctctgactcctgag

SEQ ID NO: 81644 - DNA, 20 bp, Artificial Sequence
  Description of Artificial Sequence: Synthetic oligonucleotide
  Target: ATXN2; (-) strand; PAM type: YTN; PAM sequence: CTA
gcgattttcctgcctctgac

SEQ ID NO: 81645 - DNA, 20 bp, Artificial Sequence
  Description of Artificial Sequence: Synthetic oligonucleotide
  Target: ATXN2; (-) strand; PAM type: YTN; PAM sequence: TTC
tagcgattttcctgcctctg

SEQ ID NO: 81646 - DNA, 20 bp, Artificial Sequence
  Description of Artificial Sequence: Synthetic oligonucleotide
  Target: ATXN2; (-) strand; PAM type: YTN; PAM sequence: CTT
ctagcgattttcctgcctct

SEQ ID NO: 81647 - DNA, 20 bp, Artificial Sequence
  Description of Artificial Sequence: Synthetic oligonucleotide
  Target: ATXN2; (-) strand; PAM type: YTN; PAM sequence: CTC
ccagcttctagcgattttcc

SEQ ID NO: 81648 - DNA, 20 bp, Artificial Sequence
  Description of Artificial Sequence: Synthetic oligonucleotide
  Target: ATXN2; (-) strand; PAM type: YTN; PAM sequence: CTG
cctcccagcttctagcgatt

SEQ ID NO: 81649 - DNA, 20 bp, Artificial Sequence
  Description of Artificial Sequence: Synthetic oligonucleotide
  Target: ATXN2; (-) strand; PAM type: YTN; PAM sequence: CTC
tgcctcccagcttctagcga

SEQ ID NO: 81650 - DNA, 20 bp, Artificial Sequence
  Description of Artificial Sequence: Synthetic oligonucleotide
  Target: ATXN2; (-) strand; PAM type: YTN; PAM sequence: CTG
caacctctgcctcccagctt

SEQ ID NO: 81651 - DNA, 20 bp, Artificial Sequence
  Description of Artificial Sequence: Synthetic oligonucleotide
  Target: ATXN2; (-) strand; PAM type: YTN; PAM sequence: TTG
gcccactgcaacctctgcct

SEQ ID NO: 81652 - DNA, 20 bp, Artificial Sequence
  Description of Artificial Sequence: Synthetic oligonucleotide
  Target: ATXN2; (-) strand; PAM type: YTN; PAM sequence: CTT
ggcccactgcaacctctgcc

SEQ ID NO: 81653 - DNA, 20 bp, Artificial Sequence
  Description of Artificial Sequence: Synthetic oligonucleotide
  Target: ATXN2; (-) strand; PAM type: YTN; PAM sequence: CTG
gagtgcaatggtacaatctt

SEQ ID NO: 81654 - DNA, 20 bp, Artificial Sequence
  Description of Artificial Sequence: Synthetic oligonucleotide
  Target: ATXN2; (-) strand; PAM type: YTN; PAM sequence: TTG
cccaggctggagtgcaatgg

SEQ ID NO: 81655 - DNA, 20 bp, Artificial Sequence
  Description of Artificial Sequence: Synthetic oligonucleotide
  Target: ATXN2; (-) strand; PAM type: YTN; PAM sequence: CTG
ttgcccaggctggagtgcaa

SEQ ID NO: 81656 - DNA, 20 bp, Artificial Sequence
  Description of Artificial Sequence: Synthetic oligonucleotide
  Target: ATXN2; (-) strand; PAM type: YTN; PAM sequence: TTC
tgttgcccaggctggagtgc

SEQ ID NO: 81657 - DNA, 20 bp, Artificial Sequence
  Description of Artificial Sequence: Synthetic oligonucleotide
  Target: ATXN2; (-) strand; PAM type: YTN; PAM sequence: TTG
ttctgttgcccaggctggag

SEQ ID NO: 81658 - DNA, 20 bp, Artificial Sequence
  Description of Artificial Sequence: Synthetic oligonucleotide
  Target: ATXN2; (-) strand; PAM type: YTN; PAM sequence: CTT
gttctgttgcccaggctgga

SEQ ID NO: 81659 - DNA, 20 bp, Artificial Sequence
  Description of Artificial Sequence: Synthetic oligonucleotide
  Target: ATXN2; (-) strand; PAM type: YTN; PAM sequence: TTG
acatagaatcttgttctgtt

SEQ ID NO: 81660 - DNA, 20 bp, Artificial Sequence
  Description of Artificial Sequence: Synthetic oligonucleotide
  Target: ATXN2; (-) strand; PAM type: YTN; PAM sequence: TTT
gacatagaatcttgttctgt

SEQ ID NO: 81661 - DNA, 20 bp, Artificial Sequence
  Description of Artificial Sequence: Synthetic oligonucleotide
  Target: ATXN2; (-) strand; PAM type: YTN; PAM sequence: TTT
tgacatagaatcttgttctg

SEQ ID NO: 81662 - DNA, 20 bp, Artificial Sequence
  Description of Artificial Sequence: Synthetic oligonucleotide
  Target: ATXN2; (-) strand; PAM type: YTN; PAM sequence: TTT
ttgacatagaatcttgttct

SEQ ID NO: 81663 - DNA, 20 bp, Artificial Sequence
  Description of Artificial Sequence: Synthetic oligonucleotide
  Target: ATXN2; (-) strand; PAM type: YTN; PAM sequence: TTT
tttgacatagaatcttgttc

SEQ ID NO: 81664 - DNA, 20 bp, Artificial Sequence
  Description of Artificial Sequence: Synthetic oligonucleotide
  Target: ATXN2; (-) strand; PAM type: YTN; PAM sequence: TTT
ttttgacatagaatcttgtt

SEQ ID NO: 81665 - DNA, 20 bp, Artificial Sequence
  Description of Artificial Sequence: Synthetic oligonucleotide
  Target: ATXN2; (-) strand; PAM type: YTN; PAM sequence: TTT
tttttgacatagaatcttgt

SEQ ID NO: 81666 - DNA, 20 bp, Artificial Sequence
  Description of Artificial Sequence: Synthetic oligonucleotide
  Target: ATXN2; (-) strand; PAM type: YTN; PAM sequence: TTT
ttttttgacatagaatcttg

SEQ ID NO: 81667 - DNA, 20 bp, Artificial Sequence
  Description of Artificial Sequence: Synthetic oligonucleotide
  Target: ATXN2; (-) strand; PAM type: YTN; PAM sequence: TTT
tttttttgacatagaatctt

SEQ ID NO: 81668 - DNA, 20 bp, Artificial Sequence
  Description of Artificial Sequence: Synthetic oligonucleotide
  Target: ATXN2; (-) strand; PAM type: YTN; PAM sequence: TTT
ttttttttgacatagaatct

SEQ ID NO: 81669 - DNA, 20 bp, Artificial Sequence
  Description of Artificial Sequence: Synthetic oligonucleotide
  Target: ATXN2; (-) strand; PAM type: YTN; PAM sequence: CTT
tttttttttgacatagaatc

SEQ ID NO: 81670 - DNA, 20 bp, Artificial Sequence
  Description of Artificial Sequence: Synthetic oligonucleotide
  Target: ATXN2; (-) strand; PAM type: YTN; PAM sequence: CTG
gctttttttttttgacatag

SEQ ID NO: 81671 - DNA, 20 bp, Artificial Sequence
  Description of Artificial Sequence: Synthetic oligonucleotide
  Target: ATXN2; (-) strand; PAM type: YTN; PAM sequence: CTC
ccaaagtgccgggaccacag

SEQ ID NO: 81672 - DNA, 20 bp, Artificial Sequence
  Description of Artificial Sequence: Synthetic oligonucleotide
  Target: ATXN2; (-) strand; PAM type: YTN; PAM sequence: TTC
agcctcccaaagtgccggga

SEQ ID NO: 81673 - DNA, 20 bp, Artificial Sequence
  Description of Artificial Sequence: Synthetic oligonucleotide
  Target: ATXN2; (-) strand; PAM type: YTN; PAM sequence: CTT
cagcctcccaaagtgccggg

SEQ ID NO: 81674 - DNA, 20 bp, Artificial Sequence
  Description of Artificial Sequence: Synthetic oligonucleotide
  Target: ATXN2; (-) strand; PAM type: YTN; PAM sequence: CTG
cttcagcctcccaaagtgcc

SEQ ID NO: 81675 - DNA, 20 bp, Artificial Sequence
  Description of Artificial Sequence: Synthetic oligonucleotide
  Target: ATXN2; (-) strand; PAM type: YTN; PAM sequence: CTC
aggtgatccgcctgcttcag

SEQ ID NO: 81676 - DNA, 20 bp, Artificial Sequence
  Description of Artificial Sequence: Synthetic oligonucleotide
  Target: ATXN2; (-) strand; PAM type: YTN; PAM sequence: CTG
acctcaggtgatccgcctgc

SEQ ID NO: 81677 - DNA, 20 bp, Artificial Sequence
  Description of Artificial Sequence: Synthetic oligonucleotide
  Target: ATXN2; (-) strand; PAM type: YTN; PAM sequence: CTC
ctgacctcaggtgatccgcc

SEQ ID NO: 81678 - DNA, 20 bp, Artificial Sequence
  Description of Artificial Sequence: Synthetic oligonucleotide
  Target: ATXN2; (-) strand; PAM type: YTN; PAM sequence: CTC
gaactcctgacctcaggtga

SEQ ID NO: 81679 - DNA, 20 bp, Artificial Sequence
  Description of Artificial Sequence: Synthetic oligonucleotide
  Target: ATXN2; (-) strand; PAM type: YTN; PAM sequence: CTG
gtctcgaactcctgacctca

SEQ ID NO: 81680 - DNA, 20 bp, Artificial Sequence
  Description of Artificial Sequence: Synthetic oligonucleotide
  Target: ATXN2; (-) strand; PAM type: YTN; PAM sequence: TTG
gccaggctggtctcgaactc

SEQ ID NO: 81681 - DNA, 20 bp, Artificial Sequence
  Description of Artificial Sequence: Synthetic oligonucleotide
  Target: ATXN2; (-) strand; PAM type: YTN; PAM sequence: TTT
ggccaggctggtctcgaact

SEQ ID NO: 81682 - DNA, 20 bp, Artificial Sequence
  Description of Artificial Sequence: Synthetic oligonucleotide
  Target: ATXN2; (-) strand; PAM type: YTN; PAM sequence: TTT
tggccaggctggtctcgaac

SEQ ID NO: 81683 - DNA, 20 bp, Artificial Sequence
  Description of Artificial Sequence: Synthetic oligonucleotide
  Target: ATXN2; (-) strand; PAM type: YTN; PAM sequence: TTC
cccattttggccaggctggt

SEQ ID NO: 81684 - DNA, 20 bp, Artificial Sequence
  Description of Artificial Sequence: Synthetic oligonucleotide
  Target: ATXN2; (-) strand; PAM type: YTN; PAM sequence: TTT
ccccattttggccaggctgg

SEQ ID NO: 81685 - DNA, 20 bp, Artificial Sequence
  Description of Artificial Sequence: Synthetic oligonucleotide
  Target: ATXN2; (-) strand; PAM type: YTN; PAM sequence: TTA
gtagagacggggtttcccca

SEQ ID NO: 81686 - DNA, 20 bp, Artificial Sequence
  Description of Artificial Sequence: Synthetic oligonucleotide
  Target: ATXN2; (-) strand; PAM type: YTN; PAM sequence: TTT
agtagagacggggtttcccc

SEQ ID NO: 81687 - DNA, 20 bp, Artificial Sequence
  Description of Artificial Sequence: Synthetic oligonucleotide
  Target: ATXN2; (-) strand; PAM type: YTN; PAM sequence: TTT
tagtagagacggggtttccc

SEQ ID NO: 81688 - DNA, 20 bp, Artificial Sequence
  Description of Artificial Sequence: Synthetic oligonucleotide
  Target: ATXN2; (-) strand; PAM type: YTN; PAM sequence: TTT
ttagtagagacggggtttcc

SEQ ID NO: 81689 - DNA, 20 bp, Artificial Sequence
  Description of Artificial Sequence: Synthetic oligonucleotide
  Target: ATXN2; (-) strand; PAM type: YTN; PAM sequence: TTG
tatttttagtagagacgggg

SEQ ID NO: 81690 - DNA, 20 bp, Artificial Sequence
  Description of Artificial Sequence: Synthetic oligonucleotide
  Target: ATXN2; (-) strand; PAM type: YTN; PAM sequence: TTT
gtatttttagtagagacggg

SEQ ID NO: 81691 - DNA, 20 bp, Artificial Sequence
  Description of Artificial Sequence: Synthetic oligonucleotide
  Target: ATXN2; (-) strand; PAM type: YTN; PAM sequence: TTT
tgtatttttagtagagacgg

SEQ ID NO: 81692 - DNA, 20 bp, Artificial Sequence
  Description of Artificial Sequence: Synthetic oligonucleotide
  Target: ATXN2; (-) strand; PAM type: YTN; PAM sequence: TTT
ttgtatttttagtagagacg

SEQ ID NO: 81693 - DNA, 20 bp, Artificial Sequence
  Description of Artificial Sequence: Synthetic oligonucleotide
  Target: ATXN2; (-) strand; PAM type: YTN; PAM sequence: TTA
atttttgtatttttagtaga

SEQ ID NO: 81694 - DNA, 20 bp, Artificial Sequence
  Description of Artificial Sequence: Synthetic oligonucleotide
  Target: ATXN2; (-) strand; PAM type: YTN; PAM sequence: TTG
gtcacacaccgggttaattt

SEQ ID NO: 81695 - DNA, 20 bp, Artificial Sequence
  Description of Artificial Sequence: Synthetic oligonucleotide
  Target: ATXN2; (-) strand; PAM type: YTN; PAM sequence: CTG
ggagtacagatattggtcac

SEQ ID NO: 81696 - DNA, 20 bp, Artificial Sequence
  Description of Artificial Sequence: Synthetic oligonucleotide
  Target: ATXN2; (-) strand; PAM type: YTN; PAM sequence: CTG
agtagctgggagtacagata

SEQ ID NO: 81697 - DNA, 20 bp, Artificial Sequence
  Description of Artificial Sequence: Synthetic oligonucleotide
  Target: ATXN2; (-) strand; PAM type: YTN; PAM sequence: CTC
ctgagtagctgggagtacag

SEQ ID NO: 81698 - DNA, 20 bp, Artificial Sequence
  Description of Artificial Sequence: Synthetic oligonucleotide
  Target: ATXN2; (-) strand; PAM type: YTN; PAM sequence: CTG
actcctgagtagctgggagt

SEQ ID NO: 81699 - DNA, 20 bp, Artificial Sequence
  Description of Artificial Sequence: Synthetic oligonucleotide
  Target: ATXN2; (-) strand; PAM type: YTN; PAM sequence: CTG
cctgactcctgagtagctgg

SEQ ID NO: 81700 - DNA, 20 bp, Artificial Sequence
  Description of Artificial Sequence: Synthetic oligonucleotide
  Target: ATXN2; (-) strand; PAM type: YTN; PAM sequence: CTC
ctgcctgactcctgagtagc

SEQ ID NO: 81701 - DNA, 20 bp, Artificial Sequence
  Description of Artificial Sequence: Synthetic oligonucleotide
  Target: ATXN2; (-) strand; PAM type: YTN; PAM sequence: TTC
tcctgcctgactcctgagta

SEQ ID NO: 81702 - DNA, 20 bp, Artificial Sequence
  Description of Artificial Sequence: Synthetic oligonucleotide
  Target: ATXN2; (-) strand; PAM type: YTN; PAM sequence: TTC
aagcagttctcctgcctgac

SEQ ID NO: 81703 - DNA, 20 bp, Artificial Sequence
  Description of Artificial Sequence: Synthetic oligonucleotide
  Target: ATXN2; (-) strand; PAM type: YTN; PAM sequence: CTC
ccaggttcaagcagttctcc

SEQ ID NO: 81704 - DNA, 20 bp, Artificial Sequence
  Description of Artificial Sequence: Synthetic oligonucleotide
  Target: ATXN2; (-) strand; PAM type: YTN; PAM sequence: TTC
cgcctcccaggttcaagcag

SEQ ID NO: 81705 - DNA, 20 bp, Artificial Sequence
  Description of Artificial Sequence: Synthetic oligonucleotide
  Target: ATXN2; (-) strand; PAM type: YTN; PAM sequence: CTG
tagttccgcctcccaggttc

SEQ ID NO: 81706 - DNA, 20 bp, Artificial Sequence
  Description of Artificial Sequence: Synthetic oligonucleotide
  Target: ATXN2; (-) strand; PAM type: YTN; PAM sequence: CTC
actgtagttccgcctcccag

SEQ ID NO: 81707 - DNA, 20 bp, Artificial Sequence
  Description of Artificial Sequence: Synthetic oligonucleotide
  Target: ATXN2; (-) strand; PAM type: YTN; PAM sequence: CTG
ctcactgtagttccgcctcc

SEQ ID NO: 81708 - DNA, 20 bp, Artificial Sequence
  Description of Artificial Sequence: Synthetic oligonucleotide
  Target: ATXN2; (-) strand; PAM type: YTN; PAM sequence: CTC
tgctcactgtagttccgcct

SEQ ID NO: 81709 - DNA, 20 bp, Artificial Sequence
  Description of Artificial Sequence: Synthetic oligonucleotide
  Target: ATXN2; (-) strand; PAM type: YTN; PAM sequence: CTG
gagtgcaatggcgccatctc

SEQ ID NO: 81710 - DNA, 20 bp, Artificial Sequence
  Description of Artificial Sequence: Synthetic oligonucleotide
  Target: ATXN2; (-) strand; PAM type: YTN; PAM sequence: TTG
tcacccaggctggagtgcaa

SEQ ID NO: 81711 - DNA, 20 bp, Artificial Sequence
  Description of Artificial Sequence: Synthetic oligonucleotide
  Target: ATXN2; (-) strand; PAM type: YTN; PAM sequence: CTT
gtcacccaggctggagtgca

SEQ ID NO: 81712 - DNA, 20 bp, Artificial Sequence
  Description of Artificial Sequence: Synthetic oligonucleotide
  Target: ATXN2; (-) strand; PAM type: YTN; PAM sequence: CTC
ttgtcacccaggctggagtg

SEQ ID NO: 81713 - DNA, 20 bp, Artificial Sequence
  Description of Artificial Sequence: Synthetic oligonucleotide
  Target: ATXN2; (-) strand; PAM type: YTN; PAM sequence: TTG
ctcttgtcacccaggctgga

SEQ ID NO: 81714 - DNA, 20 bp, Artificial Sequence
  Description of Artificial Sequence: Synthetic oligonucleotide
  Target: ATXN2; (-) strand; PAM type: YTN; PAM sequence: TTT
gctcttgtcacccaggctgg

SEQ ID NO: 81715 - DNA, 20 bp, Artificial Sequence
  Description of Artificial Sequence: Synthetic oligonucleotide
  Target: ATXN2; (-) strand; PAM type: YTN; PAM sequence: TTT
tgctcttgtcacccaggctg

SEQ ID NO: 81716 - DNA, 20 bp, Artificial Sequence
  Description of Artificial Sequence: Synthetic oligonucleotide
  Target: ATXN2; (-) strand; PAM type: YTN; PAM sequence: TTG
agatggagttttgctcttgt

SEQ ID NO: 81717 - DNA, 20 bp, Artificial Sequence
  Description of Artificial Sequence: Synthetic oligonucleotide
  Target: ATXN2; (-) strand; PAM type: YTN; PAM sequence: TTT
gagatggagttttgctcttg

SEQ ID NO: 81718 - DNA, 20 bp, Artificial Sequence
  Description of Artificial Sequence: Synthetic oligonucleotide
  Target: ATXN2; (-) strand; PAM type: YTN; PAM sequence: TTT
tgagatggagttttgctctt

SEQ ID NO: 81719 - DNA, 20 bp, Artificial Sequence
  Description of Artificial Sequence: Synthetic oligonucleotide
  Target: ATXN2; (-) strand; PAM type: YTN; PAM sequence: TTT
ttgagatggagttttgctct

SEQ ID NO: 81720 - DNA, 20 bp, Artificial Sequence
  Description of Artificial Sequence: Synthetic oligonucleotide
  Target: ATXN2; (-) strand; PAM type: YTN; PAM sequence: TTT
tttgagatggagttttgctc

SEQ ID NO: 81721 - DNA, 20 bp, Artificial Sequence
  Description of Artificial Sequence: Synthetic oligonucleotide
  Target: ATXN2; (-) strand; PAM type: YTN; PAM sequence: TTT
ttttgagatggagttttgct

SEQ ID NO: 81722 - DNA, 20 bp, Artificial Sequence
  Description of Artificial Sequence: Synthetic oligonucleotide
  Target: ATXN2; (-) strand; PAM type: YTN; PAM sequence: TTT
tttttgagatggagttttgc

SEQ ID NO: 81723 - DNA, 20 bp, Artificial Sequence
  Description of Artificial Sequence: Synthetic oligonucleotide
  Target: ATXN2; (-) strand; PAM type: YTN; PAM sequence: TTT
ttttttgagatggagttttg

SEQ ID NO: 81724 - DNA, 20 bp, Artificial Sequence
  Description of Artificial Sequence: Synthetic oligonucleotide
  Target: ATXN2; (-) strand; PAM type: YTN; PAM sequence: TTT
tttttttgagatggagtttt

SEQ ID NO: 81725 - DNA, 20 bp, Artificial Sequence
  Description of Artificial Sequence: Synthetic oligonucleotide
  Target: ATXN2; (-) strand; PAM type: YTN; PAM sequence: TTT
ttttttttgagatggagttt

SEQ ID NO: 81726 - DNA, 20 bp, Artificial Sequence
  Description of Artificial Sequence: Synthetic oligonucleotide
  Target: ATXN2; (-) strand; PAM type: YTN; PAM sequence: TTT
tttttttttgagatggagtt

SEQ ID NO: 81727 - DNA, 20 bp, Artificial Sequence
  Description of Artificial Sequence: Synthetic oligonucleotide
  Target: ATXN2; (-) strand; PAM type: YTN; PAM sequence: TTT
ttttttttttgagatggagt

SEQ ID NO: 81728 - DNA, 20 bp, Artificial Sequence
  Description of Artificial Sequence: Synthetic oligonucleotide
  Target: ATXN2; (-) strand; PAM type: YTN; PAM sequence: TTT
tttttttttttgagatggag

SEQ ID NO: 81729 - DNA, 20 bp, Artificial Sequence
  Description of Artificial Sequence: Synthetic oligonucleotide
  Target: ATXN2; (-) strand; PAM type: YTN; PAM sequence: TTT
ttttttttttttgagatgga

SEQ ID NO: 81730 - DNA, 20 bp, Artificial Sequence
  Description of Artificial Sequence: Synthetic oligonucleotide
  Target: ATXN2; (-) strand; PAM type: YTN; PAM sequence: TTT
tttttttttttttgagatgg

SEQ ID NO: 81731 - DNA, 20 bp, Artificial Sequence
  Description of Artificial Sequence: Synthetic oligonucleotide
  Target: ATXN2; (-) strand; PAM type: YTN; PAM sequence: TTT
ttttttttttttttgagatg

SEQ ID NO: 81732 - DNA, 20 bp, Artificial Sequence
  Description of Artificial Sequence: Synthetic oligonucleotide
  Target: ATXN2; (-) strand; PAM type: YTN; PAM sequence: TTT
tttttttttttttttgagat

SEQ ID NO: 81733 - DNA, 20 bp, Artificial Sequence
  Description of Artificial Sequence: Synthetic oligonucleotide
  Target: ATXN2; (-) strand; PAM type: YTN; PAM sequence: TTT
ttttttttttttttttgaga

SEQ ID NO: 81734 - DNA, 20 bp, Artificial Sequence
  Description of Artificial Sequence: Synthetic oligonucleotide
  Target: ATXN2; (-) strand; PAM type: YTN; PAM sequence: TTT
tttttttttttttttttgag

SEQ ID NO: 81735 - DNA, 20 bp, Artificial Sequence
  Description of Artificial Sequence: Synthetic oligonucleotide
  Target: ATXN2; (-) strand; PAM type: YTN; PAM sequence: TTT
ttttttttttttttttttga

SEQ ID NO: 81736 - DNA, 20 bp, Artificial Sequence
  Description of Artificial Sequence: Synthetic oligonucleotide
  Target: ATXN2; (-) strand; PAM type: YTN; PAM sequence: TTT
tttttttttttttttttttg

SEQ ID NO: 81737 - DNA, 20 bp, Artificial Sequence
  Description of Artificial Sequence: Synthetic oligonucleotide
  Target: ATXN2; (-) strand; PAM type: YTN; PAM sequence: TTT
tttttttttttttttttttt

SEQ ID NO: 81738 - DNA, 20 bp, Artificial Sequence
  Description of Artificial Sequence: Synthetic oligonucleotide
  Target: ATXN2; (-) strand; PAM type: YTN; PAM sequence: TTT
tttttttttttttttttttt

SEQ ID NO: 81739 - DNA, 20 bp, Artificial Sequence
  Description of Artificial Sequence: Synthetic oligonucleotide
  Target: ATXN2; (-) strand; PAM type: YTN; PAM sequence: TTT
tttttttttttttttttttt

SEQ ID NO: 81740 - DNA, 20 bp, Artificial Sequence
  Description of Artificial Sequence: Synthetic oligonucleotide
  Target: ATXN2; (-) strand; PAM type: YTN; PAM sequence: TTT
tttttttttttttttttttt

SEQ ID NO: 81741 - DNA, 20 bp, Artificial Sequence
  Description of Artificial Sequence: Synthetic oligonucleotide
  Target: ATXN2; (-) strand; PAM type: YTN; PAM sequence: TTT
tttttttttttttttttttt

SEQ ID NO: 81742 - DNA, 20 bp, Artificial Sequence
  Description of Artificial Sequence: Synthetic oligonucleotide
  Target: ATXN2; (-) strand; PAM type: YTN; PAM sequence: TTT
tttttttttttttttttttt

SEQ ID NO: 81743 - DNA, 20 bp, Artificial Sequence
  Description of Artificial Sequence: Synthetic oligonucleotide
  Target: ATXN2; (-) strand; PAM type: YTN; PAM sequence: TTT
tttttttttttttttttttt

SEQ ID NO: 81744 - DNA, 20 bp, Artificial Sequence
  Description of Artificial Sequence: Synthetic oligonucleotide
  Target: ATXN2; (-) strand; PAM type: YTN; PAM sequence: CTG
ggaggttttttttttttttt

SEQ ID NO: 81745 - DNA, 20 bp, Artificial Sequence
  Description of Artificial Sequence: Synthetic oligonucleotide
  Target: ATXN2; (-) strand; PAM type: YTN; PAM sequence: TTC
tgggaggttttttttttttt

SEQ ID NO: 81746 - DNA, 20 bp, Artificial Sequence
  Description of Artificial Sequence: Synthetic oligonucleotide
  Target: ATXN2; (-) strand; PAM type: YTN; PAM sequence: CTC
aacaagtataccattctggg

SEQ ID NO: 81747 - DNA, 20 bp, Artificial Sequence
  Description of Artificial Sequence: Synthetic oligonucleotide
  Target: ATXN2; (-) strand; PAM type: YTN; PAM sequence: CTA
aaaaacagacacaagagctc

SEQ ID NO: 81748 - DNA, 20 bp, Artificial Sequence
  Description of Artificial Sequence: Synthetic oligonucleotide
  Target: ATXN2; (-) strand; PAM type: YTN; PAM sequence: CTA
ctaaaaaacagacacaagag

SEQ ID NO: 81749 - DNA, 20 bp, Artificial Sequence
  Description of Artificial Sequence: Synthetic oligonucleotide
  Target: ATXN2; (-) strand; PAM type: YTN; PAM sequence: CTA
aaatgggaactactaaaaaa

SEQ ID NO: 81750 - DNA, 20 bp, Artificial Sequence
  Description of Artificial Sequence: Synthetic oligonucleotide
  Target: ATXN2; (-) strand; PAM type: YTN; PAM sequence: CTA
ctaaaatgggaactactaaa

SEQ ID NO: 81751 - DNA, 20 bp, Artificial Sequence
  Description of Artificial Sequence: Synthetic oligonucleotide
  Target: ATXN2; (-) strand; PAM type: YTN; PAM sequence: CTG
ggaactactaaaatgggaac

SEQ ID NO: 81752 - DNA, 20 bp, Artificial Sequence
  Description of Artificial Sequence: Synthetic oligonucleotide
  Target: ATXN2; (-) strand; PAM type: YTN; PAM sequence: CTC
aaaaaaacaaagcaaagagc

SEQ ID NO: 81753 - DNA, 20 bp, Artificial Sequence
  Description of Artificial Sequence: Synthetic oligonucleotide
  Target: ATXN2; (-) strand; PAM type: YTN; PAM sequence: TTA
tctcaaaaaaacaaagcaaa

SEQ ID NO: 81754 - DNA, 20 bp, Artificial Sequence
  Description of Artificial Sequence: Synthetic oligonucleotide
  Target: ATXN2; (-) strand; PAM type: YTN; PAM sequence: CTT
atctcaaaaaaacaaagcaa

SEQ ID NO: 81755 - DNA, 20 bp, Artificial Sequence
  Description of Artificial Sequence: Synthetic oligonucleotide
  Target: ATXN2; (-) strand; PAM type: YTN; PAM sequence: TTA
aaatgagaccttatctcaaa

SEQ ID NO: 81756 - DNA, 20 bp, Artificial Sequence
  Description of Artificial Sequence: Synthetic oligonucleotide
  Target: ATXN2; (-) strand; PAM type: YTN; PAM sequence: CTG
ggcgttaaaatgagacctta

SEQ ID NO: 81757 - DNA, 20 bp, Artificial Sequence
  Description of Artificial Sequence: Synthetic oligonucleotide
  Target: ATXN2; (-) strand; PAM type: YTN; PAM sequence: CTC
cagcctgggcgttaaaatga

SEQ ID NO: 81758 - DNA, 20 bp, Artificial Sequence
  Description of Artificial Sequence: Synthetic oligonucleotide
  Target: ATXN2; (-) strand; PAM type: YTN; PAM sequence: CTG
cactccagcctgggcgttaa

SEQ ID NO: 81759 - DNA, 20 bp, Artificial Sequence
  Description of Artificial Sequence: Synthetic oligonucleotide
  Target: ATXN2; (-) strand; PAM type: YTN; PAM sequence: TTG
caccactgcactccagcctg

SEQ ID NO: 81760 - DNA, 20 bp, Artificial Sequence
  Description of Artificial Sequence: Synthetic oligonucleotide
  Target: ATXN2; (-) strand; PAM type: YTN; PAM sequence: CTG
gatgtcgaggtgagccatga

SEQ ID NO: 81761 - DNA, 20 bp, Artificial Sequence
  Description of Artificial Sequence: Synthetic oligonucleotide
  Target: ATXN2; (-) strand; PAM type: YTN; PAM sequence: TTA
agtctggatgtcgaggtgag

SEQ ID NO: 81762 - DNA, 20 bp, Artificial Sequence
  Description of Artificial Sequence: Synthetic oligonucleotide
  Target: ATXN2; (-) strand; PAM type: YTN; PAM sequence: CTT
aagtctggatgtcgaggtga

SEQ ID NO: 81763 - DNA, 20 bp, Artificial Sequence
  Description of Artificial Sequence: Synthetic oligonucleotide
  Target: ATXN2; (-) strand; PAM type: YTN; PAM sequence: TTC
acttaagtctggatgtcgag

SEQ ID NO: 81764 - DNA, 20 bp, Artificial Sequence
  Description of Artificial Sequence: Synthetic oligonucleotide
  Target: ATXN2; (-) strand; PAM type: YTN; PAM sequence: CTG
aggcaggtggttcacttaag

SEQ ID NO: 81765 - DNA, 20 bp, Artificial Sequence
  Description of Artificial Sequence: Synthetic oligonucleotide
  Target: ATXN2; (-) strand; PAM type: YTN; PAM sequence: TTG
ggaggctgaggcaggtggtt

SEQ ID NO: 81766 - DNA, 20 bp, Artificial Sequence
  Description of Artificial Sequence: Synthetic oligonucleotide
  Target: ATXN2; (-) strand; PAM type: YTN; PAM sequence: CTT
gggaggctgaggcaggtggt

SEQ ID NO: 81767 - DNA, 20 bp, Artificial Sequence
  Description of Artificial Sequence: Synthetic oligonucleotide
  Target: ATXN2; (-) strand; PAM type: YTN; PAM sequence: CTA
cttgggaggctgaggcaggt

SEQ ID NO: 81768 - DNA, 20 bp, Artificial Sequence
  Description of Artificial Sequence: Synthetic oligonucleotide
  Target: ATXN2; (-) strand; PAM type: YTN; PAM sequence: CTC
agctacttgggaggctgagg

SEQ ID NO: 81769 - DNA, 20 bp, Artificial Sequence
  Description of Artificial Sequence: Synthetic oligonucleotide
  Target: ATXN2; (-) strand; PAM type: YTN; PAM sequence: CTG
tagtctcagctacttgggag

SEQ ID NO: 81770 - DNA, 20 bp, Artificial Sequence
  Description of Artificial Sequence: Synthetic oligonucleotide
  Target: ATXN2; (-) strand; PAM type: YTN; PAM sequence: TTC
tgtagtctcagctacttggg

SEQ ID NO: 81771 - DNA, 20 bp, Artificial Sequence
  Description of Artificial Sequence: Synthetic oligonucleotide
  Target: ATXN2; (-) strand; PAM type: YTN; PAM sequence: CTT
ctgtagtctcagctacttgg

SEQ ID NO: 81772 - DNA, 20 bp, Artificial Sequence
  Description of Artificial Sequence: Synthetic oligonucleotide
  Target: ATXN2; (-) strand; PAM type: YTN; PAM sequence: TTA
gccagtcatggtcgtgcact

SEQ ID NO: 81773 - DNA, 20 bp, Artificial Sequence
  Description of Artificial Sequence: Synthetic oligonucleotide
  Target: ATXN2; (-) strand; PAM type: YTN; PAM sequence: TTT
agccagtcatggtcgtgcac

SEQ ID NO: 81774 - DNA, 20 bp, Artificial Sequence
  Description of Artificial Sequence: Synthetic oligonucleotide
  Target: ATXN2; (-) strand; PAM type: YTN; PAM sequence: TTA
atacaaaaaatttagccagt

SEQ ID NO: 81775 - DNA, 20 bp, Artificial Sequence
  Description of Artificial Sequence: Synthetic oligonucleotide
  Target: ATXN2; (-) strand; PAM type: YTN; PAM sequence: CTC
aacaaaaaatattaatacaa

SEQ ID NO: 81776 - DNA, 20 bp, Artificial Sequence
  Description of Artificial Sequence: Synthetic oligonucleotide
  Target: ATXN2; (-) strand; PAM type: YTN; PAM sequence: CTG
ggcaacacagggaaacccca

SEQ ID NO: 81777 - DNA, 20 bp, Artificial Sequence
  Description of Artificial Sequence: Synthetic oligonucleotide
  Target: ATXN2; (-) strand; PAM type: YTN; PAM sequence: TTC
aagtccagcctgggcaacac

SEQ ID NO: 81778 - DNA, 20 bp, Artificial Sequence
  Description of Artificial Sequence: Synthetic oligonucleotide
  Target: ATXN2; (-) strand; PAM type: YTN; PAM sequence: CTG
agcccaggagttcaagtcca

SEQ ID NO: 81779 - DNA, 20 bp, Artificial Sequence
  Description of Artificial Sequence: Synthetic oligonucleotide
  Target: ATXN2; (-) strand; PAM type: YTN; PAM sequence: TTA
cctgagcccaggagttcaag

SEQ ID NO: 81780 - DNA, 20 bp, Artificial Sequence
  Description of Artificial Sequence: Synthetic oligonucleotide
  Target: ATXN2; (-) strand; PAM type: YTN; PAM sequence: CTG
aagcaggcagattacctgag

SEQ ID NO: 81781 - DNA, 20 bp, Artificial Sequence
  Description of Artificial Sequence: Synthetic oligonucleotide
  Target: ATXN2; (-) strand; PAM type: YTN; PAM sequence: TTG
ggaggctgaagcaggcagat

SEQ ID NO: 81782 - DNA, 20 bp, Artificial Sequence
  Description of Artificial Sequence: Synthetic oligonucleotide
  Target: ATXN2; (-) strand; PAM type: YTN; PAM sequence: TTT
gggaggctgaagcaggcaga

SEQ ID NO: 81783 - DNA, 20 bp, Artificial Sequence
  Description of Artificial Sequence: Synthetic oligonucleotide
  Target: ATXN2; (-) strand; PAM type: YTN; PAM sequence: CTT
tgggaggctgaagcaggcag

SEQ ID NO: 81784 - DNA, 20 bp, Artificial Sequence
  Description of Artificial Sequence: Synthetic oligonucleotide
  Target: ATXN2; (-) strand; PAM type: YTN; PAM sequence: CTG
taatcccaacactttgggag

SEQ ID NO: 81785 - DNA, 20 bp, Artificial Sequence
  Description of Artificial Sequence: Synthetic oligonucleotide
  Target: ATXN2; (-) strand; PAM type: YTN; PAM sequence: CTC
acacctgtaatcccaacact

SEQ ID NO: 81786 - DNA, 20 bp, Artificial Sequence
  Description of Artificial Sequence: Synthetic oligonucleotide
  Target: ATXN2; (-) strand; PAM type: YTN; PAM sequence: CTG
ggcatggtggctcacacctg

SEQ ID NO: 81787 - DNA, 20 bp, Artificial Sequence
  Description of Artificial Sequence: Synthetic oligonucleotide
  Target: ATXN2; (-) strand; PAM type: YTN; PAM sequence: CTG
gtggctgggcatggtggctc

SEQ ID NO: 81788 - DNA, 20 bp, Artificial Sequence
  Description of Artificial Sequence: Synthetic oligonucleotide
  Target: ATXN2; (-) strand; PAM type: YTN; PAM sequence: TTG
gaagactggtggctgggcat

SEQ ID NO: 81789 - DNA, 20 bp, Artificial Sequence
  Description of Artificial Sequence: Synthetic oligonucleotide
  Target: ATXN2; (-) strand; PAM type: YTN; PAM sequence: TTT
ggaagactggtggctgggca

SEQ ID NO: 81790 - DNA, 20 bp, Artificial Sequence
  Description of Artificial Sequence: Synthetic oligonucleotide
  Target: ATXN2; (-) strand; PAM type: YTN; PAM sequence: CTC
aaaaaaaaaaaaaaagtttg

SEQ ID NO: 81791 - DNA, 20 bp, Artificial Sequence
  Description of Artificial Sequence: Synthetic oligonucleotide
  Target: ATXN2; (-) strand; PAM type: YTN; PAM sequence: CTG
tctcaaaaaaaaaaaaaaag

SEQ ID NO: 81792 - DNA, 20 bp, Artificial Sequence
  Description of Artificial Sequence: Synthetic oligonucleotide
  Target: ATXN2; (-) strand; PAM type: YTN; PAM sequence: CTC
tgtctcaaaaaaaaaaaaaa

SEQ ID NO: 81793 - DNA, 20 bp, Artificial Sequence
  Description of Artificial Sequence: Synthetic oligonucleotide
  Target: ATXN2; (-) strand; PAM type: YTN; PAM sequence: CTG
ggccacagagcagagtgaga

SEQ ID NO: 81794 - DNA, 20 bp, Artificial Sequence
  Description of Artificial Sequence: Synthetic oligonucleotide
  Target: ATXN2; (-) strand; PAM type: YTN; PAM sequence: CTG
tgccccagcctgggccacag

SEQ ID NO: 81795 - DNA, 20 bp, Artificial Sequence
  Description of Artificial Sequence: Synthetic oligonucleotide
  Target: ATXN2; (-) strand; PAM type: YTN; PAM sequence: TTG
tgccactgtgccccagcctg

SEQ ID NO: 81796 - DNA, 20 bp, Artificial Sequence
  Description of Artificial Sequence: Synthetic oligonucleotide
  Target: ATXN2; (-) strand; PAM type: YTN; PAM sequence: CTC
agattgtgccactgtgcccc

SEQ ID NO: 81797 - DNA, 20 bp, Artificial Sequence
  Description of Artificial Sequence: Synthetic oligonucleotide
  Target: ATXN2; (-) strand; PAM type: YTN; PAM sequence: TTG
cagtgagctcagattgtgcc

SEQ ID NO: 81798 - DNA, 20 bp, Artificial Sequence
  Description of Artificial Sequence: Synthetic oligonucleotide
  Target: ATXN2; (-) strand; PAM type: YTN; PAM sequence: TTG
aacccgggaggtgaaggttg

SEQ ID NO: 81799 - DNA, 20 bp, Artificial Sequence
  Description of Artificial Sequence: Synthetic oligonucleotide
  Target: ATXN2; (-) strand; PAM type: YTN; PAM sequence: CTT
gaacccgggaggtgaaggtt

SEQ ID NO: 81800 - DNA, 20 bp, Artificial Sequence
  Description of Artificial Sequence: Synthetic oligonucleotide
  Target: ATXN2; (-) strand; PAM type: YTN; PAM sequence: CTG
aggcaggagaatcgcttgaa

SEQ ID NO: 81801 - DNA, 20 bp, Artificial Sequence
  Description of Artificial Sequence: Synthetic oligonucleotide
  Target: ATXN2; (-) strand; PAM type: YTN; PAM sequence: TTG
ggaggctgaggcaggagaat

SEQ ID NO: 81802 - DNA, 20 bp, Artificial Sequence
  Description of Artificial Sequence: Synthetic oligonucleotide
  Target: ATXN2; (-) strand; PAM type: YTN; PAM sequence: CTT
gggaggctgaggcaggagaa

SEQ ID NO: 81803 - DNA, 20 bp, Artificial Sequence
  Description of Artificial Sequence: Synthetic oligonucleotide
  Target: ATXN2; (-) strand; PAM type: YTN; PAM sequence: CTA
cttgggaggctgaggcagga

SEQ ID NO: 81804 - DNA, 20 bp, Artificial Sequence
  Description of Artificial Sequence: Synthetic oligonucleotide
  Target: ATXN2; (-) strand; PAM type: YTN; PAM sequence: CTG
taatcccagctacttgggag

SEQ ID NO: 81805 - DNA, 20 bp, Artificial Sequence
  Description of Artificial Sequence: Synthetic oligonucleotide
  Target: ATXN2; (-) strand; PAM type: YTN; PAM sequence: CTG
ggcgggcgcctgtaatccca

SEQ ID NO: 81806 - DNA, 20 bp, Artificial Sequence
  Description of Artificial Sequence: Synthetic oligonucleotide
  Target: ATXN2; (-) strand; PAM type: YTN; PAM sequence: TTG
gggctgggcgggcgcctgta

SEQ ID NO: 81807 - DNA, 20 bp, Artificial Sequence
  Description of Artificial Sequence: Synthetic oligonucleotide
  Target: ATXN2; (-) strand; PAM type: YTN; PAM sequence: CTT
ggggctgggcgggcgcctgt

SEQ ID NO: 81808 - DNA, 20 bp, Artificial Sequence
  Description of Artificial Sequence: Synthetic oligonucleotide
  Target: ATXN2; (-) strand; PAM type: YTN; PAM sequence: CTA
aaaaaaaaaaaaaaaaaaaa

SEQ ID NO: 81809 - DNA, 20 bp, Artificial Sequence
  Description of Artificial Sequence: Synthetic oligonucleotide
  Target: ATXN2; (-) strand; PAM type: YTN; PAM sequence: CTC
cgtctaaaaaaaaaaaaaaa

SEQ ID NO: 81810 - DNA, 20 bp, Artificial Sequence
  Description of Artificial Sequence: Synthetic oligonucleotide
  Target: ATXN2; (-) strand; PAM type: YTN; PAM sequence: CTG
acgacagagggagactccgt

SEQ ID NO: 81811 - DNA, 20 bp, Artificial Sequence
  Description of Artificial Sequence: Synthetic oligonucleotide
  Target: ATXN2; (-) strand; PAM type: YTN; PAM sequence: CTG
cactgacgacagagggagac

SEQ ID NO: 81812 - DNA, 20 bp, Artificial Sequence
  Description of Artificial Sequence: Synthetic oligonucleotide
  Target: ATXN2; (-) strand; PAM type: YTN; PAM sequence: TTG
cagtgagccgagatcgggcc

SEQ ID NO: 81813 - DNA, 20 bp, Artificial Sequence
  Description of Artificial Sequence: Synthetic oligonucleotide
  Target: ATXN2; (-) strand; PAM type: YTN; PAM sequence: TTG
aacccgggaggcagaggttg

SEQ ID NO: 81814 - DNA, 20 bp, Artificial Sequence
  Description of Artificial Sequence: Synthetic oligonucleotide
  Target: ATXN2; (-) strand; PAM type: YTN; PAM sequence: CTT
gaacccgggaggcagaggtt

SEQ ID NO: 81815 - DNA, 20 bp, Artificial Sequence
  Description of Artificial Sequence: Synthetic oligonucleotide
  Target: ATXN2; (-) strand; PAM type: YTN; PAM sequence: TTG
cttgaacccgggaggcagag

SEQ ID NO: 81816 - DNA, 20 bp, Artificial Sequence
  Description of Artificial Sequence: Synthetic oligonucleotide
  Target: ATXN2; (-) strand; PAM type: YTN; PAM sequence: CTG
aggcaggagaattgcttgaa

SEQ ID NO: 81817 - DNA, 20 bp, Artificial Sequence
  Description of Artificial Sequence: Synthetic oligonucleotide
  Target: ATXN2; (-) strand; PAM type: YTN; PAM sequence: CTC
gggaggctgaggcaggagaa

SEQ ID NO: 81818 - DNA, 20 bp, Artificial Sequence
  Description of Artificial Sequence: Synthetic oligonucleotide
  Target: ATXN2; (-) strand; PAM type: YTN; PAM sequence: CTA
ctcgggaggctgaggcagga

SEQ ID NO: 81819 - DNA, 20 bp, Artificial Sequence
  Description of Artificial Sequence: Synthetic oligonucleotide
  Target: ATXN2; (-) strand; PAM type: YTN; PAM sequence: CTG
tagtcccagctactcgggag

SEQ ID NO: 81820 - DNA, 20 bp, Artificial Sequence
  Description of Artificial Sequence: Synthetic oligonucleotide
  Target: ATXN2; (-) strand; PAM type: YTN; PAM sequence: TTA
aatgggcgtggtgatgtgtg

SEQ ID NO: 81821 - DNA, 20 bp, Artificial Sequence
  Description of Artificial Sequence: Synthetic oligonucleotide
  Target: ATXN2; (-) strand; PAM type: YTN; PAM sequence: CTA
aaaatacaaaaaaattaaat

SEQ ID NO: 81822 - DNA, 20 bp, Artificial Sequence
  Description of Artificial Sequence: Synthetic oligonucleotide
  Target: ATXN2; (-) strand; PAM type: YTN; PAM sequence: CTA
ctaaaaatacaaaaaaatta

SEQ ID NO: 81823 - DNA, 20 bp, Artificial Sequence
  Description of Artificial Sequence: Synthetic oligonucleotide
  Target: ATXN2; (-) strand; PAM type: YTN; PAM sequence: CTC
tactaaaaatacaaaaaaat

SEQ ID NO: 81824 - DNA, 20 bp, Artificial Sequence
  Description of Artificial Sequence: Synthetic oligonucleotide
  Target: ATXN2; (-) strand; PAM type: YTN; PAM sequence: CTG
gccaacagggtgaaacccca

SEQ ID NO: 81825 - DNA, 20 bp, Artificial Sequence
  Description of Artificial Sequence: Synthetic oligonucleotide
  Target: ATXN2; (-) strand; PAM type: YTN; PAM sequence: TTC
tggccaacagggtgaaaccc

SEQ ID NO: 81826 - DNA, 20 bp, Artificial Sequence
  Description of Artificial Sequence: Synthetic oligonucleotide
  Target: ATXN2; (-) strand; PAM type: YTN; PAM sequence: TTG
agaccattctggccaacagg

SEQ ID NO: 81827 - DNA, 20 bp, Artificial Sequence
  Description of Artificial Sequence: Synthetic oligonucleotide
  Target: ATXN2; (-) strand; PAM type: YTN; PAM sequence: TTA
caaggtcaagagattgagac

SEQ ID NO: 81828 - DNA, 20 bp, Artificial Sequence
  Description of Artificial Sequence: Synthetic oligonucleotide
  Target: ATXN2; (-) strand; PAM type: YTN; PAM sequence: TTG
aggagggcggattacaaggt

SEQ ID NO: 81829 - DNA, 20 bp, Artificial Sequence
  Description of Artificial Sequence: Synthetic oligonucleotide
  Target: ATXN2; (-) strand; PAM type: YTN; PAM sequence: TTG
ggaggttgaggagggcggat

SEQ ID NO: 81830 - DNA, 20 bp, Artificial Sequence
  Description of Artificial Sequence: Synthetic oligonucleotide
  Target: ATXN2; (-) strand; PAM type: YTN; PAM sequence: TTT
gggaggttgaggagggcgga

SEQ ID NO: 81831 - DNA, 20 bp, Artificial Sequence
  Description of Artificial Sequence: Synthetic oligonucleotide
  Target: ATXN2; (-) strand; PAM type: YTN; PAM sequence: CTT
tgggaggttgaggagggcgg

SEQ ID NO: 81832 - DNA, 20 bp, Artificial Sequence
  Description of Artificial Sequence: Synthetic oligonucleotide
  Target: ATXN2; (-) strand; PAM type: YTN; PAM sequence: CTG
taatcccagcactttgggag

SEQ ID NO: 81833 - DNA, 20 bp, Artificial Sequence
  Description of Artificial Sequence: Synthetic oligonucleotide
  Target: ATXN2; (-) strand; PAM type: YTN; PAM sequence: CTC
acccctgtaatcccagcact

SEQ ID NO: 81834 - DNA, 20 bp, Artificial Sequence
  Description of Artificial Sequence: Synthetic oligonucleotide
  Target: ATXN2; (-) strand; PAM type: YTN; PAM sequence: CTG
aaaaacagaaaaagggccgg

SEQ ID NO: 81835 - DNA, 20 bp, Artificial Sequence
  Description of Artificial Sequence: Synthetic oligonucleotide
  Target: ATXN2; (-) strand; PAM type: YTN; PAM sequence: CTA
ctgaaaaacagaaaaagggc

SEQ ID NO: 81836 - DNA, 20 bp, Artificial Sequence
  Description of Artificial Sequence: Synthetic oligonucleotide
  Target: ATXN2; (-) strand; PAM type: YTN; PAM sequence: CTC
tactgaaaaacagaaaaagg

SEQ ID NO: 81837 - DNA, 20 bp, Artificial Sequence
  Description of Artificial Sequence: Synthetic oligonucleotide
  Target: ATXN2; (-) strand; PAM type: YTN; PAM sequence: CTG
tctctactgaaaaacagaaa

SEQ ID NO: 81838 - DNA, 20 bp, Artificial Sequence
  Description of Artificial Sequence: Synthetic oligonucleotide
  Target: ATXN2; (-) strand; PAM type: YTN; PAM sequence: CTG
gccaacatggtgaaaccctg

SEQ ID NO: 81839 - DNA, 20 bp, Artificial Sequence
  Description of Artificial Sequence: Synthetic oligonucleotide
  Target: ATXN2; (-) strand; PAM type: YTN; PAM sequence: TTC
gagaccagtctggccaacat

SEQ ID NO: 81840 - DNA, 20 bp, Artificial Sequence
  Description of Artificial Sequence: Synthetic oligonucleotide
  Target: ATXN2; (-) strand; PAM type: YTN; PAM sequence: TTG
aggtcaggagttcgagacca

SEQ ID NO: 81841 - DNA, 20 bp, Artificial Sequence
  Description of Artificial Sequence: Synthetic oligonucleotide
  Target: ATXN2; (-) strand; PAM type: YTN; PAM sequence: CTT
gaggtcaggagttcgagacc

SEQ ID NO: 81842 - DNA, 20 bp, Artificial Sequence
  Description of Artificial Sequence: Synthetic oligonucleotide
  Target: ATXN2; (-) strand; PAM type: YTN; PAM sequence: TTG
ggaggccaaggagggtggat

SEQ ID NO: 81843 - DNA, 20 bp, Artificial Sequence
  Description of Artificial Sequence: Synthetic oligonucleotide
  Target: ATXN2; (-) strand; PAM type: YTN; PAM sequence: TTT
gggaggccaaggagggtgga

SEQ ID NO: 81844 - DNA, 20 bp, Artificial Sequence
  Description of Artificial Sequence: Synthetic oligonucleotide
  Target: ATXN2; (-) strand; PAM type: YTN; PAM sequence: CTT
tgggaggccaaggagggtgg

SEQ ID NO: 81845 - DNA, 20 bp, Artificial Sequence
  Description of Artificial Sequence: Synthetic oligonucleotide
  Target: ATXN2; (-) strand; PAM type: YTN; PAM sequence: TTG
taatcccagcactttgggag

SEQ ID NO: 81846 - DNA, 20 bp, Artificial Sequence
  Description of Artificial Sequence: Synthetic oligonucleotide
  Target: ATXN2; (-) strand; PAM type: YTN; PAM sequence: CTT
gtaatcccagcactttggga

SEQ ID NO: 81847 - DNA, 20 bp, Artificial Sequence
  Description of Artificial Sequence: Synthetic oligonucleotide
  Target: ATXN2; (-) strand; PAM type: YTN; PAM sequence: CTC
acgcttgtaatcccagcact

SEQ ID NO: 81848 - DNA, 20 bp, Artificial Sequence
  Description of Artificial Sequence: Synthetic oligonucleotide
  Target: ATXN2; (-) strand; PAM type: YTN; PAM sequence: CTG
ggtgcggtggctcacgcttg

SEQ ID NO: 81849 - DNA, 20 bp, Artificial Sequence
  Description of Artificial Sequence: Synthetic oligonucleotide
  Target: ATXN2; (-) strand; PAM type: YTN; PAM sequence: TTA
gctgggtgcggtggctcacg

SEQ ID NO: 81850 - DNA, 20 bp, Artificial Sequence
  Description of Artificial Sequence: Synthetic oligonucleotide
  Target: ATXN2; (-) strand; PAM type: YTN; PAM sequence: CTT
agctgggtgcggtggctcac

SEQ ID NO: 81851 - DNA, 20 bp, Artificial Sequence
  Description of Artificial Sequence: Synthetic oligonucleotide
  Target: ATXN2; (-) strand; PAM type: YTN; PAM sequence: TTG
aaagacttagctgggtgcgg

SEQ ID NO: 81852 - DNA, 20 bp, Artificial Sequence
  Description of Artificial Sequence: Synthetic oligonucleotide
  Target: ATXN2; (-) strand; PAM type: YTN; PAM sequence: TTA
acagcaatgagaaataacag

SEQ ID NO: 81853 - DNA, 20 bp, Artificial Sequence
  Description of Artificial Sequence: Synthetic oligonucleotide
  Target: ATXN2; (-) strand; PAM type: YTN; PAM sequence: TTC
agaggcagatatattaacag

SEQ ID NO: 81854 - DNA, 20 bp, Artificial Sequence
  Description of Artificial Sequence: Synthetic oligonucleotide
  Target: ATXN2; (-) strand; PAM type: YTN; PAM sequence: TTT
cagaggcagatatattaaca

SEQ ID NO: 81855 - DNA, 20 bp, Artificial Sequence
  Description of Artificial Sequence: Synthetic oligonucleotide
  Target: ATXN2; (-) strand; PAM type: YTN; PAM sequence: TTT
tcagaggcagatatattaac

SEQ ID NO: 81856 - DNA, 20 bp, Artificial Sequence
  Description of Artificial Sequence: Synthetic oligonucleotide
  Target: ATXN2; (-) strand; PAM type: YTN; PAM sequence: TTG
gcagcaagtagaaaagcaat

SEQ ID NO: 81857 - DNA, 20 bp, Artificial Sequence
  Description of Artificial Sequence: Synthetic oligonucleotide
  Target: ATXN2; (-) strand; PAM type: YTN; PAM sequence: CTG
atgtacatattggcagcaag

SEQ ID NO: 81858 - DNA, 20 bp, Artificial Sequence
  Description of Artificial Sequence: Synthetic oligonucleotide
  Target: ATXN2; (-) strand; PAM type: YTN; PAM sequence: TTC
tgatgtacatattggcagca

SEQ ID NO: 81859 - DNA, 20 bp, Artificial Sequence
  Description of Artificial Sequence: Synthetic oligonucleotide
  Target: ATXN2; (-) strand; PAM type: YTN; PAM sequence: TTT
ctgatgtacatattggcagc

SEQ ID NO: 81860 - DNA, 20 bp, Artificial Sequence
  Description of Artificial Sequence: Synthetic oligonucleotide
  Target: ATXN2; (-) strand; PAM type: YTN; PAM sequence: TTT
tctgatgtacatattggcag

SEQ ID NO: 81861 - DNA, 20 bp, Artificial Sequence
  Description of Artificial Sequence: Synthetic oligonucleotide
  Target: ATXN2; (-) strand; PAM type: YTN; PAM sequence: CTT
ttctgatgtacatattggca

SEQ ID NO: 81862 - DNA, 20 bp, Artificial Sequence
  Description of Artificial Sequence: Synthetic oligonucleotide
  Target: ATXN2; (-) strand; PAM type: YTN; PAM sequence: TTC
ttttctgatgtacatattgg

SEQ ID NO: 81863 - DNA, 20 bp, Artificial Sequence
  Description of Artificial Sequence: Synthetic oligonucleotide
  Target: ATXN2; (-) strand; PAM type: YTN; PAM sequence: TTT
cttttctgatgtacatattg

SEQ ID NO: 81864 - DNA, 20 bp, Artificial Sequence
  Description of Artificial Sequence: Synthetic oligonucleotide
  Target: ATXN2; (-) strand; PAM type: YTN; PAM sequence: CTT
tcttttctgatgtacatatt

SEQ ID NO: 81865 - DNA, 20 bp, Artificial Sequence
  Description of Artificial Sequence: Synthetic oligonucleotide
  Target: ATXN2; (-) strand; PAM type: YTN; PAM sequence: CTA
gctttcttttctgatgtaca

SEQ ID NO: 81866 - DNA, 20 bp, Artificial Sequence
  Description of Artificial Sequence: Synthetic oligonucleotide
  Target: ATXN2; (-) strand; PAM type: YTN; PAM sequence: CTA
tctagctttcttttctgatg

SEQ ID NO: 81867 - DNA, 20 bp, Artificial Sequence
  Description of Artificial Sequence: Synthetic oligonucleotide
  Target: ATXN2; (-) strand; PAM type: YTN; PAM sequence: TTC
tatctagctttcttttctga

SEQ ID NO: 81868 - DNA, 20 bp, Artificial Sequence
  Description of Artificial Sequence: Synthetic oligonucleotide
  Target: ATXN2; (-) strand; PAM type: YTN; PAM sequence: TTA
cacatgattctatctagctt

SEQ ID NO: 81869 - DNA, 20 bp, Artificial Sequence
  Description of Artificial Sequence: Synthetic oligonucleotide
  Target: ATXN2; (-) strand; PAM type: YTN; PAM sequence: TTT
acacatgattctatctagct

SEQ ID NO: 81870 - DNA, 20 bp, Artificial Sequence
  Description of Artificial Sequence: Synthetic oligonucleotide
  Target: ATXN2; (-) strand; PAM type: YTN; PAM sequence: CTT
tacacatgattctatctagc

SEQ ID NO: 81871 - DNA, 20 bp, Artificial Sequence
  Description of Artificial Sequence: Synthetic oligonucleotide
  Target: ATXN2; (-) strand; PAM type: YTN; PAM sequence: TTA
ctttacacatgattctatct

SEQ ID NO: 81872 - DNA, 20 bp, Artificial Sequence
  Description of Artificial Sequence: Synthetic oligonucleotide
  Target: ATXN2; (-) strand; PAM type: YTN; PAM sequence: TTT
actttacacatgattctatc

SEQ ID NO: 81873 - DNA, 20 bp, Artificial Sequence
  Description of Artificial Sequence: Synthetic oligonucleotide
  Target: ATXN2; (-) strand; PAM type: YTN; PAM sequence: TTT
tactttacacatgattctat

SEQ ID NO: 81874 - DNA, 20 bp, Artificial Sequence
  Description of Artificial Sequence: Synthetic oligonucleotide
  Target: ATXN2; (-) strand; PAM type: YTN; PAM sequence: CTT
ttactttacacatgattcta

SEQ ID NO: 81875 - DNA, 20 bp, Artificial Sequence
  Description of Artificial Sequence: Synthetic oligonucleotide
  Target: ATXN2; (-) strand; PAM type: YTN; PAM sequence: TTG
agaacttttactttacacat

SEQ ID NO: 81876 - DNA, 20 bp, Artificial Sequence
  Description of Artificial Sequence: Synthetic oligonucleotide
  Target: ATXN2; (-) strand; PAM type: YTN; PAM sequence: TTT
gagaacttttactttacaca

SEQ ID NO: 81877 - DNA, 20 bp, Artificial Sequence
  Description of Artificial Sequence: Synthetic oligonucleotide
  Target: ATXN2; (-) strand; PAM type: YTN; PAM sequence: CTT
tgagaacttttactttacac

SEQ ID NO: 81878 - DNA, 20 bp, Artificial Sequence
  Description of Artificial Sequence: Synthetic oligonucleotide
  Target: ATXN2; (-) strand; PAM type: YTN; PAM sequence: CTC
tttgagaacttttactttac

SEQ ID NO: 81879 - DNA, 20 bp, Artificial Sequence
  Description of Artificial Sequence: Synthetic oligonucleotide
  Target: ATXN2; (-) strand; PAM type: YTN; PAM sequence: TTA
tggcctctttgagaactttt

SEQ ID NO: 81880 - DNA, 20 bp, Artificial Sequence
  Description of Artificial Sequence: Synthetic oligonucleotide
  Target: ATXN2; (-) strand; PAM type: YTN; PAM sequence: TTT
atggcctctttgagaacttt

SEQ ID NO: 81881 - DNA, 20 bp, Artificial Sequence
  Description of Artificial Sequence: Synthetic oligonucleotide
  Target: ATXN2; (-) strand; PAM type: YTN; PAM sequence: CTT
tatggcctctttgagaactt

SEQ ID NO: 81882 - DNA, 20 bp, Artificial Sequence
  Description of Artificial Sequence: Synthetic oligonucleotide
  Target: ATXN2; (-) strand; PAM type: YTN; PAM sequence: TTC
tttatggcctctttgagaac

SEQ ID NO: 81883 - DNA, 20 bp, Artificial Sequence
  Description of Artificial Sequence: Synthetic oligonucleotide
  Target: ATXN2; (-) strand; PAM type: YTN; PAM sequence: CTG
gagagttctttatggcctct

SEQ ID NO: 81884 - DNA, 20 bp, Artificial Sequence
  Description of Artificial Sequence: Synthetic oligonucleotide
  Target: ATXN2; (-) strand; PAM type: YTN; PAM sequence: CTG
gtctggagagttctttatgg

SEQ ID NO: 81885 - DNA, 20 bp, Artificial Sequence
  Description of Artificial Sequence: Synthetic oligonucleotide
  Target: ATXN2; (-) strand; PAM type: YTN; PAM sequence: CTC
tggtctggagagttctttat

SEQ ID NO: 81886 - DNA, 20 bp, Artificial Sequence
  Description of Artificial Sequence: Synthetic oligonucleotide
  Target: ATXN2; (-) strand; PAM type: YTN; PAM sequence: TTA
gcctctggtctggagagttc

SEQ ID NO: 81887 - DNA, 20 bp, Artificial Sequence
  Description of Artificial Sequence: Synthetic oligonucleotide
  Target: ATXN2; (-) strand; PAM type: YTN; PAM sequence: TTT
agcctctggtctggagagtt

SEQ ID NO: 81888 - DNA, 20 bp, Artificial Sequence
  Description of Artificial Sequence: Synthetic oligonucleotide
  Target: ATXN2; (-) strand; PAM type: YTN; PAM sequence: CTT
tagcctctggtctggagagt

SEQ ID NO: 81889 - DNA, 20 bp, Artificial Sequence
  Description of Artificial Sequence: Synthetic oligonucleotide
  Target: ATXN2; (-) strand; PAM type: YTN; PAM sequence: CTG
ctttagcctctggtctggag

SEQ ID NO: 81890 - DNA, 20 bp, Artificial Sequence
  Description of Artificial Sequence: Synthetic oligonucleotide
  Target: ATXN2; (-) strand; PAM type: YTN; PAM sequence: CTC
ctgctttagcctctggtctg

SEQ ID NO: 81891 - DNA, 20 bp, Artificial Sequence
  Description of Artificial Sequence: Synthetic oligonucleotide
  Target: ATXN2; (-) strand; PAM type: YTN; PAM sequence: CTG
tcctcctgctttagcctctg

SEQ ID NO: 81892 - DNA, 20 bp, Artificial Sequence
  Description of Artificial Sequence: Synthetic oligonucleotide
  Target: ATXN2; (-) strand; PAM type: YTN; PAM sequence: TTA
aactgtcctcctgctttagc

SEQ ID NO: 81893 - DNA, 20 bp, Artificial Sequence
  Description of Artificial Sequence: Synthetic oligonucleotide
  Target: ATXN2; (-) strand; PAM type: YTN; PAM sequence: CTT
aaactgtcctcctgctttag

SEQ ID NO: 81894 - DNA, 20 bp, Artificial Sequence
  Description of Artificial Sequence: Synthetic oligonucleotide
  Target: ATXN2; (-) strand; PAM type: YTN; PAM sequence: CTG
ggcttaaactgtcctcctgc

SEQ ID NO: 81895 - DNA, 20 bp, Artificial Sequence
  Description of Artificial Sequence: Synthetic oligonucleotide
  Target: ATXN2; (-) strand; PAM type: YTN; PAM sequence: TTC
tgggcttaaactgtcctcct

SEQ ID NO: 81896 - DNA, 20 bp, Artificial Sequence
  Description of Artificial Sequence: Synthetic oligonucleotide
  Target: ATXN2; (-) strand; PAM type: YTN; PAM sequence: CTT
ctgggcttaaactgtcctcc

SEQ ID NO: 81897 - DNA, 20 bp, Artificial Sequence
  Description of Artificial Sequence: Synthetic oligonucleotide
  Target: ATXN2; (-) strand; PAM type: YTN; PAM sequence: CTC
caacttctgggcttaaactg

SEQ ID NO: 81898 - DNA, 20 bp, Artificial Sequence
  Description of Artificial Sequence: Synthetic oligonucleotide
  Target: ATXN2; (-) strand; PAM type: YTN; PAM sequence: CTG
gcctccaacttctgggctta

SEQ ID NO: 81899 - DNA, 20 bp, Artificial Sequence
  Description of Artificial Sequence: Synthetic oligonucleotide
  Target: ATXN2; (-) strand; PAM type: YTN; PAM sequence: TTG
cccaggctggcctccaactt

SEQ ID NO: 81900 - DNA, 20 bp, Artificial Sequence
  Description of Artificial Sequence: Synthetic oligonucleotide
  Target: ATXN2; (-) strand; PAM type: YTN; PAM sequence: TTA
tgttgcccaggctggcctcc

SEQ ID NO: 81901 - DNA, 20 bp, Artificial Sequence
  Description of Artificial Sequence: Synthetic oligonucleotide
  Target: ATXN2; (-) strand; PAM type: YTN; PAM sequence: TTG
ttatgttgcccaggctggcc

SEQ ID NO: 81902 - DNA, 20 bp, Artificial Sequence
  Description of Artificial Sequence: Synthetic oligonucleotide
  Target: ATXN2; (-) strand; PAM type: YTN; PAM sequence: CTT
gttatgttgcccaggctggc

SEQ ID NO: 81903 - DNA, 20 bp, Artificial Sequence
  Description of Artificial Sequence: Synthetic oligonucleotide
  Target: ATXN2; (-) strand; PAM type: YTN; PAM sequence: TTG
gtagaaatgggggtcttgtt

SEQ ID NO: 81904 - DNA, 20 bp, Artificial Sequence
  Description of Artificial Sequence: Synthetic oligonucleotide
  Target: ATXN2; (-) strand; PAM type: YTN; PAM sequence: TTT
ggtagaaatgggggtcttgt

SEQ ID NO: 81905 - DNA, 20 bp, Artificial Sequence
  Description of Artificial Sequence: Synthetic oligonucleotide
  Target: ATXN2; (-) strand; PAM type: YTN; PAM sequence: TTT
tggtagaaatgggggtcttg

SEQ ID NO: 81906 - DNA, 20 bp, Artificial Sequence
  Description of Artificial Sequence: Synthetic oligonucleotide
  Target: ATXN2; (-) strand; PAM type: YTN; PAM sequence: TTT
ttggtagaaatgggggtctt

SEQ ID NO: 81907 - DNA, 20 bp, Artificial Sequence
  Description of Artificial Sequence: Synthetic oligonucleotide
  Target: ATXN2; (-) strand; PAM type: YTN; PAM sequence: TTT
tttggtagaaatgggggtct

SEQ ID NO: 81908 - DNA, 20 bp, Artificial Sequence
  Description of Artificial Sequence: Synthetic oligonucleotide
  Target: ATXN2; (-) strand; PAM type: YTN; PAM sequence: TTT
ttttggtagaaatgggggtc

SEQ ID NO: 81909 - DNA, 20 bp, Artificial Sequence
  Description of Artificial Sequence: Synthetic oligonucleotide
  Target: ATXN2; (-) strand; PAM type: YTN; PAM sequence: TTT
tttttggtagaaatgggggt

SEQ ID NO: 81910 - DNA, 20 bp, Artificial Sequence
  Description of Artificial Sequence: Synthetic oligonucleotide
  Target: ATXN2; (-) strand; PAM type: YTN; PAM sequence: TTT
ttttttggtagaaatggggg

SEQ ID NO: 81911 - DNA, 20 bp, Artificial Sequence
  Description of Artificial Sequence: Synthetic oligonucleotide
  Target: ATXN2; (-) strand; PAM type: YTN; PAM sequence: TTT
tttttttggtagaaatgggg

SEQ ID NO: 81912 - DNA, 20 bp, Artificial Sequence
  Description of Artificial Sequence: Synthetic oligonucleotide
  Target: ATXN2; (-) strand; PAM type: YTN; PAM sequence: TTT
ttttttttggtagaaatggg

SEQ ID NO: 81913 - DNA, 20 bp, Artificial Sequence
  Description of Artificial Sequence: Synthetic oligonucleotide
  Target: ATXN2; (-) strand; PAM type: YTN; PAM sequence: TTT
tttttttttggtagaaatgg

SEQ ID NO: 81914 - DNA, 20 bp, Artificial Sequence
  Description of Artificial Sequence: Synthetic oligonucleotide
  Target: ATXN2; (-) strand; PAM type: YTN; PAM sequence: TTT
ttttttttttggtagaaatg

SEQ ID NO: 81915 - DNA, 20 bp, Artificial Sequence
  Description of Artificial Sequence: Synthetic oligonucleotide
  Target: ATXN2; (-) strand; PAM type: YTN; PAM sequence: TTT
tttttttttttggtagaaat

SEQ ID NO: 81916 - DNA, 20 bp, Artificial Sequence
  Description of Artificial Sequence: Synthetic oligonucleotide
  Target: ATXN2; (-) strand; PAM type: YTN; PAM sequence: TTT
ttttttttttttggtagaaa

SEQ ID NO: 81917 - DNA, 20 bp, Artificial Sequence
  Description of Artificial Sequence: Synthetic oligonucleotide
  Target: ATXN2; (-) strand; PAM type: YTN; PAM sequence: TTT
tttttttttttttggtagaa

SEQ ID NO: 81918 - DNA, 20 bp, Artificial Sequence
  Description of Artificial Sequence: Synthetic oligonucleotide
  Target: ATXN2; (-) strand; PAM type: YTN; PAM sequence: TTT
ttttttttttttttggtaga

SEQ ID NO: 81919 - DNA, 20 bp, Artificial Sequence
  Description of Artificial Sequence: Synthetic oligonucleotide
  Target: ATXN2; (-) strand; PAM type: YTN; PAM sequence: TTT
tttttttttttttttggtag

SEQ ID NO: 81920 - DNA, 20 bp, Artificial Sequence
  Description of Artificial Sequence: Synthetic oligonucleotide
  Target: ATXN2; (-) strand; PAM type: YTN; PAM sequence: TTT
ttttttttttttttttggta

SEQ ID NO: 81921 - DNA, 20 bp, Artificial Sequence
  Description of Artificial Sequence: Synthetic oligonucleotide
  Target: ATXN2; (-) strand; PAM type: YTN; PAM sequence: TTT
tttttttttttttttttggt

SEQ ID NO: 81922 - DNA, 20 bp, Artificial Sequence
  Description of Artificial Sequence: Synthetic oligonucleotide
  Target: ATXN2; (-) strand; PAM type: YTN; PAM sequence: CTT
ttttttttttttttttttgg

SEQ ID NO: 81923 - DNA, 20 bp, Artificial Sequence
  Description of Artificial Sequence: Synthetic oligonucleotide
  Target: ATXN2; (-) strand; PAM type: YTN; PAM sequence: TTC
tttttttttttttttttttt

SEQ ID NO: 81924 - DNA, 20 bp, Artificial Sequence
  Description of Artificial Sequence: Synthetic oligonucleotide
  Target: ATXN2; (-) strand; PAM type: YTN; PAM sequence: TTA
gaaaggggagttcttttttt

SEQ ID NO: 81925 - DNA, 20 bp, Artificial Sequence
  Description of Artificial Sequence: Synthetic oligonucleotide
  Target: ATXN2; (-) strand; PAM type: YTN; PAM sequence: TTT
agaaaggggagttctttttt

SEQ ID NO: 81926 - DNA, 20 bp, Artificial Sequence
  Description of Artificial Sequence: Synthetic oligonucleotide
  Target: ATXN2; (-) strand; PAM type: YTN; PAM sequence: TTT
tagaaaggggagttcttttt

SEQ ID NO: 81927 - DNA, 20 bp, Artificial Sequence
  Description of Artificial Sequence: Synthetic oligonucleotide
  Target: ATXN2; (-) strand; PAM type: YTN; PAM sequence: TTG
agcagattttagaaagggga

SEQ ID NO: 81928 - DNA, 20 bp, Artificial Sequence
  Description of Artificial Sequence: Synthetic oligonucleotide
  Target: ATXN2; (-) strand; PAM type: YTN; PAM sequence: CTT
gagcagattttagaaagggg

SEQ ID NO: 81929 - DNA, 20 bp, Artificial Sequence
  Description of Artificial Sequence: Synthetic oligonucleotide
  Target: ATXN2; (-) strand; PAM type: YTN; PAM sequence: CTG
aagcttgagcagattttaga

SEQ ID NO: 81930 - DNA, 20 bp, Artificial Sequence
  Description of Artificial Sequence: Synthetic oligonucleotide
  Target: ATXN2; (-) strand; PAM type: YTN; PAM sequence: TTC
actgaagcttgagcagattt

SEQ ID NO: 81931 - DNA, 20 bp, Artificial Sequence
  Description of Artificial Sequence: Synthetic oligonucleotide
  Target: ATXN2; (-) strand; PAM type: YTN; PAM sequence: TTT
cactgaagcttgagcagatt

SEQ ID NO: 81932 - DNA, 20 bp, Artificial Sequence
  Description of Artificial Sequence: Synthetic oligonucleotide
  Target: ATXN2; (-) strand; PAM type: YTN; PAM sequence: TTT
tcactgaagcttgagcagat

SEQ ID NO: 81933 - DNA, 20 bp, Artificial Sequence
  Description of Artificial Sequence: Synthetic oligonucleotide
  Target: ATXN2; (-) strand; PAM type: YTN; PAM sequence: CTT
ttcactgaagcttgagcaga

SEQ ID NO: 81934 - DNA, 20 bp, Artificial Sequence
  Description of Artificial Sequence: Synthetic oligonucleotide
  Target: ATXN2; (-) strand; PAM type: YTN; PAM sequence: CTA
aatgtcttttcactgaagct

SEQ ID NO: 81935 - DNA, 20 bp, Artificial Sequence
  Description of Artificial Sequence: Synthetic oligonucleotide
  Target: ATXN2; (-) strand; PAM type: YTN; PAM sequence: TTG
aagactaaatgtcttttcac

SEQ ID NO: 81936 - DNA, 20 bp, Artificial Sequence
  Description of Artificial Sequence: Synthetic oligonucleotide
  Target: ATXN2; (-) strand; PAM type: YTN; PAM sequence: TTC
gaaatcaggaattgaagact

SEQ ID NO: 81937 - DNA, 20 bp, Artificial Sequence
  Description of Artificial Sequence: Synthetic oligonucleotide
  Target: ATXN2; (-) strand; PAM type: YTN; PAM sequence: TTT
cgaaatcaggaattgaagac

SEQ ID NO: 81938 - DNA, 20 bp, Artificial Sequence
  Description of Artificial Sequence: Synthetic oligonucleotide
  Target: ATXN2; (-) strand; PAM type: YTN; PAM sequence: CTG
aaacacatttcgaaatcagg

SEQ ID NO: 81939 - DNA, 20 bp, Artificial Sequence
  Description of Artificial Sequence: Synthetic oligonucleotide
  Target: ATXN2; (-) strand; PAM type: YTN; PAM sequence: TTC
ctgaaacacatttcgaaatc

SEQ ID NO: 81940 - DNA, 20 bp, Artificial Sequence
  Description of Artificial Sequence: Synthetic oligonucleotide
  Target: ATXN2; (-) strand; PAM type: YTN; PAM sequence: TTC
attcctgaaacacatttcga

SEQ ID NO: 81941 - DNA, 20 bp, Artificial Sequence
  Description of Artificial Sequence: Synthetic oligonucleotide
  Target: ATXN2; (-) strand; PAM type: YTN; PAM sequence: TTT
cattcctgaaacacatttcg

SEQ ID NO: 81942 - DNA, 20 bp, Artificial Sequence
  Description of Artificial Sequence: Synthetic oligonucleotide
  Target: ATXN2; (-) strand; PAM type: YTN; PAM sequence: TTT
tcattcctgaaacacatttc

SEQ ID NO: 81943 - DNA, 20 bp, Artificial Sequence
  Description of Artificial Sequence: Synthetic oligonucleotide
  Target: ATXN2; (-) strand; PAM type: YTN; PAM sequence: CTA
ttttcattcctgaaacacat

SEQ ID NO: 81944 - DNA, 20 bp, Artificial Sequence
  Description of Artificial Sequence: Synthetic oligonucleotide
  Target: ATXN2; (-) strand; PAM type: YTN; PAM sequence: TTA
actattttcattcctgaaac

SEQ ID NO: 81945 - DNA, 20 bp, Artificial Sequence
  Description of Artificial Sequence: Synthetic oligonucleotide
  Target: ATXN2; (-) strand; PAM type: YTN; PAM sequence: TTG
tgcagttaactattttcatt

SEQ ID NO: 81946 - DNA, 20 bp, Artificial Sequence
  Description of Artificial Sequence: Synthetic oligonucleotide
  Target: ATXN2; (-) strand; PAM type: YTN; PAM sequence: TTT
gtgcagttaactattttcat

SEQ ID NO: 81947 - DNA, 20 bp, Artificial Sequence
  Description of Artificial Sequence: Synthetic oligonucleotide
  Target: ATXN2; (-) strand; PAM type: YTN; PAM sequence: CTT
tgtgcagttaactattttca

SEQ ID NO: 81948 - DNA, 20 bp, Artificial Sequence
  Description of Artificial Sequence: Synthetic oligonucleotide
  Target: ATXN2; (-) strand; PAM type: YTN; PAM sequence: CTG
tggactttgtgcagttaact

SEQ ID NO: 81949 - DNA, 20 bp, Artificial Sequence
  Description of Artificial Sequence: Synthetic oligonucleotide
  Target: ATXN2; (-) strand; PAM type: YTN; PAM sequence: TTG
ctgtggactttgtgcagtta

SEQ ID NO: 81950 - DNA, 20 bp, Artificial Sequence
  Description of Artificial Sequence: Synthetic oligonucleotide
  Target: ATXN2; (-) strand; PAM type: YTN; PAM sequence: TTT
gctgtggactttgtgcagtt

SEQ ID NO: 81951 - DNA, 20 bp, Artificial Sequence
  Description of Artificial Sequence: Synthetic oligonucleotide
  Target: ATXN2; (-) strand; PAM type: YTN; PAM sequence: TTA
taaacatttgctgtggactt

SEQ ID NO: 81952 - DNA, 20 bp, Artificial Sequence
  Description of Artificial Sequence: Synthetic oligonucleotide
  Target: ATXN2; (-) strand; PAM type: YTN; PAM sequence: TTT
ataaacatttgctgtggact

SEQ ID NO: 81953 - DNA, 20 bp, Artificial Sequence
  Description of Artificial Sequence: Synthetic oligonucleotide
  Target: ATXN2; (-) strand; PAM type: YTN; PAM sequence: TTC
gggtttataaacatttgctg

SEQ ID NO: 81954 - DNA, 20 bp, Artificial Sequence
  Description of Artificial Sequence: Synthetic oligonucleotide
  Target: ATXN2; (-) strand; PAM type: YTN; PAM sequence: TTT
cgggtttataaacatttgct

SEQ ID NO: 81955 - DNA, 20 bp, Artificial Sequence
  Description of Artificial Sequence: Synthetic oligonucleotide
  Target: ATXN2; (-) strand; PAM type: YTN; PAM sequence: TTT
tcgggtttataaacatttgc

SEQ ID NO: 81956 - DNA, 20 bp, Artificial Sequence
  Description of Artificial Sequence: Synthetic oligonucleotide
  Target: ATXN2; (-) strand; PAM type: YTN; PAM sequence: CTT
ttcgggtttataaacatttg

SEQ ID NO: 81957 - DNA, 20 bp, Artificial Sequence
  Description of Artificial Sequence: Synthetic oligonucleotide
  Target: ATXN2; (-) strand; PAM type: YTN; PAM sequence: TTC
ttttcgggtttataaacatt

SEQ ID NO: 81958 - DNA, 20 bp, Artificial Sequence
  Description of Artificial Sequence: Synthetic oligonucleotide
  Target: ATXN2; (-) strand; PAM type: YTN; PAM sequence: TTT
cttttcgggtttataaacat

SEQ ID NO: 81959 - DNA, 20 bp, Artificial Sequence
  Description of Artificial Sequence: Synthetic oligonucleotide
  Target: ATXN2; (-) strand; PAM type: YTN; PAM sequence: TTT
tcttttcgggtttataaaca

SEQ ID NO: 81960 - DNA, 20 bp, Artificial Sequence
  Description of Artificial Sequence: Synthetic oligonucleotide
  Target: ATXN2; (-) strand; PAM type: YTN; PAM sequence: TTT
ttcttttcgggtttataaac

SEQ ID NO: 81961 - DNA, 20 bp, Artificial Sequence
  Description of Artificial Sequence: Synthetic oligonucleotide
  Target: ATXN2; (-) strand; PAM type: YTN; PAM sequence: CTG
catttttcttttcgggttta

SEQ ID NO: 81962 - DNA, 20 bp, Artificial Sequence
  Description of Artificial Sequence: Synthetic oligonucleotide
  Target: ATXN2; (-) strand; PAM type: YTN; PAM sequence: TTG
aaacaagtactgcatttttc

SEQ ID NO: 81963 - DNA, 20 bp, Artificial Sequence
  Description of Artificial Sequence: Synthetic oligonucleotide
  Target: ATXN2; (-) strand; PAM type: YTN; PAM sequence: TTT
gaaacaagtactgcattttt

SEQ ID NO: 81964 - DNA, 20 bp, Artificial Sequence
  Description of Artificial Sequence: Synthetic oligonucleotide
  Target: ATXN2; (-) strand; PAM type: YTN; PAM sequence: TTT
tgaaacaagtactgcatttt

SEQ ID NO: 81965 - DNA, 20 bp, Artificial Sequence
  Description of Artificial Sequence: Synthetic oligonucleotide
  Target: ATXN2; (-) strand; PAM type: YTN; PAM sequence: TTA
taaagggcgggttttgaaac

SEQ ID NO: 81966 - DNA, 20 bp, Artificial Sequence
  Description of Artificial Sequence: Synthetic oligonucleotide
  Target: ATXN2; (-) strand; PAM type: YTN; PAM sequence: TTT
ataaagggcgggttttgaaa

SEQ ID NO: 81967 - DNA, 20 bp, Artificial Sequence
  Description of Artificial Sequence: Synthetic oligonucleotide
  Target: ATXN2; (-) strand; PAM type: YTN; PAM sequence: TTT
tataaagggcgggttttgaa

SEQ ID NO: 81968 - DNA, 20 bp, Artificial Sequence
  Description of Artificial Sequence: Synthetic oligonucleotide
  Target: ATXN2; (-) strand; PAM type: YTN; PAM sequence: TTT
ttataaagggcgggttttga

SEQ ID NO: 81969 - DNA, 20 bp, Artificial Sequence
  Description of Artificial Sequence: Synthetic oligonucleotide
  Target: ATXN2; (-) strand; PAM type: YTN; PAM sequence: TTT
tttataaagggcgggttttg

SEQ ID NO: 81970 - DNA, 20 bp, Artificial Sequence
  Description of Artificial Sequence: Synthetic oligonucleotide
  Target: ATXN2; (-) strand; PAM type: YTN; PAM sequence: TTA
gttttttataaagggcgggt

SEQ ID NO: 81971 - DNA, 20 bp, Artificial Sequence
  Description of Artificial Sequence: Synthetic oligonucleotide
  Target: ATXN2; (-) strand; PAM type: YTN; PAM sequence: TTT
agttttttataaagggcggg

SEQ ID NO: 81972 - DNA, 20 bp, Artificial Sequence
  Description of Artificial Sequence: Synthetic oligonucleotide
  Target: ATXN2; (-) strand; PAM type: YTN; PAM sequence: TTT
tagttttttataaagggcgg

SEQ ID NO: 81973 - DNA, 20 bp, Artificial Sequence
  Description of Artificial Sequence: Synthetic oligonucleotide
  Target: ATXN2; (-) strand; PAM type: YTN; PAM sequence: TTA
taattttagttttttataaa

SEQ ID NO: 81974 - DNA, 20 bp, Artificial Sequence
  Description of Artificial Sequence: Synthetic oligonucleotide
  Target: ATXN2; (-) strand; PAM type: YTN; PAM sequence: TTG
attataattttagtttttta

SEQ ID NO: 81975 - DNA, 20 bp, Artificial Sequence
  Description of Artificial Sequence: Synthetic oligonucleotide
  Target: ATXN2; (-) strand; PAM type: YTN; PAM sequence: CTT
gattataattttagtttttt

SEQ ID NO: 81976 - DNA, 20 bp, Artificial Sequence
  Description of Artificial Sequence: Synthetic oligonucleotide
  Target: ATXN2; (-) strand; PAM type: YTN; PAM sequence: TTA
atcttgattataattttagt

SEQ ID NO: 81977 - DNA, 20 bp, Artificial Sequence
  Description of Artificial Sequence: Synthetic oligonucleotide
  Target: ATXN2; (-) strand; PAM type: YTN; PAM sequence: CTA
agtggaattaatcttgatta

SEQ ID NO: 81978 - DNA, 20 bp, Artificial Sequence
  Description of Artificial Sequence: Synthetic oligonucleotide
  Target: ATXN2; (-) strand; PAM type: YTN; PAM sequence: TTC
taagtggaattaatcttgat

SEQ ID NO: 81979 - DNA, 20 bp, Artificial Sequence
  Description of Artificial Sequence: Synthetic oligonucleotide
  Target: ATXN2; (-) strand; PAM type: YTN; PAM sequence: TTT
ctaagtggaattaatcttga

SEQ ID NO: 81980 - DNA, 20 bp, Artificial Sequence
  Description of Artificial Sequence: Synthetic oligonucleotide
  Target: ATXN2; (-) strand; PAM type: YTN; PAM sequence: TTT
tctaagtggaattaatcttg

SEQ ID NO: 81981 - DNA, 20 bp, Artificial Sequence
  Description of Artificial Sequence: Synthetic oligonucleotide
  Target: ATXN2; (-) strand; PAM type: YTN; PAM sequence: TTT
ttctaagtggaattaatctt

SEQ ID NO: 81982 - DNA, 20 bp, Artificial Sequence
  Description of Artificial Sequence: Synthetic oligonucleotide
  Target: ATXN2; (-) strand; PAM type: YTN; PAM sequence: TTA
ataatttttctaagtggaat

SEQ ID NO: 81983 - DNA, 20 bp, Artificial Sequence
  Description of Artificial Sequence: Synthetic oligonucleotide
  Target: ATXN2; (-) strand; PAM type: YTN; PAM sequence: CTT
aataatttttctaagtggaa

SEQ ID NO: 81984 - DNA, 20 bp, Artificial Sequence
  Description of Artificial Sequence: Synthetic oligonucleotide
  Target: ATXN2; (-) strand; PAM type: YTN; PAM sequence: TTC
ttaataatttttctaagtgg

SEQ ID NO: 81985 - DNA, 20 bp, Artificial Sequence
  Description of Artificial Sequence: Synthetic oligonucleotide
  Target: ATXN2; (-) strand; PAM type: YTN; PAM sequence: TTA
aaatattcttaataattttt

SEQ ID NO: 81986 - DNA, 20 bp, Artificial Sequence
  Description of Artificial Sequence: Synthetic oligonucleotide
  Target: ATXN2; (-) strand; PAM type: YTN; PAM sequence: TTA
aagtcatgttaaaatattct

SEQ ID NO: 81987 - DNA, 20 bp, Artificial Sequence
  Description of Artificial Sequence: Synthetic oligonucleotide
  Target: ATXN2; (-) strand; PAM type: YTN; PAM sequence: TTT
aaagtcatgttaaaatattc

SEQ ID NO: 81988 - DNA, 20 bp, Artificial Sequence
  Description of Artificial Sequence: Synthetic oligonucleotide
  Target: ATXN2; (-) strand; PAM type: YTN; PAM sequence: TTT
taaagtcatgttaaaatatt

SEQ ID NO: 81989 - DNA, 20 bp, Artificial Sequence
  Description of Artificial Sequence: Synthetic oligonucleotide
  Target: ATXN2; (-) strand; PAM type: YTN; PAM sequence: TTT
ttaaagtcatgttaaaatat

SEQ ID NO: 81990 - DNA, 20 bp, Artificial Sequence
  Description of Artificial Sequence: Synthetic oligonucleotide
  Target: ATXN2; (-) strand; PAM type: YTN; PAM sequence: CTT
tttaaagtcatgttaaaata

SEQ ID NO: 81991 - DNA, 20 bp, Artificial Sequence
  Description of Artificial Sequence: Synthetic oligonucleotide
  Target: ATXN2; (-) strand; PAM type: YTN; PAM sequence: TTG
ctttttaaagtcatgttaaa

SEQ ID NO: 81992 - DNA, 20 bp, Artificial Sequence
  Description of Artificial Sequence: Synthetic oligonucleotide
  Target: ATXN2; (-) strand; PAM type: YTN; PAM sequence: TTC
atattgctttttaaagtcat

SEQ ID NO: 81993 - DNA, 20 bp, Artificial Sequence
  Description of Artificial Sequence: Synthetic oligonucleotide
  Target: ATXN2; (-) strand; PAM type: YTN; PAM sequence: TTT
catattgctttttaaagtca

SEQ ID NO: 81994 - DNA, 20 bp, Artificial Sequence
  Description of Artificial Sequence: Synthetic oligonucleotide
  Target: ATXN2; (-) strand; PAM type: YTN; PAM sequence: TTT
tcatattgctttttaaagtc

SEQ ID NO: 81995 - DNA, 20 bp, Artificial Sequence
  Description of Artificial Sequence: Synthetic oligonucleotide
  Target: ATXN2; (-) strand; PAM type: YTN; PAM sequence: TTT
ttcatattgctttttaaagt

SEQ ID NO: 81996 - DNA, 20 bp, Artificial Sequence
  Description of Artificial Sequence: Synthetic oligonucleotide
  Target: ATXN2; (-) strand; PAM type: YTN; PAM sequence: TTG
acgtttttcatattgctttt

SEQ ID NO: 81997 - DNA, 20 bp, Artificial Sequence
  Description of Artificial Sequence: Synthetic oligonucleotide
  Target: ATXN2; (-) strand; PAM type: YTN; PAM sequence: TTC
attgacgtttttcatattgc

SEQ ID NO: 81998 - DNA, 20 bp, Artificial Sequence
  Description of Artificial Sequence: Synthetic oligonucleotide
  Target: ATXN2; (-) strand; PAM type: YTN; PAM sequence: TTT
cattgacgtttttcatattg

SEQ ID NO: 81999 - DNA, 20 bp, Artificial Sequence
  Description of Artificial Sequence: Synthetic oligonucleotide
  Target: ATXN2; (-) strand; PAM type: YTN; PAM sequence: TTT
tcattgacgtttttcatatt

SEQ ID NO: 82000 - DNA, 20 bp, Artificial Sequence
  Description of Artificial Sequence: Synthetic oligonucleotide
  Target: ATXN2; (-) strand; PAM type: YTN; PAM sequence: TTT
ttcattgacgtttttcatat

SEQ ID NO: 82001 - DNA, 20 bp, Artificial Sequence
  Description of Artificial Sequence: Synthetic oligonucleotide
  Target: ATXN2; (-) strand; PAM type: YTN; PAM sequence: CTG
gccaggtcaaatatttttca

SEQ ID NO: 82002 - DNA, 20 bp, Artificial Sequence
  Description of Artificial Sequence: Synthetic oligonucleotide
  Target: ATXN2; (-) strand; PAM type: YTN; PAM sequence: TTA
catgtgtgaggcaccgtggc

SEQ ID NO: 82003 - DNA, 20 bp, Artificial Sequence
  Description of Artificial Sequence: Synthetic oligonucleotide
  Target: ATXN2; (-) strand; PAM type: YTN; PAM sequence: TTA
attacatgtgtgaggcaccg

SEQ ID NO: 82004 - DNA, 20 bp, Artificial Sequence
  Description of Artificial Sequence: Synthetic oligonucleotide
  Target: ATXN2; (-) strand; PAM type: YTN; PAM sequence: TTT
aattacatgtgtgaggcacc

SEQ ID NO: 82005 - DNA, 20 bp, Artificial Sequence
  Description of Artificial Sequence: Synthetic oligonucleotide
  Target: ATXN2; (-) strand; PAM type: YTN; PAM sequence: CTT
taattacatgtgtgaggcac

SEQ ID NO: 82006 - DNA, 20 bp, Artificial Sequence
  Description of Artificial Sequence: Synthetic oligonucleotide
  Target: ATXN2; (-) strand; PAM type: YTN; PAM sequence: TTC
ccaaagtgctttaattacat

SEQ ID NO: 82007 - DNA, 20 bp, Artificial Sequence
  Description of Artificial Sequence: Synthetic oligonucleotide
  Target: ATXN2; (-) strand; PAM type: YTN; PAM sequence: TTT
cccaaagtgctttaattaca

SEQ ID NO: 82008 - DNA, 20 bp, Artificial Sequence
  Description of Artificial Sequence: Synthetic oligonucleotide
  Target: ATXN2; (-) strand; PAM type: YTN; PAM sequence: TTT
tcccaaagtgctttaattac

SEQ ID NO: 82009 - DNA, 20 bp, Artificial Sequence
  Description of Artificial Sequence: Synthetic oligonucleotide
  Target: ATXN2; (-) strand; PAM type: YTN; PAM sequence: CTA
gttttcccaaagtgctttaa

SEQ ID NO: 82010 - DNA, 20 bp, Artificial Sequence
  Description of Artificial Sequence: Synthetic oligonucleotide
  Target: ATXN2; (-) strand; PAM type: YTN; PAM sequence: TTC
aaatgatccacccacctagt

SEQ ID NO: 82011 - DNA, 20 bp, Artificial Sequence
  Description of Artificial Sequence: Synthetic oligonucleotide
  Target: ATXN2; (-) strand; PAM type: YTN; PAM sequence: TTA
aattcaaatgatccacccac

SEQ ID NO: 82012 - DNA, 20 bp, Artificial Sequence
  Description of Artificial Sequence: Synthetic oligonucleotide
  Target: ATXN2; (-) strand; PAM type: YTN; PAM sequence: CTT
aaattcaaatgatccaccca

SEQ ID NO: 82013 - DNA, 20 bp, Artificial Sequence
  Description of Artificial Sequence: Synthetic oligonucleotide
  Target: ATXN2; (-) strand; PAM type: YTN; PAM sequence: CTC
ttaaattcaaatgatccacc

SEQ ID NO: 82014 - DNA, 20 bp, Artificial Sequence
  Description of Artificial Sequence: Synthetic oligonucleotide
  Target: ATXN2; (-) strand; PAM type: YTN; PAM sequence: CTC
aaactcttaaattcaaatga

SEQ ID NO: 82015 - DNA, 20 bp, Artificial Sequence
  Description of Artificial Sequence: Synthetic oligonucleotide
  Target: ATXN2; (-) strand; PAM type: YTN; PAM sequence: CTG
gtctcaaactcttaaattca

SEQ ID NO: 82016 - DNA, 20 bp, Artificial Sequence
  Description of Artificial Sequence: Synthetic oligonucleotide
  Target: ATXN2; (-) strand; PAM type: YTN; PAM sequence: TTG
cccaggctggtctcaaactc

SEQ ID NO: 82017 - DNA, 20 bp, Artificial Sequence
  Description of Artificial Sequence: Synthetic oligonucleotide
  Target: ATXN2; (-) strand; PAM type: YTN; PAM sequence: TTA
gccatgttgcccaggctggt

SEQ ID NO: 82018 - DNA, 20 bp, Artificial Sequence
  Description of Artificial Sequence: Synthetic oligonucleotide
  Target: ATXN2; (-) strand; PAM type: YTN; PAM sequence: TTT
agccatgttgcccaggctgg

SEQ ID NO: 82019 - DNA, 20 bp, Artificial Sequence
  Description of Artificial Sequence: Synthetic oligonucleotide
  Target: ATXN2; (-) strand; PAM type: YTN; PAM sequence: TTG
tagagacagggtttagccat

SEQ ID NO: 82020 - DNA, 20 bp, Artificial Sequence
  Description of Artificial Sequence: Synthetic oligonucleotide
  Target: ATXN2; (-) strand; PAM type: YTN; PAM sequence: TTT
gtagagacagggtttagcca

SEQ ID NO: 82021 - DNA, 20 bp, Artificial Sequence
  Description of Artificial Sequence: Synthetic oligonucleotide
  Target: ATXN2; (-) strand; PAM type: YTN; PAM sequence: TTT
tgtagagacagggtttagcc

SEQ ID NO: 82022 - DNA, 20 bp, Artificial Sequence
  Description of Artificial Sequence: Synthetic oligonucleotide
  Target: ATXN2; (-) strand; PAM type: YTN; PAM sequence: TTG
tatattttgtagagacaggg

SEQ ID NO: 82023 - DNA, 20 bp, Artificial Sequence
  Description of Artificial Sequence: Synthetic oligonucleotide
  Target: ATXN2; (-) strand; PAM type: YTN; PAM sequence: TTT
gtatattttgtagagacagg

SEQ ID NO: 82024 - DNA, 20 bp, Artificial Sequence
  Description of Artificial Sequence: Synthetic oligonucleotide
  Target: ATXN2; (-) strand; PAM type: YTN; PAM sequence: TTT
tgtatattttgtagagacag

SEQ ID NO: 82025 - DNA, 20 bp, Artificial Sequence
  Description of Artificial Sequence: Synthetic oligonucleotide
  Target: ATXN2; (-) strand; PAM type: YTN; PAM sequence: CTT
ttgtatattttgtagagaca

SEQ ID NO: 82026 - DNA, 20 bp, Artificial Sequence
  Description of Artificial Sequence: Synthetic oligonucleotide
  Target: ATXN2; (-) strand; PAM type: YTN; PAM sequence: CTG
gcttttgtatattttgtaga

SEQ ID NO: 82027 - DNA, 20 bp, Artificial Sequence
  Description of Artificial Sequence: Synthetic oligonucleotide
  Target: ATXN2; (-) strand; PAM type: YTN; PAM sequence: CTA
caggtgtatgccaccatgcc

SEQ ID NO: 82028 - DNA, 20 bp, Artificial Sequence
  Description of Artificial Sequence: Synthetic oligonucleotide
  Target: ATXN2; (-) strand; PAM type: YTN; PAM sequence: CTG
gaactacaggtgtatgccac

SEQ ID NO: 82029 - DNA, 20 bp, Artificial Sequence
  Description of Artificial Sequence: Synthetic oligonucleotide
  Target: ATXN2; (-) strand; PAM type: YTN; PAM sequence: CTC
ccgagtagctggaactacag

SEQ ID NO: 82030 - DNA, 20 bp, Artificial Sequence
  Description of Artificial Sequence: Synthetic oligonucleotide
  Target: ATXN2; (-) strand; PAM type: YTN; PAM sequence: CTC
agtctcccgagtagctggaa

SEQ ID NO: 82031 - DNA, 20 bp, Artificial Sequence
  Description of Artificial Sequence: Synthetic oligonucleotide
  Target: ATXN2; (-) strand; PAM type: YTN; PAM sequence: CTA
cctcagtctcccgagtagct

SEQ ID NO: 82032 - DNA, 20 bp, Artificial Sequence
  Description of Artificial Sequence: Synthetic oligonucleotide
  Target: ATXN2; (-) strand; PAM type: YTN; PAM sequence: CTC
ctacctcagtctcccgagta

SEQ ID NO: 82033 - DNA, 20 bp, Artificial Sequence
  Description of Artificial Sequence: Synthetic oligonucleotide
  Target: ATXN2; (-) strand; PAM type: YTN; PAM sequence: CTC
aagcagtcctcctacctcag

SEQ ID NO: 82034 - DNA, 20 bp, Artificial Sequence
  Description of Artificial Sequence: Synthetic oligonucleotide
  Target: ATXN2; (-) strand; PAM type: YTN; PAM sequence: CTG
ggctcaagcagtcctcctac

SEQ ID NO: 82035 - DNA, 20 bp, Artificial Sequence
  Description of Artificial Sequence: Synthetic oligonucleotide
  Target: ATXN2; (-) strand; PAM type: YTN; PAM sequence: CTC
aacatcctgggctcaagcag

SEQ ID NO: 82036 - DNA, 20 bp, Artificial Sequence
  Description of Artificial Sequence: Synthetic oligonucleotide
  Target: ATXN2; (-) strand; PAM type: YTN; PAM sequence: CTG
cagcctcaacatcctgggct

SEQ ID NO: 82037 - DNA, 20 bp, Artificial Sequence
  Description of Artificial Sequence: Synthetic oligonucleotide
  Target: ATXN2; (-) strand; PAM type: YTN; PAM sequence: CTC
actgcagcctcaacatcctg

SEQ ID NO: 82038 - DNA, 20 bp, Artificial Sequence
  Description of Artificial Sequence: Synthetic oligonucleotide
  Target: ATXN2; (-) strand; PAM type: YTN; PAM sequence: TTG
gagtatagtggtatggtcat

SEQ ID NO: 82039 - DNA, 20 bp, Artificial Sequence
  Description of Artificial Sequence: Synthetic oligonucleotide
  Target: ATXN2; (-) strand; PAM type: YTN; PAM sequence: TTG
gccaggttggagtatagtgg

SEQ ID NO: 82040 - DNA, 20 bp, Artificial Sequence
  Description of Artificial Sequence: Synthetic oligonucleotide
  Target: ATXN2; (-) strand; PAM type: YTN; PAM sequence: CTG
ttggccaggttggagtatag

SEQ ID NO: 82041 - DNA, 20 bp, Artificial Sequence
  Description of Artificial Sequence: Synthetic oligonucleotide
  Target: ATXN2; (-) strand; PAM type: YTN; PAM sequence: TTA
ccctgttggccaggttggag

SEQ ID NO: 82042 - DNA, 20 bp, Artificial Sequence
  Description of Artificial Sequence: Synthetic oligonucleotide
  Target: ATXN2; (-) strand; PAM type: YTN; PAM sequence: CTT
accctgttggccaggttgga

SEQ ID NO: 82043 - DNA, 20 bp, Artificial Sequence
  Description of Artificial Sequence: Synthetic oligonucleotide
  Target: ATXN2; (-) strand; PAM type: YTN; PAM sequence: CTG
agtcttaccctgttggccag

SEQ ID NO: 82044 - DNA, 20 bp, Artificial Sequence
  Description of Artificial Sequence: Synthetic oligonucleotide
  Target: ATXN2; (-) strand; PAM type: YTN; PAM sequence: TTG
agactgagtcttaccctgtt

SEQ ID NO: 82045 - DNA, 20 bp, Artificial Sequence
  Description of Artificial Sequence: Synthetic oligonucleotide
  Target: ATXN2; (-) strand; PAM type: YTN; PAM sequence: TTT
gagactgagtcttaccctgt

SEQ ID NO: 82046 - DNA, 20 bp, Artificial Sequence
  Description of Artificial Sequence: Synthetic oligonucleotide
  Target: ATXN2; (-) strand; PAM type: YTN; PAM sequence: TTT
tgagactgagtcttaccctg

SEQ ID NO: 82047 - DNA, 20 bp, Artificial Sequence
  Description of Artificial Sequence: Synthetic oligonucleotide
  Target: ATXN2; (-) strand; PAM type: YTN; PAM sequence: TTT
ttgagactgagtcttaccct

SEQ ID NO: 82048 - DNA, 20 bp, Artificial Sequence
  Description of Artificial Sequence: Synthetic oligonucleotide
  Target: ATXN2; (-) strand; PAM type: YTN; PAM sequence: TTT
tttgagactgagtcttaccc

SEQ ID NO: 82049 - DNA, 20 bp, Artificial Sequence
  Description of Artificial Sequence: Synthetic oligonucleotide
  Target: ATXN2; (-) strand; PAM type: YTN; PAM sequence: TTT
ttttgagactgagtcttacc

SEQ ID NO: 82050 - DNA, 20 bp, Artificial Sequence
  Description of Artificial Sequence: Synthetic oligonucleotide
  Target: ATXN2; (-) strand; PAM type: YTN; PAM sequence: TTT
tttttgagactgagtcttac

SEQ ID NO: 82051 - DNA, 20 bp, Artificial Sequence
  Description of Artificial Sequence: Synthetic oligonucleotide
  Target: ATXN2; (-) strand; PAM type: YTN; PAM sequence: CTT
ttttttgagactgagtctta

SEQ ID NO: 82052 - DNA, 20 bp, Artificial Sequence
  Description of Artificial Sequence: Synthetic oligonucleotide
  Target: ATXN2; (-) strand; PAM type: YTN; PAM sequence: TTC
cttttttttgagactgagtc

SEQ ID NO: 82053 - DNA, 20 bp, Artificial Sequence
  Description of Artificial Sequence: Synthetic oligonucleotide
  Target: ATXN2; (-) strand; PAM type: YTN; PAM sequence: TTT
ccttttttttgagactgagt

SEQ ID NO: 82054 - DNA, 20 bp, Artificial Sequence
  Description of Artificial Sequence: Synthetic oligonucleotide
  Target: ATXN2; (-) strand; PAM type: YTN; PAM sequence: TTA
aatttccttttttttgagac

SEQ ID NO: 82055 - DNA, 20 bp, Artificial Sequence
  Description of Artificial Sequence: Synthetic oligonucleotide
  Target: ATXN2; (-) strand; PAM type: YTN; PAM sequence: TTT
aaatttccttttttttgaga

SEQ ID NO: 82056 - DNA, 20 bp, Artificial Sequence
  Description of Artificial Sequence: Synthetic oligonucleotide
  Target: ATXN2; (-) strand; PAM type: YTN; PAM sequence: TTT
taaatttccttttttttgag

SEQ ID NO: 82057 - DNA, 20 bp, Artificial Sequence
  Description of Artificial Sequence: Synthetic oligonucleotide
  Target: ATXN2; (-) strand; PAM type: YTN; PAM sequence: TTT
ttaaatttccttttttttga

SEQ ID NO: 82058 - DNA, 20 bp, Artificial Sequence
  Description of Artificial Sequence: Synthetic oligonucleotide
  Target: ATXN2; (-) strand; PAM type: YTN; PAM sequence: TTT
tttaaatttccttttttttg

SEQ ID NO: 82059 - DNA, 20 bp, Artificial Sequence
  Description of Artificial Sequence: Synthetic oligonucleotide
  Target: ATXN2; (-) strand; PAM type: YTN; PAM sequence: TTT
ttttaaatttcctttttttt

SEQ ID NO: 82060 - DNA, 20 bp, Artificial Sequence
  Description of Artificial Sequence: Synthetic oligonucleotide
  Target: ATXN2; (-) strand; PAM type: YTN; PAM sequence: TTT
tttttaaatttccttttttt

SEQ ID NO: 82061 - DNA, 20 bp, Artificial Sequence
  Description of Artificial Sequence: Synthetic oligonucleotide
  Target: ATXN2; (-) strand; PAM type: YTN; PAM sequence: TTT
ttttttaaatttcctttttt

SEQ ID NO: 82062 - DNA, 20 bp, Artificial Sequence
  Description of Artificial Sequence: Synthetic oligonucleotide
  Target: ATXN2; (-) strand; PAM type: YTN; PAM sequence: TTG
ccaatgatcagttttttttt

SEQ ID NO: 82063 - DNA, 20 bp, Artificial Sequence
  Description of Artificial Sequence: Synthetic oligonucleotide
  Target: ATXN2; (-) strand; PAM type: YTN; PAM sequence: TTG
aacagtgttgccaatgatca

SEQ ID NO: 82064 - DNA, 20 bp, Artificial Sequence
  Description of Artificial Sequence: Synthetic oligonucleotide
  Target: ATXN2; (-) strand; PAM type: YTN; PAM sequence: TTA
ttgaacagtgttgccaatga

SEQ ID NO: 82065 - DNA, 20 bp, Artificial Sequence
  Description of Artificial Sequence: Synthetic oligonucleotide
  Target: ATXN2; (-) strand; PAM type: YTN; PAM sequence: TTT
attgaacagtgttgccaatg

SEQ ID NO: 82066 - DNA, 20 bp, Artificial Sequence
  Description of Artificial Sequence: Synthetic oligonucleotide
  Target: ATXN2; (-) strand; PAM type: YTN; PAM sequence: CTT
tattgaacagtgttgccaat

SEQ ID NO: 82067 - DNA, 20 bp, Artificial Sequence
  Description of Artificial Sequence: Synthetic oligonucleotide
  Target: ATXN2; (-) strand; PAM type: YTN; PAM sequence: TTG
agaggctttattgaacagtg

SEQ ID NO: 82068 - DNA, 20 bp, Artificial Sequence
  Description of Artificial Sequence: Synthetic oligonucleotide
  Target: ATXN2; (-) strand; PAM type: YTN; PAM sequence: CTT
gagaggctttattgaacagt

SEQ ID NO: 82069 - DNA, 20 bp, Artificial Sequence
  Description of Artificial Sequence: Synthetic oligonucleotide
  Target: ATXN2; (-) strand; PAM type: YTN; PAM sequence: TTG
ccttgagaggctttattgaa

SEQ ID NO: 82070 - DNA, 20 bp, Artificial Sequence
  Description of Artificial Sequence: Synthetic oligonucleotide
  Target: ATXN2; (-) strand; PAM type: YTN; PAM sequence: CTG
aaaccattgccttgagaggc

SEQ ID NO: 82071 - DNA, 20 bp, Artificial Sequence
  Description of Artificial Sequence: Synthetic oligonucleotide
  Target: ATXN2; (-) strand; PAM type: YTN; PAM sequence: CTC
ctgaaaccattgccttgaga

SEQ ID NO: 82072 - DNA, 20 bp, Artificial Sequence
  Description of Artificial Sequence: Synthetic oligonucleotide
  Target: ATXN2; (-) strand; PAM type: YTN; PAM sequence: TTG
gtctcctgaaaccattgcct

SEQ ID NO: 82073 - DNA, 20 bp, Artificial Sequence
  Description of Artificial Sequence: Synthetic oligonucleotide
  Target: ATXN2; (-) strand; PAM type: YTN; PAM sequence: TTA
gaatgttggtctcctgaaac

SEQ ID NO: 82074 - DNA, 20 bp, Artificial Sequence
  Description of Artificial Sequence: Synthetic oligonucleotide
  Target: ATXN2; (-) strand; PAM type: YTN; PAM sequence: TTT
agaatgttggtctcctgaaa

SEQ ID NO: 82075 - DNA, 20 bp, Artificial Sequence
  Description of Artificial Sequence: Synthetic oligonucleotide
  Target: ATXN2; (-) strand; PAM type: YTN; PAM sequence: CTT
tagaatgttggtctcctgaa

SEQ ID NO: 82076 - DNA, 20 bp, Artificial Sequence
  Description of Artificial Sequence: Synthetic oligonucleotide
  Target: ATXN2; (-) strand; PAM type: YTN; PAM sequence: CTG
tatcagaactttagaatgtt

SEQ ID NO: 82077 - DNA, 20 bp, Artificial Sequence
  Description of Artificial Sequence: Synthetic oligonucleotide
  Target: ATXN2; (-) strand; PAM type: YTN; PAM sequence: TTA
actgtatcagaactttagaa

SEQ ID NO: 82078 - DNA, 20 bp, Artificial Sequence
  Description of Artificial Sequence: Synthetic oligonucleotide
  Target: ATXN2; (-) strand; PAM type: YTN; PAM sequence: TTA
ttaactgtatcagaacttta

SEQ ID NO: 82079 - DNA, 20 bp, Artificial Sequence
  Description of Artificial Sequence: Synthetic oligonucleotide
  Target: ATXN2; (-) strand; PAM type: YTN; PAM sequence: TTT
attaactgtatcagaacttt

SEQ ID NO: 82080 - DNA, 20 bp, Artificial Sequence
  Description of Artificial Sequence: Synthetic oligonucleotide
  Target: ATXN2; (-) strand; PAM type: YTN; PAM sequence: TTT
tattaactgtatcagaactt

SEQ ID NO: 82081 - DNA, 20 bp, Artificial Sequence
  Description of Artificial Sequence: Synthetic oligonucleotide
  Target: ATXN2; (-) strand; PAM type: YTN; PAM sequence: TTT
ttattaactgtatcagaact

SEQ ID NO: 82082 - DNA, 20 bp, Artificial Sequence
  Description of Artificial Sequence: Synthetic oligonucleotide
  Target: ATXN2; (-) strand; PAM type: YTN; PAM sequence: TTA
tttttattaactgtatcaga

SEQ ID NO: 82083 - DNA, 20 bp, Artificial Sequence
  Description of Artificial Sequence: Synthetic oligonucleotide
  Target: ATXN2; (-) strand; PAM type: YTN; PAM sequence: TTT
atttttattaactgtatcag

SEQ ID NO: 82084 - DNA, 20 bp, Artificial Sequence
  Description of Artificial Sequence: Synthetic oligonucleotide
  Target: ATXN2; (-) strand; PAM type: YTN; PAM sequence: TTG
tcggcaatataagtgaacgt

SEQ ID NO: 82085 - DNA, 20 bp, Artificial Sequence
  Description of Artificial Sequence: Synthetic oligonucleotide
  Target: ATXN2; (-) strand; PAM type: YTN; PAM sequence: CTT
gtcggcaatataagtgaacg

SEQ ID NO: 82086 - DNA, 20 bp, Artificial Sequence
  Description of Artificial Sequence: Synthetic oligonucleotide
  Target: ATXN2; (-) strand; PAM type: YTN; PAM sequence: TTG
tggtatgaggcttgtcggca

SEQ ID NO: 82087 - DNA, 20 bp, Artificial Sequence
  Description of Artificial Sequence: Synthetic oligonucleotide
  Target: ATXN2; (-) strand; PAM type: YTN; PAM sequence: TTA
gttgtggtatgaggcttgtc

SEQ ID NO: 82088 - DNA, 20 bp, Artificial Sequence
  Description of Artificial Sequence: Synthetic oligonucleotide
  Target: ATXN2; (-) strand; PAM type: YTN; PAM sequence: CTC
attagttgtggtatgaggct

SEQ ID NO: 82089 - DNA, 20 bp, Artificial Sequence
  Description of Artificial Sequence: Synthetic oligonucleotide
  Target: ATXN2; (-) strand; PAM type: YTN; PAM sequence: TTG
taaaactcattagttgtggt

SEQ ID NO: 82090 - DNA, 20 bp, Artificial Sequence
  Description of Artificial Sequence: Synthetic oligonucleotide
  Target: ATXN2; (-) strand; PAM type: YTN; PAM sequence: TTT
gtaaaactcattagttgtgg

SEQ ID NO: 82091 - DNA, 20 bp, Artificial Sequence
  Description of Artificial Sequence: Synthetic oligonucleotide
  Target: ATXN2; (-) strand; PAM type: YTN; PAM sequence: CTT
tgtaaaactcattagttgtg

SEQ ID NO: 82092 - DNA, 20 bp, Artificial Sequence
  Description of Artificial Sequence: Synthetic oligonucleotide
  Target: ATXN2; (-) strand; PAM type: YTN; PAM sequence: CTA
taatgaagtctttgtaaaac

SEQ ID NO: 82093 - DNA, 20 bp, Artificial Sequence
  Description of Artificial Sequence: Synthetic oligonucleotide
  Target: ATXN2; (-) strand; PAM type: YTN; PAM sequence: TTC
tataatgaagtctttgtaaa

SEQ ID NO: 82094 - DNA, 20 bp, Artificial Sequence
  Description of Artificial Sequence: Synthetic oligonucleotide
  Target: ATXN2; (-) strand; PAM type: YTN; PAM sequence: TTC
attctataatgaagtctttg

SEQ ID NO: 82095 - DNA, 20 bp, Artificial Sequence
  Description of Artificial Sequence: Synthetic oligonucleotide
  Target: ATXN2; (-) strand; PAM type: YTN; PAM sequence: TTT
cattctataatgaagtcttt

SEQ ID NO: 82096 - DNA, 20 bp, Artificial Sequence
  Description of Artificial Sequence: Synthetic oligonucleotide
  Target: ATXN2; (-) strand; PAM type: YTN; PAM sequence: TTG
ggaatgtaataaaatttcat

SEQ ID NO: 82097 - DNA, 20 bp, Artificial Sequence
  Description of Artificial Sequence: Synthetic oligonucleotide
  Target: ATXN2; (-) strand; PAM type: YTN; PAM sequence: TTT
gggaatgtaataaaatttca

SEQ ID NO: 82098 - DNA, 20 bp, Artificial Sequence
  Description of Artificial Sequence: Synthetic oligonucleotide
  Target: ATXN2; (-) strand; PAM type: YTN; PAM sequence: TTT
tgggaatgtaataaaatttc

SEQ ID NO: 82099 - DNA, 20 bp, Artificial Sequence
  Description of Artificial Sequence: Synthetic oligonucleotide
  Target: ATXN2; (-) strand; PAM type: YTN; PAM sequence: CTA
cattttgggaatgtaataaa

SEQ ID NO: 82100 - DNA, 20 bp, Artificial Sequence
  Description of Artificial Sequence: Synthetic oligonucleotide
  Target: ATXN2; (-) strand; PAM type: YTN; PAM sequence: CTA
actacattttgggaatgtaa

SEQ ID NO: 82101 - DNA, 20 bp, Artificial Sequence
  Description of Artificial Sequence: Synthetic oligonucleotide
  Target: ATXN2; (-) strand; PAM type: YTN; PAM sequence: TTA
atagctaactacattttggg

SEQ ID NO: 82102 - DNA, 20 bp, Artificial Sequence
  Description of Artificial Sequence: Synthetic oligonucleotide
  Target: ATXN2; (-) strand; PAM type: YTN; PAM sequence: TTC
gtgccatgattaatagctaa

SEQ ID NO: 82103 - DNA, 20 bp, Artificial Sequence
  Description of Artificial Sequence: Synthetic oligonucleotide
  Target: ATXN2; (-) strand; PAM type: YTN; PAM sequence: TTT
cgtgccatgattaatagcta

SEQ ID NO: 82104 - DNA, 20 bp, Artificial Sequence
  Description of Artificial Sequence: Synthetic oligonucleotide
  Target: ATXN2; (-) strand; PAM type: YTN; PAM sequence: CTG
tgtccagcccgaaaatgtca

SEQ ID NO: 82105 - DNA, 20 bp, Artificial Sequence
  Description of Artificial Sequence: Synthetic oligonucleotide
  Target: ATXN2; (-) strand; PAM type: YTN; PAM sequence: TTA
caggtgtgagccactgtgtc

SEQ ID NO: 82106 - DNA, 20 bp, Artificial Sequence
  Description of Artificial Sequence: Synthetic oligonucleotide
  Target: ATXN2; (-) strand; PAM type: YTN; PAM sequence: CTG
gtgttacaggtgtgagccac

SEQ ID NO: 82107 - DNA, 20 bp, Artificial Sequence
  Description of Artificial Sequence: Synthetic oligonucleotide
  Target: ATXN2; (-) strand; PAM type: YTN; PAM sequence: CTA
acatgctggtgttacaggtg

SEQ ID NO: 82108 - DNA, 20 bp, Artificial Sequence
  Description of Artificial Sequence: Synthetic oligonucleotide
  Target: ATXN2; (-) strand; PAM type: YTN; PAM sequence: CTC
ctaacatgctggtgttacag

SEQ ID NO: 82109 - DNA, 20 bp, Artificial Sequence
  Description of Artificial Sequence: Synthetic oligonucleotide
  Target: ATXN2; (-) strand; PAM type: YTN; PAM sequence: TTA
ggcctcctaacatgctggtg

SEQ ID NO: 82110 - DNA, 20 bp, Artificial Sequence
  Description of Artificial Sequence: Synthetic oligonucleotide
  Target: ATXN2; (-) strand; PAM type: YTN; PAM sequence: CTT
aggcctcctaacatgctggt

SEQ ID NO: 82111 - DNA, 20 bp, Artificial Sequence
  Description of Artificial Sequence: Synthetic oligonucleotide
  Target: ATXN2; (-) strand; PAM type: YTN; PAM sequence: CTC
gagtgatccaccccacttag

SEQ ID NO: 82112 - DNA, 20 bp, Artificial Sequence
  Description of Artificial Sequence: Synthetic oligonucleotide
  Target: ATXN2; (-) strand; PAM type: YTN; PAM sequence: CTC
atggcctcgagtgatccacc

SEQ ID NO: 82113 - DNA, 20 bp, Artificial Sequence
  Description of Artificial Sequence: Synthetic oligonucleotide
  Target: ATXN2; (-) strand; PAM type: YTN; PAM sequence: TTG
aactcatggcctcgagtgat

SEQ ID NO: 82114 - DNA, 20 bp, Artificial Sequence
  Description of Artificial Sequence: Synthetic oligonucleotide
  Target: ATXN2; (-) strand; PAM type: YTN; PAM sequence: CTT
gaactcatggcctcgagtga

SEQ ID NO: 82115 - DNA, 20 bp, Artificial Sequence
  Description of Artificial Sequence: Synthetic oligonucleotide
  Target: ATXN2; (-) strand; PAM type: YTN; PAM sequence: TTG
atcttgaactcatggcctcg

SEQ ID NO: 82116 - DNA, 20 bp, Artificial Sequence
  Description of Artificial Sequence: Synthetic oligonucleotide
  Target: ATXN2; (-) strand; PAM type: YTN; PAM sequence: TTG
ccatgttgatcttgaactca

SEQ ID NO: 82117 - DNA, 20 bp, Artificial Sequence
  Description of Artificial Sequence: Synthetic oligonucleotide
  Target: ATXN2; (-) strand; PAM type: YTN; PAM sequence: TTT
gccatgttgatcttgaactc

SEQ ID NO: 82118 - DNA, 20 bp, Artificial Sequence
  Description of Artificial Sequence: Synthetic oligonucleotide
  Target: ATXN2; (-) strand; PAM type: YTN; PAM sequence: TTT
tgccatgttgatcttgaact

SEQ ID NO: 82119 - DNA, 20 bp, Artificial Sequence
  Description of Artificial Sequence: Synthetic oligonucleotide
  Target: ATXN2; (-) strand; PAM type: YTN; PAM sequence: TTC
agtagatgtggagttttgcc

SEQ ID NO: 82120 - DNA, 20 bp, Artificial Sequence
  Description of Artificial Sequence: Synthetic oligonucleotide
  Target: ATXN2; (-) strand; PAM type: YTN; PAM sequence: TTT
cagtagatgtggagttttgc

SEQ ID NO: 82121 - DNA, 20 bp, Artificial Sequence
  Description of Artificial Sequence: Synthetic oligonucleotide
  Target: ATXN2; (-) strand; PAM type: YTN; PAM sequence: TTT
tcagtagatgtggagttttg

SEQ ID NO: 82122 - DNA, 20 bp, Artificial Sequence
  Description of Artificial Sequence: Synthetic oligonucleotide
  Target: ATXN2; (-) strand; PAM type: YTN; PAM sequence: TTG
tattttcagtagatgtggag

SEQ ID NO: 82123 - DNA, 20 bp, Artificial Sequence
  Description of Artificial Sequence: Synthetic oligonucleotide
  Target: ATXN2; (-) strand; PAM type: YTN; PAM sequence: TTT
gtattttcagtagatgtgga

SEQ ID NO: 82124 - DNA, 20 bp, Artificial Sequence
  Description of Artificial Sequence: Synthetic oligonucleotide
  Target: ATXN2; (-) strand; PAM type: YTN; PAM sequence: TTT
tgtattttcagtagatgtgg

SEQ ID NO: 82125 - DNA, 20 bp, Artificial Sequence
  Description of Artificial Sequence: Synthetic oligonucleotide
  Target: ATXN2; (-) strand; PAM type: YTN; PAM sequence: TTT
ttgtattttcagtagatgtg

SEQ ID NO: 82126 - DNA, 20 bp, Artificial Sequence
  Description of Artificial Sequence: Synthetic oligonucleotide
  Target: ATXN2; (-) strand; PAM type: YTN; PAM sequence: TTT
tttgtattttcagtagatgt

SEQ ID NO: 82127 - DNA, 20 bp, Artificial Sequence
  Description of Artificial Sequence: Synthetic oligonucleotide
  Target: ATXN2; (-) strand; PAM type: YTN; PAM sequence: TTT
ttttgtattttcagtagatg

SEQ ID NO: 82128 - DNA, 20 bp, Artificial Sequence
  Description of Artificial Sequence: Synthetic oligonucleotide
  Target: ATXN2; (-) strand; PAM type: YTN; PAM sequence: CTA
gtttttttgtattttcagta

SEQ ID NO: 82129 - DNA, 20 bp, Artificial Sequence
  Description of Artificial Sequence: Synthetic oligonucleotide
  Target: ATXN2; (-) strand; PAM type: YTN; PAM sequence: CTG
cctagtttttttgtattttc

SEQ ID NO: 82130 - DNA, 20 bp, Artificial Sequence
  Description of Artificial Sequence: Synthetic oligonucleotide
  Target: ATXN2; (-) strand; PAM type: YTN; PAM sequence: CTG
gtgcgccccacagtgcctgc

SEQ ID NO: 82131 - DNA, 20 bp, Artificial Sequence
  Description of Artificial Sequence: Synthetic oligonucleotide
  Target: ATXN2; (-) strand; PAM type: YTN; PAM sequence: CTA
ctggtgcgccccacagtgcc

SEQ ID NO: 82132 - DNA, 20 bp, Artificial Sequence
  Description of Artificial Sequence: Synthetic oligonucleotide
  Target: ATXN2; (-) strand; PAM type: YTN; PAM sequence: TTG
gaactactggtgcgccccac

SEQ ID NO: 82133 - DNA, 20 bp, Artificial Sequence
  Description of Artificial Sequence: Synthetic oligonucleotide
  Target: ATXN2; (-) strand; PAM type: YTN; PAM sequence: CTC
ccaagtagttggaactactg

SEQ ID NO: 82134 - DNA, 20 bp, Artificial Sequence
  Description of Artificial Sequence: Synthetic oligonucleotide
  Target: ATXN2; (-) strand; PAM type: YTN; PAM sequence: CTC
agcctcccaagtagttggaa

SEQ ID NO: 82135 - DNA, 20 bp, Artificial Sequence
  Description of Artificial Sequence: Synthetic oligonucleotide
  Target: ATXN2; (-) strand; PAM type: YTN; PAM sequence: CTC
ccacctcagcctcccaagta

SEQ ID NO: 82136 - DNA, 20 bp, Artificial Sequence
  Description of Artificial Sequence: Synthetic oligonucleotide
  Target: ATXN2; (-) strand; PAM type: YTN; PAM sequence: TTC
aagccatcctcccacctcag

SEQ ID NO: 82137 - DNA, 20 bp, Artificial Sequence
  Description of Artificial Sequence: Synthetic oligonucleotide
  Target: ATXN2; (-) strand; PAM type: YTN; PAM sequence: CTC
ccgggttcaagccatcctcc

SEQ ID NO: 82138 - DNA, 20 bp, Artificial Sequence
  Description of Artificial Sequence: Synthetic oligonucleotide
  Target: ATXN2; (-) strand; PAM type: YTN; PAM sequence: CTG
tctcccgggttcaagccatc

SEQ ID NO: 82139 - DNA, 20 bp, Artificial Sequence
  Description of Artificial Sequence: Synthetic oligonucleotide
  Target: ATXN2; (-) strand; PAM type: YTN; PAM sequence: CTC
tgtctcccgggttcaagcca

SEQ ID NO: 82140 - DNA, 20 bp, Artificial Sequence
  Description of Artificial Sequence: Synthetic oligonucleotide
  Target: ATXN2; (-) strand; PAM type: YTN; PAM sequence: CTG
caacctctgtctcccgggtt

SEQ ID NO: 82141 - DNA, 20 bp, Artificial Sequence
  Description of Artificial Sequence: Synthetic oligonucleotide
  Target: ATXN2; (-) strand; PAM type: YTN; PAM sequence: CTC
actgcaacctctgtctcccg

SEQ ID NO: 82142 - DNA, 20 bp, Artificial Sequence
  Description of Artificial Sequence: Synthetic oligonucleotide
  Target: ATXN2; (-) strand; PAM type: YTN; PAM sequence: TTG
caaatacggctcactgcaac

SEQ ID NO: 82143 - DNA, 20 bp, Artificial Sequence
  Description of Artificial Sequence: Synthetic oligonucleotide
  Target: ATXN2; (-) strand; PAM type: YTN; PAM sequence: CTG
gagtgcagtgttgcaaatac

SEQ ID NO: 82144 - DNA, 20 bp, Artificial Sequence
  Description of Artificial Sequence: Synthetic oligonucleotide
  Target: ATXN2; (-) strand; PAM type: YTN; PAM sequence: CTA
aggctggagtgcagtgttgc

SEQ ID NO: 82145 - DNA, 20 bp, Artificial Sequence
  Description of Artificial Sequence: Synthetic oligonucleotide
  Target: ATXN2; (-) strand; PAM type: YTN; PAM sequence: TTG
ctaaggctggagtgcagtgt

SEQ ID NO: 82146 - DNA, 20 bp, Artificial Sequence
  Description of Artificial Sequence: Synthetic oligonucleotide
  Target: ATXN2; (-) strand; PAM type: YTN; PAM sequence: CTG
ttgctaaggctggagtgcag

SEQ ID NO: 82147 - DNA, 20 bp, Artificial Sequence
  Description of Artificial Sequence: Synthetic oligonucleotide
  Target: ATXN2; (-) strand; PAM type: YTN; PAM sequence: CTC
tgttgctaaggctggagtgc

SEQ ID NO: 82148 - DNA, 20 bp, Artificial Sequence
  Description of Artificial Sequence: Synthetic oligonucleotide
  Target: ATXN2; (-) strand; PAM type: YTN; PAM sequence: CTG
gctctgttgctaaggctgga

SEQ ID NO: 82149 - DNA, 20 bp, Artificial Sequence
  Description of Artificial Sequence: Synthetic oligonucleotide
  Target: ATXN2; (-) strand; PAM type: YTN; PAM sequence: TTG
tgataggatctggctctgtt

SEQ ID NO: 82150 - DNA, 20 bp, Artificial Sequence
  Description of Artificial Sequence: Synthetic oligonucleotide
  Target: ATXN2; (-) strand; PAM type: YTN; PAM sequence: TTT
gtgataggatctggctctgt

SEQ ID NO: 82151 - DNA, 20 bp, Artificial Sequence
  Description of Artificial Sequence: Synthetic oligonucleotide
  Target: ATXN2; (-) strand; PAM type: YTN; PAM sequence: TTT
tgtgataggatctggctctg

SEQ ID NO: 82152 - DNA, 20 bp, Artificial Sequence
  Description of Artificial Sequence: Synthetic oligonucleotide
  Target: ATXN2; (-) strand; PAM type: YTN; PAM sequence: TTT
ttgtgataggatctggctct

SEQ ID NO: 82153 - DNA, 20 bp, Artificial Sequence
  Description of Artificial Sequence: Synthetic oligonucleotide
  Target: ATXN2; (-) strand; PAM type: YTN; PAM sequence: TTA
tttttgtgataggatctggc

SEQ ID NO: 82154 - DNA, 20 bp, Artificial Sequence
  Description of Artificial Sequence: Synthetic oligonucleotide
  Target: ATXN2; (-) strand; PAM type: YTN; PAM sequence: TTT
atttttgtgataggatctgg

SEQ ID NO: 82155 - DNA, 20 bp, Artificial Sequence
  Description of Artificial Sequence: Synthetic oligonucleotide
  Target: ATXN2; (-) strand; PAM type: YTN; PAM sequence: TTA
tttatttttgtgataggatc

SEQ ID NO: 82156 - DNA, 20 bp, Artificial Sequence
  Description of Artificial Sequence: Synthetic oligonucleotide
  Target: ATXN2; (-) strand; PAM type: YTN; PAM sequence: TTT
atttatttttgtgataggat

SEQ ID NO: 82157 - DNA, 20 bp, Artificial Sequence
  Description of Artificial Sequence: Synthetic oligonucleotide
  Target: ATXN2; (-) strand; PAM type: YTN; PAM sequence: TTA
tttatttatttttgtgatag

SEQ ID NO: 82158 - DNA, 20 bp, Artificial Sequence
  Description of Artificial Sequence: Synthetic oligonucleotide
  Target: ATXN2; (-) strand; PAM type: YTN; PAM sequence: TTT
atttatttatttttgtgata

SEQ ID NO: 82159 - DNA, 20 bp, Artificial Sequence
  Description of Artificial Sequence: Synthetic oligonucleotide
  Target: ATXN2; (-) strand; PAM type: YTN; PAM sequence: TTA
tttatttatttatttttgtg

SEQ ID NO: 82160 - DNA, 20 bp, Artificial Sequence
  Description of Artificial Sequence: Synthetic oligonucleotide
  Target: ATXN2; (-) strand; PAM type: YTN; PAM sequence: TTT
atttatttatttatttttgt

SEQ ID NO: 82161 - DNA, 20 bp, Artificial Sequence
  Description of Artificial Sequence: Synthetic oligonucleotide
  Target: ATXN2; (-) strand; PAM type: YTN; PAM sequence: TTA
tttatttatttatttatttt

SEQ ID NO: 82162 - DNA, 20 bp, Artificial Sequence
  Description of Artificial Sequence: Synthetic oligonucleotide
  Target: ATXN2; (-) strand; PAM type: YTN; PAM sequence: TTT
atttatttatttatttattt

SEQ ID NO: 82163 - DNA, 20 bp, Artificial Sequence
  Description of Artificial Sequence: Synthetic oligonucleotide
  Target: ATXN2; (-) strand; PAM type: YTN; PAM sequence: TTA
tttatttatttatttattta

SEQ ID NO: 82164 - DNA, 20 bp, Artificial Sequence
  Description of Artificial Sequence: Synthetic oligonucleotide
  Target: ATXN2; (-) strand; PAM type: YTN; PAM sequence: TTT
atttatttatttatttattt

SEQ ID NO: 82165 - DNA, 20 bp, Artificial Sequence
  Description of Artificial Sequence: Synthetic oligonucleotide
  Target: ATXN2; (-) strand; PAM type: YTN; PAM sequence: TTA
tttatttatttatttattta

SEQ ID NO: 82166 - DNA, 20 bp, Artificial Sequence
  Description of Artificial Sequence: Synthetic oligonucleotide
  Target: ATXN2; (-) strand; PAM type: YTN; PAM sequence: TTT
atttatttatttatttattt

SEQ ID NO: 82167 - DNA, 20 bp, Artificial Sequence
  Description of Artificial Sequence: Synthetic oligonucleotide
  Target: ATXN2; (-) strand; PAM type: YTN; PAM sequence: TTA
tttatttatttatttattta

SEQ ID NO: 82168 - DNA, 20 bp, Artificial Sequence
  Description of Artificial Sequence: Synthetic oligonucleotide
  Target: ATXN2; (-) strand; PAM type: YTN; PAM sequence: TTT
atttatttatttatttattt

SEQ ID NO: 82169 - DNA, 20 bp, Artificial Sequence
  Description of Artificial Sequence: Synthetic oligonucleotide
  Target: ATXN2; (-) strand; PAM type: YTN; PAM sequence: TTT
tatttatttatttatttatt

SEQ ID NO: 82170 - DNA, 20 bp, Artificial Sequence
  Description of Artificial Sequence: Synthetic oligonucleotide
  Target: ATXN2; (-) strand; PAM type: YTN; PAM sequence: TTG
ttttatttatttatttattt

SEQ ID NO: 82171 - DNA, 20 bp, Artificial Sequence
  Description of Artificial Sequence: Synthetic oligonucleotide
  Target: ATXN2; (-) strand; PAM type: YTN; PAM sequence: TTT
gttttatttatttatttatt

SEQ ID NO: 82172 - DNA, 20 bp, Artificial Sequence
  Description of Artificial Sequence: Synthetic oligonucleotide
  Target: ATXN2; (-) strand; PAM type: YTN; PAM sequence: TTA
caatgtcaatttgttttatt

SEQ ID NO: 82173 - DNA, 20 bp, Artificial Sequence
  Description of Artificial Sequence: Synthetic oligonucleotide
  Target: ATXN2; (-) strand; PAM type: YTN; PAM sequence: TTT
acaatgtcaatttgttttat

SEQ ID NO: 82174 - DNA, 20 bp, Artificial Sequence
  Description of Artificial Sequence: Synthetic oligonucleotide
  Target: ATXN2; (-) strand; PAM type: YTN; PAM sequence: CTT
tacaatgtcaatttgtttta

SEQ ID NO: 82175 - DNA, 20 bp, Artificial Sequence
  Description of Artificial Sequence: Synthetic oligonucleotide
  Target: ATXN2; (-) strand; PAM type: YTN; PAM sequence: TTG
tgtcaagtgactttacaatg

SEQ ID NO: 82176 - DNA, 20 bp, Artificial Sequence
  Description of Artificial Sequence: Synthetic oligonucleotide
  Target: ATXN2; (-) strand; PAM type: YTN; PAM sequence: CTG
aagttgtgtcaagtgacttt

SEQ ID NO: 82177 - DNA, 20 bp, Artificial Sequence
  Description of Artificial Sequence: Synthetic oligonucleotide
  Target: ATXN2; (-) strand; PAM type: YTN; PAM sequence: TTA
accctgaagttgtgtcaagt

SEQ ID NO: 82178 - DNA, 20 bp, Artificial Sequence
  Description of Artificial Sequence: Synthetic oligonucleotide
  Target: ATXN2; (-) strand; PAM type: YTN; PAM sequence: TTT
aaccctgaagttgtgtcaag

SEQ ID NO: 82179 - DNA, 20 bp, Artificial Sequence
  Description of Artificial Sequence: Synthetic oligonucleotide
  Target: ATXN2; (-) strand; PAM type: YTN; PAM sequence: TTT
taaccctgaagttgtgtcaa

SEQ ID NO: 82180 - DNA, 20 bp, Artificial Sequence
  Description of Artificial Sequence: Synthetic oligonucleotide
  Target: ATXN2; (-) strand; PAM type: YTN; PAM sequence: TTG
taattttaaccctgaagttg

SEQ ID NO: 82181 - DNA, 20 bp, Artificial Sequence
  Description of Artificial Sequence: Synthetic oligonucleotide
  Target: ATXN2; (-) strand; PAM type: YTN; PAM sequence: CTT
gtaattttaaccctgaagtt

SEQ ID NO: 82182 - DNA, 20 bp, Artificial Sequence
  Description of Artificial Sequence: Synthetic oligonucleotide
  Target: ATXN2; (-) strand; PAM type: YTN; PAM sequence: TTG
cttgtaattttaaccctgaa

SEQ ID NO: 82183 - DNA, 20 bp, Artificial Sequence
  Description of Artificial Sequence: Synthetic oligonucleotide
  Target: ATXN2; (-) strand; PAM type: YTN; PAM sequence: TTA
catagattgcttgtaatttt

SEQ ID NO: 82184 - DNA, 20 bp, Artificial Sequence
  Description of Artificial Sequence: Synthetic oligonucleotide
  Target: ATXN2; (-) strand; PAM type: YTN; PAM sequence: CTT
acatagattgcttgtaattt

SEQ ID NO: 82185 - DNA, 20 bp, Artificial Sequence
  Description of Artificial Sequence: Synthetic oligonucleotide
  Target: ATXN2; (-) strand; PAM type: YTN; PAM sequence: TTC
ttacatagattgcttgtaat

SEQ ID NO: 82186 - DNA, 20 bp, Artificial Sequence
  Description of Artificial Sequence: Synthetic oligonucleotide
  Target: ATXN2; (-) strand; PAM type: YTN; PAM sequence: TTA
aagattcttacatagattgc

SEQ ID NO: 82187 - DNA, 20 bp, Artificial Sequence
  Description of Artificial Sequence: Synthetic oligonucleotide
  Target: ATXN2; (-) strand; PAM type: YTN; PAM sequence: TTT
aaagattcttacatagattg

SEQ ID NO: 82188 - DNA, 20 bp, Artificial Sequence
  Description of Artificial Sequence: Synthetic oligonucleotide
  Target: ATXN2; (-) strand; PAM type: YTN; PAM sequence: TTA
acatttaaagattcttacat

SEQ ID NO: 82189 - DNA, 20 bp, Artificial Sequence
  Description of Artificial Sequence: Synthetic oligonucleotide
  Target: ATXN2; (-) strand; PAM type: YTN; PAM sequence: CTC
attaacatttaaagattctt

SEQ ID NO: 82190 - DNA, 20 bp, Artificial Sequence
  Description of Artificial Sequence: Synthetic oligonucleotide
  Target: ATXN2; (-) strand; PAM type: YTN; PAM sequence: TTC
tcattaacatttaaagattc

SEQ ID NO: 82191 - DNA, 20 bp, Artificial Sequence
  Description of Artificial Sequence: Synthetic oligonucleotide
  Target: ATXN2; (-) strand; PAM type: YTN; PAM sequence: TTG
aaattctcattaacatttaa

SEQ ID NO: 82192 - DNA, 20 bp, Artificial Sequence
  Description of Artificial Sequence: Synthetic oligonucleotide
  Target: ATXN2; (-) strand; PAM type: YTN; PAM sequence: TTT
gaaattctcattaacattta

SEQ ID NO: 82193 - DNA, 20 bp, Artificial Sequence
  Description of Artificial Sequence: Synthetic oligonucleotide
  Target: ATXN2; (-) strand; PAM type: YTN; PAM sequence: TTC
atgtgaaaatttgaaattct

SEQ ID NO: 82194 - DNA, 20 bp, Artificial Sequence
  Description of Artificial Sequence: Synthetic oligonucleotide
  Target: ATXN2; (-) strand; PAM type: YTN; PAM sequence: TTG
cattcatgtgaaaatttgaa

SEQ ID NO: 82195 - DNA, 20 bp, Artificial Sequence
  Description of Artificial Sequence: Synthetic oligonucleotide
  Target: ATXN2; (-) strand; PAM type: YTN; PAM sequence: TTT
gcattcatgtgaaaatttga

SEQ ID NO: 82196 - DNA, 20 bp, Artificial Sequence
  Description of Artificial Sequence: Synthetic oligonucleotide
  Target: ATXN2; (-) strand; PAM type: YTN; PAM sequence: TTG
tgtttgcattcatgtgaaaa

SEQ ID NO: 82197 - DNA, 20 bp, Artificial Sequence
  Description of Artificial Sequence: Synthetic oligonucleotide
  Target: ATXN2; (-) strand; PAM type: YTN; PAM sequence: TTT
gtgtttgcattcatgtgaaa

SEQ ID NO: 82198 - DNA, 20 bp, Artificial Sequence
  Description of Artificial Sequence: Synthetic oligonucleotide
  Target: ATXN2; (-) strand; PAM type: YTN; PAM sequence: TTA
tttgtgtttgcattcatgtg

SEQ ID NO: 82199 - DNA, 20 bp, Artificial Sequence
  Description of Artificial Sequence: Synthetic oligonucleotide
  Target: ATXN2; (-) strand; PAM type: YTN; PAM sequence: CTG
gtaattatttgtgtttgcat

SEQ ID NO: 82200 - DNA, 20 bp, Artificial Sequence
  Description of Artificial Sequence: Synthetic oligonucleotide
  Target: ATXN2; (-) strand; PAM type: YTN; PAM sequence: TTG
ctggtaattatttgtgtttg

SEQ ID NO: 82201 - DNA, 20 bp, Artificial Sequence
  Description of Artificial Sequence: Synthetic oligonucleotide
  Target: ATXN2; (-) strand; PAM type: YTN; PAM sequence: TTT
gctggtaattatttgtgttt

SEQ ID NO: 82202 - DNA, 20 bp, Artificial Sequence
  Description of Artificial Sequence: Synthetic oligonucleotide
  Target: ATXN2; (-) strand; PAM type: YTN; PAM sequence: TTA
tttgctggtaattatttgtg

SEQ ID NO: 82203 - DNA, 20 bp, Artificial Sequence
  Description of Artificial Sequence: Synthetic oligonucleotide
  Target: ATXN2; (-) strand; PAM type: YTN; PAM sequence: TTT
atttgctggtaattatttgt

SEQ ID NO: 82204 - DNA, 20 bp, Artificial Sequence
  Description of Artificial Sequence: Synthetic oligonucleotide
  Target: ATXN2; (-) strand; PAM type: YTN; PAM sequence: TTT
tatttgctggtaattatttg

SEQ ID NO: 82205 - DNA, 20 bp, Artificial Sequence
  Description of Artificial Sequence: Synthetic oligonucleotide
  Target: ATXN2; (-) strand; PAM type: YTN; PAM sequence: TTT
ttatttgctggtaattattt

SEQ ID NO: 82206 - DNA, 20 bp, Artificial Sequence
  Description of Artificial Sequence: Synthetic oligonucleotide
  Target: ATXN2; (-) strand; PAM type: YTN; PAM sequence: CTT
tttatttgctggtaattatt

SEQ ID NO: 82207 - DNA, 20 bp, Artificial Sequence
  Description of Artificial Sequence: Synthetic oligonucleotide
  Target: ATXN2; (-) strand; PAM type: YTN; PAM sequence: TTA
actttttatttgctggtaat

SEQ ID NO: 82208 - DNA, 20 bp, Artificial Sequence
  Description of Artificial Sequence: Synthetic oligonucleotide
  Target: ATXN2; (-) strand; PAM type: YTN; PAM sequence: CTT
aactttttatttgctggtaa

SEQ ID NO: 82209 - DNA, 20 bp, Artificial Sequence
  Description of Artificial Sequence: Synthetic oligonucleotide
  Target: ATXN2; (-) strand; PAM type: YTN; PAM sequence: CTG
gcaaccttaactttttattt

SEQ ID NO: 82210 - DNA, 20 bp, Artificial Sequence
  Description of Artificial Sequence: Synthetic oligonucleotide
  Target: ATXN2; (-) strand; PAM type: YTN; PAM sequence: CTC
ccatgcctggcaaccttaac

SEQ ID NO: 82211 - DNA, 20 bp, Artificial Sequence
  Description of Artificial Sequence: Synthetic oligonucleotide
  Target: ATXN2; (-) strand; PAM type: YTN; PAM sequence: TTG
gcctcccatgcctggcaacc

SEQ ID NO: 82212 - DNA, 20 bp, Artificial Sequence
  Description of Artificial Sequence: Synthetic oligonucleotide
  Target: ATXN2; (-) strand; PAM type: YTN; PAM sequence: CTT
ggcctcccatgcctggcaac

SEQ ID NO: 82213 - DNA, 20 bp, Artificial Sequence
  Description of Artificial Sequence: Synthetic oligonucleotide
  Target: ATXN2; (-) strand; PAM type: YTN; PAM sequence: CTG
ccttggcctcccatgcctgg

SEQ ID NO: 82214 - DNA, 20 bp, Artificial Sequence
  Description of Artificial Sequence: Synthetic oligonucleotide
  Target: ATXN2; (-) strand; PAM type: YTN; PAM sequence: CTC
aagtgatccacctgccttgg

SEQ ID NO: 82215 - DNA, 20 bp, Artificial Sequence
  Description of Artificial Sequence: Synthetic oligonucleotide
  Target: ATXN2; (-) strand; PAM type: YTN; PAM sequence: CTG
gcctcaagtgatccacctgc

SEQ ID NO: 82216 - DNA, 20 bp, Artificial Sequence
  Description of Artificial Sequence: Synthetic oligonucleotide
  Target: ATXN2; (-) strand; PAM type: YTN; PAM sequence: TTC
tggcctcaagtgatccacct

SEQ ID NO: 82217 - DNA, 20 bp, Artificial Sequence
  Description of Artificial Sequence: Synthetic oligonucleotide
  Target: ATXN2; (-) strand; PAM type: YTN; PAM sequence: CTT
ctggcctcaagtgatccacc

SEQ ID NO: 82218 - DNA, 20 bp, Artificial Sequence
  Description of Artificial Sequence: Synthetic oligonucleotide
  Target: ATXN2; (-) strand; PAM type: YTN; PAM sequence: CTG
gaacttctggcctcaagtga

SEQ ID NO: 82219 - DNA, 20 bp, Artificial Sequence
  Description of Artificial Sequence: Synthetic oligonucleotide
  Target: ATXN2; (-) strand; PAM type: YTN; PAM sequence: CTG
gtctggaacttctggcctca

SEQ ID NO: 82220 - DNA, 20 bp, Artificial Sequence
  Description of Artificial Sequence: Synthetic oligonucleotide
  Target: ATXN2; (-) strand; PAM type: YTN; PAM sequence: TTG
gccaggctggtctggaactt

SEQ ID NO: 82221 - DNA, 20 bp, Artificial Sequence
  Description of Artificial Sequence: Synthetic oligonucleotide
  Target: ATXN2; (-) strand; PAM type: YTN; PAM sequence: TTC
accatattggccaggctggt

SEQ ID NO: 82222 - DNA, 20 bp, Artificial Sequence
  Description of Artificial Sequence: Synthetic oligonucleotide
  Target: ATXN2; (-) strand; PAM type: YTN; PAM sequence: TTT
caccatattggccaggctgg

SEQ ID NO: 82223 - DNA, 20 bp, Artificial Sequence
  Description of Artificial Sequence: Synthetic oligonucleotide
  Target: ATXN2; (-) strand; PAM type: YTN; PAM sequence: TTA
gtagagatggggtttcacca

SEQ ID NO: 82224 - DNA, 20 bp, Artificial Sequence
  Description of Artificial Sequence: Synthetic oligonucleotide
  Target: ATXN2; (-) strand; PAM type: YTN; PAM sequence: TTT
agtagagatggggtttcacc

SEQ ID NO: 82225 - DNA, 20 bp, Artificial Sequence
  Description of Artificial Sequence: Synthetic oligonucleotide
  Target: ATXN2; (-) strand; PAM type: YTN; PAM sequence: TTT
tagtagagatggggtttcac

SEQ ID NO: 82226 - DNA, 20 bp, Artificial Sequence
  Description of Artificial Sequence: Synthetic oligonucleotide
  Target: ATXN2; (-) strand; PAM type: YTN; PAM sequence: TTG
tattttagtagagatggggt

SEQ ID NO: 82227 - DNA, 20 bp, Artificial Sequence
  Description of Artificial Sequence: Synthetic oligonucleotide
  Target: ATXN2; (-) strand; PAM type: YTN; PAM sequence: TTT
gtattttagtagagatgggg

SEQ ID NO: 82228 - DNA, 20 bp, Artificial Sequence
  Description of Artificial Sequence: Synthetic oligonucleotide
  Target: ATXN2; (-) strand; PAM type: YTN; PAM sequence: TTT
tgtattttagtagagatggg

SEQ ID NO: 82229 - DNA, 20 bp, Artificial Sequence
  Description of Artificial Sequence: Synthetic oligonucleotide
  Target: ATXN2; (-) strand; PAM type: YTN; PAM sequence: TTT
ttgtattttagtagagatgg

SEQ ID NO: 82230 - DNA, 20 bp, Artificial Sequence
  Description of Artificial Sequence: Synthetic oligonucleotide
  Target: ATXN2; (-) strand; PAM type: YTN; PAM sequence: CTA
atttttgtattttagtagag

SEQ ID NO: 82231 - DNA, 20 bp, Artificial Sequence
  Description of Artificial Sequence: Synthetic oligonucleotide
  Target: ATXN2; (-) strand; PAM type: YTN; PAM sequence: CTG
gctaatttttgtattttagt

SEQ ID NO: 82232 - DNA, 20 bp, Artificial Sequence
  Description of Artificial Sequence: Synthetic oligonucleotide
  Target: ATXN2; (-) strand; PAM type: YTN; PAM sequence: CTC
gcctggctaatttttgtatt

SEQ ID NO: 82233 - DNA, 20 bp, Artificial Sequence
  Description of Artificial Sequence: Synthetic oligonucleotide
  Target: ATXN2; (-) strand; PAM type: YTN; PAM sequence: CTG
caggcacgcaccatctcgcc

SEQ ID NO: 82234 - DNA, 20 bp, Artificial Sequence
  Description of Artificial Sequence: Synthetic oligonucleotide
  Target: ATXN2; (-) strand; PAM type: YTN; PAM sequence: CTG
ggactgcaggcacgcaccat

SEQ ID NO: 82235 - DNA, 20 bp, Artificial Sequence
  Description of Artificial Sequence: Synthetic oligonucleotide
  Target: ATXN2; (-) strand; PAM type: YTN; PAM sequence: CTG
agtagctgggactgcaggca

SEQ ID NO: 82236 - DNA, 20 bp, Artificial Sequence
  Description of Artificial Sequence: Synthetic oligonucleotide
  Target: ATXN2; (-) strand; PAM type: YTN; PAM sequence: CTC
ctgagtagctgggactgcag

SEQ ID NO: 82237 - DNA, 20 bp, Artificial Sequence
  Description of Artificial Sequence: Synthetic oligonucleotide
  Target: ATXN2; (-) strand; PAM type: YTN; PAM sequence: CTC
agcctcctgagtagctggga

SEQ ID NO: 82238 - DNA, 20 bp, Artificial Sequence
  Description of Artificial Sequence: Synthetic oligonucleotide
  Target: ATXN2; (-) strand; PAM type: YTN; PAM sequence: CTG
cctcagcctcctgagtagct

SEQ ID NO: 82239 - DNA, 20 bp, Artificial Sequence
  Description of Artificial Sequence: Synthetic oligonucleotide
  Target: ATXN2; (-) strand; PAM type: YTN; PAM sequence: TTC
tgcctcagcctcctgagtag

SEQ ID NO: 82240 - DNA, 20 bp, Artificial Sequence
  Description of Artificial Sequence: Synthetic oligonucleotide
  Target: ATXN2; (-) strand; PAM type: YTN; PAM sequence: TTT
ctgcctcagcctcctgagta

SEQ ID NO: 82241 - DNA, 20 bp, Artificial Sequence
  Description of Artificial Sequence: Synthetic oligonucleotide
  Target: ATXN2; (-) strand; PAM type: YTN; PAM sequence: TTT
tctgcctcagcctcctgagt

SEQ ID NO: 82242 - DNA, 20 bp, Artificial Sequence
  Description of Artificial Sequence: Synthetic oligonucleotide
  Target: ATXN2; (-) strand; PAM type: YTN; PAM sequence: TTT
ttctgcctcagcctcctgag

SEQ ID NO: 82243 - DNA, 20 bp, Artificial Sequence
  Description of Artificial Sequence: Synthetic oligonucleotide
  Target: ATXN2; (-) strand; PAM type: YTN; PAM sequence: TTA
aagcgatttttctgcctcag

SEQ ID NO: 82244 - DNA, 20 bp, Artificial Sequence
  Description of Artificial Sequence: Synthetic oligonucleotide
  Target: ATXN2; (-) strand; PAM type: YTN; PAM sequence: CTC
ccaggttaaagcgatttttc

SEQ ID NO: 82245 - DNA, 20 bp, Artificial Sequence
  Description of Artificial Sequence: Synthetic oligonucleotide
  Target: ATXN2; (-) strand; PAM type: YTN; PAM sequence: CTG
cctcccaggttaaagcgatt

SEQ ID NO: 82246 - DNA, 20 bp, Artificial Sequence
  Description of Artificial Sequence: Synthetic oligonucleotide
  Target: ATXN2; (-) strand; PAM type: YTN; PAM sequence: CTC
tgcctcccaggttaaagcga

SEQ ID NO: 82247 - DNA, 20 bp, Artificial Sequence
  Description of Artificial Sequence: Synthetic oligonucleotide
  Target: ATXN2; (-) strand; PAM type: YTN; PAM sequence: TTG
caacctctgcctcccaggtt

SEQ ID NO: 82248 - DNA, 20 bp, Artificial Sequence
  Description of Artificial Sequence: Synthetic oligonucleotide
  Target: ATXN2; (-) strand; PAM type: YTN; PAM sequence: CTC
attgcaacctctgcctccca

SEQ ID NO: 82249 - DNA, 20 bp, Artificial Sequence
  Description of Artificial Sequence: Synthetic oligonucleotide
  Target: ATXN2; (-) strand; PAM type: YTN; PAM sequence: CTC
ggctcattgcaacctctgcc

SEQ ID NO: 82250 - DNA, 20 bp, Artificial Sequence
  Description of Artificial Sequence: Synthetic oligonucleotide
  Target: ATXN2; (-) strand; PAM type: YTN; PAM sequence: CTG
gagtgcagtggtgcgatctc

SEQ ID NO: 82251 - DNA, 20 bp, Artificial Sequence
  Description of Artificial Sequence: Synthetic oligonucleotide
  Target: ATXN2; (-) strand; PAM type: YTN; PAM sequence: CTA
ggctggagtgcagtggtgcg

SEQ ID NO: 82252 - DNA, 20 bp, Artificial Sequence
  Description of Artificial Sequence: Synthetic oligonucleotide
  Target: ATXN2; (-) strand; PAM type: YTN; PAM sequence: CTG
tcacctaggctggagtgcag

SEQ ID NO: 82253 - DNA, 20 bp, Artificial Sequence
  Description of Artificial Sequence: Synthetic oligonucleotide
  Target: ATXN2; (-) strand; PAM type: YTN; PAM sequence: CTC
tgtcacctaggctggagtgc

SEQ ID NO: 82254 - DNA, 20 bp, Artificial Sequence
  Description of Artificial Sequence: Synthetic oligonucleotide
  Target: ATXN2; (-) strand; PAM type: YTN; PAM sequence: CTC
gctctgtcacctaggctgga

SEQ ID NO: 82255 - DNA, 20 bp, Artificial Sequence
  Description of Artificial Sequence: Synthetic oligonucleotide
  Target: ATXN2; (-) strand; PAM type: YTN; PAM sequence: TTC
cgagacggagtctcgctctg

SEQ ID NO: 82256 - DNA, 20 bp, Artificial Sequence
  Description of Artificial Sequence: Synthetic oligonucleotide
  Target: ATXN2; (-) strand; PAM type: YTN; PAM sequence: TTT
ccgagacggagtctcgctct

SEQ ID NO: 82257 - DNA, 20 bp, Artificial Sequence
  Description of Artificial Sequence: Synthetic oligonucleotide
  Target: ATXN2; (-) strand; PAM type: YTN; PAM sequence: TTT
tccgagacggagtctcgctc

SEQ ID NO: 82258 - DNA, 20 bp, Artificial Sequence
  Description of Artificial Sequence: Synthetic oligonucleotide
  Target: ATXN2; (-) strand; PAM type: YTN; PAM sequence: TTT
ttccgagacggagtctcgct

SEQ ID NO: 82259 - DNA, 20 bp, Artificial Sequence
  Description of Artificial Sequence: Synthetic oligonucleotide
  Target: ATXN2; (-) strand; PAM type: YTN; PAM sequence: TTT
tttccgagacggagtctcgc

SEQ ID NO: 82260 - DNA, 20 bp, Artificial Sequence
  Description of Artificial Sequence: Synthetic oligonucleotide
  Target: ATXN2; (-) strand; PAM type: YTN; PAM sequence: TTT
ttttccgagacggagtctcg

SEQ ID NO: 82261 - DNA, 20 bp, Artificial Sequence
  Description of Artificial Sequence: Synthetic oligonucleotide
  Target: ATXN2; (-) strand; PAM type: YTN; PAM sequence: TTT
tttttccgagacggagtctc

SEQ ID NO: 82262 - DNA, 20 bp, Artificial Sequence
  Description of Artificial Sequence: Synthetic oligonucleotide
  Target: ATXN2; (-) strand; PAM type: YTN; PAM sequence: CTT
ttttttccgagacggagtct

SEQ ID NO: 82263 - DNA, 20 bp, Artificial Sequence
  Description of Artificial Sequence: Synthetic oligonucleotide
  Target: ATXN2; (-) strand; PAM type: YTN; PAM sequence: TTC
ttttttttccgagacggagt

SEQ ID NO: 82264 - DNA, 20 bp, Artificial Sequence
  Description of Artificial Sequence: Synthetic oligonucleotide
  Target: ATXN2; (-) strand; PAM type: YTN; PAM sequence: TTT
cttttttttccgagacggag

SEQ ID NO: 82265 - DNA, 20 bp, Artificial Sequence
  Description of Artificial Sequence: Synthetic oligonucleotide
  Target: ATXN2; (-) strand; PAM type: YTN; PAM sequence: TTT
tcttttttttccgagacgga

SEQ ID NO: 82266 - DNA, 20 bp, Artificial Sequence
  Description of Artificial Sequence: Synthetic oligonucleotide
  Target: ATXN2; (-) strand; PAM type: YTN; PAM sequence: TTT
ttcttttttttccgagacgg

SEQ ID NO: 82267 - DNA, 20 bp, Artificial Sequence
  Description of Artificial Sequence: Synthetic oligonucleotide
  Target: ATXN2; (-) strand; PAM type: YTN; PAM sequence: TTT
tttcttttttttccgagacg

SEQ ID NO: 82268 - DNA, 20 bp, Artificial Sequence
  Description of Artificial Sequence: Synthetic oligonucleotide
  Target: ATXN2; (-) strand; PAM type: YTN; PAM sequence: TTT
ttttcttttttttccgagac

SEQ ID NO: 82269 - DNA, 20 bp, Artificial Sequence
  Description of Artificial Sequence: Synthetic oligonucleotide
  Target: ATXN2; (-) strand; PAM type: YTN; PAM sequence: TTT
tttttcttttttttccgaga

SEQ ID NO: 82270 - DNA, 20 bp, Artificial Sequence
  Description of Artificial Sequence: Synthetic oligonucleotide
  Target: ATXN2; (-) strand; PAM type: YTN; PAM sequence: TTT
ttttttcttttttttccgag

SEQ ID NO: 82271 - DNA, 20 bp, Artificial Sequence
  Description of Artificial Sequence: Synthetic oligonucleotide
  Target: ATXN2; (-) strand; PAM type: YTN; PAM sequence: TTT
tttttttcttttttttccga

SEQ ID NO: 82272 - DNA, 20 bp, Artificial Sequence
  Description of Artificial Sequence: Synthetic oligonucleotide
  Target: ATXN2; (-) strand; PAM type: YTN; PAM sequence: TTT
ttttttttcttttttttccg

SEQ ID NO: 82273 - DNA, 20 bp, Artificial Sequence
  Description of Artificial Sequence: Synthetic oligonucleotide
  Target: ATXN2; (-) strand; PAM type: YTN; PAM sequence: CTT
tttttttttcttttttttcc

SEQ ID NO: 82274 - DNA, 20 bp, Artificial Sequence
  Description of Artificial Sequence: Synthetic oligonucleotide
  Target: ATXN2; (-) strand; PAM type: YTN; PAM sequence: TTA
actttttttttttctttttt

SEQ ID NO: 82275 - DNA, 20 bp, Artificial Sequence
  Description of Artificial Sequence: Synthetic oligonucleotide
  Target: ATXN2; (-) strand; PAM type: YTN; PAM sequence: CTT
aactttttttttttcttttt

SEQ ID NO: 82276 - DNA, 20 bp, Artificial Sequence
  Description of Artificial Sequence: Synthetic oligonucleotide
  Target: ATXN2; (-) strand; PAM type: YTN; PAM sequence: TTA
accttaactttttttttttc

SEQ ID NO: 82277 - DNA, 20 bp, Artificial Sequence
  Description of Artificial Sequence: Synthetic oligonucleotide
  Target: ATXN2; (-) strand; PAM type: YTN; PAM sequence: CTG
ttaaccttaacttttttttt

SEQ ID NO: 82278 - DNA, 20 bp, Artificial Sequence
  Description of Artificial Sequence: Synthetic oligonucleotide
  Target: ATXN2; (-) strand; PAM type: YTN; PAM sequence: TTG
tcacagctgttaaccttaac

SEQ ID NO: 82279 - DNA, 20 bp, Artificial Sequence
  Description of Artificial Sequence: Synthetic oligonucleotide
  Target: ATXN2; (-) strand; PAM type: YTN; PAM sequence: CTT
gtcacagctgttaaccttaa

SEQ ID NO: 82280 - DNA, 20 bp, Artificial Sequence
  Description of Artificial Sequence: Synthetic oligonucleotide
  Target: ATXN2; (-) strand; PAM type: YTN; PAM sequence: TTA
tgaaaacttgtcacagctgt

SEQ ID NO: 82281 - DNA, 20 bp, Artificial Sequence
  Description of Artificial Sequence: Synthetic oligonucleotide
  Target: ATXN2; (-) strand; PAM type: YTN; PAM sequence: TTT
atgaaaacttgtcacagctg

SEQ ID NO: 82282 - DNA, 20 bp, Artificial Sequence
  Description of Artificial Sequence: Synthetic oligonucleotide
  Target: ATXN2; (-) strand; PAM type: YTN; PAM sequence: TTG
tttatgaaaacttgtcacag

SEQ ID NO: 82283 - DNA, 20 bp, Artificial Sequence
  Description of Artificial Sequence: Synthetic oligonucleotide
  Target: ATXN2; (-) strand; PAM type: YTN; PAM sequence: CTG
ggttgtttatgaaaacttgt

SEQ ID NO: 82284 - DNA, 20 bp, Artificial Sequence
  Description of Artificial Sequence: Synthetic oligonucleotide
  Target: ATXN2; (-) strand; PAM type: YTN; PAM sequence: TTA
tgagtctgggttgtttatga

SEQ ID NO: 82285 - DNA, 20 bp, Artificial Sequence
  Description of Artificial Sequence: Synthetic oligonucleotide
  Target: ATXN2; (-) strand; PAM type: YTN; PAM sequence: TTT
atgagtctgggttgtttatg

SEQ ID NO: 82286 - DNA, 20 bp, Artificial Sequence
  Description of Artificial Sequence: Synthetic oligonucleotide
  Target: ATXN2; (-) strand; PAM type: YTN; PAM sequence: TTT
tatgagtctgggttgtttat

SEQ ID NO: 82287 - DNA, 20 bp, Artificial Sequence
  Description of Artificial Sequence: Synthetic oligonucleotide
  Target: ATXN2; (-) strand; PAM type: YTN; PAM sequence: TTT
ttatgagtctgggttgttta

SEQ ID NO: 82288 - DNA, 20 bp, Artificial Sequence
  Description of Artificial Sequence: Synthetic oligonucleotide
  Target: ATXN2; (-) strand; PAM type: YTN; PAM sequence: TTT
tttatgagtctgggttgttt

SEQ ID NO: 82289 - DNA, 20 bp, Artificial Sequence
  Description of Artificial Sequence: Synthetic oligonucleotide
  Target: ATXN2; (-) strand; PAM type: YTN; PAM sequence: TTT
ttttatgagtctgggttgtt

SEQ ID NO: 82290 - DNA, 20 bp, Artificial Sequence
  Description of Artificial Sequence: Synthetic oligonucleotide
  Target: ATXN2; (-) strand; PAM type: YTN; PAM sequence: TTT
tttttatgagtctgggttgt

SEQ ID NO: 82291 - DNA, 20 bp, Artificial Sequence
  Description of Artificial Sequence: Synthetic oligonucleotide
  Target: ATXN2; (-) strand; PAM type: YTN; PAM sequence: TTG
gtattttttttatgagtctg

SEQ ID NO: 82292 - DNA, 20 bp, Artificial Sequence
  Description of Artificial Sequence: Synthetic oligonucleotide
  Target: ATXN2; (-) strand; PAM type: YTN; PAM sequence: TTT
ggtattttttttatgagtct

SEQ ID NO: 82293 - DNA, 20 bp, Artificial Sequence
  Description of Artificial Sequence: Synthetic oligonucleotide
  Target: ATXN2; (-) strand; PAM type: YTN; PAM sequence: CTG
gtttggtattttttttatga

SEQ ID NO: 82294 - DNA, 20 bp, Artificial Sequence
  Description of Artificial Sequence: Synthetic oligonucleotide
  Target: ATXN2; (-) strand; PAM type: YTN; PAM sequence: TTA
taggcatgagccaccgcgtc

SEQ ID NO: 82295 - DNA, 20 bp, Artificial Sequence
  Description of Artificial Sequence: Synthetic oligonucleotide
  Target: ATXN2; (-) strand; PAM type: YTN; PAM sequence: CTG
ggattataggcatgagccac

SEQ ID NO: 82296 - DNA, 20 bp, Artificial Sequence
  Description of Artificial Sequence: Synthetic oligonucleotide
  Target: ATXN2; (-) strand; PAM type: YTN; PAM sequence: TTC
ccaaagtgctgggattatag

SEQ ID NO: 82297 - DNA, 20 bp, Artificial Sequence
  Description of Artificial Sequence: Synthetic oligonucleotide
  Target: ATXN2; (-) strand; PAM type: YTN; PAM sequence: CTT
cccaaagtgctgggattata

SEQ ID NO: 82298 - DNA, 20 bp, Artificial Sequence
  Description of Artificial Sequence: Synthetic oligonucleotide
  Target: ATXN2; (-) strand; PAM type: YTN; PAM sequence: CTC
ggcttcccaaagtgctggga

SEQ ID NO: 82299 - DNA, 20 bp, Artificial Sequence
  Description of Artificial Sequence: Synthetic oligonucleotide
  Target: ATXN2; (-) strand; PAM type: YTN; PAM sequence: CTG
cccgcctcggcttcccaaag

SEQ ID NO: 82300 - DNA, 20 bp, Artificial Sequence
  Description of Artificial Sequence: Synthetic oligonucleotide
  Target: ATXN2; (-) strand; PAM type: YTN; PAM sequence: TTG
atctgcccgcctcggcttcc

SEQ ID NO: 82301 - DNA, 20 bp, Artificial Sequence
  Description of Artificial Sequence: Synthetic oligonucleotide
  Target: ATXN2; (-) strand; PAM type: YTN; PAM sequence: CTT
gatctgcccgcctcggcttc

SEQ ID NO: 82302 - DNA, 20 bp, Artificial Sequence
  Description of Artificial Sequence: Synthetic oligonucleotide
  Target: ATXN2; (-) strand; PAM type: YTN; PAM sequence: CTC
ttgatctgcccgcctcggct

SEQ ID NO: 82303 - DNA, 20 bp, Artificial Sequence
  Description of Artificial Sequence: Synthetic oligonucleotide
  Target: ATXN2; (-) strand; PAM type: YTN; PAM sequence: CTC
ccgacctcttgatctgcccg

SEQ ID NO: 82304 - DNA, 20 bp, Artificial Sequence
  Description of Artificial Sequence: Synthetic oligonucleotide
  Target: ATXN2; (-) strand; PAM type: YTN; PAM sequence: CTC
aatctcccgacctcttgatc

SEQ ID NO: 82305 - DNA, 20 bp, Artificial Sequence
  Description of Artificial Sequence: Synthetic oligonucleotide
  Target: ATXN2; (-) strand; PAM type: YTN; PAM sequence: TTG
tctcaatctcccgacctctt

SEQ ID NO: 82306 - DNA, 20 bp, Artificial Sequence
  Description of Artificial Sequence: Synthetic oligonucleotide
  Target: ATXN2; (-) strand; PAM type: YTN; PAM sequence: TTA
gccaggattgtctcaatctc

SEQ ID NO: 82307 - DNA, 20 bp, Artificial Sequence
  Description of Artificial Sequence: Synthetic oligonucleotide
  Target: ATXN2; (-) strand; PAM type: YTN; PAM sequence: CTG
tgttagccaggattgtctca

SEQ ID NO: 82308 - DNA, 20 bp, Artificial Sequence
  Description of Artificial Sequence: Synthetic oligonucleotide
  Target: ATXN2; (-) strand; PAM type: YTN; PAM sequence: TTC
actgtgttagccaggattgt

SEQ ID NO: 82309 - DNA, 20 bp, Artificial Sequence
  Description of Artificial Sequence: Synthetic oligonucleotide
  Target: ATXN2; (-) strand; PAM type: YTN; PAM sequence: TTT
cactgtgttagccaggattg

SEQ ID NO: 82310 - DNA, 20 bp, Artificial Sequence
  Description of Artificial Sequence: Synthetic oligonucleotide
  Target: ATXN2; (-) strand; PAM type: YTN; PAM sequence: TTA
agtagagatggggtttcact

SEQ ID NO: 82311 - DNA, 20 bp, Artificial Sequence
  Description of Artificial Sequence: Synthetic oligonucleotide
  Target: ATXN2; (-) strand; PAM type: YTN; PAM sequence: TTT
aagtagagatggggtttcac

SEQ ID NO: 82312 - DNA, 20 bp, Artificial Sequence
  Description of Artificial Sequence: Synthetic oligonucleotide
  Target: ATXN2; (-) strand; PAM type: YTN; PAM sequence: TTT
taagtagagatggggtttca

SEQ ID NO: 82313 - DNA, 20 bp, Artificial Sequence
  Description of Artificial Sequence: Synthetic oligonucleotide
  Target: ATXN2; (-) strand; PAM type: YTN; PAM sequence: TTA
tgcattttaagtagagatgg

SEQ ID NO: 82314 - DNA, 20 bp, Artificial Sequence
  Description of Artificial Sequence: Synthetic oligonucleotide
  Target: ATXN2; (-) strand; PAM type: YTN; PAM sequence: TTT
atgcattttaagtagagatg

SEQ ID NO: 82315 - DNA, 20 bp, Artificial Sequence
  Description of Artificial Sequence: Synthetic oligonucleotide
  Target: ATXN2; (-) strand; PAM type: YTN; PAM sequence: TTT
tatgcattttaagtagagat

SEQ ID NO: 82316 - DNA, 20 bp, Artificial Sequence
  Description of Artificial Sequence: Synthetic oligonucleotide
  Target: ATXN2; (-) strand; PAM type: YTN; PAM sequence: TTT
ttatgcattttaagtagaga

SEQ ID NO: 82317 - DNA, 20 bp, Artificial Sequence
  Description of Artificial Sequence: Synthetic oligonucleotide
  Target: ATXN2; (-) strand; PAM type: YTN; PAM sequence: TTT
tttatgcattttaagtagag

SEQ ID NO: 82318 - DNA, 20 bp, Artificial Sequence
  Description of Artificial Sequence: Synthetic oligonucleotide
  Target: ATXN2; (-) strand; PAM type: YTN; PAM sequence: TTT
ttttatgcattttaagtaga

SEQ ID NO: 82319 - DNA, 20 bp, Artificial Sequence
  Description of Artificial Sequence: Synthetic oligonucleotide
  Target: ATXN2; (-) strand; PAM type: YTN; PAM sequence: TTT
tttttatgcattttaagtag

SEQ ID NO: 82320 - DNA, 20 bp, Artificial Sequence
  Description of Artificial Sequence: Synthetic oligonucleotide
  Target: ATXN2; (-) strand; PAM type: YTN; PAM sequence: CTA
attttttttatgcattttaa

SEQ ID NO: 82321 - DNA, 20 bp, Artificial Sequence
  Description of Artificial Sequence: Synthetic oligonucleotide
  Target: ATXN2; (-) strand; PAM type: YTN; PAM sequence: CTA
catgcgcccgccaccatgcc

SEQ ID NO: 82322 - DNA, 20 bp, Artificial Sequence
  Description of Artificial Sequence: Synthetic oligonucleotide
  Target: ATXN2; (-) strand; PAM type: YTN; PAM sequence: CTG
ggactacatgcgcccgccac

SEQ ID NO: 82323 - DNA, 20 bp, Artificial Sequence
  Description of Artificial Sequence: Synthetic oligonucleotide
  Target: ATXN2; (-) strand; PAM type: YTN; PAM sequence: CTC
ccgagtagctgggactacat

SEQ ID NO: 82324 - DNA, 20 bp, Artificial Sequence
  Description of Artificial Sequence: Synthetic oligonucleotide
  Target: ATXN2; (-) strand; PAM type: YTN; PAM sequence: CTC
agcctcccgagtagctggga

SEQ ID NO: 82325 - DNA, 20 bp, Artificial Sequence
  Description of Artificial Sequence: Synthetic oligonucleotide
  Target: ATXN2; (-) strand; PAM type: YTN; PAM sequence: CTG
cctcagcctcccgagtagct

SEQ ID NO: 82326 - DNA, 20 bp, Artificial Sequence
  Description of Artificial Sequence: Synthetic oligonucleotide
  Target: ATXN2; (-) strand; PAM type: YTN; PAM sequence: CTC
ctgcctcagcctcccgagta

SEQ ID NO: 82327 - DNA, 20 bp, Artificial Sequence
  Description of Artificial Sequence: Synthetic oligonucleotide
  Target: ATXN2; (-) strand; PAM type: YTN; PAM sequence: TTC
tcctgcctcagcctcccgag

SEQ ID NO: 82328 - DNA, 20 bp, Artificial Sequence
  Description of Artificial Sequence: Synthetic oligonucleotide
  Target: ATXN2; (-) strand; PAM type: YTN; PAM sequence: TTC
atgccattctcctgcctcag

SEQ ID NO: 82329 - DNA, 20 bp, Artificial Sequence
  Description of Artificial Sequence: Synthetic oligonucleotide
  Target: ATXN2; (-) strand; PAM type: YTN; PAM sequence: CTC
ccaggttcatgccattctcc

SEQ ID NO: 82330 - DNA, 20 bp, Artificial Sequence
  Description of Artificial Sequence: Synthetic oligonucleotide
  Target: ATXN2; (-) strand; PAM type: YTN; PAM sequence: CTC
cacctcccaggttcatgcca

SEQ ID NO: 82331 - DNA, 20 bp, Artificial Sequence
  Description of Artificial Sequence: Synthetic oligonucleotide
  Target: ATXN2; (-) strand; PAM type: YTN; PAM sequence: CTG
caagctccacctcccaggtt

SEQ ID NO: 82332 - DNA, 20 bp, Artificial Sequence
  Description of Artificial Sequence: Synthetic oligonucleotide
  Target: ATXN2; (-) strand; PAM type: YTN; PAM sequence: CTC
actgcaagctccacctccca

SEQ ID NO: 82333 - DNA, 20 bp, Artificial Sequence
  Description of Artificial Sequence: Synthetic oligonucleotide
  Target: ATXN2; (-) strand; PAM type: YTN; PAM sequence: CTC
agctcactgcaagctccacc

SEQ ID NO: 82334 - DNA, 20 bp, Artificial Sequence
  Description of Artificial Sequence: Synthetic oligonucleotide
  Target: ATXN2; (-) strand; PAM type: YTN; PAM sequence: CTA
gagtgcggtgacacaatctc

SEQ ID NO: 82335 - DNA, 20 bp, Artificial Sequence
  Description of Artificial Sequence: Synthetic oligonucleotide
  Target: ATXN2; (-) strand; PAM type: YTN; PAM sequence: CTG
tcgcccaggctagagtgcgg

SEQ ID NO: 82336 - DNA, 20 bp, Artificial Sequence
  Description of Artificial Sequence: Synthetic oligonucleotide
  Target: ATXN2; (-) strand; PAM type: YTN; PAM sequence: CTC
tgtcgcccaggctagagtgc

SEQ ID NO: 82337 - DNA, 20 bp, Artificial Sequence
  Description of Artificial Sequence: Synthetic oligonucleotide
  Target: ATXN2; (-) strand; PAM type: YTN; PAM sequence: CTC
gctctgtcgcccaggctaga

SEQ ID NO: 82338 - DNA, 20 bp, Artificial Sequence
  Description of Artificial Sequence: Synthetic oligonucleotide
  Target: ATXN2; (-) strand; PAM type: YTN; PAM sequence: TTG
agaaatctcgctctgtcgcc

SEQ ID NO: 82339 - DNA, 20 bp, Artificial Sequence
  Description of Artificial Sequence: Synthetic oligonucleotide
  Target: ATXN2; (-) strand; PAM type: YTN; PAM sequence: TTT
gagaaatctcgctctgtcgc

SEQ ID NO: 82340 - DNA, 20 bp, Artificial Sequence
  Description of Artificial Sequence: Synthetic oligonucleotide
  Target: ATXN2; (-) strand; PAM type: YTN; PAM sequence: TTT
tgagaaatctcgctctgtcg

SEQ ID NO: 82341 - DNA, 20 bp, Artificial Sequence
  Description of Artificial Sequence: Synthetic oligonucleotide
  Target: ATXN2; (-) strand; PAM type: YTN; PAM sequence: TTT
ttgagaaatctcgctctgtc

SEQ ID NO: 82342 - DNA, 20 bp, Artificial Sequence
  Description of Artificial Sequence: Synthetic oligonucleotide
  Target: ATXN2; (-) strand; PAM type: YTN; PAM sequence: TTT
tttgagaaatctcgctctgt

SEQ ID NO: 82343 - DNA, 20 bp, Artificial Sequence
  Description of Artificial Sequence: Synthetic oligonucleotide
  Target: ATXN2; (-) strand; PAM type: YTN; PAM sequence: TTT
ttttgagaaatctcgctctg

SEQ ID NO: 82344 - DNA, 20 bp, Artificial Sequence
  Description of Artificial Sequence: Synthetic oligonucleotide
  Target: ATXN2; (-) strand; PAM type: YTN; PAM sequence: TTT
tttttgagaaatctcgctct

SEQ ID NO: 82345 - DNA, 20 bp, Artificial Sequence
  Description of Artificial Sequence: Synthetic oligonucleotide
  Target: ATXN2; (-) strand; PAM type: YTN; PAM sequence: TTT
ttttttgagaaatctcgctc

SEQ ID NO: 82346 - DNA, 20 bp, Artificial Sequence
  Description of Artificial Sequence: Synthetic oligonucleotide
  Target: ATXN2; (-) strand; PAM type: YTN; PAM sequence: TTT
tttttttgagaaatctcgct

SEQ ID NO: 82347 - DNA, 20 bp, Artificial Sequence
  Description of Artificial Sequence: Synthetic oligonucleotide
  Target: ATXN2; (-) strand; PAM type: YTN; PAM sequence: TTT
ttttttttgagaaatctcgc

SEQ ID NO: 82348 - DNA, 20 bp, Artificial Sequence
  Description of Artificial Sequence: Synthetic oligonucleotide
  Target: ATXN2; (-) strand; PAM type: YTN; PAM sequence: TTT
tttttttttgagaaatctcg

SEQ ID NO: 82349 - DNA, 20 bp, Artificial Sequence
  Description of Artificial Sequence: Synthetic oligonucleotide
  Target: ATXN2; (-) strand; PAM type: YTN; PAM sequence: TTT
ttttttttttgagaaatctc

SEQ ID NO: 82350 - DNA, 20 bp, Artificial Sequence
  Description of Artificial Sequence: Synthetic oligonucleotide
  Target: ATXN2; (-) strand; PAM type: YTN; PAM sequence: TTT
tttttttttttgagaaatct

SEQ ID NO: 82351 - DNA, 20 bp, Artificial Sequence
  Description of Artificial Sequence: Synthetic oligonucleotide
  Target: ATXN2; (-) strand; PAM type: YTN; PAM sequence: TTT
ttttttttttttgagaaatc

SEQ ID NO: 82352 - DNA, 20 bp, Artificial Sequence
  Description of Artificial Sequence: Synthetic oligonucleotide
  Target: ATXN2; (-) strand; PAM type: YTN; PAM sequence: TTT
tttttttttttttgagaaat

SEQ ID NO: 82353 - DNA, 20 bp, Artificial Sequence
  Description of Artificial Sequence: Synthetic oligonucleotide
  Target: ATXN2; (-) strand; PAM type: YTN; PAM sequence: TTT
ttttttttttttttgagaaa

SEQ ID NO: 82354 - DNA, 20 bp, Artificial Sequence
  Description of Artificial Sequence: Synthetic oligonucleotide
  Target: ATXN2; (-) strand; PAM type: YTN; PAM sequence: TTT
tttttttttttttttgagaa

SEQ ID NO: 82355 - DNA, 20 bp, Artificial Sequence
  Description of Artificial Sequence: Synthetic oligonucleotide
  Target: ATXN2; (-) strand; PAM type: YTN; PAM sequence: TTT
ttttttttttttttttgaga

SEQ ID NO: 82356 - DNA, 20 bp, Artificial Sequence
  Description of Artificial Sequence: Synthetic oligonucleotide
  Target: ATXN2; (-) strand; PAM type: YTN; PAM sequence: TTT
tttttttttttttttttgag

SEQ ID NO: 82357 - DNA, 20 bp, Artificial Sequence
  Description of Artificial Sequence: Synthetic oligonucleotide
  Target: ATXN2; (-) strand; PAM type: YTN; PAM sequence: TTT
ttttttttttttttttttga

SEQ ID NO: 82358 - DNA, 20 bp, Artificial Sequence
  Description of Artificial Sequence: Synthetic oligonucleotide
  Target: ATXN2; (-) strand; PAM type: YTN; PAM sequence: TTT
tttttttttttttttttttg

SEQ ID NO: 82359 - DNA, 20 bp, Artificial Sequence
  Description of Artificial Sequence: Synthetic oligonucleotide
  Target: ATXN2; (-) strand; PAM type: YTN; PAM sequence: TTT
tttttttttttttttttttt

SEQ ID NO: 82360 - DNA, 20 bp, Artificial Sequence
  Description of Artificial Sequence: Synthetic oligonucleotide
  Target: ATXN2; (-) strand; PAM type: YTN; PAM sequence: TTT
tttttttttttttttttttt

SEQ ID NO: 82361 - DNA, 20 bp, Artificial Sequence
  Description of Artificial Sequence: Synthetic oligonucleotide
  Target: ATXN2; (-) strand; PAM type: YTN; PAM sequence: TTT
tttttttttttttttttttt

SEQ ID NO: 82362 - DNA, 20 bp, Artificial Sequence
  Description of Artificial Sequence: Synthetic oligonucleotide
  Target: ATXN2; (-) strand; PAM type: YTN; PAM sequence: TTT
tttttttttttttttttttt

SEQ ID NO: 82363 - DNA, 20 bp, Artificial Sequence
  Description of Artificial Sequence: Synthetic oligonucleotide
  Target: ATXN2; (-) strand; PAM type: YTN; PAM sequence: TTT
tttttttttttttttttttt

SEQ ID NO: 82364 - DNA, 20 bp, Artificial Sequence
  Description of Artificial Sequence: Synthetic oligonucleotide
  Target: ATXN2; (-) strand; PAM type: YTN; PAM sequence: TTT
tttttttttttttttttttt

SEQ ID NO: 82365 - DNA, 20 bp, Artificial Sequence
  Description of Artificial Sequence: Synthetic oligonucleotide
  Target: ATXN2; (-) strand; PAM type: YTN; PAM sequence: TTT
tttttttttttttttttttt

SEQ ID NO: 82366 - DNA, 20 bp, Artificial Sequence
  Description of Artificial Sequence: Synthetic oligonucleotide
  Target: ATXN2; (-) strand; PAM type: YTN; PAM sequence: TTT
tttttttttttttttttttt

SEQ ID NO: 82367 - DNA, 20 bp, Artificial Sequence
  Description of Artificial Sequence: Synthetic oligonucleotide
  Target: ATXN2; (-) strand; PAM type: YTN; PAM sequence: TTT
tttttttttttttttttttt

SEQ ID NO: 82368 - DNA, 20 bp, Artificial Sequence
  Description of Artificial Sequence: Synthetic oligonucleotide
  Target: ATXN2; (-) strand; PAM type: YTN; PAM sequence: TTT
tttttttttttttttttttt

SEQ ID NO: 82369 - DNA, 20 bp, Artificial Sequence
  Description of Artificial Sequence: Synthetic oligonucleotide
  Target: ATXN2; (-) strand; PAM type: YTN; PAM sequence: TTT
tttttttttttttttttttt

SEQ ID NO: 82370 - DNA, 20 bp, Artificial Sequence
  Description of Artificial Sequence: Synthetic oligonucleotide
  Target: ATXN2; (-) strand; PAM type: YTN; PAM sequence: TTA
gttttttttttttttttttt

SEQ ID NO: 82371 - DNA, 20 bp, Artificial Sequence
  Description of Artificial Sequence: Synthetic oligonucleotide
  Target: ATXN2; (-) strand; PAM type: YTN; PAM sequence: TTT
agtttttttttttttttttt

SEQ ID NO: 82372 - DNA, 20 bp, Artificial Sequence
  Description of Artificial Sequence: Synthetic oligonucleotide
  Target: ATXN2; (-) strand; PAM type: YTN; PAM sequence: TTG
gtttagtttttttttttttt

SEQ ID NO: 82373 - DNA, 20 bp, Artificial Sequence
  Description of Artificial Sequence: Synthetic oligonucleotide
  Target: ATXN2; (-) strand; PAM type: YTN; PAM sequence: TTT
ggtttagttttttttttttt

SEQ ID NO: 82374 - DNA, 20 bp, Artificial Sequence
  Description of Artificial Sequence: Synthetic oligonucleotide
  Target: ATXN2; (-) strand; PAM type: YTN; PAM sequence: TTA
caggtgtgagccaccgtgac

SEQ ID NO: 82375 - DNA, 20 bp, Artificial Sequence
  Description of Artificial Sequence: Synthetic oligonucleotide
  Target: ATXN2; (-) strand; PAM type: YTN; PAM sequence: CTG
ggattacaggtgtgagccac

SEQ ID NO: 82376 - DNA, 20 bp, Artificial Sequence
  Description of Artificial Sequence: Synthetic oligonucleotide
  Target: ATXN2; (-) strand; PAM type: YTN; PAM sequence: CTC
ccaaagtgctgggattacag

SEQ ID NO: 82377 - DNA, 20 bp, Artificial Sequence
  Description of Artificial Sequence: Synthetic oligonucleotide
  Target: ATXN2; (-) strand; PAM type: YTN; PAM sequence: CTC
gtcctcccaaagtgctggga

SEQ ID NO: 82378 - DNA, 20 bp, Artificial Sequence
  Description of Artificial Sequence: Synthetic oligonucleotide
  Target: ATXN2; (-) strand; PAM type: YTN; PAM sequence: TTA
gatgatccacccgcctcgtc

SEQ ID NO: 82379 - DNA, 20 bp, Artificial Sequence
  Description of Artificial Sequence: Synthetic oligonucleotide
  Target: ATXN2; (-) strand; PAM type: YTN; PAM sequence: CTT
agatgatccacccgcctcgt

SEQ ID NO: 82380 - DNA, 20 bp, Artificial Sequence
  Description of Artificial Sequence: Synthetic oligonucleotide
  Target: ATXN2; (-) strand; PAM type: YTN; PAM sequence: CTG
accttagatgatccacccgc

SEQ ID NO: 82381 - DNA, 20 bp, Artificial Sequence
  Description of Artificial Sequence: Synthetic oligonucleotide
  Target: ATXN2; (-) strand; PAM type: YTN; PAM sequence: CTC
ctgaccttagatgatccacc

SEQ ID NO: 82382 - DNA, 20 bp, Artificial Sequence
  Description of Artificial Sequence: Synthetic oligonucleotide
  Target: ATXN2; (-) strand; PAM type: YTN; PAM sequence: CTC
gaactcctgaccttagatga

SEQ ID NO: 82383 - DNA, 20 bp, Artificial Sequence
  Description of Artificial Sequence: Synthetic oligonucleotide
  Target: ATXN2; (-) strand; PAM type: YTN; PAM sequence: CTG
gtctcgaactcctgacctta

SEQ ID NO: 82384 - DNA, 20 bp, Artificial Sequence
  Description of Artificial Sequence: Synthetic oligonucleotide
  Target: ATXN2; (-) strand; PAM type: YTN; PAM sequence: TTG
gccaggctggtctcgaactc

SEQ ID NO: 82385 - DNA, 20 bp, Artificial Sequence
  Description of Artificial Sequence: Synthetic oligonucleotide
  Target: ATXN2; (-) strand; PAM type: YTN; PAM sequence: TTC
atcatgttggccaggctggt

SEQ ID NO: 82386 - DNA, 20 bp, Artificial Sequence
  Description of Artificial Sequence: Synthetic oligonucleotide
  Target: ATXN2; (-) strand; PAM type: YTN; PAM sequence: TTT
catcatgttggccaggctgg

SEQ ID NO: 82387 - DNA, 20 bp, Artificial Sequence
  Description of Artificial Sequence: Synthetic oligonucleotide
  Target: ATXN2; (-) strand; PAM type: YTN; PAM sequence: TTA
gtagagatggggtttcatca

SEQ ID NO: 82388 - DNA, 20 bp, Artificial Sequence
  Description of Artificial Sequence: Synthetic oligonucleotide
  Target: ATXN2; (-) strand; PAM type: YTN; PAM sequence: TTT
agtagagatggggtttcatc

SEQ ID NO: 82389 - DNA, 20 bp, Artificial Sequence
  Description of Artificial Sequence: Synthetic oligonucleotide
  Target: ATXN2; (-) strand; PAM type: YTN; PAM sequence: TTT
tagtagagatggggtttcat

SEQ ID NO: 82390 - DNA, 20 bp, Artificial Sequence
  Description of Artificial Sequence: Synthetic oligonucleotide
  Target: ATXN2; (-) strand; PAM type: YTN; PAM sequence: TTT
ttagtagagatggggtttca

SEQ ID NO: 82391 - DNA, 20 bp, Artificial Sequence
  Description of Artificial Sequence: Synthetic oligonucleotide
  Target: ATXN2; (-) strand; PAM type: YTN; PAM sequence: TTG
tatttttagtagagatgggg

SEQ ID NO: 82392 - DNA, 20 bp, Artificial Sequence
  Description of Artificial Sequence: Synthetic oligonucleotide
  Target: ATXN2; (-) strand; PAM type: YTN; PAM sequence: TTT
gtatttttagtagagatggg

SEQ ID NO: 82393 - DNA, 20 bp, Artificial Sequence
  Description of Artificial Sequence: Synthetic oligonucleotide
  Target: ATXN2; (-) strand; PAM type: YTN; PAM sequence: TTT
tgtatttttagtagagatgg

SEQ ID NO: 82394 - DNA, 20 bp, Artificial Sequence
  Description of Artificial Sequence: Synthetic oligonucleotide
  Target: ATXN2; (-) strand; PAM type: YTN; PAM sequence: TTT
ttgtatttttagtagagatg

SEQ ID NO: 82395 - DNA, 20 bp, Artificial Sequence
  Description of Artificial Sequence: Synthetic oligonucleotide
  Target: ATXN2; (-) strand; PAM type: YTN; PAM sequence: CTA
atttttgtatttttagtaga

SEQ ID NO: 82396 - DNA, 20 bp, Artificial Sequence
  Description of Artificial Sequence: Synthetic oligonucleotide
  Target: ATXN2; (-) strand; PAM type: YTN; PAM sequence: CTG
gctaatttttgtatttttag

SEQ ID NO: 82397 - DNA, 20 bp, Artificial Sequence
  Description of Artificial Sequence: Synthetic oligonucleotide
  Target: ATXN2; (-) strand; PAM type: YTN; PAM sequence: CTG
tgtgccaccatgcctggcta

SEQ ID NO: 82398 - DNA, 20 bp, Artificial Sequence
  Description of Artificial Sequence: Synthetic oligonucleotide
  Target: ATXN2; (-) strand; PAM type: YTN; PAM sequence: CTG
ggataacagctgtgtgccac

SEQ ID NO: 82399 - DNA, 20 bp, Artificial Sequence
  Description of Artificial Sequence: Synthetic oligonucleotide
  Target: ATXN2; (-) strand; PAM type: YTN; PAM sequence: CTG
agtagctgggataacagctg

SEQ ID NO: 82400 - DNA, 20 bp, Artificial Sequence
  Description of Artificial Sequence: Synthetic oligonucleotide
  Target: ATXN2; (-) strand; PAM type: YTN; PAM sequence: CTC
ctgagtagctgggataacag

SEQ ID NO: 82401 - DNA, 20 bp, Artificial Sequence
  Description of Artificial Sequence: Synthetic oligonucleotide
  Target: ATXN2; (-) strand; PAM type: YTN; PAM sequence: CTC
agcctcctgagtagctggga

SEQ ID NO: 82402 - DNA, 20 bp, Artificial Sequence
  Description of Artificial Sequence: Synthetic oligonucleotide
  Target: ATXN2; (-) strand; PAM type: YTN; PAM sequence: CTG
cctcagcctcctgagtagct

SEQ ID NO: 82403 - DNA, 20 bp, Artificial Sequence
  Description of Artificial Sequence: Synthetic oligonucleotide
  Target: ATXN2; (-) strand; PAM type: YTN; PAM sequence: TTG
tcctgcctcagcctcctgag

SEQ ID NO: 82404 - DNA, 20 bp, Artificial Sequence
  Description of Artificial Sequence: Synthetic oligonucleotide
  Target: ATXN2; (-) strand; PAM type: YTN; PAM sequence: TTC
aagtgattgtcctgcctcag

SEQ ID NO: 82405 - DNA, 20 bp, Artificial Sequence
  Description of Artificial Sequence: Synthetic oligonucleotide
  Target: ATXN2; (-) strand; PAM type: YTN; PAM sequence: CTA
ggttcaagtgattgtcctgc

SEQ ID NO: 82406 - DNA, 20 bp, Artificial Sequence
  Description of Artificial Sequence: Synthetic oligonucleotide
  Target: ATXN2; (-) strand; PAM type: YTN; PAM sequence: CTC
ctaggttcaagtgattgtcc

SEQ ID NO: 82407 - DNA, 20 bp, Artificial Sequence
  Description of Artificial Sequence: Synthetic oligonucleotide
  Target: ATXN2; (-) strand; PAM type: YTN; PAM sequence: CTC
cgcctcctaggttcaagtga

SEQ ID NO: 82408 - DNA, 20 bp, Artificial Sequence
  Description of Artificial Sequence: Synthetic oligonucleotide
  Target: ATXN2; (-) strand; PAM type: YTN; PAM sequence: CTG
caacctccgcctcctaggtt

SEQ ID NO: 82409 - DNA, 20 bp, Artificial Sequence
  Description of Artificial Sequence: Synthetic oligonucleotide
  Target: ATXN2; (-) strand; PAM type: YTN; PAM sequence: TTA
ctgcaacctccgcctcctag

SEQ ID NO: 82410 - DNA, 20 bp, Artificial Sequence
  Description of Artificial Sequence: Synthetic oligonucleotide
  Target: ATXN2; (-) strand; PAM type: YTN; PAM sequence: CTT
actgcaacctccgcctccta

SEQ ID NO: 82411 - DNA, 20 bp, Artificial Sequence
  Description of Artificial Sequence: Synthetic oligonucleotide
  Target: ATXN2; (-) strand; PAM type: YTN; PAM sequence: CTC
ggcttactgcaacctccgcc

SEQ ID NO: 82412 - DNA, 20 bp, Artificial Sequence
  Description of Artificial Sequence: Synthetic oligonucleotide
  Target: ATXN2; (-) strand; PAM type: YTN; PAM sequence: CTG
gaatgcagtgatgtgatctc

SEQ ID NO: 82413 - DNA, 20 bp, Artificial Sequence
  Description of Artificial Sequence: Synthetic oligonucleotide
  Target: ATXN2; (-) strand; PAM type: YTN; PAM sequence: CTG
tcacccaggctggaatgcag

SEQ ID NO: 82414 - DNA, 20 bp, Artificial Sequence
  Description of Artificial Sequence: Synthetic oligonucleotide
  Target: ATXN2; (-) strand; PAM type: YTN; PAM sequence: TTA
ccctgtcacccaggctggaa

SEQ ID NO: 82415 - DNA, 20 bp, Artificial Sequence
  Description of Artificial Sequence: Synthetic oligonucleotide
  Target: ATXN2; (-) strand; PAM type: YTN; PAM sequence: CTT
accctgtcacccaggctgga

SEQ ID NO: 82416 - DNA, 20 bp, Artificial Sequence
  Description of Artificial Sequence: Synthetic oligonucleotide
  Target: ATXN2; (-) strand; PAM type: YTN; PAM sequence: TTG
caggatcttaccctgtcacc

SEQ ID NO: 82417 - DNA, 20 bp, Artificial Sequence
  Description of Artificial Sequence: Synthetic oligonucleotide
  Target: ATXN2; (-) strand; PAM type: YTN; PAM sequence: TTG
tgtgtgtgtgttgcaggatc

SEQ ID NO: 82418 - DNA, 20 bp, Artificial Sequence
  Description of Artificial Sequence: Synthetic oligonucleotide
  Target: ATXN2; (-) strand; PAM type: YTN; PAM sequence: TTT
gtgtgtgtgtgttgcaggat

SEQ ID NO: 82419 - DNA, 20 bp, Artificial Sequence
  Description of Artificial Sequence: Synthetic oligonucleotide
  Target: ATXN2; (-) strand; PAM type: YTN; PAM sequence: TTG
tttgtgtgtgtgtgttgcag

SEQ ID NO: 82420 - DNA, 20 bp, Artificial Sequence
  Description of Artificial Sequence: Synthetic oligonucleotide
  Target: ATXN2; (-) strand; PAM type: YTN; PAM sequence: TTA
ttgtttgtgtgtgtgtgttg

SEQ ID NO: 82421 - DNA, 20 bp, Artificial Sequence
  Description of Artificial Sequence: Synthetic oligonucleotide
  Target: ATXN2; (-) strand; PAM type: YTN; PAM sequence: TTA
ttattgtttgtgtgtgtgtg

SEQ ID NO: 82422 - DNA, 20 bp, Artificial Sequence
  Description of Artificial Sequence: Synthetic oligonucleotide
  Target: ATXN2; (-) strand; PAM type: YTN; PAM sequence: TTA
ttattattgtttgtgtgtgt

SEQ ID NO: 82423 - DNA, 20 bp, Artificial Sequence
  Description of Artificial Sequence: Synthetic oligonucleotide
  Target: ATXN2; (-) strand; PAM type: YTN; PAM sequence: TTA
aattattattattgtttgtg

SEQ ID NO: 82424 - DNA, 20 bp, Artificial Sequence
  Description of Artificial Sequence: Synthetic oligonucleotide
  Target: ATXN2; (-) strand; PAM type: YTN; PAM sequence: TTT
aaattattattattgtttgt

SEQ ID NO: 82425 - DNA, 20 bp, Artificial Sequence
  Description of Artificial Sequence: Synthetic oligonucleotide
  Target: ATXN2; (-) strand; PAM type: YTN; PAM sequence: TTT
taaattattattattgtttg

SEQ ID NO: 82426 - DNA, 20 bp, Artificial Sequence
  Description of Artificial Sequence: Synthetic oligonucleotide
  Target: ATXN2; (-) strand; PAM type: YTN; PAM sequence: TTT
ttaaattattattattgttt

SEQ ID NO: 82427 - DNA, 20 bp, Artificial Sequence
  Description of Artificial Sequence: Synthetic oligonucleotide
  Target: ATXN2; (-) strand; PAM type: YTN; PAM sequence: TTT
tttaaattattattattgtt

SEQ ID NO: 82428 - DNA, 20 bp, Artificial Sequence
  Description of Artificial Sequence: Synthetic oligonucleotide
  Target: ATXN2; (-) strand; PAM type: YTN; PAM sequence: CTG
gttttttaaattattattat

SEQ ID NO: 82429 - DNA, 20 bp, Artificial Sequence
  Description of Artificial Sequence: Synthetic oligonucleotide
  Target: ATXN2; (-) strand; PAM type: YTN; PAM sequence: CTG
gctggttttttaaattatta

SEQ ID NO: 82430 - DNA, 20 bp, Artificial Sequence
  Description of Artificial Sequence: Synthetic oligonucleotide
  Target: ATXN2; (-) strand; PAM type: YTN; PAM sequence: CTA
tgcctggctggttttttaaa

SEQ ID NO: 82431 - DNA, 20 bp, Artificial Sequence
  Description of Artificial Sequence: Synthetic oligonucleotide
  Target: ATXN2; (-) strand; PAM type: YTN; PAM sequence: TTA
caggtgtgagccactatgcc

SEQ ID NO: 82432 - DNA, 20 bp, Artificial Sequence
  Description of Artificial Sequence: Synthetic oligonucleotide
  Target: ATXN2; (-) strand; PAM type: YTN; PAM sequence: CTG
ggattacaggtgtgagccac

SEQ ID NO: 82433 - DNA, 20 bp, Artificial Sequence
  Description of Artificial Sequence: Synthetic oligonucleotide
  Target: ATXN2; (-) strand; PAM type: YTN; PAM sequence: CTC
ccaaggtgctgggattacag

SEQ ID NO: 82434 - DNA, 20 bp, Artificial Sequence
  Description of Artificial Sequence: Synthetic oligonucleotide
  Target: ATXN2; (-) strand; PAM type: YTN; PAM sequence: TTG
gcctcccaaggtgctgggat

SEQ ID NO: 82435 - DNA, 20 bp, Artificial Sequence
  Description of Artificial Sequence: Synthetic oligonucleotide
  Target: ATXN2; (-) strand; PAM type: YTN; PAM sequence: CTT
ggcctcccaaggtgctggga

SEQ ID NO: 82436 - DNA, 20 bp, Artificial Sequence
  Description of Artificial Sequence: Synthetic oligonucleotide
  Target: ATXN2; (-) strand; PAM type: YTN; PAM sequence: CTC
cttggcctcccaaggtgctg

SEQ ID NO: 82437 - DNA, 20 bp, Artificial Sequence
  Description of Artificial Sequence: Synthetic oligonucleotide
  Target: ATXN2; (-) strand; PAM type: YTN; PAM sequence: TTG
ccctccttggcctcccaagg

SEQ ID NO: 82438 - DNA, 20 bp, Artificial Sequence
  Description of Artificial Sequence: Synthetic oligonucleotide
  Target: ATXN2; (-) strand; PAM type: YTN; PAM sequence: TTT
gccctccttggcctcccaag

SEQ ID NO: 82439 - DNA, 20 bp, Artificial Sequence
  Description of Artificial Sequence: Synthetic oligonucleotide
  Target: ATXN2; (-) strand; PAM type: YTN; PAM sequence: CTC
aaacaatttgccctccttgg

SEQ ID NO: 82440 - DNA, 20 bp, Artificial Sequence
  Description of Artificial Sequence: Synthetic oligonucleotide
  Target: ATXN2; (-) strand; PAM type: YTN; PAM sequence: CTG
acctcaaacaatttgccctc

SEQ ID NO: 82441 - DNA, 20 bp, Artificial Sequence
  Description of Artificial Sequence: Synthetic oligonucleotide
  Target: ATXN2; (-) strand; PAM type: YTN; PAM sequence: TTC
ctgacctcaaacaatttgcc

SEQ ID NO: 82442 - DNA, 20 bp, Artificial Sequence
  Description of Artificial Sequence: Synthetic oligonucleotide
  Target: ATXN2; (-) strand; PAM type: YTN; PAM sequence: TTG
aattcctgacctcaaacaat

SEQ ID NO: 82443 - DNA, 20 bp, Artificial Sequence
  Description of Artificial Sequence: Synthetic oligonucleotide
  Target: ATXN2; (-) strand; PAM type: YTN; PAM sequence: CTT
gaattcctgacctcaaacaa

SEQ ID NO: 82444 - DNA, 20 bp, Artificial Sequence
  Description of Artificial Sequence: Synthetic oligonucleotide
  Target: ATXN2; (-) strand; PAM type: YTN; PAM sequence: TTG
cccaggatggccttgaattc

SEQ ID NO: 82445 - DNA, 20 bp, Artificial Sequence
  Description of Artificial Sequence: Synthetic oligonucleotide
  Target: ATXN2; (-) strand; PAM type: YTN; PAM sequence: CTG
ttgcccaggatggccttgaa

SEQ ID NO: 82446 - DNA, 20 bp, Artificial Sequence
  Description of Artificial Sequence: Synthetic oligonucleotide
  Target: ATXN2; (-) strand; PAM type: YTN; PAM sequence: TTA
cctgttgcccaggatggcct

SEQ ID NO: 82447 - DNA, 20 bp, Artificial Sequence
  Description of Artificial Sequence: Synthetic oligonucleotide
  Target: ATXN2; (-) strand; PAM type: YTN; PAM sequence: TTT
acctgttgcccaggatggcc

SEQ ID NO: 82448 - DNA, 20 bp, Artificial Sequence
  Description of Artificial Sequence: Synthetic oligonucleotide
  Target: ATXN2; (-) strand; PAM type: YTN; PAM sequence: TTT
tacctgttgcccaggatggc

SEQ ID NO: 82449 - DNA, 20 bp, Artificial Sequence
  Description of Artificial Sequence: Synthetic oligonucleotide
  Target: ATXN2; (-) strand; PAM type: YTN; PAM sequence: TTG
tagggacagagattttacct

SEQ ID NO: 82450 - DNA, 20 bp, Artificial Sequence
  Description of Artificial Sequence: Synthetic oligonucleotide
  Target: ATXN2; (-) strand; PAM type: YTN; PAM sequence: TTT
gtagggacagagattttacc

SEQ ID NO: 82451 - DNA, 20 bp, Artificial Sequence
  Description of Artificial Sequence: Synthetic oligonucleotide
  Target: ATXN2; (-) strand; PAM type: YTN; PAM sequence: TTT
tgtagggacagagattttac

SEQ ID NO: 82452 - DNA, 20 bp, Artificial Sequence
  Description of Artificial Sequence: Synthetic oligonucleotide
  Target: ATXN2; (-) strand; PAM type: YTN; PAM sequence: TTA
ttttgtagggacagagattt

SEQ ID NO: 82453 - DNA, 20 bp, Artificial Sequence
  Description of Artificial Sequence: Synthetic oligonucleotide
  Target: ATXN2; (-) strand; PAM type: YTN; PAM sequence: TTT
attttgtagggacagagatt

SEQ ID NO: 82454 - DNA, 20 bp, Artificial Sequence
  Description of Artificial Sequence: Synthetic oligonucleotide
  Target: ATXN2; (-) strand; PAM type: YTN; PAM sequence: TTT
tattttgtagggacagagat

SEQ ID NO: 82455 - DNA, 20 bp, Artificial Sequence
  Description of Artificial Sequence: Synthetic oligonucleotide
  Target: ATXN2; (-) strand; PAM type: YTN; PAM sequence: TTT
ttattttgtagggacagaga

SEQ ID NO: 82456 - DNA, 20 bp, Artificial Sequence
  Description of Artificial Sequence: Synthetic oligonucleotide
  Target: ATXN2; (-) strand; PAM type: YTN; PAM sequence: TTG
tttttattttgtagggacag

SEQ ID NO: 82457 - DNA, 20 bp, Artificial Sequence
  Description of Artificial Sequence: Synthetic oligonucleotide
  Target: ATXN2; (-) strand; PAM type: YTN; PAM sequence: TTT
gtttttattttgtagggaca

SEQ ID NO: 82458 - DNA, 20 bp, Artificial Sequence
  Description of Artificial Sequence: Synthetic oligonucleotide
  Target: ATXN2; (-) strand; PAM type: YTN; PAM sequence: TTG
tttgtttttattttgtaggg

SEQ ID NO: 82459 - DNA, 20 bp, Artificial Sequence
  Description of Artificial Sequence: Synthetic oligonucleotide
  Target: ATXN2; (-) strand; PAM type: YTN; PAM sequence: TTT
gtttgtttttattttgtagg

SEQ ID NO: 82460 - DNA, 20 bp, Artificial Sequence
  Description of Artificial Sequence: Synthetic oligonucleotide
  Target: ATXN2; (-) strand; PAM type: YTN; PAM sequence: TTT
tgtttgtttttattttgtag

SEQ ID NO: 82461 - DNA, 20 bp, Artificial Sequence
  Description of Artificial Sequence: Synthetic oligonucleotide
  Target: ATXN2; (-) strand; PAM type: YTN; PAM sequence: TTT
ttgtttgtttttattttgta

SEQ ID NO: 82462 - DNA, 20 bp, Artificial Sequence
  Description of Artificial Sequence: Synthetic oligonucleotide
  Target: ATXN2; (-) strand; PAM type: YTN; PAM sequence: TTT
tttgtttgtttttattttgt

SEQ ID NO: 82463 - DNA, 20 bp, Artificial Sequence
  Description of Artificial Sequence: Synthetic oligonucleotide
  Target: ATXN2; (-) strand; PAM type: YTN; PAM sequence: CTT
ttttgtttgtttttattttg

SEQ ID NO: 82464 - DNA, 20 bp, Artificial Sequence
  Description of Artificial Sequence: Synthetic oligonucleotide
  Target: ATXN2; (-) strand; PAM type: YTN; PAM sequence: CTA
gcttttttgtttgtttttat

SEQ ID NO: 82465 - DNA, 20 bp, Artificial Sequence
  Description of Artificial Sequence: Synthetic oligonucleotide
  Target: ATXN2; (-) strand; PAM type: YTN; PAM sequence: CTG
cgcctagcttttttgtttgt

SEQ ID NO: 82466 - DNA, 20 bp, Artificial Sequence
  Description of Artificial Sequence: Synthetic oligonucleotide
  Target: ATXN2; (-) strand; PAM type: YTN; PAM sequence: TTA
caggcataagccactgcgcc

SEQ ID NO: 82467 - DNA, 20 bp, Artificial Sequence
  Description of Artificial Sequence: Synthetic oligonucleotide
  Target: ATXN2; (-) strand; PAM type: YTN; PAM sequence: CTG
gaattacaggcataagccac

SEQ ID NO: 82468 - DNA, 20 bp, Artificial Sequence
  Description of Artificial Sequence: Synthetic oligonucleotide
  Target: ATXN2; (-) strand; PAM type: YTN; PAM sequence: CTG
aagtgctggaattacaggca

SEQ ID NO: 82469 - DNA, 20 bp, Artificial Sequence
  Description of Artificial Sequence: Synthetic oligonucleotide
  Target: ATXN2; (-) strand; PAM type: YTN; PAM sequence: CTC
ctgaagtgctggaattacag

SEQ ID NO: 82470 - DNA, 20 bp, Artificial Sequence
  Description of Artificial Sequence: Synthetic oligonucleotide
  Target: ATXN2; (-) strand; PAM type: YTN; PAM sequence: TTG
gcctcctgaagtgctggaat

SEQ ID NO: 82471 - DNA, 20 bp, Artificial Sequence
  Description of Artificial Sequence: Synthetic oligonucleotide
  Target: ATXN2; (-) strand; PAM type: YTN; PAM sequence: CTT
ggcctcctgaagtgctggaa

SEQ ID NO: 82472 - DNA, 20 bp, Artificial Sequence
  Description of Artificial Sequence: Synthetic oligonucleotide
  Target: ATXN2; (-) strand; PAM type: YTN; PAM sequence: CTC
aggtgatccatataccttgg

SEQ ID NO: 82473 - DNA, 20 bp, Artificial Sequence
  Description of Artificial Sequence: Synthetic oligonucleotide
  Target: ATXN2; (-) strand; PAM type: YTN; PAM sequence: CTC
ccgacctcaggtgatccata

SEQ ID NO: 82474 - DNA, 20 bp, Artificial Sequence
  Description of Artificial Sequence: Synthetic oligonucleotide
  Target: ATXN2; (-) strand; PAM type: YTN; PAM sequence: CTC
gaactcccgacctcaggtga

SEQ ID NO: 82475 - DNA, 20 bp, Artificial Sequence
  Description of Artificial Sequence: Synthetic oligonucleotide
  Target: ATXN2; (-) strand; PAM type: YTN; PAM sequence: CTG
gtctcgaactcccgacctca

SEQ ID NO: 82476 - DNA, 20 bp, Artificial Sequence
  Description of Artificial Sequence: Synthetic oligonucleotide
  Target: ATXN2; (-) strand; PAM type: YTN; PAM sequence: TTG
gccaggctggtctcgaactc

SEQ ID NO: 82477 - DNA, 20 bp, Artificial Sequence
  Description of Artificial Sequence: Synthetic oligonucleotide
  Target: ATXN2; (-) strand; PAM type: YTN; PAM sequence: TTA
tcatgttggccaggctggtc

SEQ ID NO: 82478 - DNA, 20 bp, Artificial Sequence
  Description of Artificial Sequence: Synthetic oligonucleotide
  Target: ATXN2; (-) strand; PAM type: YTN; PAM sequence: TTT
atcatgttggccaggctggt

SEQ ID NO: 82479 - DNA, 20 bp, Artificial Sequence
  Description of Artificial Sequence: Synthetic oligonucleotide
  Target: ATXN2; (-) strand; PAM type: YTN; PAM sequence: TTT
tatcatgttggccaggctgg

SEQ ID NO: 82480 - DNA, 20 bp, Artificial Sequence
  Description of Artificial Sequence: Synthetic oligonucleotide
  Target: ATXN2; (-) strand; PAM type: YTN; PAM sequence: TTG
gtagagatggggttttatca

SEQ ID NO: 82481 - DNA, 20 bp, Artificial Sequence
  Description of Artificial Sequence: Synthetic oligonucleotide
  Target: ATXN2; (-) strand; PAM type: YTN; PAM sequence: TTA
ttggtagagatggggtttta

SEQ ID NO: 82482 - DNA, 20 bp, Artificial Sequence
  Description of Artificial Sequence: Synthetic oligonucleotide
  Target: ATXN2; (-) strand; PAM type: YTN; PAM sequence: TTG
tattattggtagagatgggg

SEQ ID NO: 82483 - DNA, 20 bp, Artificial Sequence
  Description of Artificial Sequence: Synthetic oligonucleotide
  Target: ATXN2; (-) strand; PAM type: YTN; PAM sequence: TTT
gtattattggtagagatggg

SEQ ID NO: 82484 - DNA, 20 bp, Artificial Sequence
  Description of Artificial Sequence: Synthetic oligonucleotide
  Target: ATXN2; (-) strand; PAM type: YTN; PAM sequence: TTT
tgtattattggtagagatgg

SEQ ID NO: 82485 - DNA, 20 bp, Artificial Sequence
  Description of Artificial Sequence: Synthetic oligonucleotide
  Target: ATXN2; (-) strand; PAM type: YTN; PAM sequence: TTT
ttgtattattggtagagatg

SEQ ID NO: 82486 - DNA, 20 bp, Artificial Sequence
  Description of Artificial Sequence: Synthetic oligonucleotide
  Target: ATXN2; (-) strand; PAM type: YTN; PAM sequence: CTA
atttttgtattattggtaga

SEQ ID NO: 82487 - DNA, 20 bp, Artificial Sequence
  Description of Artificial Sequence: Synthetic oligonucleotide
  Target: ATXN2; (-) strand; PAM type: YTN; PAM sequence: CTG
gctaatttttgtattattgg

SEQ ID NO: 82488 - DNA, 20 bp, Artificial Sequence
  Description of Artificial Sequence: Synthetic oligonucleotide
  Target: ATXN2; (-) strand; PAM type: YTN; PAM sequence: CTA
cacctggctaatttttgtat

SEQ ID NO: 82489 - DNA, 20 bp, Artificial Sequence
  Description of Artificial Sequence: Synthetic oligonucleotide
  Target: ATXN2; (-) strand; PAM type: YTN; PAM sequence: TTA
taggcatgcgccactacacc

SEQ ID NO: 82490 - DNA, 20 bp, Artificial Sequence
  Description of Artificial Sequence: Synthetic oligonucleotide
  Target: ATXN2; (-) strand; PAM type: YTN; PAM sequence: CTG
ggattataggcatgcgccac

SEQ ID NO: 82491 - DNA, 20 bp, Artificial Sequence
  Description of Artificial Sequence: Synthetic oligonucleotide
  Target: ATXN2; (-) strand; PAM type: YTN; PAM sequence: CTC
ccgagtagctgggattatag

SEQ ID NO: 82492 - DNA, 20 bp, Artificial Sequence
  Description of Artificial Sequence: Synthetic oligonucleotide
  Target: ATXN2; (-) strand; PAM type: YTN; PAM sequence: CTC
agcctcccgagtagctggga

SEQ ID NO: 82493 - DNA, 20 bp, Artificial Sequence
  Description of Artificial Sequence: Synthetic oligonucleotide
  Target: ATXN2; (-) strand; PAM type: YTN; PAM sequence: CTC
atgcctcagcctcccgagta

SEQ ID NO: 82494 - DNA, 20 bp, Artificial Sequence
  Description of Artificial Sequence: Synthetic oligonucleotide
  Target: ATXN2; (-) strand; PAM type: YTN; PAM sequence: TTC
tcatgcctcagcctcccgag

SEQ ID NO: 82495 - DNA, 20 bp, Artificial Sequence
  Description of Artificial Sequence: Synthetic oligonucleotide
  Target: ATXN2; (-) strand; PAM type: YTN; PAM sequence: TTC
aaatgattctcatgcctcag

SEQ ID NO: 82496 - DNA, 20 bp, Artificial Sequence
  Description of Artificial Sequence: Synthetic oligonucleotide
  Target: ATXN2; (-) strand; PAM type: YTN; PAM sequence: TTG
cgttcaaatgattctcatgc

SEQ ID NO: 82497 - DNA, 20 bp, Artificial Sequence
  Description of Artificial Sequence: Synthetic oligonucleotide
  Target: ATXN2; (-) strand; PAM type: YTN; PAM sequence: CTT
gcgttcaaatgattctcatg

SEQ ID NO: 82498 - DNA, 20 bp, Artificial Sequence
  Description of Artificial Sequence: Synthetic oligonucleotide
  Target: ATXN2; (-) strand; PAM type: YTN; PAM sequence: CTC
ttgcgttcaaatgattctca

SEQ ID NO: 82499 - DNA, 20 bp, Artificial Sequence
  Description of Artificial Sequence: Synthetic oligonucleotide
  Target: ATXN2; (-) strand; PAM type: YTN; PAM sequence: CTG
cctcttgcgttcaaatgatt

SEQ ID NO: 82500 - DNA, 20 bp, Artificial Sequence
  Description of Artificial Sequence: Synthetic oligonucleotide
  Target: ATXN2; (-) strand; PAM type: YTN; PAM sequence: CTC
tgcctcttgcgttcaaatga

SEQ ID NO: 82501 - DNA, 20 bp, Artificial Sequence
  Description of Artificial Sequence: Synthetic oligonucleotide
  Target: ATXN2; (-) strand; PAM type: YTN; PAM sequence: CTC
agtgcaacctctgcctcttg

SEQ ID NO: 82502 - DNA, 20 bp, Artificial Sequence
  Description of Artificial Sequence: Synthetic oligonucleotide
  Target: ATXN2; (-) strand; PAM type: YTN; PAM sequence: CTA
gggtggggtgcagtggcagg

SEQ ID NO: 82503 - DNA, 20 bp, Artificial Sequence
  Description of Artificial Sequence: Synthetic oligonucleotide
  Target: ATXN2; (-) strand; PAM type: YTN; PAM sequence: TTG
cctagggtggggtgcagtgg

SEQ ID NO: 82504 - DNA, 20 bp, Artificial Sequence
  Description of Artificial Sequence: Synthetic oligonucleotide
  Target: ATXN2; (-) strand; PAM type: YTN; PAM sequence: CTG
ttgcctagggtggggtgcag

SEQ ID NO: 82505 - DNA, 20 bp, Artificial Sequence
  Description of Artificial Sequence: Synthetic oligonucleotide
  Target: ATXN2; (-) strand; PAM type: YTN; PAM sequence: CTC
tgttgcctagggtggggtgc

SEQ ID NO: 82506 - DNA, 20 bp, Artificial Sequence
  Description of Artificial Sequence: Synthetic oligonucleotide
  Target: ATXN2; (-) strand; PAM type: YTN; PAM sequence: TTC
actctgttgcctagggtggg

SEQ ID NO: 82507 - DNA, 20 bp, Artificial Sequence
  Description of Artificial Sequence: Synthetic oligonucleotide
  Target: ATXN2; (-) strand; PAM type: YTN; PAM sequence: TTT
cactctgttgcctagggtgg

SEQ ID NO: 82508 - DNA, 20 bp, Artificial Sequence
  Description of Artificial Sequence: Synthetic oligonucleotide
  Target: ATXN2; (-) strand; PAM type: YTN; PAM sequence: TTG
tttcactctgttgcctaggg

SEQ ID NO: 82509 - DNA, 20 bp, Artificial Sequence
  Description of Artificial Sequence: Synthetic oligonucleotide
  Target: ATXN2; (-) strand; PAM type: YTN; PAM sequence: TTT
gtttcactctgttgcctagg

SEQ ID NO: 82510 - DNA, 20 bp, Artificial Sequence
  Description of Artificial Sequence: Synthetic oligonucleotide
  Target: ATXN2; (-) strand; PAM type: YTN; PAM sequence: TTT
tgtttcactctgttgcctag

SEQ ID NO: 82511 - DNA, 20 bp, Artificial Sequence
  Description of Artificial Sequence: Synthetic oligonucleotide
  Target: ATXN2; (-) strand; PAM type: YTN; PAM sequence: TTT
ttgtttcactctgttgccta

SEQ ID NO: 82512 - DNA, 20 bp, Artificial Sequence
  Description of Artificial Sequence: Synthetic oligonucleotide
  Target: ATXN2; (-) strand; PAM type: YTN; PAM sequence: CTA
tgcccagcaaaatttttgtt

SEQ ID NO: 82513 - DNA, 20 bp, Artificial Sequence
  Description of Artificial Sequence: Synthetic oligonucleotide
  Target: ATXN2; (-) strand; PAM type: YTN; PAM sequence: CTG
ggaccacaggcatgcgccac

SEQ ID NO: 82514 - DNA, 20 bp, Artificial Sequence
  Description of Artificial Sequence: Synthetic oligonucleotide
  Target: ATXN2; (-) strand; PAM type: YTN; PAM sequence: CTG
agtagctgggaccacaggca

SEQ ID NO: 82515 - DNA, 20 bp, Artificial Sequence
  Description of Artificial Sequence: Synthetic oligonucleotide
  Target: ATXN2; (-) strand; PAM type: YTN; PAM sequence: CTC
ctgagtagctgggaccacag

SEQ ID NO: 82516 - DNA, 20 bp, Artificial Sequence
  Description of Artificial Sequence: Synthetic oligonucleotide
  Target: ATXN2; (-) strand; PAM type: YTN; PAM sequence: CTC
agcctcctgagtagctggga

SEQ ID NO: 82517 - DNA, 20 bp, Artificial Sequence
  Description of Artificial Sequence: Synthetic oligonucleotide
  Target: ATXN2; (-) strand; PAM type: YTN; PAM sequence: CTA
tctcagcctcctgagtagct

SEQ ID NO: 82518 - DNA, 20 bp, Artificial Sequence
  Description of Artificial Sequence: Synthetic oligonucleotide
  Target: ATXN2; (-) strand; PAM type: YTN; PAM sequence: CTC
ctatctcagcctcctgagta

SEQ ID NO: 82519 - DNA, 20 bp, Artificial Sequence
  Description of Artificial Sequence: Synthetic oligonucleotide
  Target: ATXN2; (-) strand; PAM type: YTN; PAM sequence: CTC
aggcccaagtgatcctccta

SEQ ID NO: 82520 - DNA, 20 bp, Artificial Sequence
  Description of Artificial Sequence: Synthetic oligonucleotide
  Target: ATXN2; (-) strand; PAM type: YTN; PAM sequence: TTC
tcaggcccaagtgatcctcc

SEQ ID NO: 82521 - DNA, 20 bp, Artificial Sequence
  Description of Artificial Sequence: Synthetic oligonucleotide
  Target: ATXN2; (-) strand; PAM type: YTN; PAM sequence: CTC
gagttctcaggcccaagtga

SEQ ID NO: 82522 - DNA, 20 bp, Artificial Sequence
  Description of Artificial Sequence: Synthetic oligonucleotide
  Target: ATXN2; (-) strand; PAM type: YTN; PAM sequence: TTG
caacctcgagttctcaggcc

SEQ ID NO: 82523 - DNA, 20 bp, Artificial Sequence
  Description of Artificial Sequence: Synthetic oligonucleotide
  Target: ATXN2; (-) strand; PAM type: YTN; PAM sequence: CTC
attgcaacctcgagttctca

SEQ ID NO: 82524 - DNA, 20 bp, Artificial Sequence
  Description of Artificial Sequence: Synthetic oligonucleotide
  Target: ATXN2; (-) strand; PAM type: YTN; PAM sequence: CTG
tcacccaggcgggagtgcag

SEQ ID NO: 82525 - DNA, 20 bp, Artificial Sequence
  Description of Artificial Sequence: Synthetic oligonucleotide
  Target: ATXN2; (-) strand; PAM type: YTN; PAM sequence: CTC
tgtcacccaggcgggagtgc

SEQ ID NO: 82526 - DNA, 20 bp, Artificial Sequence
  Description of Artificial Sequence: Synthetic oligonucleotide
  Target: ATXN2; (-) strand; PAM type: YTN; PAM sequence: CTA
gctctgtcacccaggcggga

SEQ ID NO: 82527 - DNA, 20 bp, Artificial Sequence
  Description of Artificial Sequence: Synthetic oligonucleotide
  Target: ATXN2; (-) strand; PAM type: YTN; PAM sequence: TTC
tagctctgtcacccaggcgg

SEQ ID NO: 82528 - DNA, 20 bp, Artificial Sequence
  Description of Artificial Sequence: Synthetic oligonucleotide
  Target: ATXN2; (-) strand; PAM type: YTN; PAM sequence: TTG
agacaggttctagctctgtc

SEQ ID NO: 82529 - DNA, 20 bp, Artificial Sequence
  Description of Artificial Sequence: Synthetic oligonucleotide
  Target: ATXN2; (-) strand; PAM type: YTN; PAM sequence: TTT
gagacaggttctagctctgt

SEQ ID NO: 82530 - DNA, 20 bp, Artificial Sequence
  Description of Artificial Sequence: Synthetic oligonucleotide
  Target: ATXN2; (-) strand; PAM type: YTN; PAM sequence: TTT
tgagacaggttctagctctg

SEQ ID NO: 82531 - DNA, 20 bp, Artificial Sequence
  Description of Artificial Sequence: Synthetic oligonucleotide
  Target: ATXN2; (-) strand; PAM type: YTN; PAM sequence: TTT
ttgagacaggttctagctct

SEQ ID NO: 82532 - DNA, 20 bp, Artificial Sequence
  Description of Artificial Sequence: Synthetic oligonucleotide
  Target: ATXN2; (-) strand; PAM type: YTN; PAM sequence: TTT
tttgagacaggttctagctc

SEQ ID NO: 82533 - DNA, 20 bp, Artificial Sequence
  Description of Artificial Sequence: Synthetic oligonucleotide
  Target: ATXN2; (-) strand; PAM type: YTN; PAM sequence: TTT
ttttgagacaggttctagct

SEQ ID NO: 82534 - DNA, 20 bp, Artificial Sequence
  Description of Artificial Sequence: Synthetic oligonucleotide
  Target: ATXN2; (-) strand; PAM type: YTN; PAM sequence: TTA
tttttttgagacaggttcta

SEQ ID NO: 82535 - DNA, 20 bp, Artificial Sequence
  Description of Artificial Sequence: Synthetic oligonucleotide
  Target: ATXN2; (-) strand; PAM type: YTN; PAM sequence: CTT
atttttttgagacaggttct

SEQ ID NO: 82536 - DNA, 20 bp, Artificial Sequence
  Description of Artificial Sequence: Synthetic oligonucleotide
  Target: ATXN2; (-) strand; PAM type: YTN; PAM sequence: CTC
gccttatttttttgagacag

SEQ ID NO: 82537 - DNA, 20 bp, Artificial Sequence
  Description of Artificial Sequence: Synthetic oligonucleotide
  Target: ATXN2; (-) strand; PAM type: YTN; PAM sequence: CTG
cgcctcgccttatttttttg

SEQ ID NO: 82538 - DNA, 20 bp, Artificial Sequence
  Description of Artificial Sequence: Synthetic oligonucleotide
  Target: ATXN2; (-) strand; PAM type: YTN; PAM sequence: TTA
cagcatgagccactgcgcct

SEQ ID NO: 82539 - DNA, 20 bp, Artificial Sequence
  Description of Artificial Sequence: Synthetic oligonucleotide
  Target: ATXN2; (-) strand; PAM type: YTN; PAM sequence: TTG
ggattacagcatgagccact

SEQ ID NO: 82540 - DNA, 20 bp, Artificial Sequence
  Description of Artificial Sequence: Synthetic oligonucleotide
  Target: ATXN2; (-) strand; PAM type: YTN; PAM sequence: TTT
gggattacagcatgagccac

SEQ ID NO: 82541 - DNA, 20 bp, Artificial Sequence
  Description of Artificial Sequence: Synthetic oligonucleotide
  Target: ATXN2; (-) strand; PAM type: YTN; PAM sequence: TTT
tgggattacagcatgagcca

SEQ ID NO: 82542 - DNA, 20 bp, Artificial Sequence
  Description of Artificial Sequence: Synthetic oligonucleotide
  Target: ATXN2; (-) strand; PAM type: YTN; PAM sequence: CTC
ccaaagttttgggattacag

SEQ ID NO: 82543 - DNA, 20 bp, Artificial Sequence
  Description of Artificial Sequence: Synthetic oligonucleotide
  Target: ATXN2; (-) strand; PAM type: YTN; PAM sequence: TTG
gcctcccaaagttttgggat

SEQ ID NO: 82544 - DNA, 20 bp, Artificial Sequence
  Description of Artificial Sequence: Synthetic oligonucleotide
  Target: ATXN2; (-) strand; PAM type: YTN; PAM sequence: CTT
ggcctcccaaagttttggga

SEQ ID NO: 82545 - DNA, 20 bp, Artificial Sequence
  Description of Artificial Sequence: Synthetic oligonucleotide
  Target: ATXN2; (-) strand; PAM type: YTN; PAM sequence: CTG
tcttggcctcccaaagtttt

SEQ ID NO: 82546 - DNA, 20 bp, Artificial Sequence
  Description of Artificial Sequence: Synthetic oligonucleotide
  Target: ATXN2; (-) strand; PAM type: YTN; PAM sequence: CTG
cctgtcttggcctcccaaag

SEQ ID NO: 82547 - DNA, 20 bp, Artificial Sequence
  Description of Artificial Sequence: Synthetic oligonucleotide
  Target: ATXN2; (-) strand; PAM type: YTN; PAM sequence: TTA
ggtgatctgcctgtcttggc

SEQ ID NO: 82548 - DNA, 20 bp, Artificial Sequence
  Description of Artificial Sequence: Synthetic oligonucleotide
  Target: ATXN2; (-) strand; PAM type: YTN; PAM sequence: CTT
aggtgatctgcctgtcttgg

SEQ ID NO: 82549 - DNA, 20 bp, Artificial Sequence
  Description of Artificial Sequence: Synthetic oligonucleotide
  Target: ATXN2; (-) strand; PAM type: YTN; PAM sequence: CTG
accttaggtgatctgcctgt

SEQ ID NO: 82550 - DNA, 20 bp, Artificial Sequence
  Description of Artificial Sequence: Synthetic oligonucleotide
  Target: ATXN2; (-) strand; PAM type: YTN; PAM sequence: CTC
ctgaccttaggtgatctgcc

SEQ ID NO: 82551 - DNA, 20 bp, Artificial Sequence
  Description of Artificial Sequence: Synthetic oligonucleotide
  Target: ATXN2; (-) strand; PAM type: YTN; PAM sequence: TTG
aactcctgaccttaggtgat

SEQ ID NO: 82552 - DNA, 20 bp, Artificial Sequence
  Description of Artificial Sequence: Synthetic oligonucleotide
  Target: ATXN2; (-) strand; PAM type: YTN; PAM sequence: CTT
gaactcctgaccttaggtga

SEQ ID NO: 82553 - DNA, 20 bp, Artificial Sequence
  Description of Artificial Sequence: Synthetic oligonucleotide
  Target: ATXN2; (-) strand; PAM type: YTN; PAM sequence: CTC
gtcttgaactcctgacctta

SEQ ID NO: 82554 - DNA, 20 bp, Artificial Sequence
  Description of Artificial Sequence: Synthetic oligonucleotide
  Target: ATXN2; (-) strand; PAM type: YTN; PAM sequence: TTG
gccaggctcgtcttgaactc

SEQ ID NO: 82555 - DNA, 20 bp, Artificial Sequence
  Description of Artificial Sequence: Synthetic oligonucleotide
  Target: ATXN2; (-) strand; PAM type: YTN; PAM sequence: TTC
accatgttggccaggctcgt

SEQ ID NO: 82556 - DNA, 20 bp, Artificial Sequence
  Description of Artificial Sequence: Synthetic oligonucleotide
  Target: ATXN2; (-) strand; PAM type: YTN; PAM sequence: TTT
caccatgttggccaggctcg

SEQ ID NO: 82557 - DNA, 20 bp, Artificial Sequence
  Description of Artificial Sequence: Synthetic oligonucleotide
  Target: ATXN2; (-) strand; PAM type: YTN; PAM sequence: TTA
gtagagatggggtttcacca

SEQ ID NO: 82558 - DNA, 20 bp, Artificial Sequence
  Description of Artificial Sequence: Synthetic oligonucleotide
  Target: ATXN2; (-) strand; PAM type: YTN; PAM sequence: TTT
agtagagatggggtttcacc

SEQ ID NO: 82559 - DNA, 20 bp, Artificial Sequence
  Description of Artificial Sequence: Synthetic oligonucleotide
  Target: ATXN2; (-) strand; PAM type: YTN; PAM sequence: TTT
tagtagagatggggtttcac

SEQ ID NO: 82560 - DNA, 20 bp, Artificial Sequence
  Description of Artificial Sequence: Synthetic oligonucleotide
  Target: ATXN2; (-) strand; PAM type: YTN; PAM sequence: TTT
ttagtagagatggggtttca

SEQ ID NO: 82561 - DNA, 20 bp, Artificial Sequence
  Description of Artificial Sequence: Synthetic oligonucleotide
  Target: ATXN2; (-) strand; PAM type: YTN; PAM sequence: TTT
tttagtagagatggggtttc

SEQ ID NO: 82562 - DNA, 20 bp, Artificial Sequence
  Description of Artificial Sequence: Synthetic oligonucleotide
  Target: ATXN2; (-) strand; PAM type: YTN; PAM sequence: TTT
ttttagtagagatggggttt

SEQ ID NO: 82563 - DNA, 20 bp, Artificial Sequence
  Description of Artificial Sequence: Synthetic oligonucleotide
  Target: ATXN2; (-) strand; PAM type: YTN; PAM sequence: TTT
tttttagtagagatggggtt

SEQ ID NO: 82564 - DNA, 20 bp, Artificial Sequence
  Description of Artificial Sequence: Synthetic oligonucleotide
  Target: ATXN2; (-) strand; PAM type: YTN; PAM sequence: TTT
ttttttagtagagatggggt

SEQ ID NO: 82565 - DNA, 20 bp, Artificial Sequence
  Description of Artificial Sequence: Synthetic oligonucleotide
  Target: ATXN2; (-) strand; PAM type: YTN; PAM sequence: TTG
tatttttttttagtagagat

SEQ ID NO: 82566 - DNA, 20 bp, Artificial Sequence
  Description of Artificial Sequence: Synthetic oligonucleotide
  Target: ATXN2; (-) strand; PAM type: YTN; PAM sequence: TTT
gtatttttttttagtagaga

SEQ ID NO: 82567 - DNA, 20 bp, Artificial Sequence
  Description of Artificial Sequence: Synthetic oligonucleotide
  Target: ATXN2; (-) strand; PAM type: YTN; PAM sequence: TTT
tgtatttttttttagtagag

SEQ ID NO: 82568 - DNA, 20 bp, Artificial Sequence
  Description of Artificial Sequence: Synthetic oligonucleotide
  Target: ATXN2; (-) strand; PAM type: YTN; PAM sequence: TTT
ttgtatttttttttagtaga

SEQ ID NO: 82569 - DNA, 20 bp, Artificial Sequence
  Description of Artificial Sequence: Synthetic oligonucleotide
  Target: ATXN2; (-) strand; PAM type: YTN; PAM sequence: CTG
gcaaatttttgtattttttt

SEQ ID NO: 82570 - DNA, 20 bp, Artificial Sequence
  Description of Artificial Sequence: Synthetic oligonucleotide
  Target: ATXN2; (-) strand; PAM type: YTN; PAM sequence: CTA
cacctggcaaatttttgtat

SEQ ID NO: 82571 - DNA, 20 bp, Artificial Sequence
  Description of Artificial Sequence: Synthetic oligonucleotide
  Target: ATXN2; (-) strand; PAM type: YTN; PAM sequence: TTA
caggcatgcaccactacacc

SEQ ID NO: 82572 - DNA, 20 bp, Artificial Sequence
  Description of Artificial Sequence: Synthetic oligonucleotide
  Target: ATXN2; (-) strand; PAM type: YTN; PAM sequence: CTG
ggattacaggcatgcaccac

SEQ ID NO: 82573 - DNA, 20 bp, Artificial Sequence
  Description of Artificial Sequence: Synthetic oligonucleotide
  Target: ATXN2; (-) strand; PAM type: YTN; PAM sequence: CTG
agtagctgggattacaggca

SEQ ID NO: 82574 - DNA, 20 bp, Artificial Sequence
  Description of Artificial Sequence: Synthetic oligonucleotide
  Target: ATXN2; (-) strand; PAM type: YTN; PAM sequence: CTC
ctgagtagctgggattacag

SEQ ID NO: 82575 - DNA, 20 bp, Artificial Sequence
  Description of Artificial Sequence: Synthetic oligonucleotide
  Target: ATXN2; (-) strand; PAM type: YTN; PAM sequence: CTC
agcctcctgagtagctggga

SEQ ID NO: 82576 - DNA, 20 bp, Artificial Sequence
  Description of Artificial Sequence: Synthetic oligonucleotide
  Target: ATXN2; (-) strand; PAM type: YTN; PAM sequence: CTG
cctcagcctcctgagtagct

SEQ ID NO: 82577 - DNA, 20 bp, Artificial Sequence
  Description of Artificial Sequence: Synthetic oligonucleotide
  Target: ATXN2; (-) strand; PAM type: YTN; PAM sequence: CTC
ctgcctcagcctcctgagta

SEQ ID NO: 82578 - DNA, 20 bp, Artificial Sequence
  Description of Artificial Sequence: Synthetic oligonucleotide
  Target: ATXN2; (-) strand; PAM type: YTN; PAM sequence: TTC
tcctgcctcagcctcctgag

SEQ ID NO: 82579 - DNA, 20 bp, Artificial Sequence
  Description of Artificial Sequence: Synthetic oligonucleotide
  Target: ATXN2; (-) strand; PAM type: YTN; PAM sequence: TTC
cagtgattctcctgcctcag

SEQ ID NO: 82580 - DNA, 20 bp, Artificial Sequence
  Description of Artificial Sequence: Synthetic oligonucleotide
  Target: ATXN2; (-) strand; PAM type: YTN; PAM sequence: TTC
ccaggttccagtgattctcc

SEQ ID NO: 82581 - DNA, 20 bp, Artificial Sequence
  Description of Artificial Sequence: Synthetic oligonucleotide
  Target: ATXN2; (-) strand; PAM type: YTN; PAM sequence: CTT
cccaggttccagtgattctc

SEQ ID NO: 82582 - DNA, 20 bp, Artificial Sequence
  Description of Artificial Sequence: Synthetic oligonucleotide
  Target: ATXN2; (-) strand; PAM type: YTN; PAM sequence: CTC
cacttcccaggttccagtga

SEQ ID NO: 82583 - DNA, 20 bp, Artificial Sequence
  Description of Artificial Sequence: Synthetic oligonucleotide
  Target: ATXN2; (-) strand; PAM type: YTN; PAM sequence: CTG
taacctccacttcccaggtt

SEQ ID NO: 82584 - DNA, 20 bp, Artificial Sequence
  Description of Artificial Sequence: Synthetic oligonucleotide
  Target: ATXN2; (-) strand; PAM type: YTN; PAM sequence: CTC
actgtaacctccacttccca

SEQ ID NO: 82585 - DNA, 20 bp, Artificial Sequence
  Description of Artificial Sequence: Synthetic oligonucleotide
  Target: ATXN2; (-) strand; PAM type: YTN; PAM sequence: CTC
ggctcactgtaacctccact

SEQ ID NO: 82586 - DNA, 20 bp, Artificial Sequence
  Description of Artificial Sequence: Synthetic oligonucleotide
  Target: ATXN2; (-) strand; PAM type: YTN; PAM sequence: CTG
gaaagcagtggcataatctc

SEQ ID NO: 82587 - DNA, 20 bp, Artificial Sequence
  Description of Artificial Sequence: Synthetic oligonucleotide
  Target: ATXN2; (-) strand; PAM type: YTN; PAM sequence: CTG
tcacccagtctggaaagcag

SEQ ID NO: 82588 - DNA, 20 bp, Artificial Sequence
  Description of Artificial Sequence: Synthetic oligonucleotide
  Target: ATXN2; (-) strand; PAM type: YTN; PAM sequence: CTC
tgtcacccagtctggaaagc

SEQ ID NO: 82589 - DNA, 20 bp, Artificial Sequence
  Description of Artificial Sequence: Synthetic oligonucleotide
  Target: ATXN2; (-) strand; PAM type: YTN; PAM sequence: CTC
actctgtcacccagtctgga

SEQ ID NO: 82590 - DNA, 20 bp, Artificial Sequence
  Description of Artificial Sequence: Synthetic oligonucleotide
  Target: ATXN2; (-) strand; PAM type: YTN; PAM sequence: TTG
agacagagtctcactctgtc

SEQ ID NO: 82591 - DNA, 20 bp, Artificial Sequence
  Description of Artificial Sequence: Synthetic oligonucleotide
  Target: ATXN2; (-) strand; PAM type: YTN; PAM sequence: TTT
gagacagagtctcactctgt

SEQ ID NO: 82592 - DNA, 20 bp, Artificial Sequence
  Description of Artificial Sequence: Synthetic oligonucleotide
  Target: ATXN2; (-) strand; PAM type: YTN; PAM sequence: TTT
tgagacagagtctcactctg

SEQ ID NO: 82593 - DNA, 20 bp, Artificial Sequence
  Description of Artificial Sequence: Synthetic oligonucleotide
  Target: ATXN2; (-) strand; PAM type: YTN; PAM sequence: TTA
ttttgagacagagtctcact

SEQ ID NO: 82594 - DNA, 20 bp, Artificial Sequence
  Description of Artificial Sequence: Synthetic oligonucleotide
  Target: ATXN2; (-) strand; PAM type: YTN; PAM sequence: TTT
attttgagacagagtctcac

SEQ ID NO: 82595 - DNA, 20 bp, Artificial Sequence
  Description of Artificial Sequence: Synthetic oligonucleotide
  Target: ATXN2; (-) strand; PAM type: YTN; PAM sequence: TTA
tttattttgagacagagtct

SEQ ID NO: 82596 - DNA, 20 bp, Artificial Sequence
  Description of Artificial Sequence: Synthetic oligonucleotide
  Target: ATXN2; (-) strand; PAM type: YTN; PAM sequence: TTT
atttattttgagacagagtc

SEQ ID NO: 82597 - DNA, 20 bp, Artificial Sequence
  Description of Artificial Sequence: Synthetic oligonucleotide
  Target: ATXN2; (-) strand; PAM type: YTN; PAM sequence: TTA
tttatttattttgagacaga

SEQ ID NO: 82598 - DNA, 20 bp, Artificial Sequence
  Description of Artificial Sequence: Synthetic oligonucleotide
  Target: ATXN2; (-) strand; PAM type: YTN; PAM sequence: TTG
gttatttatttattttgaga

SEQ ID NO: 82599 - DNA, 20 bp, Artificial Sequence
  Description of Artificial Sequence: Synthetic oligonucleotide
  Target: ATXN2; (-) strand; PAM type: YTN; PAM sequence: CTT
ggttatttatttattttgag

SEQ ID NO: 82600 - DNA, 20 bp, Artificial Sequence
  Description of Artificial Sequence: Synthetic oligonucleotide
  Target: ATXN2; (-) strand; PAM type: YTN; PAM sequence: TTA
aatccttggttatttattta

SEQ ID NO: 82601 - DNA, 20 bp, Artificial Sequence
  Description of Artificial Sequence: Synthetic oligonucleotide
  Target: ATXN2; (-) strand; PAM type: YTN; PAM sequence: CTA
cataaatgttaaatccttgg

SEQ ID NO: 82602 - DNA, 20 bp, Artificial Sequence
  Description of Artificial Sequence: Synthetic oligonucleotide
  Target: ATXN2; (-) strand; PAM type: YTN; PAM sequence: TTA
cgtggtgtgaaatctacata

SEQ ID NO: 82603 - DNA, 20 bp, Artificial Sequence
  Description of Artificial Sequence: Synthetic oligonucleotide
  Target: ATXN2; (-) strand; PAM type: YTN; PAM sequence: CTT
acgtggtgtgaaatctacat

SEQ ID NO: 82604 - DNA, 20 bp, Artificial Sequence
  Description of Artificial Sequence: Synthetic oligonucleotide
  Target: ATXN2; (-) strand; PAM type: YTN; PAM sequence: CTG
tacttacgtggtgtgaaatc

SEQ ID NO: 82605 - DNA, 20 bp, Artificial Sequence
  Description of Artificial Sequence: Synthetic oligonucleotide
  Target: ATXN2; (-) strand; PAM type: YTN; PAM sequence: TTC
tgtacttacgtggtgtgaaa

SEQ ID NO: 82606 - DNA, 20 bp, Artificial Sequence
  Description of Artificial Sequence: Synthetic oligonucleotide
  Target: ATXN2; (-) strand; PAM type: YTN; PAM sequence: TTA
atgtatgtggttctgtactt

SEQ ID NO: 82607 - DNA, 20 bp, Artificial Sequence
  Description of Artificial Sequence: Synthetic oligonucleotide
  Target: ATXN2; (-) strand; PAM type: YTN; PAM sequence: TTT
aatgtatgtggttctgtact

SEQ ID NO: 82608 - DNA, 20 bp, Artificial Sequence
  Description of Artificial Sequence: Synthetic oligonucleotide
  Target: ATXN2; (-) strand; PAM type: YTN; PAM sequence: TTT
taatgtatgtggttctgtac

SEQ ID NO: 82609 - DNA, 20 bp, Artificial Sequence
  Description of Artificial Sequence: Synthetic oligonucleotide
  Target: ATXN2; (-) strand; PAM type: YTN; PAM sequence: TTT
ttaatgtatgtggttctgta

SEQ ID NO: 82610 - DNA, 20 bp, Artificial Sequence
  Description of Artificial Sequence: Synthetic oligonucleotide
  Target: ATXN2; (-) strand; PAM type: YTN; PAM sequence: TTG
tttttaatgtatgtggttct

SEQ ID NO: 82611 - DNA, 20 bp, Artificial Sequence
  Description of Artificial Sequence: Synthetic oligonucleotide
  Target: ATXN2; (-) strand; PAM type: YTN; PAM sequence: TTT
gtttttaatgtatgtggttc

SEQ ID NO: 82612 - DNA, 20 bp, Artificial Sequence
  Description of Artificial Sequence: Synthetic oligonucleotide
  Target: ATXN2; (-) strand; PAM type: YTN; PAM sequence: CTT
tgtttttaatgtatgtggtt

SEQ ID NO: 82613 - DNA, 20 bp, Artificial Sequence
  Description of Artificial Sequence: Synthetic oligonucleotide
  Target: ATXN2; (-) strand; PAM type: YTN; PAM sequence: TTC
tttgtttttaatgtatgtgg

SEQ ID NO: 82614 - DNA, 20 bp, Artificial Sequence
  Description of Artificial Sequence: Synthetic oligonucleotide
  Target: ATXN2; (-) strand; PAM type: YTN; PAM sequence: TTT
ctttgtttttaatgtatgtg

SEQ ID NO: 82615 - DNA, 20 bp, Artificial Sequence
  Description of Artificial Sequence: Synthetic oligonucleotide
  Target: ATXN2; (-) strand; PAM type: YTN; PAM sequence: TTT
tctttgtttttaatgtatgt

SEQ ID NO: 82616 - DNA, 20 bp, Artificial Sequence
  Description of Artificial Sequence: Synthetic oligonucleotide
  Target: ATXN2; (-) strand; PAM type: YTN; PAM sequence: CTT
ttctttgtttttaatgtatg

SEQ ID NO: 82617 - DNA, 20 bp, Artificial Sequence
  Description of Artificial Sequence: Synthetic oligonucleotide
  Target: ATXN2; (-) strand; PAM type: YTN; PAM sequence: TTC
ttttctttgtttttaatgta

SEQ ID NO: 82618 - DNA, 20 bp, Artificial Sequence
  Description of Artificial Sequence: Synthetic oligonucleotide
  Target: ATXN2; (-) strand; PAM type: YTN; PAM sequence: TTT
cttttctttgtttttaatgt

SEQ ID NO: 82619 - DNA, 20 bp, Artificial Sequence
  Description of Artificial Sequence: Synthetic oligonucleotide
  Target: ATXN2; (-) strand; PAM type: YTN; PAM sequence: TTT
tcttttctttgtttttaatg

SEQ ID NO: 82620 - DNA, 20 bp, Artificial Sequence
  Description of Artificial Sequence: Synthetic oligonucleotide
  Target: ATXN2; (-) strand; PAM type: YTN; PAM sequence: CTA
ttttcttttctttgttttta

SEQ ID NO: 82621 - DNA, 20 bp, Artificial Sequence
  Description of Artificial Sequence: Synthetic oligonucleotide
  Target: ATXN2; (-) strand; PAM type: YTN; PAM sequence: CTA
aaataggaggtctattttct

SEQ ID NO: 82622 - DNA, 20 bp, Artificial Sequence
  Description of Artificial Sequence: Synthetic oligonucleotide
  Target: ATXN2; (-) strand; PAM type: YTN; PAM sequence: TTG
ctaaaataggaggtctattt

SEQ ID NO: 82623 - DNA, 20 bp, Artificial Sequence
  Description of Artificial Sequence: Synthetic oligonucleotide
  Target: ATXN2; (-) strand; PAM type: YTN; PAM sequence: CTT
gctaaaataggaggtctatt

SEQ ID NO: 82624 - DNA, 20 bp, Artificial Sequence
  Description of Artificial Sequence: Synthetic oligonucleotide
  Target: ATXN2; (-) strand; PAM type: YTN; PAM sequence: TTG
gcttgctaaaataggaggtc

SEQ ID NO: 82625 - DNA, 20 bp, Artificial Sequence
  Description of Artificial Sequence: Synthetic oligonucleotide
  Target: ATXN2; (-) strand; PAM type: YTN; PAM sequence: TTT
ggcttgctaaaataggaggt

SEQ ID NO: 82626 - DNA, 20 bp, Artificial Sequence
  Description of Artificial Sequence: Synthetic oligonucleotide
  Target: ATXN2; (-) strand; PAM type: YTN; PAM sequence: TTT
tggcttgctaaaataggagg

SEQ ID NO: 82627 - DNA, 20 bp, Artificial Sequence
  Description of Artificial Sequence: Synthetic oligonucleotide
  Target: ATXN2; (-) strand; PAM type: YTN; PAM sequence: TTG
attttggcttgctaaaatag

SEQ ID NO: 82628 - DNA, 20 bp, Artificial Sequence
  Description of Artificial Sequence: Synthetic oligonucleotide
  Target: ATXN2; (-) strand; PAM type: YTN; PAM sequence: CTT
gattttggcttgctaaaata

SEQ ID NO: 82629 - DNA, 20 bp, Artificial Sequence
  Description of Artificial Sequence: Synthetic oligonucleotide
  Target: ATXN2; (-) strand; PAM type: YTN; PAM sequence: TTG
taaccttgattttggcttgc

SEQ ID NO: 82630 - DNA, 20 bp, Artificial Sequence
  Description of Artificial Sequence: Synthetic oligonucleotide
  Target: ATXN2; (-) strand; PAM type: YTN; PAM sequence: TTT
gtaaccttgattttggcttg

SEQ ID NO: 82631 - DNA, 20 bp, Artificial Sequence
  Description of Artificial Sequence: Synthetic oligonucleotide
  Target: ATXN2; (-) strand; PAM type: YTN; PAM sequence: TTT
tgtaaccttgattttggctt

SEQ ID NO: 82632 - DNA, 20 bp, Artificial Sequence
  Description of Artificial Sequence: Synthetic oligonucleotide
  Target: ATXN2; (-) strand; PAM type: YTN; PAM sequence: TTT
ttgtaaccttgattttggct

SEQ ID NO: 82633 - DNA, 20 bp, Artificial Sequence
  Description of Artificial Sequence: Synthetic oligonucleotide
  Target: ATXN2; (-) strand; PAM type: YTN; PAM sequence: CTT
tttgtaaccttgattttggc

SEQ ID NO: 82634 - DNA, 20 bp, Artificial Sequence
  Description of Artificial Sequence: Synthetic oligonucleotide
  Target: ATXN2; (-) strand; PAM type: YTN; PAM sequence: TTC
aggatatctttttgtaacct

SEQ ID NO: 82635 - DNA, 20 bp, Artificial Sequence
  Description of Artificial Sequence: Synthetic oligonucleotide
  Target: ATXN2; (-) strand; PAM type: YTN; PAM sequence: CTT
caggatatctttttgtaacc

SEQ ID NO: 82636 - DNA, 20 bp, Artificial Sequence
  Description of Artificial Sequence: Synthetic oligonucleotide
  Target: ATXN2; (-) strand; PAM type: YTN; PAM sequence: TTG
cccttcaggatatctttttg

SEQ ID NO: 82637 - DNA, 20 bp, Artificial Sequence
  Description of Artificial Sequence: Synthetic oligonucleotide
  Target: ATXN2; (-) strand; PAM type: YTN; PAM sequence: CTT
gcccttcaggatatcttttt

SEQ ID NO: 82638 - DNA, 20 bp, Artificial Sequence
  Description of Artificial Sequence: Synthetic oligonucleotide
  Target: ATXN2; (-) strand; PAM type: YTN; PAM sequence: TTA
tggaatacagtcacggacag

SEQ ID NO: 82639 - DNA, 20 bp, Artificial Sequence
  Description of Artificial Sequence: Synthetic oligonucleotide
  Target: ATXN2; (-) strand; PAM type: YTN; PAM sequence: TTT
atggaatacagtcacggaca

SEQ ID NO: 82640 - DNA, 20 bp, Artificial Sequence
  Description of Artificial Sequence: Synthetic oligonucleotide
  Target: ATXN2; (-) strand; PAM type: YTN; PAM sequence: TTT
tatggaatacagtcacggac

SEQ ID NO: 82641 - DNA, 20 bp, Artificial Sequence
  Description of Artificial Sequence: Synthetic oligonucleotide
  Target: ATXN2; (-) strand; PAM type: YTN; PAM sequence: TTG
ttttatggaatacagtcacg

SEQ ID NO: 82642 - DNA, 20 bp, Artificial Sequence
  Description of Artificial Sequence: Synthetic oligonucleotide
  Target: ATXN2; (-) strand; PAM type: YTN; PAM sequence: CTT
gttttatggaatacagtcac

SEQ ID NO: 82643 - DNA, 20 bp, Artificial Sequence
  Description of Artificial Sequence: Synthetic oligonucleotide
  Target: ATXN2; (-) strand; PAM type: YTN; PAM sequence: CTA
acaggcttgttttatggaat

SEQ ID NO: 82644 - DNA, 20 bp, Artificial Sequence
  Description of Artificial Sequence: Synthetic oligonucleotide
  Target: ATXN2; (-) strand; PAM type: YTN; PAM sequence: CTG
cgtccggccccctaacaggc

SEQ ID NO: 82645 - DNA, 20 bp, Artificial Sequence
  Description of Artificial Sequence: Synthetic oligonucleotide
  Target: ATXN2; (-) strand; PAM type: YTN; PAM sequence: CTG
ctgcgtccggccccctaaca

SEQ ID NO: 82646 - DNA, 20 bp, Artificial Sequence
  Description of Artificial Sequence: Synthetic oligonucleotide
  Target: ATXN2; (-) strand; PAM type: YTN; PAM sequence: TTA
caggcgtgagctgctgcgtc

SEQ ID NO: 82647 - DNA, 20 bp, Artificial Sequence
  Description of Artificial Sequence: Synthetic oligonucleotide
  Target: ATXN2; (-) strand; PAM type: YTN; PAM sequence: CTG
gaattacaggcgtgagctgc

SEQ ID NO: 82648 - DNA, 20 bp, Artificial Sequence
  Description of Artificial Sequence: Synthetic oligonucleotide
  Target: ATXN2; (-) strand; PAM type: YTN; PAM sequence: CTC
ccaaagtgctggaattacag

SEQ ID NO: 82649 - DNA, 20 bp, Artificial Sequence
  Description of Artificial Sequence: Synthetic oligonucleotide
  Target: ATXN2; (-) strand; PAM type: YTN; PAM sequence: TTG
tgatccgcccaacagcctcc

SEQ ID NO: 82650 - DNA, 20 bp, Artificial Sequence
  Description of Artificial Sequence: Synthetic oligonucleotide
  Target: ATXN2; (-) strand; PAM type: YTN; PAM sequence: CTT
gtgatccgcccaacagcctc

SEQ ID NO: 82651 - DNA, 20 bp, Artificial Sequence
  Description of Artificial Sequence: Synthetic oligonucleotide
  Target: ATXN2; (-) strand; PAM type: YTN; PAM sequence: CTG
accttgtgatccgcccaaca

SEQ ID NO: 82652 - DNA, 20 bp, Artificial Sequence
  Description of Artificial Sequence: Synthetic oligonucleotide
  Target: ATXN2; (-) strand; PAM type: YTN; PAM sequence: CTC
ctgaccttgtgatccgccca

SEQ ID NO: 82653 - DNA, 20 bp, Artificial Sequence
  Description of Artificial Sequence: Synthetic oligonucleotide
  Target: ATXN2; (-) strand; PAM type: YTN; PAM sequence: TTG
gccaggatggtgtcgatctc

SEQ ID NO: 82654 - DNA, 20 bp, Artificial Sequence
  Description of Artificial Sequence: Synthetic oligonucleotide
  Target: ATXN2; (-) strand; PAM type: YTN; PAM sequence: TTC
accatgttggccaggatggt

SEQ ID NO: 82655 - DNA, 20 bp, Artificial Sequence
  Description of Artificial Sequence: Synthetic oligonucleotide
  Target: ATXN2; (-) strand; PAM type: YTN; PAM sequence: TTT
caccatgttggccaggatgg

SEQ ID NO: 82656 - DNA, 20 bp, Artificial Sequence
  Description of Artificial Sequence: Synthetic oligonucleotide
  Target: ATXN2; (-) strand; PAM type: YTN; PAM sequence: TTA
gtagagacggggtttcacca

SEQ ID NO: 82657 - DNA, 20 bp, Artificial Sequence
  Description of Artificial Sequence: Synthetic oligonucleotide
  Target: ATXN2; (-) strand; PAM type: YTN; PAM sequence: TTT
agtagagacggggtttcacc

SEQ ID NO: 82658 - DNA, 20 bp, Artificial Sequence
  Description of Artificial Sequence: Synthetic oligonucleotide
  Target: ATXN2; (-) strand; PAM type: YTN; PAM sequence: TTT
tagtagagacggggtttcac

SEQ ID NO: 82659 - DNA, 20 bp, Artificial Sequence
  Description of Artificial Sequence: Synthetic oligonucleotide
  Target: ATXN2; (-) strand; PAM type: YTN; PAM sequence: TTT
ttagtagagacggggtttca

SEQ ID NO: 82660 - DNA, 20 bp, Artificial Sequence
  Description of Artificial Sequence: Synthetic oligonucleotide
  Target: ATXN2; (-) strand; PAM type: YTN; PAM sequence: TTG
tatttttagtagagacgggg

SEQ ID NO: 82661 - DNA, 20 bp, Artificial Sequence
  Description of Artificial Sequence: Synthetic oligonucleotide
  Target: ATXN2; (-) strand; PAM type: YTN; PAM sequence: TTT
gtatttttagtagagacggg

SEQ ID NO: 82662 - DNA, 20 bp, Artificial Sequence
  Description of Artificial Sequence: Synthetic oligonucleotide
  Target: ATXN2; (-) strand; PAM type: YTN; PAM sequence: TTT
tgtatttttagtagagacgg

SEQ ID NO: 82663 - DNA, 20 bp, Artificial Sequence
  Description of Artificial Sequence: Synthetic oligonucleotide
  Target: ATXN2; (-) strand; PAM type: YTN; PAM sequence: TTT
ttgtatttttagtagagacg

SEQ ID NO: 82664 - DNA, 20 bp, Artificial Sequence
  Description of Artificial Sequence: Synthetic oligonucleotide
  Target: ATXN2; (-) strand; PAM type: YTN; PAM sequence: CTA
atttttgtatttttagtaga

SEQ ID NO: 82665 - DNA, 20 bp, Artificial Sequence
  Description of Artificial Sequence: Synthetic oligonucleotide
  Target: ATXN2; (-) strand; PAM type: YTN; PAM sequence: CTG
tgatgcccagctaatttttg

SEQ ID NO: 82666 - DNA, 20 bp, Artificial Sequence
  Description of Artificial Sequence: Synthetic oligonucleotide
  Target: ATXN2; (-) strand; PAM type: YTN; PAM sequence: CTA
caggcgcacactgtgatgcc

SEQ ID NO: 82667 - DNA, 20 bp, Artificial Sequence
  Description of Artificial Sequence: Synthetic oligonucleotide
  Target: ATXN2; (-) strand; PAM type: YTN; PAM sequence: TTG
gtactacaggcgcacactgt

SEQ ID NO: 82668 - DNA, 20 bp, Artificial Sequence
  Description of Artificial Sequence: Synthetic oligonucleotide
  Target: ATXN2; (-) strand; PAM type: YTN; PAM sequence: CTC
ccatgtagttggtactacag

SEQ ID NO: 82669 - DNA, 20 bp, Artificial Sequence
  Description of Artificial Sequence: Synthetic oligonucleotide
  Target: ATXN2; (-) strand; PAM type: YTN; PAM sequence: TTA
gcctcccatgtagttggtac

SEQ ID NO: 82670 - DNA, 20 bp, Artificial Sequence
  Description of Artificial Sequence: Synthetic oligonucleotide
  Target: ATXN2; (-) strand; PAM type: YTN; PAM sequence: CTT
agcctcccatgtagttggta

SEQ ID NO: 82671 - DNA, 20 bp, Artificial Sequence
  Description of Artificial Sequence: Synthetic oligonucleotide
  Target: ATXN2; (-) strand; PAM type: YTN; PAM sequence: CTG
ccttagcctcccatgtagtt

SEQ ID NO: 82672 - DNA, 20 bp, Artificial Sequence
  Description of Artificial Sequence: Synthetic oligonucleotide
  Target: ATXN2; (-) strand; PAM type: YTN; PAM sequence: CTC
ctgccttagcctcccatgta

SEQ ID NO: 82673 - DNA, 20 bp, Artificial Sequence
  Description of Artificial Sequence: Synthetic oligonucleotide
  Target: ATXN2; (-) strand; PAM type: YTN; PAM sequence: TTC
tcctgccttagcctcccatg

SEQ ID NO: 82674 - DNA, 20 bp, Artificial Sequence
  Description of Artificial Sequence: Synthetic oligonucleotide
  Target: ATXN2; (-) strand; PAM type: YTN; PAM sequence: TTC
aagcgattctcctgccttag

SEQ ID NO: 82675 - DNA, 20 bp, Artificial Sequence
  Description of Artificial Sequence: Synthetic oligonucleotide
  Target: ATXN2; (-) strand; PAM type: YTN; PAM sequence: CTC
ccgggttcaagcgattctcc

SEQ ID NO: 82676 - DNA, 20 bp, Artificial Sequence
  Description of Artificial Sequence: Synthetic oligonucleotide
  Target: ATXN2; (-) strand; PAM type: YTN; PAM sequence: CTG
cctcccgggttcaagcgatt

SEQ ID NO: 82677 - DNA, 20 bp, Artificial Sequence
  Description of Artificial Sequence: Synthetic oligonucleotide
  Target: ATXN2; (-) strand; PAM type: YTN; PAM sequence: CTC
tgcctcccgggttcaagcga

SEQ ID NO: 82678 - DNA, 20 bp, Artificial Sequence
  Description of Artificial Sequence: Synthetic oligonucleotide
  Target: ATXN2; (-) strand; PAM type: YTN; PAM sequence: CTG
caacctctgcctcccgggtt

SEQ ID NO: 82679 - DNA, 20 bp, Artificial Sequence
  Description of Artificial Sequence: Synthetic oligonucleotide
  Target: ATXN2; (-) strand; PAM type: YTN; PAM sequence: CTC
actgcaacctctgcctcccg

SEQ ID NO: 82680 - DNA, 20 bp, Artificial Sequence
  Description of Artificial Sequence: Synthetic oligonucleotide
  Target: ATXN2; (-) strand; PAM type: YTN; PAM sequence: CTC
agctcactgcaacctctgcc

SEQ ID NO: 82681 - DNA, 20 bp, Artificial Sequence
  Description of Artificial Sequence: Synthetic oligonucleotide
  Target: ATXN2; (-) strand; PAM type: YTN; PAM sequence: CTG
gagtgcagtggcacgatctc

SEQ ID NO: 82682 - DNA, 20 bp, Artificial Sequence
  Description of Artificial Sequence: Synthetic oligonucleotide
  Target: ATXN2; (-) strand; PAM type: YTN; PAM sequence: CTG
tcaccaggctggagtgcagt

SEQ ID NO: 82683 - DNA, 20 bp, Artificial Sequence
  Description of Artificial Sequence: Synthetic oligonucleotide
  Target: ATXN2; (-) strand; PAM type: YTN; PAM sequence: CTC
tgtcaccaggctggagtgca

SEQ ID NO: 82684 - DNA, 20 bp, Artificial Sequence
  Description of Artificial Sequence: Synthetic oligonucleotide
  Target: ATXN2; (-) strand; PAM type: YTN; PAM sequence: CTC
gctctgtcaccaggctggag

SEQ ID NO: 82685 - DNA, 20 bp, Artificial Sequence
  Description of Artificial Sequence: Synthetic oligonucleotide
  Target: ATXN2; (-) strand; PAM type: YTN; PAM sequence: TTA
gatggagtctcgctctgtca

SEQ ID NO: 82686 - DNA, 20 bp, Artificial Sequence
  Description of Artificial Sequence: Synthetic oligonucleotide
  Target: ATXN2; (-) strand; PAM type: YTN; PAM sequence: TTA
attagatggagtctcgctct

SEQ ID NO: 82687 - DNA, 20 bp, Artificial Sequence
  Description of Artificial Sequence: Synthetic oligonucleotide
  Target: ATXN2; (-) strand; PAM type: YTN; PAM sequence: TTT
aattagatggagtctcgctc

SEQ ID NO: 82688 - DNA, 20 bp, Artificial Sequence
  Description of Artificial Sequence: Synthetic oligonucleotide
  Target: ATXN2; (-) strand; PAM type: YTN; PAM sequence: TTT
taattagatggagtctcgct

SEQ ID NO: 82689 - DNA, 20 bp, Artificial Sequence
  Description of Artificial Sequence: Synthetic oligonucleotide
  Target: ATXN2; (-) strand; PAM type: YTN; PAM sequence: TTT
ttaattagatggagtctcgc

SEQ ID NO: 82690 - DNA, 20 bp, Artificial Sequence
  Description of Artificial Sequence: Synthetic oligonucleotide
  Target: ATXN2; (-) strand; PAM type: YTN; PAM sequence: TTT
tttaattagatggagtctcg

SEQ ID NO: 82691 - DNA, 20 bp, Artificial Sequence
  Description of Artificial Sequence: Synthetic oligonucleotide
  Target: ATXN2; (-) strand; PAM type: YTN; PAM sequence: TTT
ttttaattagatggagtctc

SEQ ID NO: 82692 - DNA, 20 bp, Artificial Sequence
  Description of Artificial Sequence: Synthetic oligonucleotide
  Target: ATXN2; (-) strand; PAM type: YTN; PAM sequence: TTT
tttttaattagatggagtct

SEQ ID NO: 82693 - DNA, 20 bp, Artificial Sequence
  Description of Artificial Sequence: Synthetic oligonucleotide
  Target: ATXN2; (-) strand; PAM type: YTN; PAM sequence: TTT
ttttttaattagatggagtc

SEQ ID NO: 82694 - DNA, 20 bp, Artificial Sequence
  Description of Artificial Sequence: Synthetic oligonucleotide
  Target: ATXN2; (-) strand; PAM type: YTN; PAM sequence: TTT
tttttttaattagatggagt

SEQ ID NO: 82695 - DNA, 20 bp, Artificial Sequence
  Description of Artificial Sequence: Synthetic oligonucleotide
  Target: ATXN2; (-) strand; PAM type: YTN; PAM sequence: TTT
ttttttttaattagatggag

SEQ ID NO: 82696 - DNA, 20 bp, Artificial Sequence
  Description of Artificial Sequence: Synthetic oligonucleotide
  Target: ATXN2; (-) strand; PAM type: YTN; PAM sequence: TTT
tttttttttaattagatgga

SEQ ID NO: 82697 - DNA, 20 bp, Artificial Sequence
  Description of Artificial Sequence: Synthetic oligonucleotide
  Target: ATXN2; (-) strand; PAM type: YTN; PAM sequence: TTT
ttttttttttaattagatgg

SEQ ID NO: 82698 - DNA, 20 bp, Artificial Sequence
  Description of Artificial Sequence: Synthetic oligonucleotide
  Target: ATXN2; (-) strand; PAM type: YTN; PAM sequence: CTG
tttttttttttttaattaga

SEQ ID NO: 82699 - DNA, 20 bp, Artificial Sequence
  Description of Artificial Sequence: Synthetic oligonucleotide
  Target: ATXN2; (-) strand; PAM type: YTN; PAM sequence: CTA
acaggcctgttttttttttt

SEQ ID NO: 82700 - DNA, 20 bp, Artificial Sequence
  Description of Artificial Sequence: Synthetic oligonucleotide
  Target: ATXN2; (-) strand; PAM type: YTN; PAM sequence: TTC
ctaacaggcctgtttttttt

SEQ ID NO: 82701 - DNA, 20 bp, Artificial Sequence
  Description of Artificial Sequence: Synthetic oligonucleotide
  Target: ATXN2; (-) strand; PAM type: YTN; PAM sequence: CTG
gttcctaacaggcctgtttt

SEQ ID NO: 82702 - DNA, 20 bp, Artificial Sequence
  Description of Artificial Sequence: Synthetic oligonucleotide
  Target: ATXN2; (-) strand; PAM type: YTN; PAM sequence: TTG
tgcagtctggttcctaacag

SEQ ID NO: 82703 - DNA, 20 bp, Artificial Sequence
  Description of Artificial Sequence: Synthetic oligonucleotide
  Target: ATXN2; (-) strand; PAM type: YTN; PAM sequence: CTG
ttgtgcagtctggttcctaa

SEQ ID NO: 82704 - DNA, 20 bp, Artificial Sequence
  Description of Artificial Sequence: Synthetic oligonucleotide
  Target: ATXN2; (-) strand; PAM type: YTN; PAM sequence: CTC
ctgttgtgcagtctggttcc

SEQ ID NO: 82705 - DNA, 20 bp, Artificial Sequence
  Description of Artificial Sequence: Synthetic oligonucleotide
  Target: ATXN2; (-) strand; PAM type: YTN; PAM sequence: CTC
acacagctcctgttgtgcag

SEQ ID NO: 82706 - DNA, 20 bp, Artificial Sequence
  Description of Artificial Sequence: Synthetic oligonucleotide
  Target: ATXN2; (-) strand; PAM type: YTN; PAM sequence: CTA
atgctcacacagctcctgtt

SEQ ID NO: 82707 - DNA, 20 bp, Artificial Sequence
  Description of Artificial Sequence: Synthetic oligonucleotide
  Target: ATXN2; (-) strand; PAM type: YTN; PAM sequence: CTC
aggtgctaatgctcacacag

SEQ ID NO: 82708 - DNA, 20 bp, Artificial Sequence
  Description of Artificial Sequence: Synthetic oligonucleotide
  Target: ATXN2; (-) strand; PAM type: YTN; PAM sequence: CTA
acaggtggggctcaggtgct

SEQ ID NO: 82709 - DNA, 20 bp, Artificial Sequence
  Description of Artificial Sequence: Synthetic oligonucleotide
  Target: ATXN2; (-) strand; PAM type: YTN; PAM sequence: CTG
atctaacaggtggggctcag

SEQ ID NO: 82710 - DNA, 20 bp, Artificial Sequence
  Description of Artificial Sequence: Synthetic oligonucleotide
  Target: ATXN2; (-) strand; PAM type: YTN; PAM sequence: CTG
cacctgatctaacaggtggg

SEQ ID NO: 82711 - DNA, 20 bp, Artificial Sequence
  Description of Artificial Sequence: Synthetic oligonucleotide
  Target: ATXN2; (-) strand; PAM type: YTN; PAM sequence: CTA
atgctgcacctgatctaaca

SEQ ID NO: 82712 - DNA, 20 bp, Artificial Sequence
  Description of Artificial Sequence: Synthetic oligonucleotide
  Target: ATXN2; (-) strand; PAM type: YTN; PAM sequence: CTA
taagaacctaatgctgcacc

SEQ ID NO: 82713 - DNA, 20 bp, Artificial Sequence
  Description of Artificial Sequence: Synthetic oligonucleotide
  Target: ATXN2; (-) strand; PAM type: YTN; PAM sequence: TTC
tataagaacctaatgctgca

SEQ ID NO: 82714 - DNA, 20 bp, Artificial Sequence
  Description of Artificial Sequence: Synthetic oligonucleotide
  Target: ATXN2; (-) strand; PAM type: YTN; PAM sequence: CTT
ctataagaacctaatgctgc

SEQ ID NO: 82715 - DNA, 20 bp, Artificial Sequence
  Description of Artificial Sequence: Synthetic oligonucleotide
  Target: ATXN2; (-) strand; PAM type: YTN; PAM sequence: TTG
tgcttctataagaacctaat

SEQ ID NO: 82716 - DNA, 20 bp, Artificial Sequence
  Description of Artificial Sequence: Synthetic oligonucleotide
  Target: ATXN2; (-) strand; PAM type: YTN; PAM sequence: TTT
gtgcttctataagaacctaa

SEQ ID NO: 82717 - DNA, 20 bp, Artificial Sequence
  Description of Artificial Sequence: Synthetic oligonucleotide
  Target: ATXN2; (-) strand; PAM type: YTN; PAM sequence: TTC
ccagtagggtttgtgcttct

SEQ ID NO: 82718 - DNA, 20 bp, Artificial Sequence
  Description of Artificial Sequence: Synthetic oligonucleotide
  Target: ATXN2; (-) strand; PAM type: YTN; PAM sequence: CTA
tatgcagttcccagtagggt

SEQ ID NO: 82719 - DNA, 20 bp, Artificial Sequence
  Description of Artificial Sequence: Synthetic oligonucleotide
  Target: ATXN2; (-) strand; PAM type: YTN; PAM sequence: TTG
ctatatgcagttcccagtag

SEQ ID NO: 82720 - DNA, 20 bp, Artificial Sequence
  Description of Artificial Sequence: Synthetic oligonucleotide
  Target: ATXN2; (-) strand; PAM type: YTN; PAM sequence: CTT
gctatatgcagttcccagta

SEQ ID NO: 82721 - DNA, 20 bp, Artificial Sequence
  Description of Artificial Sequence: Synthetic oligonucleotide
  Target: ATXN2; (-) strand; PAM type: YTN; PAM sequence: CTC
ttgctatatgcagttcccag

SEQ ID NO: 82722 - DNA, 20 bp, Artificial Sequence
  Description of Artificial Sequence: Synthetic oligonucleotide
  Target: ATXN2; (-) strand; PAM type: YTN; PAM sequence: CTA
catctcttgctatatgcagt

SEQ ID NO: 82723 - DNA, 20 bp, Artificial Sequence
  Description of Artificial Sequence: Synthetic oligonucleotide
  Target: ATXN2; (-) strand; PAM type: YTN; PAM sequence: CTC
ataaagagcatacaacctac

SEQ ID NO: 82724 - DNA, 20 bp, Artificial Sequence
  Description of Artificial Sequence: Synthetic oligonucleotide
  Target: ATXN2; (-) strand; PAM type: YTN; PAM sequence: TTC
tcataaagagcatacaacct

SEQ ID NO: 82725 - DNA, 20 bp, Artificial Sequence
  Description of Artificial Sequence: Synthetic oligonucleotide
  Target: ATXN2; (-) strand; PAM type: YTN; PAM sequence: TTA
gattctcataaagagcatac

SEQ ID NO: 82726 - DNA, 20 bp, Artificial Sequence
  Description of Artificial Sequence: Synthetic oligonucleotide
  Target: ATXN2; (-) strand; PAM type: YTN; PAM sequence: TTG
ttagattctcataaagagca

SEQ ID NO: 82727 - DNA, 20 bp, Artificial Sequence
  Description of Artificial Sequence: Synthetic oligonucleotide
  Target: ATXN2; (-) strand; PAM type: YTN; PAM sequence: TTT
gttagattctcataaagagc

SEQ ID NO: 82728 - DNA, 20 bp, Artificial Sequence
  Description of Artificial Sequence: Synthetic oligonucleotide
  Target: ATXN2; (-) strand; PAM type: YTN; PAM sequence: TTA
tgcatttgttagattctcat

SEQ ID NO: 82729 - DNA, 20 bp, Artificial Sequence
  Description of Artificial Sequence: Synthetic oligonucleotide
  Target: ATXN2; (-) strand; PAM type: YTN; PAM sequence: CTC
agatcattatgcatttgtta

SEQ ID NO: 82730 - DNA, 20 bp, Artificial Sequence
  Description of Artificial Sequence: Synthetic oligonucleotide
  Target: ATXN2; (-) strand; PAM type: YTN; PAM sequence: TTC
cacctcagatcattatgcat

SEQ ID NO: 82731 - DNA, 20 bp, Artificial Sequence
  Description of Artificial Sequence: Synthetic oligonucleotide
  Target: ATXN2; (-) strand; PAM type: YTN; PAM sequence: TTG
ttccacctcagatcattatg

SEQ ID NO: 82732 - DNA, 20 bp, Artificial Sequence
  Description of Artificial Sequence: Synthetic oligonucleotide
  Target: ATXN2; (-) strand; PAM type: YTN; PAM sequence: CTA
aaaaaaaaaaaattgttcca

SEQ ID NO: 82733 - DNA, 20 bp, Artificial Sequence
  Description of Artificial Sequence: Synthetic oligonucleotide
  Target: ATXN2; (-) strand; PAM type: YTN; PAM sequence: CTC
cgtctaaaaaaaaaaaaatt

SEQ ID NO: 82734 - DNA, 20 bp, Artificial Sequence
  Description of Artificial Sequence: Synthetic oligonucleotide
  Target: ATXN2; (-) strand; PAM type: YTN; PAM sequence: CTG
ggggacaaagtgagactccg

SEQ ID NO: 82735 - DNA, 20 bp, Artificial Sequence
  Description of Artificial Sequence: Synthetic oligonucleotide
  Target: ATXN2; (-) strand; PAM type: YTN; PAM sequence: TTC
agcctgggggacaaagtgag

SEQ ID NO: 82736 - DNA, 20 bp, Artificial Sequence
  Description of Artificial Sequence: Synthetic oligonucleotide
  Target: ATXN2; (-) strand; PAM type: YTN; PAM sequence: CTT
cagcctgggggacaaagtga

SEQ ID NO: 82737 - DNA, 20 bp, Artificial Sequence
  Description of Artificial Sequence: Synthetic oligonucleotide
  Target: ATXN2; (-) strand; PAM type: YTN; PAM sequence: CTG
tacttcagcctgggggacaa

SEQ ID NO: 82738 - DNA, 20 bp, Artificial Sequence
  Description of Artificial Sequence: Synthetic oligonucleotide
  Target: ATXN2; (-) strand; PAM type: YTN; PAM sequence: CTG
agatagcaccactgtacttc

SEQ ID NO: 82739 - DNA, 20 bp, Artificial Sequence
  Description of Artificial Sequence: Synthetic oligonucleotide
  Target: ATXN2; (-) strand; PAM type: YTN; PAM sequence: TTG
cagtgagctgagatagcacc

SEQ ID NO: 82740 - DNA, 20 bp, Artificial Sequence
  Description of Artificial Sequence: Synthetic oligonucleotide
  Target: ATXN2; (-) strand; PAM type: YTN; PAM sequence: CTT
gcagtgagctgagatagcac

SEQ ID NO: 82741 - DNA, 20 bp, Artificial Sequence
  Description of Artificial Sequence: Synthetic oligonucleotide
  Target: ATXN2; (-) strand; PAM type: YTN; PAM sequence: CTC
cggaggccgaggcaagagaa

SEQ ID NO: 82742 - DNA, 20 bp, Artificial Sequence
  Description of Artificial Sequence: Synthetic oligonucleotide
  Target: ATXN2; (-) strand; PAM type: YTN; PAM sequence: CTA
ctccggaggccgaggcaaga

SEQ ID NO: 82743 - DNA, 20 bp, Artificial Sequence
  Description of Artificial Sequence: Synthetic oligonucleotide
  Target: ATXN2; (-) strand; PAM type: YTN; PAM sequence: CTG
tagtcacagctactccggag

SEQ ID NO: 82744 - DNA, 20 bp, Artificial Sequence
  Description of Artificial Sequence: Synthetic oligonucleotide
  Target: ATXN2; (-) strand; PAM type: YTN; PAM sequence: CTG
ggcgcggtggagggcgcctg

SEQ ID NO: 82745 - DNA, 20 bp, Artificial Sequence
  Description of Artificial Sequence: Synthetic oligonucleotide
  Target: ATXN2; (-) strand; PAM type: YTN; PAM sequence: TTA
gctgggcgcggtggagggcg

SEQ ID NO: 82746 - DNA, 20 bp, Artificial Sequence
  Description of Artificial Sequence: Synthetic oligonucleotide
  Target: ATXN2; (-) strand; PAM type: YTN; PAM sequence: CTA
aaaatacaaaaaaattagct

SEQ ID NO: 82747 - DNA, 20 bp, Artificial Sequence
  Description of Artificial Sequence: Synthetic oligonucleotide
  Target: ATXN2; (-) strand; PAM type: YTN; PAM sequence: CTA
ctaaaaatacaaaaaaatta

SEQ ID NO: 82748 - DNA, 20 bp, Artificial Sequence
  Description of Artificial Sequence: Synthetic oligonucleotide
  Target: ATXN2; (-) strand; PAM type: YTN; PAM sequence: CTC
tactaaaaatacaaaaaaat

SEQ ID NO: 82749 - DNA, 20 bp, Artificial Sequence
  Description of Artificial Sequence: Synthetic oligonucleotide
  Target: ATXN2; (-) strand; PAM type: YTN; PAM sequence: CTA
acatggtgaaacccccctct

SEQ ID NO: 82750 - DNA, 20 bp, Artificial Sequence
  Description of Artificial Sequence: Synthetic oligonucleotide
  Target: ATXN2; (-) strand; PAM type: YTN; PAM sequence: CTG
gctaacatggtgaaaccccc

SEQ ID NO: 82751 - DNA, 20 bp, Artificial Sequence
  Description of Artificial Sequence: Synthetic oligonucleotide
  Target: ATXN2; (-) strand; PAM type: YTN; PAM sequence: TTG
ggaggccgaggcgggcagat

SEQ ID NO: 82752 - DNA, 20 bp, Artificial Sequence
  Description of Artificial Sequence: Synthetic oligonucleotide
  Target: ATXN2; (-) strand; PAM type: YTN; PAM sequence: TTT
gggaggccgaggcgggcaga

SEQ ID NO: 82753 - DNA, 20 bp, Artificial Sequence
  Description of Artificial Sequence: Synthetic oligonucleotide
  Target: ATXN2; (-) strand; PAM type: YTN; PAM sequence: CTT
tgggaggccgaggcgggcag

SEQ ID NO: 82754 - DNA, 20 bp, Artificial Sequence
  Description of Artificial Sequence: Synthetic oligonucleotide
  Target: ATXN2; (-) strand; PAM type: YTN; PAM sequence: CTG
taatcccagcactttgggag

SEQ ID NO: 82755 - DNA, 20 bp, Artificial Sequence
  Description of Artificial Sequence: Synthetic oligonucleotide
  Target: ATXN2; (-) strand; PAM type: YTN; PAM sequence: CTC
acgcctgtaatcccagcact

SEQ ID NO: 82756 - DNA, 20 bp, Artificial Sequence
  Description of Artificial Sequence: Synthetic oligonucleotide
  Target: ATXN2; (-) strand; PAM type: YTN; PAM sequence: TTC
caccggccgggcacggtggc

SEQ ID NO: 82757 - DNA, 20 bp, Artificial Sequence
  Description of Artificial Sequence: Synthetic oligonucleotide
  Target: ATXN2; (-) strand; PAM type: YTN; PAM sequence: CTG
ttccaccggccgggcacggt

SEQ ID NO: 82758 - DNA, 20 bp, Artificial Sequence
  Description of Artificial Sequence: Synthetic oligonucleotide
  Target: ATXN2; (-) strand; PAM type: YTN; PAM sequence: TTG
agatgaaactgttccaccgg

SEQ ID NO: 82759 - DNA, 20 bp, Artificial Sequence
  Description of Artificial Sequence: Synthetic oligonucleotide
  Target: ATXN2; (-) strand; PAM type: YTN; PAM sequence: TTT
gagatgaaactgttccaccg

SEQ ID NO: 82760 - DNA, 20 bp, Artificial Sequence
  Description of Artificial Sequence: Synthetic oligonucleotide
  Target: ATXN2; (-) strand; PAM type: YTN; PAM sequence: TTT
tgagatgaaactgttccacc

SEQ ID NO: 82761 - DNA, 20 bp, Artificial Sequence
  Description of Artificial Sequence: Synthetic oligonucleotide
  Target: ATXN2; (-) strand; PAM type: YTN; PAM sequence: TTC
cataggggcaggggatgatt

SEQ ID NO: 82762 - DNA, 20 bp, Artificial Sequence
  Description of Artificial Sequence: Synthetic oligonucleotide
  Target: ATXN2; (-) strand; PAM type: YTN; PAM sequence: TTT
ccataggggcaggggatgat

SEQ ID NO: 82763 - DNA, 20 bp, Artificial Sequence
  Description of Artificial Sequence: Synthetic oligonucleotide
  Target: ATXN2; (-) strand; PAM type: YTN; PAM sequence: TTT
tccataggggcaggggatga

SEQ ID NO: 82764 - DNA, 20 bp, Artificial Sequence
  Description of Artificial Sequence: Synthetic oligonucleotide
  Target: ATXN2; (-) strand; PAM type: YTN; PAM sequence: TTT
ttccataggggcaggggatg

SEQ ID NO: 82765 - DNA, 20 bp, Artificial Sequence
  Description of Artificial Sequence: Synthetic oligonucleotide
  Target: ATXN2; (-) strand; PAM type: YTN; PAM sequence: TTG
tggaagatggtttttccata

SEQ ID NO: 82766 - DNA, 20 bp, Artificial Sequence
  Description of Artificial Sequence: Synthetic oligonucleotide
  Target: ATXN2; (-) strand; PAM type: YTN; PAM sequence: TTT
gtggaagatggtttttccat

SEQ ID NO: 82767 - DNA, 20 bp, Artificial Sequence
  Description of Artificial Sequence: Synthetic oligonucleotide
  Target: ATXN2; (-) strand; PAM type: YTN; PAM sequence: TTT
tgtggaagatggtttttcca

SEQ ID NO: 82768 - DNA, 20 bp, Artificial Sequence
  Description of Artificial Sequence: Synthetic oligonucleotide
  Target: ATXN2; (-) strand; PAM type: YTN; PAM sequence: CTA
gggaccggttttgtggaaga

SEQ ID NO: 82769 - DNA, 20 bp, Artificial Sequence
  Description of Artificial Sequence: Synthetic oligonucleotide
  Target: ATXN2; (-) strand; PAM type: YTN; PAM sequence: TTA
acactagggaccggttttgt

SEQ ID NO: 82770 - DNA, 20 bp, Artificial Sequence
  Description of Artificial Sequence: Synthetic oligonucleotide
  Target: ATXN2; (-) strand; PAM type: YTN; PAM sequence: TTT
aacactagggaccggttttg

SEQ ID NO: 82771 - DNA, 20 bp, Artificial Sequence
  Description of Artificial Sequence: Synthetic oligonucleotide
  Target: ATXN2; (-) strand; PAM type: YTN; PAM sequence: TTT
taacactagggaccggtttt

SEQ ID NO: 82772 - DNA, 20 bp, Artificial Sequence
  Description of Artificial Sequence: Synthetic oligonucleotide
  Target: ATXN2; (-) strand; PAM type: YTN; PAM sequence: TTT
ttaacactagggaccggttt

SEQ ID NO: 82773 - DNA, 20 bp, Artificial Sequence
  Description of Artificial Sequence: Synthetic oligonucleotide
  Target: ATXN2; (-) strand; PAM type: YTN; PAM sequence: CTT
tttaacactagggaccggtt

SEQ ID NO: 82774 - DNA, 20 bp, Artificial Sequence
  Description of Artificial Sequence: Synthetic oligonucleotide
  Target: ATXN2; (-) strand; PAM type: YTN; PAM sequence: CTC
aacctttttaacactaggga

SEQ ID NO: 82775 - DNA, 20 bp, Artificial Sequence
  Description of Artificial Sequence: Synthetic oligonucleotide
  Target: ATXN2; (-) strand; PAM type: YTN; PAM sequence: TTA
aggcaatggtcctcaacctt

SEQ ID NO: 82776 - DNA, 20 bp, Artificial Sequence
  Description of Artificial Sequence: Synthetic oligonucleotide
  Target: ATXN2; (-) strand; PAM type: YTN; PAM sequence: TTT
aaggcaatggtcctcaacct

SEQ ID NO: 82777 - DNA, 20 bp, Artificial Sequence
  Description of Artificial Sequence: Synthetic oligonucleotide
  Target: ATXN2; (-) strand; PAM type: YTN; PAM sequence: TTT
taaggcaatggtcctcaacc

SEQ ID NO: 82778 - DNA, 20 bp, Artificial Sequence
  Description of Artificial Sequence: Synthetic oligonucleotide
  Target: ATXN2; (-) strand; PAM type: YTN; PAM sequence: CTG
tgtattttaaggcaatggtc

SEQ ID NO: 82779 - DNA, 20 bp, Artificial Sequence
  Description of Artificial Sequence: Synthetic oligonucleotide
  Target: ATXN2; (-) strand; PAM type: YTN; PAM sequence: TTG
aaataaatagaaacgtaata

SEQ ID NO: 82780 - DNA, 20 bp, Artificial Sequence
  Description of Artificial Sequence: Synthetic oligonucleotide
  Target: ATXN2; (-) strand; PAM type: YTN; PAM sequence: CTT
gaaataaatagaaacgtaat

SEQ ID NO: 82781 - DNA, 20 bp, Artificial Sequence
  Description of Artificial Sequence: Synthetic oligonucleotide
  Target: ATXN2; (-) strand; PAM type: YTN; PAM sequence: CTC
ccttgaaataaatagaaacg

SEQ ID NO: 82782 - DNA, 20 bp, Artificial Sequence
  Description of Artificial Sequence: Synthetic oligonucleotide
  Target: ATXN2; (-) strand; PAM type: YTN; PAM sequence: CTG
gggcccctcccttgaaataa

SEQ ID NO: 82783 - DNA, 20 bp, Artificial Sequence
  Description of Artificial Sequence: Synthetic oligonucleotide
  Target: ATXN2; (-) strand; PAM type: YTN; PAM sequence: TTC
tggggcccctcccttgaaat

SEQ ID NO: 82784 - DNA, 20 bp, Artificial Sequence
  Description of Artificial Sequence: Synthetic oligonucleotide
  Target: ATXN2; (-) strand; PAM type: YTN; PAM sequence: TTA
agttctggggcccctccctt

SEQ ID NO: 82785 - DNA, 20 bp, Artificial Sequence
  Description of Artificial Sequence: Synthetic oligonucleotide
  Target: ATXN2; (-) strand; PAM type: YTN; PAM sequence: TTT
aagttctggggcccctccct

SEQ ID NO: 82786 - DNA, 20 bp, Artificial Sequence
  Description of Artificial Sequence: Synthetic oligonucleotide
  Target: ATXN2; (-) strand; PAM type: YTN; PAM sequence: TTT
taagttctggggcccctccc

SEQ ID NO: 82787 - DNA, 20 bp, Artificial Sequence
  Description of Artificial Sequence: Synthetic oligonucleotide
  Target: ATXN2; (-) strand; PAM type: YTN; PAM sequence: TTA
aattttaagttctggggccc

SEQ ID NO: 82788 - DNA, 20 bp, Artificial Sequence
  Description of Artificial Sequence: Synthetic oligonucleotide
  Target: ATXN2; (-) strand; PAM type: YTN; PAM sequence: TTT
aaattttaagttctggggcc

SEQ ID NO: 82789 - DNA, 20 bp, Artificial Sequence
  Description of Artificial Sequence: Synthetic oligonucleotide
  Target: ATXN2; (-) strand; PAM type: YTN; PAM sequence: TTT
taaattttaagttctggggc

SEQ ID NO: 82790 - DNA, 20 bp, Artificial Sequence
  Description of Artificial Sequence: Synthetic oligonucleotide
  Target: ATXN2; (-) strand; PAM type: YTN; PAM sequence: TTT
ttaaattttaagttctgggg

SEQ ID NO: 82791 - DNA, 20 bp, Artificial Sequence
  Description of Artificial Sequence: Synthetic oligonucleotide
  Target: ATXN2; (-) strand; PAM type: YTN; PAM sequence: TTA
tttttaaattttaagttctg

SEQ ID NO: 82792 - DNA, 20 bp, Artificial Sequence
  Description of Artificial Sequence: Synthetic oligonucleotide
  Target: ATXN2; (-) strand; PAM type: YTN; PAM sequence: TTT
atttttaaattttaagttct

SEQ ID NO: 82793 - DNA, 20 bp, Artificial Sequence
  Description of Artificial Sequence: Synthetic oligonucleotide
  Target: ATXN2; (-) strand; PAM type: YTN; PAM sequence: TTT
tatttttaaattttaagttc

SEQ ID NO: 82794 - DNA, 20 bp, Artificial Sequence
  Description of Artificial Sequence: Synthetic oligonucleotide
  Target: ATXN2; (-) strand; PAM type: YTN; PAM sequence: TTT
ttatttttaaattttaagtt

SEQ ID NO: 82795 - DNA, 20 bp, Artificial Sequence
  Description of Artificial Sequence: Synthetic oligonucleotide
  Target: ATXN2; (-) strand; PAM type: YTN; PAM sequence: TTA
tttttatttttaaattttaa

SEQ ID NO: 82796 - DNA, 20 bp, Artificial Sequence
  Description of Artificial Sequence: Synthetic oligonucleotide
  Target: ATXN2; (-) strand; PAM type: YTN; PAM sequence: TTT
atttttatttttaaatttta

SEQ ID NO: 82797 - DNA, 20 bp, Artificial Sequence
  Description of Artificial Sequence: Synthetic oligonucleotide
  Target: ATXN2; (-) strand; PAM type: YTN; PAM sequence: CTT
tatttttatttttaaatttt

SEQ ID NO: 82798 - DNA, 20 bp, Artificial Sequence
  Description of Artificial Sequence: Synthetic oligonucleotide
  Target: ATXN2; (-) strand; PAM type: YTN; PAM sequence: CTC
cctttatttttatttttaaa

SEQ ID NO: 82799 - DNA, 20 bp, Artificial Sequence
  Description of Artificial Sequence: Synthetic oligonucleotide
  Target: ATXN2; (-) strand; PAM type: YTN; PAM sequence: CTG
caccgagccccctcccttta

SEQ ID NO: 82800 - DNA, 20 bp, Artificial Sequence
  Description of Artificial Sequence: Synthetic oligonucleotide
  Target: ATXN2; (-) strand; PAM type: YTN; PAM sequence: TTA
caggtgtgagccactgcacc

SEQ ID NO: 82801 - DNA, 20 bp, Artificial Sequence
  Description of Artificial Sequence: Synthetic oligonucleotide
  Target: ATXN2; (-) strand; PAM type: YTN; PAM sequence: CTG
agattacaggtgtgagccac

SEQ ID NO: 82802 - DNA, 20 bp, Artificial Sequence
  Description of Artificial Sequence: Synthetic oligonucleotide
  Target: ATXN2; (-) strand; PAM type: YTN; PAM sequence: TTC
ccaaagtgctgagattacag

SEQ ID NO: 82803 - DNA, 20 bp, Artificial Sequence
  Description of Artificial Sequence: Synthetic oligonucleotide
  Target: ATXN2; (-) strand; PAM type: YTN; PAM sequence: CTT
cccaaagtgctgagattaca

SEQ ID NO: 82804 - DNA, 20 bp, Artificial Sequence
  Description of Artificial Sequence: Synthetic oligonucleotide
  Target: ATXN2; (-) strand; PAM type: YTN; PAM sequence: CTC
agcttcccaaagtgctgaga

SEQ ID NO: 82805 - DNA, 20 bp, Artificial Sequence
  Description of Artificial Sequence: Synthetic oligonucleotide
  Target: ATXN2; (-) strand; PAM type: YTN; PAM sequence: CTG
cctcagcttcccaaagtgct

SEQ ID NO: 82806 - DNA, 20 bp, Artificial Sequence
  Description of Artificial Sequence: Synthetic oligonucleotide
  Target: ATXN2; (-) strand; PAM type: YTN; PAM sequence: CTC
ctgcctcagcttcccaaagt

SEQ ID NO: 82807 - DNA, 20 bp, Artificial Sequence
  Description of Artificial Sequence: Synthetic oligonucleotide
  Target: ATXN2; (-) strand; PAM type: YTN; PAM sequence: CTC
aagtgatcctcctgcctcag

SEQ ID NO: 82808 - DNA, 20 bp, Artificial Sequence
  Description of Artificial Sequence: Synthetic oligonucleotide
  Target: ATXN2; (-) strand; PAM type: YTN; PAM sequence: CTG
ggctcaagtgatcctcctgc

SEQ ID NO: 82809 - DNA, 20 bp, Artificial Sequence
  Description of Artificial Sequence: Synthetic oligonucleotide
  Target: ATXN2; (-) strand; PAM type: YTN; PAM sequence: CTC
ctgggctcaagtgatcctcc

SEQ ID NO: 82810 - DNA, 20 bp, Artificial Sequence
  Description of Artificial Sequence: Synthetic oligonucleotide
  Target: ATXN2; (-) strand; PAM type: YTN; PAM sequence: CTC
aaactcctgggctcaagtga

SEQ ID NO: 82811 - DNA, 20 bp, Artificial Sequence
  Description of Artificial Sequence: Synthetic oligonucleotide
  Target: ATXN2; (-) strand; PAM type: YTN; PAM sequence: TTG
gtctcaaactcctgggctca

SEQ ID NO: 82812 - DNA, 20 bp, Artificial Sequence
  Description of Artificial Sequence: Synthetic oligonucleotide
  Target: ATXN2; (-) strand; PAM type: YTN; PAM sequence: TTG
cccagattggtctcaaactc

SEQ ID NO: 82813 - DNA, 20 bp, Artificial Sequence
  Description of Artificial Sequence: Synthetic oligonucleotide
  Target: ATXN2; (-) strand; PAM type: YTN; PAM sequence: CTG
ccatgttgcccagattggtc

SEQ ID NO: 82814 - DNA, 20 bp, Artificial Sequence
  Description of Artificial Sequence: Synthetic oligonucleotide
  Target: ATXN2; (-) strand; PAM type: YTN; PAM sequence: TTG
tagagacagggtcctgccat

SEQ ID NO: 82815 - DNA, 20 bp, Artificial Sequence
  Description of Artificial Sequence: Synthetic oligonucleotide
  Target: ATXN2; (-) strand; PAM type: YTN; PAM sequence: TTT
gtagagacagggtcctgcca

SEQ ID NO: 82816 - DNA, 20 bp, Artificial Sequence
  Description of Artificial Sequence: Synthetic oligonucleotide
  Target: ATXN2; (-) strand; PAM type: YTN; PAM sequence: TTT
tgtagagacagggtcctgcc

SEQ ID NO: 82817 - DNA, 20 bp, Artificial Sequence
  Description of Artificial Sequence: Synthetic oligonucleotide
  Target: ATXN2; (-) strand; PAM type: YTN; PAM sequence: TTT
ttgtagagacagggtcctgc

SEQ ID NO: 82818 - DNA, 20 bp, Artificial Sequence
  Description of Artificial Sequence: Synthetic oligonucleotide
  Target: ATXN2; (-) strand; PAM type: YTN; PAM sequence: TTT
tttgtagagacagggtcctg

SEQ ID NO: 82819 - DNA, 20 bp, Artificial Sequence
  Description of Artificial Sequence: Synthetic oligonucleotide
  Target: ATXN2; (-) strand; PAM type: YTN; PAM sequence: TTA
aattttttgtagagacaggg

SEQ ID NO: 82820 - DNA, 20 bp, Artificial Sequence
  Description of Artificial Sequence: Synthetic oligonucleotide
  Target: ATXN2; (-) strand; PAM type: YTN; PAM sequence: TTT
aaattttttgtagagacagg

SEQ ID NO: 82821 - DNA, 20 bp, Artificial Sequence
  Description of Artificial Sequence: Synthetic oligonucleotide
  Target: ATXN2; (-) strand; PAM type: YTN; PAM sequence: CTA
acatttaaattttttgtaga

SEQ ID NO: 82822 - DNA, 20 bp, Artificial Sequence
  Description of Artificial Sequence: Synthetic oligonucleotide
  Target: ATXN2; (-) strand; PAM type: YTN; PAM sequence: CTG
gctaacatttaaattttttg

SEQ ID NO: 82823 - DNA, 20 bp, Artificial Sequence
  Description of Artificial Sequence: Synthetic oligonucleotide
  Target: ATXN2; (-) strand; PAM type: YTN; PAM sequence: CTA
caggtgtacaccagctggct

SEQ ID NO: 82824 - DNA, 20 bp, Artificial Sequence
  Description of Artificial Sequence: Synthetic oligonucleotide
  Target: ATXN2; (-) strand; PAM type: YTN; PAM sequence: CTG
gaactacaggtgtacaccag

SEQ ID NO: 82825 - DNA, 20 bp, Artificial Sequence
  Description of Artificial Sequence: Synthetic oligonucleotide
  Target: ATXN2; (-) strand; PAM type: YTN; PAM sequence: CTG
agtagctggaactacaggtg

SEQ ID NO: 82826 - DNA, 20 bp, Artificial Sequence
  Description of Artificial Sequence: Synthetic oligonucleotide
  Target: ATXN2; (-) strand; PAM type: YTN; PAM sequence: CTC
ctgagtagctggaactacag

SEQ ID NO: 82827 - DNA, 20 bp, Artificial Sequence
  Description of Artificial Sequence: Synthetic oligonucleotide
  Target: ATXN2; (-) strand; PAM type: YTN; PAM sequence: TTA
gcctcctgagtagctggaac

SEQ ID NO: 82828 - DNA, 20 bp, Artificial Sequence
  Description of Artificial Sequence: Synthetic oligonucleotide
  Target: ATXN2; (-) strand; PAM type: YTN; PAM sequence: CTT
agcctcctgagtagctggaa

SEQ ID NO: 82829 - DNA, 20 bp, Artificial Sequence
  Description of Artificial Sequence: Synthetic oligonucleotide
  Target: ATXN2; (-) strand; PAM type: YTN; PAM sequence: CTG
tcttagcctcctgagtagct

SEQ ID NO: 82830 - DNA, 20 bp, Artificial Sequence
  Description of Artificial Sequence: Synthetic oligonucleotide
  Target: ATXN2; (-) strand; PAM type: YTN; PAM sequence: CTC
ctgtcttagcctcctgagta

SEQ ID NO: 82831 - DNA, 20 bp, Artificial Sequence
  Description of Artificial Sequence: Synthetic oligonucleotide
  Target: ATXN2; (-) strand; PAM type: YTN; PAM sequence: TTC
tcctgtcttagcctcctgag

SEQ ID NO: 82832 - DNA, 20 bp, Artificial Sequence
  Description of Artificial Sequence: Synthetic oligonucleotide
  Target: ATXN2; (-) strand; PAM type: YTN; PAM sequence: TTT
ctcctgtcttagcctcctga

SEQ ID NO: 82833 - DNA, 20 bp, Artificial Sequence
  Description of Artificial Sequence: Synthetic oligonucleotide
  Target: ATXN2; (-) strand; PAM type: YTN; PAM sequence: CTA
tggggccaagcatttctcct

SEQ ID NO: 82834 - DNA, 20 bp, Artificial Sequence
  Description of Artificial Sequence: Synthetic oligonucleotide
  Target: ATXN2; (-) strand; PAM type: YTN; PAM sequence: CTC
aatctatggggccaagcatt

SEQ ID NO: 82835 - DNA, 20 bp, Artificial Sequence
  Description of Artificial Sequence: Synthetic oligonucleotide
  Target: ATXN2; (-) strand; PAM type: YTN; PAM sequence: CTG
gagtgcagcctcaatctatg

SEQ ID NO: 82836 - DNA, 20 bp, Artificial Sequence
  Description of Artificial Sequence: Synthetic oligonucleotide
  Target: ATXN2; (-) strand; PAM type: YTN; PAM sequence: CTG
tcacccaggctggagtgcag

SEQ ID NO: 82837 - DNA, 20 bp, Artificial Sequence
  Description of Artificial Sequence: Synthetic oligonucleotide
  Target: ATXN2; (-) strand; PAM type: YTN; PAM sequence: CTC
tgtcacccaggctggagtgc

SEQ ID NO: 82838 - DNA, 20 bp, Artificial Sequence
  Description of Artificial Sequence: Synthetic oligonucleotide
  Target: ATXN2; (-) strand; PAM type: YTN; PAM sequence: CTC
cctctgtcacccaggctgga

SEQ ID NO: 82839 - DNA, 20 bp, Artificial Sequence
  Description of Artificial Sequence: Synthetic oligonucleotide
  Target: ATXN2; (-) strand; PAM type: YTN; PAM sequence: TTA
gagtcaaggtctccctctgt

SEQ ID NO: 82840 - DNA, 20 bp, Artificial Sequence
  Description of Artificial Sequence: Synthetic oligonucleotide
  Target: ATXN2; (-) strand; PAM type: YTN; PAM sequence: TTT
agagtcaaggtctccctctg

SEQ ID NO: 82841 - DNA, 20 bp, Artificial Sequence
  Description of Artificial Sequence: Synthetic oligonucleotide
  Target: ATXN2; (-) strand; PAM type: YTN; PAM sequence: TTT
tagagtcaaggtctccctct

SEQ ID NO: 82842 - DNA, 20 bp, Artificial Sequence
  Description of Artificial Sequence: Synthetic oligonucleotide
  Target: ATXN2; (-) strand; PAM type: YTN; PAM sequence: TTT
ttagagtcaaggtctccctc

SEQ ID NO: 82843 - DNA, 20 bp, Artificial Sequence
  Description of Artificial Sequence: Synthetic oligonucleotide
  Target: ATXN2; (-) strand; PAM type: YTN; PAM sequence: TTT
tttagagtcaaggtctccct

SEQ ID NO: 82844 - DNA, 20 bp, Artificial Sequence
  Description of Artificial Sequence: Synthetic oligonucleotide
  Target: ATXN2; (-) strand; PAM type: YTN; PAM sequence: TTT
ttttagagtcaaggtctccc

SEQ ID NO: 82845 - DNA, 20 bp, Artificial Sequence
  Description of Artificial Sequence: Synthetic oligonucleotide
  Target: ATXN2; (-) strand; PAM type: YTN; PAM sequence: TTA
tttttttagagtcaaggtct

SEQ ID NO: 82846 - DNA, 20 bp, Artificial Sequence
  Description of Artificial Sequence: Synthetic oligonucleotide
  Target: ATXN2; (-) strand; PAM type: YTN; PAM sequence: TTT
atttttttagagtcaaggtc

SEQ ID NO: 82847 - DNA, 20 bp, Artificial Sequence
  Description of Artificial Sequence: Synthetic oligonucleotide
  Target: ATXN2; (-) strand; PAM type: YTN; PAM sequence: TTA
tttatttttttagagtcaag

SEQ ID NO: 82848 - DNA, 20 bp, Artificial Sequence
  Description of Artificial Sequence: Synthetic oligonucleotide
  Target: ATXN2; (-) strand; PAM type: YTN; PAM sequence: TTT
atttatttttttagagtcaa

SEQ ID NO: 82849 - DNA, 20 bp, Artificial Sequence
  Description of Artificial Sequence: Synthetic oligonucleotide
  Target: ATXN2; (-) strand; PAM type: YTN; PAM sequence: CTT
tatttatttttttagagtca

SEQ ID NO: 82850 - DNA, 20 bp, Artificial Sequence
  Description of Artificial Sequence: Synthetic oligonucleotide
  Target: ATXN2; (-) strand; PAM type: YTN; PAM sequence: CTC
cctttatttatttttttaga

SEQ ID NO: 82851 - DNA, 20 bp, Artificial Sequence
  Description of Artificial Sequence: Synthetic oligonucleotide
  Target: ATXN2; (-) strand; PAM type: YTN; PAM sequence: CTC
tccctttatttattttttta

SEQ ID NO: 82852 - DNA, 20 bp, Artificial Sequence
  Description of Artificial Sequence: Synthetic oligonucleotide
  Target: ATXN2; (-) strand; PAM type: YTN; PAM sequence: TTA
cacctctccctttatttatt

SEQ ID NO: 82853 - DNA, 20 bp, Artificial Sequence
  Description of Artificial Sequence: Synthetic oligonucleotide
  Target: ATXN2; (-) strand; PAM type: YTN; PAM sequence: TTA
ttacacctctccctttattt

SEQ ID NO: 82854 - DNA, 20 bp, Artificial Sequence
  Description of Artificial Sequence: Synthetic oligonucleotide
  Target: ATXN2; (-) strand; PAM type: YTN; PAM sequence: TTT
attacacctctccctttatt

SEQ ID NO: 82855 - DNA, 20 bp, Artificial Sequence
  Description of Artificial Sequence: Synthetic oligonucleotide
  Target: ATXN2; (-) strand; PAM type: YTN; PAM sequence: TTT
tattacacctctccctttat

SEQ ID NO: 82856 - DNA, 20 bp, Artificial Sequence
  Description of Artificial Sequence: Synthetic oligonucleotide
  Target: ATXN2; (-) strand; PAM type: YTN; PAM sequence: TTG
taggattttattacacctct

SEQ ID NO: 82857 - DNA, 20 bp, Artificial Sequence
  Description of Artificial Sequence: Synthetic oligonucleotide
  Target: ATXN2; (-) strand; PAM type: YTN; PAM sequence: TTT
gtaggattttattacacctc

SEQ ID NO: 82858 - DNA, 20 bp, Artificial Sequence
  Description of Artificial Sequence: Synthetic oligonucleotide
  Target: ATXN2; (-) strand; PAM type: YTN; PAM sequence: TTG
cccaaagcaatatttgtagg

SEQ ID NO: 82859 - DNA, 20 bp, Artificial Sequence
  Description of Artificial Sequence: Synthetic oligonucleotide
  Target: ATXN2; (-) strand; PAM type: YTN; PAM sequence: CTT
gcccaaagcaatatttgtag

SEQ ID NO: 82860 - DNA, 20 bp, Artificial Sequence
  Description of Artificial Sequence: Synthetic oligonucleotide
  Target: ATXN2; (-) strand; PAM type: YTN; PAM sequence: TTA
ggggacttgcccaaagcaat

SEQ ID NO: 82861 - DNA, 20 bp, Artificial Sequence
  Description of Artificial Sequence: Synthetic oligonucleotide
  Target: ATXN2; (-) strand; PAM type: YTN; PAM sequence: TTG
agagattaggggacttgccc

SEQ ID NO: 82862 - DNA, 20 bp, Artificial Sequence
  Description of Artificial Sequence: Synthetic oligonucleotide
  Target: ATXN2; (-) strand; PAM type: YTN; PAM sequence: TTT
gagagattaggggacttgcc

SEQ ID NO: 82863 - DNA, 20 bp, Artificial Sequence
  Description of Artificial Sequence: Synthetic oligonucleotide
  Target: ATXN2; (-) strand; PAM type: YTN; PAM sequence: CTT
tgagagattaggggacttgc

SEQ ID NO: 82864 - DNA, 20 bp, Artificial Sequence
  Description of Artificial Sequence: Synthetic oligonucleotide
  Target: ATXN2; (-) strand; PAM type: YTN; PAM sequence: CTA
agctttgagagattagggga

SEQ ID NO: 82865 - DNA, 20 bp, Artificial Sequence
  Description of Artificial Sequence: Synthetic oligonucleotide
  Target: ATXN2; (-) strand; PAM type: YTN; PAM sequence: CTC
taagctttgagagattaggg

SEQ ID NO: 82866 - DNA, 20 bp, Artificial Sequence
  Description of Artificial Sequence: Synthetic oligonucleotide
  Target: ATXN2; (-) strand; PAM type: YTN; PAM sequence: TTA
aaaatggaaggcaaaaactc

SEQ ID NO: 82867 - DNA, 20 bp, Artificial Sequence
  Description of Artificial Sequence: Synthetic oligonucleotide
  Target: ATXN2; (-) strand; PAM type: YTN; PAM sequence: CTT
aaaaatggaaggcaaaaact

SEQ ID NO: 82868 - DNA, 20 bp, Artificial Sequence
  Description of Artificial Sequence: Synthetic oligonucleotide
  Target: ATXN2; (-) strand; PAM type: YTN; PAM sequence: CTA
aatcttaaaaatggaaggca

SEQ ID NO: 82869 - DNA, 20 bp, Artificial Sequence
  Description of Artificial Sequence: Synthetic oligonucleotide
  Target: ATXN2; (-) strand; PAM type: YTN; PAM sequence: TTA
aaaaacagtaacaacaacaa

SEQ ID NO: 82870 - DNA, 20 bp, Artificial Sequence
  Description of Artificial Sequence: Synthetic oligonucleotide
  Target: ATXN2; (-) strand; PAM type: YTN; PAM sequence: CTT
aaaaaacagtaacaacaaca

SEQ ID NO: 82871 - DNA, 20 bp, Artificial Sequence
  Description of Artificial Sequence: Synthetic oligonucleotide
  Target: ATXN2; (-) strand; PAM type: YTN; PAM sequence: CTC
ttaaaaaacagtaacaacaa

SEQ ID NO: 82872 - DNA, 20 bp, Artificial Sequence
  Description of Artificial Sequence: Synthetic oligonucleotide
  Target: ATXN2; (-) strand; PAM type: YTN; PAM sequence: CTG
tctcttaaaaaacagtaaca

SEQ ID NO: 82873 - DNA, 20 bp, Artificial Sequence
  Description of Artificial Sequence: Synthetic oligonucleotide
  Target: ATXN2; (-) strand; PAM type: YTN; PAM sequence: CTA
ccctgtctcttaaaaaacag

SEQ ID NO: 82874 - DNA, 20 bp, Artificial Sequence
  Description of Artificial Sequence: Synthetic oligonucleotide
  Target: ATXN2; (-) strand; PAM type: YTN; PAM sequence: TTA
taggcatgagccaccgtgcg

SEQ ID NO: 82875 - DNA, 20 bp, Artificial Sequence
  Description of Artificial Sequence: Synthetic oligonucleotide
  Target: ATXN2; (-) strand; PAM type: YTN; PAM sequence: CTG
ggattataggcatgagccac

SEQ ID NO: 82876 - DNA, 20 bp, Artificial Sequence
  Description of Artificial Sequence: Synthetic oligonucleotide
  Target: ATXN2; (-) strand; PAM type: YTN; PAM sequence: CTC
ccaaagtgctgggattatag

SEQ ID NO: 82877 - DNA, 20 bp, Artificial Sequence
  Description of Artificial Sequence: Synthetic oligonucleotide
  Target: ATXN2; (-) strand; PAM type: YTN; PAM sequence: TTG
gcctcccaaagtgctgggat

SEQ ID NO: 82878 - DNA, 20 bp, Artificial Sequence
  Description of Artificial Sequence: Synthetic oligonucleotide
  Target: ATXN2; (-) strand; PAM type: YTN; PAM sequence: CTT
ggcctcccaaagtgctggga

SEQ ID NO: 82879 - DNA, 20 bp, Artificial Sequence
  Description of Artificial Sequence: Synthetic oligonucleotide
  Target: ATXN2; (-) strand; PAM type: YTN; PAM sequence: CTG
ccttggcctcccaaagtgct

SEQ ID NO: 82880 - DNA, 20 bp, Artificial Sequence
  Description of Artificial Sequence: Synthetic oligonucleotide
  Target: ATXN2; (-) strand; PAM type: YTN; PAM sequence: TTA
agcgatccacctgccttggc

SEQ ID NO: 82881 - DNA, 20 bp, Artificial Sequence
  Description of Artificial Sequence: Synthetic oligonucleotide
  Target: ATXN2; (-) strand; PAM type: YTN; PAM sequence: CTT
aagcgatccacctgccttgg

SEQ ID NO: 82882 - DNA, 20 bp, Artificial Sequence
  Description of Artificial Sequence: Synthetic oligonucleotide
  Target: ATXN2; (-) strand; PAM type: YTN; PAM sequence: CTG
accttaagcgatccacctgc

SEQ ID NO: 82883 - DNA, 20 bp, Artificial Sequence
  Description of Artificial Sequence: Synthetic oligonucleotide
  Target: ATXN2; (-) strand; PAM type: YTN; PAM sequence: CTC
ctgaccttaagcgatccacc

SEQ ID NO: 82884 - DNA, 20 bp, Artificial Sequence
  Description of Artificial Sequence: Synthetic oligonucleotide
  Target: ATXN2; (-) strand; PAM type: YTN; PAM sequence: CTC
gaactcctgaccttaagcga

SEQ ID NO: 82885 - DNA, 20 bp, Artificial Sequence
  Description of Artificial Sequence: Synthetic oligonucleotide
  Target: ATXN2; (-) strand; PAM type: YTN; PAM sequence: CTC
atctcgaactcctgacctta

SEQ ID NO: 82886 - DNA, 20 bp, Artificial Sequence
  Description of Artificial Sequence: Synthetic oligonucleotide
  Target: ATXN2; (-) strand; PAM type: YTN; PAM sequence: TTA
ggctcatctcgaactcctga

SEQ ID NO: 82887 - DNA, 20 bp, Artificial Sequence
  Description of Artificial Sequence: Synthetic oligonucleotide
  Target: ATXN2; (-) strand; PAM type: YTN; PAM sequence: TTG
gttaggctcatctcgaactc

SEQ ID NO: 82888 - DNA, 20 bp, Artificial Sequence
  Description of Artificial Sequence: Synthetic oligonucleotide
  Target: ATXN2; (-) strand; PAM type: YTN; PAM sequence: TTC
accatgttggttaggctcat

SEQ ID NO: 82889 - DNA, 20 bp, Artificial Sequence
  Description of Artificial Sequence: Synthetic oligonucleotide
  Target: ATXN2; (-) strand; PAM type: YTN; PAM sequence: TTT
caccatgttggttaggctca

SEQ ID NO: 82890 - DNA, 20 bp, Artificial Sequence
  Description of Artificial Sequence: Synthetic oligonucleotide
  Target: ATXN2; (-) strand; PAM type: YTN; PAM sequence: TTA
gcagagacagggtttcacca

SEQ ID NO: 82891 - DNA, 20 bp, Artificial Sequence
  Description of Artificial Sequence: Synthetic oligonucleotide
  Target: ATXN2; (-) strand; PAM type: YTN; PAM sequence: TTT
agcagagacagggtttcacc

SEQ ID NO: 82892 - DNA, 20 bp, Artificial Sequence
  Description of Artificial Sequence: Synthetic oligonucleotide
  Target: ATXN2; (-) strand; PAM type: YTN; PAM sequence: TTT
tagcagagacagggtttcac

SEQ ID NO: 82893 - DNA, 20 bp, Artificial Sequence
  Description of Artificial Sequence: Synthetic oligonucleotide
  Target: ATXN2; (-) strand; PAM type: YTN; PAM sequence: TTT
ttagcagagacagggtttca

SEQ ID NO: 82894 - DNA, 20 bp, Artificial Sequence
  Description of Artificial Sequence: Synthetic oligonucleotide
  Target: ATXN2; (-) strand; PAM type: YTN; PAM sequence: TTG
tatttttagcagagacaggg

SEQ ID NO: 82895 - DNA, 20 bp, Artificial Sequence
  Description of Artificial Sequence: Synthetic oligonucleotide
  Target: ATXN2; (-) strand; PAM type: YTN; PAM sequence: TTT
gtatttttagcagagacagg

SEQ ID NO: 82896 - DNA, 20 bp, Artificial Sequence
  Description of Artificial Sequence: Synthetic oligonucleotide
  Target: ATXN2; (-) strand; PAM type: YTN; PAM sequence: TTT
tgtatttttagcagagacag

SEQ ID NO: 82897 - DNA, 20 bp, Artificial Sequence
  Description of Artificial Sequence: Synthetic oligonucleotide
  Target: ATXN2; (-) strand; PAM type: YTN; PAM sequence: TTT
ttgtatttttagcagagaca

SEQ ID NO: 82898 - DNA, 20 bp, Artificial Sequence
  Description of Artificial Sequence: Synthetic oligonucleotide
  Target: ATXN2; (-) strand; PAM type: YTN; PAM sequence: CTA
atttttgtatttttagcaga

SEQ ID NO: 82899 - DNA, 20 bp, Artificial Sequence
  Description of Artificial Sequence: Synthetic oligonucleotide
  Target: ATXN2; (-) strand; PAM type: YTN; PAM sequence: CTC
agctaatttttgtattttta

SEQ ID NO: 82900 - DNA, 20 bp, Artificial Sequence
  Description of Artificial Sequence: Synthetic oligonucleotide
  Target: ATXN2; (-) strand; PAM type: YTN; PAM sequence: CTA
ccccactcagctaatttttg

SEQ ID NO: 82901 - DNA, 20 bp, Artificial Sequence
  Description of Artificial Sequence: Synthetic oligonucleotide
  Target: ATXN2; (-) strand; PAM type: YTN; PAM sequence: CTG
ctaccccactcagctaattt

SEQ ID NO: 82902 - DNA, 20 bp, Artificial Sequence
  Description of Artificial Sequence: Synthetic oligonucleotide
  Target: ATXN2; (-) strand; PAM type: YTN; PAM sequence: TTA
caggtgcctgctaccccact

SEQ ID NO: 82903 - DNA, 20 bp, Artificial Sequence
  Description of Artificial Sequence: Synthetic oligonucleotide
  Target: ATXN2; (-) strand; PAM type: YTN; PAM sequence: CTG
agattacaggtgcctgctac

SEQ ID NO: 82904 - DNA, 20 bp, Artificial Sequence
  Description of Artificial Sequence: Synthetic oligonucleotide
  Target: ATXN2; (-) strand; PAM type: YTN; PAM sequence: CTG
agtagctgagattacaggtg

SEQ ID NO: 82905 - DNA, 20 bp, Artificial Sequence
  Description of Artificial Sequence: Synthetic oligonucleotide
  Target: ATXN2; (-) strand; PAM type: YTN; PAM sequence: TTC
tgagtagctgagattacagg

SEQ ID NO: 82906 - DNA, 20 bp, Artificial Sequence
  Description of Artificial Sequence: Synthetic oligonucleotide
  Target: ATXN2; (-) strand; PAM type: YTN; PAM sequence: CTT
ctgagtagctgagattacag

SEQ ID NO: 82907 - DNA, 20 bp, Artificial Sequence
  Description of Artificial Sequence: Synthetic oligonucleotide
  Target: ATXN2; (-) strand; PAM type: YTN; PAM sequence: CTC
agccttctgagtagctgaga

SEQ ID NO: 82908 - DNA, 20 bp, Artificial Sequence
  Description of Artificial Sequence: Synthetic oligonucleotide
  Target: ATXN2; (-) strand; PAM type: YTN; PAM sequence: CTG
cctcagccttctgagtagct

SEQ ID NO: 82909 - DNA, 20 bp, Artificial Sequence
  Description of Artificial Sequence: Synthetic oligonucleotide
  Target: ATXN2; (-) strand; PAM type: YTN; PAM sequence: CTC
ctgcctcagccttctgagta

SEQ ID NO: 82910 - DNA, 20 bp, Artificial Sequence
  Description of Artificial Sequence: Synthetic oligonucleotide
  Target: ATXN2; (-) strand; PAM type: YTN; PAM sequence: TTC
tcctgcctcagccttctgag

SEQ ID NO: 82911 - DNA, 20 bp, Artificial Sequence
  Description of Artificial Sequence: Synthetic oligonucleotide
  Target: ATXN2; (-) strand; PAM type: YTN; PAM sequence: TTC
aagcgattctcctgcctcag

SEQ ID NO: 82912 - DNA, 20 bp, Artificial Sequence
  Description of Artificial Sequence: Synthetic oligonucleotide
  Target: ATXN2; (-) strand; PAM type: YTN; PAM sequence: TTC
ccgggttcaagcgattctcc

SEQ ID NO: 82913 - DNA, 20 bp, Artificial Sequence
  Description of Artificial Sequence: Synthetic oligonucleotide
  Target: ATXN2; (-) strand; PAM type: YTN; PAM sequence: TTT
cccgggttcaagcgattctc

SEQ ID NO: 82914 - DNA, 20 bp, Artificial Sequence
  Description of Artificial Sequence: Synthetic oligonucleotide
  Target: ATXN2; (-) strand; PAM type: YTN; PAM sequence: CTG
tttcccgggttcaagcgatt

SEQ ID NO: 82915 - DNA, 20 bp, Artificial Sequence
  Description of Artificial Sequence: Synthetic oligonucleotide
  Target: ATXN2; (-) strand; PAM type: YTN; PAM sequence: CTC
tgtttcccgggttcaagcga

SEQ ID NO: 82916 - DNA, 20 bp, Artificial Sequence
  Description of Artificial Sequence: Synthetic oligonucleotide
  Target: ATXN2; (-) strand; PAM type: YTN; PAM sequence: CTG
caacctctgtttcccgggtt

SEQ ID NO: 82917 - DNA, 20 bp, Artificial Sequence
  Description of Artificial Sequence: Synthetic oligonucleotide
  Target: ATXN2; (-) strand; PAM type: YTN; PAM sequence: CTC
actgcaacctctgtttcccg

SEQ ID NO: 82918 - DNA, 20 bp, Artificial Sequence
  Description of Artificial Sequence: Synthetic oligonucleotide
  Target: ATXN2; (-) strand; PAM type: YTN; PAM sequence: CTC
agctcactgcaacctctgtt

SEQ ID NO: 82919 - DNA, 20 bp, Artificial Sequence
  Description of Artificial Sequence: Synthetic oligonucleotide
  Target: ATXN2; (-) strand; PAM type: YTN; PAM sequence: CTG
gagtgcagtggtgcaatctc

SEQ ID NO: 82920 - DNA, 20 bp, Artificial Sequence
  Description of Artificial Sequence: Synthetic oligonucleotide
  Target: ATXN2; (-) strand; PAM type: YTN; PAM sequence: TTC
ccaggctggagtgcagtggt

SEQ ID NO: 82921 - DNA, 20 bp, Artificial Sequence
  Description of Artificial Sequence: Synthetic oligonucleotide
  Target: ATXN2; (-) strand; PAM type: YTN; PAM sequence: TTT
cccaggctggagtgcagtgg

SEQ ID NO: 82922 - DNA, 20 bp, Artificial Sequence
  Description of Artificial Sequence: Synthetic oligonucleotide
  Target: ATXN2; (-) strand; PAM type: YTN; PAM sequence: CTT
tcccaggctggagtgcagtg

SEQ ID NO: 82923 - DNA, 20 bp, Artificial Sequence
  Description of Artificial Sequence: Synthetic oligonucleotide
  Target: ATXN2; (-) strand; PAM type: YTN; PAM sequence: CTC
tttcccaggctggagtgcag

SEQ ID NO: 82924 - DNA, 20 bp, Artificial Sequence
  Description of Artificial Sequence: Synthetic oligonucleotide
  Target: ATXN2; (-) strand; PAM type: YTN; PAM sequence: TTG
ctctttcccaggctggagtg

SEQ ID NO: 82925 - DNA, 20 bp, Artificial Sequence
  Description of Artificial Sequence: Synthetic oligonucleotide
  Target: ATXN2; (-) strand; PAM type: YTN; PAM sequence: TTT
gctctttcccaggctggagt

SEQ ID NO: 82926 - DNA, 20 bp, Artificial Sequence
  Description of Artificial Sequence: Synthetic oligonucleotide
  Target: ATXN2; (-) strand; PAM type: YTN; PAM sequence: TTT
tgctctttcccaggctggag

SEQ ID NO: 82927 - DNA, 20 bp, Artificial Sequence
  Description of Artificial Sequence: Synthetic oligonucleotide
  Target: ATXN2; (-) strand; PAM type: YTN; PAM sequence: TTG
agacagttttgctctttccc

SEQ ID NO: 82928 - DNA, 20 bp, Artificial Sequence
  Description of Artificial Sequence: Synthetic oligonucleotide
  Target: ATXN2; (-) strand; PAM type: YTN; PAM sequence: TTT
gagacagttttgctctttcc

SEQ ID NO: 82929 - DNA, 20 bp, Artificial Sequence
  Description of Artificial Sequence: Synthetic oligonucleotide
  Target: ATXN2; (-) strand; PAM type: YTN; PAM sequence: TTT
tgagacagttttgctctttc

SEQ ID NO: 82930 - DNA, 20 bp, Artificial Sequence
  Description of Artificial Sequence: Synthetic oligonucleotide
  Target: ATXN2; (-) strand; PAM type: YTN; PAM sequence: TTT
ttgagacagttttgctcttt

SEQ ID NO: 82931 - DNA, 20 bp, Artificial Sequence
  Description of Artificial Sequence: Synthetic oligonucleotide
  Target: ATXN2; (-) strand; PAM type: YTN; PAM sequence: TTT
tttgagacagttttgctctt

SEQ ID NO: 82932 - DNA, 20 bp, Artificial Sequence
  Description of Artificial Sequence: Synthetic oligonucleotide
  Target: ATXN2; (-) strand; PAM type: YTN; PAM sequence: TTT
ttttgagacagttttgctct

SEQ ID NO: 82933 - DNA, 20 bp, Artificial Sequence
  Description of Artificial Sequence: Synthetic oligonucleotide
  Target: ATXN2; (-) strand; PAM type: YTN; PAM sequence: TTT
tttttgagacagttttgctc

SEQ ID NO: 82934 - DNA, 20 bp, Artificial Sequence
  Description of Artificial Sequence: Synthetic oligonucleotide
  Target: ATXN2; (-) strand; PAM type: YTN; PAM sequence: TTT
ttttttgagacagttttgct

SEQ ID NO: 82935 - DNA, 20 bp, Artificial Sequence
  Description of Artificial Sequence: Synthetic oligonucleotide
  Target: ATXN2; (-) strand; PAM type: YTN; PAM sequence: TTT
tttttttgagacagttttgc

SEQ ID NO: 82936 - DNA, 20 bp, Artificial Sequence
  Description of Artificial Sequence: Synthetic oligonucleotide
  Target: ATXN2; (-) strand; PAM type: YTN; PAM sequence: TTT
ttttttttgagacagttttg

SEQ ID NO: 82937 - DNA, 20 bp, Artificial Sequence
  Description of Artificial Sequence: Synthetic oligonucleotide
  Target: ATXN2; (-) strand; PAM type: YTN; PAM sequence: TTT
tttttttttgagacagtttt

SEQ ID NO: 82938 - DNA, 20 bp, Artificial Sequence
  Description of Artificial Sequence: Synthetic oligonucleotide
  Target: ATXN2; (-) strand; PAM type: YTN; PAM sequence: TTT
ttttttttttgagacagttt

SEQ ID NO: 82939 - DNA, 20 bp, Artificial Sequence
  Description of Artificial Sequence: Synthetic oligonucleotide
  Target: ATXN2; (-) strand; PAM type: YTN; PAM sequence: TTT
tttttttttttgagacagtt

SEQ ID NO: 82940 - DNA, 20 bp, Artificial Sequence
  Description of Artificial Sequence: Synthetic oligonucleotide
  Target: ATXN2; (-) strand; PAM type: YTN; PAM sequence: CTA
aggtgttttttttttttttg

SEQ ID NO: 82941 - DNA, 20 bp, Artificial Sequence
  Description of Artificial Sequence: Synthetic oligonucleotide
  Target: ATXN2; (-) strand; PAM type: YTN; PAM sequence: CTC
atgagctaaggtgttttttt

SEQ ID NO: 82942 - DNA, 20 bp, Artificial Sequence
  Description of Artificial Sequence: Synthetic oligonucleotide
  Target: ATXN2; (-) strand; PAM type: YTN; PAM sequence: TTA
caggcgtgagccacccccgc

SEQ ID NO: 82943 - DNA, 20 bp, Artificial Sequence
  Description of Artificial Sequence: Synthetic oligonucleotide
  Target: ATXN2; (-) strand; PAM type: YTN; PAM sequence: CTG
ggattacaggcgtgagccac

SEQ ID NO: 82944 - DNA, 20 bp, Artificial Sequence
  Description of Artificial Sequence: Synthetic oligonucleotide
  Target: ATXN2; (-) strand; PAM type: YTN; PAM sequence: CTC
ccaaagtgctgggattacag

SEQ ID NO: 82945 - DNA, 20 bp, Artificial Sequence
  Description of Artificial Sequence: Synthetic oligonucleotide
  Target: ATXN2; (-) strand; PAM type: YTN; PAM sequence: CTC
ggcctcccaaagtgctggga

SEQ ID NO: 82946 - DNA, 20 bp, Artificial Sequence
  Description of Artificial Sequence: Synthetic oligonucleotide
  Target: ATXN2; (-) strand; PAM type: YTN; PAM sequence: TTG
cctcggcctcccaaagtgct

SEQ ID NO: 82947 - DNA, 20 bp, Artificial Sequence
  Description of Artificial Sequence: Synthetic oligonucleotide
  Target: ATXN2; (-) strand; PAM type: YTN; PAM sequence: CTT
gcctcggcctcccaaagtgc

SEQ ID NO: 82948 - DNA, 20 bp, Artificial Sequence
  Description of Artificial Sequence: Synthetic oligonucleotide
  Target: ATXN2; (-) strand; PAM type: YTN; PAM sequence: TTC
gcttgcctcggcctcccaaa

SEQ ID NO: 82949 - DNA, 20 bp, Artificial Sequence
  Description of Artificial Sequence: Synthetic oligonucleotide
  Target: ATXN2; (-) strand; PAM type: YTN; PAM sequence: CTC
aggtgattcgcttgcctcgg

SEQ ID NO: 82950 - DNA, 20 bp, Artificial Sequence
  Description of Artificial Sequence: Synthetic oligonucleotide
  Target: ATXN2; (-) strand; PAM type: YTN; PAM sequence: CTG
acctcaggtgattcgcttgc

SEQ ID NO: 82951 - DNA, 20 bp, Artificial Sequence
  Description of Artificial Sequence: Synthetic oligonucleotide
  Target: ATXN2; (-) strand; PAM type: YTN; PAM sequence: CTC
ctgacctcaggtgattcgct

SEQ ID NO: 82952 - DNA, 20 bp, Artificial Sequence
  Description of Artificial Sequence: Synthetic oligonucleotide
  Target: ATXN2; (-) strand; PAM type: YTN; PAM sequence: TTG
aactcctgacctcaggtgat

SEQ ID NO: 82953 - DNA, 20 bp, Artificial Sequence
  Description of Artificial Sequence: Synthetic oligonucleotide
  Target: ATXN2; (-) strand; PAM type: YTN; PAM sequence: CTT
gaactcctgacctcaggtga

SEQ ID NO: 82954 - DNA, 20 bp, Artificial Sequence
  Description of Artificial Sequence: Synthetic oligonucleotide
  Target: ATXN2; (-) strand; PAM type: YTN; PAM sequence: CTC
ttgaactcctgacctcaggt

SEQ ID NO: 82955 - DNA, 20 bp, Artificial Sequence
  Description of Artificial Sequence: Synthetic oligonucleotide
  Target: ATXN2; (-) strand; PAM type: YTN; PAM sequence: CTG
ctcttgaactcctgacctca

SEQ ID NO: 82956 - DNA, 20 bp, Artificial Sequence
  Description of Artificial Sequence: Synthetic oligonucleotide
  Target: ATXN2; (-) strand; PAM type: YTN; PAM sequence: TTG
gccaggctgctcttgaactc

SEQ ID NO: 82957 - DNA, 20 bp, Artificial Sequence
  Description of Artificial Sequence: Synthetic oligonucleotide
  Target: ATXN2; (-) strand; PAM type: YTN; PAM sequence: TTC
accatgttggccaggctgct

SEQ ID NO: 82958 - DNA, 20 bp, Artificial Sequence
  Description of Artificial Sequence: Synthetic oligonucleotide
  Target: ATXN2; (-) strand; PAM type: YTN; PAM sequence: TTT
caccatgttggccaggctgc

SEQ ID NO: 82959 - DNA, 20 bp, Artificial Sequence
  Description of Artificial Sequence: Synthetic oligonucleotide
  Target: ATXN2; (-) strand; PAM type: YTN; PAM sequence: TTA
gtagatatggagtttcacca

SEQ ID NO: 82960 - DNA, 20 bp, Artificial Sequence
  Description of Artificial Sequence: Synthetic oligonucleotide
  Target: ATXN2; (-) strand; PAM type: YTN; PAM sequence: TTT
agtagatatggagtttcacc

SEQ ID NO: 82961 - DNA, 20 bp, Artificial Sequence
  Description of Artificial Sequence: Synthetic oligonucleotide
  Target: ATXN2; (-) strand; PAM type: YTN; PAM sequence: TTT
tagtagatatggagtttcac

SEQ ID NO: 82962 - DNA, 20 bp, Artificial Sequence
  Description of Artificial Sequence: Synthetic oligonucleotide
  Target: ATXN2; (-) strand; PAM type: YTN; PAM sequence: TTT
ttagtagatatggagtttca

SEQ ID NO: 82963 - DNA, 20 bp, Artificial Sequence
  Description of Artificial Sequence: Synthetic oligonucleotide
  Target: ATXN2; (-) strand; PAM type: YTN; PAM sequence: TTG
catttttagtagatatggag

SEQ ID NO: 82964 - DNA, 20 bp, Artificial Sequence
  Description of Artificial Sequence: Synthetic oligonucleotide
  Target: ATXN2; (-) strand; PAM type: YTN; PAM sequence: TTT
gcatttttagtagatatgga

SEQ ID NO: 82965 - DNA, 20 bp, Artificial Sequence
  Description of Artificial Sequence: Synthetic oligonucleotide
  Target: ATXN2; (-) strand; PAM type: YTN; PAM sequence: TTT
tgcatttttagtagatatgg

SEQ ID NO: 82966 - DNA, 20 bp, Artificial Sequence
  Description of Artificial Sequence: Synthetic oligonucleotide
  Target: ATXN2; (-) strand; PAM type: YTN; PAM sequence: CTA
agttttgcatttttagtaga

SEQ ID NO: 82967 - DNA, 20 bp, Artificial Sequence
  Description of Artificial Sequence: Synthetic oligonucleotide
  Target: ATXN2; (-) strand; PAM type: YTN; PAM sequence: CTG
gctaagttttgcatttttag

SEQ ID NO: 82968 - DNA, 20 bp, Artificial Sequence
  Description of Artificial Sequence: Synthetic oligonucleotide
  Target: ATXN2; (-) strand; PAM type: YTN; PAM sequence: TTA
caggcacccgccaccatgcc

SEQ ID NO: 82969 - DNA, 20 bp, Artificial Sequence
  Description of Artificial Sequence: Synthetic oligonucleotide
  Target: ATXN2; (-) strand; PAM type: YTN; PAM sequence: CTG
ggattacaggcacccgccac

SEQ ID NO: 82970 - DNA, 20 bp, Artificial Sequence
  Description of Artificial Sequence: Synthetic oligonucleotide
  Target: ATXN2; (-) strand; PAM type: YTN; PAM sequence: CTC
ccgaatagctgggattacag

SEQ ID NO: 82971 - DNA, 20 bp, Artificial Sequence
  Description of Artificial Sequence: Synthetic oligonucleotide
  Target: ATXN2; (-) strand; PAM type: YTN; PAM sequence: TTA
gccctcccgaatagctggga

SEQ ID NO: 82972 - DNA, 20 bp, Artificial Sequence
  Description of Artificial Sequence: Synthetic oligonucleotide
  Target: ATXN2; (-) strand; PAM type: YTN; PAM sequence: CTT
agccctcccgaatagctggg

SEQ ID NO: 82973 - DNA, 20 bp, Artificial Sequence
  Description of Artificial Sequence: Synthetic oligonucleotide
  Target: ATXN2; (-) strand; PAM type: YTN; PAM sequence: CTG
ccttagccctcccgaatagc

SEQ ID NO: 82974 - DNA, 20 bp, Artificial Sequence
  Description of Artificial Sequence: Synthetic oligonucleotide
  Target: ATXN2; (-) strand; PAM type: YTN; PAM sequence: CTC
ctgccttagccctcccgaat

SEQ ID NO: 82975 - DNA, 20 bp, Artificial Sequence
  Description of Artificial Sequence: Synthetic oligonucleotide
  Target: ATXN2; (-) strand; PAM type: YTN; PAM sequence: TTC
tcctgccttagccctcccga

SEQ ID NO: 82976 - DNA, 20 bp, Artificial Sequence
  Description of Artificial Sequence: Synthetic oligonucleotide
  Target: ATXN2; (-) strand; PAM type: YTN; PAM sequence: TTC
aagcaattctcctgccttag

SEQ ID NO: 82977 - DNA, 20 bp, Artificial Sequence
  Description of Artificial Sequence: Synthetic oligonucleotide
  Target: ATXN2; (-) strand; PAM type: YTN; PAM sequence: CTC
ccaggttcaagcaattctcc

SEQ ID NO: 82978 - DNA, 20 bp, Artificial Sequence
  Description of Artificial Sequence: Synthetic oligonucleotide
  Target: ATXN2; (-) strand; PAM type: YTN; PAM sequence: CTC
cgcctcccaggttcaagcaa

SEQ ID NO: 82979 - DNA, 20 bp, Artificial Sequence
  Description of Artificial Sequence: Synthetic oligonucleotide
  Target: ATXN2; (-) strand; PAM type: YTN; PAM sequence: CTG
caacctccgcctcccaggtt

SEQ ID NO: 82980 - DNA, 20 bp, Artificial Sequence
  Description of Artificial Sequence: Synthetic oligonucleotide
  Target: ATXN2; (-) strand; PAM type: YTN; PAM sequence: CTC
actgcaacctccgcctccca

SEQ ID NO: 82981 - DNA, 20 bp, Artificial Sequence
  Description of Artificial Sequence: Synthetic oligonucleotide
  Target: ATXN2; (-) strand; PAM type: YTN; PAM sequence: TTG
gctcactgcaacctccgcct

SEQ ID NO: 82982 - DNA, 20 bp, Artificial Sequence
  Description of Artificial Sequence: Synthetic oligonucleotide
  Target: ATXN2; (-) strand; PAM type: YTN; PAM sequence: CTT
ggctcactgcaacctccgcc

SEQ ID NO: 82983 - DNA, 20 bp, Artificial Sequence
  Description of Artificial Sequence: Synthetic oligonucleotide
  Target: ATXN2; (-) strand; PAM type: YTN; PAM sequence: CTG
gagtgcagtggcgtgatctt

SEQ ID NO: 82984 - DNA, 20 bp, Artificial Sequence
  Description of Artificial Sequence: Synthetic oligonucleotide
  Target: ATXN2; (-) strand; PAM type: YTN; PAM sequence: CTG
tcgcccaggctggagtgcag

SEQ ID NO: 82985 - DNA, 20 bp, Artificial Sequence
  Description of Artificial Sequence: Synthetic oligonucleotide
  Target: ATXN2; (-) strand; PAM type: YTN; PAM sequence: CTC
tgtcgcccaggctggagtgc

SEQ ID NO: 82986 - DNA, 20 bp, Artificial Sequence
  Description of Artificial Sequence: Synthetic oligonucleotide
  Target: ATXN2; (-) strand; PAM type: YTN; PAM sequence: TTG
agacagagtctctgtcgccc

SEQ ID NO: 82987 - DNA, 20 bp, Artificial Sequence
  Description of Artificial Sequence: Synthetic oligonucleotide
  Target: ATXN2; (-) strand; PAM type: YTN; PAM sequence: TTT
gagacagagtctctgtcgcc

SEQ ID NO: 82988 - DNA, 20 bp, Artificial Sequence
  Description of Artificial Sequence: Synthetic oligonucleotide
  Target: ATXN2; (-) strand; PAM type: YTN; PAM sequence: TTT
tgagacagagtctctgtcgc

SEQ ID NO: 82989 - DNA, 20 bp, Artificial Sequence
  Description of Artificial Sequence: Synthetic oligonucleotide
  Target: ATXN2; (-) strand; PAM type: YTN; PAM sequence: TTT
ttgagacagagtctctgtcg

SEQ ID NO: 82990 - DNA, 20 bp, Artificial Sequence
  Description of Artificial Sequence: Synthetic oligonucleotide
  Target: ATXN2; (-) strand; PAM type: YTN; PAM sequence: TTG
tttttgagacagagtctctg

SEQ ID NO: 82991 - DNA, 20 bp, Artificial Sequence
  Description of Artificial Sequence: Synthetic oligonucleotide
  Target: ATXN2; (-) strand; PAM type: YTN; PAM sequence: TTT
gtttttgagacagagtctct

SEQ ID NO: 82992 - DNA, 20 bp, Artificial Sequence
  Description of Artificial Sequence: Synthetic oligonucleotide
  Target: ATXN2; (-) strand; PAM type: YTN; PAM sequence: TTG
tttgtttttgagacagagtc

SEQ ID NO: 82993 - DNA, 20 bp, Artificial Sequence
  Description of Artificial Sequence: Synthetic oligonucleotide
  Target: ATXN2; (-) strand; PAM type: YTN; PAM sequence: TTT
gtttgtttttgagacagagt

SEQ ID NO: 82994 - DNA, 20 bp, Artificial Sequence
  Description of Artificial Sequence: Synthetic oligonucleotide
  Target: ATXN2; (-) strand; PAM type: YTN; PAM sequence: TTT
tgtttgtttttgagacagag

SEQ ID NO: 82995 - DNA, 20 bp, Artificial Sequence
  Description of Artificial Sequence: Synthetic oligonucleotide
  Target: ATXN2; (-) strand; PAM type: YTN; PAM sequence: TTT
ttgtttgtttttgagacaga

SEQ ID NO: 82996 - DNA, 20 bp, Artificial Sequence
  Description of Artificial Sequence: Synthetic oligonucleotide
  Target: ATXN2; (-) strand; PAM type: YTN; PAM sequence: TTT
tttgtttgtttttgagacag

SEQ ID NO: 82997 - DNA, 20 bp, Artificial Sequence
  Description of Artificial Sequence: Synthetic oligonucleotide
  Target: ATXN2; (-) strand; PAM type: YTN; PAM sequence: TTT
ttttgtttgtttttgagaca

SEQ ID NO: 82998 - DNA, 20 bp, Artificial Sequence
  Description of Artificial Sequence: Synthetic oligonucleotide
  Target: ATXN2; (-) strand; PAM type: YTN; PAM sequence: CTA
agggtttttttgtttgtttt

SEQ ID NO: 82999 - DNA, 20 bp, Artificial Sequence
  Description of Artificial Sequence: Synthetic oligonucleotide
  Target: ATXN2; (-) strand; PAM type: YTN; PAM sequence: TTA
ccatctaagggtttttttgt

SEQ ID NO: 83000 - DNA, 20 bp, Artificial Sequence
  Description of Artificial Sequence: Synthetic oligonucleotide
  Target: ATXN2; (-) strand; PAM type: YTN; PAM sequence: CTG
ttaccatctaagggtttttt

SEQ ID NO: 83001 - DNA, 20 bp, Artificial Sequence
  Description of Artificial Sequence: Synthetic oligonucleotide
  Target: ATXN2; (-) strand; PAM type: YTN; PAM sequence: TTA
ctgttaccatctaagggttt

SEQ ID NO: 83002 - DNA, 20 bp, Artificial Sequence
  Description of Artificial Sequence: Synthetic oligonucleotide
  Target: ATXN2; (-) strand; PAM type: YTN; PAM sequence: CTA
tgatgttactgttaccatct

SEQ ID NO: 83003 - DNA, 20 bp, Artificial Sequence
  Description of Artificial Sequence: Synthetic oligonucleotide
  Target: ATXN2; (-) strand; PAM type: YTN; PAM sequence: CTG
ggtcatctatgatgttactg

SEQ ID NO: 83004 - DNA, 20 bp, Artificial Sequence
  Description of Artificial Sequence: Synthetic oligonucleotide
  Target: ATXN2; (-) strand; PAM type: YTN; PAM sequence: TTC
caaaggatatctgggtcatc

SEQ ID NO: 83005 - DNA, 20 bp, Artificial Sequence
  Description of Artificial Sequence: Synthetic oligonucleotide
  Target: ATXN2; (-) strand; PAM type: YTN; PAM sequence: TTT
ccaaaggatatctgggtcat

SEQ ID NO: 83006 - DNA, 20 bp, Artificial Sequence
  Description of Artificial Sequence: Synthetic oligonucleotide
  Target: ATXN2; (-) strand; PAM type: YTN; PAM sequence: TTT
tccaaaggatatctgggtca

SEQ ID NO: 83007 - DNA, 20 bp, Artificial Sequence
  Description of Artificial Sequence: Synthetic oligonucleotide
  Target: ATXN2; (-) strand; PAM type: YTN; PAM sequence: TTT
ttccaaaggatatctgggtc

SEQ ID NO: 83008 - DNA, 20 bp, Artificial Sequence
  Description of Artificial Sequence: Synthetic oligonucleotide
  Target: ATXN2; (-) strand; PAM type: YTN; PAM sequence: TTT
tttccaaaggatatctgggt

SEQ ID NO: 83009 - DNA, 20 bp, Artificial Sequence
  Description of Artificial Sequence: Synthetic oligonucleotide
  Target: ATXN2; (-) strand; PAM type: YTN; PAM sequence: TTT
ttttccaaaggatatctggg

SEQ ID NO: 83010 - DNA, 20 bp, Artificial Sequence
  Description of Artificial Sequence: Synthetic oligonucleotide
  Target: ATXN2; (-) strand; PAM type: YTN; PAM sequence: TTG
tttttttccaaaggatatct

SEQ ID NO: 83011 - DNA, 20 bp, Artificial Sequence
  Description of Artificial Sequence: Synthetic oligonucleotide
  Target: ATXN2; (-) strand; PAM type: YTN; PAM sequence: TTT
gtttttttccaaaggatatc

SEQ ID NO: 83012 - DNA, 20 bp, Artificial Sequence
  Description of Artificial Sequence: Synthetic oligonucleotide
  Target: ATXN2; (-) strand; PAM type: YTN; PAM sequence: TTT
tgtttttttccaaaggatat

SEQ ID NO: 83013 - DNA, 20 bp, Artificial Sequence
  Description of Artificial Sequence: Synthetic oligonucleotide
  Target: ATXN2; (-) strand; PAM type: YTN; PAM sequence: TTT
ttgtttttttccaaaggata

SEQ ID NO: 83014 - DNA, 20 bp, Artificial Sequence
  Description of Artificial Sequence: Synthetic oligonucleotide
  Target: ATXN2; (-) strand; PAM type: YTN; PAM sequence: TTT
tttgtttttttccaaaggat

SEQ ID NO: 83015 - DNA, 20 bp, Artificial Sequence
  Description of Artificial Sequence: Synthetic oligonucleotide
  Target: ATXN2; (-) strand; PAM type: YTN; PAM sequence: TTT
ttttgtttttttccaaagga

SEQ ID NO: 83016 - DNA, 20 bp, Artificial Sequence
  Description of Artificial Sequence: Synthetic oligonucleotide
  Target: ATXN2; (-) strand; PAM type: YTN; PAM sequence: TTT
tttttgtttttttccaaagg

SEQ ID NO: 83017 - DNA, 20 bp, Artificial Sequence
  Description of Artificial Sequence: Synthetic oligonucleotide
  Target: ATXN2; (-) strand; PAM type: YTN; PAM sequence: TTG
tgttttttttgtttttttcc

SEQ ID NO: 83018 - DNA, 20 bp, Artificial Sequence
  Description of Artificial Sequence: Synthetic oligonucleotide
  Target: ATXN2; (-) strand; PAM type: YTN; PAM sequence: CTT
gtgttttttttgtttttttc

SEQ ID NO: 83019 - DNA, 20 bp, Artificial Sequence
  Description of Artificial Sequence: Synthetic oligonucleotide
  Target: ATXN2; (-) strand; PAM type: YTN; PAM sequence: TTA
aatgaaagtacttgtgtttt

SEQ ID NO: 83020 - DNA, 20 bp, Artificial Sequence
  Description of Artificial Sequence: Synthetic oligonucleotide
  Target: ATXN2; (-) strand; PAM type: YTN; PAM sequence: TTT
aaatgaaagtacttgtgttt

SEQ ID NO: 83021 - DNA, 20 bp, Artificial Sequence
  Description of Artificial Sequence: Synthetic oligonucleotide
  Target: ATXN2; (-) strand; PAM type: YTN; PAM sequence: TTT
taaatgaaagtacttgtgtt

SEQ ID NO: 83022 - DNA, 20 bp, Artificial Sequence
  Description of Artificial Sequence: Synthetic oligonucleotide
  Target: ATXN2; (-) strand; PAM type: YTN; PAM sequence: TTT
ttaaatgaaagtacttgtgt

SEQ ID NO: 83023 - DNA, 20 bp, Artificial Sequence
  Description of Artificial Sequence: Synthetic oligonucleotide
  Target: ATXN2; (-) strand; PAM type: YTN; PAM sequence: CTT
tttaaatgaaagtacttgtg

SEQ ID NO: 83024 - DNA, 20 bp, Artificial Sequence
  Description of Artificial Sequence: Synthetic oligonucleotide
  Target: ATXN2; (-) strand; PAM type: YTN; PAM sequence: CTG
ccgtatctttttaaatgaaa

SEQ ID NO: 83025 - DNA, 20 bp, Artificial Sequence
  Description of Artificial Sequence: Synthetic oligonucleotide
  Target: ATXN2; (-) strand; PAM type: YTN; PAM sequence: TTG
gccgctgccgtatcttttta

SEQ ID NO: 83026 - DNA, 20 bp, Artificial Sequence
  Description of Artificial Sequence: Synthetic oligonucleotide
  Target: ATXN2; (-) strand; PAM type: YTN; PAM sequence: CTT
ggccgctgccgtatcttttt

SEQ ID NO: 83027 - DNA, 20 bp, Artificial Sequence
  Description of Artificial Sequence: Synthetic oligonucleotide
  Target: ATXN2; (-) strand; PAM type: YTN; PAM sequence: TTA
caggcatgagccaccgtgct

SEQ ID NO: 83028 - DNA, 20 bp, Artificial Sequence
  Description of Artificial Sequence: Synthetic oligonucleotide
  Target: ATXN2; (-) strand; PAM type: YTN; PAM sequence: CTG
ggattacaggcatgagccac

SEQ ID NO: 83029 - DNA, 20 bp, Artificial Sequence
  Description of Artificial Sequence: Synthetic oligonucleotide
  Target: ATXN2; (-) strand; PAM type: YTN; PAM sequence: TTC
tgggattacaggcatgagcc

SEQ ID NO: 83030 - DNA, 20 bp, Artificial Sequence
  Description of Artificial Sequence: Synthetic oligonucleotide
  Target: ATXN2; (-) strand; PAM type: YTN; PAM sequence: CTC
ccaaagttctgggattacag

SEQ ID NO: 83031 - DNA, 20 bp, Artificial Sequence
  Description of Artificial Sequence: Synthetic oligonucleotide
  Target: ATXN2; (-) strand; PAM type: YTN; PAM sequence: CTC
agcctcccaaagttctggga

SEQ ID NO: 83032 - DNA, 20 bp, Artificial Sequence
  Description of Artificial Sequence: Synthetic oligonucleotide
  Target: ATXN2; (-) strand; PAM type: YTN; PAM sequence: CTG
cctcagcctcccaaagttct

SEQ ID NO: 83033 - DNA, 20 bp, Artificial Sequence
  Description of Artificial Sequence: Synthetic oligonucleotide
  Target: ATXN2; (-) strand; PAM type: YTN; PAM sequence: CTC
aggtgatccacctgcctcag

SEQ ID NO: 83034 - DNA, 20 bp, Artificial Sequence
  Description of Artificial Sequence: Synthetic oligonucleotide
  Target: ATXN2; (-) strand; PAM type: YTN; PAM sequence: CTG
acctcaggtgatccacctgc

SEQ ID NO: 83035 - DNA, 20 bp, Artificial Sequence
  Description of Artificial Sequence: Synthetic oligonucleotide
  Target: ATXN2; (-) strand; PAM type: YTN; PAM sequence: CTC
ctgacctcaggtgatccacc

SEQ ID NO: 83036 - DNA, 20 bp, Artificial Sequence
  Description of Artificial Sequence: Synthetic oligonucleotide
  Target: ATXN2; (-) strand; PAM type: YTN; PAM sequence: CTC
aaactcctgacctcaggtga

SEQ ID NO: 83037 - DNA, 20 bp, Artificial Sequence
  Description of Artificial Sequence: Synthetic oligonucleotide
  Target: ATXN2; (-) strand; PAM type: YTN; PAM sequence: CTA
gaatggtctcaaactcctga

SEQ ID NO: 83038 - DNA, 20 bp, Artificial Sequence
  Description of Artificial Sequence: Synthetic oligonucleotide
  Target: ATXN2; (-) strand; PAM type: YTN; PAM sequence: TTG
gctagaatggtctcaaactc

SEQ ID NO: 83039 - DNA, 20 bp, Artificial Sequence
  Description of Artificial Sequence: Synthetic oligonucleotide
  Target: ATXN2; (-) strand; PAM type: YTN; PAM sequence: TTC
accatgttggctagaatggt

SEQ ID NO: 83040 - DNA, 20 bp, Artificial Sequence
  Description of Artificial Sequence: Synthetic oligonucleotide
  Target: ATXN2; (-) strand; PAM type: YTN; PAM sequence: TTT
caccatgttggctagaatgg

SEQ ID NO: 83041 - DNA, 20 bp, Artificial Sequence
  Description of Artificial Sequence: Synthetic oligonucleotide
  Target: ATXN2; (-) strand; PAM type: YTN; PAM sequence: TTA
gtagagacagggtttcacca

SEQ ID NO: 83042 - DNA, 20 bp, Artificial Sequence
  Description of Artificial Sequence: Synthetic oligonucleotide
  Target: ATXN2; (-) strand; PAM type: YTN; PAM sequence: TTT
agtagagacagggtttcacc

SEQ ID NO: 83043 - DNA, 20 bp, Artificial Sequence
  Description of Artificial Sequence: Synthetic oligonucleotide
  Target: ATXN2; (-) strand; PAM type: YTN; PAM sequence: TTT
tagtagagacagggtttcac

SEQ ID NO: 83044 - DNA, 20 bp, Artificial Sequence
  Description of Artificial Sequence: Synthetic oligonucleotide
  Target: ATXN2; (-) strand; PAM type: YTN; PAM sequence: TTT
ttagtagagacagggtttca

SEQ ID NO: 83045 - DNA, 20 bp, Artificial Sequence
  Description of Artificial Sequence: Synthetic oligonucleotide
  Target: ATXN2; (-) strand; PAM type: YTN; PAM sequence: TTG
tatttttagtagagacaggg

SEQ ID NO: 83046 - DNA, 20 bp, Artificial Sequence
  Description of Artificial Sequence: Synthetic oligonucleotide
  Target: ATXN2; (-) strand; PAM type: YTN; PAM sequence: TTT
gtatttttagtagagacagg

SEQ ID NO: 83047 - DNA, 20 bp, Artificial Sequence
  Description of Artificial Sequence: Synthetic oligonucleotide
  Target: ATXN2; (-) strand; PAM type: YTN; PAM sequence: TTT
tgtatttttagtagagacag

SEQ ID NO: 83048 - DNA, 20 bp, Artificial Sequence
  Description of Artificial Sequence: Synthetic oligonucleotide
  Target: ATXN2; (-) strand; PAM type: YTN; PAM sequence: TTT
ttgtatttttagtagagaca

SEQ ID NO: 83049 - DNA, 20 bp, Artificial Sequence
  Description of Artificial Sequence: Synthetic oligonucleotide
  Target: ATXN2; (-) strand; PAM type: YTN; PAM sequence: CTA
atttttgtatttttagtaga

SEQ ID NO: 83050 - DNA, 20 bp, Artificial Sequence
  Description of Artificial Sequence: Synthetic oligonucleotide
  Target: ATXN2; (-) strand; PAM type: YTN; PAM sequence: CTG
gctaatttttgtatttttag

SEQ ID NO: 83051 - DNA, 20 bp, Artificial Sequence
  Description of Artificial Sequence: Synthetic oligonucleotide
  Target: ATXN2; (-) strand; PAM type: YTN; PAM sequence: CTA
catgcgcacaccaccacgcc

SEQ ID NO: 83052 - DNA, 20 bp, Artificial Sequence
  Description of Artificial Sequence: Synthetic oligonucleotide
  Target: ATXN2; (-) strand; PAM type: YTN; PAM sequence: CTG
ggtctacatgcgcacaccac

SEQ ID NO: 83053 - DNA, 20 bp, Artificial Sequence
  Description of Artificial Sequence: Synthetic oligonucleotide
  Target: ATXN2; (-) strand; PAM type: YTN; PAM sequence: CTG
agtagctgggtctacatgcg

SEQ ID NO: 83054 - DNA, 20 bp, Artificial Sequence
  Description of Artificial Sequence: Synthetic oligonucleotide
  Target: ATXN2; (-) strand; PAM type: YTN; PAM sequence: CTC
ctgagtagctgggtctacat

SEQ ID NO: 83055 - DNA, 20 bp, Artificial Sequence
  Description of Artificial Sequence: Synthetic oligonucleotide
  Target: ATXN2; (-) strand; PAM type: YTN; PAM sequence: CTC
agcctcctgagtagctgggt

SEQ ID NO: 83056 - DNA, 20 bp, Artificial Sequence
  Description of Artificial Sequence: Synthetic oligonucleotide
  Target: ATXN2; (-) strand; PAM type: YTN; PAM sequence: CTG
cctcagcctcctgagtagct

SEQ ID NO: 83057 - DNA, 20 bp, Artificial Sequence
  Description of Artificial Sequence: Synthetic oligonucleotide
  Target: ATXN2; (-) strand; PAM type: YTN; PAM sequence: CTC
ctgcctcagcctcctgagta

SEQ ID NO: 83058 - DNA, 20 bp, Artificial Sequence
  Description of Artificial Sequence: Synthetic oligonucleotide
  Target: ATXN2; (-) strand; PAM type: YTN; PAM sequence: TTC
tcctgcctcagcctcctgag

SEQ ID NO: 83059 - DNA, 20 bp, Artificial Sequence
  Description of Artificial Sequence: Synthetic oligonucleotide
  Target: ATXN2; (-) strand; PAM type: YTN; PAM sequence: TTC
aagtgattctcctgcctcag

SEQ ID NO: 83060 - DNA, 20 bp, Artificial Sequence
  Description of Artificial Sequence: Synthetic oligonucleotide
  Target: ATXN2; (-) strand; PAM type: YTN; PAM sequence: CTC
ccgggttcaagtgattctcc

SEQ ID NO: 83061 - DNA, 20 bp, Artificial Sequence
  Description of Artificial Sequence: Synthetic oligonucleotide
  Target: ATXN2; (-) strand; PAM type: YTN; PAM sequence: TTG
cctcccgggttcaagtgatt

SEQ ID NO: 83062 - DNA, 20 bp, Artificial Sequence
  Description of Artificial Sequence: Synthetic oligonucleotide
  Target: ATXN2; (-) strand; PAM type: YTN; PAM sequence: TTT
gcctcccgggttcaagtgat

SEQ ID NO: 83063 - DNA, 20 bp, Artificial Sequence
  Description of Artificial Sequence: Synthetic oligonucleotide
  Target: ATXN2; (-) strand; PAM type: YTN; PAM sequence: CTT
tgcctcccgggttcaagtga

SEQ ID NO: 83064 - DNA, 20 bp, Artificial Sequence
  Description of Artificial Sequence: Synthetic oligonucleotide
  Target: ATXN2; (-) strand; PAM type: YTN; PAM sequence: CTG
caacctttgcctcccgggtt

SEQ ID NO: 83065 - DNA, 20 bp, Artificial Sequence
  Description of Artificial Sequence: Synthetic oligonucleotide
  Target: ATXN2; (-) strand; PAM type: YTN; PAM sequence: TTA
ctgcaacctttgcctcccgg

SEQ ID NO: 83066 - DNA, 20 bp, Artificial Sequence
  Description of Artificial Sequence: Synthetic oligonucleotide
  Target: ATXN2; (-) strand; PAM type: YTN; PAM sequence: CTT
actgcaacctttgcctcccg

SEQ ID NO: 83067 - DNA, 20 bp, Artificial Sequence
  Description of Artificial Sequence: Synthetic oligonucleotide
  Target: ATXN2; (-) strand; PAM type: YTN; PAM sequence: CTG
cttactgcaacctttgcctc

SEQ ID NO: 83068 - DNA, 20 bp, Artificial Sequence
  Description of Artificial Sequence: Synthetic oligonucleotide
  Target: ATXN2; (-) strand; PAM type: YTN; PAM sequence: CTC
tgcttactgcaacctttgcc

SEQ ID NO: 83069 - DNA, 20 bp, Artificial Sequence
  Description of Artificial Sequence: Synthetic oligonucleotide
  Target: ATXN2; (-) strand; PAM type: YTN; PAM sequence: CTG
gagtgcagtggcacgatctc

SEQ ID NO: 83070 - DNA, 20 bp, Artificial Sequence
  Description of Artificial Sequence: Synthetic oligonucleotide
  Target: ATXN2; (-) strand; PAM type: YTN; PAM sequence: CTG
tcgcccaggctggagtgcag

SEQ ID NO: 83071 - DNA, 20 bp, Artificial Sequence
  Description of Artificial Sequence: Synthetic oligonucleotide
  Target: ATXN2; (-) strand; PAM type: YTN; PAM sequence: CTC
tgtcgcccaggctggagtgc

SEQ ID NO: 83072 - DNA, 20 bp, Artificial Sequence
  Description of Artificial Sequence: Synthetic oligonucleotide
  Target: ATXN2; (-) strand; PAM type: YTN; PAM sequence: TTG
ctctgtcgcccaggctggag

SEQ ID NO: 83073 - DNA, 20 bp, Artificial Sequence
  Description of Artificial Sequence: Synthetic oligonucleotide
  Target: ATXN2; (-) strand; PAM type: YTN; PAM sequence: CTT
gctctgtcgcccaggctgga

SEQ ID NO: 83074 - DNA, 20 bp, Artificial Sequence
  Description of Artificial Sequence: Synthetic oligonucleotide
  Target: ATXN2; (-) strand; PAM type: YTN; PAM sequence: TTG
agacggagtcttgctctgtc

SEQ ID NO: 83075 - DNA, 20 bp, Artificial Sequence
  Description of Artificial Sequence: Synthetic oligonucleotide
  Target: ATXN2; (-) strand; PAM type: YTN; PAM sequence: TTT
gagacggagtcttgctctgt

SEQ ID NO: 83076 - DNA, 20 bp, Artificial Sequence
  Description of Artificial Sequence: Synthetic oligonucleotide
  Target: ATXN2; (-) strand; PAM type: YTN; PAM sequence: TTT
tgagacggagtcttgctctg

SEQ ID NO: 83077 - DNA, 20 bp, Artificial Sequence
  Description of Artificial Sequence: Synthetic oligonucleotide
  Target: ATXN2; (-) strand; PAM type: YTN; PAM sequence: TTT
ttgagacggagtcttgctct

SEQ ID NO: 83078 - DNA, 20 bp, Artificial Sequence
  Description of Artificial Sequence: Synthetic oligonucleotide
  Target: ATXN2; (-) strand; PAM type: YTN; PAM sequence: TTT
tttgagacggagtcttgctc

SEQ ID NO: 83079 - DNA, 20 bp, Artificial Sequence
  Description of Artificial Sequence: Synthetic oligonucleotide
  Target: ATXN2; (-) strand; PAM type: YTN; PAM sequence: TTT
ttttgagacggagtcttgct

SEQ ID NO: 83080 - DNA, 20 bp, Artificial Sequence
  Description of Artificial Sequence: Synthetic oligonucleotide
  Target: ATXN2; (-) strand; PAM type: YTN; PAM sequence: TTT
tttttgagacggagtcttgc

SEQ ID NO: 83081 - DNA, 20 bp, Artificial Sequence
  Description of Artificial Sequence: Synthetic oligonucleotide
  Target: ATXN2; (-) strand; PAM type: YTN; PAM sequence: TTT
ttttttgagacggagtcttg

SEQ ID NO: 83082 - DNA, 20 bp, Artificial Sequence
  Description of Artificial Sequence: Synthetic oligonucleotide
  Target: ATXN2; (-) strand; PAM type: YTN; PAM sequence: TTT
tttttttgagacggagtctt

SEQ ID NO: 83083 - DNA, 20 bp, Artificial Sequence
  Description of Artificial Sequence: Synthetic oligonucleotide
  Target: ATXN2; (-) strand; PAM type: YTN; PAM sequence: TTT
ttttttttgagacggagtct

SEQ ID NO: 83084 - DNA, 20 bp, Artificial Sequence
  Description of Artificial Sequence: Synthetic oligonucleotide
  Target: ATXN2; (-) strand; PAM type: YTN; PAM sequence: TTT
tttttttttgagacggagtc

SEQ ID NO: 83085 - DNA, 20 bp, Artificial Sequence
  Description of Artificial Sequence: Synthetic oligonucleotide
  Target: ATXN2; (-) strand; PAM type: YTN; PAM sequence: TTT
ttttttttttgagacggagt

SEQ ID NO: 83086 - DNA, 20 bp, Artificial Sequence
  Description of Artificial Sequence: Synthetic oligonucleotide
  Target: ATXN2; (-) strand; PAM type: YTN; PAM sequence: TTT
tttttttttttgagacggag

SEQ ID NO: 83087 - DNA, 20 bp, Artificial Sequence
  Description of Artificial Sequence: Synthetic oligonucleotide
  Target: ATXN2; (-) strand; PAM type: YTN; PAM sequence: TTT
ttttttttttttgagacgga

SEQ ID NO: 83088 - DNA, 20 bp, Artificial Sequence
  Description of Artificial Sequence: Synthetic oligonucleotide
  Target: ATXN2; (-) strand; PAM type: YTN; PAM sequence: TTT
tttttttttttttgagacgg

SEQ ID NO: 83089 - DNA, 20 bp, Artificial Sequence
  Description of Artificial Sequence: Synthetic oligonucleotide
  Target: ATXN2; (-) strand; PAM type: YTN; PAM sequence: TTT
ttttttttttttttgagacg

SEQ ID NO: 83090 - DNA, 20 bp, Artificial Sequence
  Description of Artificial Sequence: Synthetic oligonucleotide
  Target: ATXN2; (-) strand; PAM type: YTN; PAM sequence: TTT
tttttttttttttttgagac

SEQ ID NO: 83091 - DNA, 20 bp, Artificial Sequence
  Description of Artificial Sequence: Synthetic oligonucleotide
  Target: ATXN2; (-) strand; PAM type: YTN; PAM sequence: TTT
ttttttttttttttttgaga

SEQ ID NO: 83092 - DNA, 20 bp, Artificial Sequence
  Description of Artificial Sequence: Synthetic oligonucleotide
  Target: ATXN2; (-) strand; PAM type: YTN; PAM sequence: TTT
tttttttttttttttttgag

SEQ ID NO: 83093 - DNA, 20 bp, Artificial Sequence
  Description of Artificial Sequence: Synthetic oligonucleotide
  Target: ATXN2; (-) strand; PAM type: YTN; PAM sequence: TTT
ttttttttttttttttttga

SEQ ID NO: 83094 - DNA, 20 bp, Artificial Sequence
  Description of Artificial Sequence: Synthetic oligonucleotide
  Target: ATXN2; (-) strand; PAM type: YTN; PAM sequence: TTT
tttttttttttttttttttg

SEQ ID NO: 83095 - DNA, 20 bp, Artificial Sequence
  Description of Artificial Sequence: Synthetic oligonucleotide
  Target: ATXN2; (-) strand; PAM type: YTN; PAM sequence: CTT
tttttttttttttttttttt

SEQ ID NO: 83096 - DNA, 20 bp, Artificial Sequence
  Description of Artificial Sequence: Synthetic oligonucleotide
  Target: ATXN2; (-) strand; PAM type: YTN; PAM sequence: TTA
tctttttttttttttttttt

SEQ ID NO: 83097 - DNA, 20 bp, Artificial Sequence
  Description of Artificial Sequence: Synthetic oligonucleotide
  Target: ATXN2; (-) strand; PAM type: YTN; PAM sequence: CTA
ttatcttttttttttttttt

SEQ ID NO: 83098 - DNA, 20 bp, Artificial Sequence
  Description of Artificial Sequence: Synthetic oligonucleotide
  Target: ATXN2; (-) strand; PAM type: YTN; PAM sequence: TTA
acagtcacacctattatctt

SEQ ID NO: 83099 - DNA, 20 bp, Artificial Sequence
  Description of Artificial Sequence: Synthetic oligonucleotide
  Target: ATXN2; (-) strand; PAM type: YTN; PAM sequence: TTA
ttaacagtcacacctattat

SEQ ID NO: 83100 - DNA, 20 bp, Artificial Sequence
  Description of Artificial Sequence: Synthetic oligonucleotide
  Target: ATXN2; (-) strand; PAM type: YTN; PAM sequence: TTT
attaacagtcacacctatta

SEQ ID NO: 83101 - DNA, 20 bp, Artificial Sequence
  Description of Artificial Sequence: Synthetic oligonucleotide
  Target: ATXN2; (-) strand; PAM type: YTN; PAM sequence: TTC
aacggagatgtaaacagttt

SEQ ID NO: 83102 - DNA, 20 bp, Artificial Sequence
  Description of Artificial Sequence: Synthetic oligonucleotide
  Target: ATXN2; (-) strand; PAM type: YTN; PAM sequence: CTT
caacggagatgtaaacagtt

SEQ ID NO: 83103 - DNA, 20 bp, Artificial Sequence
  Description of Artificial Sequence: Synthetic oligonucleotide
  Target: ATXN2; (-) strand; PAM type: YTN; PAM sequence: TTG
tgacaacttcaacggagatg

SEQ ID NO: 83104 - DNA, 20 bp, Artificial Sequence
  Description of Artificial Sequence: Synthetic oligonucleotide
  Target: ATXN2; (-) strand; PAM type: YTN; PAM sequence: TTC
aagtgattgtgacaacttca

SEQ ID NO: 83105 - DNA, 20 bp, Artificial Sequence
  Description of Artificial Sequence: Synthetic oligonucleotide
  Target: ATXN2; (-) strand; PAM type: YTN; PAM sequence: TTT
caagtgattgtgacaacttc

SEQ ID NO: 83106 - DNA, 20 bp, Artificial Sequence
  Description of Artificial Sequence: Synthetic oligonucleotide
  Target: ATXN2; (-) strand; PAM type: YTN; PAM sequence: CTA
tttcaagtgattgtgacaac

SEQ ID NO: 83107 - DNA, 20 bp, Artificial Sequence
  Description of Artificial Sequence: Synthetic oligonucleotide
  Target: ATXN2; (-) strand; PAM type: YTN; PAM sequence: TTA
gctatttcaagtgattgtga

SEQ ID NO: 83108 - DNA, 20 bp, Artificial Sequence
  Description of Artificial Sequence: Synthetic oligonucleotide
  Target: ATXN2; (-) strand; PAM type: YTN; PAM sequence: TTT
agctatttcaagtgattgtg

SEQ ID NO: 83109 - DNA, 20 bp, Artificial Sequence
  Description of Artificial Sequence: Synthetic oligonucleotide
  Target: ATXN2; (-) strand; PAM type: YTN; PAM sequence: TTT
tagctatttcaagtgattgt

SEQ ID NO: 83110 - DNA, 20 bp, Artificial Sequence
  Description of Artificial Sequence: Synthetic oligonucleotide
  Target: ATXN2; (-) strand; PAM type: YTN; PAM sequence: TTT
ttagctatttcaagtgattg

SEQ ID NO: 83111 - DNA, 20 bp, Artificial Sequence
  Description of Artificial Sequence: Synthetic oligonucleotide
  Target: ATXN2; (-) strand; PAM type: YTN; PAM sequence: TTT
tttagctatttcaagtgatt

SEQ ID NO: 83112 - DNA, 20 bp, Artificial Sequence
  Description of Artificial Sequence: Synthetic oligonucleotide
  Target: ATXN2; (-) strand; PAM type: YTN; PAM sequence: TTT
ttttagctatttcaagtgat

SEQ ID NO: 83113 - DNA, 20 bp, Artificial Sequence
  Description of Artificial Sequence: Synthetic oligonucleotide
  Target: ATXN2; (-) strand; PAM type: YTN; PAM sequence: TTT
tttttagctatttcaagtga

SEQ ID NO: 83114 - DNA, 20 bp, Artificial Sequence
  Description of Artificial Sequence: Synthetic oligonucleotide
  Target: ATXN2; (-) strand; PAM type: YTN; PAM sequence: TTT
ttttttagctatttcaagtg

SEQ ID NO: 83115 - DNA, 20 bp, Artificial Sequence
  Description of Artificial Sequence: Synthetic oligonucleotide
  Target: ATXN2; (-) strand; PAM type: YTN; PAM sequence: TTT
tttttttagctatttcaagt

SEQ ID NO: 83116 - DNA, 20 bp, Artificial Sequence
  Description of Artificial Sequence: Synthetic oligonucleotide
  Target: ATXN2; (-) strand; PAM type: YTN; PAM sequence: TTT
ttttttttagctatttcaag

SEQ ID NO: 83117 - DNA, 20 bp, Artificial Sequence
  Description of Artificial Sequence: Synthetic oligonucleotide
  Target: ATXN2; (-) strand; PAM type: YTN; PAM sequence: CTA
tttttttttttagctatttc

SEQ ID NO: 83118 - DNA, 20 bp, Artificial Sequence
  Description of Artificial Sequence: Synthetic oligonucleotide
  Target: ATXN2; (-) strand; PAM type: YTN; PAM sequence: TTG
agcatgaacaaaaccctatt

SEQ ID NO: 83119 - DNA, 20 bp, Artificial Sequence
  Description of Artificial Sequence: Synthetic oligonucleotide
  Target: ATXN2; (-) strand; PAM type: YTN; PAM sequence: TTG
tgtaaatagttgagcatgaa

SEQ ID NO: 83120 - DNA, 20 bp, Artificial Sequence
  Description of Artificial Sequence: Synthetic oligonucleotide
  Target: ATXN2; (-) strand; PAM type: YTN; PAM sequence: TTG
atgttgtgtaaatagttgag

SEQ ID NO: 83121 - DNA, 20 bp, Artificial Sequence
  Description of Artificial Sequence: Synthetic oligonucleotide
  Target: ATXN2; (-) strand; PAM type: YTN; PAM sequence: TTT
gatgttgtgtaaatagttga

SEQ ID NO: 83122 - DNA, 20 bp, Artificial Sequence
  Description of Artificial Sequence: Synthetic oligonucleotide
  Target: ATXN2; (-) strand; PAM type: YTN; PAM sequence: TTT
tgatgttgtgtaaatagttg

SEQ ID NO: 83123 - DNA, 20 bp, Artificial Sequence
  Description of Artificial Sequence: Synthetic oligonucleotide
  Target: ATXN2; (-) strand; PAM type: YTN; PAM sequence: CTA
gtgatagtattttgatgttg

SEQ ID NO: 83124 - DNA, 20 bp, Artificial Sequence
  Description of Artificial Sequence: Synthetic oligonucleotide
  Target: ATXN2; (-) strand; PAM type: YTN; PAM sequence: TTG
actagtgatagtattttgat

SEQ ID NO: 83125 - DNA, 20 bp, Artificial Sequence
  Description of Artificial Sequence: Synthetic oligonucleotide
  Target: ATXN2; (-) strand; PAM type: YTN; PAM sequence: TTT
gactagtgatagtattttga

SEQ ID NO: 83126 - DNA, 20 bp, Artificial Sequence
  Description of Artificial Sequence: Synthetic oligonucleotide
  Target: ATXN2; (-) strand; PAM type: YTN; PAM sequence: TTT
tgactagtgatagtattttg

SEQ ID NO: 83127 - DNA, 20 bp, Artificial Sequence
  Description of Artificial Sequence: Synthetic oligonucleotide
  Target: ATXN2; (-) strand; PAM type: YTN; PAM sequence: CTG
ttttgactagtgatagtatt

SEQ ID NO: 83128 - DNA, 20 bp, Artificial Sequence
  Description of Artificial Sequence: Synthetic oligonucleotide
  Target: ATXN2; (-) strand; PAM type: YTN; PAM sequence: TTC
tgttttgactagtgatagta

SEQ ID NO: 83129 - DNA, 20 bp, Artificial Sequence
  Description of Artificial Sequence: Synthetic oligonucleotide
  Target: ATXN2; (-) strand; PAM type: YTN; PAM sequence: TTT
ctgttttgactagtgatagt

SEQ ID NO: 83130 - DNA, 20 bp, Artificial Sequence
  Description of Artificial Sequence: Synthetic oligonucleotide
  Target: ATXN2; (-) strand; PAM type: YTN; PAM sequence: TTT
tctgttttgactagtgatag

SEQ ID NO: 83131 - DNA, 20 bp, Artificial Sequence
  Description of Artificial Sequence: Synthetic oligonucleotide
  Target: ATXN2; (-) strand; PAM type: YTN; PAM sequence: TTA
caattttctgttttgactag

SEQ ID NO: 83132 - DNA, 20 bp, Artificial Sequence
  Description of Artificial Sequence: Synthetic oligonucleotide
  Target: ATXN2; (-) strand; PAM type: YTN; PAM sequence: CTA
gaattacaattttctgtttt

SEQ ID NO: 83133 - DNA, 20 bp, Artificial Sequence
  Description of Artificial Sequence: Synthetic oligonucleotide
  Target: ATXN2; (-) strand; PAM type: YTN; PAM sequence: CTC
tagaattacaattttctgtt

SEQ ID NO: 83134 - DNA, 20 bp, Artificial Sequence
  Description of Artificial Sequence: Synthetic oligonucleotide
  Target: ATXN2; (-) strand; PAM type: YTN; PAM sequence: TTC
tctagaattacaattttctg

SEQ ID NO: 83135 - DNA, 20 bp, Artificial Sequence
  Description of Artificial Sequence: Synthetic oligonucleotide
  Target: ATXN2; (-) strand; PAM type: YTN; PAM sequence: TTG
ttctctagaattacaatttt

SEQ ID NO: 83136 - DNA, 20 bp, Artificial Sequence
  Description of Artificial Sequence: Synthetic oligonucleotide
  Target: ATXN2; (-) strand; PAM type: YTN; PAM sequence: TTA
gaagattgttctctagaatt

SEQ ID NO: 83137 - DNA, 20 bp, Artificial Sequence
  Description of Artificial Sequence: Synthetic oligonucleotide
  Target: ATXN2; (-) strand; PAM type: YTN; PAM sequence: TTT
agaagattgttctctagaat

SEQ ID NO: 83138 - DNA, 20 bp, Artificial Sequence
  Description of Artificial Sequence: Synthetic oligonucleotide
  Target: ATXN2; (-) strand; PAM type: YTN; PAM sequence: TTT
tagaagattgttctctagaa

SEQ ID NO: 83139 - DNA, 20 bp, Artificial Sequence
  Description of Artificial Sequence: Synthetic oligonucleotide
  Target: ATXN2; (-) strand; PAM type: YTN; PAM sequence: TTA
aggttttagaagattgttct

SEQ ID NO: 83140 - DNA, 20 bp, Artificial Sequence
  Description of Artificial Sequence: Synthetic oligonucleotide
  Target: ATXN2; (-) strand; PAM type: YTN; PAM sequence: TTT
aaggttttagaagattgttc

SEQ ID NO: 83141 - DNA, 20 bp, Artificial Sequence
  Description of Artificial Sequence: Synthetic oligonucleotide
  Target: ATXN2; (-) strand; PAM type: YTN; PAM sequence: TTT
taaggttttagaagattgtt

SEQ ID NO: 83142 - DNA, 20 bp, Artificial Sequence
  Description of Artificial Sequence: Synthetic oligonucleotide
  Target: ATXN2; (-) strand; PAM type: YTN; PAM sequence: TTG
aaacgaattttaaggtttta

SEQ ID NO: 83143 - DNA, 20 bp, Artificial Sequence
  Description of Artificial Sequence: Synthetic oligonucleotide
  Target: ATXN2; (-) strand; PAM type: YTN; PAM sequence: TTT
gaaacgaattttaaggtttt

SEQ ID NO: 83144 - DNA, 20 bp, Artificial Sequence
  Description of Artificial Sequence: Synthetic oligonucleotide
  Target: ATXN2; (-) strand; PAM type: YTN; PAM sequence: CTT
tgaaacgaattttaaggttt

SEQ ID NO: 83145 - DNA, 20 bp, Artificial Sequence
  Description of Artificial Sequence: Synthetic oligonucleotide
  Target: ATXN2; (-) strand; PAM type: YTN; PAM sequence: TTA
ctttgaaacgaattttaagg

SEQ ID NO: 83146 - DNA, 20 bp, Artificial Sequence
  Description of Artificial Sequence: Synthetic oligonucleotide
  Target: ATXN2; (-) strand; PAM type: YTN; PAM sequence: TTT
actttgaaacgaattttaag

SEQ ID NO: 83147 - DNA, 20 bp, Artificial Sequence
  Description of Artificial Sequence: Synthetic oligonucleotide
  Target: ATXN2; (-) strand; PAM type: YTN; PAM sequence: TTT
tactttgaaacgaattttaa

SEQ ID NO: 83148 - DNA, 20 bp, Artificial Sequence
  Description of Artificial Sequence: Synthetic oligonucleotide
  Target: ATXN2; (-) strand; PAM type: YTN; PAM sequence: TTT
ttactttgaaacgaatttta

SEQ ID NO: 83149 - DNA, 20 bp, Artificial Sequence
  Description of Artificial Sequence: Synthetic oligonucleotide
  Target: ATXN2; (-) strand; PAM type: YTN; PAM sequence: TTT
tttactttgaaacgaatttt

SEQ ID NO: 83150 - DNA, 20 bp, Artificial Sequence
  Description of Artificial Sequence: Synthetic oligonucleotide
  Target: ATXN2; (-) strand; PAM type: YTN; PAM sequence: TTT
ttttactttgaaacgaattt

SEQ ID NO: 83151 - DNA, 20 bp, Artificial Sequence
  Description of Artificial Sequence: Synthetic oligonucleotide
  Target: ATXN2; (-) strand; PAM type: YTN; PAM sequence: TTG
tttttttactttgaaacgaa

SEQ ID NO: 83152 - DNA, 20 bp, Artificial Sequence
  Description of Artificial Sequence: Synthetic oligonucleotide
  Target: ATXN2; (-) strand; PAM type: YTN; PAM sequence: TTA
gcaaagtattgtttttttac

SEQ ID NO: 83153 - DNA, 20 bp, Artificial Sequence
  Description of Artificial Sequence: Synthetic oligonucleotide
  Target: ATXN2; (-) strand; PAM type: YTN; PAM sequence: CTT
agcaaagtattgttttttta

SEQ ID NO: 83154 - DNA, 20 bp, Artificial Sequence
  Description of Artificial Sequence: Synthetic oligonucleotide
  Target: ATXN2; (-) strand; PAM type: YTN; PAM sequence: CTG
tcaccttagcaaagtattgt

SEQ ID NO: 83155 - DNA, 20 bp, Artificial Sequence
  Description of Artificial Sequence: Synthetic oligonucleotide
  Target: ATXN2; (-) strand; PAM type: YTN; PAM sequence: TTA
gaactgtcaccttagcaaag

SEQ ID NO: 83156 - DNA, 20 bp, Artificial Sequence
  Description of Artificial Sequence: Synthetic oligonucleotide
  Target: ATXN2; (-) strand; PAM type: YTN; PAM sequence: CTA
cagccgtgttagaactgtca

SEQ ID NO: 83157 - DNA, 20 bp, Artificial Sequence
  Description of Artificial Sequence: Synthetic oligonucleotide
  Target: ATXN2; (-) strand; PAM type: YTN; PAM sequence: CTA
aatagctacagccgtgttag

SEQ ID NO: 83158 - DNA, 20 bp, Artificial Sequence
  Description of Artificial Sequence: Synthetic oligonucleotide
  Target: ATXN2; (-) strand; PAM type: YTN; PAM sequence: TTG
tcctaaatagctacagccgt

SEQ ID NO: 83159 - DNA, 20 bp, Artificial Sequence
  Description of Artificial Sequence: Synthetic oligonucleotide
  Target: ATXN2; (-) strand; PAM type: YTN; PAM sequence: TTT
gtcctaaatagctacagccg

SEQ ID NO: 83160 - DNA, 20 bp, Artificial Sequence
  Description of Artificial Sequence: Synthetic oligonucleotide
  Target: ATXN2; (-) strand; PAM type: YTN; PAM sequence: TTT
tgtcctaaatagctacagcc

SEQ ID NO: 83161 - DNA, 20 bp, Artificial Sequence
  Description of Artificial Sequence: Synthetic oligonucleotide
  Target: ATXN2; (-) strand; PAM type: YTN; PAM sequence: TTT
ttgtcctaaatagctacagc

SEQ ID NO: 83162 - DNA, 20 bp, Artificial Sequence
  Description of Artificial Sequence: Synthetic oligonucleotide
  Target: ATXN2; (-) strand; PAM type: YTN; PAM sequence: TTT
tttgtcctaaatagctacag

SEQ ID NO: 83163 - DNA, 20 bp, Artificial Sequence
  Description of Artificial Sequence: Synthetic oligonucleotide
  Target: ATXN2; (-) strand; PAM type: YTN; PAM sequence: TTT
ttttgtcctaaatagctaca

SEQ ID NO: 83164 - DNA, 20 bp, Artificial Sequence
  Description of Artificial Sequence: Synthetic oligonucleotide
  Target: ATXN2; (-) strand; PAM type: YTN; PAM sequence: CTC
atttttttgtcctaaatagc

SEQ ID NO: 83165 - DNA, 20 bp, Artificial Sequence
  Description of Artificial Sequence: Synthetic oligonucleotide
  Target: ATXN2; (-) strand; PAM type: YTN; PAM sequence: CTC
aaaacaaacaaacaaacaaa

SEQ ID NO: 83166 - DNA, 20 bp, Artificial Sequence
  Description of Artificial Sequence: Synthetic oligonucleotide
  Target: ATXN2; (-) strand; PAM type: YTN; PAM sequence: CTG
tctcaaaacaaacaaacaaa

SEQ ID NO: 83167 - DNA, 20 bp, Artificial Sequence
  Description of Artificial Sequence: Synthetic oligonucleotide
  Target: ATXN2; (-) strand; PAM type: YTN; PAM sequence: CTC
tgtctcaaaacaaacaaaca

SEQ ID NO: 83168 - DNA, 20 bp, Artificial Sequence
  Description of Artificial Sequence: Synthetic oligonucleotide
  Target: ATXN2; (-) strand; PAM type: YTN; PAM sequence: CTG
ggcaacagagcgagactctg

SEQ ID NO: 83169 - DNA, 20 bp, Artificial Sequence
  Description of Artificial Sequence: Synthetic oligonucleotide
  Target: ATXN2; (-) strand; PAM type: YTN; PAM sequence: CTC
cagcctgggcaacagagcga

SEQ ID NO: 83170 - DNA, 20 bp, Artificial Sequence
  Description of Artificial Sequence: Synthetic oligonucleotide
  Target: ATXN2; (-) strand; PAM type: YTN; PAM sequence: TTA
cactccagcctgggcaacag

SEQ ID NO: 83171 - DNA, 20 bp, Artificial Sequence
  Description of Artificial Sequence: Synthetic oligonucleotide
  Target: ATXN2; (-) strand; PAM type: YTN; PAM sequence: CTG
agatcatgccattacactcc

SEQ ID NO: 83172 - DNA, 20 bp, Artificial Sequence
  Description of Artificial Sequence: Synthetic oligonucleotide
  Target: ATXN2; (-) strand; PAM type: YTN; PAM sequence: TTG
cagtgagctgagatcatgcc

SEQ ID NO: 83173 - DNA, 20 bp, Artificial Sequence
  Description of Artificial Sequence: Synthetic oligonucleotide
  Target: ATXN2; (-) strand; PAM type: YTN; PAM sequence: TTG
caatgagtgcggaggttgca

SEQ ID NO: 83174 - DNA, 20 bp, Artificial Sequence
  Description of Artificial Sequence: Synthetic oligonucleotide
  Target: ATXN2; (-) strand; PAM type: YTN; PAM sequence: TTG
atcccggaggttgcaatgag

SEQ ID NO: 83175 - DNA, 20 bp, Artificial Sequence
  Description of Artificial Sequence: Synthetic oligonucleotide
  Target: ATXN2; (-) strand; PAM type: YTN; PAM sequence: CTT
gatcccggaggttgcaatga

SEQ ID NO: 83176 - DNA, 20 bp, Artificial Sequence
  Description of Artificial Sequence: Synthetic oligonucleotide
  Target: ATXN2; (-) strand; PAM type: YTN; PAM sequence: TTG
cttgatcccggaggttgcaa

SEQ ID NO: 83177 - DNA, 20 bp, Artificial Sequence
  Description of Artificial Sequence: Synthetic oligonucleotide
  Target: ATXN2; (-) strand; PAM type: YTN; PAM sequence: CTG
agggaagagaattgcttgat

SEQ ID NO: 83178 - DNA, 20 bp, Artificial Sequence
  Description of Artificial Sequence: Synthetic oligonucleotide
  Target: ATXN2; (-) strand; PAM type: YTN; PAM sequence: TTG
ggaggctgagggaagagaat

SEQ ID NO: 83179 - DNA, 20 bp, Artificial Sequence
  Description of Artificial Sequence: Synthetic oligonucleotide
  Target: ATXN2; (-) strand; PAM type: YTN; PAM sequence: CTT
gggaggctgagggaagagaa

SEQ ID NO: 83180 - DNA, 20 bp, Artificial Sequence
  Description of Artificial Sequence: Synthetic oligonucleotide
  Target: ATXN2; (-) strand; PAM type: YTN; PAM sequence: TTC
ttgggaggctgagggaagag

SEQ ID NO: 83181 - DNA, 20 bp, Artificial Sequence
  Description of Artificial Sequence: Synthetic oligonucleotide
  Target: ATXN2; (-) strand; PAM type: YTN; PAM sequence: CTT
cttgggaggctgagggaaga

SEQ ID NO: 83182 - DNA, 20 bp, Artificial Sequence
  Description of Artificial Sequence: Synthetic oligonucleotide
  Target: ATXN2; (-) strand; PAM type: YTN; PAM sequence: CTG
taatcccagcttcttgggag

SEQ ID NO: 83183 - DNA, 20 bp, Artificial Sequence
  Description of Artificial Sequence: Synthetic oligonucleotide
  Target: ATXN2; (-) strand; PAM type: YTN; PAM sequence: TTA
gccgggcatggtggtgggcg

SEQ ID NO: 83184 - DNA, 20 bp, Artificial Sequence
  Description of Artificial Sequence: Synthetic oligonucleotide
  Target: ATXN2; (-) strand; PAM type: YTN; PAM sequence: CTA
aaaatacaaaaattagccgg

SEQ ID NO: 83185 - DNA, 20 bp, Artificial Sequence
  Description of Artificial Sequence: Synthetic oligonucleotide
  Target: ATXN2; (-) strand; PAM type: YTN; PAM sequence: CTA
ctaaaaatacaaaaattagc

SEQ ID NO: 83186 - DNA, 20 bp, Artificial Sequence
  Description of Artificial Sequence: Synthetic oligonucleotide
  Target: ATXN2; (-) strand; PAM type: YTN; PAM sequence: CTC
tactaaaaatacaaaaatta

SEQ ID NO: 83187 - DNA, 20 bp, Artificial Sequence
  Description of Artificial Sequence: Synthetic oligonucleotide
  Target: ATXN2; (-) strand; PAM type: YTN; PAM sequence: CTG
gccaacatggtgaaaccccc

SEQ ID NO: 83188 - DNA, 20 bp, Artificial Sequence
  Description of Artificial Sequence: Synthetic oligonucleotide
  Target: ATXN2; (-) strand; PAM type: YTN; PAM sequence: CTA
gtctggccaacatggtgaaa

SEQ ID NO: 83189 - DNA, 20 bp, Artificial Sequence
  Description of Artificial Sequence: Synthetic oligonucleotide
  Target: ATXN2; (-) strand; PAM type: YTN; PAM sequence: TTG
agactagtctggccaacatg

SEQ ID NO: 83190 - DNA, 20 bp, Artificial Sequence
  Description of Artificial Sequence: Synthetic oligonucleotide
  Target: ATXN2; (-) strand; PAM type: YTN; PAM sequence: TTT
gagactagtctggccaacat

SEQ ID NO: 83191 - DNA, 20 bp, Artificial Sequence
  Description of Artificial Sequence: Synthetic oligonucleotide
  Target: ATXN2; (-) strand; PAM type: YTN; PAM sequence: CTG
gggtcaggagtttgagacta

SEQ ID NO: 83192 - DNA, 20 bp, Artificial Sequence
  Description of Artificial Sequence: Synthetic oligonucleotide
  Target: ATXN2; (-) strand; PAM type: YTN; PAM sequence: CTG
aggcgggtggatcacctggg

SEQ ID NO: 83193 - DNA, 20 bp, Artificial Sequence
  Description of Artificial Sequence: Synthetic oligonucleotide
  Target: ATXN2; (-) strand; PAM type: YTN; PAM sequence: TTA
ggaggctgaggcgggtggat

SEQ ID NO: 83194 - DNA, 20 bp, Artificial Sequence
  Description of Artificial Sequence: Synthetic oligonucleotide
  Target: ATXN2; (-) strand; PAM type: YTN; PAM sequence: TTT
aggaggctgaggcgggtgga

SEQ ID NO: 83195 - DNA, 20 bp, Artificial Sequence
  Description of Artificial Sequence: Synthetic oligonucleotide
  Target: ATXN2; (-) strand; PAM type: YTN; PAM sequence: CTT
taggaggctgaggcgggtgg

SEQ ID NO: 83196 - DNA, 20 bp, Artificial Sequence
  Description of Artificial Sequence: Synthetic oligonucleotide
  Target: ATXN2; (-) strand; PAM type: YTN; PAM sequence: CTG
taatcccagcactttaggag

SEQ ID NO: 83197 - DNA, 20 bp, Artificial Sequence
  Description of Artificial Sequence: Synthetic oligonucleotide
  Target: ATXN2; (-) strand; PAM type: YTN; PAM sequence: CTC
atacctgtaatcccagcact

SEQ ID NO: 83198 - DNA, 20 bp, Artificial Sequence
  Description of Artificial Sequence: Synthetic oligonucleotide
  Target: ATXN2; (-) strand; PAM type: YTN; PAM sequence: CTC
aaggccaggcgcggtggctc

SEQ ID NO: 83199 - DNA, 20 bp, Artificial Sequence
  Description of Artificial Sequence: Synthetic oligonucleotide
  Target: ATXN2; (-) strand; PAM type: YTN; PAM sequence: TTA
aaggaggatctcaaggccag

SEQ ID NO: 83200 - DNA, 20 bp, Artificial Sequence
  Description of Artificial Sequence: Synthetic oligonucleotide
  Target: ATXN2; (-) strand; PAM type: YTN; PAM sequence: CTT
aaaggaggatctcaaggcca

SEQ ID NO: 83201 - DNA, 20 bp, Artificial Sequence
  Description of Artificial Sequence: Synthetic oligonucleotide
  Target: ATXN2; (-) strand; PAM type: YTN; PAM sequence: TTG
acttaaaggaggatctcaag

SEQ ID NO: 83202 - DNA, 20 bp, Artificial Sequence
  Description of Artificial Sequence: Synthetic oligonucleotide
  Target: ATXN2; (-) strand; PAM type: YTN; PAM sequence: TTT
gacttaaaggaggatctcaa

SEQ ID NO: 83203 - DNA, 20 bp, Artificial Sequence
  Description of Artificial Sequence: Synthetic oligonucleotide
  Target: ATXN2; (-) strand; PAM type: YTN; PAM sequence: TTT
tgacttaaaggaggatctca

SEQ ID NO: 83204 - DNA, 20 bp, Artificial Sequence
  Description of Artificial Sequence: Synthetic oligonucleotide
  Target: ATXN2; (-) strand; PAM type: YTN; PAM sequence: TTA
atagccatatattttgactt

SEQ ID NO: 83205 - DNA, 20 bp, Artificial Sequence
  Description of Artificial Sequence: Synthetic oligonucleotide
  Target: ATXN2; (-) strand; PAM type: YTN; PAM sequence: TTT
aatagccatatattttgact

SEQ ID NO: 83206 - DNA, 20 bp, Artificial Sequence
  Description of Artificial Sequence: Synthetic oligonucleotide
  Target: ATXN2; (-) strand; PAM type: YTN; PAM sequence: CTA
tttaatagccatatattttg

SEQ ID NO: 83207 - DNA, 20 bp, Artificial Sequence
  Description of Artificial Sequence: Synthetic oligonucleotide
  Target: ATXN2; (-) strand; PAM type: YTN; PAM sequence: TTG
tagctatttaatagccatat

SEQ ID NO: 83208 - DNA, 20 bp, Artificial Sequence
  Description of Artificial Sequence: Synthetic oligonucleotide
  Target: ATXN2; (-) strand; PAM type: YTN; PAM sequence: CTC
atattgtagctatttaatag

SEQ ID NO: 83209 - DNA, 20 bp, Artificial Sequence
  Description of Artificial Sequence: Synthetic oligonucleotide
  Target: ATXN2; (-) strand; PAM type: YTN; PAM sequence: TTA
actcatattgtagctattta

SEQ ID NO: 83210 - DNA, 20 bp, Artificial Sequence
  Description of Artificial Sequence: Synthetic oligonucleotide
  Target: ATXN2; (-) strand; PAM type: YTN; PAM sequence: CTA
cataagggatgttaactcat

SEQ ID NO: 83211 - DNA, 20 bp, Artificial Sequence
  Description of Artificial Sequence: Synthetic oligonucleotide
  Target: ATXN2; (-) strand; PAM type: YTN; PAM sequence: TTC
tacataagggatgttaactc

SEQ ID NO: 83212 - DNA, 20 bp, Artificial Sequence
  Description of Artificial Sequence: Synthetic oligonucleotide
  Target: ATXN2; (-) strand; PAM type: YTN; PAM sequence: CTT
ctacataagggatgttaact

SEQ ID NO: 83213 - DNA, 20 bp, Artificial Sequence
  Description of Artificial Sequence: Synthetic oligonucleotide
  Target: ATXN2; (-) strand; PAM type: YTN; PAM sequence: TTA
tacttctacataagggatgt

SEQ ID NO: 83214 - DNA, 20 bp, Artificial Sequence
  Description of Artificial Sequence: Synthetic oligonucleotide
  Target: ATXN2; (-) strand; PAM type: YTN; PAM sequence: TTT
atacttctacataagggatg

SEQ ID NO: 83215 - DNA, 20 bp, Artificial Sequence
  Description of Artificial Sequence: Synthetic oligonucleotide
  Target: ATXN2; (-) strand; PAM type: YTN; PAM sequence: TTA
gcaatggtttatacttctac

SEQ ID NO: 83216 - DNA, 20 bp, Artificial Sequence
  Description of Artificial Sequence: Synthetic oligonucleotide
  Target: ATXN2; (-) strand; PAM type: YTN; PAM sequence: CTA
attagcaatggtttatactt

SEQ ID NO: 83217 - DNA, 20 bp, Artificial Sequence
  Description of Artificial Sequence: Synthetic oligonucleotide
  Target: ATXN2; (-) strand; PAM type: YTN; PAM sequence: CTC
taattagcaatggtttatac

SEQ ID NO: 83218 - DNA, 20 bp, Artificial Sequence
  Description of Artificial Sequence: Synthetic oligonucleotide
  Target: ATXN2; (-) strand; PAM type: YTN; PAM sequence: TTA
ctctaattagcaatggttta

SEQ ID NO: 83219 - DNA, 20 bp, Artificial Sequence
  Description of Artificial Sequence: Synthetic oligonucleotide
  Target: ATXN2; (-) strand; PAM type: YTN; PAM sequence: TTC
agtgttactctaattagcaa

SEQ ID NO: 83220 - DNA, 20 bp, Artificial Sequence
  Description of Artificial Sequence: Synthetic oligonucleotide
  Target: ATXN2; (-) strand; PAM type: YTN; PAM sequence: TTT
cagtgttactctaattagca

SEQ ID NO: 83221 - DNA, 20 bp, Artificial Sequence
  Description of Artificial Sequence: Synthetic oligonucleotide
  Target: ATXN2; (-) strand; PAM type: YTN; PAM sequence: TTT
tcagtgttactctaattagc

SEQ ID NO: 83222 - DNA, 20 bp, Artificial Sequence
  Description of Artificial Sequence: Synthetic oligonucleotide
  Target: ATXN2; (-) strand; PAM type: YTN; PAM sequence: TTG
tattttcagtgttactctaa

SEQ ID NO: 83223 - DNA, 20 bp, Artificial Sequence
  Description of Artificial Sequence: Synthetic oligonucleotide
  Target: ATXN2; (-) strand; PAM type: YTN; PAM sequence: CTT
gtattttcagtgttactcta

SEQ ID NO: 83224 - DNA, 20 bp, Artificial Sequence
  Description of Artificial Sequence: Synthetic oligonucleotide
  Target: ATXN2; (-) strand; PAM type: YTN; PAM sequence: TTA
aatgtaaacttgtattttca

SEQ ID NO: 83225 - DNA, 20 bp, Artificial Sequence
  Description of Artificial Sequence: Synthetic oligonucleotide
  Target: ATXN2; (-) strand; PAM type: YTN; PAM sequence: TTG
gttaaatgtaaacttgtatt

SEQ ID NO: 83226 - DNA, 20 bp, Artificial Sequence
  Description of Artificial Sequence: Synthetic oligonucleotide
  Target: ATXN2; (-) strand; PAM type: YTN; PAM sequence: TTT
ggttaaatgtaaacttgtat

SEQ ID NO: 83227 - DNA, 20 bp, Artificial Sequence
  Description of Artificial Sequence: Synthetic oligonucleotide
  Target: ATXN2; (-) strand; PAM type: YTN; PAM sequence: TTT
tggttaaatgtaaacttgta

SEQ ID NO: 83228 - DNA, 20 bp, Artificial Sequence
  Description of Artificial Sequence: Synthetic oligonucleotide
  Target: ATXN2; (-) strand; PAM type: YTN; PAM sequence: TTT
ttggttaaatgtaaacttgt

SEQ ID NO: 83229 - DNA, 20 bp, Artificial Sequence
  Description of Artificial Sequence: Synthetic oligonucleotide
  Target: ATXN2; (-) strand; PAM type: YTN; PAM sequence: TTT
tttggttaaatgtaaacttg

SEQ ID NO: 83230 - DNA, 20 bp, Artificial Sequence
  Description of Artificial Sequence: Synthetic oligonucleotide
  Target: ATXN2; (-) strand; PAM type: YTN; PAM sequence: TTT
ttttggttaaatgtaaactt

SEQ ID NO: 83231 - DNA, 20 bp, Artificial Sequence
  Description of Artificial Sequence: Synthetic oligonucleotide
  Target: ATXN2; (-) strand; PAM type: YTN; PAM sequence: CTT
tttttggttaaatgtaaact

SEQ ID NO: 83232 - DNA, 20 bp, Artificial Sequence
  Description of Artificial Sequence: Synthetic oligonucleotide
  Target: ATXN2; (-) strand; PAM type: YTN; PAM sequence: TTC
ctttttttggttaaatgtaa

SEQ ID NO: 83233 - DNA, 20 bp, Artificial Sequence
  Description of Artificial Sequence: Synthetic oligonucleotide
  Target: ATXN2; (-) strand; PAM type: YTN; PAM sequence: CTG
aaacagtgaaaacatgggat

SEQ ID NO: 83234 - DNA, 20 bp, Artificial Sequence
  Description of Artificial Sequence: Synthetic oligonucleotide
  Target: ATXN2; (-) strand; PAM type: YTN; PAM sequence: TTC
tgaaacagtgaaaacatggg

SEQ ID NO: 83235 - DNA, 20 bp, Artificial Sequence
  Description of Artificial Sequence: Synthetic oligonucleotide
  Target: ATXN2; (-) strand; PAM type: YTN; PAM sequence: TTC
cacattctgaaacagtgaaa

SEQ ID NO: 83236 - DNA, 20 bp, Artificial Sequence
  Description of Artificial Sequence: Synthetic oligonucleotide
  Target: ATXN2; (-) strand; PAM type: YTN; PAM sequence: TTA
aagattccacattctgaaac

SEQ ID NO: 83237 - DNA, 20 bp, Artificial Sequence
  Description of Artificial Sequence: Synthetic oligonucleotide
  Target: ATXN2; (-) strand; PAM type: YTN; PAM sequence: CTT
aaagattccacattctgaaa

SEQ ID NO: 83238 - DNA, 20 bp, Artificial Sequence
  Description of Artificial Sequence: Synthetic oligonucleotide
  Target: ATXN2; (-) strand; PAM type: YTN; PAM sequence: TTG
cttaaagattccacattctg

SEQ ID NO: 83239 - DNA, 20 bp, Artificial Sequence
  Description of Artificial Sequence: Synthetic oligonucleotide
  Target: ATXN2; (-) strand; PAM type: YTN; PAM sequence: CTG
tagttgcttaaagattccac

SEQ ID NO: 83240 - DNA, 20 bp, Artificial Sequence
  Description of Artificial Sequence: Synthetic oligonucleotide
  Target: ATXN2; (-) strand; PAM type: YTN; PAM sequence: TTA
agagaaaaatgtaagcctgt

SEQ ID NO: 83241 - DNA, 20 bp, Artificial Sequence
  Description of Artificial Sequence: Synthetic oligonucleotide
  Target: ATXN2; (-) strand; PAM type: YTN; PAM sequence: TTT
aagagaaaaatgtaagcctg

SEQ ID NO: 83242 - DNA, 20 bp, Artificial Sequence
  Description of Artificial Sequence: Synthetic oligonucleotide
  Target: ATXN2; (-) strand; PAM type: YTN; PAM sequence: TTT
taagagaaaaatgtaagcct

SEQ ID NO: 83243 - DNA, 20 bp, Artificial Sequence
  Description of Artificial Sequence: Synthetic oligonucleotide
  Target: ATXN2; (-) strand; PAM type: YTN; PAM sequence: TTT
ttaagagaaaaatgtaagcc

SEQ ID NO: 83244 - DNA, 20 bp, Artificial Sequence
  Description of Artificial Sequence: Synthetic oligonucleotide
  Target: ATXN2; (-) strand; PAM type: YTN; PAM sequence: TTT
tttaagagaaaaatgtaagc

SEQ ID NO: 83245 - DNA, 20 bp, Artificial Sequence
  Description of Artificial Sequence: Synthetic oligonucleotide
  Target: ATXN2; (-) strand; PAM type: YTN; PAM sequence: TTT
ttttaagagaaaaatgtaag

SEQ ID NO: 83246 - DNA, 20 bp, Artificial Sequence
  Description of Artificial Sequence: Synthetic oligonucleotide
  Target: ATXN2; (-) strand; PAM type: YTN; PAM sequence: TTT
tttttaagagaaaaatgtaa

SEQ ID NO: 83247 - DNA, 20 bp, Artificial Sequence
  Description of Artificial Sequence: Synthetic oligonucleotide
  Target: ATXN2; (-) strand; PAM type: YTN; PAM sequence: TTT
ttttttaagagaaaaatgta

SEQ ID NO: 83248 - DNA, 20 bp, Artificial Sequence
  Description of Artificial Sequence: Synthetic oligonucleotide
  Target: ATXN2; (-) strand; PAM type: YTN; PAM sequence: TTT
tttttttaagagaaaaatgt

SEQ ID NO: 83249 - DNA, 20 bp, Artificial Sequence
  Description of Artificial Sequence: Synthetic oligonucleotide
  Target: ATXN2; (-) strand; PAM type: YTN; PAM sequence: TTT
ttttttttaagagaaaaatg

SEQ ID NO: 83250 - DNA, 20 bp, Artificial Sequence
  Description of Artificial Sequence: Synthetic oligonucleotide
  Target: ATXN2; (-) strand; PAM type: YTN; PAM sequence: TTT
tttttttttaagagaaaaat

SEQ ID NO: 83251 - DNA, 20 bp, Artificial Sequence
  Description of Artificial Sequence: Synthetic oligonucleotide
  Target: ATXN2; (-) strand; PAM type: YTN; PAM sequence: TTT
ttttttttttaagagaaaaa

SEQ ID NO: 83252 - DNA, 20 bp, Artificial Sequence
  Description of Artificial Sequence: Synthetic oligonucleotide
  Target: ATXN2; (-) strand; PAM type: YTN; PAM sequence: CTT
tttttttttttaagagaaaa

SEQ ID NO: 83253 - DNA, 20 bp, Artificial Sequence
  Description of Artificial Sequence: Synthetic oligonucleotide
  Target: ATXN2; (-) strand; PAM type: YTN; PAM sequence: TTC
tttttttttttttaagagaa

SEQ ID NO: 83254 - DNA, 20 bp, Artificial Sequence
  Description of Artificial Sequence: Synthetic oligonucleotide
  Target: ATXN2; (-) strand; PAM type: YTN; PAM sequence: TTT
ctttttttttttttaagaga

SEQ ID NO: 83255 - DNA, 20 bp, Artificial Sequence
  Description of Artificial Sequence: Synthetic oligonucleotide
  Target: ATXN2; (-) strand; PAM type: YTN; PAM sequence: TTT
tctttttttttttttaagag

SEQ ID NO: 83256 - DNA, 20 bp, Artificial Sequence
  Description of Artificial Sequence: Synthetic oligonucleotide
  Target: ATXN2; (-) strand; PAM type: YTN; PAM sequence: TTT
ttctttttttttttttaaga

SEQ ID NO: 83257 - DNA, 20 bp, Artificial Sequence
  Description of Artificial Sequence: Synthetic oligonucleotide
  Target: ATXN2; (-) strand; PAM type: YTN; PAM sequence: CTT
tttctttttttttttttaag

SEQ ID NO: 83258 - DNA, 20 bp, Artificial Sequence
  Description of Artificial Sequence: Synthetic oligonucleotide
  Target: ATXN2; (-) strand; PAM type: YTN; PAM sequence: TTC
tttttcttttttttttttta

SEQ ID NO: 83259 - DNA, 20 bp, Artificial Sequence
  Description of Artificial Sequence: Synthetic oligonucleotide
  Target: ATXN2; (-) strand; PAM type: YTN; PAM sequence: TTT
ctttttcttttttttttttt

SEQ ID NO: 83260 - DNA, 20 bp, Artificial Sequence
  Description of Artificial Sequence: Synthetic oligonucleotide
  Target: ATXN2; (-) strand; PAM type: YTN; PAM sequence: TTT
tctttttctttttttttttt

SEQ ID NO: 83261 - DNA, 20 bp, Artificial Sequence
  Description of Artificial Sequence: Synthetic oligonucleotide
  Target: ATXN2; (-) strand; PAM type: YTN; PAM sequence: TTT
ttctttttcttttttttttt

SEQ ID NO: 83262 - DNA, 20 bp, Artificial Sequence
  Description of Artificial Sequence: Synthetic oligonucleotide
  Target: ATXN2; (-) strand; PAM type: YTN; PAM sequence: CTT
tttctttttctttttttttt

SEQ ID NO: 83263 - DNA, 20 bp, Artificial Sequence
  Description of Artificial Sequence: Synthetic oligonucleotide
  Target: ATXN2; (-) strand; PAM type: YTN; PAM sequence: TTC
tttttctttttctttttttt

SEQ ID NO: 83264 - DNA, 20 bp, Artificial Sequence
  Description of Artificial Sequence: Synthetic oligonucleotide
  Target: ATXN2; (-) strand; PAM type: YTN; PAM sequence: TTT
ctttttctttttcttttttt

SEQ ID NO: 83265 - DNA, 20 bp, Artificial Sequence
  Description of Artificial Sequence: Synthetic oligonucleotide
  Target: ATXN2; (-) strand; PAM type: YTN; PAM sequence: TTT
tctttttctttttctttttt

SEQ ID NO: 83266 - DNA, 20 bp, Artificial Sequence
  Description of Artificial Sequence: Synthetic oligonucleotide
  Target: ATXN2; (-) strand; PAM type: YTN; PAM sequence: TTG
gttttctttttctttttctt

SEQ ID NO: 83267 - DNA, 20 bp, Artificial Sequence
  Description of Artificial Sequence: Synthetic oligonucleotide
  Target: ATXN2; (-) strand; PAM type: YTN; PAM sequence: TTT
ggttttctttttctttttct

SEQ ID NO: 83268 - DNA, 20 bp, Artificial Sequence
  Description of Artificial Sequence: Synthetic oligonucleotide
  Target: ATXN2; (-) strand; PAM type: YTN; PAM sequence: CTT
tggttttctttttctttttc

SEQ ID NO: 83269 - DNA, 20 bp, Artificial Sequence
  Description of Artificial Sequence: Synthetic oligonucleotide
  Target: ATXN2; (-) strand; PAM type: YTN; PAM sequence: TTG
ctttggttttctttttcttt

SEQ ID NO: 83270 - DNA, 20 bp, Artificial Sequence
  Description of Artificial Sequence: Synthetic oligonucleotide
  Target: ATXN2; (-) strand; PAM type: YTN; PAM sequence: CTT
gctttggttttctttttctt

SEQ ID NO: 83271 - DNA, 20 bp, Artificial Sequence
  Description of Artificial Sequence: Synthetic oligonucleotide
  Target: ATXN2; (-) strand; PAM type: YTN; PAM sequence: TTG
ggccaaaacttgctttggtt

SEQ ID NO: 83272 - DNA, 20 bp, Artificial Sequence
  Description of Artificial Sequence: Synthetic oligonucleotide
  Target: ATXN2; (-) strand; PAM type: YTN; PAM sequence: TTT
gggccaaaacttgctttggt

SEQ ID NO: 83273 - DNA, 20 bp, Artificial Sequence
  Description of Artificial Sequence: Synthetic oligonucleotide
  Target: ATXN2; (-) strand; PAM type: YTN; PAM sequence: TTA
agtttgggccaaaacttgct

SEQ ID NO: 83274 - DNA, 20 bp, Artificial Sequence
  Description of Artificial Sequence: Synthetic oligonucleotide
  Target: ATXN2; (-) strand; PAM type: YTN; PAM sequence: TTT
aagtttgggccaaaacttgc

SEQ ID NO: 83275 - DNA, 20 bp, Artificial Sequence
  Description of Artificial Sequence: Synthetic oligonucleotide
  Target: ATXN2; (-) strand; PAM type: YTN; PAM sequence: TTT
taagtttgggccaaaacttg

SEQ ID NO: 83276 - DNA, 20 bp, Artificial Sequence
  Description of Artificial Sequence: Synthetic oligonucleotide
  Target: ATXN2; (-) strand; PAM type: YTN; PAM sequence: TTT
ttaagtttgggccaaaactt

SEQ ID NO: 83277 - DNA, 20 bp, Artificial Sequence
  Description of Artificial Sequence: Synthetic oligonucleotide
  Target: ATXN2; (-) strand; PAM type: YTN; PAM sequence: CTT
tttaagtttgggccaaaact

SEQ ID NO: 83278 - DNA, 20 bp, Artificial Sequence
  Description of Artificial Sequence: Synthetic oligonucleotide
  Target: ATXN2; (-) strand; PAM type: YTN; PAM sequence: TTC
aagtatgtggagaaaataaa

SEQ ID NO: 83279 - DNA, 20 bp, Artificial Sequence
  Description of Artificial Sequence: Synthetic oligonucleotide
  Target: ATXN2; (-) strand; PAM type: YTN; PAM sequence: TTT
caagtatgtggagaaaataa

SEQ ID NO: 83280 - DNA, 20 bp, Artificial Sequence
  Description of Artificial Sequence: Synthetic oligonucleotide
  Target: ATXN2; (-) strand; PAM type: YTN; PAM sequence: TTG
tttcaagtatgtggagaaaa

SEQ ID NO: 83281 - DNA, 20 bp, Artificial Sequence
  Description of Artificial Sequence: Synthetic oligonucleotide
  Target: ATXN2; (-) strand; PAM type: YTN; PAM sequence: TTT
gtttcaagtatgtggagaaa

SEQ ID NO: 83282 - DNA, 20 bp, Artificial Sequence
  Description of Artificial Sequence: Synthetic oligonucleotide
  Target: ATXN2; (-) strand; PAM type: YTN; PAM sequence: TTT
tgtttcaagtatgtggagaa

SEQ ID NO: 83283 - DNA, 20 bp, Artificial Sequence
  Description of Artificial Sequence: Synthetic oligonucleotide
  Target: ATXN2; (-) strand; PAM type: YTN; PAM sequence: TTT
ttgtttcaagtatgtggaga

SEQ ID NO: 83284 - DNA, 20 bp, Artificial Sequence
  Description of Artificial Sequence: Synthetic oligonucleotide
  Target: ATXN2; (-) strand; PAM type: YTN; PAM sequence: TTA
gtttttgtttcaagtatgtg

SEQ ID NO: 83285 - DNA, 20 bp, Artificial Sequence
  Description of Artificial Sequence: Synthetic oligonucleotide
  Target: ATXN2; (-) strand; PAM type: YTN; PAM sequence: TTT
agtttttgtttcaagtatgt

SEQ ID NO: 83286 - DNA, 20 bp, Artificial Sequence
  Description of Artificial Sequence: Synthetic oligonucleotide
  Target: ATXN2; (-) strand; PAM type: YTN; PAM sequence: TTA
gtttagtttttgtttcaagt

SEQ ID NO: 83287 - DNA, 20 bp, Artificial Sequence
  Description of Artificial Sequence: Synthetic oligonucleotide
  Target: ATXN2; (-) strand; PAM type: YTN; PAM sequence: CTA
attagtttagtttttgtttc

SEQ ID NO: 83288 - DNA, 20 bp, Artificial Sequence
  Description of Artificial Sequence: Synthetic oligonucleotide
  Target: ATXN2; (-) strand; PAM type: YTN; PAM sequence: TTA
cctaattagtttagtttttg

SEQ ID NO: 83289 - DNA, 20 bp, Artificial Sequence
  Description of Artificial Sequence: Synthetic oligonucleotide
  Target: ATXN2; (-) strand; PAM type: YTN; PAM sequence: TTT
acctaattagtttagttttt

SEQ ID NO: 83290 - DNA, 20 bp, Artificial Sequence
  Description of Artificial Sequence: Synthetic oligonucleotide
  Target: ATXN2; (-) strand; PAM type: YTN; PAM sequence: TTT
tacctaattagtttagtttt

SEQ ID NO: 83291 - DNA, 20 bp, Artificial Sequence
  Description of Artificial Sequence: Synthetic oligonucleotide
  Target: ATXN2; (-) strand; PAM type: YTN; PAM sequence: TTA
cgtattttacctaattagtt

SEQ ID NO: 83292 - DNA, 20 bp, Artificial Sequence
  Description of Artificial Sequence: Synthetic oligonucleotide
  Target: ATXN2; (-) strand; PAM type: YTN; PAM sequence: CTT
acgtattttacctaattagt

SEQ ID NO: 83293 - DNA, 20 bp, Artificial Sequence
  Description of Artificial Sequence: Synthetic oligonucleotide
  Target: ATXN2; (-) strand; PAM type: YTN; PAM sequence: TTG
ggcttacgtattttacctaa

SEQ ID NO: 83294 - DNA, 20 bp, Artificial Sequence
  Description of Artificial Sequence: Synthetic oligonucleotide
  Target: ATXN2; (-) strand; PAM type: YTN; PAM sequence: TTT
gggcttacgtattttaccta

SEQ ID NO: 83295 - DNA, 20 bp, Artificial Sequence
  Description of Artificial Sequence: Synthetic oligonucleotide
  Target: ATXN2; (-) strand; PAM type: YTN; PAM sequence: TTT
tgggcttacgtattttacct

SEQ ID NO: 83296 - DNA, 20 bp, Artificial Sequence
  Description of Artificial Sequence: Synthetic oligonucleotide
  Target: ATXN2; (-) strand; PAM type: YTN; PAM sequence: CTT
ttgggcttacgtattttacc

SEQ ID NO: 83297 - DNA, 20 bp, Artificial Sequence
  Description of Artificial Sequence: Synthetic oligonucleotide
  Target: ATXN2; (-) strand; PAM type: YTN; PAM sequence: TTC
ttttgggcttacgtatttta

SEQ ID NO: 83298 - DNA, 20 bp, Artificial Sequence
  Description of Artificial Sequence: Synthetic oligonucleotide
  Target: ATXN2; (-) strand; PAM type: YTN; PAM sequence: TTT
cttttgggcttacgtatttt

SEQ ID NO: 83299 - DNA, 20 bp, Artificial Sequence
  Description of Artificial Sequence: Synthetic oligonucleotide
  Target: ATXN2; (-) strand; PAM type: YTN; PAM sequence: TTT
tcttttgggcttacgtattt

SEQ ID NO: 83300 - DNA, 20 bp, Artificial Sequence
  Description of Artificial Sequence: Synthetic oligonucleotide
  Target: ATXN2; (-) strand; PAM type: YTN; PAM sequence: TTT
ttcttttgggcttacgtatt

SEQ ID NO: 83301 - DNA, 20 bp, Artificial Sequence
  Description of Artificial Sequence: Synthetic oligonucleotide
  Target: ATXN2; (-) strand; PAM type: YTN; PAM sequence: TTG
tttttcttttgggcttacgt

SEQ ID NO: 83302 - DNA, 20 bp, Artificial Sequence
  Description of Artificial Sequence: Synthetic oligonucleotide
  Target: ATXN2; (-) strand; PAM type: YTN; PAM sequence: TTT
gtttttcttttgggcttacg

SEQ ID NO: 83303 - DNA, 20 bp, Artificial Sequence
  Description of Artificial Sequence: Synthetic oligonucleotide
  Target: ATXN2; (-) strand; PAM type: YTN; PAM sequence: TTT
tgtttttcttttgggcttac

SEQ ID NO: 83304 - DNA, 20 bp, Artificial Sequence
  Description of Artificial Sequence: Synthetic oligonucleotide
  Target: ATXN2; (-) strand; PAM type: YTN; PAM sequence: CTA
accaaagagacatgttttgt

SEQ ID NO: 83305 - DNA, 20 bp, Artificial Sequence
  Description of Artificial Sequence: Synthetic oligonucleotide
  Target: ATXN2; (-) strand; PAM type: YTN; PAM sequence: TTA
ctaaccaaagagacatgttt

SEQ ID NO: 83306 - DNA, 20 bp, Artificial Sequence
  Description of Artificial Sequence: Synthetic oligonucleotide
  Target: ATXN2; (-) strand; PAM type: YTN; PAM sequence: CTA
ttactaaccaaagagacatg

SEQ ID NO: 83307 - DNA, 20 bp, Artificial Sequence
  Description of Artificial Sequence: Synthetic oligonucleotide
  Target: ATXN2; (-) strand; PAM type: YTN; PAM sequence: TTG
tagatggctattactaacca

SEQ ID NO: 83308 - DNA, 20 bp, Artificial Sequence
  Description of Artificial Sequence: Synthetic oligonucleotide
  Target: ATXN2; (-) strand; PAM type: YTN; PAM sequence: TTA
gaggtaaattgtagatggct

SEQ ID NO: 83309 - DNA, 20 bp, Artificial Sequence
  Description of Artificial Sequence: Synthetic oligonucleotide
  Target: ATXN2; (-) strand; PAM type: YTN; PAM sequence: TTG
agggtcattagaggtaaatt

SEQ ID NO: 83310 - DNA, 20 bp, Artificial Sequence
  Description of Artificial Sequence: Synthetic oligonucleotide
  Target: ATXN2; (-) strand; PAM type: YTN; PAM sequence: TTG
acattgagggtcattagagg

SEQ ID NO: 83311 - DNA, 20 bp, Artificial Sequence
  Description of Artificial Sequence: Synthetic oligonucleotide
  Target: ATXN2; (-) strand; PAM type: YTN; PAM sequence: TTA
attgacattgagggtcatta

SEQ ID NO: 83312 - DNA, 20 bp, Artificial Sequence
  Description of Artificial Sequence: Synthetic oligonucleotide
  Target: ATXN2; (-) strand; PAM type: YTN; PAM sequence: TTA
gaccaaaaaagttaattgac

SEQ ID NO: 83313 - DNA, 20 bp, Artificial Sequence
  Description of Artificial Sequence: Synthetic oligonucleotide
  Target: ATXN2; (-) strand; PAM type: YTN; PAM sequence: CTG
aagttagaccaaaaaagtta

SEQ ID NO: 83314 - DNA, 20 bp, Artificial Sequence
  Description of Artificial Sequence: Synthetic oligonucleotide
  Target: ATXN2; (-) strand; PAM type: YTN; PAM sequence: CTC
tgaagttagaccaaaaaagt

SEQ ID NO: 83315 - DNA, 20 bp, Artificial Sequence
  Description of Artificial Sequence: Synthetic oligonucleotide
  Target: ATXN2; (-) strand; PAM type: YTN; PAM sequence: CTA
accatctctgaagttagacc

SEQ ID NO: 83316 - DNA, 20 bp, Artificial Sequence
  Description of Artificial Sequence: Synthetic oligonucleotide
  Target: ATXN2; (-) strand; PAM type: YTN; PAM sequence: TTG
atactaaccatctctgaagt

SEQ ID NO: 83317 - DNA, 20 bp, Artificial Sequence
  Description of Artificial Sequence: Synthetic oligonucleotide
  Target: ATXN2; (-) strand; PAM type: YTN; PAM sequence: TTA
tgtgcacattgatactaacc

SEQ ID NO: 83318 - DNA, 20 bp, Artificial Sequence
  Description of Artificial Sequence: Synthetic oligonucleotide
  Target: ATXN2; (-) strand; PAM type: YTN; PAM sequence: TTT
atgtgcacattgatactaac

SEQ ID NO: 83319 - DNA, 20 bp, Artificial Sequence
  Description of Artificial Sequence: Synthetic oligonucleotide
  Target: ATXN2; (-) strand; PAM type: YTN; PAM sequence: TTT
tatgtgcacattgatactaa

SEQ ID NO: 83320 - DNA, 20 bp, Artificial Sequence
  Description of Artificial Sequence: Synthetic oligonucleotide
  Target: ATXN2; (-) strand; PAM type: YTN; PAM sequence: CTT
ttatgtgcacattgatacta

SEQ ID NO: 83321 - DNA, 20 bp, Artificial Sequence
  Description of Artificial Sequence: Synthetic oligonucleotide
  Target: ATXN2; (-) strand; PAM type: YTN; PAM sequence: TTC
ttttatgtgcacattgatac

SEQ ID NO: 83322 - DNA, 20 bp, Artificial Sequence
  Description of Artificial Sequence: Synthetic oligonucleotide
  Target: ATXN2; (-) strand; PAM type: YTN; PAM sequence: TTA
ttcttttatgtgcacattga

SEQ ID NO: 83323 - DNA, 20 bp, Artificial Sequence
  Description of Artificial Sequence: Synthetic oligonucleotide
  Target: ATXN2; (-) strand; PAM type: YTN; PAM sequence: TTG
ttattcttttatgtgcacat

SEQ ID NO: 83324 - DNA, 20 bp, Artificial Sequence
  Description of Artificial Sequence: Synthetic oligonucleotide
  Target: ATXN2; (-) strand; PAM type: YTN; PAM sequence: TTT
gttattcttttatgtgcaca

SEQ ID NO: 83325 - DNA, 20 bp, Artificial Sequence
  Description of Artificial Sequence: Synthetic oligonucleotide
  Target: ATXN2; (-) strand; PAM type: YTN; PAM sequence: CTT
tgttattcttttatgtgcac

SEQ ID NO: 83326 - DNA, 20 bp, Artificial Sequence
  Description of Artificial Sequence: Synthetic oligonucleotide
  Target: ATXN2; (-) strand; PAM type: YTN; PAM sequence: TTA
aatggcatcatcctttgtta

SEQ ID NO: 83327 - DNA, 20 bp, Artificial Sequence
  Description of Artificial Sequence: Synthetic oligonucleotide
  Target: ATXN2; (-) strand; PAM type: YTN; PAM sequence: TTT
aaatggcatcatcctttgtt

SEQ ID NO: 83328 - DNA, 20 bp, Artificial Sequence
  Description of Artificial Sequence: Synthetic oligonucleotide
  Target: ATXN2; (-) strand; PAM type: YTN; PAM sequence: TTA
taaggtttaaatggcatcat

SEQ ID NO: 83329 - DNA, 20 bp, Artificial Sequence
  Description of Artificial Sequence: Synthetic oligonucleotide
  Target: ATXN2; (-) strand; PAM type: YTN; PAM sequence: TTT
ataaggtttaaatggcatca

SEQ ID NO: 83330 - DNA, 20 bp, Artificial Sequence
  Description of Artificial Sequence: Synthetic oligonucleotide
  Target: ATXN2; (-) strand; PAM type: YTN; PAM sequence: TTA
gtaatttataaggtttaaat

SEQ ID NO: 83331 - DNA, 20 bp, Artificial Sequence
  Description of Artificial Sequence: Synthetic oligonucleotide
  Target: ATXN2; (-) strand; PAM type: YTN; PAM sequence: TTC
attagtaatttataaggttt

SEQ ID NO: 83332 - DNA, 20 bp, Artificial Sequence
  Description of Artificial Sequence: Synthetic oligonucleotide
  Target: ATXN2; (-) strand; PAM type: YTN; PAM sequence: CTT
cattagtaatttataaggtt

SEQ ID NO: 83333 - DNA, 20 bp, Artificial Sequence
  Description of Artificial Sequence: Synthetic oligonucleotide
  Target: ATXN2; (-) strand; PAM type: YTN; PAM sequence: TTA
gtcatgtggcttcattagta

SEQ ID NO: 83334 - DNA, 20 bp, Artificial Sequence
  Description of Artificial Sequence: Synthetic oligonucleotide
  Target: ATXN2; (-) strand; PAM type: YTN; PAM sequence: TTA
attagtcatgtggcttcatt

SEQ ID NO: 83335 - DNA, 20 bp, Artificial Sequence
  Description of Artificial Sequence: Synthetic oligonucleotide
  Target: ATXN2; (-) strand; PAM type: YTN; PAM sequence: CTA
ggttaattagtcatgtggct

SEQ ID NO: 83336 - DNA, 20 bp, Artificial Sequence
  Description of Artificial Sequence: Synthetic oligonucleotide
  Target: ATXN2; (-) strand; PAM type: YTN; PAM sequence: TTA
tctaggttaattagtcatgt

SEQ ID NO: 83337 - DNA, 20 bp, Artificial Sequence
  Description of Artificial Sequence: Synthetic oligonucleotide
  Target: ATXN2; (-) strand; PAM type: YTN; PAM sequence: TTT
atctaggttaattagtcatg

SEQ ID NO: 83338 - DNA, 20 bp, Artificial Sequence
  Description of Artificial Sequence: Synthetic oligonucleotide
  Target: ATXN2; (-) strand; PAM type: YTN; PAM sequence: TTT
tatctaggttaattagtcat

SEQ ID NO: 83339 - DNA, 20 bp, Artificial Sequence
  Description of Artificial Sequence: Synthetic oligonucleotide
  Target: ATXN2; (-) strand; PAM type: YTN; PAM sequence: TTT
ttatctaggttaattagtca

SEQ ID NO: 83340 - DNA, 20 bp, Artificial Sequence
  Description of Artificial Sequence: Synthetic oligonucleotide
  Target: ATXN2; (-) strand; PAM type: YTN; PAM sequence: CTT
tttatctaggttaattagtc

SEQ ID NO: 83341 - DNA, 20 bp, Artificial Sequence
  Description of Artificial Sequence: Synthetic oligonucleotide
  Target: ATXN2; (-) strand; PAM type: YTN; PAM sequence: TTG
ctttttatctaggttaatta

SEQ ID NO: 83342 - DNA, 20 bp, Artificial Sequence
  Description of Artificial Sequence: Synthetic oligonucleotide
  Target: ATXN2; (-) strand; PAM type: YTN; PAM sequence: TTT
gctttttatctaggttaatt

SEQ ID NO: 83343 - DNA, 20 bp, Artificial Sequence
  Description of Artificial Sequence: Synthetic oligonucleotide
  Target: ATXN2; (-) strand; PAM type: YTN; PAM sequence: TTA
gccgtttgctttttatctag

SEQ ID NO: 83344 - DNA, 20 bp, Artificial Sequence
  Description of Artificial Sequence: Synthetic oligonucleotide
  Target: ATXN2; (-) strand; PAM type: YTN; PAM sequence: TTT
agccgtttgctttttatcta

SEQ ID NO: 83345 - DNA, 20 bp, Artificial Sequence
  Description of Artificial Sequence: Synthetic oligonucleotide
  Target: ATXN2; (-) strand; PAM type: YTN; PAM sequence: TTG
ggtatttagccgtttgcttt

SEQ ID NO: 83346 - DNA, 20 bp, Artificial Sequence
  Description of Artificial Sequence: Synthetic oligonucleotide
  Target: ATXN2; (-) strand; PAM type: YTN; PAM sequence: TTG
aaggttgggtatttagccgt

SEQ ID NO: 83347 - DNA, 20 bp, Artificial Sequence
  Description of Artificial Sequence: Synthetic oligonucleotide
  Target: ATXN2; (-) strand; PAM type: YTN; PAM sequence: TTT
gaaggttgggtatttagccg

SEQ ID NO: 83348 - DNA, 20 bp, Artificial Sequence
  Description of Artificial Sequence: Synthetic oligonucleotide
  Target: ATXN2; (-) strand; PAM type: YTN; PAM sequence: TTG
agcaaagatttgaaggttgg

SEQ ID NO: 83349 - DNA, 20 bp, Artificial Sequence
  Description of Artificial Sequence: Synthetic oligonucleotide
  Target: ATXN2; (-) strand; PAM type: YTN; PAM sequence: TTT
gagcaaagatttgaaggttg

SEQ ID NO: 83350 - DNA, 20 bp, Artificial Sequence
  Description of Artificial Sequence: Synthetic oligonucleotide
  Target: ATXN2; (-) strand; PAM type: YTN; PAM sequence: CTA
acatttgagcaaagatttga

SEQ ID NO: 83351 - DNA, 20 bp, Artificial Sequence
  Description of Artificial Sequence: Synthetic oligonucleotide
  Target: ATXN2; (-) strand; PAM type: YTN; PAM sequence: TTG
aggagctaacatttgagcaa

SEQ ID NO: 83352 - DNA, 20 bp, Artificial Sequence
  Description of Artificial Sequence: Synthetic oligonucleotide
  Target: ATXN2; (-) strand; PAM type: YTN; PAM sequence: TTA
attgaggagctaacatttga

SEQ ID NO: 83353 - DNA, 20 bp, Artificial Sequence
  Description of Artificial Sequence: Synthetic oligonucleotide
  Target: ATXN2; (-) strand; PAM type: YTN; PAM sequence: CTT
aattgaggagctaacatttg

SEQ ID NO: 83354 - DNA, 20 bp, Artificial Sequence
  Description of Artificial Sequence: Synthetic oligonucleotide
  Target: ATXN2; (-) strand; PAM type: YTN; PAM sequence: TTG
ggggaacttaattgaggagc

SEQ ID NO: 83355 - DNA, 20 bp, Artificial Sequence
  Description of Artificial Sequence: Synthetic oligonucleotide
  Target: ATXN2; (-) strand; PAM type: YTN; PAM sequence: TTA
aatggattgggggaacttaa

SEQ ID NO: 83356 - DNA, 20 bp, Artificial Sequence
  Description of Artificial Sequence: Synthetic oligonucleotide
  Target: ATXN2; (-) strand; PAM type: YTN; PAM sequence: TTT
aaatggattgggggaactta

SEQ ID NO: 83357 - DNA, 20 bp, Artificial Sequence
  Description of Artificial Sequence: Synthetic oligonucleotide
  Target: ATXN2; (-) strand; PAM type: YTN; PAM sequence: TTT
taaatggattgggggaactt

SEQ ID NO: 83358 - DNA, 20 bp, Artificial Sequence
  Description of Artificial Sequence: Synthetic oligonucleotide
  Target: ATXN2; (-) strand; PAM type: YTN; PAM sequence: TTA
caattttaaatggattgggg

SEQ ID NO: 83359 - DNA, 20 bp, Artificial Sequence
  Description of Artificial Sequence: Synthetic oligonucleotide
  Target: ATXN2; (-) strand; PAM type: YTN; PAM sequence: TTA
aaggtatagggagtgtgggg

SEQ ID NO: 83360 - DNA, 20 bp, Artificial Sequence
  Description of Artificial Sequence: Synthetic oligonucleotide
  Target: ATXN2; (-) strand; PAM type: YTN; PAM sequence: TTA
gaagaaagcagattaaaggt

SEQ ID NO: 83361 - DNA, 20 bp, Artificial Sequence
  Description of Artificial Sequence: Synthetic oligonucleotide
  Target: ATXN2; (-) strand; PAM type: YTN; PAM sequence: CTA
tggaattagaagaaagcaga

SEQ ID NO: 83362 - DNA, 20 bp, Artificial Sequence
  Description of Artificial Sequence: Synthetic oligonucleotide
  Target: ATXN2; (-) strand; PAM type: YTN; PAM sequence: CTA
tgtataatagtgtataagag

SEQ ID NO: 83363 - DNA, 20 bp, Artificial Sequence
  Description of Artificial Sequence: Synthetic oligonucleotide
  Target: ATXN2; (-) strand; PAM type: YTN; PAM sequence: TTA
ccagcctatgtataatagtg

SEQ ID NO: 83364 - DNA, 20 bp, Artificial Sequence
  Description of Artificial Sequence: Synthetic oligonucleotide
  Target: ATXN2; (-) strand; PAM type: YTN; PAM sequence: TTA
aattaccagcctatgtataa

SEQ ID NO: 83365 - DNA, 20 bp, Artificial Sequence
  Description of Artificial Sequence: Synthetic oligonucleotide
  Target: ATXN2; (-) strand; PAM type: YTN; PAM sequence: CTA
ggcagacaatgagacattaa

SEQ ID NO: 83366 - DNA, 20 bp, Artificial Sequence
  Description of Artificial Sequence: Synthetic oligonucleotide
  Target: ATXN2; (-) strand; PAM type: YTN; PAM sequence: CTA
atgtgactaggcagacaatg

SEQ ID NO: 83367 - DNA, 20 bp, Artificial Sequence
  Description of Artificial Sequence: Synthetic oligonucleotide
  Target: ATXN2; (-) strand; PAM type: YTN; PAM sequence: TTC
taatgtgactaggcagacaa

SEQ ID NO: 83368 - DNA, 20 bp, Artificial Sequence
  Description of Artificial Sequence: Synthetic oligonucleotide
  Target: ATXN2; (-) strand; PAM type: YTN; PAM sequence: TTA
cattctaatgtgactaggca

SEQ ID NO: 83369 - DNA, 20 bp, Artificial Sequence
  Description of Artificial Sequence: Synthetic oligonucleotide
  Target: ATXN2; (-) strand; PAM type: YTN; PAM sequence: TTT
acattctaatgtgactaggc

SEQ ID NO: 83370 - DNA, 20 bp, Artificial Sequence
  Description of Artificial Sequence: Synthetic oligonucleotide
  Target: ATXN2; (-) strand; PAM type: YTN; PAM sequence: TTG
gagtttacattctaatgtga

SEQ ID NO: 83371 - DNA, 20 bp, Artificial Sequence
  Description of Artificial Sequence: Synthetic oligonucleotide
  Target: ATXN2; (-) strand; PAM type: YTN; PAM sequence: TTT
ggagtttacattctaatgtg

SEQ ID NO: 83372 - DNA, 20 bp, Artificial Sequence
  Description of Artificial Sequence: Synthetic oligonucleotide
  Target: ATXN2; (-) strand; PAM type: YTN; PAM sequence: TTT
tggagtttacattctaatgt

SEQ ID NO: 83373 - DNA, 20 bp, Artificial Sequence
  Description of Artificial Sequence: Synthetic oligonucleotide
  Target: ATXN2; (-) strand; PAM type: YTN; PAM sequence: CTT
ttggagtttacattctaatg

SEQ ID NO: 83374 - DNA, 20 bp, Artificial Sequence
  Description of Artificial Sequence: Synthetic oligonucleotide
  Target: ATXN2; (-) strand; PAM type: YTN; PAM sequence: TTG
tccttttggagtttacattc

SEQ ID NO: 83375 - DNA, 20 bp, Artificial Sequence
  Description of Artificial Sequence: Synthetic oligonucleotide
  Target: ATXN2; (-) strand; PAM type: YTN; PAM sequence: TTG
ggatgaatcagtgaataaag

SEQ ID NO: 83376 - DNA, 20 bp, Artificial Sequence
  Description of Artificial Sequence: Synthetic oligonucleotide
  Target: ATXN2; (-) strand; PAM type: YTN; PAM sequence: TTT
gggatgaatcagtgaataaa

SEQ ID NO: 83377 - DNA, 20 bp, Artificial Sequence
  Description of Artificial Sequence: Synthetic oligonucleotide
  Target: ATXN2; (-) strand; PAM type: YTN; PAM sequence: TTT
tgggatgaatcagtgaataa

SEQ ID NO: 83378 - DNA, 20 bp, Artificial Sequence
  Description of Artificial Sequence: Synthetic oligonucleotide
  Target: ATXN2; (-) strand; PAM type: YTN; PAM sequence: TTT
ttgggatgaatcagtgaata

SEQ ID NO: 83379 - DNA, 20 bp, Artificial Sequence
  Description of Artificial Sequence: Synthetic oligonucleotide
  Target: ATXN2; (-) strand; PAM type: YTN; PAM sequence: CTA
tgtacatggggtttttggga

SEQ ID NO: 83380 - DNA, 20 bp, Artificial Sequence
  Description of Artificial Sequence: Synthetic oligonucleotide
  Target: ATXN2; (-) strand; PAM type: YTN; PAM sequence: TTG
aagcatctatgtacatgggg

SEQ ID NO: 83381 - DNA, 20 bp, Artificial Sequence
  Description of Artificial Sequence: Synthetic oligonucleotide
  Target: ATXN2; (-) strand; PAM type: YTN; PAM sequence: TTA
ttgaagcatctatgtacatg

SEQ ID NO: 83382 - DNA, 20 bp, Artificial Sequence
  Description of Artificial Sequence: Synthetic oligonucleotide
  Target: ATXN2; (-) strand; PAM type: YTN; PAM sequence: TTT
attgaagcatctatgtacat

SEQ ID NO: 83383 - DNA, 20 bp, Artificial Sequence
  Description of Artificial Sequence: Synthetic oligonucleotide
  Target: ATXN2; (-) strand; PAM type: YTN; PAM sequence: CTT
tattgaagcatctatgtaca

SEQ ID NO: 83384 - DNA, 20 bp, Artificial Sequence
  Description of Artificial Sequence: Synthetic oligonucleotide
  Target: ATXN2; (-) strand; PAM type: YTN; PAM sequence: TTG
aatacagctttattgaagca

SEQ ID NO: 83385 - DNA, 20 bp, Artificial Sequence
  Description of Artificial Sequence: Synthetic oligonucleotide
  Target: ATXN2; (-) strand; PAM type: YTN; PAM sequence: CTA
cgttgaatacagctttattg

SEQ ID NO: 83386 - DNA, 20 bp, Artificial Sequence
  Description of Artificial Sequence: Synthetic oligonucleotide
  Target: ATXN2; (-) strand; PAM type: YTN; PAM sequence: CTA
aaatatctacgttgaataca

SEQ ID NO: 83387 - DNA, 20 bp, Artificial Sequence
  Description of Artificial Sequence: Synthetic oligonucleotide
  Target: ATXN2; (-) strand; PAM type: YTN; PAM sequence: TTG
tagaagggcctaaaatatct

SEQ ID NO: 83388 - DNA, 20 bp, Artificial Sequence
  Description of Artificial Sequence: Synthetic oligonucleotide
  Target: ATXN2; (-) strand; PAM type: YTN; PAM sequence: CTT
gtagaagggcctaaaatatc

SEQ ID NO: 83389 - DNA, 20 bp, Artificial Sequence
  Description of Artificial Sequence: Synthetic oligonucleotide
  Target: ATXN2; (-) strand; PAM type: YTN; PAM sequence: TTA
aatatcttgtagaagggcct

SEQ ID NO: 83390 - DNA, 20 bp, Artificial Sequence
  Description of Artificial Sequence: Synthetic oligonucleotide
  Target: ATXN2; (-) strand; PAM type: YTN; PAM sequence: TTG
cagttaaatatcttgtagaa

SEQ ID NO: 83391 - DNA, 20 bp, Artificial Sequence
  Description of Artificial Sequence: Synthetic oligonucleotide
  Target: ATXN2; (-) strand; PAM type: YTN; PAM sequence: TTT
gcagttaaatatcttgtaga

SEQ ID NO: 83392 - DNA, 20 bp, Artificial Sequence
  Description of Artificial Sequence: Synthetic oligonucleotide
  Target: ATXN2; (-) strand; PAM type: YTN; PAM sequence: TTT
tgcagttaaatatcttgtag

SEQ ID NO: 83393 - DNA, 20 bp, Artificial Sequence
  Description of Artificial Sequence: Synthetic oligonucleotide
  Target: ATXN2; (-) strand; PAM type: YTN; PAM sequence: CTT
ttgcagttaaatatcttgta

SEQ ID NO: 83394 - DNA, 20 bp, Artificial Sequence
  Description of Artificial Sequence: Synthetic oligonucleotide
  Target: ATXN2; (-) strand; PAM type: YTN; PAM sequence: TTC
atcttttgcagttaaatatc

SEQ ID NO: 83395 - DNA, 20 bp, Artificial Sequence
  Description of Artificial Sequence: Synthetic oligonucleotide
  Target: ATXN2; (-) strand; PAM type: YTN; PAM sequence: CTG
ttcatcttttgcagttaaat

SEQ ID NO: 83396 - DNA, 20 bp, Artificial Sequence
  Description of Artificial Sequence: Synthetic oligonucleotide
  Target: ATXN2; (-) strand; PAM type: YTN; PAM sequence: TTC
agtgagactgttcatctttt

SEQ ID NO: 83397 - DNA, 20 bp, Artificial Sequence
  Description of Artificial Sequence: Synthetic oligonucleotide
  Target: ATXN2; (-) strand; PAM type: YTN; PAM sequence: TTT
cagtgagactgttcatcttt

SEQ ID NO: 83398 - DNA, 20 bp, Artificial Sequence
  Description of Artificial Sequence: Synthetic oligonucleotide
  Target: ATXN2; (-) strand; PAM type: YTN; PAM sequence: TTA
aatttcagtgagactgttca

SEQ ID NO: 83399 - DNA, 20 bp, Artificial Sequence
  Description of Artificial Sequence: Synthetic oligonucleotide
  Target: ATXN2; (-) strand; PAM type: YTN; PAM sequence: TTT
aaatttcagtgagactgttc

SEQ ID NO: 83400 - DNA, 20 bp, Artificial Sequence
  Description of Artificial Sequence: Synthetic oligonucleotide
  Target: ATXN2; (-) strand; PAM type: YTN; PAM sequence: TTC
catttaaatttcagtgagac

SEQ ID NO: 83401 - DNA, 20 bp, Artificial Sequence
  Description of Artificial Sequence: Synthetic oligonucleotide
  Target: ATXN2; (-) strand; PAM type: YTN; PAM sequence: CTT
ccatttaaatttcagtgaga

SEQ ID NO: 83402 - DNA, 20 bp, Artificial Sequence
  Description of Artificial Sequence: Synthetic oligonucleotide
  Target: ATXN2; (-) strand; PAM type: YTN; PAM sequence: TTC
atcatgcttccatttaaatt

SEQ ID NO: 83403 - DNA, 20 bp, Artificial Sequence
  Description of Artificial Sequence: Synthetic oligonucleotide
  Target: ATXN2; (-) strand; PAM type: YTN; PAM sequence: TTG
ttcatcatgcttccatttaa

SEQ ID NO: 83404 - DNA, 20 bp, Artificial Sequence
  Description of Artificial Sequence: Synthetic oligonucleotide
  Target: ATXN2; (-) strand; PAM type: YTN; PAM sequence: TTA
atgtagttgttcatcatgct

SEQ ID NO: 83405 - DNA, 20 bp, Artificial Sequence
  Description of Artificial Sequence: Synthetic oligonucleotide
  Target: ATXN2; (-) strand; PAM type: YTN; PAM sequence: TTT
aatgtagttgttcatcatgc

SEQ ID NO: 83406 - DNA, 20 bp, Artificial Sequence
  Description of Artificial Sequence: Synthetic oligonucleotide
  Target: ATXN2; (-) strand; PAM type: YTN; PAM sequence: CTG
tgatttaatgtagttgttca

SEQ ID NO: 83407 - DNA, 20 bp, Artificial Sequence
  Description of Artificial Sequence: Synthetic oligonucleotide
  Target: ATXN2; (-) strand; PAM type: YTN; PAM sequence: CTC
aaaaaaaaaaaaaatgtgct

SEQ ID NO: 83408 - DNA, 20 bp, Artificial Sequence
  Description of Artificial Sequence: Synthetic oligonucleotide
  Target: ATXN2; (-) strand; PAM type: YTN; PAM sequence: CTA
tctcaaaaaaaaaaaaaatg

SEQ ID NO: 83409 - DNA, 20 bp, Artificial Sequence
  Description of Artificial Sequence: Synthetic oligonucleotide
  Target: ATXN2; (-) strand; PAM type: YTN; PAM sequence: CTC
tatctcaaaaaaaaaaaaaa

SEQ ID NO: 83410 - DNA, 20 bp, Artificial Sequence
  Description of Artificial Sequence: Synthetic oligonucleotide
  Target: ATXN2; (-) strand; PAM type: YTN; PAM sequence: CTG
ggagacagagtgagactcta

SEQ ID NO: 83411 - DNA, 20 bp, Artificial Sequence
  Description of Artificial Sequence: Synthetic oligonucleotide
  Target: ATXN2; (-) strand; PAM type: YTN; PAM sequence: CTC
cagcctgggagacagagtga

SEQ ID NO: 83412 - DNA, 20 bp, Artificial Sequence
  Description of Artificial Sequence: Synthetic oligonucleotide
  Target: ATXN2; (-) strand; PAM type: YTN; PAM sequence: CTG
cactccagcctgggagacag

SEQ ID NO: 83413 - DNA, 20 bp, Artificial Sequence
  Description of Artificial Sequence: Synthetic oligonucleotide
  Target: ATXN2; (-) strand; PAM type: YTN; PAM sequence: TTG
tgccactgcactccagcctg

SEQ ID NO: 83414 - DNA, 20 bp, Artificial Sequence
  Description of Artificial Sequence: Synthetic oligonucleotide
  Target: ATXN2; (-) strand; PAM type: YTN; PAM sequence: CTG
agattgtgccactgcactcc

SEQ ID NO: 83415 - DNA, 20 bp, Artificial Sequence
  Description of Artificial Sequence: Synthetic oligonucleotide
  Target: ATXN2; (-) strand; PAM type: YTN; PAM sequence: TTG
cagtcagctgagattgtgcc

SEQ ID NO: 83416 - DNA, 20 bp, Artificial Sequence
  Description of Artificial Sequence: Synthetic oligonucleotide
  Target: ATXN2; (-) strand; PAM type: YTN; PAM sequence: TTG
agcccaggaggcggaggttg

SEQ ID NO: 83417 - DNA, 20 bp, Artificial Sequence
  Description of Artificial Sequence: Synthetic oligonucleotide
  Target: ATXN2; (-) strand; PAM type: YTN; PAM sequence: CTT
gagcccaggaggcggaggtt

SEQ ID NO: 83418 - DNA, 20 bp, Artificial Sequence
  Description of Artificial Sequence: Synthetic oligonucleotide
  Target: ATXN2; (-) strand; PAM type: YTN; PAM sequence: CTG
aggcaggagcatcacttgag

SEQ ID NO: 83419 - DNA, 20 bp, Artificial Sequence
  Description of Artificial Sequence: Synthetic oligonucleotide
  Target: ATXN2; (-) strand; PAM type: YTN; PAM sequence: TTG
ggaggctgaggcaggagcat

SEQ ID NO: 83420 - DNA, 20 bp, Artificial Sequence
  Description of Artificial Sequence: Synthetic oligonucleotide
  Target: ATXN2; (-) strand; PAM type: YTN; PAM sequence: CTT
gggaggctgaggcaggagca

SEQ ID NO: 83421 - DNA, 20 bp, Artificial Sequence
  Description of Artificial Sequence: Synthetic oligonucleotide
  Target: ATXN2; (-) strand; PAM type: YTN; PAM sequence: CTA
cttgggaggctgaggcagga

SEQ ID NO: 83422 - DNA, 20 bp, Artificial Sequence
  Description of Artificial Sequence: Synthetic oligonucleotide
  Target: ATXN2; (-) strand; PAM type: YTN; PAM sequence: CTG
taatcccagctacttgggag

SEQ ID NO: 83423 - DNA, 20 bp, Artificial Sequence
  Description of Artificial Sequence: Synthetic oligonucleotide
  Target: ATXN2; (-) strand; PAM type: YTN; PAM sequence: TTA
gccaggcgcctgtaatccca

SEQ ID NO: 83424 - DNA, 20 bp, Artificial Sequence
  Description of Artificial Sequence: Synthetic oligonucleotide
  Target: ATXN2; (-) strand; PAM type: YTN; PAM sequence: TTT
agccaggcgcctgtaatccc

SEQ ID NO: 83425 - DNA, 20 bp, Artificial Sequence
  Description of Artificial Sequence: Synthetic oligonucleotide
  Target: ATXN2; (-) strand; PAM type: YTN; PAM sequence: CTG
tttagccaggcgcctgtaat

SEQ ID NO: 83426 - DNA, 20 bp, Artificial Sequence
  Description of Artificial Sequence: Synthetic oligonucleotide
  Target: ATXN2; (-) strand; PAM type: YTN; PAM sequence: TTG
tgctgtttagccaggcgcct

SEQ ID NO: 83427 - DNA, 20 bp, Artificial Sequence
  Description of Artificial Sequence: Synthetic oligonucleotide
  Target: ATXN2; (-) strand; PAM type: YTN; PAM sequence: TTA
aaaattgtgctgtttagcca

SEQ ID NO: 83428 - DNA, 20 bp, Artificial Sequence
  Description of Artificial Sequence: Synthetic oligonucleotide
  Target: ATXN2; (-) strand; PAM type: YTN; PAM sequence: CTT
aaaaattgtgctgtttagcc

SEQ ID NO: 83429 - DNA, 20 bp, Artificial Sequence
  Description of Artificial Sequence: Synthetic oligonucleotide
  Target: ATXN2; (-) strand; PAM type: YTN; PAM sequence: TTG
caacttaaaaattgtgctgt

SEQ ID NO: 83430 - DNA, 20 bp, Artificial Sequence
  Description of Artificial Sequence: Synthetic oligonucleotide
  Target: ATXN2; (-) strand; PAM type: YTN; PAM sequence: TTG
aggcattgcaacttaaaaat

SEQ ID NO: 83431 - DNA, 20 bp, Artificial Sequence
  Description of Artificial Sequence: Synthetic oligonucleotide
  Target: ATXN2; (-) strand; PAM type: YTN; PAM sequence: CTT
gaggcattgcaacttaaaaa

SEQ ID NO: 83432 - DNA, 20 bp, Artificial Sequence
  Description of Artificial Sequence: Synthetic oligonucleotide
  Target: ATXN2; (-) strand; PAM type: YTN; PAM sequence: CTC
ttgaggcattgcaacttaaa

SEQ ID NO: 83433 - DNA, 20 bp, Artificial Sequence
  Description of Artificial Sequence: Synthetic oligonucleotide
  Target: ATXN2; (-) strand; PAM type: YTN; PAM sequence: TTC
tcttgaggcattgcaactta

SEQ ID NO: 83434 - DNA, 20 bp, Artificial Sequence
  Description of Artificial Sequence: Synthetic oligonucleotide
  Target: ATXN2; (-) strand; PAM type: YTN; PAM sequence: TTT
ctcttgaggcattgcaactt

SEQ ID NO: 83435 - DNA, 20 bp, Artificial Sequence
  Description of Artificial Sequence: Synthetic oligonucleotide
  Target: ATXN2; (-) strand; PAM type: YTN; PAM sequence: CTT
tctcttgaggcattgcaact

SEQ ID NO: 83436 - DNA, 20 bp, Artificial Sequence
  Description of Artificial Sequence: Synthetic oligonucleotide
  Target: ATXN2; (-) strand; PAM type: YTN; PAM sequence: TTC
tttctcttgaggcattgcaa

SEQ ID NO: 83437 - DNA, 20 bp, Artificial Sequence
  Description of Artificial Sequence: Synthetic oligonucleotide
  Target: ATXN2; (-) strand; PAM type: YTN; PAM sequence: CTT
ctttctcttgaggcattgca

SEQ ID NO: 83438 - DNA, 20 bp, Artificial Sequence
  Description of Artificial Sequence: Synthetic oligonucleotide
  Target: ATXN2; (-) strand; PAM type: YTN; PAM sequence: CTG
cttctttctcttgaggcatt

SEQ ID NO: 83439 - DNA, 20 bp, Artificial Sequence
  Description of Artificial Sequence: Synthetic oligonucleotide
  Target: ATXN2; (-) strand; PAM type: YTN; PAM sequence: TTA
ctgcttctttctcttgaggc

SEQ ID NO: 83440 - DNA, 20 bp, Artificial Sequence
  Description of Artificial Sequence: Synthetic oligonucleotide
  Target: ATXN2; (-) strand; PAM type: YTN; PAM sequence: TTT
actgcttctttctcttgagg

SEQ ID NO: 83441 - DNA, 20 bp, Artificial Sequence
  Description of Artificial Sequence: Synthetic oligonucleotide
  Target: ATXN2; (-) strand; PAM type: YTN; PAM sequence: TTT
tactgcttctttctcttgag

SEQ ID NO: 83442 - DNA, 20 bp, Artificial Sequence
  Description of Artificial Sequence: Synthetic oligonucleotide
  Target: ATXN2; (-) strand; PAM type: YTN; PAM sequence: TTT
ttactgcttctttctcttga

SEQ ID NO: 83443 - DNA, 20 bp, Artificial Sequence
  Description of Artificial Sequence: Synthetic oligonucleotide
  Target: ATXN2; (-) strand; PAM type: YTN; PAM sequence: TTA
gtatttttactgcttctttc

SEQ ID NO: 83444 - DNA, 20 bp, Artificial Sequence
  Description of Artificial Sequence: Synthetic oligonucleotide
  Target: ATXN2; (-) strand; PAM type: YTN; PAM sequence: CTT
agtatttttactgcttcttt

SEQ ID NO: 83445 - DNA, 20 bp, Artificial Sequence
  Description of Artificial Sequence: Synthetic oligonucleotide
  Target: ATXN2; (-) strand; PAM type: YTN; PAM sequence: TTC
agcttagtatttttactgct

SEQ ID NO: 83446 - DNA, 20 bp, Artificial Sequence
  Description of Artificial Sequence: Synthetic oligonucleotide
  Target: ATXN2; (-) strand; PAM type: YTN; PAM sequence: TTT
cagcttagtatttttactgc

SEQ ID NO: 83447 - DNA, 20 bp, Artificial Sequence
  Description of Artificial Sequence: Synthetic oligonucleotide
  Target: ATXN2; (-) strand; PAM type: YTN; PAM sequence: TTT
tcagcttagtatttttactg

SEQ ID NO: 83448 - DNA, 20 bp, Artificial Sequence
  Description of Artificial Sequence: Synthetic oligonucleotide
  Target: ATXN2; (-) strand; PAM type: YTN; PAM sequence: TTA
gtgattttcagcttagtatt

SEQ ID NO: 83449 - DNA, 20 bp, Artificial Sequence
  Description of Artificial Sequence: Synthetic oligonucleotide
  Target: ATXN2; (-) strand; PAM type: YTN; PAM sequence: TTT
agtgattttcagcttagtat

SEQ ID NO: 83450 - DNA, 20 bp, Artificial Sequence
  Description of Artificial Sequence: Synthetic oligonucleotide
  Target: ATXN2; (-) strand; PAM type: YTN; PAM sequence: TTT
tagtgattttcagcttagta

SEQ ID NO: 83451 - DNA, 20 bp, Artificial Sequence
  Description of Artificial Sequence: Synthetic oligonucleotide
  Target: ATXN2; (-) strand; PAM type: YTN; PAM sequence: CTT
ttagtgattttcagcttagt

SEQ ID NO: 83452 - DNA, 20 bp, Artificial Sequence
  Description of Artificial Sequence: Synthetic oligonucleotide
  Target: ATXN2; (-) strand; PAM type: YTN; PAM sequence: TTC
ttttagtgattttcagctta

SEQ ID NO: 83453 - DNA, 20 bp, Artificial Sequence
  Description of Artificial Sequence: Synthetic oligonucleotide
  Target: ATXN2; (-) strand; PAM type: YTN; PAM sequence: TTT
cttttagtgattttcagctt

SEQ ID NO: 83454 - DNA, 20 bp, Artificial Sequence
  Description of Artificial Sequence: Synthetic oligonucleotide
  Target: ATXN2; (-) strand; PAM type: YTN; PAM sequence: TTT
tcttttagtgattttcagct

SEQ ID NO: 83455 - DNA, 20 bp, Artificial Sequence
  Description of Artificial Sequence: Synthetic oligonucleotide
  Target: ATXN2; (-) strand; PAM type: YTN; PAM sequence: TTT
ttcttttagtgattttcagc

SEQ ID NO: 83456 - DNA, 20 bp, Artificial Sequence
  Description of Artificial Sequence: Synthetic oligonucleotide
  Target: ATXN2; (-) strand; PAM type: YTN; PAM sequence: CTG
aataaaatatttttctttta

SEQ ID NO: 83457 - DNA, 20 bp, Artificial Sequence
  Description of Artificial Sequence: Synthetic oligonucleotide
  Target: ATXN2; (-) strand; PAM type: YTN; PAM sequence: TTC
agtctgaataaaatattttt

SEQ ID NO: 83458 - DNA, 20 bp, Artificial Sequence
  Description of Artificial Sequence: Synthetic oligonucleotide
  Target: ATXN2; (-) strand; PAM type: YTN; PAM sequence: TTG
ggatacaggattcagtctga

SEQ ID NO: 83459 - DNA, 20 bp, Artificial Sequence
  Description of Artificial Sequence: Synthetic oligonucleotide
  Target: ATXN2; (-) strand; PAM type: YTN; PAM sequence: CTT
gggatacaggattcagtctg

SEQ ID NO: 83460 - DNA, 20 bp, Artificial Sequence
  Description of Artificial Sequence: Synthetic oligonucleotide
  Target: ATXN2; (-) strand; PAM type: YTN; PAM sequence: TTG
cttgggatacaggattcagt

SEQ ID NO: 83461 - DNA, 20 bp, Artificial Sequence
  Description of Artificial Sequence: Synthetic oligonucleotide
  Target: ATXN2; (-) strand; PAM type: YTN; PAM sequence: TTA
gaattgcttgggatacagga

SEQ ID NO: 83462 - DNA, 20 bp, Artificial Sequence
  Description of Artificial Sequence: Synthetic oligonucleotide
  Target: ATXN2; (-) strand; PAM type: YTN; PAM sequence: CTA
aataatatgacattagaatt

SEQ ID NO: 83463 - DNA, 20 bp, Artificial Sequence
  Description of Artificial Sequence: Synthetic oligonucleotide
  Target: ATXN2; (-) strand; PAM type: YTN; PAM sequence: CTA
aacctaaataatatgacatt

SEQ ID NO: 83464 - DNA, 20 bp, Artificial Sequence
  Description of Artificial Sequence: Synthetic oligonucleotide
  Target: ATXN2; (-) strand; PAM type: YTN; PAM sequence: TTC
ctaaacctaaataatatgac

SEQ ID NO: 83465 - DNA, 20 bp, Artificial Sequence
  Description of Artificial Sequence: Synthetic oligonucleotide
  Target: ATXN2; (-) strand; PAM type: YTN; PAM sequence: CTA
ttcctaaacctaaataatat

SEQ ID NO: 83466 - DNA, 20 bp, Artificial Sequence
  Description of Artificial Sequence: Synthetic oligonucleotide
  Target: ATXN2; (-) strand; PAM type: YTN; PAM sequence: CTC
tattcctaaacctaaataat

SEQ ID NO: 83467 - DNA, 20 bp, Artificial Sequence
  Description of Artificial Sequence: Synthetic oligonucleotide
  Target: ATXN2; (-) strand; PAM type: YTN; PAM sequence: TTA
ctctattcctaaacctaaat

SEQ ID NO: 83468 - DNA, 20 bp, Artificial Sequence
  Description of Artificial Sequence: Synthetic oligonucleotide
  Target: ATXN2; (-) strand; PAM type: YTN; PAM sequence: TTG
ttactctattcctaaaccta

SEQ ID NO: 83469 - DNA, 20 bp, Artificial Sequence
  Description of Artificial Sequence: Synthetic oligonucleotide
  Target: ATXN2; (-) strand; PAM type: YTN; PAM sequence: TTA
caattgttactctattccta

SEQ ID NO: 83470 - DNA, 20 bp, Artificial Sequence
  Description of Artificial Sequence: Synthetic oligonucleotide
  Target: ATXN2; (-) strand; PAM type: YTN; PAM sequence: TTT
acaattgttactctattcct

SEQ ID NO: 83471 - DNA, 20 bp, Artificial Sequence
  Description of Artificial Sequence: Synthetic oligonucleotide
  Target: ATXN2; (-) strand; PAM type: YTN; PAM sequence: TTA
aaaataaaaatatggattta

SEQ ID NO: 83472 - DNA, 20 bp, Artificial Sequence
  Description of Artificial Sequence: Synthetic oligonucleotide
  Target: ATXN2; (-) strand; PAM type: YTN; PAM sequence: TTC
cccattaaaaataaaaatat

SEQ ID NO: 83473 - DNA, 20 bp, Artificial Sequence
  Description of Artificial Sequence: Synthetic oligonucleotide
  Target: ATXN2; (-) strand; PAM type: YTN; PAM sequence: CTT
ccccattaaaaataaaaata

SEQ ID NO: 83474 - DNA, 20 bp, Artificial Sequence
  Description of Artificial Sequence: Synthetic oligonucleotide
  Target: ATXN2; (-) strand; PAM type: YTN; PAM sequence: TTC
ccttccccattaaaaataaa

SEQ ID NO: 83475 - DNA, 20 bp, Artificial Sequence
  Description of Artificial Sequence: Synthetic oligonucleotide
  Target: ATXN2; (-) strand; PAM type: YTN; PAM sequence: CTA
cattcccttccccattaaaa

SEQ ID NO: 83476 - DNA, 20 bp, Artificial Sequence
  Description of Artificial Sequence: Synthetic oligonucleotide
  Target: ATXN2; (-) strand; PAM type: YTN; PAM sequence: TTC
tacattcccttccccattaa

SEQ ID NO: 83477 - DNA, 20 bp, Artificial Sequence
  Description of Artificial Sequence: Synthetic oligonucleotide
  Target: ATXN2; (-) strand; PAM type: YTN; PAM sequence: CTT
ctacattcccttccccatta

SEQ ID NO: 83478 - DNA, 20 bp, Artificial Sequence
  Description of Artificial Sequence: Synthetic oligonucleotide
  Target: ATXN2; (-) strand; PAM type: YTN; PAM sequence: TTC
ttctacattcccttccccat

SEQ ID NO: 83479 - DNA, 20 bp, Artificial Sequence
  Description of Artificial Sequence: Synthetic oligonucleotide
  Target: ATXN2; (-) strand; PAM type: YTN; PAM sequence: CTT
cttctacattcccttcccca

SEQ ID NO: 83480 - DNA, 20 bp, Artificial Sequence
  Description of Artificial Sequence: Synthetic oligonucleotide
  Target: ATXN2; (-) strand; PAM type: YTN; PAM sequence: TTC
ttcttctacattcccttccc

SEQ ID NO: 83481 - DNA, 20 bp, Artificial Sequence
  Description of Artificial Sequence: Synthetic oligonucleotide
  Target: ATXN2; (-) strand; PAM type: YTN; PAM sequence: CTT
cttcttctacattcccttcc

SEQ ID NO: 83482 - DNA, 20 bp, Artificial Sequence
  Description of Artificial Sequence: Synthetic oligonucleotide
  Target: ATXN2; (-) strand; PAM type: YTN; PAM sequence: CTC
ttcttcttctacattccctt

SEQ ID NO: 83483 - DNA, 20 bp, Artificial Sequence
  Description of Artificial Sequence: Synthetic oligonucleotide
  Target: ATXN2; (-) strand; PAM type: YTN; PAM sequence: TTG
actcttcttcttctacattc

SEQ ID NO: 83484 - DNA, 20 bp, Artificial Sequence
  Description of Artificial Sequence: Synthetic oligonucleotide
  Target: ATXN2; (-) strand; PAM type: YTN; PAM sequence: CTG
gttgactcttcttcttctac

SEQ ID NO: 83485 - DNA, 20 bp, Artificial Sequence
  Description of Artificial Sequence: Synthetic oligonucleotide
  Target: ATXN2; (-) strand; PAM type: YTN; PAM sequence: TTC
gctggttgactcttcttctt

SEQ ID NO: 83486 - DNA, 20 bp, Artificial Sequence
  Description of Artificial Sequence: Synthetic oligonucleotide
  Target: ATXN2; (-) strand; PAM type: YTN; PAM sequence: TTT
cgctggttgactcttcttct

SEQ ID NO: 83487 - DNA, 20 bp, Artificial Sequence
  Description of Artificial Sequence: Synthetic oligonucleotide
  Target: ATXN2; (-) strand; PAM type: YTN; PAM sequence: TTT
tcgctggttgactcttcttc

SEQ ID NO: 83488 - DNA, 20 bp, Artificial Sequence
  Description of Artificial Sequence: Synthetic oligonucleotide
  Target: ATXN2; (-) strand; PAM type: YTN; PAM sequence: TTG
ggaattttcgctggttgact

SEQ ID NO: 83489 - DNA, 20 bp, Artificial Sequence
  Description of Artificial Sequence: Synthetic oligonucleotide
  Target: ATXN2; (-) strand; PAM type: YTN; PAM sequence: CTA
ttgggaattttcgctggttg

SEQ ID NO: 83490 - DNA, 20 bp, Artificial Sequence
  Description of Artificial Sequence: Synthetic oligonucleotide
  Target: ATXN2; (-) strand; PAM type: YTN; PAM sequence: TTC
atggcactattgggaatttt

SEQ ID NO: 83491 - DNA, 20 bp, Artificial Sequence
  Description of Artificial Sequence: Synthetic oligonucleotide
  Target: ATXN2; (-) strand; PAM type: YTN; PAM sequence: TTT
catggcactattgggaattt

SEQ ID NO: 83492 - DNA, 20 bp, Artificial Sequence
  Description of Artificial Sequence: Synthetic oligonucleotide
  Target: ATXN2; (-) strand; PAM type: YTN; PAM sequence: TTG
taatttcatggcactattgg

SEQ ID NO: 83493 - DNA, 20 bp, Artificial Sequence
  Description of Artificial Sequence: Synthetic oligonucleotide
  Target: ATXN2; (-) strand; PAM type: YTN; PAM sequence: TTT
gtaatttcatggcactattg

SEQ ID NO: 83494 - DNA, 20 bp, Artificial Sequence
  Description of Artificial Sequence: Synthetic oligonucleotide
  Target: ATXN2; (-) strand; PAM type: YTN; PAM sequence: TTT
tgtaatttcatggcactatt

SEQ ID NO: 83495 - DNA, 20 bp, Artificial Sequence
  Description of Artificial Sequence: Synthetic oligonucleotide
  Target: ATXN2; (-) strand; PAM type: YTN; PAM sequence: TTT
ttgtaatttcatggcactat

SEQ ID NO: 83496 - DNA, 20 bp, Artificial Sequence
  Description of Artificial Sequence: Synthetic oligonucleotide
  Target: ATXN2; (-) strand; PAM type: YTN; PAM sequence: TTT
tttgtaatttcatggcacta

SEQ ID NO: 83497 - DNA, 20 bp, Artificial Sequence
  Description of Artificial Sequence: Synthetic oligonucleotide
  Target: ATXN2; (-) strand; PAM type: YTN; PAM sequence: CTT
ttttgtaatttcatggcact

SEQ ID NO: 83498 - DNA, 20 bp, Artificial Sequence
  Description of Artificial Sequence: Synthetic oligonucleotide
  Target: ATXN2; (-) strand; PAM type: YTN; PAM sequence: TTG
gtaacttttttgtaatttca

SEQ ID NO: 83499 - DNA, 20 bp, Artificial Sequence
  Description of Artificial Sequence: Synthetic oligonucleotide
  Target: ATXN2; (-) strand; PAM type: YTN; PAM sequence: TTT
ggtaacttttttgtaatttc

SEQ ID NO: 83500 - DNA, 20 bp, Artificial Sequence
  Description of Artificial Sequence: Synthetic oligonucleotide
  Target: ATXN2; (-) strand; PAM type: YTN; PAM sequence: TTT
tggtaacttttttgtaattt

SEQ ID NO: 83501 - DNA, 20 bp, Artificial Sequence
  Description of Artificial Sequence: Synthetic oligonucleotide
  Target: ATXN2; (-) strand; PAM type: YTN; PAM sequence: TTT
ttggtaacttttttgtaatt

SEQ ID NO: 83502 - DNA, 20 bp, Artificial Sequence
  Description of Artificial Sequence: Synthetic oligonucleotide
  Target: ATXN2; (-) strand; PAM type: YTN; PAM sequence: TTA
tttttggtaacttttttgta

SEQ ID NO: 83503 - DNA, 20 bp, Artificial Sequence
  Description of Artificial Sequence: Synthetic oligonucleotide
  Target: ATXN2; (-) strand; PAM type: YTN; PAM sequence: CTA
tgaccaagttatttttggta

SEQ ID NO: 83504 - DNA, 20 bp, Artificial Sequence
  Description of Artificial Sequence: Synthetic oligonucleotide
  Target: ATXN2; (-) strand; PAM type: YTN; PAM sequence: CTA
gcctatgaccaagttatttt

SEQ ID NO: 83505 - DNA, 20 bp, Artificial Sequence
  Description of Artificial Sequence: Synthetic oligonucleotide
  Target: ATXN2; (-) strand; PAM type: YTN; PAM sequence: CTG
ctagcctatgaccaagttat

SEQ ID NO: 83506 - DNA, 20 bp, Artificial Sequence
  Description of Artificial Sequence: Synthetic oligonucleotide
  Target: ATXN2; (-) strand; PAM type: YTN; PAM sequence: TTA
gctgctagcctatgaccaag

SEQ ID NO: 83507 - DNA, 20 bp, Artificial Sequence
  Description of Artificial Sequence: Synthetic oligonucleotide
  Target: ATXN2; (-) strand; PAM type: YTN; PAM sequence: TTA
ttagctgctagcctatgacc

SEQ ID NO: 83508 - DNA, 20 bp, Artificial Sequence
  Description of Artificial Sequence: Synthetic oligonucleotide
  Target: ATXN2; (-) strand; PAM type: YTN; PAM sequence: TTT
attagctgctagcctatgac

SEQ ID NO: 83509 - DNA, 20 bp, Artificial Sequence
  Description of Artificial Sequence: Synthetic oligonucleotide
  Target: ATXN2; (-) strand; PAM type: YTN; PAM sequence: TTT
tattagctgctagcctatga

SEQ ID NO: 83510 - DNA, 20 bp, Artificial Sequence
  Description of Artificial Sequence: Synthetic oligonucleotide
  Target: ATXN2; (-) strand; PAM type: YTN; PAM sequence: TTT
ttattagctgctagcctatg

SEQ ID NO: 83511 - DNA, 20 bp, Artificial Sequence
  Description of Artificial Sequence: Synthetic oligonucleotide
  Target: ATXN2; (-) strand; PAM type: YTN; PAM sequence: TTT
tttattagctgctagcctat

SEQ ID NO: 83512 - DNA, 20 bp, Artificial Sequence
  Description of Artificial Sequence: Synthetic oligonucleotide
  Target: ATXN2; (-) strand; PAM type: YTN; PAM sequence: CTG
aaagtgttttttattagctg

SEQ ID NO: 83513 - DNA, 20 bp, Artificial Sequence
  Description of Artificial Sequence: Synthetic oligonucleotide
  Target: ATXN2; (-) strand; PAM type: YTN; PAM sequence: TTC
atctgaaagtgttttttatt

SEQ ID NO: 83514 - DNA, 20 bp, Artificial Sequence
  Description of Artificial Sequence: Synthetic oligonucleotide
  Target: ATXN2; (-) strand; PAM type: YTN; PAM sequence: TTT
catctgaaagtgttttttat

SEQ ID NO: 83515 - DNA, 20 bp, Artificial Sequence
  Description of Artificial Sequence: Synthetic oligonucleotide
  Target: ATXN2; (-) strand; PAM type: YTN; PAM sequence: TTT
tcatctgaaagtgtttttta

SEQ ID NO: 83516 - DNA, 20 bp, Artificial Sequence
  Description of Artificial Sequence: Synthetic oligonucleotide
  Target: ATXN2; (-) strand; PAM type: YTN; PAM sequence: TTT
ttcatctgaaagtgtttttt

SEQ ID NO: 83517 - DNA, 20 bp, Artificial Sequence
  Description of Artificial Sequence: Synthetic oligonucleotide
  Target: ATXN2; (-) strand; PAM type: YTN; PAM sequence: CTT
tttcatctgaaagtgttttt

SEQ ID NO: 83518 - DNA, 20 bp, Artificial Sequence
  Description of Artificial Sequence: Synthetic oligonucleotide
  Target: ATXN2; (-) strand; PAM type: YTN; PAM sequence: TTC
tttttcatctgaaagtgttt

SEQ ID NO: 83519 - DNA, 20 bp, Artificial Sequence
  Description of Artificial Sequence: Synthetic oligonucleotide
  Target: ATXN2; (-) strand; PAM type: YTN; PAM sequence: TTT
ctttttcatctgaaagtgtt

SEQ ID NO: 83520 - DNA, 20 bp, Artificial Sequence
  Description of Artificial Sequence: Synthetic oligonucleotide
  Target: ATXN2; (-) strand; PAM type: YTN; PAM sequence: CTT
tctttttcatctgaaagtgt

SEQ ID NO: 83521 - DNA, 20 bp, Artificial Sequence
  Description of Artificial Sequence: Synthetic oligonucleotide
  Target: ATXN2; (-) strand; PAM type: YTN; PAM sequence: TTA
acctttctttttcatctgaa

SEQ ID NO: 83522 - DNA, 20 bp, Artificial Sequence
  Description of Artificial Sequence: Synthetic oligonucleotide
  Target: ATXN2; (-) strand; PAM type: YTN; PAM sequence: TTG
ttaacctttctttttcatct

SEQ ID NO: 83523 - DNA, 20 bp, Artificial Sequence
  Description of Artificial Sequence: Synthetic oligonucleotide
  Target: ATXN2; (-) strand; PAM type: YTN; PAM sequence: TTG
ttgttaacctttctttttca

SEQ ID NO: 83524 - DNA, 20 bp, Artificial Sequence
  Description of Artificial Sequence: Synthetic oligonucleotide
  Target: ATXN2; (-) strand; PAM type: YTN; PAM sequence: TTG
ttgttgttaacctttctttt

SEQ ID NO: 83525 - DNA, 20 bp, Artificial Sequence
  Description of Artificial Sequence: Synthetic oligonucleotide
  Target: ATXN2; (-) strand; PAM type: YTN; PAM sequence: TTG
ttgttgttgttaacctttct

SEQ ID NO: 83526 - DNA, 20 bp, Artificial Sequence
  Description of Artificial Sequence: Synthetic oligonucleotide
  Target: ATXN2; (-) strand; PAM type: YTN; PAM sequence: TTT
gttgttgttgttaacctttc

SEQ ID NO: 83527 - DNA, 20 bp, Artificial Sequence
  Description of Artificial Sequence: Synthetic oligonucleotide
  Target: ATXN2; (-) strand; PAM type: YTN; PAM sequence: CTT
tgttgttgttgttaaccttt

SEQ ID NO: 83528 - DNA, 20 bp, Artificial Sequence
  Description of Artificial Sequence: Synthetic oligonucleotide
  Target: ATXN2; (-) strand; PAM type: YTN; PAM sequence: CTA
aagctttgttgttgttgtta

SEQ ID NO: 83529 - DNA, 20 bp, Artificial Sequence
  Description of Artificial Sequence: Synthetic oligonucleotide
  Target: ATXN2; (-) strand; PAM type: YTN; PAM sequence: TTC
taaagctttgttgttgttgt

SEQ ID NO: 83530 - DNA, 20 bp, Artificial Sequence
  Description of Artificial Sequence: Synthetic oligonucleotide
  Target: ATXN2; (-) strand; PAM type: YTN; PAM sequence: CTG
ttctaaagctttgttgttgt

SEQ ID NO: 83531 - DNA, 20 bp, Artificial Sequence
  Description of Artificial Sequence: Synthetic oligonucleotide
  Target: ATXN2; (-) strand; PAM type: YTN; PAM sequence: CTG
aggaactgttctaaagcttt

SEQ ID NO: 83532 - DNA, 20 bp, Artificial Sequence
  Description of Artificial Sequence: Synthetic oligonucleotide
  Target: ATXN2; (-) strand; PAM type: YTN; PAM sequence: TTC
ctgaggaactgttctaaagc

SEQ ID NO: 83533 - DNA, 20 bp, Artificial Sequence
  Description of Artificial Sequence: Synthetic oligonucleotide
  Target: ATXN2; (-) strand; PAM type: YTN; PAM sequence: CTG
agtaaagtgcaggaatgaaa

SEQ ID NO: 83534 - DNA, 20 bp, Artificial Sequence
  Description of Artificial Sequence: Synthetic oligonucleotide
  Target: ATXN2; (-) strand; PAM type: YTN; PAM sequence: CTG
atagtactgagtaaagtgca

SEQ ID NO: 83535 - DNA, 20 bp, Artificial Sequence
  Description of Artificial Sequence: Synthetic oligonucleotide
  Target: ATXN2; (-) strand; PAM type: YTN; PAM sequence: CTG
tcgtgctgatagtactgagt

SEQ ID NO: 83536 - DNA, 20 bp, Artificial Sequence
  Description of Artificial Sequence: Synthetic oligonucleotide
  Target: ATXN2; (-) strand; PAM type: YTN; PAM sequence: TTA
tctgtcgtgctgatagtact

SEQ ID NO: 83537 - DNA, 20 bp, Artificial Sequence
  Description of Artificial Sequence: Synthetic oligonucleotide
  Target: ATXN2; (-) strand; PAM type: YTN; PAM sequence: TTT
atctgtcgtgctgatagtac

SEQ ID NO: 83538 - DNA, 20 bp, Artificial Sequence
  Description of Artificial Sequence: Synthetic oligonucleotide
  Target: ATXN2; (-) strand; PAM type: YTN; PAM sequence: TTG
gtttatctgtcgtgctgata

SEQ ID NO: 83539 - DNA, 20 bp, Artificial Sequence
  Description of Artificial Sequence: Synthetic oligonucleotide
  Target: ATXN2; (-) strand; PAM type: YTN; PAM sequence: CTT
ggtttatctgtcgtgctgat

SEQ ID NO: 83540 - DNA, 20 bp, Artificial Sequence
  Description of Artificial Sequence: Synthetic oligonucleotide
  Target: ATXN2; (-) strand; PAM type: YTN; PAM sequence: TTA
atgagggtacttggtttatc

SEQ ID NO: 83541 - DNA, 20 bp, Artificial Sequence
  Description of Artificial Sequence: Synthetic oligonucleotide
  Target: ATXN2; (-) strand; PAM type: YTN; PAM sequence: TTA
ttaatgagggtacttggttt

SEQ ID NO: 83542 - DNA, 20 bp, Artificial Sequence
  Description of Artificial Sequence: Synthetic oligonucleotide
  Target: ATXN2; (-) strand; PAM type: YTN; PAM sequence: TTA
ttattaatgagggtacttgg

SEQ ID NO: 83543 - DNA, 20 bp, Artificial Sequence
  Description of Artificial Sequence: Synthetic oligonucleotide
  Target: ATXN2; (-) strand; PAM type: YTN; PAM sequence: CTG
taaccattattattaatgag

SEQ ID NO: 83544 - DNA, 20 bp, Artificial Sequence
  Description of Artificial Sequence: Synthetic oligonucleotide
  Target: ATXN2; (-) strand; PAM type: YTN; PAM sequence: TTG
aaacctgtaaccattattat

SEQ ID NO: 83545 - DNA, 20 bp, Artificial Sequence
  Description of Artificial Sequence: Synthetic oligonucleotide
  Target: ATXN2; (-) strand; PAM type: YTN; PAM sequence: TTT
gaaacctgtaaccattatta

SEQ ID NO: 83546 - DNA, 20 bp, Artificial Sequence
  Description of Artificial Sequence: Synthetic oligonucleotide
  Target: ATXN2; (-) strand; PAM type: YTN; PAM sequence: TTT
tgaaacctgtaaccattatt

SEQ ID NO: 83547 - DNA, 20 bp, Artificial Sequence
  Description of Artificial Sequence: Synthetic oligonucleotide
  Target: ATXN2; (-) strand; PAM type: YTN; PAM sequence: TTA
ataaggtaatatatgtgaag

SEQ ID NO: 83548 - DNA, 20 bp, Artificial Sequence
  Description of Artificial Sequence: Synthetic oligonucleotide
  Target: ATXN2; (-) strand; PAM type: YTN; PAM sequence: TTT
aataaggtaatatatgtgaa

SEQ ID NO: 83549 - DNA, 20 bp, Artificial Sequence
  Description of Artificial Sequence: Synthetic oligonucleotide
  Target: ATXN2; (-) strand; PAM type: YTN; PAM sequence: CTG
aggatttaataaggtaatat

SEQ ID NO: 83550 - DNA, 20 bp, Artificial Sequence
  Description of Artificial Sequence: Synthetic oligonucleotide
  Target: ATXN2; (-) strand; PAM type: YTN; PAM sequence: CTC
tgaggatttaataaggtaat

SEQ ID NO: 83551 - DNA, 20 bp, Artificial Sequence
  Description of Artificial Sequence: Synthetic oligonucleotide
  Target: ATXN2; (-) strand; PAM type: YTN; PAM sequence: TTC
ctctgaggatttaataaggt

SEQ ID NO: 83552 - DNA, 20 bp, Artificial Sequence
  Description of Artificial Sequence: Synthetic oligonucleotide
  Target: ATXN2; (-) strand; PAM type: YTN; PAM sequence: TTG
gttcctctgaggatttaata

SEQ ID NO: 83553 - DNA, 20 bp, Artificial Sequence
  Description of Artificial Sequence: Synthetic oligonucleotide
  Target: ATXN2; (-) strand; PAM type: YTN; PAM sequence: TTT
ggttcctctgaggatttaat

SEQ ID NO: 83554 - DNA, 20 bp, Artificial Sequence
  Description of Artificial Sequence: Synthetic oligonucleotide
  Target: ATXN2; (-) strand; PAM type: YTN; PAM sequence: TTA
atttggttcctctgaggatt

SEQ ID NO: 83555 - DNA, 20 bp, Artificial Sequence
  Description of Artificial Sequence: Synthetic oligonucleotide
  Target: ATXN2; (-) strand; PAM type: YTN; PAM sequence: TTT
aatttggttcctctgaggat

SEQ ID NO: 83556 - DNA, 20 bp, Artificial Sequence
  Description of Artificial Sequence: Synthetic oligonucleotide
  Target: ATXN2; (-) strand; PAM type: YTN; PAM sequence: TTG
agtttaatttggttcctctg

SEQ ID NO: 83557 - DNA, 20 bp, Artificial Sequence
  Description of Artificial Sequence: Synthetic oligonucleotide
  Target: ATXN2; (-) strand; PAM type: YTN; PAM sequence: TTT
gagtttaatttggttcctct

SEQ ID NO: 83558 - DNA, 20 bp, Artificial Sequence
  Description of Artificial Sequence: Synthetic oligonucleotide
  Target: ATXN2; (-) strand; PAM type: YTN; PAM sequence: TTG
atatttgagtttaatttggt

SEQ ID NO: 83559 - DNA, 20 bp, Artificial Sequence
  Description of Artificial Sequence: Synthetic oligonucleotide
  Target: ATXN2; (-) strand; PAM type: YTN; PAM sequence: TTA
ttgatatttgagtttaattt

SEQ ID NO: 83560 - DNA, 20 bp, Artificial Sequence
  Description of Artificial Sequence: Synthetic oligonucleotide
  Target: ATXN2; (-) strand; PAM type: YTN; PAM sequence: CTG
gattattgatatttgagttt

SEQ ID NO: 83561 - DNA, 20 bp, Artificial Sequence
  Description of Artificial Sequence: Synthetic oligonucleotide
  Target: ATXN2; (-) strand; PAM type: YTN; PAM sequence: TTA
ctggattattgatatttgag

SEQ ID NO: 83562 - DNA, 20 bp, Artificial Sequence
  Description of Artificial Sequence: Synthetic oligonucleotide
  Target: ATXN2; (-) strand; PAM type: YTN; PAM sequence: TTA
gttactggattattgatatt

SEQ ID NO: 83563 - DNA, 20 bp, Artificial Sequence
  Description of Artificial Sequence: Synthetic oligonucleotide
  Target: ATXN2; (-) strand; PAM type: YTN; PAM sequence: TTG
ttagttactggattattgat

SEQ ID NO: 83564 - DNA, 20 bp, Artificial Sequence
  Description of Artificial Sequence: Synthetic oligonucleotide
  Target: ATXN2; (-) strand; PAM type: YTN; PAM sequence: TTT
gttagttactggattattga

SEQ ID NO: 83565 - DNA, 20 bp, Artificial Sequence
  Description of Artificial Sequence: Synthetic oligonucleotide
  Target: ATXN2; (-) strand; PAM type: YTN; PAM sequence: TTT
tgttagttactggattattg

SEQ ID NO: 83566 - DNA, 20 bp, Artificial Sequence
  Description of Artificial Sequence: Synthetic oligonucleotide
  Target: ATXN2; (-) strand; PAM type: YTN; PAM sequence: CTT
ttgttagttactggattatt

SEQ ID NO: 83567 - DNA, 20 bp, Artificial Sequence
  Description of Artificial Sequence: Synthetic oligonucleotide
  Target: ATXN2; (-) strand; PAM type: YTN; PAM sequence: TTA
agtgcttttgttagttactg

SEQ ID NO: 83568 - DNA, 20 bp, Artificial Sequence
  Description of Artificial Sequence: Synthetic oligonucleotide
  Target: ATXN2; (-) strand; PAM type: YTN; PAM sequence: TTA
ttaagtgcttttgttagtta

SEQ ID NO: 83569 - DNA, 20 bp, Artificial Sequence
  Description of Artificial Sequence: Synthetic oligonucleotide
  Target: ATXN2; (-) strand; PAM type: YTN; PAM sequence: CTG
tcaagtgcatatattattaa

SEQ ID NO: 83570 - DNA, 20 bp, Artificial Sequence
  Description of Artificial Sequence: Synthetic oligonucleotide
  Target: ATXN2; (-) strand; PAM type: YTN; PAM sequence: TTA
ctgtcaagtgcatatattat

SEQ ID NO: 83571 - DNA, 20 bp, Artificial Sequence
  Description of Artificial Sequence: Synthetic oligonucleotide
  Target: ATXN2; (-) strand; PAM type: YTN; PAM sequence: TTT
actgtcaagtgcatatatta

SEQ ID NO: 83572 - DNA, 20 bp, Artificial Sequence
  Description of Artificial Sequence: Synthetic oligonucleotide
  Target: ATXN2; (-) strand; PAM type: YTN; PAM sequence: TTT
tactgtcaagtgcatatatt

SEQ ID NO: 83573 - DNA, 20 bp, Artificial Sequence
  Description of Artificial Sequence: Synthetic oligonucleotide
  Target: ATXN2; (-) strand; PAM type: YTN; PAM sequence: TTT
ttactgtcaagtgcatatat

SEQ ID NO: 83574 - DNA, 20 bp, Artificial Sequence
  Description of Artificial Sequence: Synthetic oligonucleotide
  Target: ATXN2; (-) strand; PAM type: YTN; PAM sequence: TTG
catttttactgtcaagtgca

SEQ ID NO: 83575 - DNA, 20 bp, Artificial Sequence
  Description of Artificial Sequence: Synthetic oligonucleotide
  Target: ATXN2; (-) strand; PAM type: YTN; PAM sequence: TTA
aaggaaaaattgcattttta

SEQ ID NO: 83576 - DNA, 20 bp, Artificial Sequence
  Description of Artificial Sequence: Synthetic oligonucleotide
  Target: ATXN2; (-) strand; PAM type: YTN; PAM sequence: TTT
aaaggaaaaattgcattttt

SEQ ID NO: 83577 - DNA, 20 bp, Artificial Sequence
  Description of Artificial Sequence: Synthetic oligonucleotide
  Target: ATXN2; (-) strand; PAM type: YTN; PAM sequence: TTT
taaaggaaaaattgcatttt

SEQ ID NO: 83578 - DNA, 20 bp, Artificial Sequence
  Description of Artificial Sequence: Synthetic oligonucleotide
  Target: ATXN2; (-) strand; PAM type: YTN; PAM sequence: TTT
ttaaaggaaaaattgcattt

SEQ ID NO: 83579 - DNA, 20 bp, Artificial Sequence
  Description of Artificial Sequence: Synthetic oligonucleotide
  Target: ATXN2; (-) strand; PAM type: YTN; PAM sequence: TTG
tggggaatttttaaaggaaa

SEQ ID NO: 83580 - DNA, 20 bp, Artificial Sequence
  Description of Artificial Sequence: Synthetic oligonucleotide
  Target: ATXN2; (-) strand; PAM type: YTN; PAM sequence: TTG
tcaaatattgtggggaattt

SEQ ID NO: 83581 - DNA, 20 bp, Artificial Sequence
  Description of Artificial Sequence: Synthetic oligonucleotide
  Target: ATXN2; (-) strand; PAM type: YTN; PAM sequence: TTT
gtcaaatattgtggggaatt

SEQ ID NO: 83582 - DNA, 20 bp, Artificial Sequence
  Description of Artificial Sequence: Synthetic oligonucleotide
  Target: ATXN2; (-) strand; PAM type: YTN; PAM sequence: TTG
tagtttgtcaaatattgtgg

SEQ ID NO: 83583 - DNA, 20 bp, Artificial Sequence
  Description of Artificial Sequence: Synthetic oligonucleotide
  Target: ATXN2; (-) strand; PAM type: YTN; PAM sequence: TTT
gtagtttgtcaaatattgtg

SEQ ID NO: 83584 - DNA, 20 bp, Artificial Sequence
  Description of Artificial Sequence: Synthetic oligonucleotide
  Target: ATXN2; (-) strand; PAM type: YTN; PAM sequence: CTT
tgtagtttgtcaaatattgt

SEQ ID NO: 83585 - DNA, 20 bp, Artificial Sequence
  Description of Artificial Sequence: Synthetic oligonucleotide
  Target: ATXN2; (-) strand; PAM type: YTN; PAM sequence: TTC
tttgtagtttgtcaaatatt

SEQ ID NO: 83586 - DNA, 20 bp, Artificial Sequence
  Description of Artificial Sequence: Synthetic oligonucleotide
  Target: ATXN2; (-) strand; PAM type: YTN; PAM sequence: TTT
ctttgtagtttgtcaaatat

SEQ ID NO: 83587 - DNA, 20 bp, Artificial Sequence
  Description of Artificial Sequence: Synthetic oligonucleotide
  Target: ATXN2; (-) strand; PAM type: YTN; PAM sequence: TTC
catggaatggtttctttgta

SEQ ID NO: 83588 - DNA, 20 bp, Artificial Sequence
  Description of Artificial Sequence: Synthetic oligonucleotide
  Target: ATXN2; (-) strand; PAM type: YTN; PAM sequence: CTT
ccatggaatggtttctttgt

SEQ ID NO: 83589 - DNA, 20 bp, Artificial Sequence
  Description of Artificial Sequence: Synthetic oligonucleotide
  Target: ATXN2; (-) strand; PAM type: YTN; PAM sequence: CTC
ttccatggaatggtttcttt

SEQ ID NO: 83590 - DNA, 20 bp, Artificial Sequence
  Description of Artificial Sequence: Synthetic oligonucleotide
  Target: ATXN2; (-) strand; PAM type: YTN; PAM sequence: TTG
ctcttccatggaatggtttc

SEQ ID NO: 83591 - DNA, 20 bp, Artificial Sequence
  Description of Artificial Sequence: Synthetic oligonucleotide
  Target: ATXN2; (-) strand; PAM type: YTN; PAM sequence: TTC
cagtgtcaagaaggttgctc

SEQ ID NO: 83592 - DNA, 20 bp, Artificial Sequence
  Description of Artificial Sequence: Synthetic oligonucleotide
  Target: ATXN2; (-) strand; PAM type: YTN; PAM sequence: CTT
ccagtgtcaagaaggttgct

SEQ ID NO: 83593 - DNA, 20 bp, Artificial Sequence
  Description of Artificial Sequence: Synthetic oligonucleotide
  Target: ATXN2; (-) strand; PAM type: YTN; PAM sequence: TTA
cttccagtgtcaagaaggtt

SEQ ID NO: 83594 - DNA, 20 bp, Artificial Sequence
  Description of Artificial Sequence: Synthetic oligonucleotide
  Target: ATXN2; (-) strand; PAM type: YTN; PAM sequence: TTG
tattacttccagtgtcaaga

SEQ ID NO: 83595 - DNA, 20 bp, Artificial Sequence
  Description of Artificial Sequence: Synthetic oligonucleotide
  Target: ATXN2; (-) strand; PAM type: YTN; PAM sequence: CTT
gtattacttccagtgtcaag

SEQ ID NO: 83596 - DNA, 20 bp, Artificial Sequence
  Description of Artificial Sequence: Synthetic oligonucleotide
  Target: ATXN2; (-) strand; PAM type: YTN; PAM sequence: TTA
gaagacttgtattacttcca

SEQ ID NO: 83597 - DNA, 20 bp, Artificial Sequence
  Description of Artificial Sequence: Synthetic oligonucleotide
  Target: ATXN2; (-) strand; PAM type: YTN; PAM sequence: TTT
agaagacttgtattacttcc

SEQ ID NO: 83598 - DNA, 20 bp, Artificial Sequence
  Description of Artificial Sequence: Synthetic oligonucleotide
  Target: ATXN2; (-) strand; PAM type: YTN; PAM sequence: CTT
tagaagacttgtattacttc

SEQ ID NO: 83599 - DNA, 20 bp, Artificial Sequence
  Description of Artificial Sequence: Synthetic oligonucleotide
  Target: ATXN2; (-) strand; PAM type: YTN; PAM sequence: TTC
tttagaagacttgtattact

SEQ ID NO: 83600 - DNA, 20 bp, Artificial Sequence
  Description of Artificial Sequence: Synthetic oligonucleotide
  Target: ATXN2; (-) strand; PAM type: YTN; PAM sequence: TTA
ttctttagaagacttgtatt

SEQ ID NO: 83601 - DNA, 20 bp, Artificial Sequence
  Description of Artificial Sequence: Synthetic oligonucleotide
  Target: ATXN2; (-) strand; PAM type: YTN; PAM sequence: CTA
ttattctttagaagacttgt

SEQ ID NO: 83602 - DNA, 20 bp, Artificial Sequence
  Description of Artificial Sequence: Synthetic oligonucleotide
  Target: ATXN2; (-) strand; PAM type: YTN; PAM sequence: CTC
tattattctttagaagactt

SEQ ID NO: 83603 - DNA, 20 bp, Artificial Sequence
  Description of Artificial Sequence: Synthetic oligonucleotide
  Target: ATXN2; (-) strand; PAM type: YTN; PAM sequence: CTA
gcggtgctctattattcttt

SEQ ID NO: 83604 - DNA, 20 bp, Artificial Sequence
  Description of Artificial Sequence: Synthetic oligonucleotide
  Target: ATXN2; (-) strand; PAM type: YTN; PAM sequence: TTG
ctagcggtgctctattattc

SEQ ID NO: 83605 - DNA, 20 bp, Artificial Sequence
  Description of Artificial Sequence: Synthetic oligonucleotide
  Target: ATXN2; (-) strand; PAM type: YTN; PAM sequence: CTT
gctagcggtgctctattatt

SEQ ID NO: 83606 - DNA, 20 bp, Artificial Sequence
  Description of Artificial Sequence: Synthetic oligonucleotide
  Target: ATXN2; (-) strand; PAM type: YTN; PAM sequence: CTC
ttgctagcggtgctctatta

SEQ ID NO: 83607 - DNA, 20 bp, Artificial Sequence
  Description of Artificial Sequence: Synthetic oligonucleotide
  Target: ATXN2; (-) strand; PAM type: YTN; PAM sequence: TTA
tggctcttgctagcggtgct

SEQ ID NO: 83608 - DNA, 20 bp, Artificial Sequence
  Description of Artificial Sequence: Synthetic oligonucleotide
  Target: ATXN2; (-) strand; PAM type: YTN; PAM sequence: TTT
atggctcttgctagcggtgc

SEQ ID NO: 83609 - DNA, 20 bp, Artificial Sequence
  Description of Artificial Sequence: Synthetic oligonucleotide
  Target: ATXN2; (-) strand; PAM type: YTN; PAM sequence: TTT
tatggctcttgctagcggtg

SEQ ID NO: 83610 - DNA, 20 bp, Artificial Sequence
  Description of Artificial Sequence: Synthetic oligonucleotide
  Target: ATXN2; (-) strand; PAM type: YTN; PAM sequence: TTT
ttatggctcttgctagcggt

SEQ ID NO: 83611 - DNA, 20 bp, Artificial Sequence
  Description of Artificial Sequence: Synthetic oligonucleotide
  Target: ATXN2; (-) strand; PAM type: YTN; PAM sequence: TTC
aggatttttatggctcttgc

SEQ ID NO: 83612 - DNA, 20 bp, Artificial Sequence
  Description of Artificial Sequence: Synthetic oligonucleotide
  Target: ATXN2; (-) strand; PAM type: YTN; PAM sequence: CTT
caggatttttatggctcttg

SEQ ID NO: 83613 - DNA, 20 bp, Artificial Sequence
  Description of Artificial Sequence: Synthetic oligonucleotide
  Target: ATXN2; (-) strand; PAM type: YTN; PAM sequence: TTC
agagggcttcaggattttta

SEQ ID NO: 83614 - DNA, 20 bp, Artificial Sequence
  Description of Artificial Sequence: Synthetic oligonucleotide
  Target: ATXN2; (-) strand; PAM type: YTN; PAM sequence: CTA
gttcagagggcttcaggatt

SEQ ID NO: 83615 - DNA, 20 bp, Artificial Sequence
  Description of Artificial Sequence: Synthetic oligonucleotide
  Target: ATXN2; (-) strand; PAM type: YTN; PAM sequence: TTA
ctagttcagagggcttcagg

SEQ ID NO: 83616 - DNA, 20 bp, Artificial Sequence
  Description of Artificial Sequence: Synthetic oligonucleotide
  Target: ATXN2; (-) strand; PAM type: YTN; PAM sequence: TTT
actagttcagagggcttcag

SEQ ID NO: 83617 - DNA, 20 bp, Artificial Sequence
  Description of Artificial Sequence: Synthetic oligonucleotide
  Target: ATXN2; (-) strand; PAM type: YTN; PAM sequence: TTT
tactagttcagagggcttca

SEQ ID NO: 83618 - DNA, 20 bp, Artificial Sequence
  Description of Artificial Sequence: Synthetic oligonucleotide
  Target: ATXN2; (-) strand; PAM type: YTN; PAM sequence: TTA
ccaagagtggttttactagt

SEQ ID NO: 83619 - DNA, 20 bp, Artificial Sequence
  Description of Artificial Sequence: Synthetic oligonucleotide
  Target: ATXN2; (-) strand; PAM type: YTN; PAM sequence: TTA
gagaaagttaccaagagtgg

SEQ ID NO: 83620 - DNA, 20 bp, Artificial Sequence
  Description of Artificial Sequence: Synthetic oligonucleotide
  Target: ATXN2; (-) strand; PAM type: YTN; PAM sequence: CTT
agagaaagttaccaagagtg

SEQ ID NO: 83621 - DNA, 20 bp, Artificial Sequence
  Description of Artificial Sequence: Synthetic oligonucleotide
  Target: ATXN2; (-) strand; PAM type: YTN; PAM sequence: TTC
cttagagaaagttaccaaga

SEQ ID NO: 83622 - DNA, 20 bp, Artificial Sequence
  Description of Artificial Sequence: Synthetic oligonucleotide
  Target: ATXN2; (-) strand; PAM type: YTN; PAM sequence: TTT
ccttagagaaagttaccaag

SEQ ID NO: 83623 - DNA, 20 bp, Artificial Sequence
  Description of Artificial Sequence: Synthetic oligonucleotide
  Target: ATXN2; (-) strand; PAM type: YTN; PAM sequence: TTA
tttccttagagaaagttacc

SEQ ID NO: 83624 - DNA, 20 bp, Artificial Sequence
  Description of Artificial Sequence: Synthetic oligonucleotide
  Target: ATXN2; (-) strand; PAM type: YTN; PAM sequence: TTC
agtgtaattatttccttaga

SEQ ID NO: 83625 - DNA, 20 bp, Artificial Sequence
  Description of Artificial Sequence: Synthetic oligonucleotide
  Target: ATXN2; (-) strand; PAM type: YTN; PAM sequence: CTT
cagtgtaattatttccttag

SEQ ID NO: 83626 - DNA, 20 bp, Artificial Sequence
  Description of Artificial Sequence: Synthetic oligonucleotide
  Target: ATXN2; (-) strand; PAM type: YTN; PAM sequence: TTG
cttcagtgtaattatttcct

SEQ ID NO: 83627 - DNA, 20 bp, Artificial Sequence
  Description of Artificial Sequence: Synthetic oligonucleotide
  Target: ATXN2; (-) strand; PAM type: YTN; PAM sequence: TTT
gcttcagtgtaattatttcc

SEQ ID NO: 83628 - DNA, 20 bp, Artificial Sequence
  Description of Artificial Sequence: Synthetic oligonucleotide
  Target: ATXN2; (-) strand; PAM type: YTN; PAM sequence: TTT
tgcttcagtgtaattatttc

SEQ ID NO: 83629 - DNA, 20 bp, Artificial Sequence
  Description of Artificial Sequence: Synthetic oligonucleotide
  Target: ATXN2; (-) strand; PAM type: YTN; PAM sequence: TTT
ttgcttcagtgtaattattt

SEQ ID NO: 83630 - DNA, 20 bp, Artificial Sequence
  Description of Artificial Sequence: Synthetic oligonucleotide
  Target: ATXN2; (-) strand; PAM type: YTN; PAM sequence: CTT
tttgcttcagtgtaattatt

SEQ ID NO: 83631 - DNA, 20 bp, Artificial Sequence
  Description of Artificial Sequence: Synthetic oligonucleotide
  Target: ATXN2; (-) strand; PAM type: YTN; PAM sequence: TTA
aatagctttttgcttcagtg

SEQ ID NO: 83632 - DNA, 20 bp, Artificial Sequence
  Description of Artificial Sequence: Synthetic oligonucleotide
  Target: ATXN2; (-) strand; PAM type: YTN; PAM sequence: TTT
aaatagctttttgcttcagt

SEQ ID NO: 83633 - DNA, 20 bp, Artificial Sequence
  Description of Artificial Sequence: Synthetic oligonucleotide
  Target: ATXN2; (-) strand; PAM type: YTN; PAM sequence: TTT
taaatagctttttgcttcag

SEQ ID NO: 83634 - DNA, 20 bp, Artificial Sequence
  Description of Artificial Sequence: Synthetic oligonucleotide
  Target: ATXN2; (-) strand; PAM type: YTN; PAM sequence: TTT
ttaaatagctttttgcttca

SEQ ID NO: 83635 - DNA, 20 bp, Artificial Sequence
  Description of Artificial Sequence: Synthetic oligonucleotide
  Target: ATXN2; (-) strand; PAM type: YTN; PAM sequence: TTA
tagatagtggtgcagtgaac

SEQ ID NO: 83636 - DNA, 20 bp, Artificial Sequence
  Description of Artificial Sequence: Synthetic oligonucleotide
  Target: ATXN2; (-) strand; PAM type: YTN; PAM sequence: TTG
ttatagatagtggtgcagtg

SEQ ID NO: 83637 - DNA, 20 bp, Artificial Sequence
  Description of Artificial Sequence: Synthetic oligonucleotide
  Target: ATXN2; (-) strand; PAM type: YTN; PAM sequence: TTT
gttatagatagtggtgcagt

SEQ ID NO: 83638 - DNA, 20 bp, Artificial Sequence
  Description of Artificial Sequence: Synthetic oligonucleotide
  Target: ATXN2; (-) strand; PAM type: YTN; PAM sequence: TTT
tgttatagatagtggtgcag

SEQ ID NO: 83639 - DNA, 20 bp, Artificial Sequence
  Description of Artificial Sequence: Synthetic oligonucleotide
  Target: ATXN2; (-) strand; PAM type: YTN; PAM sequence: TTT
ttgttatagatagtggtgca

SEQ ID NO: 83640 - DNA, 20 bp, Artificial Sequence
  Description of Artificial Sequence: Synthetic oligonucleotide
  Target: ATXN2; (-) strand; PAM type: YTN; PAM sequence: TTT
tttgttatagatagtggtgc

SEQ ID NO: 83641 - DNA, 20 bp, Artificial Sequence
  Description of Artificial Sequence: Synthetic oligonucleotide
  Target: ATXN2; (-) strand; PAM type: YTN; PAM sequence: CTT
ttttgttatagatagtggtg

SEQ ID NO: 83642 - DNA, 20 bp, Artificial Sequence
  Description of Artificial Sequence: Synthetic oligonucleotide
  Target: ATXN2; (-) strand; PAM type: YTN; PAM sequence: TTC
cacttttttgttatagatag

SEQ ID NO: 83643 - DNA, 20 bp, Artificial Sequence
  Description of Artificial Sequence: Synthetic oligonucleotide
  Target: ATXN2; (-) strand; PAM type: YTN; PAM sequence: TTT
ccacttttttgttatagata

SEQ ID NO: 83644 - DNA, 20 bp, Artificial Sequence
  Description of Artificial Sequence: Synthetic oligonucleotide
  Target: ATXN2; (-) strand; PAM type: YTN; PAM sequence: TTG
ggtttccacttttttgttat

SEQ ID NO: 83645 - DNA, 20 bp, Artificial Sequence
  Description of Artificial Sequence: Synthetic oligonucleotide
  Target: ATXN2; (-) strand; PAM type: YTN; PAM sequence: TTG
ggaattgggtttccactttt

SEQ ID NO: 83646 - DNA, 20 bp, Artificial Sequence
  Description of Artificial Sequence: Synthetic oligonucleotide
  Target: ATXN2; (-) strand; PAM type: YTN; PAM sequence: TTG
ttgggaattgggtttccact

SEQ ID NO: 83647 - DNA, 20 bp, Artificial Sequence
  Description of Artificial Sequence: Synthetic oligonucleotide
  Target: ATXN2; (-) strand; PAM type: YTN; PAM sequence: CTA
ttgttgggaattgggtttcc

SEQ ID NO: 83648 - DNA, 20 bp, Artificial Sequence
  Description of Artificial Sequence: Synthetic oligonucleotide
  Target: ATXN2; (-) strand; PAM type: YTN; PAM sequence: TTC
tattgttgggaattgggttt

SEQ ID NO: 83649 - DNA, 20 bp, Artificial Sequence
  Description of Artificial Sequence: Synthetic oligonucleotide
  Target: ATXN2; (-) strand; PAM type: YTN; PAM sequence: TTA
accattctattgttgggaat

SEQ ID NO: 83650 - DNA, 20 bp, Artificial Sequence
  Description of Artificial Sequence: Synthetic oligonucleotide
  Target: ATXN2; (-) strand; PAM type: YTN; PAM sequence: CTT
aaccattctattgttgggaa

SEQ ID NO: 83651 - DNA, 20 bp, Artificial Sequence
  Description of Artificial Sequence: Synthetic oligonucleotide
  Target: ATXN2; (-) strand; PAM type: YTN; PAM sequence: TTA
cttaaccattctattgttgg

SEQ ID NO: 83652 - DNA, 20 bp, Artificial Sequence
  Description of Artificial Sequence: Synthetic oligonucleotide
  Target: ATXN2; (-) strand; PAM type: YTN; PAM sequence: TTT
acttaaccattctattgttg

SEQ ID NO: 83653 - DNA, 20 bp, Artificial Sequence
  Description of Artificial Sequence: Synthetic oligonucleotide
  Target: ATXN2; (-) strand; PAM type: YTN; PAM sequence: TTT
tacttaaccattctattgtt

SEQ ID NO: 83654 - DNA, 20 bp, Artificial Sequence
  Description of Artificial Sequence: Synthetic oligonucleotide
  Target: ATXN2; (-) strand; PAM type: YTN; PAM sequence: TTT
ttacttaaccattctattgt

SEQ ID NO: 83655 - DNA, 20 bp, Artificial Sequence
  Description of Artificial Sequence: Synthetic oligonucleotide
  Target: ATXN2; (-) strand; PAM type: YTN; PAM sequence: CTG
taaggtttttacttaaccat

SEQ ID NO: 83656 - DNA, 20 bp, Artificial Sequence
  Description of Artificial Sequence: Synthetic oligonucleotide
  Target: ATXN2; (-) strand; PAM type: YTN; PAM sequence: CTG
cgcccggctgtaaggttttt

SEQ ID NO: 83657 - DNA, 20 bp, Artificial Sequence
  Description of Artificial Sequence: Synthetic oligonucleotide
  Target: ATXN2; (-) strand; PAM type: YTN; PAM sequence: TTG
caggcgtgagccactgcgcc

SEQ ID NO: 83658 - DNA, 20 bp, Artificial Sequence
  Description of Artificial Sequence: Synthetic oligonucleotide
  Target: ATXN2; (-) strand; PAM type: YTN; PAM sequence: CTG
ggattgcaggcgtgagccac

SEQ ID NO: 83659 - DNA, 20 bp, Artificial Sequence
  Description of Artificial Sequence: Synthetic oligonucleotide
  Target: ATXN2; (-) strand; PAM type: YTN; PAM sequence: CTC
ccaaagtgctgggattgcag

SEQ ID NO: 83660 - DNA, 20 bp, Artificial Sequence
  Description of Artificial Sequence: Synthetic oligonucleotide
  Target: ATXN2; (-) strand; PAM type: YTN; PAM sequence: CTC
ggcctcccaaagtgctggga

SEQ ID NO: 83661 - DNA, 20 bp, Artificial Sequence
  Description of Artificial Sequence: Synthetic oligonucleotide
  Target: ATXN2; (-) strand; PAM type: YTN; PAM sequence: CTC
aggtgatgcgcccgcctcgg

SEQ ID NO: 83662 - DNA, 20 bp, Artificial Sequence
  Description of Artificial Sequence: Synthetic oligonucleotide
  Target: ATXN2; (-) strand; PAM type: YTN; PAM sequence: CTA
ccgacctcaggtgatgcgcc

SEQ ID NO: 83663 - DNA, 20 bp, Artificial Sequence
  Description of Artificial Sequence: Synthetic oligonucleotide
  Target: ATXN2; (-) strand; PAM type: YTN; PAM sequence: CTC
gtactaccgacctcaggtga

SEQ ID NO: 83664 - DNA, 20 bp, Artificial Sequence
  Description of Artificial Sequence: Synthetic oligonucleotide
  Target: ATXN2; (-) strand; PAM type: YTN; PAM sequence: TTG
gtctcgtactaccgacctca

SEQ ID NO: 83665 - DNA, 20 bp, Artificial Sequence
  Description of Artificial Sequence: Synthetic oligonucleotide
  Target: ATXN2; (-) strand; PAM type: YTN; PAM sequence: TTT
ggtctcgtactaccgacctc

SEQ ID NO: 83666 - DNA, 20 bp, Artificial Sequence
  Description of Artificial Sequence: Synthetic oligonucleotide
  Target: ATXN2; (-) strand; PAM type: YTN; PAM sequence: TTG
gccagtttggtctcgtacta

SEQ ID NO: 83667 - DNA, 20 bp, Artificial Sequence
  Description of Artificial Sequence: Synthetic oligonucleotide
  Target: ATXN2; (-) strand; PAM type: YTN; PAM sequence: TTC
accatgttggccagtttggt

SEQ ID NO: 83668 - DNA, 20 bp, Artificial Sequence
  Description of Artificial Sequence: Synthetic oligonucleotide
  Target: ATXN2; (-) strand; PAM type: YTN; PAM sequence: TTT
caccatgttggccagtttgg

SEQ ID NO: 83669 - DNA, 20 bp, Artificial Sequence
  Description of Artificial Sequence: Synthetic oligonucleotide
  Target: ATXN2; (-) strand; PAM type: YTN; PAM sequence: TTG
gtagagacaaggtttcacca

SEQ ID NO: 83670 - DNA, 20 bp, Artificial Sequence
  Description of Artificial Sequence: Synthetic oligonucleotide
  Target: ATXN2; (-) strand; PAM type: YTN; PAM sequence: TTT
ggtagagacaaggtttcacc

SEQ ID NO: 83671 - DNA, 20 bp, Artificial Sequence
  Description of Artificial Sequence: Synthetic oligonucleotide
  Target: ATXN2; (-) strand; PAM type: YTN; PAM sequence: TTT
tggtagagacaaggtttcac

SEQ ID NO: 83672 - DNA, 20 bp, Artificial Sequence
  Description of Artificial Sequence: Synthetic oligonucleotide
  Target: ATXN2; (-) strand; PAM type: YTN; PAM sequence: TTT
ttggtagagacaaggtttca

SEQ ID NO: 83673 - DNA, 20 bp, Artificial Sequence
  Description of Artificial Sequence: Synthetic oligonucleotide
  Target: ATXN2; (-) strand; PAM type: YTN; PAM sequence: TTG
tatttttggtagagacaagg

SEQ ID NO: 83674 - DNA, 20 bp, Artificial Sequence
  Description of Artificial Sequence: Synthetic oligonucleotide
  Target: ATXN2; (-) strand; PAM type: YTN; PAM sequence: TTT
gtatttttggtagagacaag

SEQ ID NO: 83675 - DNA, 20 bp, Artificial Sequence
  Description of Artificial Sequence: Synthetic oligonucleotide
  Target: ATXN2; (-) strand; PAM type: YTN; PAM sequence: TTT
tgtatttttggtagagacaa

SEQ ID NO: 83676 - DNA, 20 bp, Artificial Sequence
  Description of Artificial Sequence: Synthetic oligonucleotide
  Target: ATXN2; (-) strand; PAM type: YTN; PAM sequence: TTT
ttgtatttttggtagagaca

SEQ ID NO: 83677 - DNA, 20 bp, Artificial Sequence
  Description of Artificial Sequence: Synthetic oligonucleotide
  Target: ATXN2; (-) strand; PAM type: YTN; PAM sequence: CTA
atttttgtatttttggtaga

SEQ ID NO: 83678 - DNA, 20 bp, Artificial Sequence
  Description of Artificial Sequence: Synthetic oligonucleotide
  Target: ATXN2; (-) strand; PAM type: YTN; PAM sequence: TTG
gctaatttttgtatttttgg

SEQ ID NO: 83679 - DNA, 20 bp, Artificial Sequence
  Description of Artificial Sequence: Synthetic oligonucleotide
  Target: ATXN2; (-) strand; PAM type: YTN; PAM sequence: CTT
ggctaatttttgtatttttg

SEQ ID NO: 83680 - DNA, 20 bp, Artificial Sequence
  Description of Artificial Sequence: Synthetic oligonucleotide
  Target: ATXN2; (-) strand; PAM type: YTN; PAM sequence: TTC
caccacgcttggctaatttt

SEQ ID NO: 83681 - DNA, 20 bp, Artificial Sequence
  Description of Artificial Sequence: Synthetic oligonucleotide
  Target: ATXN2; (-) strand; PAM type: YTN; PAM sequence: CTA
caggaatgttccaccacgct

SEQ ID NO: 83682 - DNA, 20 bp, Artificial Sequence
  Description of Artificial Sequence: Synthetic oligonucleotide
  Target: ATXN2; (-) strand; PAM type: YTN; PAM sequence: CTG
gggctacaggaatgttccac

SEQ ID NO: 83683 - DNA, 20 bp, Artificial Sequence
  Description of Artificial Sequence: Synthetic oligonucleotide
  Target: ATXN2; (-) strand; PAM type: YTN; PAM sequence: TTG
agtagctggggctacaggaa

SEQ ID NO: 83684 - DNA, 20 bp, Artificial Sequence
  Description of Artificial Sequence: Synthetic oligonucleotide
  Target: ATXN2; (-) strand; PAM type: YTN; PAM sequence: CTT
gagtagctggggctacagga

SEQ ID NO: 83685 - DNA, 20 bp, Artificial Sequence
  Description of Artificial Sequence: Synthetic oligonucleotide
  Target: ATXN2; (-) strand; PAM type: YTN; PAM sequence: CTC
ttgagtagctggggctacag

SEQ ID NO: 83686 - DNA, 20 bp, Artificial Sequence
  Description of Artificial Sequence: Synthetic oligonucleotide
  Target: ATXN2; (-) strand; PAM type: YTN; PAM sequence: CTC
agcctcttgagtagctgggg

SEQ ID NO: 83687 - DNA, 20 bp, Artificial Sequence
  Description of Artificial Sequence: Synthetic oligonucleotide
  Target: ATXN2; (-) strand; PAM type: YTN; PAM sequence: CTC
ccacctcagcctcttgagta

SEQ ID NO: 83688 - DNA, 20 bp, Artificial Sequence
  Description of Artificial Sequence: Synthetic oligonucleotide
  Target: ATXN2; (-) strand; PAM type: YTN; PAM sequence: TTC
tcccacctcagcctcttgag

SEQ ID NO: 83689 - DNA, 20 bp, Artificial Sequence
  Description of Artificial Sequence: Synthetic oligonucleotide
  Target: ATXN2; (-) strand; PAM type: YTN; PAM sequence: TTC
aagcgattctcccacctcag

SEQ ID NO: 83690 - DNA, 20 bp, Artificial Sequence
  Description of Artificial Sequence: Synthetic oligonucleotide
  Target: ATXN2; (-) strand; PAM type: YTN; PAM sequence: CTG
ggttcaagcgattctcccac

SEQ ID NO: 83691 - DNA, 20 bp, Artificial Sequence
  Description of Artificial Sequence: Synthetic oligonucleotide
  Target: ATXN2; (-) strand; PAM type: YTN; PAM sequence: CTC
ctgggttcaagcgattctcc

SEQ ID NO: 83692 - DNA, 20 bp, Artificial Sequence
  Description of Artificial Sequence: Synthetic oligonucleotide
  Target: ATXN2; (-) strand; PAM type: YTN; PAM sequence: CTG
actcctgggttcaagcgatt

SEQ ID NO: 83693 - DNA, 20 bp, Artificial Sequence
  Description of Artificial Sequence: Synthetic oligonucleotide
  Target: ATXN2; (-) strand; PAM type: YTN; PAM sequence: CTC
tgactcctgggttcaagcga

SEQ ID NO: 83694 - DNA, 20 bp, Artificial Sequence
  Description of Artificial Sequence: Synthetic oligonucleotide
  Target: ATXN2; (-) strand; PAM type: YTN; PAM sequence: CTG
cagcctctgactcctgggtt

SEQ ID NO: 83695 - DNA, 20 bp, Artificial Sequence
  Description of Artificial Sequence: Synthetic oligonucleotide
  Target: ATXN2; (-) strand; PAM type: YTN; PAM sequence: CTC
actgcagcctctgactcctg

SEQ ID NO: 83696 - DNA, 20 bp, Artificial Sequence
  Description of Artificial Sequence: Synthetic oligonucleotide
  Target: ATXN2; (-) strand; PAM type: YTN; PAM sequence: CTC
agctcactgcagcctctgac

SEQ ID NO: 83697 - DNA, 20 bp, Artificial Sequence
  Description of Artificial Sequence: Synthetic oligonucleotide
  Target: ATXN2; (-) strand; PAM type: YTN; PAM sequence: CTG
aagtgcagtggtacgatctc

SEQ ID NO: 83698 - DNA, 20 bp, Artificial Sequence
  Description of Artificial Sequence: Synthetic oligonucleotide
  Target: ATXN2; (-) strand; PAM type: YTN; PAM sequence: TTG
cccagtctgaagtgcagtgg

SEQ ID NO: 83699 - DNA, 20 bp, Artificial Sequence
  Description of Artificial Sequence: Synthetic oligonucleotide
  Target: ATXN2; (-) strand; PAM type: YTN; PAM sequence: TTT
gcccagtctgaagtgcagtg

SEQ ID NO: 83700 - DNA, 20 bp, Artificial Sequence
  Description of Artificial Sequence: Synthetic oligonucleotide
  Target: ATXN2; (-) strand; PAM type: YTN; PAM sequence: CTC
ggtgtttgcccagtctgaag

SEQ ID NO: 83701 - DNA, 20 bp, Artificial Sequence
  Description of Artificial Sequence: Synthetic oligonucleotide
  Target: ATXN2; (-) strand; PAM type: YTN; PAM sequence: TTG
agacagagtctcggtgtttg

SEQ ID NO: 83702 - DNA, 20 bp, Artificial Sequence
  Description of Artificial Sequence: Synthetic oligonucleotide
  Target: ATXN2; (-) strand; PAM type: YTN; PAM sequence: TTT
gagacagagtctcggtgttt

SEQ ID NO: 83703 - DNA, 20 bp, Artificial Sequence
  Description of Artificial Sequence: Synthetic oligonucleotide
  Target: ATXN2; (-) strand; PAM type: YTN; PAM sequence: TTT
tgagacagagtctcggtgtt

SEQ ID NO: 83704 - DNA, 20 bp, Artificial Sequence
  Description of Artificial Sequence: Synthetic oligonucleotide
  Target: ATXN2; (-) strand; PAM type: YTN; PAM sequence: TTT
ttgagacagagtctcggtgt

SEQ ID NO: 83705 - DNA, 20 bp, Artificial Sequence
  Description of Artificial Sequence: Synthetic oligonucleotide
  Target: ATXN2; (-) strand; PAM type: YTN; PAM sequence: TTT
tttgagacagagtctcggtg

SEQ ID NO: 83706 - DNA, 20 bp, Artificial Sequence
  Description of Artificial Sequence: Synthetic oligonucleotide
  Target: ATXN2; (-) strand; PAM type: YTN; PAM sequence: TTT
ttttgagacagagtctcggt

SEQ ID NO: 83707 - DNA, 20 bp, Artificial Sequence
  Description of Artificial Sequence: Synthetic oligonucleotide
  Target: ATXN2; (-) strand; PAM type: YTN; PAM sequence: TTT
tttttgagacagagtctcgg

SEQ ID NO: 83708 - DNA, 20 bp, Artificial Sequence
  Description of Artificial Sequence: Synthetic oligonucleotide
  Target: ATXN2; (-) strand; PAM type: YTN; PAM sequence: TTT
ttttttgagacagagtctcg

SEQ ID NO: 83709 - DNA, 20 bp, Artificial Sequence
  Description of Artificial Sequence: Synthetic oligonucleotide
  Target: ATXN2; (-) strand; PAM type: YTN; PAM sequence: TTT
tttttttgagacagagtctc

SEQ ID NO: 83710 - DNA, 20 bp, Artificial Sequence
  Description of Artificial Sequence: Synthetic oligonucleotide
  Target: ATXN2; (-) strand; PAM type: YTN; PAM sequence: TTT
ttttttttgagacagagtct

SEQ ID NO: 83711 - DNA, 20 bp, Artificial Sequence
  Description of Artificial Sequence: Synthetic oligonucleotide
  Target: ATXN2; (-) strand; PAM type: YTN; PAM sequence: TTT
tttttttttgagacagagtc

SEQ ID NO: 83712 - DNA, 20 bp, Artificial Sequence
  Description of Artificial Sequence: Synthetic oligonucleotide
  Target: ATXN2; (-) strand; PAM type: YTN; PAM sequence: TTT
ttttttttttgagacagagt

SEQ ID NO: 83713 - DNA, 20 bp, Artificial Sequence
  Description of Artificial Sequence: Synthetic oligonucleotide
  Target: ATXN2; (-) strand; PAM type: YTN; PAM sequence: TTT
tttttttttttgagacagag

SEQ ID NO: 83714 - DNA, 20 bp, Artificial Sequence
  Description of Artificial Sequence: Synthetic oligonucleotide
  Target: ATXN2; (-) strand; PAM type: YTN; PAM sequence: TTT
ttttttttttttgagacaga

SEQ ID NO: 83715 - DNA, 20 bp, Artificial Sequence
  Description of Artificial Sequence: Synthetic oligonucleotide
  Target: ATXN2; (-) strand; PAM type: YTN; PAM sequence: TTT
tttttttttttttgagacag

SEQ ID NO: 83716 - DNA, 20 bp, Artificial Sequence
  Description of Artificial Sequence: Synthetic oligonucleotide
  Target: ATXN2; (-) strand; PAM type: YTN; PAM sequence: TTT
ttttttttttttttgagaca

SEQ ID NO: 83717 - DNA, 20 bp, Artificial Sequence
  Description of Artificial Sequence: Synthetic oligonucleotide
  Target: ATXN2; (-) strand; PAM type: YTN; PAM sequence: TTG
taaatgtaaatttttttttt

SEQ ID NO: 83718 - DNA, 20 bp, Artificial Sequence
  Description of Artificial Sequence: Synthetic oligonucleotide
  Target: ATXN2; (-) strand; PAM type: YTN; PAM sequence: TTG
tattgtaaatgtaaattttt

SEQ ID NO: 83719 - DNA, 20 bp, Artificial Sequence
  Description of Artificial Sequence: Synthetic oligonucleotide
  Target: ATXN2; (-) strand; PAM type: YTN; PAM sequence: CTG
aacgttgtattgtaaatgta

SEQ ID NO: 83720 - DNA, 20 bp, Artificial Sequence
  Description of Artificial Sequence: Synthetic oligonucleotide
  Target: ATXN2; (-) strand; PAM type: YTN; PAM sequence: TTC
ccctgaacgttgtattgtaa

SEQ ID NO: 83721 - DNA, 20 bp, Artificial Sequence
  Description of Artificial Sequence: Synthetic oligonucleotide
  Target: ATXN2; (-) strand; PAM type: YTN; PAM sequence: TTT
cccctgaacgttgtattgta

SEQ ID NO: 83722 - DNA, 20 bp, Artificial Sequence
  Description of Artificial Sequence: Synthetic oligonucleotide
  Target: ATXN2; (-) strand; PAM type: YTN; PAM sequence: TTT
tcccctgaacgttgtattgt

SEQ ID NO: 83723 - DNA, 20 bp, Artificial Sequence
  Description of Artificial Sequence: Synthetic oligonucleotide
  Target: ATXN2; (-) strand; PAM type: YTN; PAM sequence: TTT
ttcccctgaacgttgtattg

SEQ ID NO: 83724 - DNA, 20 bp, Artificial Sequence
  Description of Artificial Sequence: Synthetic oligonucleotide
  Target: ATXN2; (-) strand; PAM type: YTN; PAM sequence: TTT
tttcccctgaacgttgtatt

SEQ ID NO: 83725 - DNA, 20 bp, Artificial Sequence
  Description of Artificial Sequence: Synthetic oligonucleotide
  Target: ATXN2; (-) strand; PAM type: YTN; PAM sequence: CTT
ttttcccctgaacgttgtat

SEQ ID NO: 83726 - DNA, 20 bp, Artificial Sequence
  Description of Artificial Sequence: Synthetic oligonucleotide
  Target: ATXN2; (-) strand; PAM type: YTN; PAM sequence: TTA
gcttttttcccctgaacgtt

SEQ ID NO: 83727 - DNA, 20 bp, Artificial Sequence
  Description of Artificial Sequence: Synthetic oligonucleotide
  Target: ATXN2; (-) strand; PAM type: YTN; PAM sequence: TTG
tagttagcttttttcccctg

SEQ ID NO: 83728 - DNA, 20 bp, Artificial Sequence
  Description of Artificial Sequence: Synthetic oligonucleotide
  Target: ATXN2; (-) strand; PAM type: YTN; PAM sequence: TTT
gtagttagcttttttcccct

SEQ ID NO: 83729 - DNA, 20 bp, Artificial Sequence
  Description of Artificial Sequence: Synthetic oligonucleotide
  Target: ATXN2; (-) strand; PAM type: YTN; PAM sequence: TTT
tgtagttagcttttttcccc

SEQ ID NO: 83730 - DNA, 20 bp, Artificial Sequence
  Description of Artificial Sequence: Synthetic oligonucleotide
  Target: ATXN2; (-) strand; PAM type: YTN; PAM sequence: TTA
ttttgtagttagcttttttc

SEQ ID NO: 83731 - DNA, 20 bp, Artificial Sequence
  Description of Artificial Sequence: Synthetic oligonucleotide
  Target: ATXN2; (-) strand; PAM type: YTN; PAM sequence: TTG
tgtatgttattttgtagtta

SEQ ID NO: 83732 - DNA, 20 bp, Artificial Sequence
  Description of Artificial Sequence: Synthetic oligonucleotide
  Target: ATXN2; (-) strand; PAM type: YTN; PAM sequence: TTA
tgtagtagaggtgattgtgt

SEQ ID NO: 83733 - DNA, 20 bp, Artificial Sequence
  Description of Artificial Sequence: Synthetic oligonucleotide
  Target: ATXN2; (-) strand; PAM type: YTN; PAM sequence: TTT
atgtagtagaggtgattgtg

SEQ ID NO: 83734 - DNA, 20 bp, Artificial Sequence
  Description of Artificial Sequence: Synthetic oligonucleotide
  Target: ATXN2; (-) strand; PAM type: YTN; PAM sequence: TTT
tatgtagtagaggtgattgt

SEQ ID NO: 83735 - DNA, 20 bp, Artificial Sequence
  Description of Artificial Sequence: Synthetic oligonucleotide
  Target: ATXN2; (-) strand; PAM type: YTN; PAM sequence: TTT
ttatgtagtagaggtgattg

SEQ ID NO: 83736 - DNA, 20 bp, Artificial Sequence
  Description of Artificial Sequence: Synthetic oligonucleotide
  Target: ATXN2; (-) strand; PAM type: YTN; PAM sequence: TTC
atttttatgtagtagaggtg

SEQ ID NO: 83737 - DNA, 20 bp, Artificial Sequence
  Description of Artificial Sequence: Synthetic oligonucleotide
  Target: ATXN2; (-) strand; PAM type: YTN; PAM sequence: TTT
catttttatgtagtagaggt

SEQ ID NO: 83738 - DNA, 20 bp, Artificial Sequence
  Description of Artificial Sequence: Synthetic oligonucleotide
  Target: ATXN2; (-) strand; PAM type: YTN; PAM sequence: TTT
tcatttttatgtagtagagg

SEQ ID NO: 83739 - DNA, 20 bp, Artificial Sequence
  Description of Artificial Sequence: Synthetic oligonucleotide
  Target: ATXN2; (-) strand; PAM type: YTN; PAM sequence: CTT
ttcatttttatgtagtagag

SEQ ID NO: 83740 - DNA, 20 bp, Artificial Sequence
  Description of Artificial Sequence: Synthetic oligonucleotide
  Target: ATXN2; (-) strand; PAM type: YTN; PAM sequence: TTA
ccttttcatttttatgtagt

SEQ ID NO: 83741 - DNA, 20 bp, Artificial Sequence
  Description of Artificial Sequence: Synthetic oligonucleotide
  Target: ATXN2; (-) strand; PAM type: YTN; PAM sequence: TTT
accttttcatttttatgtag

SEQ ID NO: 83742 - DNA, 20 bp, Artificial Sequence
  Description of Artificial Sequence: Synthetic oligonucleotide
  Target: ATXN2; (-) strand; PAM type: YTN; PAM sequence: TTT
taccttttcatttttatgta

SEQ ID NO: 83743 - DNA, 20 bp, Artificial Sequence
  Description of Artificial Sequence: Synthetic oligonucleotide
  Target: ATXN2; (-) strand; PAM type: YTN; PAM sequence: TTT
ttaccttttcatttttatgt

SEQ ID NO: 83744 - DNA, 20 bp, Artificial Sequence
  Description of Artificial Sequence: Synthetic oligonucleotide
  Target: ATXN2; (-) strand; PAM type: YTN; PAM sequence: CTT
tttaccttttcatttttatg

SEQ ID NO: 83745 - DNA, 20 bp, Artificial Sequence
  Description of Artificial Sequence: Synthetic oligonucleotide
  Target: ATXN2; (-) strand; PAM type: YTN; PAM sequence: TTG
ctttttaccttttcattttt

SEQ ID NO: 83746 - DNA, 20 bp, Artificial Sequence
  Description of Artificial Sequence: Synthetic oligonucleotide
  Target: ATXN2; (-) strand; PAM type: YTN; PAM sequence: TTT
gctttttaccttttcatttt

SEQ ID NO: 83747 - DNA, 20 bp, Artificial Sequence
  Description of Artificial Sequence: Synthetic oligonucleotide
  Target: ATXN2; (-) strand; PAM type: YTN; PAM sequence: TTT
tgctttttaccttttcattt

SEQ ID NO: 83748 - DNA, 20 bp, Artificial Sequence
  Description of Artificial Sequence: Synthetic oligonucleotide
  Target: ATXN2; (-) strand; PAM type: YTN; PAM sequence: TTT
ttgctttttaccttttcatt

SEQ ID NO: 83749 - DNA, 20 bp, Artificial Sequence
  Description of Artificial Sequence: Synthetic oligonucleotide
  Target: ATXN2; (-) strand; PAM type: YTN; PAM sequence: TTA
tttttgctttttaccttttc

SEQ ID NO: 83750 - DNA, 20 bp, Artificial Sequence
  Description of Artificial Sequence: Synthetic oligonucleotide
  Target: ATXN2; (-) strand; PAM type: YTN; PAM sequence: CTT
atttttgctttttacctttt

SEQ ID NO: 83751 - DNA, 20 bp, Artificial Sequence
  Description of Artificial Sequence: Synthetic oligonucleotide
  Target: ATXN2; (-) strand; PAM type: YTN; PAM sequence: TTC
ttatttttgctttttacctt

SEQ ID NO: 83752 - DNA, 20 bp, Artificial Sequence
  Description of Artificial Sequence: Synthetic oligonucleotide
  Target: ATXN2; (-) strand; PAM type: YTN; PAM sequence: CTA
attcttatttttgcttttta

SEQ ID NO: 83753 - DNA, 20 bp, Artificial Sequence
  Description of Artificial Sequence: Synthetic oligonucleotide
  Target: ATXN2; (-) strand; PAM type: YTN; PAM sequence: CTG
cccccaaccatcagtctaat

SEQ ID NO: 83754 - DNA, 20 bp, Artificial Sequence
  Description of Artificial Sequence: Synthetic oligonucleotide
  Target: ATXN2; (-) strand; PAM type: YTN; PAM sequence: TTA
caggcaggaatgagccactg

SEQ ID NO: 83755 - DNA, 20 bp, Artificial Sequence
  Description of Artificial Sequence: Synthetic oligonucleotide
  Target: ATXN2; (-) strand; PAM type: YTN; PAM sequence: CTC
ccaaagtgccaggattacag

SEQ ID NO: 83756 - DNA, 20 bp, Artificial Sequence
  Description of Artificial Sequence: Synthetic oligonucleotide
  Target: ATXN2; (-) strand; PAM type: YTN; PAM sequence: CTC
ggcctcccaaagtgccagga

SEQ ID NO: 83757 - DNA, 20 bp, Artificial Sequence
  Description of Artificial Sequence: Synthetic oligonucleotide
  Target: ATXN2; (-) strand; PAM type: YTN; PAM sequence: TTC
gccagcctcggcctcccaaa

SEQ ID NO: 83758 - DNA, 20 bp, Artificial Sequence
  Description of Artificial Sequence: Synthetic oligonucleotide
  Target: ATXN2; (-) strand; PAM type: YTN; PAM sequence: CTC
aagtgattcgccagcctcgg

SEQ ID NO: 83759 - DNA, 20 bp, Artificial Sequence
  Description of Artificial Sequence: Synthetic oligonucleotide
  Target: ATXN2; (-) strand; PAM type: YTN; PAM sequence: CTG
acctcaagtgattcgccagc

SEQ ID NO: 83760 - DNA, 20 bp, Artificial Sequence
  Description of Artificial Sequence: Synthetic oligonucleotide
  Target: ATXN2; (-) strand; PAM type: YTN; PAM sequence: CTC
ctgacctcaagtgattcgcc

SEQ ID NO: 83761 - DNA, 20 bp, Artificial Sequence
  Description of Artificial Sequence: Synthetic oligonucleotide
  Target: ATXN2; (-) strand; PAM type: YTN; PAM sequence: CTC
ctcctgacctcaagtgattc

SEQ ID NO: 83762 - DNA, 20 bp, Artificial Sequence
  Description of Artificial Sequence: Synthetic oligonucleotide
  Target: ATXN2; (-) strand; PAM type: YTN; PAM sequence: CTC
gaactcctcctgacctcaag

SEQ ID NO: 83763 - DNA, 20 bp, Artificial Sequence
  Description of Artificial Sequence: Synthetic oligonucleotide
  Target: ATXN2; (-) strand; PAM type: YTN; PAM sequence: CTG
gtctcgaactcctcctgacc

SEQ ID NO: 83764 - DNA, 20 bp, Artificial Sequence
  Description of Artificial Sequence: Synthetic oligonucleotide
  Target: ATXN2; (-) strand; PAM type: YTN; PAM sequence: TTG
gccaggctggtctcgaactc

SEQ ID NO: 83765 - DNA, 20 bp, Artificial Sequence
  Description of Artificial Sequence: Synthetic oligonucleotide
  Target: ATXN2; (-) strand; PAM type: YTN; PAM sequence: TTC
accatgttggccaggctggt

SEQ ID NO: 83766 - DNA, 20 bp, Artificial Sequence
  Description of Artificial Sequence: Synthetic oligonucleotide
  Target: ATXN2; (-) strand; PAM type: YTN; PAM sequence: TTT
caccatgttggccaggctgg

SEQ ID NO: 83767 - DNA, 20 bp, Artificial Sequence
  Description of Artificial Sequence: Synthetic oligonucleotide
  Target: ATXN2; (-) strand; PAM type: YTN; PAM sequence: TTA
gtagagatggggtttcacca

SEQ ID NO: 83768 - DNA, 20 bp, Artificial Sequence
  Description of Artificial Sequence: Synthetic oligonucleotide
  Target: ATXN2; (-) strand; PAM type: YTN; PAM sequence: TTT
agtagagatggggtttcacc

SEQ ID NO: 83769 - DNA, 20 bp, Artificial Sequence
  Description of Artificial Sequence: Synthetic oligonucleotide
  Target: ATXN2; (-) strand; PAM type: YTN; PAM sequence: TTT
tagtagagatggggtttcac

SEQ ID NO: 83770 - DNA, 20 bp, Artificial Sequence
  Description of Artificial Sequence: Synthetic oligonucleotide
  Target: ATXN2; (-) strand; PAM type: YTN; PAM sequence: TTT
ttagtagagatggggtttca

SEQ ID NO: 83771 - DNA, 20 bp, Artificial Sequence
  Description of Artificial Sequence: Synthetic oligonucleotide
  Target: ATXN2; (-) strand; PAM type: YTN; PAM sequence: TTG
tatttttagtagagatgggg

SEQ ID NO: 83772 - DNA, 20 bp, Artificial Sequence
  Description of Artificial Sequence: Synthetic oligonucleotide
  Target: ATXN2; (-) strand; PAM type: YTN; PAM sequence: TTT
gtatttttagtagagatggg

SEQ ID NO: 83773 - DNA, 20 bp, Artificial Sequence
  Description of Artificial Sequence: Synthetic oligonucleotide
  Target: ATXN2; (-) strand; PAM type: YTN; PAM sequence: TTT
tgtatttttagtagagatgg

SEQ ID NO: 83774 - DNA, 20 bp, Artificial Sequence
  Description of Artificial Sequence: Synthetic oligonucleotide
  Target: ATXN2; (-) strand; PAM type: YTN; PAM sequence: TTT
ttgtatttttagtagagatg

SEQ ID NO: 83775 - DNA, 20 bp, Artificial Sequence
  Description of Artificial Sequence: Synthetic oligonucleotide
  Target: ATXN2; (-) strand; PAM type: YTN; PAM sequence: CTG
gccaatttttgtatttttag

SEQ ID NO: 83776 - DNA, 20 bp, Artificial Sequence
  Description of Artificial Sequence: Synthetic oligonucleotide
  Target: ATXN2; (-) strand; PAM type: YTN; PAM sequence: CTG
cccctggccaatttttgtat

SEQ ID NO: 83777 - DNA, 20 bp, Artificial Sequence
  Description of Artificial Sequence: Synthetic oligonucleotide
  Target: ATXN2; (-) strand; PAM type: YTN; PAM sequence: CTA
ctgcccctggccaatttttg

SEQ ID NO: 83778 - DNA, 20 bp, Artificial Sequence
  Description of Artificial Sequence: Synthetic oligonucleotide
  Target: ATXN2; (-) strand; PAM type: YTN; PAM sequence: TTA
caggcgtgagctactgcccc

SEQ ID NO: 83779 - DNA, 20 bp, Artificial Sequence
  Description of Artificial Sequence: Synthetic oligonucleotide
  Target: ATXN2; (-) strand; PAM type: YTN; PAM sequence: CTG
ggattacaggcgtgagctac

SEQ ID NO: 83780 - DNA, 20 bp, Artificial Sequence
  Description of Artificial Sequence: Synthetic oligonucleotide
  Target: ATXN2; (-) strand; PAM type: YTN; PAM sequence: CTC
ccaaagtgctgggattacag

SEQ ID NO: 83781 - DNA, 20 bp, Artificial Sequence
  Description of Artificial Sequence: Synthetic oligonucleotide
  Target: ATXN2; (-) strand; PAM type: YTN; PAM sequence: TTG
gcctcccaaagtgctgggat

SEQ ID NO: 83782 - DNA, 20 bp, Artificial Sequence
  Description of Artificial Sequence: Synthetic oligonucleotide
  Target: ATXN2; (-) strand; PAM type: YTN; PAM sequence: CTT
ggcctcccaaagtgctggga

SEQ ID NO: 83783 - DNA, 20 bp, Artificial Sequence
  Description of Artificial Sequence: Synthetic oligonucleotide
  Target: ATXN2; (-) strand; PAM type: YTN; PAM sequence: CTG
ccttggcctcccaaagtgct

SEQ ID NO: 83784 - DNA, 20 bp, Artificial Sequence
  Description of Artificial Sequence: Synthetic oligonucleotide
  Target: ATXN2; (-) strand; PAM type: YTN; PAM sequence: CTC
aagtgatccgcctgccttgg

SEQ ID NO: 83785 - DNA, 20 bp, Artificial Sequence
  Description of Artificial Sequence: Synthetic oligonucleotide
  Target: ATXN2; (-) strand; PAM type: YTN; PAM sequence: CTG
acctcaagtgatccgcctgc

SEQ ID NO: 83786 - DNA, 20 bp, Artificial Sequence
  Description of Artificial Sequence: Synthetic oligonucleotide
  Target: ATXN2; (-) strand; PAM type: YTN; PAM sequence: CTC
ctgacctcaagtgatccgcc

SEQ ID NO: 83787 - DNA, 20 bp, Artificial Sequence
  Description of Artificial Sequence: Synthetic oligonucleotide
  Target: ATXN2; (-) strand; PAM type: YTN; PAM sequence: CTC
gaactcctgacctcaagtga

SEQ ID NO: 83788 - DNA, 20 bp, Artificial Sequence
  Description of Artificial Sequence: Synthetic oligonucleotide
  Target: ATXN2; (-) strand; PAM type: YTN; PAM sequence: CTG
gtctcgaactcctgacctca

SEQ ID NO: 83789 - DNA, 20 bp, Artificial Sequence
  Description of Artificial Sequence: Synthetic oligonucleotide
  Target: ATXN2; (-) strand; PAM type: YTN; PAM sequence: TTG
gccaggctggtctcgaactc

SEQ ID NO: 83790 - DNA, 20 bp, Artificial Sequence
  Description of Artificial Sequence: Synthetic oligonucleotide
  Target: ATXN2; (-) strand; PAM type: YTN; PAM sequence: TTG
ccatgttggccaggctggtc

SEQ ID NO: 83791 - DNA, 20 bp, Artificial Sequence
  Description of Artificial Sequence: Synthetic oligonucleotide
  Target: ATXN2; (-) strand; PAM type: YTN; PAM sequence: TTT
gccatgttggccaggctggt

SEQ ID NO: 83792 - DNA, 20 bp, Artificial Sequence
  Description of Artificial Sequence: Synthetic oligonucleotide
  Target: ATXN2; (-) strand; PAM type: YTN; PAM sequence: TTT
tgccatgttggccaggctgg

SEQ ID NO: 83793 - DNA, 20 bp, Artificial Sequence
  Description of Artificial Sequence: Synthetic oligonucleotide
  Target: ATXN2; (-) strand; PAM type: YTN; PAM sequence: TTA
gtgaggacgggattttgcca

SEQ ID NO: 83794 - DNA, 20 bp, Artificial Sequence
  Description of Artificial Sequence: Synthetic oligonucleotide
  Target: ATXN2; (-) strand; PAM type: YTN; PAM sequence: TTT
agtgaggacgggattttgcc

SEQ ID NO: 83795 - DNA, 20 bp, Artificial Sequence
  Description of Artificial Sequence: Synthetic oligonucleotide
  Target: ATXN2; (-) strand; PAM type: YTN; PAM sequence: TTT
tagtgaggacgggattttgc

SEQ ID NO: 83796 - DNA, 20 bp, Artificial Sequence
  Description of Artificial Sequence: Synthetic oligonucleotide
  Target: ATXN2; (-) strand; PAM type: YTN; PAM sequence: TTT
ttagtgaggacgggattttg

SEQ ID NO: 83797 - DNA, 20 bp, Artificial Sequence
  Description of Artificial Sequence: Synthetic oligonucleotide
  Target: ATXN2; (-) strand; PAM type: YTN; PAM sequence: TTG
tatttttagtgaggacggga

SEQ ID NO: 83798 - DNA, 20 bp, Artificial Sequence
  Description of Artificial Sequence: Synthetic oligonucleotide
  Target: ATXN2; (-) strand; PAM type: YTN; PAM sequence: TTT
gtatttttagtgaggacggg

SEQ ID NO: 83799 - DNA, 20 bp, Artificial Sequence
  Description of Artificial Sequence: Synthetic oligonucleotide
  Target: ATXN2; (-) strand; PAM type: YTN; PAM sequence: TTT
tgtatttttagtgaggacgg

SEQ ID NO: 83800 - DNA, 20 bp, Artificial Sequence
  Description of Artificial Sequence: Synthetic oligonucleotide
  Target: ATXN2; (-) strand; PAM type: YTN; PAM sequence: TTT
ttgtatttttagtgaggacg

SEQ ID NO: 83801 - DNA, 20 bp, Artificial Sequence
  Description of Artificial Sequence: Synthetic oligonucleotide
  Target: ATXN2; (-) strand; PAM type: YTN; PAM sequence: TTT
tttgtatttttagtgaggac

SEQ ID NO: 83802 - DNA, 20 bp, Artificial Sequence
  Description of Artificial Sequence: Synthetic oligonucleotide
  Target: ATXN2; (-) strand; PAM type: YTN; PAM sequence: TTT
ttttgtatttttagtgagga

SEQ ID NO: 83803 - DNA, 20 bp, Artificial Sequence
  Description of Artificial Sequence: Synthetic oligonucleotide
  Target: ATXN2; (-) strand; PAM type: YTN; PAM sequence: CTA
atttttttgtatttttagtg

SEQ ID NO: 83804 - DNA, 20 bp, Artificial Sequence
  Description of Artificial Sequence: Synthetic oligonucleotide
  Target: ATXN2; (-) strand; PAM type: YTN; PAM sequence: CTG
gctaatttttttgtattttt

SEQ ID NO: 83805 - DNA, 20 bp, Artificial Sequence
  Description of Artificial Sequence: Synthetic oligonucleotide
  Target: ATXN2; (-) strand; PAM type: YTN; PAM sequence: CTA
ccacacctggctaatttttt

SEQ ID NO: 83806 - DNA, 20 bp, Artificial Sequence
  Description of Artificial Sequence: Synthetic oligonucleotide
  Target: ATXN2; (-) strand; PAM type: YTN; PAM sequence: TTC
gtgctaccacacctggctaa

SEQ ID NO: 83807 - DNA, 20 bp, Artificial Sequence
  Description of Artificial Sequence: Synthetic oligonucleotide
  Target: ATXN2; (-) strand; PAM type: YTN; PAM sequence: TTA
caggttcgtgctaccacacc

SEQ ID NO: 83808 - DNA, 20 bp, Artificial Sequence
  Description of Artificial Sequence: Synthetic oligonucleotide
  Target: ATXN2; (-) strand; PAM type: YTN; PAM sequence: CTG
ggattacaggttcgtgctac

SEQ ID NO: 83809 - DNA, 20 bp, Artificial Sequence
  Description of Artificial Sequence: Synthetic oligonucleotide
  Target: ATXN2; (-) strand; PAM type: YTN; PAM sequence: CTC
cccagtagctgggattacag

SEQ ID NO: 83810 - DNA, 20 bp, Artificial Sequence
  Description of Artificial Sequence: Synthetic oligonucleotide
  Target: ATXN2; (-) strand; PAM type: YTN; PAM sequence: CTC
agcctccccagtagctggga

SEQ ID NO: 83811 - DNA, 20 bp, Artificial Sequence
  Description of Artificial Sequence: Synthetic oligonucleotide
  Target: ATXN2; (-) strand; PAM type: YTN; PAM sequence: CTC
cagcctcagcctccccagta

SEQ ID NO: 83812 - DNA, 20 bp, Artificial Sequence
  Description of Artificial Sequence: Synthetic oligonucleotide
  Target: ATXN2; (-) strand; PAM type: YTN; PAM sequence: TTC
tccagcctcagcctccccag

SEQ ID NO: 83813 - DNA, 20 bp, Artificial Sequence
  Description of Artificial Sequence: Synthetic oligonucleotide
  Target: ATXN2; (-) strand; PAM type: YTN; PAM sequence: TTA
agtgattctccagcctcagc

SEQ ID NO: 83814 - DNA, 20 bp, Artificial Sequence
  Description of Artificial Sequence: Synthetic oligonucleotide
  Target: ATXN2; (-) strand; PAM type: YTN; PAM sequence: TTT
aagtgattctccagcctcag

SEQ ID NO: 83815 - DNA, 20 bp, Artificial Sequence
  Description of Artificial Sequence: Synthetic oligonucleotide
  Target: ATXN2; (-) strand; PAM type: YTN; PAM sequence: TTC
atttaagtgattctccagcc

SEQ ID NO: 83816 - DNA, 20 bp, Artificial Sequence
  Description of Artificial Sequence: Synthetic oligonucleotide
  Target: ATXN2; (-) strand; PAM type: YTN; PAM sequence: CTG
ggttcatttaagtgattctc

SEQ ID NO: 83817 - DNA, 20 bp, Artificial Sequence
  Description of Artificial Sequence: Synthetic oligonucleotide
  Target: ATXN2; (-) strand; PAM type: YTN; PAM sequence: CTC
ctgggttcatttaagtgatt

SEQ ID NO: 83818 - DNA, 20 bp, Artificial Sequence
  Description of Artificial Sequence: Synthetic oligonucleotide
  Target: ATXN2; (-) strand; PAM type: YTN; PAM sequence: CTG
tctcctgggttcatttaagt

SEQ ID NO: 83819 - DNA, 20 bp, Artificial Sequence
  Description of Artificial Sequence: Synthetic oligonucleotide
  Target: ATXN2; (-) strand; PAM type: YTN; PAM sequence: CTC
tgtctcctgggttcatttaa

SEQ ID NO: 83820 - DNA, 20 bp, Artificial Sequence
  Description of Artificial Sequence: Synthetic oligonucleotide
  Target: ATXN2; (-) strand; PAM type: YTN; PAM sequence: CTG
cagtctctgtctcctgggtt

SEQ ID NO: 83821 - DNA, 20 bp, Artificial Sequence
  Description of Artificial Sequence: Synthetic oligonucleotide
  Target: ATXN2; (-) strand; PAM type: YTN; PAM sequence: TTA
ctgcagtctctgtctcctgg

SEQ ID NO: 83822 - DNA, 20 bp, Artificial Sequence
  Description of Artificial Sequence: Synthetic oligonucleotide
  Target: ATXN2; (-) strand; PAM type: YTN; PAM sequence: CTT
actgcagtctctgtctcctg

SEQ ID NO: 83823 - DNA, 20 bp, Artificial Sequence
  Description of Artificial Sequence: Synthetic oligonucleotide
  Target: ATXN2; (-) strand; PAM type: YTN; PAM sequence: CTC
agcttactgcagtctctgtc

SEQ ID NO: 83824 - DNA, 20 bp, Artificial Sequence
  Description of Artificial Sequence: Synthetic oligonucleotide
  Target: ATXN2; (-) strand; PAM type: YTN; PAM sequence: CTG
atctcagcttactgcagtct

SEQ ID NO: 83825 - DNA, 20 bp, Artificial Sequence
  Description of Artificial Sequence: Synthetic oligonucleotide
  Target: ATXN2; (-) strand; PAM type: YTN; PAM sequence: CTG
gagtgcagtggcctgatctc

SEQ ID NO: 83826 - DNA, 20 bp, Artificial Sequence
  Description of Artificial Sequence: Synthetic oligonucleotide
  Target: ATXN2; (-) strand; PAM type: YTN; PAM sequence: CTG
tcgcccaggctggagtgcag

SEQ ID NO: 83827 - DNA, 20 bp, Artificial Sequence
  Description of Artificial Sequence: Synthetic oligonucleotide
  Target: ATXN2; (-) strand; PAM type: YTN; PAM sequence: CTC
tgtcgcccaggctggagtgc

SEQ ID NO: 83828 - DNA, 20 bp, Artificial Sequence
  Description of Artificial Sequence: Synthetic oligonucleotide
  Target: ATXN2; (-) strand; PAM type: YTN; PAM sequence: CTC
actctgtcgcccaggctgga

SEQ ID NO: 83829 - DNA, 20 bp, Artificial Sequence
  Description of Artificial Sequence: Synthetic oligonucleotide
  Target: ATXN2; (-) strand; PAM type: YTN; PAM sequence: TTG
gatggaatctcactctgtcg

SEQ ID NO: 83830 - DNA, 20 bp, Artificial Sequence
  Description of Artificial Sequence: Synthetic oligonucleotide
  Target: ATXN2; (-) strand; PAM type: YTN; PAM sequence: TTT
ggatggaatctcactctgtc

SEQ ID NO: 83831 - DNA, 20 bp, Artificial Sequence
  Description of Artificial Sequence: Synthetic oligonucleotide
  Target: ATXN2; (-) strand; PAM type: YTN; PAM sequence: TTT
tggatggaatctcactctgt

SEQ ID NO: 83832 - DNA, 20 bp, Artificial Sequence
  Description of Artificial Sequence: Synthetic oligonucleotide
  Target: ATXN2; (-) strand; PAM type: YTN; PAM sequence: TTG
tgtgtgtgtgtgtgtgtgtg

SEQ ID NO: 83833 - DNA, 20 bp, Artificial Sequence
  Description of Artificial Sequence: Synthetic oligonucleotide
  Target: ATXN2; (-) strand; PAM type: YTN; PAM sequence: TTT
gtgtgtgtgtgtgtgtgtgt

SEQ ID NO: 83834 - DNA, 20 bp, Artificial Sequence
  Description of Artificial Sequence: Synthetic oligonucleotide
  Target: ATXN2; (-) strand; PAM type: YTN; PAM sequence: TTT
tgtgtgtgtgtgtgtgtgtg

SEQ ID NO: 83835 - DNA, 20 bp, Artificial Sequence
  Description of Artificial Sequence: Synthetic oligonucleotide
  Target: ATXN2; (-) strand; PAM type: YTN; PAM sequence: CTA
attttgtgtgtgtgtgtgtg

SEQ ID NO: 83836 - DNA, 20 bp, Artificial Sequence
  Description of Artificial Sequence: Synthetic oligonucleotide
  Target: ATXN2; (-) strand; PAM type: YTN; PAM sequence: CTG
taatctaattttgtgtgtgt

SEQ ID NO: 83837 - DNA, 20 bp, Artificial Sequence
  Description of Artificial Sequence: Synthetic oligonucleotide
  Target: ATXN2; (-) strand; PAM type: YTN; PAM sequence: TTA
ctgtaatctaattttgtgtg

SEQ ID NO: 83838 - DNA, 20 bp, Artificial Sequence
  Description of Artificial Sequence: Synthetic oligonucleotide
  Target: ATXN2; (-) strand; PAM type: YTN; PAM sequence: TTT
actgtaatctaattttgtgt

SEQ ID NO: 83839 - DNA, 20 bp, Artificial Sequence
  Description of Artificial Sequence: Synthetic oligonucleotide
  Target: ATXN2; (-) strand; PAM type: YTN; PAM sequence: TTT
tactgtaatctaattttgtg

SEQ ID NO: 83840 - DNA, 20 bp, Artificial Sequence
  Description of Artificial Sequence: Synthetic oligonucleotide
  Target: ATXN2; (-) strand; PAM type: YTN; PAM sequence: TTA
gaacataattttactgtaat

SEQ ID NO: 83841 - DNA, 20 bp, Artificial Sequence
  Description of Artificial Sequence: Synthetic oligonucleotide
  Target: ATXN2; (-) strand; PAM type: YTN; PAM sequence: TTA
ggaaagataatgtaatcaca

SEQ ID NO: 83842 - DNA, 20 bp, Artificial Sequence
  Description of Artificial Sequence: Synthetic oligonucleotide
  Target: ATXN2; (-) strand; PAM type: YTN; PAM sequence: TTT
aggaaagataatgtaatcac

SEQ ID NO: 83843 - DNA, 20 bp, Artificial Sequence
  Description of Artificial Sequence: Synthetic oligonucleotide
  Target: ATXN2; (-) strand; PAM type: YTN; PAM sequence: TTT
taggaaagataatgtaatca

SEQ ID NO: 83844 - DNA, 20 bp, Artificial Sequence
  Description of Artificial Sequence: Synthetic oligonucleotide
  Target: ATXN2; (-) strand; PAM type: YTN; PAM sequence: CTG
ttttaggaaagataatgtaa

SEQ ID NO: 83845 - DNA, 20 bp, Artificial Sequence
  Description of Artificial Sequence: Synthetic oligonucleotide
  Target: ATXN2; (-) strand; PAM type: YTN; PAM sequence: TTG
aaggtggctgttttaggaaa

SEQ ID NO: 83846 - DNA, 20 bp, Artificial Sequence
  Description of Artificial Sequence: Synthetic oligonucleotide
  Target: ATXN2; (-) strand; PAM type: YTN; PAM sequence: TTT
gaaggtggctgttttaggaa

SEQ ID NO: 83847 - DNA, 20 bp, Artificial Sequence
  Description of Artificial Sequence: Synthetic oligonucleotide
  Target: ATXN2; (-) strand; PAM type: YTN; PAM sequence: TTT
tgaaggtggctgttttagga

SEQ ID NO: 83848 - DNA, 20 bp, Artificial Sequence
  Description of Artificial Sequence: Synthetic oligonucleotide
  Target: ATXN2; (-) strand; PAM type: YTN; PAM sequence: TTT
ttgaaggtggctgttttagg

SEQ ID NO: 83849 - DNA, 20 bp, Artificial Sequence
  Description of Artificial Sequence: Synthetic oligonucleotide
  Target: ATXN2; (-) strand; PAM type: YTN; PAM sequence: TTA
tatatatttttgaaggtggc

SEQ ID NO: 83850 - DNA, 20 bp, Artificial Sequence
  Description of Artificial Sequence: Synthetic oligonucleotide
  Target: ATXN2; (-) strand; PAM type: YTN; PAM sequence: TTG
ttatatatatttttgaaggt

SEQ ID NO: 83851 - DNA, 20 bp, Artificial Sequence
  Description of Artificial Sequence: Synthetic oligonucleotide
  Target: ATXN2; (-) strand; PAM type: YTN; PAM sequence: TTT
gttatatatatttttgaagg

SEQ ID NO: 83852 - DNA, 20 bp, Artificial Sequence
  Description of Artificial Sequence: Synthetic oligonucleotide
  Target: ATXN2; (-) strand; PAM type: YTN; PAM sequence: CTT
tgttatatatatttttgaag

SEQ ID NO: 83853 - DNA, 20 bp, Artificial Sequence
  Description of Artificial Sequence: Synthetic oligonucleotide
  Target: ATXN2; (-) strand; PAM type: YTN; PAM sequence: TTC
tttgttatatatatttttga

SEQ ID NO: 83854 - DNA, 20 bp, Artificial Sequence
  Description of Artificial Sequence: Synthetic oligonucleotide
  Target: ATXN2; (-) strand; PAM type: YTN; PAM sequence: TTG
ttctttgttatatatatttt

SEQ ID NO: 83855 - DNA, 20 bp, Artificial Sequence
  Description of Artificial Sequence: Synthetic oligonucleotide
  Target: ATXN2; (-) strand; PAM type: YTN; PAM sequence: TTT
gttctttgttatatatattt

SEQ ID NO: 83856 - DNA, 20 bp, Artificial Sequence
  Description of Artificial Sequence: Synthetic oligonucleotide
  Target: ATXN2; (-) strand; PAM type: YTN; PAM sequence: TTT
tgttctttgttatatatatt

SEQ ID NO: 83857 - DNA, 20 bp, Artificial Sequence
  Description of Artificial Sequence: Synthetic oligonucleotide
  Target: ATXN2; (-) strand; PAM type: YTN; PAM sequence: TTA
ttttgttctttgttatatat

SEQ ID NO: 83858 - DNA, 20 bp, Artificial Sequence
  Description of Artificial Sequence: Synthetic oligonucleotide
  Target: ATXN2; (-) strand; PAM type: YTN; PAM sequence: TTT
attttgttctttgttatata

SEQ ID NO: 83859 - DNA, 20 bp, Artificial Sequence
  Description of Artificial Sequence: Synthetic oligonucleotide
  Target: ATXN2; (-) strand; PAM type: YTN; PAM sequence: TTC
agaagtgatttattttgttc

SEQ ID NO: 83860 - DNA, 20 bp, Artificial Sequence
  Description of Artificial Sequence: Synthetic oligonucleotide
  Target: ATXN2; (-) strand; PAM type: YTN; PAM sequence: TTT
cagaagtgatttattttgtt

SEQ ID NO: 83861 - DNA, 20 bp, Artificial Sequence
  Description of Artificial Sequence: Synthetic oligonucleotide
  Target: ATXN2; (-) strand; PAM type: YTN; PAM sequence: CTT
tcagaagtgatttattttgt

SEQ ID NO: 83862 - DNA, 20 bp, Artificial Sequence
  Description of Artificial Sequence: Synthetic oligonucleotide
  Target: ATXN2; (-) strand; PAM type: YTN; PAM sequence: TTC
atgactttcagaagtgattt

SEQ ID NO: 83863 - DNA, 20 bp, Artificial Sequence
  Description of Artificial Sequence: Synthetic oligonucleotide
  Target: ATXN2; (-) strand; PAM type: YTN; PAM sequence: TTT
catgactttcagaagtgatt

SEQ ID NO: 83864 - DNA, 20 bp, Artificial Sequence
  Description of Artificial Sequence: Synthetic oligonucleotide
  Target: ATXN2; (-) strand; PAM type: YTN; PAM sequence: TTT
tcatgactttcagaagtgat

SEQ ID NO: 83865 - DNA, 20 bp, Artificial Sequence
  Description of Artificial Sequence: Synthetic oligonucleotide
  Target: ATXN2; (-) strand; PAM type: YTN; PAM sequence: TTT
ttcatgactttcagaagtga

SEQ ID NO: 83866 - DNA, 20 bp, Artificial Sequence
  Description of Artificial Sequence: Synthetic oligonucleotide
  Target: ATXN2; (-) strand; PAM type: YTN; PAM sequence: TTG
tgtgtgtgtgtgtgaatagt

SEQ ID NO: 83867 - DNA, 20 bp, Artificial Sequence
  Description of Artificial Sequence: Synthetic oligonucleotide
  Target: ATXN2; (-) strand; PAM type: YTN; PAM sequence: TTT
gtgtgtgtgtgtgtgaatag

SEQ ID NO: 83868 - DNA, 20 bp, Artificial Sequence
  Description of Artificial Sequence: Synthetic oligonucleotide
  Target: ATXN2; (-) strand; PAM type: YTN; PAM sequence: CTT
tgtgtgtgtgtgtgtgaata

SEQ ID NO: 83869 - DNA, 20 bp, Artificial Sequence
  Description of Artificial Sequence: Synthetic oligonucleotide
  Target: ATXN2; (-) strand; PAM type: YTN; PAM sequence: TTG
actttgtgtgtgtgtgtgtg

SEQ ID NO: 83870 - DNA, 20 bp, Artificial Sequence
  Description of Artificial Sequence: Synthetic oligonucleotide
  Target: ATXN2; (-) strand; PAM type: YTN; PAM sequence: TTT
gactttgtgtgtgtgtgtgt

SEQ ID NO: 83871 - DNA, 20 bp, Artificial Sequence
  Description of Artificial Sequence: Synthetic oligonucleotide
  Target: ATXN2; (-) strand; PAM type: YTN; PAM sequence: TTC
ataatttgactttgtgtgtg

SEQ ID NO: 83872 - DNA, 20 bp, Artificial Sequence
  Description of Artificial Sequence: Synthetic oligonucleotide
  Target: ATXN2; (-) strand; PAM type: YTN; PAM sequence: TTT
cataatttgactttgtgtgt

SEQ ID NO: 83873 - DNA, 20 bp, Artificial Sequence
  Description of Artificial Sequence: Synthetic oligonucleotide
  Target: ATXN2; (-) strand; PAM type: YTN; PAM sequence: TTA
agaaacatttcataatttga

SEQ ID NO: 83874 - DNA, 20 bp, Artificial Sequence
  Description of Artificial Sequence: Synthetic oligonucleotide
  Target: ATXN2; (-) strand; PAM type: YTN; PAM sequence: TTT
aagaaacatttcataatttg

SEQ ID NO: 83875 - DNA, 20 bp, Artificial Sequence
  Description of Artificial Sequence: Synthetic oligonucleotide
  Target: ATXN2; (-) strand; PAM type: YTN; PAM sequence: CTT
taagaaacatttcataattt

SEQ ID NO: 83876 - DNA, 20 bp, Artificial Sequence
  Description of Artificial Sequence: Synthetic oligonucleotide
  Target: ATXN2; (-) strand; PAM type: YTN; PAM sequence: CTG
ctttaagaaacatttcataa

SEQ ID NO: 83877 - DNA, 20 bp, Artificial Sequence
  Description of Artificial Sequence: Synthetic oligonucleotide
  Target: ATXN2; (-) strand; PAM type: YTN; PAM sequence: TTC
acatctgctttaagaaacat

SEQ ID NO: 83878 - DNA, 20 bp, Artificial Sequence
  Description of Artificial Sequence: Synthetic oligonucleotide
  Target: ATXN2; (-) strand; PAM type: YTN; PAM sequence: CTG
gaaattcacatctgctttaa

SEQ ID NO: 83879 - DNA, 20 bp, Artificial Sequence
  Description of Artificial Sequence: Synthetic oligonucleotide
  Target: ATXN2; (-) strand; PAM type: YTN; PAM sequence: TTG
aaagtctggaaattcacatc

SEQ ID NO: 83880 - DNA, 20 bp, Artificial Sequence
  Description of Artificial Sequence: Synthetic oligonucleotide
  Target: ATXN2; (-) strand; PAM type: YTN; PAM sequence: CTT
gaaagtctggaaattcacat

SEQ ID NO: 83881 - DNA, 20 bp, Artificial Sequence
  Description of Artificial Sequence: Synthetic oligonucleotide
  Target: ATXN2; (-) strand; PAM type: YTN; PAM sequence: TTC
gagatagcaaaatatgcttg

SEQ ID NO: 83882 - DNA, 20 bp, Artificial Sequence
  Description of Artificial Sequence: Synthetic oligonucleotide
  Target: ATXN2; (-) strand; PAM type: YTN; PAM sequence: TTT
cgagatagcaaaatatgctt

SEQ ID NO: 83883 - DNA, 20 bp, Artificial Sequence
  Description of Artificial Sequence: Synthetic oligonucleotide
  Target: ATXN2; (-) strand; PAM type: YTN; PAM sequence: TTG
acaagtttcgagatagcaaa

SEQ ID NO: 83884 - DNA, 20 bp, Artificial Sequence
  Description of Artificial Sequence: Synthetic oligonucleotide
  Target: ATXN2; (-) strand; PAM type: YTN; PAM sequence: TTT
gacaagtttcgagatagcaa

SEQ ID NO: 83885 - DNA, 20 bp, Artificial Sequence
  Description of Artificial Sequence: Synthetic oligonucleotide
  Target: ATXN2; (-) strand; PAM type: YTN; PAM sequence: TTC
ggtttgacaagtttcgagat

SEQ ID NO: 83886 - DNA, 20 bp, Artificial Sequence
  Description of Artificial Sequence: Synthetic oligonucleotide
  Target: ATXN2; (-) strand; PAM type: YTN; PAM sequence: CTG
agagcaagggtgaaaaaaaa

SEQ ID NO: 83887 - DNA, 20 bp, Artificial Sequence
  Description of Artificial Sequence: Synthetic oligonucleotide
  Target: ATXN2; (-) strand; PAM type: YTN; PAM sequence: CTC
tgagagcaagggtgaaaaaa

SEQ ID NO: 83888 - DNA, 20 bp, Artificial Sequence
  Description of Artificial Sequence: Synthetic oligonucleotide
  Target: ATXN2; (-) strand; PAM type: YTN; PAM sequence: TTG
tgcgtatcaacagtgaaaat

SEQ ID NO: 83889 - DNA, 20 bp, Artificial Sequence
  Description of Artificial Sequence: Synthetic oligonucleotide
  Target: ATXN2; (-) strand; PAM type: YTN; PAM sequence: TTT
gtgcgtatcaacagtgaaaa

SEQ ID NO: 83890 - DNA, 20 bp, Artificial Sequence
  Description of Artificial Sequence: Synthetic oligonucleotide
  Target: ATXN2; (-) strand; PAM type: YTN; PAM sequence: TTA
ggtttgtgcgtatcaacagt

SEQ ID NO: 83891 - DNA, 20 bp, Artificial Sequence
  Description of Artificial Sequence: Synthetic oligonucleotide
  Target: ATXN2; (-) strand; PAM type: YTN; PAM sequence: CTT
aggtttgtgcgtatcaacag

SEQ ID NO: 83892 - DNA, 20 bp, Artificial Sequence
  Description of Artificial Sequence: Synthetic oligonucleotide
  Target: ATXN2; (-) strand; PAM type: YTN; PAM sequence: CTC
acttaggtttgtgcgtatca

SEQ ID NO: 83893 - DNA, 20 bp, Artificial Sequence
  Description of Artificial Sequence: Synthetic oligonucleotide
  Target: ATXN2; (-) strand; PAM type: YTN; PAM sequence: CTC
ctcacttaggtttgtgcgta

SEQ ID NO: 83894 - DNA, 20 bp, Artificial Sequence
  Description of Artificial Sequence: Synthetic oligonucleotide
  Target: ATXN2; (-) strand; PAM type: YTN; PAM sequence: CTA
gaatctcctcacttaggttt

SEQ ID NO: 83895 - DNA, 20 bp, Artificial Sequence
  Description of Artificial Sequence: Synthetic oligonucleotide
  Target: ATXN2; (-) strand; PAM type: YTN; PAM sequence: TTC
tagaatctcctcacttaggt

SEQ ID NO: 83896 - DNA, 20 bp, Artificial Sequence
  Description of Artificial Sequence: Synthetic oligonucleotide
  Target: ATXN2; (-) strand; PAM type: YTN; PAM sequence: CTT
ctagaatctcctcacttagg

SEQ ID NO: 83897 - DNA, 20 bp, Artificial Sequence
  Description of Artificial Sequence: Synthetic oligonucleotide
  Target: ATXN2; (-) strand; PAM type: YTN; PAM sequence: TTC
agcttctagaatctcctcac

SEQ ID NO: 83898 - DNA, 20 bp, Artificial Sequence
  Description of Artificial Sequence: Synthetic oligonucleotide
  Target: ATXN2; (-) strand; PAM type: YTN; PAM sequence: TTT
cagcttctagaatctcctca

SEQ ID NO: 83899 - DNA, 20 bp, Artificial Sequence
  Description of Artificial Sequence: Synthetic oligonucleotide
  Target: ATXN2; (-) strand; PAM type: YTN; PAM sequence: TTG
taaataagtttcagcttcta

SEQ ID NO: 83900 - DNA, 20 bp, Artificial Sequence
  Description of Artificial Sequence: Synthetic oligonucleotide
  Target: ATXN2; (-) strand; PAM type: YTN; PAM sequence: CTT
gtaaataagtttcagcttct

SEQ ID NO: 83901 - DNA, 20 bp, Artificial Sequence
  Description of Artificial Sequence: Synthetic oligonucleotide
  Target: ATXN2; (-) strand; PAM type: YTN; PAM sequence: TTC
cttgtaaataagtttcagct

SEQ ID NO: 83902 - DNA, 20 bp, Artificial Sequence
  Description of Artificial Sequence: Synthetic oligonucleotide
  Target: ATXN2; (-) strand; PAM type: YTN; PAM sequence: CTG
cattccttgtaaataagttt

SEQ ID NO: 83903 - DNA, 20 bp, Artificial Sequence
  Description of Artificial Sequence: Synthetic oligonucleotide
  Target: ATXN2; (-) strand; PAM type: YTN; PAM sequence: TTC
ctgcattccttgtaaataag

SEQ ID NO: 83904 - DNA, 20 bp, Artificial Sequence
  Description of Artificial Sequence: Synthetic oligonucleotide
  Target: ATXN2; (-) strand; PAM type: YTN; PAM sequence: TTT
cctgcattccttgtaaataa

SEQ ID NO: 83905 - DNA, 20 bp, Artificial Sequence
  Description of Artificial Sequence: Synthetic oligonucleotide
  Target: ATXN2; (-) strand; PAM type: YTN; PAM sequence: CTT
tcctgcattccttgtaaata

SEQ ID NO: 83906 - DNA, 20 bp, Artificial Sequence
  Description of Artificial Sequence: Synthetic oligonucleotide
  Target: ATXN2; (-) strand; PAM type: YTN; PAM sequence: TTG
aatcactttcctgcattcct

SEQ ID NO: 83907 - DNA, 20 bp, Artificial Sequence
  Description of Artificial Sequence: Synthetic oligonucleotide
  Target: ATXN2; (-) strand; PAM type: YTN; PAM sequence: TTT
gaatcactttcctgcattcc

SEQ ID NO: 83908 - DNA, 20 bp, Artificial Sequence
  Description of Artificial Sequence: Synthetic oligonucleotide
  Target: ATXN2; (-) strand; PAM type: YTN; PAM sequence: TTG
aatttgaatcactttcctgc

SEQ ID NO: 83909 - DNA, 20 bp, Artificial Sequence
  Description of Artificial Sequence: Synthetic oligonucleotide
  Target: ATXN2; (-) strand; PAM type: YTN; PAM sequence: TTT
gaatttgaatcactttcctg

SEQ ID NO: 83910 - DNA, 20 bp, Artificial Sequence
  Description of Artificial Sequence: Synthetic oligonucleotide
  Target: ATXN2; (-) strand; PAM type: YTN; PAM sequence: CTT
tgaatttgaatcactttcct

SEQ ID NO: 83911 - DNA, 20 bp, Artificial Sequence
  Description of Artificial Sequence: Synthetic oligonucleotide
  Target: ATXN2; (-) strand; PAM type: YTN; PAM sequence: TTA
ctttgaatttgaatcacttt

SEQ ID NO: 83912 - DNA, 20 bp, Artificial Sequence
  Description of Artificial Sequence: Synthetic oligonucleotide
  Target: ATXN2; (-) strand; PAM type: YTN; PAM sequence: TTG
tagaattactttgaatttga

SEQ ID NO: 83913 - DNA, 20 bp, Artificial Sequence
  Description of Artificial Sequence: Synthetic oligonucleotide
  Target: ATXN2; (-) strand; PAM type: YTN; PAM sequence: CTT
gtagaattactttgaatttg

SEQ ID NO: 83914 - DNA, 20 bp, Artificial Sequence
  Description of Artificial Sequence: Synthetic oligonucleotide
  Target: ATXN2; (-) strand; PAM type: YTN; PAM sequence: TTA
atgtacttgtagaattactt

SEQ ID NO: 83915 - DNA, 20 bp, Artificial Sequence
  Description of Artificial Sequence: Synthetic oligonucleotide
  Target: ATXN2; (-) strand; PAM type: YTN; PAM sequence: TTG
aacagatcgttaatgtactt

SEQ ID NO: 83916 - DNA, 20 bp, Artificial Sequence
  Description of Artificial Sequence: Synthetic oligonucleotide
  Target: ATXN2; (-) strand; PAM type: YTN; PAM sequence: CTT
gaacagatcgttaatgtact

SEQ ID NO: 83917 - DNA, 20 bp, Artificial Sequence
  Description of Artificial Sequence: Synthetic oligonucleotide
  Target: ATXN2; (-) strand; PAM type: YTN; PAM sequence: TTC
ttgaacagatcgttaatgta

SEQ ID NO: 83918 - DNA, 20 bp, Artificial Sequence
  Description of Artificial Sequence: Synthetic oligonucleotide
  Target: ATXN2; (-) strand; PAM type: YTN; PAM sequence: TTA
ttcttgaacagatcgttaat

SEQ ID NO: 83919 - DNA, 20 bp, Artificial Sequence
  Description of Artificial Sequence: Synthetic oligonucleotide
  Target: ATXN2; (-) strand; PAM type: YTN; PAM sequence: TTT
attcttgaacagatcgttaa

SEQ ID NO: 83920 - DNA, 20 bp, Artificial Sequence
  Description of Artificial Sequence: Synthetic oligonucleotide
  Target: ATXN2; (-) strand; PAM type: YTN; PAM sequence: TTT
tattcttgaacagatcgtta

SEQ ID NO: 83921 - DNA, 20 bp, Artificial Sequence
  Description of Artificial Sequence: Synthetic oligonucleotide
  Target: ATXN2; (-) strand; PAM type: YTN; PAM sequence: TTG
tgtaatgtgaagttttattc

SEQ ID NO: 83922 - DNA, 20 bp, Artificial Sequence
  Description of Artificial Sequence: Synthetic oligonucleotide
  Target: ATXN2; (-) strand; PAM type: YTN; PAM sequence: TTT
gtgtaatgtgaagttttatt

SEQ ID NO: 83923 - DNA, 20 bp, Artificial Sequence
  Description of Artificial Sequence: Synthetic oligonucleotide
  Target: ATXN2; (-) strand; PAM type: YTN; PAM sequence: TTG
gatttgtgtaatgtgaagtt

SEQ ID NO: 83924 - DNA, 20 bp, Artificial Sequence
  Description of Artificial Sequence: Synthetic oligonucleotide
  Target: ATXN2; (-) strand; PAM type: YTN; PAM sequence: CTG
tgttggatttgtgtaatgtg

SEQ ID NO: 83925 - DNA, 20 bp, Artificial Sequence
  Description of Artificial Sequence: Synthetic oligonucleotide
  Target: ATXN2; (-) strand; PAM type: YTN; PAM sequence: TTA
ctgtgttggatttgtgtaat

SEQ ID NO: 83926 - DNA, 20 bp, Artificial Sequence
  Description of Artificial Sequence: Synthetic oligonucleotide
  Target: ATXN2; (-) strand; PAM type: YTN; PAM sequence: TTT
actgtgttggatttgtgtaa

SEQ ID NO: 83927 - DNA, 20 bp, Artificial Sequence
  Description of Artificial Sequence: Synthetic oligonucleotide
  Target: ATXN2; (-) strand; PAM type: YTN; PAM sequence: TTG
tttactgtgttggatttgtg

SEQ ID NO: 83928 - DNA, 20 bp, Artificial Sequence
  Description of Artificial Sequence: Synthetic oligonucleotide
  Target: ATXN2; (-) strand; PAM type: YTN; PAM sequence: TTT
gtttactgtgttggatttgt

SEQ ID NO: 83929 - DNA, 20 bp, Artificial Sequence
  Description of Artificial Sequence: Synthetic oligonucleotide
  Target: ATXN2; (-) strand; PAM type: YTN; PAM sequence: TTT
tgtttactgtgttggatttg

SEQ ID NO: 83930 - DNA, 20 bp, Artificial Sequence
  Description of Artificial Sequence: Synthetic oligonucleotide
  Target: ATXN2; (-) strand; PAM type: YTN; PAM sequence: CTG
atgaataggtgaaattttgt

SEQ ID NO: 83931 - DNA, 20 bp, Artificial Sequence
  Description of Artificial Sequence: Synthetic oligonucleotide
  Target: ATXN2; (-) strand; PAM type: YTN; PAM sequence: TTC
tgatgaataggtgaaatttt

SEQ ID NO: 83932 - DNA, 20 bp, Artificial Sequence
  Description of Artificial Sequence: Synthetic oligonucleotide
  Target: ATXN2; (-) strand; PAM type: YTN; PAM sequence: TTT
ctgatgaataggtgaaattt

SEQ ID NO: 83933 - DNA, 20 bp, Artificial Sequence
  Description of Artificial Sequence: Synthetic oligonucleotide
  Target: ATXN2; (-) strand; PAM type: YTN; PAM sequence: CTT
tctgatgaataggtgaaatt

SEQ ID NO: 83934 - DNA, 20 bp, Artificial Sequence
  Description of Artificial Sequence: Synthetic oligonucleotide
  Target: ATXN2; (-) strand; PAM type: YTN; PAM sequence: TTC
tttctgatgaataggtgaaa

SEQ ID NO: 83935 - DNA, 20 bp, Artificial Sequence
  Description of Artificial Sequence: Synthetic oligonucleotide
  Target: ATXN2; (-) strand; PAM type: YTN; PAM sequence: TTA
ttctttctgatgaataggtg

SEQ ID NO: 83936 - DNA, 20 bp, Artificial Sequence
  Description of Artificial Sequence: Synthetic oligonucleotide
  Target: ATXN2; (-) strand; PAM type: YTN; PAM sequence: CTT
attctttctgatgaataggt

SEQ ID NO: 83937 - DNA, 20 bp, Artificial Sequence
  Description of Artificial Sequence: Synthetic oligonucleotide
  Target: ATXN2; (-) strand; PAM type: YTN; PAM sequence: CTA
aatggcagcccttattcttt

SEQ ID NO: 83938 - DNA, 20 bp, Artificial Sequence
  Description of Artificial Sequence: Synthetic oligonucleotide
  Target: ATXN2; (-) strand; PAM type: YTN; PAM sequence: TTG
agacctaaatggcagccctt

SEQ ID NO: 83939 - DNA, 20 bp, Artificial Sequence
  Description of Artificial Sequence: Synthetic oligonucleotide
  Target: ATXN2; (-) strand; PAM type: YTN; PAM sequence: CTT
gagacctaaatggcagccct

SEQ ID NO: 83940 - DNA, 20 bp, Artificial Sequence
  Description of Artificial Sequence: Synthetic oligonucleotide
  Target: ATXN2; (-) strand; PAM type: YTN; PAM sequence: TTA
cttgagacctaaatggcagc

SEQ ID NO: 83941 - DNA, 20 bp, Artificial Sequence
  Description of Artificial Sequence: Synthetic oligonucleotide
  Target: ATXN2; (-) strand; PAM type: YTN; PAM sequence: TTT
acttgagacctaaatggcag

SEQ ID NO: 83942 - DNA, 20 bp, Artificial Sequence
  Description of Artificial Sequence: Synthetic oligonucleotide
  Target: ATXN2; (-) strand; PAM type: YTN; PAM sequence: TTT
tacttgagacctaaatggca

SEQ ID NO: 83943 - DNA, 20 bp, Artificial Sequence
  Description of Artificial Sequence: Synthetic oligonucleotide
  Target: ATXN2; (-) strand; PAM type: YTN; PAM sequence: CTT
ttacttgagacctaaatggc

SEQ ID NO: 83944 - DNA, 20 bp, Artificial Sequence
  Description of Artificial Sequence: Synthetic oligonucleotide
  Target: ATXN2; (-) strand; PAM type: YTN; PAM sequence: TTC
ttttacttgagacctaaatg

SEQ ID NO: 83945 - DNA, 20 bp, Artificial Sequence
  Description of Artificial Sequence: Synthetic oligonucleotide
  Target: ATXN2; (-) strand; PAM type: YTN; PAM sequence: TTA
agttcttttacttgagacct

SEQ ID NO: 83946 - DNA, 20 bp, Artificial Sequence
  Description of Artificial Sequence: Synthetic oligonucleotide
  Target: ATXN2; (-) strand; PAM type: YTN; PAM sequence: TTT
aagttcttttacttgagacc

SEQ ID NO: 83947 - DNA, 20 bp, Artificial Sequence
  Description of Artificial Sequence: Synthetic oligonucleotide
  Target: ATXN2; (-) strand; PAM type: YTN; PAM sequence: CTT
taagttcttttacttgagac

SEQ ID NO: 83948 - DNA, 20 bp, Artificial Sequence
  Description of Artificial Sequence: Synthetic oligonucleotide
  Target: ATXN2; (-) strand; PAM type: YTN; PAM sequence: TTG
ctttaagttcttttacttga

SEQ ID NO: 83949 - DNA, 20 bp, Artificial Sequence
  Description of Artificial Sequence: Synthetic oligonucleotide
  Target: ATXN2; (-) strand; PAM type: YTN; PAM sequence: CTT
gctttaagttcttttacttg

SEQ ID NO: 83950 - DNA, 20 bp, Artificial Sequence
  Description of Artificial Sequence: Synthetic oligonucleotide
  Target: ATXN2; (-) strand; PAM type: YTN; PAM sequence: TTC
cttgctttaagttcttttac

SEQ ID NO: 83951 - DNA, 20 bp, Artificial Sequence
  Description of Artificial Sequence: Synthetic oligonucleotide
  Target: ATXN2; (-) strand; PAM type: YTN; PAM sequence: TTT
ccttgctttaagttctttta

SEQ ID NO: 83952 - DNA, 20 bp, Artificial Sequence
  Description of Artificial Sequence: Synthetic oligonucleotide
  Target: ATXN2; (-) strand; PAM type: YTN; PAM sequence: TTT
tccttgctttaagttctttt

SEQ ID NO: 83953 - DNA, 20 bp, Artificial Sequence
  Description of Artificial Sequence: Synthetic oligonucleotide
  Target: ATXN2; (-) strand; PAM type: YTN; PAM sequence: TTT
ttccttgctttaagttcttt

SEQ ID NO: 83954 - DNA, 20 bp, Artificial Sequence
  Description of Artificial Sequence: Synthetic oligonucleotide
  Target: ATXN2; (-) strand; PAM type: YTN; PAM sequence: TTA
gatttttccttgctttaagt

SEQ ID NO: 83955 - DNA, 20 bp, Artificial Sequence
  Description of Artificial Sequence: Synthetic oligonucleotide
  Target: ATXN2; (-) strand; PAM type: YTN; PAM sequence: TTT
agatttttccttgctttaag

SEQ ID NO: 83956 - DNA, 20 bp, Artificial Sequence
  Description of Artificial Sequence: Synthetic oligonucleotide
  Target: ATXN2; (-) strand; PAM type: YTN; PAM sequence: TTA
atttagatttttccttgctt

SEQ ID NO: 83957 - DNA, 20 bp, Artificial Sequence
  Description of Artificial Sequence: Synthetic oligonucleotide
  Target: ATXN2; (-) strand; PAM type: YTN; PAM sequence: TTA
aggttaatttagatttttcc

SEQ ID NO: 83958 - DNA, 20 bp, Artificial Sequence
  Description of Artificial Sequence: Synthetic oligonucleotide
  Target: ATXN2; (-) strand; PAM type: YTN; PAM sequence: TTT
aaggttaatttagatttttc

SEQ ID NO: 83959 - DNA, 20 bp, Artificial Sequence
  Description of Artificial Sequence: Synthetic oligonucleotide
  Target: ATXN2; (-) strand; PAM type: YTN; PAM sequence: TTA
caacaatttaaggttaattt

SEQ ID NO: 83960 - DNA, 20 bp, Artificial Sequence
  Description of Artificial Sequence: Synthetic oligonucleotide
  Target: ATXN2; (-) strand; PAM type: YTN; PAM sequence: TTT
acaacaatttaaggttaatt

SEQ ID NO: 83961 - DNA, 20 bp, Artificial Sequence
  Description of Artificial Sequence: Synthetic oligonucleotide
  Target: ATXN2; (-) strand; PAM type: YTN; PAM sequence: CTT
tacaacaatttaaggttaat

SEQ ID NO: 83962 - DNA, 20 bp, Artificial Sequence
  Description of Artificial Sequence: Synthetic oligonucleotide
  Target: ATXN2; (-) strand; PAM type: YTN; PAM sequence: TTG
aggctttacaacaatttaag

SEQ ID NO: 83963 - DNA, 20 bp, Artificial Sequence
  Description of Artificial Sequence: Synthetic oligonucleotide
  Target: ATXN2; (-) strand; PAM type: YTN; PAM sequence: CTT
gaggctttacaacaatttaa

SEQ ID NO: 83964 - DNA, 20 bp, Artificial Sequence
  Description of Artificial Sequence: Synthetic oligonucleotide
  Target: ATXN2; (-) strand; PAM type: YTN; PAM sequence: TTC
cttgaggctttacaacaatt

SEQ ID NO: 83965 - DNA, 20 bp, Artificial Sequence
  Description of Artificial Sequence: Synthetic oligonucleotide
  Target: ATXN2; (-) strand; PAM type: YTN; PAM sequence: CTG
ttccttgaggctttacaaca

SEQ ID NO: 83966 - DNA, 20 bp, Artificial Sequence
  Description of Artificial Sequence: Synthetic oligonucleotide
  Target: ATXN2; (-) strand; PAM type: YTN; PAM sequence: TTC
tgttccttgaggctttacaa

SEQ ID NO: 83967 - DNA, 20 bp, Artificial Sequence
  Description of Artificial Sequence: Synthetic oligonucleotide
  Target: ATXN2; (-) strand; PAM type: YTN; PAM sequence: TTT
ctgttccttgaggctttaca

SEQ ID NO: 83968 - DNA, 20 bp, Artificial Sequence
  Description of Artificial Sequence: Synthetic oligonucleotide
  Target: ATXN2; (-) strand; PAM type: YTN; PAM sequence: TTT
tctgttccttgaggctttac

SEQ ID NO: 83969 - DNA, 20 bp, Artificial Sequence
  Description of Artificial Sequence: Synthetic oligonucleotide
  Target: ATXN2; (-) strand; PAM type: YTN; PAM sequence: TTT
ttctgttccttgaggcttta

SEQ ID NO: 83970 - DNA, 20 bp, Artificial Sequence
  Description of Artificial Sequence: Synthetic oligonucleotide
  Target: ATXN2; (-) strand; PAM type: YTN; PAM sequence: TTT
tttctgttccttgaggcttt

SEQ ID NO: 83971 - DNA, 20 bp, Artificial Sequence
  Description of Artificial Sequence: Synthetic oligonucleotide
  Target: ATXN2; (-) strand; PAM type: YTN; PAM sequence: CTT
ttttctgttccttgaggctt

SEQ ID NO: 83972 - DNA, 20 bp, Artificial Sequence
  Description of Artificial Sequence: Synthetic oligonucleotide
  Target: ATXN2; (-) strand; PAM type: YTN; PAM sequence: TTA
gtaccacaaggtcttttttc

SEQ ID NO: 83973 - DNA, 20 bp, Artificial Sequence
  Description of Artificial Sequence: Synthetic oligonucleotide
  Target: ATXN2; (-) strand; PAM type: YTN; PAM sequence: TTT
agtaccacaaggtctttttt

SEQ ID NO: 83974 - DNA, 20 bp, Artificial Sequence
  Description of Artificial Sequence: Synthetic oligonucleotide
  Target: ATXN2; (-) strand; PAM type: YTN; PAM sequence: TTT
tagtaccacaaggtcttttt

SEQ ID NO: 83975 - DNA, 20 bp, Artificial Sequence
  Description of Artificial Sequence: Synthetic oligonucleotide
  Target: ATXN2; (-) strand; PAM type: YTN; PAM sequence: TTG
gaatgttttagtaccacaag

SEQ ID NO: 83976 - DNA, 20 bp, Artificial Sequence
  Description of Artificial Sequence: Synthetic oligonucleotide
  Target: ATXN2; (-) strand; PAM type: YTN; PAM sequence: TTT
ggaatgttttagtaccacaa

SEQ ID NO: 83977 - DNA, 20 bp, Artificial Sequence
  Description of Artificial Sequence: Synthetic oligonucleotide
  Target: ATXN2; (-) strand; PAM type: YTN; PAM sequence: TTG
agtgatcaaagatatttgga

SEQ ID NO: 83978 - DNA, 20 bp, Artificial Sequence
  Description of Artificial Sequence: Synthetic oligonucleotide
  Target: ATXN2; (-) strand; PAM type: YTN; PAM sequence: TTT
gagtgatcaaagatatttgg

SEQ ID NO: 83979 - DNA, 20 bp, Artificial Sequence
  Description of Artificial Sequence: Synthetic oligonucleotide
  Target: ATXN2; (-) strand; PAM type: YTN; PAM sequence: CTG
agtagtttgagtgatcaaag

SEQ ID NO: 83980 - DNA, 20 bp, Artificial Sequence
  Description of Artificial Sequence: Synthetic oligonucleotide
  Target: ATXN2; (-) strand; PAM type: YTN; PAM sequence: CTC
ctgagtagtttgagtgatca

SEQ ID NO: 83981 - DNA, 20 bp, Artificial Sequence
  Description of Artificial Sequence: Synthetic oligonucleotide
  Target: ATXN2; (-) strand; PAM type: YTN; PAM sequence: TTG
ctcctgagtagtttgagtga

SEQ ID NO: 83982 - DNA, 20 bp, Artificial Sequence
  Description of Artificial Sequence: Synthetic oligonucleotide
  Target: ATXN2; (-) strand; PAM type: YTN; PAM sequence: TTT
gctcctgagtagtttgagtg

SEQ ID NO: 83983 - DNA, 20 bp, Artificial Sequence
  Description of Artificial Sequence: Synthetic oligonucleotide
  Target: ATXN2; (-) strand; PAM type: YTN; PAM sequence: TTA
taagagaatttgctcctgag

SEQ ID NO: 83984 - DNA, 20 bp, Artificial Sequence
  Description of Artificial Sequence: Synthetic oligonucleotide
  Target: ATXN2; (-) strand; PAM type: YTN; PAM sequence: TTA
gattataagagaatttgctc

SEQ ID NO: 83985 - DNA, 20 bp, Artificial Sequence
  Description of Artificial Sequence: Synthetic oligonucleotide
  Target: ATXN2; (-) strand; PAM type: YTN; PAM sequence: TTA
aaaattagattataagagaa

SEQ ID NO: 83986 - DNA, 20 bp, Artificial Sequence
  Description of Artificial Sequence: Synthetic oligonucleotide
  Target: ATXN2; (-) strand; PAM type: YTN; PAM sequence: CTT
aaaaattagattataagaga

SEQ ID NO: 83987 - DNA, 20 bp, Artificial Sequence
  Description of Artificial Sequence: Synthetic oligonucleotide
  Target: ATXN2; (-) strand; PAM type: YTN; PAM sequence: CTA
ggcttaaaaattagattata

SEQ ID NO: 83988 - DNA, 20 bp, Artificial Sequence
  Description of Artificial Sequence: Synthetic oligonucleotide
  Target: ATXN2; (-) strand; PAM type: YTN; PAM sequence: CTA
ctaggcttaaaaattagatt

SEQ ID NO: 83989 - DNA, 20 bp, Artificial Sequence
  Description of Artificial Sequence: Synthetic oligonucleotide
  Target: ATXN2; (-) strand; PAM type: YTN; PAM sequence: TTG
actactaggcttaaaaatta

SEQ ID NO: 83990 - DNA, 20 bp, Artificial Sequence
  Description of Artificial Sequence: Synthetic oligonucleotide
  Target: ATXN2; (-) strand; PAM type: YTN; PAM sequence: TTG
cattgactactaggcttaaa

SEQ ID NO: 83991 - DNA, 20 bp, Artificial Sequence
  Description of Artificial Sequence: Synthetic oligonucleotide
  Target: ATXN2; (-) strand; PAM type: YTN; PAM sequence: TTA
agttgcattgactactaggc

SEQ ID NO: 83992 - DNA, 20 bp, Artificial Sequence
  Description of Artificial Sequence: Synthetic oligonucleotide
  Target: ATXN2; (-) strand; PAM type: YTN; PAM sequence: TTA
ttaagttgcattgactacta

SEQ ID NO: 83993 - DNA, 20 bp, Artificial Sequence
  Description of Artificial Sequence: Synthetic oligonucleotide
  Target: ATXN2; (-) strand; PAM type: YTN; PAM sequence: CTA
aggttattaagttgcattga

SEQ ID NO: 83994 - DNA, 20 bp, Artificial Sequence
  Description of Artificial Sequence: Synthetic oligonucleotide
  Target: ATXN2; (-) strand; PAM type: YTN; PAM sequence: TTA
aaactaaggttattaagttg

SEQ ID NO: 83995 - DNA, 20 bp, Artificial Sequence
  Description of Artificial Sequence: Synthetic oligonucleotide
  Target: ATXN2; (-) strand; PAM type: YTN; PAM sequence: TTC
aaatatataaacattaaaac

SEQ ID NO: 83996 - DNA, 20 bp, Artificial Sequence
  Description of Artificial Sequence: Synthetic oligonucleotide
  Target: ATXN2; (-) strand; PAM type: YTN; PAM sequence: TTC
aacatgttcaaatatataaa

SEQ ID NO: 83997 - DNA, 20 bp, Artificial Sequence
  Description of Artificial Sequence: Synthetic oligonucleotide
  Target: ATXN2; (-) strand; PAM type: YTN; PAM sequence: TTG
gcagataattcaacatgttc

SEQ ID NO: 83998 - DNA, 20 bp, Artificial Sequence
  Description of Artificial Sequence: Synthetic oligonucleotide
  Target: ATXN2; (-) strand; PAM type: YTN; PAM sequence: TTT
ggcagataattcaacatgtt

SEQ ID NO: 83999 - DNA, 20 bp, Artificial Sequence
  Description of Artificial Sequence: Synthetic oligonucleotide
  Target: ATXN2; (-) strand; PAM type: YTN; PAM sequence: TTA
ggaagagatttggcagataa

SEQ ID NO: 84000 - DNA, 20 bp, Artificial Sequence
  Description of Artificial Sequence: Synthetic oligonucleotide
  Target: ATXN2; (-) strand; PAM type: YTN; PAM sequence: TTA
ggtattaggaagagatttgg

SEQ ID NO: 84001 - DNA, 20 bp, Artificial Sequence
  Description of Artificial Sequence: Synthetic oligonucleotide
  Target: ATXN2; (-) strand; PAM type: YTN; PAM sequence: CTT
aggtattaggaagagatttg

SEQ ID NO: 84002 - DNA, 20 bp, Artificial Sequence
  Description of Artificial Sequence: Synthetic oligonucleotide
  Target: ATXN2; (-) strand; PAM type: YTN; PAM sequence: TTC
ttaggtattaggaagagatt

SEQ ID NO: 84003 - DNA, 20 bp, Artificial Sequence
  Description of Artificial Sequence: Synthetic oligonucleotide
  Target: ATXN2; (-) strand; PAM type: YTN; PAM sequence: TTT
cttaggtattaggaagagat

SEQ ID NO: 84004 - DNA, 20 bp, Artificial Sequence
  Description of Artificial Sequence: Synthetic oligonucleotide
  Target: ATXN2; (-) strand; PAM type: YTN; PAM sequence: CTT
tcttaggtattaggaagaga

SEQ ID NO: 84005 - DNA, 20 bp, Artificial Sequence
  Description of Artificial Sequence: Synthetic oligonucleotide
  Target: ATXN2; (-) strand; PAM type: YTN; PAM sequence: TTA
ctttcttaggtattaggaag

SEQ ID NO: 84006 - DNA, 20 bp, Artificial Sequence
  Description of Artificial Sequence: Synthetic oligonucleotide
  Target: ATXN2; (-) strand; PAM type: YTN; PAM sequence: TTT
actttcttaggtattaggaa

SEQ ID NO: 84007 - DNA, 20 bp, Artificial Sequence
  Description of Artificial Sequence: Synthetic oligonucleotide
  Target: ATXN2; (-) strand; PAM type: YTN; PAM sequence: TTT
tactttcttaggtattagga

SEQ ID NO: 84008 - DNA, 20 bp, Artificial Sequence
  Description of Artificial Sequence: Synthetic oligonucleotide
  Target: ATXN2; (-) strand; PAM type: YTN; PAM sequence: TTT
ttactttcttaggtattagg

SEQ ID NO: 84009 - DNA, 20 bp, Artificial Sequence
  Description of Artificial Sequence: Synthetic oligonucleotide
  Target: ATXN2; (-) strand; PAM type: YTN; PAM sequence: CTG
tttttactttcttaggtatt

SEQ ID NO: 84010 - DNA, 20 bp, Artificial Sequence
  Description of Artificial Sequence: Synthetic oligonucleotide
  Target: ATXN2; (-) strand; PAM type: YTN; PAM sequence: TTC
tgtttttactttcttaggta

SEQ ID NO: 84011 - DNA, 20 bp, Artificial Sequence
  Description of Artificial Sequence: Synthetic oligonucleotide
  Target: ATXN2; (-) strand; PAM type: YTN; PAM sequence: TTA
tagaaaaggatgtattctgt

SEQ ID NO: 84012 - DNA, 20 bp, Artificial Sequence
  Description of Artificial Sequence: Synthetic oligonucleotide
  Target: ATXN2; (-) strand; PAM type: YTN; PAM sequence: TTT
atagaaaaggatgtattctg

SEQ ID NO: 84013 - DNA, 20 bp, Artificial Sequence
  Description of Artificial Sequence: Synthetic oligonucleotide
  Target: ATXN2; (-) strand; PAM type: YTN; PAM sequence: TTT
tatagaaaaggatgtattct

SEQ ID NO: 84014 - DNA, 20 bp, Artificial Sequence
  Description of Artificial Sequence: Synthetic oligonucleotide
  Target: ATXN2; (-) strand; PAM type: YTN; PAM sequence: CTT
ttatagaaaaggatgtattc

SEQ ID NO: 84015 - DNA, 20 bp, Artificial Sequence
  Description of Artificial Sequence: Synthetic oligonucleotide
  Target: ATXN2; (-) strand; PAM type: YTN; PAM sequence: TTA
aaatacaacttttatagaaa

SEQ ID NO: 84016 - DNA, 20 bp, Artificial Sequence
  Description of Artificial Sequence: Synthetic oligonucleotide
  Target: ATXN2; (-) strand; PAM type: YTN; PAM sequence: TTT
aaaatacaacttttatagaa

SEQ ID NO: 84017 - DNA, 20 bp, Artificial Sequence
  Description of Artificial Sequence: Synthetic oligonucleotide
  Target: ATXN2; (-) strand; PAM type: YTN; PAM sequence: CTA
gcgaaaaatgaaaaaattta

SEQ ID NO: 84018 - DNA, 20 bp, Artificial Sequence
  Description of Artificial Sequence: Synthetic oligonucleotide
  Target: ATXN2; (-) strand; PAM type: YTN; PAM sequence: TTG
gcatctagcgaaaaatgaaa

SEQ ID NO: 84019 - DNA, 20 bp, Artificial Sequence
  Description of Artificial Sequence: Synthetic oligonucleotide
  Target: ATXN2; (-) strand; PAM type: YTN; PAM sequence: TTC
gttggcatctagcgaaaaat

SEQ ID NO: 84020 - DNA, 20 bp, Artificial Sequence
  Description of Artificial Sequence: Synthetic oligonucleotide
  Target: ATXN2; (-) strand; PAM type: YTN; PAM sequence: TTT
cgttggcatctagcgaaaaa

SEQ ID NO: 84021 - DNA, 20 bp, Artificial Sequence
  Description of Artificial Sequence: Synthetic oligonucleotide
  Target: ATXN2; (-) strand; PAM type: YTN; PAM sequence: TTT
tcgttggcatctagcgaaaa

SEQ ID NO: 84022 - DNA, 20 bp, Artificial Sequence
  Description of Artificial Sequence: Synthetic oligonucleotide
  Target: ATXN2; (-) strand; PAM type: YTN; PAM sequence: TTT
ttcgttggcatctagcgaaa

SEQ ID NO: 84023 - DNA, 20 bp, Artificial Sequence
  Description of Artificial Sequence: Synthetic oligonucleotide
  Target: ATXN2; (-) strand; PAM type: YTN; PAM sequence: CTT
tttcgttggcatctagcgaa

SEQ ID NO: 84024 - DNA, 20 bp, Artificial Sequence
  Description of Artificial Sequence: Synthetic oligonucleotide
  Target: ATXN2; (-) strand; PAM type: YTN; PAM sequence: TTC
cctttttcgttggcatctag

SEQ ID NO: 84025 - DNA, 20 bp, Artificial Sequence
  Description of Artificial Sequence: Synthetic oligonucleotide
  Target: ATXN2; (-) strand; PAM type: YTN; PAM sequence: TTT
ccctttttcgttggcatcta

SEQ ID NO: 84026 - DNA, 20 bp, Artificial Sequence
  Description of Artificial Sequence: Synthetic oligonucleotide
  Target: ATXN2; (-) strand; PAM type: YTN; PAM sequence: TTC
agtttccctttttcgttggc

SEQ ID NO: 84027 - DNA, 20 bp, Artificial Sequence
  Description of Artificial Sequence: Synthetic oligonucleotide
  Target: ATXN2; (-) strand; PAM type: YTN; PAM sequence: CTT
cagtttccctttttcgttgg

SEQ ID NO: 84028 - DNA, 20 bp, Artificial Sequence
  Description of Artificial Sequence: Synthetic oligonucleotide
  Target: ATXN2; (-) strand; PAM type: YTN; PAM sequence: TTC
cccaagtagggtaacttcag

SEQ ID NO: 84029 - DNA, 20 bp, Artificial Sequence
  Description of Artificial Sequence: Synthetic oligonucleotide
  Target: ATXN2; (-) strand; PAM type: YTN; PAM sequence: TTT
ccccaagtagggtaacttca

SEQ ID NO: 84030 - DNA, 20 bp, Artificial Sequence
  Description of Artificial Sequence: Synthetic oligonucleotide
  Target: ATXN2; (-) strand; PAM type: YTN; PAM sequence: TTC
agatgaagtgatcgtttccc

SEQ ID NO: 84031 - DNA, 20 bp, Artificial Sequence
  Description of Artificial Sequence: Synthetic oligonucleotide
  Target: ATXN2; (-) strand; PAM type: YTN; PAM sequence: CTA
gttcagatgaagtgatcgtt

SEQ ID NO: 84032 - DNA, 20 bp, Artificial Sequence
  Description of Artificial Sequence: Synthetic oligonucleotide
  Target: ATXN2; (-) strand; PAM type: YTN; PAM sequence: TTA
gccaaactagttcagatgaa

SEQ ID NO: 84033 - DNA, 20 bp, Artificial Sequence
  Description of Artificial Sequence: Synthetic oligonucleotide
  Target: ATXN2; (-) strand; PAM type: YTN; PAM sequence: CTT
agccaaactagttcagatga

SEQ ID NO: 84034 - DNA, 20 bp, Artificial Sequence
  Description of Artificial Sequence: Synthetic oligonucleotide
  Target: ATXN2; (-) strand; PAM type: YTN; PAM sequence: CTA
cttagccaaactagttcaga

SEQ ID NO: 84035 - DNA, 20 bp, Artificial Sequence
  Description of Artificial Sequence: Synthetic oligonucleotide
  Target: ATXN2; (-) strand; PAM type: YTN; PAM sequence: CTG
aagcatcccaaacactactt

SEQ ID NO: 84036 - DNA, 20 bp, Artificial Sequence
  Description of Artificial Sequence: Synthetic oligonucleotide
  Target: ATXN2; (-) strand; PAM type: YTN; PAM sequence: CTG
agtctgaagcatcccaaaca

SEQ ID NO: 84037 - DNA, 20 bp, Artificial Sequence
  Description of Artificial Sequence: Synthetic oligonucleotide
  Target: ATXN2; (-) strand; PAM type: YTN; PAM sequence: CTC
tgagtctgaagcatcccaaa

SEQ ID NO: 84038 - DNA, 20 bp, Artificial Sequence
  Description of Artificial Sequence: Synthetic oligonucleotide
  Target: ATXN2; (-) strand; PAM type: YTN; PAM sequence: TTC
tctgagtctgaagcatccca

SEQ ID NO: 84039 - DNA, 20 bp, Artificial Sequence
  Description of Artificial Sequence: Synthetic oligonucleotide
  Target: ATXN2; (-) strand; PAM type: YTN; PAM sequence: CTT
ctctgagtctgaagcatccc

SEQ ID NO: 84040 - DNA, 20 bp, Artificial Sequence
  Description of Artificial Sequence: Synthetic oligonucleotide
  Target: ATXN2; (-) strand; PAM type: YTN; PAM sequence: TTC
cccttctctgagtctgaagc

SEQ ID NO: 84041 - DNA, 20 bp, Artificial Sequence
  Description of Artificial Sequence: Synthetic oligonucleotide
  Target: ATXN2; (-) strand; PAM type: YTN; PAM sequence: CTT
ccccttctctgagtctgaag

SEQ ID NO: 84042 - DNA, 20 bp, Artificial Sequence
  Description of Artificial Sequence: Synthetic oligonucleotide
  Target: ATXN2; (-) strand; PAM type: YTN; PAM sequence: TTA
cacgccccgcccccccttcc

SEQ ID NO: 84043 - DNA, 20 bp, Artificial Sequence
  Description of Artificial Sequence: Synthetic oligonucleotide
  Target: ATXN2; (-) strand; PAM type: YTN; PAM sequence: TTT
acacgccccgcccccccttc

SEQ ID NO: 84044 - DNA, 20 bp, Artificial Sequence
  Description of Artificial Sequence: Synthetic oligonucleotide
  Target: ATXN2; (-) strand; PAM type: YTN; PAM sequence: CTT
tacacgccccgccccccctt

SEQ ID NO: 84045 - DNA, 20 bp, Artificial Sequence
  Description of Artificial Sequence: Synthetic oligonucleotide
  Target: ATXN2; (-) strand; PAM type: YTN; PAM sequence: TTG
actttacacgccccgccccc

SEQ ID NO: 84046 - DNA, 20 bp, Artificial Sequence
  Description of Artificial Sequence: Synthetic oligonucleotide
  Target: ATXN2; (-) strand; PAM type: YTN; PAM sequence: TTT
gactttacacgccccgcccc

SEQ ID NO: 84047 - DNA, 20 bp, Artificial Sequence
  Description of Artificial Sequence: Synthetic oligonucleotide
  Target: ATXN2; (-) strand; PAM type: YTN; PAM sequence: TTA
tttgactttacacgccccgc

SEQ ID NO: 84048 - DNA, 20 bp, Artificial Sequence
  Description of Artificial Sequence: Synthetic oligonucleotide
  Target: ATXN2; (-) strand; PAM type: YTN; PAM sequence: TTC
aaagggggcggaaacagtcg

SEQ ID NO: 84049 - DNA, 20 bp, Artificial Sequence
  Description of Artificial Sequence: Synthetic oligonucleotide
  Target: ATXN2; (-) strand; PAM type: YTN; PAM sequence: CTT
caaagggggcggaaacagtc

SEQ ID NO: 84050 - DNA, 20 bp, Artificial Sequence
  Description of Artificial Sequence: Synthetic oligonucleotide
  Target: ATXN2; (-) strand; PAM type: YTN; PAM sequence: CTG
ccttcaaagggggcggaaac

SEQ ID NO: 84051 - DNA, 20 bp, Artificial Sequence
  Description of Artificial Sequence: Synthetic oligonucleotide
  Target: ATXN2; (-) strand; PAM type: YTN; PAM sequence: CTG
ctgccttcaaagggggcgga

SEQ ID NO: 84052 - DNA, 20 bp, Artificial Sequence
  Description of Artificial Sequence: Synthetic oligonucleotide
  Target: ATXN2; (-) strand; PAM type: YTN; PAM sequence: TTC
tgctgccttcaaagggggcg

SEQ ID NO: 84053 - DNA, 20 bp, Artificial Sequence
  Description of Artificial Sequence: Synthetic oligonucleotide
  Target: ATXN2; (-) strand; PAM type: YTN; PAM sequence: TTA
aggaattctgctgccttcaa

SEQ ID NO: 84054 - DNA, 20 bp, Artificial Sequence
  Description of Artificial Sequence: Synthetic oligonucleotide
  Target: ATXN2; (-) strand; PAM type: YTN; PAM sequence: TTT
aaggaattctgctgccttca

SEQ ID NO: 84055 - DNA, 20 bp, Artificial Sequence
  Description of Artificial Sequence: Synthetic oligonucleotide
  Target: ATXN2; (-) strand; PAM type: YTN; PAM sequence: TTT
taaggaattctgctgccttc

SEQ ID NO: 84056 - DNA, 20 bp, Artificial Sequence
  Description of Artificial Sequence: Synthetic oligonucleotide
  Target: ATXN2; (-) strand; PAM type: YTN; PAM sequence: TTT
ttaaggaattctgctgcctt

SEQ ID NO: 84057 - DNA, 20 bp, Artificial Sequence
  Description of Artificial Sequence: Synthetic oligonucleotide
  Target: ATXN2; (-) strand; PAM type: YTN; PAM sequence: CTG
gtttttaaggaattctgctg

SEQ ID NO: 84058 - DNA, 20 bp, Artificial Sequence
  Description of Artificial Sequence: Synthetic oligonucleotide
  Target: ATXN2; (-) strand; PAM type: YTN; PAM sequence: TTC
cccatcaagaggaatcagct

SEQ ID NO: 84059 - DNA, 20 bp, Artificial Sequence
  Description of Artificial Sequence: Synthetic oligonucleotide
  Target: ATXN2; (-) strand; PAM type: YTN; PAM sequence: TTA
cagcagaaattccccatcaa

SEQ ID NO: 84060 - DNA, 20 bp, Artificial Sequence
  Description of Artificial Sequence: Synthetic oligonucleotide
  Target: ATXN2; (-) strand; PAM type: YTN; PAM sequence: TTT
acagcagaaattccccatca

SEQ ID NO: 84061 - DNA, 20 bp, Artificial Sequence
  Description of Artificial Sequence: Synthetic oligonucleotide
  Target: ATXN2; (-) strand; PAM type: YTN; PAM sequence: TTA
tttacagcagaaattcccca

SEQ ID NO: 84062 - DNA, 20 bp, Artificial Sequence
  Description of Artificial Sequence: Synthetic oligonucleotide
  Target: ATXN2; (-) strand; PAM type: YTN; PAM sequence: TTT
atttacagcagaaattcccc

SEQ ID NO: 84063 - DNA, 20 bp, Artificial Sequence
  Description of Artificial Sequence: Synthetic oligonucleotide
  Target: ATXN2; (-) strand; PAM type: YTN; PAM sequence: TTT
tatttacagcagaaattccc

SEQ ID NO: 84064 - DNA, 20 bp, Artificial Sequence
  Description of Artificial Sequence: Synthetic oligonucleotide
  Target: ATXN2; (-) strand; PAM type: YTN; PAM sequence: TTT
ttatttacagcagaaattcc

SEQ ID NO: 84065 - DNA, 20 bp, Artificial Sequence
  Description of Artificial Sequence: Synthetic oligonucleotide
  Target: ATXN2; (-) strand; PAM type: YTN; PAM sequence: TTC
caaagaatttttatttacag

SEQ ID NO: 84066 - DNA, 20 bp, Artificial Sequence
  Description of Artificial Sequence: Synthetic oligonucleotide
  Target: ATXN2; (-) strand; PAM type: YTN; PAM sequence: TTT
ccaaagaatttttatttaca

SEQ ID NO: 84067 - DNA, 20 bp, Artificial Sequence
  Description of Artificial Sequence: Synthetic oligonucleotide
  Target: ATXN2; (-) strand; PAM type: YTN; PAM sequence: TTC
agcaacccatttccaaagaa

SEQ ID NO: 84068 - DNA, 20 bp, Artificial Sequence
  Description of Artificial Sequence: Synthetic oligonucleotide
  Target: ATXN2; (-) strand; PAM type: YTN; PAM sequence: TTT
cagcaacccatttccaaaga

SEQ ID NO: 84069 - DNA, 20 bp, Artificial Sequence
  Description of Artificial Sequence: Synthetic oligonucleotide
  Target: ATXN2; (-) strand; PAM type: YTN; PAM sequence: TTT
tcagcaacccatttccaaag

SEQ ID NO: 84070 - DNA, 20 bp, Artificial Sequence
  Description of Artificial Sequence: Synthetic oligonucleotide
  Target: ATXN2; (-) strand; PAM type: YTN; PAM sequence: TTG
aaaacacattttcagcaacc

SEQ ID NO: 84071 - DNA, 20 bp, Artificial Sequence
  Description of Artificial Sequence: Synthetic oligonucleotide
  Target: ATXN2; (-) strand; PAM type: YTN; PAM sequence: TTT
gaaaacacattttcagcaac

SEQ ID NO: 84072 - DNA, 20 bp, Artificial Sequence
  Description of Artificial Sequence: Synthetic oligonucleotide
  Target: ATXN2; (-) strand; PAM type: YTN; PAM sequence: TTT
tgaaaacacattttcagcaa

SEQ ID NO: 84073 - DNA, 20 bp, Artificial Sequence
  Description of Artificial Sequence: Synthetic oligonucleotide
  Target: ATXN2; (-) strand; PAM type: YTN; PAM sequence: TTT
ttgaaaacacattttcagca

SEQ ID NO: 84074 - DNA, 20 bp, Artificial Sequence
  Description of Artificial Sequence: Synthetic oligonucleotide
  Target: ATXN2; (-) strand; PAM type: YTN; PAM sequence: CTT
tttgaaaacacattttcagc

SEQ ID NO: 84075 - DNA, 20 bp, Artificial Sequence
  Description of Artificial Sequence: Synthetic oligonucleotide
  Target: ATXN2; (-) strand; PAM type: YTN; PAM sequence: TTC
tttttgaaaacacattttca

SEQ ID NO: 84076 - DNA, 20 bp, Artificial Sequence
  Description of Artificial Sequence: Synthetic oligonucleotide
  Target: ATXN2; (-) strand; PAM type: YTN; PAM sequence: TTT
ctttttgaaaacacattttc

SEQ ID NO: 84077 - DNA, 20 bp, Artificial Sequence
  Description of Artificial Sequence: Synthetic oligonucleotide
  Target: ATXN2; (-) strand; PAM type: YTN; PAM sequence: TTT
tctttttgaaaacacatttt

SEQ ID NO: 84078 - DNA, 20 bp, Artificial Sequence
  Description of Artificial Sequence: Synthetic oligonucleotide
  Target: ATXN2; (-) strand; PAM type: YTN; PAM sequence: TTC
acccgagttttctttttgaa

SEQ ID NO: 84079 - DNA, 20 bp, Artificial Sequence
  Description of Artificial Sequence: Synthetic oligonucleotide
  Target: ATXN2; (-) strand; PAM type: YTN; PAM sequence: TTC
attcacccgagttttctttt

SEQ ID NO: 84080 - DNA, 20 bp, Artificial Sequence
  Description of Artificial Sequence: Synthetic oligonucleotide
  Target: ATXN2; (-) strand; PAM type: YTN; PAM sequence: TTT
cattcacccgagttttcttt

SEQ ID NO: 84081 - DNA, 20 bp, Artificial Sequence
  Description of Artificial Sequence: Synthetic oligonucleotide
  Target: ATXN2; (-) strand; PAM type: YTN; PAM sequence: TTT
tcattcacccgagttttctt

SEQ ID NO: 84082 - DNA, 20 bp, Artificial Sequence
  Description of Artificial Sequence: Synthetic oligonucleotide
  Target: ATXN2; (-) strand; PAM type: YTN; PAM sequence: TTT
ttcattcacccgagttttct

SEQ ID NO: 84083 - DNA, 20 bp, Artificial Sequence
  Description of Artificial Sequence: Synthetic oligonucleotide
  Target: ATXN2; (-) strand; PAM type: YTN; PAM sequence: TTG
gaaggtggaataagaggatt

SEQ ID NO: 84084 - DNA, 20 bp, Artificial Sequence
  Description of Artificial Sequence: Synthetic oligonucleotide
  Target: ATXN2; (-) strand; PAM type: YTN; PAM sequence: TTT
ggaaggtggaataagaggat

SEQ ID NO: 84085 - DNA, 20 bp, Artificial Sequence
  Description of Artificial Sequence: Synthetic oligonucleotide
  Target: ATXN2; (-) strand; PAM type: YTN; PAM sequence: CTT
tggaaggtggaataagagga

SEQ ID NO: 84086 - DNA, 20 bp, Artificial Sequence
  Description of Artificial Sequence: Synthetic oligonucleotide
  Target: ATXN2; (-) strand; PAM type: YTN; PAM sequence: TTG
ggctttggaaggtggaataa

SEQ ID NO: 84087 - DNA, 20 bp, Artificial Sequence
  Description of Artificial Sequence: Synthetic oligonucleotide
  Target: ATXN2; (-) strand; PAM type: YTN; PAM sequence: CTT
gggctttggaaggtggaata

SEQ ID NO: 84088 - DNA, 20 bp, Artificial Sequence
  Description of Artificial Sequence: Synthetic oligonucleotide
  Target: ATXN2; (-) strand; PAM type: YTN; PAM sequence: TTA
aataggcatcttgggctttg

SEQ ID NO: 84089 - DNA, 20 bp, Artificial Sequence
  Description of Artificial Sequence: Synthetic oligonucleotide
  Target: ATXN2; (-) strand; PAM type: YTN; PAM sequence: CTT
aaataggcatcttgggcttt

SEQ ID NO: 84090 - DNA, 20 bp, Artificial Sequence
  Description of Artificial Sequence: Synthetic oligonucleotide
  Target: ATXN2; (-) strand; PAM type: YTN; PAM sequence: CTC
cttaaataggcatcttgggc

SEQ ID NO: 84091 - DNA, 20 bp, Artificial Sequence
  Description of Artificial Sequence: Synthetic oligonucleotide
  Target: ATXN2; (-) strand; PAM type: YTN; PAM sequence: TTG
acggcgggtgaccggcgtcc

SEQ ID NO: 84092 - DNA, 20 bp, Artificial Sequence
  Description of Artificial Sequence: Synthetic oligonucleotide
  Target: ATXN2; (-) strand; PAM type: YTN; PAM sequence: CTT
gacggcgggtgaccggcgtc

SEQ ID NO: 84093 - DNA, 20 bp, Artificial Sequence
  Description of Artificial Sequence: Synthetic oligonucleotide
  Target: ATXN2; (-) strand; PAM type: YTN; PAM sequence: CTA
ggccgccggcttgacggcgg

SEQ ID NO: 84094 - DNA, 20 bp, Artificial Sequence
  Description of Artificial Sequence: Synthetic oligonucleotide
  Target: ATXN2; (-) strand; PAM type: YTN; PAM sequence: TTA
ggcctaggccgccggcttga

SEQ ID NO: 84095 - DNA, 20 bp, Artificial Sequence
  Description of Artificial Sequence: Synthetic oligonucleotide
  Target: ATXN2; (-) strand; PAM type: YTN; PAM sequence: TTT
aggcctaggccgccggcttg

SEQ ID NO: 84096 - DNA, 20 bp, Artificial Sequence
  Description of Artificial Sequence: Synthetic oligonucleotide
  Target: ATXN2; (-) strand; PAM type: YTN; PAM sequence: CTT
taggcctaggccgccggctt

SEQ ID NO: 84097 - DNA, 20 bp, Artificial Sequence
  Description of Artificial Sequence: Synthetic oligonucleotide
  Target: ATXN2; (-) strand; PAM type: YTN; PAM sequence: TTC
tttaggcctaggccgccggc

SEQ ID NO: 84098 - DNA, 20 bp, Artificial Sequence
  Description of Artificial Sequence: Synthetic oligonucleotide
  Target: ATXN2; (-) strand; PAM type: YTN; PAM sequence: CTT
ctttaggcctaggccgccgg

SEQ ID NO: 84099 - DNA, 20 bp, Artificial Sequence
  Description of Artificial Sequence: Synthetic oligonucleotide
  Target: ATXN2; (-) strand; PAM type: YTN; PAM sequence: CTG
tgccttctttaggcctaggc

SEQ ID NO: 84100 - DNA, 20 bp, Artificial Sequence
  Description of Artificial Sequence: Synthetic oligonucleotide
  Target: ATXN2; (-) strand; PAM type: YTN; PAM sequence: CTA
ctgtgccttctttaggccta

SEQ ID NO: 84101 - DNA, 20 bp, Artificial Sequence
  Description of Artificial Sequence: Synthetic oligonucleotide
  Target: ATXN2; (-) strand; PAM type: YTN; PAM sequence: TTG
taggcactactgtgccttct

SEQ ID NO: 84102 - DNA, 20 bp, Artificial Sequence
  Description of Artificial Sequence: Synthetic oligonucleotide
  Target: ATXN2; (-) strand; PAM type: YTN; PAM sequence: CTC
aagtccatccgtgttgtagg

SEQ ID NO: 84103 - DNA, 20 bp, Artificial Sequence
  Description of Artificial Sequence: Synthetic oligonucleotide
  Target: ATXN2; (-) strand; PAM type: YTN; PAM sequence: TTG
tgcctcaagtccatccgtgt

SEQ ID NO: 84104 - DNA, 20 bp, Artificial Sequence
  Description of Artificial Sequence: Synthetic oligonucleotide
  Target: ATXN2; (-) strand; PAM type: YTN; PAM sequence: CTT
gtgcctcaagtccatccgtg

SEQ ID NO: 84105 - DNA, 20 bp, Artificial Sequence
  Description of Artificial Sequence: Synthetic oligonucleotide
  Target: ATXN2; (-) strand; PAM type: YTN; PAM sequence: TTC
ccttgtgcctcaagtccatc

SEQ ID NO: 84106 - DNA, 20 bp, Artificial Sequence
  Description of Artificial Sequence: Synthetic oligonucleotide
  Target: ATXN2; (-) strand; PAM type: YTN; PAM sequence: TTT
cccttgtgcctcaagtccat

SEQ ID NO: 84107 - DNA, 20 bp, Artificial Sequence
  Description of Artificial Sequence: Synthetic oligonucleotide
  Target: ATXN2; (-) strand; PAM type: YTN; PAM sequence: TTA
ccaagggcacgcaagtccat

SEQ ID NO: 84108 - DNA, 20 bp, Artificial Sequence
  Description of Artificial Sequence: Synthetic oligonucleotide
  Target: ATXN2; (-) strand; PAM type: YTN; PAM sequence: CTT
accaagggcacgcaagtcca

SEQ ID NO: 84109 - DNA, 20 bp, Artificial Sequence
  Description of Artificial Sequence: Synthetic oligonucleotide
  Target: ATXN2; (-) strand; PAM type: YTN; PAM sequence: TTC
gggagtgccgccagagctta

SEQ ID NO: 84110 - DNA, 20 bp, Artificial Sequence
  Description of Artificial Sequence: Synthetic oligonucleotide
  Target: ATXN2; (-) strand; PAM type: YTN; PAM sequence: CTT
cgggagtgccgccagagctt

SEQ ID NO: 84111 - DNA, 20 bp, Artificial Sequence
  Description of Artificial Sequence: Synthetic oligonucleotide
  Target: ATXN2; (-) strand; PAM type: YTN; PAM sequence: TTA
acttcgggagtgccgccaga

SEQ ID NO: 84112 - DNA, 20 bp, Artificial Sequence
  Description of Artificial Sequence: Synthetic oligonucleotide
  Target: ATXN2; (-) strand; PAM type: YTN; PAM sequence: CTT
aacttcgggagtgccgccag

SEQ ID NO: 84113 - DNA, 20 bp, Artificial Sequence
  Description of Artificial Sequence: Synthetic oligonucleotide
  Target: ATXN2; (-) strand; PAM type: YTN; PAM sequence: TTG
tggccggtgtccttaacttc

SEQ ID NO: 84114 - DNA, 20 bp, Artificial Sequence
  Description of Artificial Sequence: Synthetic oligonucleotide
  Target: ATXN2; (-) strand; PAM type: YTN; PAM sequence: TTC
cattgtggccggtgtcctta

SEQ ID NO: 84115 - DNA, 20 bp, Artificial Sequence
  Description of Artificial Sequence: Synthetic oligonucleotide
  Target: ATXN2; (-) strand; PAM type: YTN; PAM sequence: CTC
cattccattgtggccggtgt

SEQ ID NO: 84116 - DNA, 20 bp, Artificial Sequence
  Description of Artificial Sequence: Synthetic oligonucleotide
  Target: ATXN2; (-) strand; PAM type: YTN; PAM sequence: TTC
aaagggagaaggaaacgtca

SEQ ID NO: 84117 - DNA, 20 bp, Artificial Sequence
  Description of Artificial Sequence: Synthetic oligonucleotide
  Target: ATXN2; (-) strand; PAM type: YTN; PAM sequence: TTA
gtgttcaaagggagaaggaa

SEQ ID NO: 84118 - DNA, 20 bp, Artificial Sequence
  Description of Artificial Sequence: Synthetic oligonucleotide
  Target: ATXN2; (-) strand; PAM type: YTN; PAM sequence: CTT
agtgttcaaagggagaagga

SEQ ID NO: 84119 - DNA, 20 bp, Artificial Sequence
  Description of Artificial Sequence: Synthetic oligonucleotide
  Target: ATXN2; (-) strand; PAM type: YTN; PAM sequence: CTA
agaaaatgcttagtgttcaa

SEQ ID NO: 84120 - DNA, 20 bp, Artificial Sequence
  Description of Artificial Sequence: Synthetic oligonucleotide
  Target: ATXN2; (-) strand; PAM type: YTN; PAM sequence: TTC
acgaactaagaaaatgctta

SEQ ID NO: 84121 - DNA, 20 bp, Artificial Sequence
  Description of Artificial Sequence: Synthetic oligonucleotide
  Target: ATXN2; (-) strand; PAM type: YTN; PAM sequence: TTT
cacgaactaagaaaatgctt

SEQ ID NO: 84122 - DNA, 20 bp, Artificial Sequence
  Description of Artificial Sequence: Synthetic oligonucleotide
  Target: ATXN2; (-) strand; PAM type: YTN; PAM sequence: TTC
gtatttcacgaactaagaaa

SEQ ID NO: 84123 - DNA, 20 bp, Artificial Sequence
  Description of Artificial Sequence: Synthetic oligonucleotide
  Target: ATXN2; (-) strand; PAM type: YTN; PAM sequence: TTG
tcagttcgtatttcacgaac

SEQ ID NO: 84124 - DNA, 20 bp, Artificial Sequence
  Description of Artificial Sequence: Synthetic oligonucleotide
  Target: ATXN2; (-) strand; PAM type: YTN; PAM sequence: TTG
ggggtggcgggcggttgtca

SEQ ID NO: 84125 - DNA, 20 bp, Artificial Sequence
  Description of Artificial Sequence: Synthetic oligonucleotide
  Target: ATXN2; (-) strand; PAM type: YTN; PAM sequence: CTG
ttgggggtggcgggcggttg

SEQ ID NO: 84126 - DNA, 20 bp, Artificial Sequence
  Description of Artificial Sequence: Synthetic oligonucleotide
  Target: ATXN2; (-) strand; PAM type: YTN; PAM sequence: TTG
tgcaggagggcctgttgggg

SEQ ID NO: 84127 - DNA, 20 bp, Artificial Sequence
  Description of Artificial Sequence: Synthetic oligonucleotide
  Target: ATXN2; (-) strand; PAM type: YTN; PAM sequence: TTT
gtgcaggagggcctgttggg

SEQ ID NO: 84128 - DNA, 20 bp, Artificial Sequence
  Description of Artificial Sequence: Synthetic oligonucleotide
  Target: ATXN2; (-) strand; PAM type: YTN; PAM sequence: CTC
gagggtgtgtttgtgcagga

SEQ ID NO: 84129 - DNA, 20 bp, Artificial Sequence
  Description of Artificial Sequence: Synthetic oligonucleotide
  Target: ATXN2; (-) strand; PAM type: YTN; PAM sequence: TTG
actcgagggtgtgtttgtgc

SEQ ID NO: 84130 - DNA, 20 bp, Artificial Sequence
  Description of Artificial Sequence: Synthetic oligonucleotide
  Target: ATXN2; (-) strand; PAM type: YTN; PAM sequence: TTT
gactcgagggtgtgtttgtg

SEQ ID NO: 84131 - DNA, 20 bp, Artificial Sequence
  Description of Artificial Sequence: Synthetic oligonucleotide
  Target: ATXN2; (-) strand; PAM type: YTN; PAM sequence: CTG
ggtttgactcgagggtgtgt

SEQ ID NO: 84132 - DNA, 20 bp, Artificial Sequence
  Description of Artificial Sequence: Synthetic oligonucleotide
  Target: ATXN2; (-) strand; PAM type: YTN; PAM sequence: CTA
actgggtttgactcgagggt

SEQ ID NO: 84133 - DNA, 20 bp, Artificial Sequence
  Description of Artificial Sequence: Synthetic oligonucleotide
  Target: ATXN2; (-) strand; PAM type: YTN; PAM sequence: TTG
tcccggctaactgggtttga

SEQ ID NO: 84134 - DNA, 20 bp, Artificial Sequence
  Description of Artificial Sequence: Synthetic oligonucleotide
  Target: ATXN2; (-) strand; PAM type: YTN; PAM sequence: CTC
agtgttgtcccggctaactg

SEQ ID NO: 84135 - DNA, 20 bp, Artificial Sequence
  Description of Artificial Sequence: Synthetic oligonucleotide
  Target: ATXN2; (-) strand; PAM type: YTN; PAM sequence: CTG
ggggctcagtgttgtcccgg

SEQ ID NO: 84136 - DNA, 20 bp, Artificial Sequence
  Description of Artificial Sequence: Synthetic oligonucleotide
  Target: ATXN2; (-) strand; PAM type: YTN; PAM sequence: TTG
tagtaggggctgggggctca

SEQ ID NO: 84137 - DNA, 20 bp, Artificial Sequence
  Description of Artificial Sequence: Synthetic oligonucleotide
  Target: ATXN2; (-) strand; PAM type: YTN; PAM sequence: CTA
agccggggttgtagtagggg

SEQ ID NO: 84138 - DNA, 20 bp, Artificial Sequence
  Description of Artificial Sequence: Synthetic oligonucleotide
  Target: ATXN2; (-) strand; PAM type: YTN; PAM sequence: CTC
ctaagccggggttgtagtag

SEQ ID NO: 84139 - DNA, 20 bp, Artificial Sequence
  Description of Artificial Sequence: Synthetic oligonucleotide
  Target: ATXN2; (-) strand; PAM type: YTN; PAM sequence: TTC
cctcctaagccggggttgta

SEQ ID NO: 84140 - DNA, 20 bp, Artificial Sequence
  Description of Artificial Sequence: Synthetic oligonucleotide
  Target: ATXN2; (-) strand; PAM type: YTN; PAM sequence: TTT
ccctcctaagccggggttgt

SEQ ID NO: 84141 - DNA, 20 bp, Artificial Sequence
  Description of Artificial Sequence: Synthetic oligonucleotide
  Target: ATXN2; (-) strand; PAM type: YTN; PAM sequence: TTT
tccctcctaagccggggttg

SEQ ID NO: 84142 - DNA, 20 bp, Artificial Sequence
  Description of Artificial Sequence: Synthetic oligonucleotide
  Target: ATXN2; (-) strand; PAM type: YTN; PAM sequence: TTT
ttccctcctaagccggggtt

SEQ ID NO: 84143 - DNA, 20 bp, Artificial Sequence
  Description of Artificial Sequence: Synthetic oligonucleotide
  Target: ATXN2; (-) strand; PAM type: YTN; PAM sequence: CTT
tttccctcctaagccggggt

SEQ ID NO: 84144 - DNA, 20 bp, Artificial Sequence
  Description of Artificial Sequence: Synthetic oligonucleotide
  Target: ATXN2; (-) strand; PAM type: YTN; PAM sequence: CTA
gcgtctttttccctcctaag

SEQ ID NO: 84145 - DNA, 20 bp, Artificial Sequence
  Description of Artificial Sequence: Synthetic oligonucleotide
  Target: ATXN2; (-) strand; PAM type: YTN; PAM sequence: TTA
ctagcgtctttttccctcct

SEQ ID NO: 84146 - DNA, 20 bp, Artificial Sequence
  Description of Artificial Sequence: Synthetic oligonucleotide
  Target: ATXN2; (-) strand; PAM type: YTN; PAM sequence: TTT
actagcgtctttttccctcc

SEQ ID NO: 84147 - DNA, 20 bp, Artificial Sequence
  Description of Artificial Sequence: Synthetic oligonucleotide
  Target: ATXN2; (-) strand; PAM type: YTN; PAM sequence: CTG
aaggcagaaaggcgggtgtt

SEQ ID NO: 84148 - DNA, 20 bp, Artificial Sequence
  Description of Artificial Sequence: Synthetic oligonucleotide
  Target: ATXN2; (-) strand; PAM type: YTN; PAM sequence: TTC
ctgaaggcagaaaggcgggt

SEQ ID NO: 84149 - DNA, 20 bp, Artificial Sequence
  Description of Artificial Sequence: Synthetic oligonucleotide
  Target: ATXN2; (-) strand; PAM type: YTN; PAM sequence: TTG
cagcaggggacgtggtcggg

SEQ ID NO: 84150 - DNA, 20 bp, Artificial Sequence
  Description of Artificial Sequence: Synthetic oligonucleotide
  Target: ATXN2; (-) strand; PAM type: YTN; PAM sequence: CTA
ggagagagagattgcagcag

SEQ ID NO: 84151 - DNA, 20 bp, Artificial Sequence
  Description of Artificial Sequence: Synthetic oligonucleotide
  Target: ATXN2; (-) strand; PAM type: YTN; PAM sequence: TTC
ggaaatgctaggagagagag

SEQ ID NO: 84152 - DNA, 20 bp, Artificial Sequence
  Description of Artificial Sequence: Synthetic oligonucleotide
  Target: ATXN2; (-) strand; PAM type: YTN; PAM sequence: TTT
cggaaatgctaggagagaga

SEQ ID NO: 84153 - DNA, 20 bp, Artificial Sequence
  Description of Artificial Sequence: Synthetic oligonucleotide
  Target: ATXN2; (-) strand; PAM type: YTN; PAM sequence: TTA
tcccaacccccgccccaatt

SEQ ID NO: 84154 - DNA, 20 bp, Artificial Sequence
  Description of Artificial Sequence: Synthetic oligonucleotide
  Target: ATXN2; (-) strand; PAM type: YTN; PAM sequence: CTT
atcccaacccccgccccaat

SEQ ID NO: 84155 - DNA, 20 bp, Artificial Sequence
  Description of Artificial Sequence: Synthetic oligonucleotide
  Target: ATXN2; (-) strand; PAM type: YTN; PAM sequence: CTG
cgcacttatcccaacccccg

SEQ ID NO: 84156 - DNA, 20 bp, Artificial Sequence
  Description of Artificial Sequence: Synthetic oligonucleotide
  Target: ATXN2; (-) strand; PAM type: YTN; PAM sequence: CTG
gtggcagggggcgggcaccc

SEQ ID NO: 84157 - DNA, 20 bp, Artificial Sequence
  Description of Artificial Sequence: Synthetic oligonucleotide
  Target: ATXN2; (-) strand; PAM type: YTN; PAM sequence: CTG
gagatccggggtggcggtgc

SEQ ID NO: 84158 - DNA, 20 bp, Artificial Sequence
  Description of Artificial Sequence: Synthetic oligonucleotide
  Target: ATXN2; (-) strand; PAM type: YTN; PAM sequence: CTG
gaccctggagatccggggtg

SEQ ID NO: 84159 - DNA, 20 bp, Artificial Sequence
  Description of Artificial Sequence: Synthetic oligonucleotide
  Target: ATXN2; (-) strand; PAM type: YTN; PAM sequence: CTG
gacccaggctggaccctgga

SEQ ID NO: 84160 - DNA, 20 bp, Artificial Sequence
  Description of Artificial Sequence: Synthetic oligonucleotide
  Target: ATXN2; (-) strand; PAM type: YTN; PAM sequence: CTG
tggaacatcggtgggtgagg

SEQ ID NO: 84161 - DNA, 20 bp, Artificial Sequence
  Description of Artificial Sequence: Synthetic oligonucleotide
  Target: ATXN2; (-) strand; PAM type: YTN; PAM sequence: TTC
gaggccgcagtggagaaggc

SEQ ID NO: 84162 - DNA, 20 bp, Artificial Sequence
  Description of Artificial Sequence: Synthetic oligonucleotide
  Target: ATXN2; (-) strand; PAM type: YTN; PAM sequence: CTG
ttcgaggccgcagtggagaa

SEQ ID NO: 84163 - DNA, 20 bp, Artificial Sequence
  Description of Artificial Sequence: Synthetic oligonucleotide
  Target: ATXN2; (-) strand; PAM type: YTN; PAM sequence: TTG
ctgttcgaggccgcagtgga

SEQ ID NO: 84164 - DNA, 20 bp, Artificial Sequence
  Description of Artificial Sequence: Synthetic oligonucleotide
  Target: ATXN2; (-) strand; PAM type: YTN; PAM sequence: CTC
cggcgcgcgggtggtggccg

SEQ ID NO: 84165 - DNA, 20 bp, Artificial Sequence
  Description of Artificial Sequence: Synthetic oligonucleotide
  Target: ATXN2; (-) strand; PAM type: YTN; PAM sequence: CTC
tccggcgcgcgggtggtggc

SEQ ID NO: 84166 - DNA, 20 bp, Artificial Sequence
  Description of Artificial Sequence: Synthetic oligonucleotide
  Target: ATXN2; (-) strand; PAM type: YTN; PAM sequence: TTC
ccccgccagacctctccggc

SEQ ID NO: 84167 - DNA, 20 bp, Artificial Sequence
  Description of Artificial Sequence: Synthetic oligonucleotide
  Target: ATXN2; (-) strand; PAM type: YTN; PAM sequence: CTT
cccccgccagacctctccgg

SEQ ID NO: 84168 - DNA, 20 bp, Artificial Sequence
  Description of Artificial Sequence: Synthetic oligonucleotide
  Target: ATXN2; (-) strand; PAM type: YTN; PAM sequence: CTC
cttcccccgccagacctctc

SEQ ID NO: 84169 - DNA, 20 bp, Artificial Sequence
  Description of Artificial Sequence: Synthetic oligonucleotide
  Target: ATXN2; (-) strand; PAM type: YTN; PAM sequence: TTC
ctccttcccccgccagacct

SEQ ID NO: 84170 - DNA, 20 bp, Artificial Sequence
  Description of Artificial Sequence: Synthetic oligonucleotide
  Target: ATXN2; (-) strand; PAM type: YTN; PAM sequence: CTT
cctccttcccccgccagacc

SEQ ID NO: 84171 - DNA, 20 bp, Artificial Sequence
  Description of Artificial Sequence: Synthetic oligonucleotide
  Target: ATXN2; (-) strand; PAM type: YTN; PAM sequence: CTG
gggaagggaaggggtgggga

SEQ ID NO: 84172 - DNA, 20 bp, Artificial Sequence
  Description of Artificial Sequence: Synthetic oligonucleotide
  Target: ATXN2; (-) strand; PAM type: YTN; PAM sequence: CTC
ccccacctggggaagggaag

SEQ ID NO: 84173 - DNA, 20 bp, Artificial Sequence
  Description of Artificial Sequence: Synthetic oligonucleotide
  Target: ATXN2; (-) strand; PAM type: YTN; PAM sequence: TTC
caccctcccccacctgggga

SEQ ID NO: 84174 - DNA, 20 bp, Artificial Sequence
  Description of Artificial Sequence: Synthetic oligonucleotide
  Target: ATXN2; (-) strand; PAM type: YTN; PAM sequence: CTC
cggcagcgttccaccctccc

SEQ ID NO: 84175 - DNA, 20 bp, Artificial Sequence
  Description of Artificial Sequence: Synthetic oligonucleotide
  Target: ATXN2; (-) strand; PAM type: YTN; PAM sequence: CTC
catgtggcctccggcagcgt

SEQ ID NO: 84176 - DNA, 20 bp, Artificial Sequence
  Description of Artificial Sequence: Synthetic oligonucleotide
  Target: ATXN2; (-) strand; PAM type: YTN; PAM sequence: CTG
aaatcgtggggctccatgtg

SEQ ID NO: 84177 - DNA, 20 bp, Artificial Sequence
  Description of Artificial Sequence: Synthetic oligonucleotide
  Target: ATXN2; (-) strand; PAM type: YTN; PAM sequence: CTC
ccctgaaatcgtggggctcc

SEQ ID NO: 84178 - DNA, 20 bp, Artificial Sequence
  Description of Artificial Sequence: Synthetic oligonucleotide
  Target: ATXN2; (-) strand; PAM type: YTN; PAM sequence: CTC
ccgaactcccctgaaatcgt

SEQ ID NO: 84179 - DNA, 20 bp, Artificial Sequence
  Description of Artificial Sequence: Synthetic oligonucleotide
  Target: ATXN2; (-) strand; PAM type: YTN; PAM sequence: TTC
gtgtccgaggcggcggcggg

SEQ ID NO: 84180 - DNA, 20 bp, Artificial Sequence
  Description of Artificial Sequence: Synthetic oligonucleotide
  Target: ATXN2; (-) strand; PAM type: YTN; PAM sequence: CTG
cgttcgtgtccgaggcggcg

SEQ ID NO: 84181 - DNA, 20 bp, Artificial Sequence
  Description of Artificial Sequence: Synthetic oligonucleotide
  Target: ATXN2; (-) strand; PAM type: YTN; PAM sequence: CTC
tgcgttcgtgtccgaggcgg

SEQ ID NO: 84182 - DNA, 20 bp, Artificial Sequence
  Description of Artificial Sequence: Synthetic oligonucleotide
  Target: ATXN2; (-) strand; PAM type: YTN; PAM sequence: TTG
gcccccgcacccctctgcgt

SEQ ID NO: 84183 - DNA, 20 bp, Artificial Sequence
  Description of Artificial Sequence: Synthetic oligonucleotide
  Target: ATXN2; (-) strand; PAM type: YTN; PAM sequence: CTT
ggcccccgcacccctctgcg

SEQ ID NO: 84184 - DNA, 20 bp, Artificial Sequence
  Description of Artificial Sequence: Synthetic oligonucleotide
  Target: ATXN2; (-) strand; PAM type: YTN; PAM sequence: CTG
ggaaagatcggaggacgggg

SEQ ID NO: 84185 - DNA, 20 bp, Artificial Sequence
  Description of Artificial Sequence: Synthetic oligonucleotide
  Target: ATXN2; (-) strand; PAM type: YTN; PAM sequence: CTC
cgagtcctgggaaagatcgg

SEQ ID NO: 84186 - DNA, 20 bp, Artificial Sequence
  Description of Artificial Sequence: Synthetic oligonucleotide
  Target: ATXN2; (-) strand; PAM type: YTN; PAM sequence: CTC
cccgccccctccgagtcctg

SEQ ID NO: 84187 - DNA, 20 bp, Artificial Sequence
  Description of Artificial Sequence: Synthetic oligonucleotide
  Target: ATXN2; (-) strand; PAM type: YTN; PAM sequence: CTC
tccccgccccctccgagtcc

SEQ ID NO: 84188 - DNA, 20 bp, Artificial Sequence
  Description of Artificial Sequence: Synthetic oligonucleotide
  Target: ATXN2; (-) strand; PAM type: YTN; PAM sequence: CTC
tctccccgccccctccgagt

SEQ ID NO: 84189 - DNA, 20 bp, Artificial Sequence
  Description of Artificial Sequence: Synthetic oligonucleotide
  Target: ATXN2; (-) strand; PAM type: YTN; PAM sequence: CTG
tcggggctctctccccgccc

SEQ ID NO: 84190 - DNA, 20 bp, Artificial Sequence
  Description of Artificial Sequence: Synthetic oligonucleotide
  Target: ATXN2; (-) strand; PAM type: YTN; PAM sequence: CTC
cggaatcatcagggtctgtc

SEQ ID NO: 84191 - DNA, 20 bp, Artificial Sequence
  Description of Artificial Sequence: Synthetic oligonucleotide
  Target: ATXN2; (-) strand; PAM type: YTN; PAM sequence: CTC
ctccggaatcatcagggtct

SEQ ID NO: 84192 - DNA, 20 bp, Artificial Sequence
  Description of Artificial Sequence: Synthetic oligonucleotide
  Target: ATXN2; (-) strand; PAM type: YTN; PAM sequence: TTA
aaggggtaggcaccgggctc

SEQ ID NO: 84193 - DNA, 20 bp, Artificial Sequence
  Description of Artificial Sequence: Synthetic oligonucleotide
  Target: ATXN2; (-) strand; PAM type: YTN; PAM sequence: TTA
gggccgcgtcccccgtgccg

SEQ ID NO: 84194 - DNA, 20 bp, Artificial Sequence
  Description of Artificial Sequence: Synthetic oligonucleotide
  Target: ATXN2; (-) strand; PAM type: YTN; PAM sequence: CTG
gaggggagaagttagggccg

SEQ ID NO: 84195 - DNA, 20 bp, Artificial Sequence
  Description of Artificial Sequence: Synthetic oligonucleotide
  Target: ATXN2; (-) strand; PAM type: YTN; PAM sequence: CTC
tggaggggagaagttagggc

SEQ ID NO: 84196 - DNA, 20 bp, Artificial Sequence
  Description of Artificial Sequence: Synthetic oligonucleotide
  Target: ATXN2; (-) strand; PAM type: YTN; PAM sequence: CTC
catgggggacatctctggag

SEQ ID NO: 84197 - DNA, 20 bp, Artificial Sequence
  Description of Artificial Sequence: Synthetic oligonucleotide
  Target: ATXN2; (-) strand; PAM type: YTN; PAM sequence: TTC
cggaacatgtccccctccat

SEQ ID NO: 84198 - DNA, 20 bp, Artificial Sequence
  Description of Artificial Sequence: Synthetic oligonucleotide
  Target: ATXN2; (-) strand; PAM type: YTN; PAM sequence: TTT
ccggaacatgtccccctcca

SEQ ID NO: 84199 - DNA, 20 bp, Artificial Sequence
  Description of Artificial Sequence: Synthetic oligonucleotide
  Target: ATXN2; (-) strand; PAM type: YTN; PAM sequence: TTT
tccggaacatgtccccctcc

SEQ ID NO: 84200 - DNA, 20 bp, Artificial Sequence
  Description of Artificial Sequence: Synthetic oligonucleotide
  Target: ATXN2; (-) strand; PAM type: YTN; PAM sequence: CTG
tggtggcgttttccggaaca

SEQ ID NO: 84201 - DNA, 20 bp, Artificial Sequence
  Description of Artificial Sequence: Synthetic oligonucleotide
  Target: ATXN2; (-) strand; PAM type: YTN; PAM sequence: CTG
gaggctgtggtggcgttttc

SEQ ID NO: 84202 - DNA, 20 bp, Artificial Sequence
  Description of Artificial Sequence: Synthetic oligonucleotide
  Target: ATXN2; (-) strand; PAM type: YTN; PAM sequence: TTG
gaggggtctggaggctgtgg

SEQ ID NO: 84203 - DNA, 20 bp, Artificial Sequence
  Description of Artificial Sequence: Synthetic oligonucleotide
  Target: ATXN2; (-) strand; PAM type: YTN; PAM sequence: TTA
ggtgtgaacgttggaggggt

SEQ ID NO: 84204 - DNA, 20 bp, Artificial Sequence
  Description of Artificial Sequence: Synthetic oligonucleotide
  Target: ATXN2; (-) strand; PAM type: YTN; PAM sequence: TTT
aggtgtgaacgttggagggg

SEQ ID NO: 84205 - DNA, 20 bp, Artificial Sequence
  Description of Artificial Sequence: Synthetic oligonucleotide
  Target: ATXN2; (-) strand; PAM type: YTN; PAM sequence: CTC
ccggtttaggtgtgaacgtt

SEQ ID NO: 84206 - DNA, 20 bp, Artificial Sequence
  Description of Artificial Sequence: Synthetic oligonucleotide
  Target: ATXN2; (-) strand; PAM type: YTN; PAM sequence: CTC
cactcccggtttaggtgtga

SEQ ID NO: 84207 - DNA, 20 bp, Artificial Sequence
  Description of Artificial Sequence: Synthetic oligonucleotide
  Target: ATXN2; (-) strand; PAM type: YTN; PAM sequence: CTC
ctccactcccggtttaggtg

SEQ ID NO: 84208 - DNA, 20 bp, Artificial Sequence
  Description of Artificial Sequence: Synthetic oligonucleotide
  Target: ATXN2; (-) strand; PAM type: YTN; PAM sequence: CTC
gggcagctcctccactcccg

SEQ ID NO: 84209 - DNA, 20 bp, Artificial Sequence
  Description of Artificial Sequence: Synthetic oligonucleotide
  Target: ATXN2; (-) strand; PAM type: YTN; PAM sequence: CTC
cgcccgcagcgtggggatgc

SEQ ID NO: 84210 - DNA, 20 bp, Artificial Sequence
  Description of Artificial Sequence: Synthetic oligonucleotide
  Target: ATXN2; (-) strand; PAM type: YTN; PAM sequence: TTC
cgcacgatcctccgcccgca

SEQ ID NO: 84211 - DNA, 20 bp, Artificial Sequence
  Description of Artificial Sequence: Synthetic oligonucleotide
  Target: ATXN2; (-) strand; PAM type: YTN; PAM sequence: CTT
ccgcacgatcctccgcccgc

SEQ ID NO: 84212 - DNA, 20 bp, Artificial Sequence
  Description of Artificial Sequence: Synthetic oligonucleotide
  Target: ATXN2; (-) strand; PAM type: YTN; PAM sequence: CTC
ccccttccgcacgatcctcc

SEQ ID NO: 84213 - DNA, 20 bp, Artificial Sequence
  Description of Artificial Sequence: Synthetic oligonucleotide
  Target: ATXN2; (-) strand; PAM type: YTN; PAM sequence: CTC
gggtagcggcgatggtcagc

SEQ ID NO: 84214 - DNA, 20 bp, Artificial Sequence
  Description of Artificial Sequence: Synthetic oligonucleotide
  Target: ATXN2; (-) strand; PAM type: YTN; PAM sequence: TTC
tcgggtagcggcgatggtca

SEQ ID NO: 84215 - DNA, 20 bp, Artificial Sequence
  Description of Artificial Sequence: Synthetic oligonucleotide
  Target: ATXN2; (-) strand; PAM type: YTN; PAM sequence: TTG
ggaggggttctcgggtagcg

SEQ ID NO: 84216 - DNA, 20 bp, Artificial Sequence
  Description of Artificial Sequence: Synthetic oligonucleotide
  Target: ATXN2; (-) strand; PAM type: YTN; PAM sequence: CTC
cccacgcgtgttgggagggg

SEQ ID NO: 84217 - DNA, 20 bp, Artificial Sequence
  Description of Artificial Sequence: Synthetic oligonucleotide
  Target: ATXN2; (-) strand; PAM type: YTN; PAM sequence: CTC
ccctccccacgcgtgttggg

SEQ ID NO: 84218 - DNA, 20 bp, Artificial Sequence
  Description of Artificial Sequence: Synthetic oligonucleotide
  Target: ATXN2; (-) strand; PAM type: YTN; PAM sequence: CTC
ccccggcggtcaagatggag

SEQ ID NO: 84219 - DNA, 20 bp, Artificial Sequence
  Description of Artificial Sequence: Synthetic oligonucleotide
  Target: ATXN2; (-) strand; PAM type: YTN; PAM sequence: CTC
ccgcagcatccccgccccct

SEQ ID NO: 84220 - DNA, 20 bp, Artificial Sequence
  Description of Artificial Sequence: Synthetic oligonucleotide
  Target: ATXN2; (-) strand; PAM type: YTN; PAM sequence: CTG
tccagcctcccgcagcatcc

SEQ ID NO: 84221 - DNA, 20 bp, Artificial Sequence
  Description of Artificial Sequence: Synthetic oligonucleotide
  Target: ATXN2; (-) strand; PAM type: YTN; PAM sequence: TTG
tcaggcctgtccagcctccc

SEQ ID NO: 84222 - DNA, 20 bp, Artificial Sequence
  Description of Artificial Sequence: Synthetic oligonucleotide
  Target: ATXN2; (-) strand; PAM type: YTN; PAM sequence: CTG
ggattgtcaggcctgtccag

SEQ ID NO: 84223 - DNA, 20 bp, Artificial Sequence
  Description of Artificial Sequence: Synthetic oligonucleotide
  Target: ATXN2; (-) strand; PAM type: YTN; PAM sequence: CTC
tgggattgtcaggcctgtcc

SEQ ID NO: 84224 - DNA, 20 bp, Artificial Sequence
  Description of Artificial Sequence: Synthetic oligonucleotide
  Target: ATXN2; (-) strand; PAM type: YTN; PAM sequence: CTC
ggccggtgggcgcagccggg

SEQ ID NO: 84225 - DNA, 20 bp, Artificial Sequence
  Description of Artificial Sequence: Synthetic oligonucleotide
  Target: ATXN2; (-) strand; PAM type: YTN; PAM sequence: CTG
agccccgaggctcggccggt

SEQ ID NO: 84226 - DNA, 20 bp, Artificial Sequence
  Description of Artificial Sequence: Synthetic oligonucleotide
  Target: ATXN2; (-) strand; PAM type: YTN; PAM sequence: CTC
gggcctgagccccgaggctc

SEQ ID NO: 84227 - DNA, 20 bp, Artificial Sequence
  Description of Artificial Sequence: Synthetic oligonucleotide
  Target: ATXN2; (-) strand; PAM type: YTN; PAM sequence: CTC
gctcgggcctgagccccgag

SEQ ID NO: 84228 - DNA, 20 bp, Artificial Sequence
  Description of Artificial Sequence: Synthetic oligonucleotide
  Target: ATXN2; (-) strand; PAM type: YTN; PAM sequence: CTG
ggggccggcagcgcggggga

SEQ ID NO: 84229 - DNA, 20 bp, Artificial Sequence
  Description of Artificial Sequence: Synthetic oligonucleotide
  Target: ATXN2; (-) strand; PAM type: YTN; PAM sequence: CTA
cccggggtgggctgggggcc

SEQ ID NO: 84230 - DNA, 20 bp, Artificial Sequence
  Description of Artificial Sequence: Synthetic oligonucleotide
  Target: ATXN2; (-) strand; PAM type: YTN; PAM sequence: CTC
ccccgcggcccgcgccgccg

SEQ ID NO: 84231 - DNA, 20 bp, Artificial Sequence
  Description of Artificial Sequence: Synthetic oligonucleotide
  Target: ATXN2; (-) strand; PAM type: YTN; PAM sequence: CTC
cgggcccggcgtcccctccc

SEQ ID NO: 84232 - DNA, 20 bp, Artificial Sequence
  Description of Artificial Sequence: Synthetic oligonucleotide
  Target: ATXN2; (-) strand; PAM type: YTN; PAM sequence: CTC
cgctccgggcccggcgtccc

SEQ ID NO: 84233 - DNA, 20 bp, Artificial Sequence
  Description of Artificial Sequence: Synthetic oligonucleotide
  Target: ATXN2; (-) strand; PAM type: YTN; PAM sequence: CTG
ggcaggtgggtgtcggcacc

SEQ ID NO: 84234 - DNA, 20 bp, Artificial Sequence
  Description of Artificial Sequence: Synthetic oligonucleotide
  Target: ATXN2; (-) strand; PAM type: YTN; PAM sequence: CTC
cggcggcgggaggcccggcc

SEQ ID NO: 84235 - DNA, 20 bp, Artificial Sequence
  Description of Artificial Sequence: Synthetic oligonucleotide
  Target: ATXN2; (-) strand; PAM type: YTN; PAM sequence: CTC
ggtggtcgcggcgacctccg

SEQ ID NO: 84236 - DNA, 20 bp, Artificial Sequence
  Description of Artificial Sequence: Synthetic oligonucleotide
  Target: ATXN2; (-) strand; PAM type: YTN; PAM sequence: CTC
ctcggtggtcgcggcgacct

SEQ ID NO: 84237 - DNA, 20 bp, Artificial Sequence
  Description of Artificial Sequence: Synthetic oligonucleotide
  Target: ATXN2; (-) strand; PAM type: YTN; PAM sequence: CTC
cctcctcggtggtcgcggcg

SEQ ID NO: 84238 - DNA, 20 bp, Artificial Sequence
  Description of Artificial Sequence: Synthetic oligonucleotide
  Target: ATXN2; (-) strand; PAM type: YTN; PAM sequence: CTC
ggccacggctccctcctcgg

SEQ ID NO: 84239 - DNA, 20 bp, Artificial Sequence
  Description of Artificial Sequence: Synthetic oligonucleotide
  Target: ATXN2; (-) strand; PAM type: YTN; PAM sequence: CTC
gtcctcggccacggctccct

SEQ ID NO: 84240 - DNA, 20 bp, Artificial Sequence
  Description of Artificial Sequence: Synthetic oligonucleotide
  Target: ATXN2; (-) strand; PAM type: YTN; PAM sequence: CTC
ctcgtcctcggccacggctc

SEQ ID NO: 84241 - DNA, 20 bp, Artificial Sequence
  Description of Artificial Sequence: Synthetic oligonucleotide
  Target: ATXN2; (-) strand; PAM type: YTN; PAM sequence: CTC
ggtctcctcgtcctcggcca

SEQ ID NO: 84242 - DNA, 20 bp, Artificial Sequence
  Description of Artificial Sequence: Synthetic oligonucleotide
  Target: ATXN2; (-) strand; PAM type: YTN; PAM sequence: CTC
gtcctcggtctcctcgtcct

SEQ ID NO: 84243 - DNA, 20 bp, Artificial Sequence
  Description of Artificial Sequence: Synthetic oligonucleotide
  Target: ATXN2; (-) strand; PAM type: YTN; PAM sequence: TTC
gccgtcctcgtcctcggtct

SEQ ID NO: 84244 - DNA, 20 bp, Artificial Sequence
  Description of Artificial Sequence: Synthetic oligonucleotide
  Target: ATXN2; (-) strand; PAM type: YTN; PAM sequence: CTT
cgccgtcctcgtcctcggtc

SEQ ID NO: 84245 - DNA, 20 bp, Artificial Sequence
  Description of Artificial Sequence: Synthetic oligonucleotide
  Target: ATXN2; (-) strand; PAM type: YTN; PAM sequence: CTA
gcgtcgcccgccgccgcgcc

SEQ ID NO: 84246 - DNA, 20 bp, Artificial Sequence
  Description of Artificial Sequence: Synthetic oligonucleotide
  Target: ATXN2; (-) strand; PAM type: YTN; PAM sequence: TTC
tagcgtcgcccgccgccgcg

SEQ ID NO: 84247 - DNA, 20 bp, Artificial Sequence
  Description of Artificial Sequence: Synthetic oligonucleotide
  Target: ATXN2; (-) strand; PAM type: YTN; PAM sequence: CTT
ctagcgtcgcccgccgccgc

SEQ ID NO: 84248 - DNA, 20 bp, Artificial Sequence
  Description of Artificial Sequence: Synthetic oligonucleotide
  Target: ATXN2; (-) strand; PAM type: YTN; PAM sequence: CTG
ccaatgtccgcaagcccggc

SEQ ID NO: 84249 - DNA, 20 bp, Artificial Sequence
  Description of Artificial Sequence: Synthetic oligonucleotide
  Target: ATXN2; (-) strand; PAM type: YTN; PAM sequence: CTG
aagccccagcagcagcagca

SEQ ID NO: 84250 - DNA, 20 bp, Artificial Sequence
  Description of Artificial Sequence: Synthetic oligonucleotide
  Target: ATXN2; (-) strand; PAM type: YTN; PAM sequence: CTC
accatgtcgctgaagcccca

SEQ ID NO: 84251 - DNA, 20 bp, Artificial Sequence
  Description of Artificial Sequence: Synthetic oligonucleotide
  Target: ATXN2; (-) strand; PAM type: YTN; PAM sequence: CTG
tccccgcccggcgtgcgagc

SEQ ID NO: 84252 - DNA, 20 bp, Artificial Sequence
  Description of Artificial Sequence: Synthetic oligonucleotide
  Target: ATXN2; (-) strand; PAM type: YTN; PAM sequence: CTC
ccggctgtccccgcccggcg

SEQ ID NO: 84253 - DNA, 20 bp, Artificial Sequence
  Description of Artificial Sequence: Synthetic oligonucleotide
  Target: ATXN2; (-) strand; PAM type: YTN; PAM sequence: TTG
gcgcgcccggctcccggctg

SEQ ID NO: 84254 - DNA, 20 bp, Artificial Sequence
  Description of Artificial Sequence: Synthetic oligonucleotide
  Target: ATXN2; (-) strand; PAM type: YTN; PAM sequence: CTT
ggcgcgcccggctcccggct

SEQ ID NO: 84255 - DNA, 20 bp, Artificial Sequence
  Description of Artificial Sequence: Synthetic oligonucleotide
  Target: ATXN2; (-) strand; PAM type: YTN; PAM sequence: CTC
cttggcgcgcccggctcccg

SEQ ID NO: 84256 - DNA, 20 bp, Artificial Sequence
  Description of Artificial Sequence: Synthetic oligonucleotide
  Target: ATXN2; (-) strand; PAM type: YTN; PAM sequence: TTC
cggcgtctccttggcgcgcc

SEQ ID NO: 84257 - DNA, 20 bp, Artificial Sequence
  Description of Artificial Sequence: Synthetic oligonucleotide
  Target: ATXN2; (-) strand; PAM type: YTN; PAM sequence: CTC
ggcgcccgcgcgtccccgcc

SEQ ID NO: 84258 - DNA, 20 bp, Artificial Sequence
  Description of Artificial Sequence: Synthetic oligonucleotide
  Target: ATXN2; (-) strand; PAM type: YTN; PAM sequence: CTC
cccgctcggcgcccgcgcgt

SEQ ID NO: 84259 - DNA, 20 bp, Artificial Sequence
  Description of Artificial Sequence: Synthetic oligonucleotide
  Target: ATXN2; (-) strand; PAM type: YTN; PAM sequence: CTC
cggccgcgccaacccgcgcc

SEQ ID NO: 84260 - DNA, 20 bp, Artificial Sequence
  Description of Artificial Sequence: Synthetic oligonucleotide
  Target: ATXN2; (-) strand; PAM type: YTN; PAM sequence: CTC
gccagcccgggcgcccctcc

SEQ ID NO: 84261 - DNA, 20 bp, Artificial Sequence
  Description of Artificial Sequence: Synthetic oligonucleotide
  Target: ATXN2; (-) strand; PAM type: YTN; PAM sequence: CTC
cccctcgccagcccgggcgc

SEQ ID NO: 84262 - DNA, 20 bp, Artificial Sequence
  Description of Artificial Sequence: Synthetic oligonucleotide
  Target: ATXN2; (-) strand; PAM type: YTN; PAM sequence: TTC
tccccctcgccagcccgggc

SEQ ID NO: 84263 - DNA, 20 bp, Artificial Sequence
  Description of Artificial Sequence: Synthetic oligonucleotide
  Target: ATXN2; (-) strand; PAM type: YTN; PAM sequence: CTT
ctccccctcgccagcccggg

SEQ ID NO: 84264 - DNA, 20 bp, Artificial Sequence
  Description of Artificial Sequence: Synthetic oligonucleotide
  Target: ATXN2; (-) strand; PAM type: YTN; PAM sequence: CTC
cttctccccctcgccagccc

SEQ ID NO: 84265 - DNA, 20 bp, Artificial Sequence
  Description of Artificial Sequence: Synthetic oligonucleotide
  Target: ATXN2; (-) strand; PAM type: YTN; PAM sequence: TTC
gtcgtcctccttctccccct

SEQ ID NO: 84266 - DNA, 20 bp, Artificial Sequence
  Description of Artificial Sequence: Synthetic oligonucleotide
  Target: ATXN2; (-) strand; PAM type: YTN; PAM sequence: CTT
cgtcgtcctccttctccccc

SEQ ID NO: 84267 - DNA, 20 bp, Artificial Sequence
  Description of Artificial Sequence: Synthetic oligonucleotide
  Target: ATXN2; (-) strand; PAM type: YTN; PAM sequence: CTC
cccgccccttcgtcgtcctc

SEQ ID NO: 84268 - DNA, 20 bp, Artificial Sequence
  Description of Artificial Sequence: Synthetic oligonucleotide
  Target: ATXN2; (-) strand; PAM type: YTN; PAM sequence: CTC
ggcgggcctccccgcccctt

SEQ ID NO: 84269 - DNA, 20 bp, Artificial Sequence
  Description of Artificial Sequence: Synthetic oligonucleotide
  Target: ATXN2; (-) strand; PAM type: YTN; PAM sequence: TTG
gtctcggcgggcctccccgc

SEQ ID NO: 84270 - DNA, 20 bp, Artificial Sequence
  Description of Artificial Sequence: Synthetic oligonucleotide
  Target: ATXN2; (-) strand; PAM type: YTN; PAM sequence: CTT
ggtctcggcgggcctccccg

SEQ ID NO: 84271 - DNA, 20 bp, Artificial Sequence
  Description of Artificial Sequence: Synthetic oligonucleotide
  Target: ATXN2; (-) strand; PAM type: YTN; PAM sequence: CTC
cttggtctcggcgggcctcc

SEQ ID NO: 84272 - DNA, 20 bp, Artificial Sequence
  Description of Artificial Sequence: Synthetic oligonucleotide
  Target: ATXN2; (-) strand; PAM type: YTN; PAM sequence: CTC
ccggcggctccttggtctcg

SEQ ID NO: 84273 - DNA, 20 bp, Artificial Sequence
  Description of Artificial Sequence: Synthetic oligonucleotide
  Target: ATXN2; (-) strand; PAM type: YTN; PAM sequence: TTC
ggcccggctcccggcggctc

SEQ ID NO: 84274 - DNA, 20 bp, Artificial Sequence
  Description of Artificial Sequence: Synthetic oligonucleotide
  Target: ATXN2; (-) strand; PAM type: YTN; PAM sequence: TTT
cggcccggctcccggcggct

SEQ ID NO: 84275 - DNA, 20 bp, Artificial Sequence
  Description of Artificial Sequence: Synthetic oligonucleotide
  Target: ATXN2; (-) strand; PAM type: YTN; PAM sequence: TTG
gtagcaacggcaacggcggc

SEQ ID NO: 84276 - DNA, 20 bp, Artificial Sequence
  Description of Artificial Sequence: Synthetic oligonucleotide
  Target: ATXN2; (-) strand; PAM type: YTN; PAM sequence: TTT
ggtagcaacggcaacggcgg

SEQ ID NO: 84277 - DNA, 20 bp, Artificial Sequence
  Description of Artificial Sequence: Synthetic oligonucleotide
  Target: ATXN2; (-) strand; PAM type: YTN; PAM sequence: TTT
tggtagcaacggcaacggcg

SEQ ID NO: 84278 - DNA, 20 bp, Artificial Sequence
  Description of Artificial Sequence: Synthetic oligonucleotide
  Target: ATXN2; (-) strand; PAM type: YTN; PAM sequence: CTG
ttttggtagcaacggcaacg

SEQ ID NO: 84279 - DNA, 20 bp, Artificial Sequence
  Description of Artificial Sequence: Synthetic oligonucleotide
  Target: ATXN2; (-) strand; PAM type: YTN; PAM sequence: CTC
agactgttttggtagcaacg

SEQ ID NO: 84280 - DNA, 20 bp, Artificial Sequence
  Description of Artificial Sequence: Synthetic oligonucleotide
  Target: ATXN2; (-) strand; PAM type: YTN; PAM sequence: CTC
cgcctcagactgttttggta

SEQ ID NO: 84281 - DNA, 20 bp, Artificial Sequence
  Description of Artificial Sequence: Synthetic oligonucleotide
  Target: ATXN2; (-) strand; PAM type: YTN; PAM sequence: CTC
cctccgcctcagactgtttt

SEQ ID NO: 84282 - DNA, 20 bp, Artificial Sequence
  Description of Artificial Sequence: Synthetic oligonucleotide
  Target: ATXN2; (-) strand; PAM type: YTN; PAM sequence: CTC
gcctccctccgcctcagact

SEQ ID NO: 84283 - DNA, 20 bp, Artificial Sequence
  Description of Artificial Sequence: Synthetic oligonucleotide
  Target: ATXN2; (-) strand; PAM type: YTN; PAM sequence: CTC
ccggcagagctcgcctccct

SEQ ID NO: 84284 - DNA, 20 bp, Artificial Sequence
  Description of Artificial Sequence: Synthetic oligonucleotide
  Target: ATXN2; (-) strand; PAM type: YTN; PAM sequence: CTC
cctcccggcagagctcgcct

SEQ ID NO: 84285 - DNA, 20 bp, Artificial Sequence
  Description of Artificial Sequence: Synthetic oligonucleotide
  Target: ATXN2; (-) strand; PAM type: YTN; PAM sequence: CTC
ccccgcccggccccggcccc

SEQ ID NO: 84286 - DNA, 20 bp, Artificial Sequence
  Description of Artificial Sequence: Synthetic oligonucleotide
  Target: ATXN2; (-) strand; PAM type: YTN; PAM sequence: CTC
cgccgcccctcccccgcccg

SEQ ID NO: 84287 - DNA, 20 bp, Artificial Sequence
  Description of Artificial Sequence: Synthetic oligonucleotide
  Target: ATXN2; (-) strand; PAM type: YTN; PAM sequence: CTC
cagcggccggcgcggcggag

SEQ ID NO: 84288 - DNA, 20 bp, Artificial Sequence
  Description of Artificial Sequence: Synthetic oligonucleotide
  Target: ATXN2; (-) strand; PAM type: YTN; PAM sequence: CTC
gctccagcggccggcgcggc

SEQ ID NO: 84289 - DNA, 20 bp, Artificial Sequence
  Description of Artificial Sequence: Synthetic oligonucleotide
  Target: ATXN2; (-) strand; PAM type: YTN; PAM sequence: TTC
gccgcagccaggtggcccgg

SEQ ID NO: 84290 - DNA, 20 bp, Artificial Sequence
  Description of Artificial Sequence: Synthetic oligonucleotide
  Target: ATXN2; (-) strand; PAM type: YTN; PAM sequence: CTT
cgccgcagccaggtggcccg

SEQ ID NO: 84291 - DNA, 20 bp, Artificial Sequence
  Description of Artificial Sequence: Synthetic oligonucleotide
  Target: ATXN2; (-) strand; PAM type: YTN; PAM sequence: CTC
gccgcttcgccgcagccagg

SEQ ID NO: 84292 - DNA, 20 bp, Artificial Sequence
  Description of Artificial Sequence: Synthetic oligonucleotide
  Target: ATXN2; (-) strand; PAM type: YTN; PAM sequence: CTC
ggagtcccgcggtggccacc

SEQ ID NO: 84293 - DNA, 20 bp, Artificial Sequence
  Description of Artificial Sequence: Synthetic oligonucleotide
  Target: ATXN2; (-) strand; PAM type: YTN; PAM sequence: CTC
ctcggagtcccgcggtggcc

SEQ ID NO: 84294 - DNA, 20 bp, Artificial Sequence
  Description of Artificial Sequence: Synthetic oligonucleotide
  Target: ATXN2; (-) strand; PAM type: YTN; PAM sequence: CTC
agcggccgcagctcctcgga

SEQ ID NO: 84295 - DNA, 20 bp, Artificial Sequence
  Description of Artificial Sequence: Synthetic oligonucleotide
  Target: ATXN2; (-) strand; PAM type: YTN; PAM sequence: CTC
cgatgcgctcagcggccgca

SEQ ID NO: 84296 - DNA, 20 bp, Artificial Sequence
  Description of Artificial Sequence: Synthetic oligonucleotide
  Target: ATXN2; (-) strand; PAM type: YTN; PAM sequence: CTC
ggcgcgcccgccctccgatg

SEQ ID NO: 84297 - DNA, 20 bp, Artificial Sequence
  Description of Artificial Sequence: Synthetic oligonucleotide
  Target: ATXN2; (-) strand; PAM type: YTN; PAM sequence: CTC
ccacccggcgcctcggcgcg

SEQ ID NO: 84298 - DNA, 20 bp, Artificial Sequence
  Description of Artificial Sequence: Synthetic oligonucleotide
  Target: ATXN2; (-) strand; PAM type: YTN; PAM sequence: CTC
cgctcccacccggcgcctcg

SEQ ID NO: 84299 - DNA, 20 bp, Artificial Sequence
  Description of Artificial Sequence: Synthetic oligonucleotide
  Target: ATXN2; (-) strand; PAM type: YTN; PAM sequence: CTA
tccgcacctccgctcccacc

SEQ ID NO: 84300 - DNA, 20 bp, Artificial Sequence
  Description of Artificial Sequence: Synthetic oligonucleotide
  Target: ATXN2; (-) strand; PAM type: YTN; PAM sequence: TTC
cggtaaagagtccctatccg

SEQ ID NO: 84301 - DNA, 20 bp, Artificial Sequence
  Description of Artificial Sequence: Synthetic oligonucleotide
  Target: ATXN2; (-) strand; PAM type: YTN; PAM sequence: CTT
ccggtaaagagtccctatcc

SEQ ID NO: 84302 - DNA, 20 bp, Artificial Sequence
  Description of Artificial Sequence: Synthetic oligonucleotide
  Target: ATXN2; (-) strand; PAM type: YTN; PAM sequence: CTC
cgacttccggtaaagagtcc

SEQ ID NO: 84303 - DNA, 20 bp, Artificial Sequence
  Description of Artificial Sequence: Synthetic oligonucleotide
  Target: ATXN2; (-) strand; PAM type: YTN; PAM sequence: CTG
acccctccgacttccggtaa

SEQ ID NO: 84304 - DNA, 20 bp, Artificial Sequence
  Description of Artificial Sequence: Synthetic oligonucleotide
  Target: ATXN2; (-) strand; PAM type: YTN; PAM sequence: TTC
cgtctgacccctccgacttc

SEQ ID NO: 84305 - DNA, 20 bp, Artificial Sequence
  Description of Artificial Sequence: Synthetic oligonucleotide
  Target: ATXN2; (-) strand; PAM type: YTN; PAM sequence: CTT
ccgtctgacccctccgactt

SEQ ID NO: 84306 - DNA, 20 bp, Artificial Sequence
  Description of Artificial Sequence: Synthetic oligonucleotide
  Target: ATXN2; (-) strand; PAM type: YTN; PAM sequence: CTG
cttccgtctgacccctccga

SEQ ID NO: 84307 - DNA, 20 bp, Artificial Sequence
  Description of Artificial Sequence: Synthetic oligonucleotide
  Target: ATXN2; (-) strand; PAM type: YTN; PAM sequence: TTC
tgcttccgtctgacccctcc

SEQ ID NO: 84308 - DNA, 20 bp, Artificial Sequence
  Description of Artificial Sequence: Synthetic oligonucleotide
  Target: ATXN2; (-) strand; PAM type: YTN; PAM sequence: CTC
acgttctgcttccgtctgac

SEQ ID NO: 84309 - DNA, 20 bp, Artificial Sequence
  Description of Artificial Sequence: Synthetic oligonucleotide
  Target: ATXN2; (-) strand; PAM type: YTN; PAM sequence: CTC
ccggccccggggccacctca

SEQ ID NO: 84310 - DNA, 20 bp, Artificial Sequence
  Description of Artificial Sequence: Synthetic oligonucleotide
  Target: ATXN2; (-) strand; PAM type: YTN; PAM sequence: CTC
acgtgtccctcccggccccg

SEQ ID NO: 84311 - DNA, 20 bp, Artificial Sequence
  Description of Artificial Sequence: Synthetic oligonucleotide
  Target: ATXN2; (-) strand; PAM type: YTN; PAM sequence: CTC
ctcacgtgtccctcccggcc

SEQ ID NO: 84312 - DNA, 20 bp, Artificial Sequence
  Description of Artificial Sequence: Synthetic oligonucleotide
  Target: ATXN2; (-) strand; PAM type: YTN; PAM sequence: CTC
acccgacccccgagaaagca

SEQ ID NO: 84313 - DNA, 20 bp, Artificial Sequence
  Description of Artificial Sequence: Synthetic oligonucleotide
  Target: ATXN2; (-) strand; PAM type: YTN; PAM sequence: CTG
gccctcacccgacccccgag

SEQ ID NO: 84314 - DNA, 20 bp, Artificial Sequence
  Description of Artificial Sequence: Synthetic oligonucleotide
  Target: ATXN2; (-) strand; PAM type: YTN; PAM sequence: TTG
aggaaggcggatccgggtag

SEQ ID NO: 84315 - DNA, 20 bp, Artificial Sequence
  Description of Artificial Sequence: Synthetic oligonucleotide
  Target: ATXN2; (-) strand; PAM type: YTN; PAM sequence: CTT
gaggaaggcggatccgggta

SEQ ID NO: 84316 - DNA, 20 bp, Artificial Sequence
  Description of Artificial Sequence: Synthetic oligonucleotide
  Target: ATXN2; (-) strand; PAM type: YTN; PAM sequence: CTC
cccgaagggcagacccgcct

SEQ ID NO: 84317 - DNA, 20 bp, Artificial Sequence
  Description of Artificial Sequence: Synthetic oligonucleotide
  Target: ATXN2; (-) strand; PAM type: YTN; PAM sequence: CTG
agaccgacacgccctccccg

SEQ ID NO: 84318 - DNA, 20 bp, Artificial Sequence
  Description of Artificial Sequence: Synthetic oligonucleotide
  Target: ATXN2; (-) strand; PAM type: YTN; PAM sequence: CTC
cacaccaggcaggccccaga

SEQ ID NO: 84319 - DNA, 20 bp, Artificial Sequence
  Description of Artificial Sequence: Synthetic oligonucleotide
  Target: ATXN2; (-) strand; PAM type: YTN; PAM sequence: CTG
tcctccacaccaggcaggcc

SEQ ID NO: 84320 - DNA, 20 bp, Artificial Sequence
  Description of Artificial Sequence: Synthetic oligonucleotide
  Target: ATXN2; (-) strand; PAM type: YTN; PAM sequence: CTC
ctgtcctccacaccaggcag

SEQ ID NO: 84321 - DNA, 20 bp, Artificial Sequence
  Description of Artificial Sequence: Synthetic oligonucleotide
  Target: ATXN2; (-) strand; PAM type: YTN; PAM sequence: CTC
tcctgtcctccacaccaggc

SEQ ID NO: 84322 - DNA, 20 bp, Artificial Sequence
  Description of Artificial Sequence: Synthetic oligonucleotide
  Target: ATXN2; (-) strand; PAM type: YTN; PAM sequence: TTC
tctcctgtcctccacaccag

SEQ ID NO: 84323 - DNA, 20 bp, Artificial Sequence
  Description of Artificial Sequence: Synthetic oligonucleotide
  Target: ATXN2; (-) strand; PAM type: YTN; PAM sequence: CTT
ctctcctgtcctccacacca

SEQ ID NO: 84324 - DNA, 20 bp, Artificial Sequence
  Description of Artificial Sequence: Synthetic oligonucleotide
  Target: ATXN2; (-) strand; PAM type: YTN; PAM sequence: CTG
aaggaatacagtaggagaag

SEQ ID NO: 84325 - DNA, 20 bp, Artificial Sequence
  Description of Artificial Sequence: Synthetic oligonucleotide
  Target: ATXN2; (-) strand; PAM type: YTN; PAM sequence: CTA
ggtccccgcagaagtgaaga

SEQ ID NO: 84326 - DNA, 20 bp, Artificial Sequence
  Description of Artificial Sequence: Synthetic oligonucleotide
  Target: ATXN2; (-) strand; PAM type: YTN; PAM sequence: TTG
catcaggtgggggcaaacta

SEQ ID NO: 84327 - DNA, 20 bp, Artificial Sequence
  Description of Artificial Sequence: Synthetic oligonucleotide
  Target: ATXN2; (-) strand; PAM type: YTN; PAM sequence: CTG
ggttgcatcaggtgggggca

SEQ ID NO: 84328 - DNA, 20 bp, Artificial Sequence
  Description of Artificial Sequence: Synthetic oligonucleotide
  Target: ATXN2; (-) strand; PAM type: YTN; PAM sequence: TTC
tgggttgcatcaggtggggg

SEQ ID NO: 84329 - DNA, 20 bp, Artificial Sequence
  Description of Artificial Sequence: Synthetic oligonucleotide
  Target: ATXN2; (-) strand; PAM type: YTN; PAM sequence: TTT
ctgggttgcatcaggtgggg

SEQ ID NO: 84330 - DNA, 20 bp, Artificial Sequence
  Description of Artificial Sequence: Synthetic oligonucleotide
  Target: ATXN2; (-) strand; PAM type: YTN; PAM sequence: TTT
tctgggttgcatcaggtggg

SEQ ID NO: 84331 - DNA, 20 bp, Artificial Sequence
  Description of Artificial Sequence: Synthetic oligonucleotide
  Target: ATXN2; (-) strand; PAM type: YTN; PAM sequence: CTC
gcagtcagtccattttctgg

SEQ ID NO: 84332 - DNA, 20 bp, Artificial Sequence
  Description of Artificial Sequence: Synthetic oligonucleotide
  Target: ATXN2; (-) strand; PAM type: YTN; PAM sequence: CTC
cgccccaaggcactcgcagt

SEQ ID NO: 84333 - DNA, 20 bp, Artificial Sequence
  Description of Artificial Sequence: Synthetic oligonucleotide
  Target: ATXN2; (-) strand; PAM type: YTN; PAM sequence: TTC
tccgccccaaggcactcgca

SEQ ID NO: 84334 - DNA, 20 bp, Artificial Sequence
  Description of Artificial Sequence: Synthetic oligonucleotide
  Target: ATXN2; (-) strand; PAM type: YTN; PAM sequence: TTA
cacgtagcaagacacattct

SEQ ID NO: 84335 - DNA, 20 bp, Artificial Sequence
  Description of Artificial Sequence: Synthetic oligonucleotide
  Target: ATXN2; (-) strand; PAM type: YTN; PAM sequence: TTT
acacgtagcaagacacattc

SEQ ID NO: 84336 - DNA, 20 bp, Artificial Sequence
  Description of Artificial Sequence: Synthetic oligonucleotide
  Target: ATXN2; (-) strand; PAM type: YTN; PAM sequence: CTT
tacacgtagcaagacacatt

SEQ ID NO: 84337 - DNA, 20 bp, Artificial Sequence
  Description of Artificial Sequence: Synthetic oligonucleotide
  Target: ATXN2; (-) strand; PAM type: YTN; PAM sequence: CTA
ggtgctttacacgtagcaag

SEQ ID NO: 84338 - DNA, 20 bp, Artificial Sequence
  Description of Artificial Sequence: Synthetic oligonucleotide
  Target: ATXN2; (-) strand; PAM type: YTN; PAM sequence: TTC
taggtgctttacacgtagca

SEQ ID NO: 84339 - DNA, 20 bp, Artificial Sequence
  Description of Artificial Sequence: Synthetic oligonucleotide
  Target: ATXN2; (-) strand; PAM type: YTN; PAM sequence: CTG
gcagggttctaggtgcttta

SEQ ID NO: 84340 - DNA, 20 bp, Artificial Sequence
  Description of Artificial Sequence: Synthetic oligonucleotide
  Target: ATXN2; (-) strand; PAM type: YTN; PAM sequence: CTG
aatctggcagggttctaggt

SEQ ID NO: 84341 - DNA, 20 bp, Artificial Sequence
  Description of Artificial Sequence: Synthetic oligonucleotide
  Target: ATXN2; (-) strand; PAM type: YTN; PAM sequence: CTG
tgtcccctgaatctggcagg

SEQ ID NO: 84342 - DNA, 20 bp, Artificial Sequence
  Description of Artificial Sequence: Synthetic oligonucleotide
  Target: ATXN2; (-) strand; PAM type: YTN; PAM sequence: CTG
tgtggcgggcgggggacggc

SEQ ID NO: 84343 - DNA, 20 bp, Artificial Sequence
  Description of Artificial Sequence: Synthetic oligonucleotide
  Target: ATXN2; (-) strand; PAM type: YTN; PAM sequence: CTA
ctgtgtggcgggcgggggac

SEQ ID NO: 84344 - DNA, 20 bp, Artificial Sequence
  Description of Artificial Sequence: Synthetic oligonucleotide
  Target: ATXN2; (-) strand; PAM type: YTN; PAM sequence: CTG
gagcgcctactgtgtggcgg

SEQ ID NO: 84345 - DNA, 20 bp, Artificial Sequence
  Description of Artificial Sequence: Synthetic oligonucleotide
  Target: ATXN2; (-) strand; PAM type: YTN; PAM sequence: CTG
gtagatgccccgagccactg

SEQ ID NO: 84346 - DNA, 20 bp, Artificial Sequence
  Description of Artificial Sequence: Synthetic oligonucleotide
  Target: ATXN2; (-) strand; PAM type: YTN; PAM sequence: CTG
cctggtagatgccccgagcc

SEQ ID NO: 84347 - DNA, 20 bp, Artificial Sequence
  Description of Artificial Sequence: Synthetic oligonucleotide
  Target: ATXN2; (-) strand; PAM type: YTN; PAM sequence: CTC
cagccccggcagggcaggac

SEQ ID NO: 84348 - DNA, 20 bp, Artificial Sequence
  Description of Artificial Sequence: Synthetic oligonucleotide
  Target: ATXN2; (-) strand; PAM type: YTN; PAM sequence: CTC
cactccagccccggcagggc

SEQ ID NO: 84349 - DNA, 20 bp, Artificial Sequence
  Description of Artificial Sequence: Synthetic oligonucleotide
  Target: ATXN2; (-) strand; PAM type: YTN; PAM sequence: TTG
ctccactccagccccggcag

SEQ ID NO: 84350 - DNA, 20 bp, Artificial Sequence
  Description of Artificial Sequence: Synthetic oligonucleotide
  Target: ATXN2; (-) strand; PAM type: YTN; PAM sequence: CTG
gggtggaaaaagtggggaaa

SEQ ID NO: 84351 - DNA, 20 bp, Artificial Sequence
  Description of Artificial Sequence: Synthetic oligonucleotide
  Target: ATXN2; (-) strand; PAM type: YTN; PAM sequence: CTG
tgcgcggctggggtggaaaa

SEQ ID NO: 84352 - DNA, 20 bp, Artificial Sequence
  Description of Artificial Sequence: Synthetic oligonucleotide
  Target: ATXN2; (-) strand; PAM type: YTN; PAM sequence: CTG
gtgactgtgcgcggctgggg

SEQ ID NO: 84353 - DNA, 20 bp, Artificial Sequence
  Description of Artificial Sequence: Synthetic oligonucleotide
  Target: ATXN2; (-) strand; PAM type: YTN; PAM sequence: TTC
tggtgactgtgcgcggctgg

SEQ ID NO: 84354 - DNA, 20 bp, Artificial Sequence
  Description of Artificial Sequence: Synthetic oligonucleotide
  Target: ATXN2; (-) strand; PAM type: YTN; PAM sequence: TTT
ctggtgactgtgcgcggctg

SEQ ID NO: 84355 - DNA, 20 bp, Artificial Sequence
  Description of Artificial Sequence: Synthetic oligonucleotide
  Target: ATXN2; (-) strand; PAM type: YTN; PAM sequence: TTT
tctggtgactgtgcgcggct

SEQ ID NO: 84356 - DNA, 20 bp, Artificial Sequence
  Description of Artificial Sequence: Synthetic oligonucleotide
  Target: ATXN2; (-) strand; PAM type: YTN; PAM sequence: CTA
aaagagttttctggtgactg

SEQ ID NO: 84357 - DNA, 20 bp, Artificial Sequence
  Description of Artificial Sequence: Synthetic oligonucleotide
  Target: ATXN2; (-) strand; PAM type: YTN; PAM sequence: TTC
aaatgaaggtcagataccta

SEQ ID NO: 84358 - DNA, 20 bp, Artificial Sequence
  Description of Artificial Sequence: Synthetic oligonucleotide
  Target: ATXN2; (-) strand; PAM type: YTN; PAM sequence: TTC
aagtgagggaacataggttc

SEQ ID NO: 84359 - DNA, 20 bp, Artificial Sequence
  Description of Artificial Sequence: Synthetic oligonucleotide
  Target: ATXN2; (-) strand; PAM type: YTN; PAM sequence: CTC
atgaatgaggaaaaagaagt

SEQ ID NO: 84360 - DNA, 20 bp, Artificial Sequence
  Description of Artificial Sequence: Synthetic oligonucleotide
  Target: ATXN2; (-) strand; PAM type: YTN; PAM sequence: TTA
gaatctcatgaatgaggaaa

SEQ ID NO: 84361 - DNA, 20 bp, Artificial Sequence
  Description of Artificial Sequence: Synthetic oligonucleotide
  Target: ATXN2; (-) strand; PAM type: YTN; PAM sequence: TTT
agaatctcatgaatgaggaa

SEQ ID NO: 84362 - DNA, 20 bp, Artificial Sequence
  Description of Artificial Sequence: Synthetic oligonucleotide
  Target: ATXN2; (-) strand; PAM type: YTN; PAM sequence: CTT
tagaatctcatgaatgagga

SEQ ID NO: 84363 - DNA, 20 bp, Artificial Sequence
  Description of Artificial Sequence: Synthetic oligonucleotide
  Target: ATXN2; (-) strand; PAM type: YTN; PAM sequence: TTC
ctttagaatctcatgaatga

SEQ ID NO: 84364 - DNA, 20 bp, Artificial Sequence
  Description of Artificial Sequence: Synthetic oligonucleotide
  Target: ATXN2; (-) strand; PAM type: YTN; PAM sequence: TTT
cctttagaatctcatgaatg

SEQ ID NO: 84365 - DNA, 20 bp, Artificial Sequence
  Description of Artificial Sequence: Synthetic oligonucleotide
  Target: ATXN2; (-) strand; PAM type: YTN; PAM sequence: CTA
ccagtcccaatcccatatat

SEQ ID NO: 84366 - DNA, 20 bp, Artificial Sequence
  Description of Artificial Sequence: Synthetic oligonucleotide
  Target: ATXN2; (-) strand; PAM type: YTN; PAM sequence: TTC
taccagtcccaatcccatat

SEQ ID NO: 84367 - DNA, 20 bp, Artificial Sequence
  Description of Artificial Sequence: Synthetic oligonucleotide
  Target: ATXN2; (-) strand; PAM type: YTN; PAM sequence: TTA
tccgtagttctaccagtccc

SEQ ID NO: 84368 - DNA, 20 bp, Artificial Sequence
  Description of Artificial Sequence: Synthetic oligonucleotide
  Target: ATXN2; (-) strand; PAM type: YTN; PAM sequence: CTA
ccgagggagatcccattatc

SEQ ID NO: 84369 - DNA, 20 bp, Artificial Sequence
  Description of Artificial Sequence: Synthetic oligonucleotide
  Target: ATXN2; (-) strand; PAM type: YTN; PAM sequence: CTC
taccgagggagatcccatta

SEQ ID NO: 84370 - DNA, 20 bp, Artificial Sequence
  Description of Artificial Sequence: Synthetic oligonucleotide
  Target: ATXN2; (-) strand; PAM type: YTN; PAM sequence: CTG
tctctaccgagggagatccc

SEQ ID NO: 84371 - DNA, 20 bp, Artificial Sequence
  Description of Artificial Sequence: Synthetic oligonucleotide
  Target: ATXN2; (-) strand; PAM type: YTN; PAM sequence: CTC
tgtctctaccgagggagatc

SEQ ID NO: 84372 - DNA, 20 bp, Artificial Sequence
  Description of Artificial Sequence: Synthetic oligonucleotide
  Target: ATXN2; (-) strand; PAM type: YTN; PAM sequence: TTG
aggtcggctctgtctctacc

SEQ ID NO: 84373 - DNA, 20 bp, Artificial Sequence
  Description of Artificial Sequence: Synthetic oligonucleotide
  Target: ATXN2; (-) strand; PAM type: YTN; PAM sequence: TTT
gaggtcggctctgtctctac

SEQ ID NO: 84374 - DNA, 20 bp, Artificial Sequence
  Description of Artificial Sequence: Synthetic oligonucleotide
  Target: ATXN2; (-) strand; PAM type: YTN; PAM sequence: TTT
tgaggtcggctctgtctcta

SEQ ID NO: 84375 - DNA, 20 bp, Artificial Sequence
  Description of Artificial Sequence: Synthetic oligonucleotide
  Target: ATXN2; (-) strand; PAM type: YTN; PAM sequence: TTG
ttttgaggtcggctctgtct

SEQ ID NO: 84376 - DNA, 20 bp, Artificial Sequence
  Description of Artificial Sequence: Synthetic oligonucleotide
  Target: ATXN2; (-) strand; PAM type: YTN; PAM sequence: TTC
gcacattgttttgaggtcgg

SEQ ID NO: 84377 - DNA, 20 bp, Artificial Sequence
  Description of Artificial Sequence: Synthetic oligonucleotide
  Target: ATXN2; (-) strand; PAM type: YTN; PAM sequence: CTA
aagttcgcacattgttttga

SEQ ID NO: 84378 - DNA, 20 bp, Artificial Sequence
  Description of Artificial Sequence: Synthetic oligonucleotide
  Target: ATXN2; (-) strand; PAM type: YTN; PAM sequence: CTA
aagggtccaaggtctaaagt

SEQ ID NO: 84379 - DNA, 20 bp, Artificial Sequence
  Description of Artificial Sequence: Synthetic oligonucleotide
  Target: ATXN2; (-) strand; PAM type: YTN; PAM sequence: TTC
taaagggtccaaggtctaaa

SEQ ID NO: 84380 - DNA, 20 bp, Artificial Sequence
  Description of Artificial Sequence: Synthetic oligonucleotide
  Target: ATXN2; (-) strand; PAM type: YTN; PAM sequence: CTT
ctaaagggtccaaggtctaa

SEQ ID NO: 84381 - DNA, 20 bp, Artificial Sequence
  Description of Artificial Sequence: Synthetic oligonucleotide
  Target: ATXN2; (-) strand; PAM type: YTN; PAM sequence: TTA
aaacttctaaagggtccaag

SEQ ID NO: 84382 - DNA, 20 bp, Artificial Sequence
  Description of Artificial Sequence: Synthetic oligonucleotide
  Target: ATXN2; (-) strand; PAM type: YTN; PAM sequence: TTA
aattaaaacttctaaagggt

SEQ ID NO: 84383 - DNA, 20 bp, Artificial Sequence
  Description of Artificial Sequence: Synthetic oligonucleotide
  Target: ATXN2; (-) strand; PAM type: YTN; PAM sequence: CTG
ggtaagttaaattaaaactt

SEQ ID NO: 84384 - DNA, 20 bp, Artificial Sequence
  Description of Artificial Sequence: Synthetic oligonucleotide
  Target: ATXN2; (-) strand; PAM type: YTN; PAM sequence: CTG
gctgggtaagttaaattaaa

SEQ ID NO: 84385 - DNA, 20 bp, Artificial Sequence
  Description of Artificial Sequence: Synthetic oligonucleotide
  Target: ATXN2; (-) strand; PAM type: YTN; PAM sequence: CTG
tgctggctgggtaagttaaa

SEQ ID NO: 84386 - DNA, 20 bp, Artificial Sequence
  Description of Artificial Sequence: Synthetic oligonucleotide
  Target: ATXN2; (-) strand; PAM type: YTN; PAM sequence: CTA
ctgtgctggctgggtaagtt

SEQ ID NO: 84387 - DNA, 20 bp, Artificial Sequence
  Description of Artificial Sequence: Synthetic oligonucleotide
  Target: ATXN2; (-) strand; PAM type: YTN; PAM sequence: TTA
aaaagagtctactgtgctgg

SEQ ID NO: 84388 - DNA, 20 bp, Artificial Sequence
  Description of Artificial Sequence: Synthetic oligonucleotide
  Target: ATXN2; (-) strand; PAM type: YTN; PAM sequence: TTT
aaaaagagtctactgtgctg

SEQ ID NO: 84389 - DNA, 20 bp, Artificial Sequence
  Description of Artificial Sequence: Synthetic oligonucleotide
  Target: ATXN2; (-) strand; PAM type: YTN; PAM sequence: TTT
taaaaagagtctactgtgct

SEQ ID NO: 84390 - DNA, 20 bp, Artificial Sequence
  Description of Artificial Sequence: Synthetic oligonucleotide
  Target: ATXN2; (-) strand; PAM type: YTN; PAM sequence: CTG
caacacattttaaaaagagt

SEQ ID NO: 84391 - DNA, 20 bp, Artificial Sequence
  Description of Artificial Sequence: Synthetic oligonucleotide
  Target: ATXN2; (-) strand; PAM type: YTN; PAM sequence: TTA
actgcaacacattttaaaaa

SEQ ID NO: 84392 - DNA, 20 bp, Artificial Sequence
  Description of Artificial Sequence: Synthetic oligonucleotide
  Target: ATXN2; (-) strand; PAM type: YTN; PAM sequence: TTT
aactgcaacacattttaaaa

SEQ ID NO: 84393 - DNA, 20 bp, Artificial Sequence
  Description of Artificial Sequence: Synthetic oligonucleotide
  Target: ATXN2; (-) strand; PAM type: YTN; PAM sequence: TTC
cagtttaactgcaacacatt

SEQ ID NO: 84394 - DNA, 20 bp, Artificial Sequence
  Description of Artificial Sequence: Synthetic oligonucleotide
  Target: ATXN2; (-) strand; PAM type: YTN; PAM sequence: CTT
ccagtttaactgcaacacat

SEQ ID NO: 84395 - DNA, 20 bp, Artificial Sequence
  Description of Artificial Sequence: Synthetic oligonucleotide
  Target: ATXN2; (-) strand; PAM type: YTN; PAM sequence: TTG
cttccagtttaactgcaaca

SEQ ID NO: 84396 - DNA, 20 bp, Artificial Sequence
  Description of Artificial Sequence: Synthetic oligonucleotide
  Target: ATXN2; (-) strand; PAM type: YTN; PAM sequence: CTT
gcttccagtttaactgcaac

SEQ ID NO: 84397 - DNA, 20 bp, Artificial Sequence
  Description of Artificial Sequence: Synthetic oligonucleotide
  Target: ATXN2; (-) strand; PAM type: YTN; PAM sequence: CTA
cttgcttccagtttaactgc

SEQ ID NO: 84398 - DNA, 20 bp, Artificial Sequence
  Description of Artificial Sequence: Synthetic oligonucleotide
  Target: ATXN2; (-) strand; PAM type: YTN; PAM sequence: TTC
tacttgcttccagtttaact

SEQ ID NO: 84399 - DNA, 20 bp, Artificial Sequence
  Description of Artificial Sequence: Synthetic oligonucleotide
  Target: ATXN2; (-) strand; PAM type: YTN; PAM sequence: TTT
ctacttgcttccagtttaac

SEQ ID NO: 84400 - DNA, 20 bp, Artificial Sequence
  Description of Artificial Sequence: Synthetic oligonucleotide
  Target: ATXN2; (-) strand; PAM type: YTN; PAM sequence: CTT
tctacttgcttccagtttaa

SEQ ID NO: 84401 - DNA, 20 bp, Artificial Sequence
  Description of Artificial Sequence: Synthetic oligonucleotide
  Target: ATXN2; (-) strand; PAM type: YTN; PAM sequence: CTA
ctttctacttgcttccagtt

SEQ ID NO: 84402 - DNA, 20 bp, Artificial Sequence
  Description of Artificial Sequence: Synthetic oligonucleotide
  Target: ATXN2; (-) strand; PAM type: YTN; PAM sequence: TTA
cctactttctacttgcttcc

SEQ ID NO: 84403 - DNA, 20 bp, Artificial Sequence
  Description of Artificial Sequence: Synthetic oligonucleotide
  Target: ATXN2; (-) strand; PAM type: YTN; PAM sequence: CTC
aaaaaaaaaaaaaaaagtta

SEQ ID NO: 84404 - DNA, 20 bp, Artificial Sequence
  Description of Artificial Sequence: Synthetic oligonucleotide
  Target: ATXN2; (-) strand; PAM type: YTN; PAM sequence: CTG
ctcaaaaaaaaaaaaaaaag

SEQ ID NO: 84405 - DNA, 20 bp, Artificial Sequence
  Description of Artificial Sequence: Synthetic oligonucleotide
  Target: ATXN2; (-) strand; PAM type: YTN; PAM sequence: TTC
actgctcaaaaaaaaaaaaa

SEQ ID NO: 84406 - DNA, 20 bp, Artificial Sequence
  Description of Artificial Sequence: Synthetic oligonucleotide
  Target: ATXN2; (-) strand; PAM type: YTN; PAM sequence: TTA
aaaaacaatagattcactgc

SEQ ID NO: 84407 - DNA, 20 bp, Artificial Sequence
  Description of Artificial Sequence: Synthetic oligonucleotide
  Target: ATXN2; (-) strand; PAM type: YTN; PAM sequence: TTT
aaaaaacaatagattcactg

SEQ ID NO: 84408 - DNA, 20 bp, Artificial Sequence
  Description of Artificial Sequence: Synthetic oligonucleotide
  Target: ATXN2; (-) strand; PAM type: YTN; PAM sequence: CTT
taaaaaacaatagattcact

SEQ ID NO: 84409 - DNA, 20 bp, Artificial Sequence
  Description of Artificial Sequence: Synthetic oligonucleotide
  Target: ATXN2; (-) strand; PAM type: YTN; PAM sequence: TTC
actttaaaaaacaatagatt

SEQ ID NO: 84410 - DNA, 20 bp, Artificial Sequence
  Description of Artificial Sequence: Synthetic oligonucleotide
  Target: ATXN2; (-) strand; PAM type: YTN; PAM sequence: TTT
cactttaaaaaacaatagat

SEQ ID NO: 84411 - DNA, 20 bp, Artificial Sequence
  Description of Artificial Sequence: Synthetic oligonucleotide
  Target: ATXN2; (-) strand; PAM type: YTN; PAM sequence: CTG
aagtcatttcactttaaaaa

SEQ ID NO: 84412 - DNA, 20 bp, Artificial Sequence
  Description of Artificial Sequence: Synthetic oligonucleotide
  Target: ATXN2; (-) strand; PAM type: YTN; PAM sequence: TTC
ctgaagtcatttcactttaa

SEQ ID NO: 84413 - DNA, 20 bp, Artificial Sequence
  Description of Artificial Sequence: Synthetic oligonucleotide
  Target: ATXN2; (-) strand; PAM type: YTN; PAM sequence: TTT
cctgaagtcatttcacttta

SEQ ID NO: 84414 - DNA, 20 bp, Artificial Sequence
  Description of Artificial Sequence: Synthetic oligonucleotide
  Target: ATXN2; (-) strand; PAM type: YTN; PAM sequence: TTA
tttcctgaagtcatttcact

SEQ ID NO: 84415 - DNA, 20 bp, Artificial Sequence
  Description of Artificial Sequence: Synthetic oligonucleotide
  Target: ATXN2; (-) strand; PAM type: YTN; PAM sequence: CTA
ttatttcctgaagtcatttc

SEQ ID NO: 84416 - DNA, 20 bp, Artificial Sequence
  Description of Artificial Sequence: Synthetic oligonucleotide
  Target: ATXN2; (-) strand; PAM type: YTN; PAM sequence: TTC
ccctattatttcctgaagtc

SEQ ID NO: 84417 - DNA, 20 bp, Artificial Sequence
  Description of Artificial Sequence: Synthetic oligonucleotide
  Target: ATXN2; (-) strand; PAM type: YTN; PAM sequence: CTT
cccctattatttcctgaagt

SEQ ID NO: 84418 - DNA, 20 bp, Artificial Sequence
  Description of Artificial Sequence: Synthetic oligonucleotide
  Target: ATXN2; (-) strand; PAM type: YTN; PAM sequence: TTC
ttcccctattatttcctgaa

SEQ ID NO: 84419 - DNA, 20 bp, Artificial Sequence
  Description of Artificial Sequence: Synthetic oligonucleotide
  Target: ATXN2; (-) strand; PAM type: YTN; PAM sequence: TTT
cttcccctattatttcctga

SEQ ID NO: 84420 - DNA, 20 bp, Artificial Sequence
  Description of Artificial Sequence: Synthetic oligonucleotide
  Target: ATXN2; (-) strand; PAM type: YTN; PAM sequence: TTG
gtgtttcttcccctattatt

SEQ ID NO: 84421 - DNA, 20 bp, Artificial Sequence
  Description of Artificial Sequence: Synthetic oligonucleotide
  Target: ATXN2; (-) strand; PAM type: YTN; PAM sequence: TTT
ggtgtttcttcccctattat

SEQ ID NO: 84422 - DNA, 20 bp, Artificial Sequence
  Description of Artificial Sequence: Synthetic oligonucleotide
  Target: ATXN2; (-) strand; PAM type: YTN; PAM sequence: TTT
tggtgtttcttcccctatta

SEQ ID NO: 84423 - DNA, 20 bp, Artificial Sequence
  Description of Artificial Sequence: Synthetic oligonucleotide
  Target: ATXN2; (-) strand; PAM type: YTN; PAM sequence: TTG
aggggaattttggtgtttct

SEQ ID NO: 84424 - DNA, 20 bp, Artificial Sequence
  Description of Artificial Sequence: Synthetic oligonucleotide
  Target: ATXN2; (-) strand; PAM type: YTN; PAM sequence: CTA
ggacattgaggggaattttg

SEQ ID NO: 84425 - DNA, 20 bp, Artificial Sequence
  Description of Artificial Sequence: Synthetic oligonucleotide
  Target: ATXN2; (-) strand; PAM type: YTN; PAM sequence: TTC
taggacattgaggggaattt

SEQ ID NO: 84426 - DNA, 20 bp, Artificial Sequence
  Description of Artificial Sequence: Synthetic oligonucleotide
  Target: ATXN2; (-) strand; PAM type: YTN; PAM sequence: CTG
gacagttctaggacattgag

SEQ ID NO: 84427 - DNA, 20 bp, Artificial Sequence
  Description of Artificial Sequence: Synthetic oligonucleotide
  Target: ATXN2; (-) strand; PAM type: YTN; PAM sequence: TTA
tctggacagttctaggacat

SEQ ID NO: 84428 - DNA, 20 bp, Artificial Sequence
  Description of Artificial Sequence: Synthetic oligonucleotide
  Target: ATXN2; (-) strand; PAM type: YTN; PAM sequence: TTT
atctggacagttctaggaca

SEQ ID NO: 84429 - DNA, 20 bp, Artificial Sequence
  Description of Artificial Sequence: Synthetic oligonucleotide
  Target: ATXN2; (-) strand; PAM type: YTN; PAM sequence: CTT
tatctggacagttctaggac

SEQ ID NO: 84430 - DNA, 20 bp, Artificial Sequence
  Description of Artificial Sequence: Synthetic oligonucleotide
  Target: ATXN2; (-) strand; PAM type: YTN; PAM sequence: TTA
cctttatctggacagttcta

SEQ ID NO: 84431 - DNA, 20 bp, Artificial Sequence
  Description of Artificial Sequence: Synthetic oligonucleotide
  Target: ATXN2; (-) strand; PAM type: YTN; PAM sequence: TTT
acctttatctggacagttct

SEQ ID NO: 84432 - DNA, 20 bp, Artificial Sequence
  Description of Artificial Sequence: Synthetic oligonucleotide
  Target: ATXN2; (-) strand; PAM type: YTN; PAM sequence: CTT
tacctttatctggacagttc

SEQ ID NO: 84433 - DNA, 20 bp, Artificial Sequence
  Description of Artificial Sequence: Synthetic oligonucleotide
  Target: ATXN2; (-) strand; PAM type: YTN; PAM sequence: CTA
agtctttacctttatctgga

SEQ ID NO: 84434 - DNA, 20 bp, Artificial Sequence
  Description of Artificial Sequence: Synthetic oligonucleotide
  Target: ATXN2; (-) strand; PAM type: YTN; PAM sequence: TTA
tctaagtctttacctttatc

SEQ ID NO: 84435 - DNA, 20 bp, Artificial Sequence
  Description of Artificial Sequence: Synthetic oligonucleotide
  Target: ATXN2; (-) strand; PAM type: YTN; PAM sequence: TTT
atctaagtctttacctttat

SEQ ID NO: 84436 - DNA, 20 bp, Artificial Sequence
  Description of Artificial Sequence: Synthetic oligonucleotide
  Target: ATXN2; (-) strand; PAM type: YTN; PAM sequence: CTC
cacgtttatctaagtcttta

SEQ ID NO: 84437 - DNA, 20 bp, Artificial Sequence
  Description of Artificial Sequence: Synthetic oligonucleotide
  Target: ATXN2; (-) strand; PAM type: YTN; PAM sequence: TTC
tccacgtttatctaagtctt

SEQ ID NO: 84438 - DNA, 20 bp, Artificial Sequence
  Description of Artificial Sequence: Synthetic oligonucleotide
  Target: ATXN2; (-) strand; PAM type: YTN; PAM sequence: TTC
aatcattctccacgtttatc

SEQ ID NO: 84439 - DNA, 20 bp, Artificial Sequence
  Description of Artificial Sequence: Synthetic oligonucleotide
  Target: ATXN2; (-) strand; PAM type: YTN; PAM sequence: CTG
gttcaatcattctccacgtt

SEQ ID NO: 84440 - DNA, 20 bp, Artificial Sequence
  Description of Artificial Sequence: Synthetic oligonucleotide
  Target: ATXN2; (-) strand; PAM type: YTN; PAM sequence: CTG
ctggttcaatcattctccac

SEQ ID NO: 84441 - DNA, 20 bp, Artificial Sequence
  Description of Artificial Sequence: Synthetic oligonucleotide
  Target: ATXN2; (-) strand; PAM type: YTN; PAM sequence: CTG
aaaactgctggttcaatcat

SEQ ID NO: 84442 - DNA, 20 bp, Artificial Sequence
  Description of Artificial Sequence: Synthetic oligonucleotide
  Target: ATXN2; (-) strand; PAM type: YTN; PAM sequence: CTA
ctgaaaactgctggttcaat

SEQ ID NO: 84443 - DNA, 20 bp, Artificial Sequence
  Description of Artificial Sequence: Synthetic oligonucleotide
  Target: ATXN2; (-) strand; PAM type: YTN; PAM sequence: TTG
gactactgaaaactgctggt

SEQ ID NO: 84444 - DNA, 20 bp, Artificial Sequence
  Description of Artificial Sequence: Synthetic oligonucleotide
  Target: ATXN2; (-) strand; PAM type: YTN; PAM sequence: TTC
agttggactactgaaaactg

SEQ ID NO: 84445 - DNA, 20 bp, Artificial Sequence
  Description of Artificial Sequence: Synthetic oligonucleotide
  Target: ATXN2; (-) strand; PAM type: YTN; PAM sequence: TTT
cagttggactactgaaaact

SEQ ID NO: 84446 - DNA, 20 bp, Artificial Sequence
  Description of Artificial Sequence: Synthetic oligonucleotide
  Target: ATXN2; (-) strand; PAM type: YTN; PAM sequence: TTA
atttcagttggactactgaa

SEQ ID NO: 84447 - DNA, 20 bp, Artificial Sequence
  Description of Artificial Sequence: Synthetic oligonucleotide
  Target: ATXN2; (-) strand; PAM type: YTN; PAM sequence: CTA
ggaggttaatttcagttgga

SEQ ID NO: 84448 - DNA, 20 bp, Artificial Sequence
  Description of Artificial Sequence: Synthetic oligonucleotide
  Target: ATXN2; (-) strand; PAM type: YTN; PAM sequence: CTA
tctaggaggttaatttcagt

SEQ ID NO: 84449 - DNA, 20 bp, Artificial Sequence
  Description of Artificial Sequence: Synthetic oligonucleotide
  Target: ATXN2; (-) strand; PAM type: YTN; PAM sequence: CTG
gactatctaggaggttaatt

SEQ ID NO: 84450 - DNA, 20 bp, Artificial Sequence
  Description of Artificial Sequence: Synthetic oligonucleotide
  Target: ATXN2; (-) strand; PAM type: YTN; PAM sequence: TTG
cctggactatctaggaggtt

SEQ ID NO: 84451 - DNA, 20 bp, Artificial Sequence
  Description of Artificial Sequence: Synthetic oligonucleotide
  Target: ATXN2; (-) strand; PAM type: YTN; PAM sequence: TTT
gcctggactatctaggaggt

SEQ ID NO: 84452 - DNA, 20 bp, Artificial Sequence
  Description of Artificial Sequence: Synthetic oligonucleotide
  Target: ATXN2; (-) strand; PAM type: YTN; PAM sequence: TTT
tgcctggactatctaggagg

SEQ ID NO: 84453 - DNA, 20 bp, Artificial Sequence
  Description of Artificial Sequence: Synthetic oligonucleotide
  Target: ATXN2; (-) strand; PAM type: YTN; PAM sequence: TTT
ttgcctggactatctaggag

SEQ ID NO: 84454 - DNA, 20 bp, Artificial Sequence
  Description of Artificial Sequence: Synthetic oligonucleotide
  Target: ATXN2; (-) strand; PAM type: YTN; PAM sequence: TTG
gcagaatacaatgatcattt

SEQ ID NO: 84455 - DNA, 20 bp, Artificial Sequence
  Description of Artificial Sequence: Synthetic oligonucleotide
  Target: ATXN2; (-) strand; PAM type: YTN; PAM sequence: CTA
cattggcagaatacaatgat

SEQ ID NO: 84456 - DNA, 20 bp, Artificial Sequence
  Description of Artificial Sequence: Synthetic oligonucleotide
  Target: ATXN2; (-) strand; PAM type: YTN; PAM sequence: TTC
ctacattggcagaatacaat

SEQ ID NO: 84457 - DNA, 20 bp, Artificial Sequence
  Description of Artificial Sequence: Synthetic oligonucleotide
  Target: ATXN2; (-) strand; PAM type: YTN; PAM sequence: TTT
cctacattggcagaatacaa

SEQ ID NO: 84458 - DNA, 20 bp, Artificial Sequence
  Description of Artificial Sequence: Synthetic oligonucleotide
  Target: ATXN2; (-) strand; PAM type: YTN; PAM sequence: CTG
atttcctacattggcagaat

SEQ ID NO: 84459 - DNA, 20 bp, Artificial Sequence
  Description of Artificial Sequence: Synthetic oligonucleotide
  Target: ATXN2; (-) strand; PAM type: YTN; PAM sequence: TTA
gatgggaaataaaactgatt

SEQ ID NO: 84460 - DNA, 20 bp, Artificial Sequence
  Description of Artificial Sequence: Synthetic oligonucleotide
  Target: ATXN2; (-) strand; PAM type: YTN; PAM sequence: CTT
agatgggaaataaaactgat

SEQ ID NO: 84461 - DNA, 20 bp, Artificial Sequence
  Description of Artificial Sequence: Synthetic oligonucleotide
  Target: ATXN2; (-) strand; PAM type: YTN; PAM sequence: TTA
ccttagatgggaaataaaac

SEQ ID NO: 84462 - DNA, 20 bp, Artificial Sequence
  Description of Artificial Sequence: Synthetic oligonucleotide
  Target: ATXN2; (-) strand; PAM type: YTN; PAM sequence: TTT
accttagatgggaaataaaa

SEQ ID NO: 84463 - DNA, 20 bp, Artificial Sequence
  Description of Artificial Sequence: Synthetic oligonucleotide
  Target: ATXN2; (-) strand; PAM type: YTN; PAM sequence: TTT
taccttagatgggaaataaa

SEQ ID NO: 84464 - DNA, 20 bp, Artificial Sequence
  Description of Artificial Sequence: Synthetic oligonucleotide
  Target: ATXN2; (-) strand; PAM type: YTN; PAM sequence: TTT
ttaccttagatgggaaataa

SEQ ID NO: 84465 - DNA, 20 bp, Artificial Sequence
  Description of Artificial Sequence: Synthetic oligonucleotide
  Target: ATXN2; (-) strand; PAM type: YTN; PAM sequence: CTT
tttaccttagatgggaaata

SEQ ID NO: 84466 - DNA, 20 bp, Artificial Sequence
  Description of Artificial Sequence: Synthetic oligonucleotide
  Target: ATXN2; (-) strand; PAM type: YTN; PAM sequence: CTA
ctttttaccttagatgggaa

SEQ ID NO: 84467 - DNA, 20 bp, Artificial Sequence
  Description of Artificial Sequence: Synthetic oligonucleotide
  Target: ATXN2; (-) strand; PAM type: YTN; PAM sequence: TTG
atctactttttaccttagat

SEQ ID NO: 84468 - DNA, 20 bp, Artificial Sequence
  Description of Artificial Sequence: Synthetic oligonucleotide
  Target: ATXN2; (-) strand; PAM type: YTN; PAM sequence: CTT
gatctactttttaccttaga

SEQ ID NO: 84469 - DNA, 20 bp, Artificial Sequence
  Description of Artificial Sequence: Synthetic oligonucleotide
  Target: ATXN2; (-) strand; PAM type: YTN; PAM sequence: TTG
caatggtcccttgatctact

SEQ ID NO: 84470 - DNA, 20 bp, Artificial Sequence
  Description of Artificial Sequence: Synthetic oligonucleotide
  Target: ATXN2; (-) strand; PAM type: YTN; PAM sequence: TTT
gcaatggtcccttgatctac

SEQ ID NO: 84471 - DNA, 20 bp, Artificial Sequence
  Description of Artificial Sequence: Synthetic oligonucleotide
  Target: ATXN2; (-) strand; PAM type: YTN; PAM sequence: TTT
tgcaatggtcccttgatcta

SEQ ID NO: 84472 - DNA, 20 bp, Artificial Sequence
  Description of Artificial Sequence: Synthetic oligonucleotide
  Target: ATXN2; (-) strand; PAM type: YTN; PAM sequence: TTA
aagggttttgcaatggtccc

SEQ ID NO: 84473 - DNA, 20 bp, Artificial Sequence
  Description of Artificial Sequence: Synthetic oligonucleotide
  Target: ATXN2; (-) strand; PAM type: YTN; PAM sequence: TTT
aaagggttttgcaatggtcc

SEQ ID NO: 84474 - DNA, 20 bp, Artificial Sequence
  Description of Artificial Sequence: Synthetic oligonucleotide
  Target: ATXN2; (-) strand; PAM type: YTN; PAM sequence: TTT
taaagggttttgcaatggtc

SEQ ID NO: 84475 - DNA, 20 bp, Artificial Sequence
  Description of Artificial Sequence: Synthetic oligonucleotide
  Target: ATXN2; (-) strand; PAM type: YTN; PAM sequence: TTT
ttaaagggttttgcaatggt

SEQ ID NO: 84476 - DNA, 20 bp, Artificial Sequence
  Description of Artificial Sequence: Synthetic oligonucleotide
  Target: ATXN2; (-) strand; PAM type: YTN; PAM sequence: TTA
atttttaaagggttttgcaa

SEQ ID NO: 84477 - DNA, 20 bp, Artificial Sequence
  Description of Artificial Sequence: Synthetic oligonucleotide
  Target: ATXN2; (-) strand; PAM type: YTN; PAM sequence: CTA
ggttaatttttaaagggttt

SEQ ID NO: 84478 - DNA, 20 bp, Artificial Sequence
  Description of Artificial Sequence: Synthetic oligonucleotide
  Target: ATXN2; (-) strand; PAM type: YTN; PAM sequence: CTA
ggctaggttaatttttaaag

SEQ ID NO: 84479 - DNA, 20 bp, Artificial Sequence
  Description of Artificial Sequence: Synthetic oligonucleotide
  Target: ATXN2; (-) strand; PAM type: YTN; PAM sequence: TTG
gctaggctaggttaattttt

SEQ ID NO: 84480 - DNA, 20 bp, Artificial Sequence
  Description of Artificial Sequence: Synthetic oligonucleotide
  Target: ATXN2; (-) strand; PAM type: YTN; PAM sequence: TTC
accatgttggctaggctagg

SEQ ID NO: 84481 - DNA, 20 bp, Artificial Sequence
  Description of Artificial Sequence: Synthetic oligonucleotide
  Target: ATXN2; (-) strand; PAM type: YTN; PAM sequence: TTT
caccatgttggctaggctag

SEQ ID NO: 84482 - DNA, 20 bp, Artificial Sequence
  Description of Artificial Sequence: Synthetic oligonucleotide
  Target: ATXN2; (-) strand; PAM type: YTN; PAM sequence: TTG
gtagagacggggtttcacca

SEQ ID NO: 84483 - DNA, 20 bp, Artificial Sequence
  Description of Artificial Sequence: Synthetic oligonucleotide
  Target: ATXN2; (-) strand; PAM type: YTN; PAM sequence: TTT
ggtagagacggggtttcacc

SEQ ID NO: 84484 - DNA, 20 bp, Artificial Sequence
  Description of Artificial Sequence: Synthetic oligonucleotide
  Target: ATXN2; (-) strand; PAM type: YTN; PAM sequence: TTT
tggtagagacggggtttcac

SEQ ID NO: 84485 - DNA, 20 bp, Artificial Sequence
  Description of Artificial Sequence: Synthetic oligonucleotide
  Target: ATXN2; (-) strand; PAM type: YTN; PAM sequence: TTT
ttggtagagacggggtttca

SEQ ID NO: 84486 - DNA, 20 bp, Artificial Sequence
  Description of Artificial Sequence: Synthetic oligonucleotide
  Target: ATXN2; (-) strand; PAM type: YTN; PAM sequence: TTA
tatttttggtagagacgggg

SEQ ID NO: 84487 - DNA, 20 bp, Artificial Sequence
  Description of Artificial Sequence: Synthetic oligonucleotide
  Target: ATXN2; (-) strand; PAM type: YTN; PAM sequence: TTT
atatttttggtagagacggg

SEQ ID NO: 84488 - DNA, 20 bp, Artificial Sequence
  Description of Artificial Sequence: Synthetic oligonucleotide
  Target: ATXN2; (-) strand; PAM type: YTN; PAM sequence: TTT
tatatttttggtagagacgg

SEQ ID NO: 84489 - DNA, 20 bp, Artificial Sequence
  Description of Artificial Sequence: Synthetic oligonucleotide
  Target: ATXN2; (-) strand; PAM type: YTN; PAM sequence: TTT
ttatatttttggtagagacg

SEQ ID NO: 84490 - DNA, 20 bp, Artificial Sequence
  Description of Artificial Sequence: Synthetic oligonucleotide
  Target: ATXN2; (-) strand; PAM type: YTN; PAM sequence: CTA
atttttatatttttggtaga

SEQ ID NO: 84491 - DNA, 20 bp, Artificial Sequence
  Description of Artificial Sequence: Synthetic oligonucleotide
  Target: ATXN2; (-) strand; PAM type: YTN; PAM sequence: TTA
caggcgcccaccaccacacc

SEQ ID NO: 84492 - DNA, 20 bp, Artificial Sequence
  Description of Artificial Sequence: Synthetic oligonucleotide
  Target: ATXN2; (-) strand; PAM type: YTN; PAM sequence: CTG
ggattacaggcgcccaccac

SEQ ID NO: 84493 - DNA, 20 bp, Artificial Sequence
  Description of Artificial Sequence: Synthetic oligonucleotide
  Target: ATXN2; (-) strand; PAM type: YTN; PAM sequence: CTC
ccgagtagctgggattacag

SEQ ID NO: 84494 - DNA, 20 bp, Artificial Sequence
  Description of Artificial Sequence: Synthetic oligonucleotide
  Target: ATXN2; (-) strand; PAM type: YTN; PAM sequence: CTG
tatcagcctcccgagtagct

SEQ ID NO: 84495 - DNA, 20 bp, Artificial Sequence
  Description of Artificial Sequence: Synthetic oligonucleotide
  Target: ATXN2; (-) strand; PAM type: YTN; PAM sequence: CTC
ctgtatcagcctcccgagta

SEQ ID NO: 84496 - DNA, 20 bp, Artificial Sequence
  Description of Artificial Sequence: Synthetic oligonucleotide
  Target: ATXN2; (-) strand; PAM type: YTN; PAM sequence: TTC
tcctgtatcagcctcccgag

SEQ ID NO: 84497 - DNA, 20 bp, Artificial Sequence
  Description of Artificial Sequence: Synthetic oligonucleotide
  Target: ATXN2; (-) strand; PAM type: YTN; PAM sequence: TTC
aagcaattctcctgtatcag

SEQ ID NO: 84498 - DNA, 20 bp, Artificial Sequence
  Description of Artificial Sequence: Synthetic oligonucleotide
  Target: ATXN2; (-) strand; PAM type: YTN; PAM sequence: CTC
ccggattcaagcaattctcc

SEQ ID NO: 84499 - DNA, 20 bp, Artificial Sequence
  Description of Artificial Sequence: Synthetic oligonucleotide
  Target: ATXN2; (-) strand; PAM type: YTN; PAM sequence: CTC
cacctcccggattcaagcaa

SEQ ID NO: 84500 - DNA, 20 bp, Artificial Sequence
  Description of Artificial Sequence: Synthetic oligonucleotide
  Target: ATXN2; (-) strand; PAM type: YTN; PAM sequence: CTG
caacctccacctcccggatt

SEQ ID NO: 84501 - DNA, 20 bp, Artificial Sequence
  Description of Artificial Sequence: Synthetic oligonucleotide
  Target: ATXN2; (-) strand; PAM type: YTN; PAM sequence: CTG
actgcaacctccacctcccg

SEQ ID NO: 84502 - DNA, 20 bp, Artificial Sequence
  Description of Artificial Sequence: Synthetic oligonucleotide
  Target: ATXN2; (-) strand; PAM type: YTN; PAM sequence: CTC
ggctgactgcaacctccacc

SEQ ID NO: 84503 - DNA, 20 bp, Artificial Sequence
  Description of Artificial Sequence: Synthetic oligonucleotide
  Target: ATXN2; (-) strand; PAM type: YTN; PAM sequence: CTG
gagtgcatgatctcggctga

SEQ ID NO: 84504 - DNA, 20 bp, Artificial Sequence
  Description of Artificial Sequence: Synthetic oligonucleotide
  Target: ATXN2; (-) strand; PAM type: YTN; PAM sequence: CTG
tcgcccaggctggagtgcat

SEQ ID NO: 84505 - DNA, 20 bp, Artificial Sequence
  Description of Artificial Sequence: Synthetic oligonucleotide
  Target: ATXN2; (-) strand; PAM type: YTN; PAM sequence: CTC
tgtcgcccaggctggagtgc

SEQ ID NO: 84506 - DNA, 20 bp, Artificial Sequence
  Description of Artificial Sequence: Synthetic oligonucleotide
  Target: ATXN2; (-) strand; PAM type: YTN; PAM sequence: CTC
gctctgtcgcccaggctgga

SEQ ID NO: 84507 - DNA, 20 bp, Artificial Sequence
  Description of Artificial Sequence: Synthetic oligonucleotide
  Target: ATXN2; (-) strand; PAM type: YTN; PAM sequence: TTG
agacggagtctcgctctgtc

SEQ ID NO: 84508 - DNA, 20 bp, Artificial Sequence
  Description of Artificial Sequence: Synthetic oligonucleotide
  Target: ATXN2; (-) strand; PAM type: YTN; PAM sequence: TTT
gagacggagtctcgctctgt

SEQ ID NO: 84509 - DNA, 20 bp, Artificial Sequence
  Description of Artificial Sequence: Synthetic oligonucleotide
  Target: ATXN2; (-) strand; PAM type: YTN; PAM sequence: TTT
tgagacggagtctcgctctg

SEQ ID NO: 84510 - DNA, 20 bp, Artificial Sequence
  Description of Artificial Sequence: Synthetic oligonucleotide
  Target: ATXN2; (-) strand; PAM type: YTN; PAM sequence: TTT
ttgagacggagtctcgctct

SEQ ID NO: 84511 - DNA, 20 bp, Artificial Sequence
  Description of Artificial Sequence: Synthetic oligonucleotide
  Target: ATXN2; (-) strand; PAM type: YTN; PAM sequence: TTT
tttgagacggagtctcgctc

SEQ ID NO: 84512 - DNA, 20 bp, Artificial Sequence
  Description of Artificial Sequence: Synthetic oligonucleotide
  Target: ATXN2; (-) strand; PAM type: YTN; PAM sequence: TTA
ttttttgagacggagtctcg

SEQ ID NO: 84513 - DNA, 20 bp, Artificial Sequence
  Description of Artificial Sequence: Synthetic oligonucleotide
  Target: ATXN2; (-) strand; PAM type: YTN; PAM sequence: TTT
attttttgagacggagtctc

SEQ ID NO: 84514 - DNA, 20 bp, Artificial Sequence
  Description of Artificial Sequence: Synthetic oligonucleotide
  Target: ATXN2; (-) strand; PAM type: YTN; PAM sequence: TTA
tttattttttgagacggagt

SEQ ID NO: 84515 - DNA, 20 bp, Artificial Sequence
  Description of Artificial Sequence: Synthetic oligonucleotide
  Target: ATXN2; (-) strand; PAM type: YTN; PAM sequence: TTT
atttattttttgagacggag

SEQ ID NO: 84516 - DNA, 20 bp, Artificial Sequence
  Description of Artificial Sequence: Synthetic oligonucleotide
  Target: ATXN2; (-) strand; PAM type: YTN; PAM sequence: TTA
tttatttattttttgagacg

SEQ ID NO: 84517 - DNA, 20 bp, Artificial Sequence
  Description of Artificial Sequence: Synthetic oligonucleotide
  Target: ATXN2; (-) strand; PAM type: YTN; PAM sequence: TTT
atttatttattttttgagac

SEQ ID NO: 84518 - DNA, 20 bp, Artificial Sequence
  Description of Artificial Sequence: Synthetic oligonucleotide
  Target: ATXN2; (-) strand; PAM type: YTN; PAM sequence: TTA
tttatttatttattttttga

SEQ ID NO: 84519 - DNA, 20 bp, Artificial Sequence
  Description of Artificial Sequence: Synthetic oligonucleotide
  Target: ATXN2; (-) strand; PAM type: YTN; PAM sequence: TTT
atttatttatttattttttg

SEQ ID NO: 84520 - DNA, 20 bp, Artificial Sequence
  Description of Artificial Sequence: Synthetic oligonucleotide
  Target: ATXN2; (-) strand; PAM type: YTN; PAM sequence: TTA
tttatttatttatttatttt

SEQ ID NO: 84521 - DNA, 20 bp, Artificial Sequence
  Description of Artificial Sequence: Synthetic oligonucleotide
  Target: ATXN2; (-) strand; PAM type: YTN; PAM sequence: TTT
atttatttatttatttattt

SEQ ID NO: 84522 - DNA, 20 bp, Artificial Sequence
  Description of Artificial Sequence: Synthetic oligonucleotide
  Target: ATXN2; (-) strand; PAM type: YTN; PAM sequence: TTA
tttatttatttatttattta

SEQ ID NO: 84523 - DNA, 20 bp, Artificial Sequence
  Description of Artificial Sequence: Synthetic oligonucleotide
  Target: ATXN2; (-) strand; PAM type: YTN; PAM sequence: TTT
atttatttatttatttattt

SEQ ID NO: 84524 - DNA, 20 bp, Artificial Sequence
  Description of Artificial Sequence: Synthetic oligonucleotide
  Target: ATXN2; (-) strand; PAM type: YTN; PAM sequence: CTT
tatttatttatttatttatt

SEQ ID NO: 84525 - DNA, 20 bp, Artificial Sequence
  Description of Artificial Sequence: Synthetic oligonucleotide
  Target: ATXN2; (-) strand; PAM type: YTN; PAM sequence: TTA
ctttatttatttatttattt

SEQ ID NO: 84526 - DNA, 20 bp, Artificial Sequence
  Description of Artificial Sequence: Synthetic oligonucleotide
  Target: ATXN2; (-) strand; PAM type: YTN; PAM sequence: TTA
ggttactttatttatttatt

SEQ ID NO: 84527 - DNA, 20 bp, Artificial Sequence
  Description of Artificial Sequence: Synthetic oligonucleotide
  Target: ATXN2; (-) strand; PAM type: YTN; PAM sequence: TTT
aggttactttatttatttat

SEQ ID NO: 84528 - DNA, 20 bp, Artificial Sequence
  Description of Artificial Sequence: Synthetic oligonucleotide
  Target: ATXN2; (-) strand; PAM type: YTN; PAM sequence: CTT
taggttactttatttattta

SEQ ID NO: 84529 - DNA, 20 bp, Artificial Sequence
  Description of Artificial Sequence: Synthetic oligonucleotide
  Target: ATXN2; (-) strand; PAM type: YTN; PAM sequence: TTC
ctttaggttactttatttat

SEQ ID NO: 84530 - DNA, 20 bp, Artificial Sequence
  Description of Artificial Sequence: Synthetic oligonucleotide
  Target: ATXN2; (-) strand; PAM type: YTN; PAM sequence: TTT
cctttaggttactttattta

SEQ ID NO: 84531 - DNA, 20 bp, Artificial Sequence
  Description of Artificial Sequence: Synthetic oligonucleotide
  Target: ATXN2; (-) strand; PAM type: YTN; PAM sequence: TTC
cagtttcctttaggttactt

SEQ ID NO: 84532 - DNA, 20 bp, Artificial Sequence
  Description of Artificial Sequence: Synthetic oligonucleotide
  Target: ATXN2; (-) strand; PAM type: YTN; PAM sequence: TTA
gttccagtttcctttaggtt

SEQ ID NO: 84533 - DNA, 20 bp, Artificial Sequence
  Description of Artificial Sequence: Synthetic oligonucleotide
  Target: ATXN2; (-) strand; PAM type: YTN; PAM sequence: TTT
agttccagtttcctttaggt

SEQ ID NO: 84534 - DNA, 20 bp, Artificial Sequence
  Description of Artificial Sequence: Synthetic oligonucleotide
  Target: ATXN2; (-) strand; PAM type: YTN; PAM sequence: TTT
tagttccagtttcctttagg

SEQ ID NO: 84535 - DNA, 20 bp, Artificial Sequence
  Description of Artificial Sequence: Synthetic oligonucleotide
  Target: ATXN2; (-) strand; PAM type: YTN; PAM sequence: TTT
ttagttccagtttcctttag

SEQ ID NO: 84536 - DNA, 20 bp, Artificial Sequence
  Description of Artificial Sequence: Synthetic oligonucleotide
  Target: ATXN2; (-) strand; PAM type: YTN; PAM sequence: TTT
tttagttccagtttccttta

SEQ ID NO: 84537 - DNA, 20 bp, Artificial Sequence
  Description of Artificial Sequence: Synthetic oligonucleotide
  Target: ATXN2; (-) strand; PAM type: YTN; PAM sequence: CTG
gttttttagttccagtttcc

SEQ ID NO: 84538 - DNA, 20 bp, Artificial Sequence
  Description of Artificial Sequence: Synthetic oligonucleotide
  Target: ATXN2; (-) strand; PAM type: YTN; PAM sequence: TTC
aactggttttttagttccag

SEQ ID NO: 84539 - DNA, 20 bp, Artificial Sequence
  Description of Artificial Sequence: Synthetic oligonucleotide
  Target: ATXN2; (-) strand; PAM type: YTN; PAM sequence: TTT
caactggttttttagttcca

SEQ ID NO: 84540 - DNA, 20 bp, Artificial Sequence
  Description of Artificial Sequence: Synthetic oligonucleotide
  Target: ATXN2; (-) strand; PAM type: YTN; PAM sequence: TTG
tttcaactggttttttagtt

SEQ ID NO: 84541 - DNA, 20 bp, Artificial Sequence
  Description of Artificial Sequence: Synthetic oligonucleotide
  Target: ATXN2; (-) strand; PAM type: YTN; PAM sequence: TTT
gtttcaactggttttttagt

SEQ ID NO: 84542 - DNA, 20 bp, Artificial Sequence
  Description of Artificial Sequence: Synthetic oligonucleotide
  Target: ATXN2; (-) strand; PAM type: YTN; PAM sequence: TTT
tgtttcaactggttttttag

SEQ ID NO: 84543 - DNA, 20 bp, Artificial Sequence
  Description of Artificial Sequence: Synthetic oligonucleotide
  Target: ATXN2; (-) strand; PAM type: YTN; PAM sequence: TTT
ttgtttcaactggtttttta

SEQ ID NO: 84544 - DNA, 20 bp, Artificial Sequence
  Description of Artificial Sequence: Synthetic oligonucleotide
  Target: ATXN2; (-) strand; PAM type: YTN; PAM sequence: TTT
tttgtttcaactggtttttt

SEQ ID NO: 84545 - DNA, 20 bp, Artificial Sequence
  Description of Artificial Sequence: Synthetic oligonucleotide
  Target: ATXN2; (-) strand; PAM type: YTN; PAM sequence: TTT
ttttgtttcaactggttttt

SEQ ID NO: 84546 - DNA, 20 bp, Artificial Sequence
  Description of Artificial Sequence: Synthetic oligonucleotide
  Target: ATXN2; (-) strand; PAM type: YTN; PAM sequence: CTG
taccacagccgggtacaggt

SEQ ID NO: 84547 - DNA, 20 bp, Artificial Sequence
  Description of Artificial Sequence: Synthetic oligonucleotide
  Target: ATXN2; (-) strand; PAM type: YTN; PAM sequence: CTG
gcctgtaccacagccgggta

SEQ ID NO: 84548 - DNA, 20 bp, Artificial Sequence
  Description of Artificial Sequence: Synthetic oligonucleotide
  Target: ATXN2; (-) strand; PAM type: YTN; PAM sequence: CTC
acagcagccctggcctgtac

SEQ ID NO: 84549 - DNA, 20 bp, Artificial Sequence
  Description of Artificial Sequence: Synthetic oligonucleotide
  Target: ATXN2; (-) strand; PAM type: YTN; PAM sequence: TTC
ccctcacagcagccctggcc

SEQ ID NO: 84550 - DNA, 20 bp, Artificial Sequence
  Description of Artificial Sequence: Synthetic oligonucleotide
  Target: ATXN2; (-) strand; PAM type: YTN; PAM sequence: CTT
cccctcacagcagccctggc

SEQ ID NO: 84551 - DNA, 20 bp, Artificial Sequence
  Description of Artificial Sequence: Synthetic oligonucleotide
  Target: ATXN2; (-) strand; PAM type: YTN; PAM sequence: CTC
caggagcttcccctcacagc

SEQ ID NO: 84552 - DNA, 20 bp, Artificial Sequence
  Description of Artificial Sequence: Synthetic oligonucleotide
  Target: ATXN2; (-) strand; PAM type: YTN; PAM sequence: CTC
tccaggagcttcccctcaca

SEQ ID NO: 84553 - DNA, 20 bp, Artificial Sequence
  Description of Artificial Sequence: Synthetic oligonucleotide
  Target: ATXN2; (-) strand; PAM type: YTN; PAM sequence: CTG
ccccatgtcaccctctccag

SEQ ID NO: 84554 - DNA, 20 bp, Artificial Sequence
  Description of Artificial Sequence: Synthetic oligonucleotide
  Target: ATXN2; (-) strand; PAM type: YTN; PAM sequence: TTG
ggtccctgccccatgtcacc

SEQ ID NO: 84555 - DNA, 20 bp, Artificial Sequence
  Description of Artificial Sequence: Synthetic oligonucleotide
  Target: ATXN2; (-) strand; PAM type: YTN; PAM sequence: TTT
gggtccctgccccatgtcac

SEQ ID NO: 84556 - DNA, 20 bp, Artificial Sequence
  Description of Artificial Sequence: Synthetic oligonucleotide
  Target: ATXN2; (-) strand; PAM type: YTN; PAM sequence: CTC
atttgggtccctgccccatg

SEQ ID NO: 84557 - DNA, 20 bp, Artificial Sequence
  Description of Artificial Sequence: Synthetic oligonucleotide
  Target: ATXN2; (-) strand; PAM type: YTN; PAM sequence: CTC
atgcccatgctcatttgggt

SEQ ID NO: 84558 - DNA, 20 bp, Artificial Sequence
  Description of Artificial Sequence: Synthetic oligonucleotide
  Target: ATXN2; (-) strand; PAM type: YTN; PAM sequence: CTC
cccaggatcctcatgcccat

SEQ ID NO: 84559 - DNA, 20 bp, Artificial Sequence
  Description of Artificial Sequence: Synthetic oligonucleotide
  Target: ATXN2; (-) strand; PAM type: YTN; PAM sequence: TTC
tccccaggatcctcatgccc

SEQ ID NO: 84560 - DNA, 20 bp, Artificial Sequence
  Description of Artificial Sequence: Synthetic oligonucleotide
  Target: ATXN2; (-) strand; PAM type: YTN; PAM sequence: TTT
ctccccaggatcctcatgcc

SEQ ID NO: 84561 - DNA, 20 bp, Artificial Sequence
  Description of Artificial Sequence: Synthetic oligonucleotide
  Target: ATXN2; (-) strand; PAM type: YTN; PAM sequence: CTG
gagcgtttctccccaggatc

SEQ ID NO: 84562 - DNA, 20 bp, Artificial Sequence
  Description of Artificial Sequence: Synthetic oligonucleotide
  Target: ATXN2; (-) strand; PAM type: YTN; PAM sequence: CTC
cacctggagcgtttctcccc

SEQ ID NO: 84563 - DNA, 20 bp, Artificial Sequence
  Description of Artificial Sequence: Synthetic oligonucleotide
  Target: ATXN2; (-) strand; PAM type: YTN; PAM sequence: CTG
tgccctccacctggagcgtt

SEQ ID NO: 84564 - DNA, 20 bp, Artificial Sequence
  Description of Artificial Sequence: Synthetic oligonucleotide
  Target: ATXN2; (-) strand; PAM type: YTN; PAM sequence: CTC
gctgtgccctccacctggag

SEQ ID NO: 84565 - DNA, 20 bp, Artificial Sequence
  Description of Artificial Sequence: Synthetic oligonucleotide
  Target: ATXN2; (-) strand; PAM type: YTN; PAM sequence: TTG
ccctcgctgtgccctccacc

SEQ ID NO: 84566 - DNA, 20 bp, Artificial Sequence
  Description of Artificial Sequence: Synthetic oligonucleotide
  Target: ATXN2; (-) strand; PAM type: YTN; PAM sequence: TTT
gccctcgctgtgccctccac

SEQ ID NO: 84567 - DNA, 20 bp, Artificial Sequence
  Description of Artificial Sequence: Synthetic oligonucleotide
  Target: ATXN2; (-) strand; PAM type: YTN; PAM sequence: CTT
tgccctcgctgtgccctcca

SEQ ID NO: 84568 - DNA, 20 bp, Artificial Sequence
  Description of Artificial Sequence: Synthetic oligonucleotide
  Target: ATXN2; (-) strand; PAM type: YTN; PAM sequence: CTC
agagcctttgccctcgctgt

SEQ ID NO: 84569 - DNA, 20 bp, Artificial Sequence
  Description of Artificial Sequence: Synthetic oligonucleotide
  Target: ATXN2; (-) strand; PAM type: YTN; PAM sequence: CTC
ccccctcagagcctttgccc

SEQ ID NO: 84570 - DNA, 20 bp, Artificial Sequence
  Description of Artificial Sequence: Synthetic oligonucleotide
  Target: ATXN2; (-) strand; PAM type: YTN; PAM sequence: CTC
agactcccccctcagagcct

SEQ ID NO: 84571 - DNA, 20 bp, Artificial Sequence
  Description of Artificial Sequence: Synthetic oligonucleotide
  Target: ATXN2; (-) strand; PAM type: YTN; PAM sequence: TTC
ctcagactcccccctcagag

SEQ ID NO: 84572 - DNA, 20 bp, Artificial Sequence
  Description of Artificial Sequence: Synthetic oligonucleotide
  Target: ATXN2; (-) strand; PAM type: YTN; PAM sequence: CTG
ttcctcagactcccccctca

SEQ ID NO: 84573 - DNA, 20 bp, Artificial Sequence
  Description of Artificial Sequence: Synthetic oligonucleotide
  Target: ATXN2; (-) strand; PAM type: YTN; PAM sequence: TTG
ctgttcctcagactcccccc

SEQ ID NO: 84574 - DNA, 20 bp, Artificial Sequence
  Description of Artificial Sequence: Synthetic oligonucleotide
  Target: ATXN2; (-) strand; PAM type: YTN; PAM sequence: CTT
gctgttcctcagactccccc

SEQ ID NO: 84575 - DNA, 20 bp, Artificial Sequence
  Description of Artificial Sequence: Synthetic oligonucleotide
  Target: ATXN2; (-) strand; PAM type: YTN; PAM sequence: CTC
cttgctgttcctcagactcc

SEQ ID NO: 84576 - DNA, 20 bp, Artificial Sequence
  Description of Artificial Sequence: Synthetic oligonucleotide
  Target: ATXN2; (-) strand; PAM type: YTN; PAM sequence: TTG
caggcctccttgctgttcct

SEQ ID NO: 84577 - DNA, 20 bp, Artificial Sequence
  Description of Artificial Sequence: Synthetic oligonucleotide
  Target: ATXN2; (-) strand; PAM type: YTN; PAM sequence: CTC
cattgcaggcctccttgctg

SEQ ID NO: 84578 - DNA, 20 bp, Artificial Sequence
  Description of Artificial Sequence: Synthetic oligonucleotide
  Target: ATXN2; (-) strand; PAM type: YTN; PAM sequence: CTG
ctccattgcaggcctccttg

SEQ ID NO: 84579 - DNA, 20 bp, Artificial Sequence
  Description of Artificial Sequence: Synthetic oligonucleotide
  Target: ATXN2; (-) strand; PAM type: YTN; PAM sequence: TTG
acgacctgctccattgcagg

SEQ ID NO: 84580 - DNA, 20 bp, Artificial Sequence
  Description of Artificial Sequence: Synthetic oligonucleotide
  Target: ATXN2; (-) strand; PAM type: YTN; PAM sequence: TTA
aagaaagaatataacgggac

SEQ ID NO: 84581 - DNA, 20 bp, Artificial Sequence
  Description of Artificial Sequence: Synthetic oligonucleotide
  Target: ATXN2; (-) strand; PAM type: YTN; PAM sequence: CTA
ttaaagaaagaatataacgg

SEQ ID NO: 84582 - DNA, 20 bp, Artificial Sequence
  Description of Artificial Sequence: Synthetic oligonucleotide
  Target: ATXN2; (-) strand; PAM type: YTN; PAM sequence: TTC
tattaaagaaagaatataac

SEQ ID NO: 84583 - DNA, 20 bp, Artificial Sequence
  Description of Artificial Sequence: Synthetic oligonucleotide
  Target: ATXN2; (-) strand; PAM type: YTN; PAM sequence: TTT
ctattaaagaaagaatataa

SEQ ID NO: 84584 - DNA, 20 bp, Artificial Sequence
  Description of Artificial Sequence: Synthetic oligonucleotide
  Target: ATXN2; (-) strand; PAM type: YTN; PAM sequence: TTG
tatttctattaaagaaagaa

SEQ ID NO: 84585 - DNA, 20 bp, Artificial Sequence
  Description of Artificial Sequence: Synthetic oligonucleotide
  Target: ATXN2; (-) strand; PAM type: YTN; PAM sequence: TTT
gtatttctattaaagaaaga

SEQ ID NO: 84586 - DNA, 20 bp, Artificial Sequence
  Description of Artificial Sequence: Synthetic oligonucleotide
  Target: ATXN2; (-) strand; PAM type: YTN; PAM sequence: TTA
caggtgtgagccaccgcgcc

SEQ ID NO: 84587 - DNA, 20 bp, Artificial Sequence
  Description of Artificial Sequence: Synthetic oligonucleotide
  Target: ATXN2; (-) strand; PAM type: YTN; PAM sequence: CTG
ggattacaggtgtgagccac

SEQ ID NO: 84588 - DNA, 20 bp, Artificial Sequence
  Description of Artificial Sequence: Synthetic oligonucleotide
  Target: ATXN2; (-) strand; PAM type: YTN; PAM sequence: CTC
ccagagtgctgggattacag

SEQ ID NO: 84589 - DNA, 20 bp, Artificial Sequence
  Description of Artificial Sequence: Synthetic oligonucleotide
  Target: ATXN2; (-) strand; PAM type: YTN; PAM sequence: CTC
ggcctcccagagtgctggga

SEQ ID NO: 84590 - DNA, 20 bp, Artificial Sequence
  Description of Artificial Sequence: Synthetic oligonucleotide
  Target: ATXN2; (-) strand; PAM type: YTN; PAM sequence: CTC
aggtgatccatccgcctcgg

SEQ ID NO: 84591 - DNA, 20 bp, Artificial Sequence
  Description of Artificial Sequence: Synthetic oligonucleotide
  Target: ATXN2; (-) strand; PAM type: YTN; PAM sequence: CTG
acctcaggtgatccatccgc

SEQ ID NO: 84592 - DNA, 20 bp, Artificial Sequence
  Description of Artificial Sequence: Synthetic oligonucleotide
  Target: ATXN2; (-) strand; PAM type: YTN; PAM sequence: CTC
ctgacctcaggtgatccatc

SEQ ID NO: 84593 - DNA, 20 bp, Artificial Sequence
  Description of Artificial Sequence: Synthetic oligonucleotide
  Target: ATXN2; (-) strand; PAM type: YTN; PAM sequence: TTG
aactcctgacctcaggtgat

SEQ ID NO: 84594 - DNA, 20 bp, Artificial Sequence
  Description of Artificial Sequence: Synthetic oligonucleotide
  Target: ATXN2; (-) strand; PAM type: YTN; PAM sequence: CTT
gaactcctgacctcaggtga

SEQ ID NO: 84595 - DNA, 20 bp, Artificial Sequence
  Description of Artificial Sequence: Synthetic oligonucleotide
  Target: ATXN2; (-) strand; PAM type: YTN; PAM sequence: CTG
gtcttgaactcctgacctca

SEQ ID NO: 84596 - DNA, 20 bp, Artificial Sequence
  Description of Artificial Sequence: Synthetic oligonucleotide
  Target: ATXN2; (-) strand; PAM type: YTN; PAM sequence: TTG
gccacgctggtcttgaactc

SEQ ID NO: 84597 - DNA, 20 bp, Artificial Sequence
  Description of Artificial Sequence: Synthetic oligonucleotide
  Target: ATXN2; (-) strand; PAM type: YTN; PAM sequence: TTC
accatgttggccacgctggt

SEQ ID NO: 84598 - DNA, 20 bp, Artificial Sequence
  Description of Artificial Sequence: Synthetic oligonucleotide
  Target: ATXN2; (-) strand; PAM type: YTN; PAM sequence: TTT
caccatgttggccacgctgg

SEQ ID NO: 84599 - DNA, 20 bp, Artificial Sequence
  Description of Artificial Sequence: Synthetic oligonucleotide
  Target: ATXN2; (-) strand; PAM type: YTN; PAM sequence: TTA
gtagcgatggggtttcacca

SEQ ID NO: 84600 - DNA, 20 bp, Artificial Sequence
  Description of Artificial Sequence: Synthetic oligonucleotide
  Target: ATXN2; (-) strand; PAM type: YTN; PAM sequence: TTT
agtagcgatggggtttcacc

SEQ ID NO: 84601 - DNA, 20 bp, Artificial Sequence
  Description of Artificial Sequence: Synthetic oligonucleotide
  Target: ATXN2; (-) strand; PAM type: YTN; PAM sequence: TTT
tagtagcgatggggtttcac

SEQ ID NO: 84602 - DNA, 20 bp, Artificial Sequence
  Description of Artificial Sequence: Synthetic oligonucleotide
  Target: ATXN2; (-) strand; PAM type: YTN; PAM sequence: TTT
ttagtagcgatggggtttca

SEQ ID NO: 84603 - DNA, 20 bp, Artificial Sequence
  Description of Artificial Sequence: Synthetic oligonucleotide
  Target: ATXN2; (-) strand; PAM type: YTN; PAM sequence: TTC
gtatttttagtagcgatggg

SEQ ID NO: 84604 - DNA, 20 bp, Artificial Sequence
  Description of Artificial Sequence: Synthetic oligonucleotide
  Target: ATXN2; (-) strand; PAM type: YTN; PAM sequence: TTT
cgtatttttagtagcgatgg

SEQ ID NO: 84605 - DNA, 20 bp, Artificial Sequence
  Description of Artificial Sequence: Synthetic oligonucleotide
  Target: ATXN2; (-) strand; PAM type: YTN; PAM sequence: TTT
tcgtatttttagtagcgatg

SEQ ID NO: 84606 - DNA, 20 bp, Artificial Sequence
  Description of Artificial Sequence: Synthetic oligonucleotide
  Target: ATXN2; (-) strand; PAM type: YTN; PAM sequence: TTT
ttcgtatttttagtagcgat

SEQ ID NO: 84607 - DNA, 20 bp, Artificial Sequence
  Description of Artificial Sequence: Synthetic oligonucleotide
  Target: ATXN2; (-) strand; PAM type: YTN; PAM sequence: TTT
tttcgtatttttagtagcga

SEQ ID NO: 84608 - DNA, 20 bp, Artificial Sequence
  Description of Artificial Sequence: Synthetic oligonucleotide
  Target: ATXN2; (-) strand; PAM type: YTN; PAM sequence: CTA
attttttcgtatttttagta

SEQ ID NO: 84609 - DNA, 20 bp, Artificial Sequence
  Description of Artificial Sequence: Synthetic oligonucleotide
  Target: ATXN2; (-) strand; PAM type: YTN; PAM sequence: CTG
agatcacagatgcccaccac

SEQ ID NO: 84610 - DNA, 20 bp, Artificial Sequence
  Description of Artificial Sequence: Synthetic oligonucleotide
  Target: ATXN2; (-) strand; PAM type: YTN; PAM sequence: CTG
cgtagctgagatcacagatg

SEQ ID NO: 84611 - DNA, 20 bp, Artificial Sequence
  Description of Artificial Sequence: Synthetic oligonucleotide
  Target: ATXN2; (-) strand; PAM type: YTN; PAM sequence: CTC
agcatcctgcgtagctgaga

SEQ ID NO: 84612 - DNA, 20 bp, Artificial Sequence
  Description of Artificial Sequence: Synthetic oligonucleotide
  Target: ATXN2; (-) strand; PAM type: YTN; PAM sequence: CTG
cctcagcatcctgcgtagct

SEQ ID NO: 84613 - DNA, 20 bp, Artificial Sequence
  Description of Artificial Sequence: Synthetic oligonucleotide
  Target: ATXN2; (-) strand; PAM type: YTN; PAM sequence: CTC
ctgcctcagcatcctgcgta

SEQ ID NO: 84614 - DNA, 20 bp, Artificial Sequence
  Description of Artificial Sequence: Synthetic oligonucleotide
  Target: ATXN2; (-) strand; PAM type: YTN; PAM sequence: TTC
tcctgcctcagcatcctgcg

SEQ ID NO: 84615 - DNA, 20 bp, Artificial Sequence
  Description of Artificial Sequence: Synthetic oligonucleotide
  Target: ATXN2; (-) strand; PAM type: YTN; PAM sequence: TTC
aagcgattctcctgcctcag

SEQ ID NO: 84616 - DNA, 20 bp, Artificial Sequence
  Description of Artificial Sequence: Synthetic oligonucleotide
  Target: ATXN2; (-) strand; PAM type: YTN; PAM sequence: CTG
ggttcaagcgattctcctgc

SEQ ID NO: 84617 - DNA, 20 bp, Artificial Sequence
  Description of Artificial Sequence: Synthetic oligonucleotide
  Target: ATXN2; (-) strand; PAM type: YTN; PAM sequence: CTC
ctgggttcaagcgattctcc

SEQ ID NO: 84618 - DNA, 20 bp, Artificial Sequence
  Description of Artificial Sequence: Synthetic oligonucleotide
  Target: ATXN2; (-) strand; PAM type: YTN; PAM sequence: CTC
cgcctcctgggttcaagcga

SEQ ID NO: 84619 - DNA, 20 bp, Artificial Sequence
  Description of Artificial Sequence: Synthetic oligonucleotide
  Target: ATXN2; (-) strand; PAM type: YTN; PAM sequence: CTG
taacctccgcctcctgggtt

SEQ ID NO: 84620 - DNA, 20 bp, Artificial Sequence
  Description of Artificial Sequence: Synthetic oligonucleotide
  Target: ATXN2; (-) strand; PAM type: YTN; PAM sequence: TTG
gtcactgtaacctccgcctc

SEQ ID NO: 84621 - DNA, 20 bp, Artificial Sequence
  Description of Artificial Sequence: Synthetic oligonucleotide
  Target: ATXN2; (-) strand; PAM type: YTN; PAM sequence: TTT
ggtcactgtaacctccgcct

SEQ ID NO: 84622 - DNA, 20 bp, Artificial Sequence
  Description of Artificial Sequence: Synthetic oligonucleotide
  Target: ATXN2; (-) strand; PAM type: YTN; PAM sequence: CTT
tggtcactgtaacctccgcc

SEQ ID NO: 84623 - DNA, 20 bp, Artificial Sequence
  Description of Artificial Sequence: Synthetic oligonucleotide
  Target: ATXN2; (-) strand; PAM type: YTN; PAM sequence: CTC
tttggtcactgtaacctccg

SEQ ID NO: 84624 - DNA, 20 bp, Artificial Sequence
  Description of Artificial Sequence: Synthetic oligonucleotide
  Target: ATXN2; (-) strand; PAM type: YTN; PAM sequence: CTG
gagtgcagtggtgccctctt

SEQ ID NO: 84625 - DNA, 20 bp, Artificial Sequence
  Description of Artificial Sequence: Synthetic oligonucleotide
  Target: ATXN2; (-) strand; PAM type: YTN; PAM sequence: TTG
cccaggctggagtgcagtgg

SEQ ID NO: 84626 - DNA, 20 bp, Artificial Sequence
  Description of Artificial Sequence: Synthetic oligonucleotide
  Target: ATXN2; (-) strand; PAM type: YTN; PAM sequence: TTG
ttgcccaggctggagtgcag

SEQ ID NO: 84627 - DNA, 20 bp, Artificial Sequence
  Description of Artificial Sequence: Synthetic oligonucleotide
  Target: ATXN2; (-) strand; PAM type: YTN; PAM sequence: CTT
gttgcccaggctggagtgca

SEQ ID NO: 84628 - DNA, 20 bp, Artificial Sequence
  Description of Artificial Sequence: Synthetic oligonucleotide
  Target: ATXN2; (-) strand; PAM type: YTN; PAM sequence: CTC
ttgttgcccaggctggagtg

SEQ ID NO: 84629 - DNA, 20 bp, Artificial Sequence
  Description of Artificial Sequence: Synthetic oligonucleotide
  Target: ATXN2; (-) strand; PAM type: YTN; PAM sequence: TTC
gctcttgttgcccaggctgg

SEQ ID NO: 84630 - DNA, 20 bp, Artificial Sequence
  Description of Artificial Sequence: Synthetic oligonucleotide
  Target: ATXN2; (-) strand; PAM type: YTN; PAM sequence: TTT
cgctcttgttgcccaggctg

SEQ ID NO: 84631 - DNA, 20 bp, Artificial Sequence
  Description of Artificial Sequence: Synthetic oligonucleotide
  Target: ATXN2; (-) strand; PAM type: YTN; PAM sequence: TTA
gataaagtttcgctcttgtt

SEQ ID NO: 84632 - DNA, 20 bp, Artificial Sequence
  Description of Artificial Sequence: Synthetic oligonucleotide
  Target: ATXN2; (-) strand; PAM type: YTN; PAM sequence: TTT
agataaagtttcgctcttgt

SEQ ID NO: 84633 - DNA, 20 bp, Artificial Sequence
  Description of Artificial Sequence: Synthetic oligonucleotide
  Target: ATXN2; (-) strand; PAM type: YTN; PAM sequence: TTT
tagataaagtttcgctcttg

SEQ ID NO: 84634 - DNA, 20 bp, Artificial Sequence
  Description of Artificial Sequence: Synthetic oligonucleotide
  Target: ATXN2; (-) strand; PAM type: YTN; PAM sequence: TTT
ttagataaagtttcgctctt

SEQ ID NO: 84635 - DNA, 20 bp, Artificial Sequence
  Description of Artificial Sequence: Synthetic oligonucleotide
  Target: ATXN2; (-) strand; PAM type: YTN; PAM sequence: TTT
tttagataaagtttcgctct

SEQ ID NO: 84636 - DNA, 20 bp, Artificial Sequence
  Description of Artificial Sequence: Synthetic oligonucleotide
  Target: ATXN2; (-) strand; PAM type: YTN; PAM sequence: TTT
ttttagataaagtttcgctc

SEQ ID NO: 84637 - DNA, 20 bp, Artificial Sequence
  Description of Artificial Sequence: Synthetic oligonucleotide
  Target: ATXN2; (-) strand; PAM type: YTN; PAM sequence: TTT
tttttagataaagtttcgct

SEQ ID NO: 84638 - DNA, 20 bp, Artificial Sequence
  Description of Artificial Sequence: Synthetic oligonucleotide
  Target: ATXN2; (-) strand; PAM type: YTN; PAM sequence: TTA
ttttttttagataaagtttc

SEQ ID NO: 84639 - DNA, 20 bp, Artificial Sequence
  Description of Artificial Sequence: Synthetic oligonucleotide
  Target: ATXN2; (-) strand; PAM type: YTN; PAM sequence: TTT
attttttttagataaagttt

SEQ ID NO: 84640 - DNA, 20 bp, Artificial Sequence
  Description of Artificial Sequence: Synthetic oligonucleotide
  Target: ATXN2; (-) strand; PAM type: YTN; PAM sequence: TTT
tattttttttagataaagtt

SEQ ID NO: 84641 - DNA, 20 bp, Artificial Sequence
  Description of Artificial Sequence: Synthetic oligonucleotide
  Target: ATXN2; (-) strand; PAM type: YTN; PAM sequence: TTT
ttattttttttagataaagt

SEQ ID NO: 84642 - DNA, 20 bp, Artificial Sequence
  Description of Artificial Sequence: Synthetic oligonucleotide
  Target: ATXN2; (-) strand; PAM type: YTN; PAM sequence: TTA
tttttattttttttagataa

SEQ ID NO: 84643 - DNA, 20 bp, Artificial Sequence
  Description of Artificial Sequence: Synthetic oligonucleotide
  Target: ATXN2; (-) strand; PAM type: YTN; PAM sequence: TTT
atttttattttttttagata

SEQ ID NO: 84644 - DNA, 20 bp, Artificial Sequence
  Description of Artificial Sequence: Synthetic oligonucleotide
  Target: ATXN2; (-) strand; PAM type: YTN; PAM sequence: TTT
tatttttattttttttagat

SEQ ID NO: 84645 - DNA, 20 bp, Artificial Sequence
  Description of Artificial Sequence: Synthetic oligonucleotide
  Target: ATXN2; (-) strand; PAM type: YTN; PAM sequence: TTT
ttatttttattttttttaga

SEQ ID NO: 84646 - DNA, 20 bp, Artificial Sequence
  Description of Artificial Sequence: Synthetic oligonucleotide
  Target: ATXN2; (-) strand; PAM type: YTN; PAM sequence: TTT
tttatttttattttttttag

SEQ ID NO: 84647 - DNA, 20 bp, Artificial Sequence
  Description of Artificial Sequence: Synthetic oligonucleotide
  Target: ATXN2; (-) strand; PAM type: YTN; PAM sequence: TTT
ttttatttttatttttttta

SEQ ID NO: 84648 - DNA, 20 bp, Artificial Sequence
  Description of Artificial Sequence: Synthetic oligonucleotide
  Target: ATXN2; (-) strand; PAM type: YTN; PAM sequence: TTG
tatttttttatttttatttt

SEQ ID NO: 84649 - DNA, 20 bp, Artificial Sequence
  Description of Artificial Sequence: Synthetic oligonucleotide
  Target: ATXN2; (-) strand; PAM type: YTN; PAM sequence: TTC
caatcagagaaaagtgattg

SEQ ID NO: 84650 - DNA, 20 bp, Artificial Sequence
  Description of Artificial Sequence: Synthetic oligonucleotide
  Target: ATXN2; (-) strand; PAM type: YTN; PAM sequence: TTG
attccaatcagagaaaagtg

SEQ ID NO: 84651 - DNA, 20 bp, Artificial Sequence
  Description of Artificial Sequence: Synthetic oligonucleotide
  Target: ATXN2; (-) strand; PAM type: YTN; PAM sequence: CTT
gattccaatcagagaaaagt

SEQ ID NO: 84652 - DNA, 20 bp, Artificial Sequence
  Description of Artificial Sequence: Synthetic oligonucleotide
  Target: ATXN2; (-) strand; PAM type: YTN; PAM sequence: CTG
ggaccttgattccaatcaga

SEQ ID NO: 84653 - DNA, 20 bp, Artificial Sequence
  Description of Artificial Sequence: Synthetic oligonucleotide
  Target: ATXN2; (-) strand; PAM type: YTN; PAM sequence: TTC
tgggaccttgattccaatca

SEQ ID NO: 84654 - DNA, 20 bp, Artificial Sequence
  Description of Artificial Sequence: Synthetic oligonucleotide
  Target: ATXN2; (-) strand; PAM type: YTN; PAM sequence: TTG
tattctgggaccttgattcc

SEQ ID NO: 84655 - DNA, 20 bp, Artificial Sequence
  Description of Artificial Sequence: Synthetic oligonucleotide
  Target: ATXN2; (-) strand; PAM type: YTN; PAM sequence: TTA
agattgtattctgggacctt

SEQ ID NO: 84656 - DNA, 20 bp, Artificial Sequence
  Description of Artificial Sequence: Synthetic oligonucleotide
  Target: ATXN2; (-) strand; PAM type: YTN; PAM sequence: CTT
aagattgtattctgggacct

SEQ ID NO: 84657 - DNA, 20 bp, Artificial Sequence
  Description of Artificial Sequence: Synthetic oligonucleotide
  Target: ATXN2; (-) strand; PAM type: YTN; PAM sequence: TTC
ttaagattgtattctgggac

SEQ ID NO: 84658 - DNA, 20 bp, Artificial Sequence
  Description of Artificial Sequence: Synthetic oligonucleotide
  Target: ATXN2; (-) strand; PAM type: YTN; PAM sequence: TTG
ttcttaagattgtattctgg

SEQ ID NO: 84659 - DNA, 20 bp, Artificial Sequence
  Description of Artificial Sequence: Synthetic oligonucleotide
  Target: ATXN2; (-) strand; PAM type: YTN; PAM sequence: CTT
gttcttaagattgtattctg

SEQ ID NO: 84660 - DNA, 20 bp, Artificial Sequence
  Description of Artificial Sequence: Synthetic oligonucleotide
  Target: ATXN2; (-) strand; PAM type: YTN; PAM sequence: CTG
gccaaaacttgttcttaaga

SEQ ID NO: 84661 - DNA, 20 bp, Artificial Sequence
  Description of Artificial Sequence: Synthetic oligonucleotide
  Target: ATXN2; (-) strand; PAM type: YTN; PAM sequence: TTA
caggcgtgagccaccacact

SEQ ID NO: 84662 - DNA, 20 bp, Artificial Sequence
  Description of Artificial Sequence: Synthetic oligonucleotide
  Target: ATXN2; (-) strand; PAM type: YTN; PAM sequence: CTG
ggattacaggcgtgagccac

SEQ ID NO: 84663 - DNA, 20 bp, Artificial Sequence
  Description of Artificial Sequence: Synthetic oligonucleotide
  Target: ATXN2; (-) strand; PAM type: YTN; PAM sequence: CTC
ccaaagtgctgggattacag

SEQ ID NO: 84664 - DNA, 20 bp, Artificial Sequence
  Description of Artificial Sequence: Synthetic oligonucleotide
  Target: ATXN2; (-) strand; PAM type: YTN; PAM sequence: CTG
cctcccaaagtgctgggatt

SEQ ID NO: 84665 - DNA, 20 bp, Artificial Sequence
  Description of Artificial Sequence: Synthetic oligonucleotide
  Target: ATXN2; (-) strand; PAM type: YTN; PAM sequence: CTC
aggtgatccaccggccactg

SEQ ID NO: 84666 - DNA, 20 bp, Artificial Sequence
  Description of Artificial Sequence: Synthetic oligonucleotide
  Target: ATXN2; (-) strand; PAM type: YTN; PAM sequence: CTG
acctcaggtgatccaccggc

SEQ ID NO: 84667 - DNA, 20 bp, Artificial Sequence
  Description of Artificial Sequence: Synthetic oligonucleotide
  Target: ATXN2; (-) strand; PAM type: YTN; PAM sequence: CTC
ctgacctcaggtgatccacc

SEQ ID NO: 84668 - DNA, 20 bp, Artificial Sequence
  Description of Artificial Sequence: Synthetic oligonucleotide
  Target: ATXN2; (-) strand; PAM type: YTN; PAM sequence: CTC
gaactcctgacctcaggtga

SEQ ID NO: 84669 - DNA, 20 bp, Artificial Sequence
  Description of Artificial Sequence: Synthetic oligonucleotide
  Target: ATXN2; (-) strand; PAM type: YTN; PAM sequence: CTG
gtctcgaactcctgacctca

SEQ ID NO: 84670 - DNA, 20 bp, Artificial Sequence
  Description of Artificial Sequence: Synthetic oligonucleotide
  Target: ATXN2; (-) strand; PAM type: YTN; PAM sequence: TTG
gccaggctggtctcgaactc

SEQ ID NO: 84671 - DNA, 20 bp, Artificial Sequence
  Description of Artificial Sequence: Synthetic oligonucleotide
  Target: ATXN2; (-) strand; PAM type: YTN; PAM sequence: CTA
aaaattggccaggctggtct

SEQ ID NO: 84672 - DNA, 20 bp, Artificial Sequence
  Description of Artificial Sequence: Synthetic oligonucleotide
  Target: ATXN2; (-) strand; PAM type: YTN; PAM sequence: CTA
ctaaaaattggccaggctgg

SEQ ID NO: 84673 - DNA, 20 bp, Artificial Sequence
  Description of Artificial Sequence: Synthetic oligonucleotide
  Target: ATXN2; (-) strand; PAM type: YTN; PAM sequence: CTC
tactaaaaattggccaggct

SEQ ID NO: 84674 - DNA, 20 bp, Artificial Sequence
  Description of Artificial Sequence: Synthetic oligonucleotide
  Target: ATXN2; (-) strand; PAM type: YTN; PAM sequence: TTA
gtagagatgggctctactaa

SEQ ID NO: 84675 - DNA, 20 bp, Artificial Sequence
  Description of Artificial Sequence: Synthetic oligonucleotide
  Target: ATXN2; (-) strand; PAM type: YTN; PAM sequence: TTT
agtagagatgggctctacta

SEQ ID NO: 84676 - DNA, 20 bp, Artificial Sequence
  Description of Artificial Sequence: Synthetic oligonucleotide
  Target: ATXN2; (-) strand; PAM type: YTN; PAM sequence: TTT
tagtagagatgggctctact

SEQ ID NO: 84677 - DNA, 20 bp, Artificial Sequence
  Description of Artificial Sequence: Synthetic oligonucleotide
  Target: ATXN2; (-) strand; PAM type: YTN; PAM sequence: TTT
ttagtagagatgggctctac

SEQ ID NO: 84678 - DNA, 20 bp, Artificial Sequence
  Description of Artificial Sequence: Synthetic oligonucleotide
  Target: ATXN2; (-) strand; PAM type: YTN; PAM sequence: TTG
tatttttagtagagatgggc

SEQ ID NO: 84679 - DNA, 20 bp, Artificial Sequence
  Description of Artificial Sequence: Synthetic oligonucleotide
  Target: ATXN2; (-) strand; PAM type: YTN; PAM sequence: TTT
gtatttttagtagagatggg

SEQ ID NO: 84680 - DNA, 20 bp, Artificial Sequence
  Description of Artificial Sequence: Synthetic oligonucleotide
  Target: ATXN2; (-) strand; PAM type: YTN; PAM sequence: TTT
tgtatttttagtagagatgg

SEQ ID NO: 84681 - DNA, 20 bp, Artificial Sequence
  Description of Artificial Sequence: Synthetic oligonucleotide
  Target: ATXN2; (-) strand; PAM type: YTN; PAM sequence: TTT
ttgtatttttagtagagatg

SEQ ID NO: 84682 - DNA, 20 bp, Artificial Sequence
  Description of Artificial Sequence: Synthetic oligonucleotide
  Target: ATXN2; (-) strand; PAM type: YTN; PAM sequence: CTA
atttttgtatttttagtaga

SEQ ID NO: 84683 - DNA, 20 bp, Artificial Sequence
  Description of Artificial Sequence: Synthetic oligonucleotide
  Target: ATXN2; (-) strand; PAM type: YTN; PAM sequence: CTA
caggtgcgcatcaccacacc

SEQ ID NO: 84684 - DNA, 20 bp, Artificial Sequence
  Description of Artificial Sequence: Synthetic oligonucleotide
  Target: ATXN2; (-) strand; PAM type: YTN; PAM sequence: CTG
ggactacaggtgcgcatcac

SEQ ID NO: 84685 - DNA, 20 bp, Artificial Sequence
  Description of Artificial Sequence: Synthetic oligonucleotide
  Target: ATXN2; (-) strand; PAM type: YTN; PAM sequence: CTC
ccaagtagctgggactacag

SEQ ID NO: 84686 - DNA, 20 bp, Artificial Sequence
  Description of Artificial Sequence: Synthetic oligonucleotide
  Target: ATXN2; (-) strand; PAM type: YTN; PAM sequence: CTC
agcctcccaagtagctggga

SEQ ID NO: 84687 - DNA, 20 bp, Artificial Sequence
  Description of Artificial Sequence: Synthetic oligonucleotide
  Target: ATXN2; (-) strand; PAM type: YTN; PAM sequence: CTG
cctcagcctcccaagtagct

SEQ ID NO: 84688 - DNA, 20 bp, Artificial Sequence
  Description of Artificial Sequence: Synthetic oligonucleotide
  Target: ATXN2; (-) strand; PAM type: YTN; PAM sequence: CTC
ctgcctcagcctcccaagta

SEQ ID NO: 84689 - DNA, 20 bp, Artificial Sequence
  Description of Artificial Sequence: Synthetic oligonucleotide
  Target: ATXN2; (-) strand; PAM type: YTN; PAM sequence: TTC
tcctgcctcagcctcccaag

SEQ ID NO: 84690 - DNA, 20 bp, Artificial Sequence
  Description of Artificial Sequence: Synthetic oligonucleotide
  Target: ATXN2; (-) strand; PAM type: YTN; PAM sequence: TTC
acaccattctcctgcctcag

SEQ ID NO: 84691 - DNA, 20 bp, Artificial Sequence
  Description of Artificial Sequence: Synthetic oligonucleotide
  Target: ATXN2; (-) strand; PAM type: YTN; PAM sequence: CTC
ccaggttcacaccattctcc

SEQ ID NO: 84692 - DNA, 20 bp, Artificial Sequence
  Description of Artificial Sequence: Synthetic oligonucleotide
  Target: ATXN2; (-) strand; PAM type: YTN; PAM sequence: CTG
caagcaccgcctcccaggtt

SEQ ID NO: 84693 - DNA, 20 bp, Artificial Sequence
  Description of Artificial Sequence: Synthetic oligonucleotide
  Target: ATXN2; (-) strand; PAM type: YTN; PAM sequence: CTC
actgcaagcaccgcctccca

SEQ ID NO: 84694 - DNA, 20 bp, Artificial Sequence
  Description of Artificial Sequence: Synthetic oligonucleotide
  Target: ATXN2; (-) strand; PAM type: YTN; PAM sequence: CTC
cgctcactgcaagcaccgcc

SEQ ID NO: 84695 - DNA, 20 bp, Artificial Sequence
  Description of Artificial Sequence: Synthetic oligonucleotide
  Target: ATXN2; (-) strand; PAM type: YTN; PAM sequence: CTG
gagtgcagtggtgtgatctc

SEQ ID NO: 84696 - DNA, 20 bp, Artificial Sequence
  Description of Artificial Sequence: Synthetic oligonucleotide
  Target: ATXN2; (-) strand; PAM type: YTN; PAM sequence: CTG
tcgcccaggctggagtgcag

SEQ ID NO: 84697 - DNA, 20 bp, Artificial Sequence
  Description of Artificial Sequence: Synthetic oligonucleotide
  Target: ATXN2; (-) strand; PAM type: YTN; PAM sequence: CTC
tgtcgcccaggctggagtgc

SEQ ID NO: 84698 - DNA, 20 bp, Artificial Sequence
  Description of Artificial Sequence: Synthetic oligonucleotide
  Target: ATXN2; (-) strand; PAM type: YTN; PAM sequence: CTC
gctctgtcgcccaggctgga

SEQ ID NO: 84699 - DNA, 20 bp, Artificial Sequence
  Description of Artificial Sequence: Synthetic oligonucleotide
  Target: ATXN2; (-) strand; PAM type: YTN; PAM sequence: TTG
agacggagtctcgctctgtc

SEQ ID NO: 84700 - DNA, 20 bp, Artificial Sequence
  Description of Artificial Sequence: Synthetic oligonucleotide
  Target: ATXN2; (-) strand; PAM type: YTN; PAM sequence: TTT
gagacggagtctcgctctgt

SEQ ID NO: 84701 - DNA, 20 bp, Artificial Sequence
  Description of Artificial Sequence: Synthetic oligonucleotide
  Target: ATXN2; (-) strand; PAM type: YTN; PAM sequence: TTT
tgagacggagtctcgctctg

SEQ ID NO: 84702 - DNA, 20 bp, Artificial Sequence
  Description of Artificial Sequence: Synthetic oligonucleotide
  Target: ATXN2; (-) strand; PAM type: YTN; PAM sequence: TTT
ttgagacggagtctcgctct

SEQ ID NO: 84703 - DNA, 20 bp, Artificial Sequence
  Description of Artificial Sequence: Synthetic oligonucleotide
  Target: ATXN2; (-) strand; PAM type: YTN; PAM sequence: TTT
tttgagacggagtctcgctc

SEQ ID NO: 84704 - DNA, 20 bp, Artificial Sequence
  Description of Artificial Sequence: Synthetic oligonucleotide
  Target: ATXN2; (-) strand; PAM type: YTN; PAM sequence: TTT
ttttgagacggagtctcgct

SEQ ID NO: 84705 - DNA, 20 bp, Artificial Sequence
  Description of Artificial Sequence: Synthetic oligonucleotide
  Target: ATXN2; (-) strand; PAM type: YTN; PAM sequence: TTT
tttttgagacggagtctcgc

SEQ ID NO: 84706 - DNA, 20 bp, Artificial Sequence
  Description of Artificial Sequence: Synthetic oligonucleotide
  Target: ATXN2; (-) strand; PAM type: YTN; PAM sequence: TTT
ttttttgagacggagtctcg

SEQ ID NO: 84707 - DNA, 20 bp, Artificial Sequence
  Description of Artificial Sequence: Synthetic oligonucleotide
  Target: ATXN2; (-) strand; PAM type: YTN; PAM sequence: TTT
tttttttgagacggagtctc

SEQ ID NO: 84708 - DNA, 20 bp, Artificial Sequence
  Description of Artificial Sequence: Synthetic oligonucleotide
  Target: ATXN2; (-) strand; PAM type: YTN; PAM sequence: CTA
ttttttttttgagacggagt

SEQ ID NO: 84709 - DNA, 20 bp, Artificial Sequence
  Description of Artificial Sequence: Synthetic oligonucleotide
  Target: ATXN2; (-) strand; PAM type: YTN; PAM sequence: TTA
ctattttttttttgagacgg

SEQ ID NO: 84710 - DNA, 20 bp, Artificial Sequence
  Description of Artificial Sequence: Synthetic oligonucleotide
  Target: ATXN2; (-) strand; PAM type: YTN; PAM sequence: CTT
actattttttttttgagacg

SEQ ID NO: 84711 - DNA, 20 bp, Artificial Sequence
  Description of Artificial Sequence: Synthetic oligonucleotide
  Target: ATXN2; (-) strand; PAM type: YTN; PAM sequence: CTG
aaacttactatttttttttt

SEQ ID NO: 84712 - DNA, 20 bp, Artificial Sequence
  Description of Artificial Sequence: Synthetic oligonucleotide
  Target: ATXN2; (-) strand; PAM type: YTN; PAM sequence: TTC
catcgacctgaaacttacta

SEQ ID NO: 84713 - DNA, 20 bp, Artificial Sequence
  Description of Artificial Sequence: Synthetic oligonucleotide
  Target: ATXN2; (-) strand; PAM type: YTN; PAM sequence: CTT
ccatcgacctgaaacttact

SEQ ID NO: 84714 - DNA, 20 bp, Artificial Sequence
  Description of Artificial Sequence: Synthetic oligonucleotide
  Target: ATXN2; (-) strand; PAM type: YTN; PAM sequence: TTC
aacttccatcgacctgaaac

SEQ ID NO: 84715 - DNA, 20 bp, Artificial Sequence
  Description of Artificial Sequence: Synthetic oligonucleotide
  Target: ATXN2; (-) strand; PAM type: YTN; PAM sequence: TTA
ttcaacttccatcgacctga

SEQ ID NO: 84716 - DNA, 20 bp, Artificial Sequence
  Description of Artificial Sequence: Synthetic oligonucleotide
  Target: ATXN2; (-) strand; PAM type: YTN; PAM sequence: CTT
attcaacttccatcgacctg

SEQ ID NO: 84717 - DNA, 20 bp, Artificial Sequence
  Description of Artificial Sequence: Synthetic oligonucleotide
  Target: ATXN2; (-) strand; PAM type: YTN; PAM sequence: TTC
ttattcaacttccatcgacc

SEQ ID NO: 84718 - DNA, 20 bp, Artificial Sequence
  Description of Artificial Sequence: Synthetic oligonucleotide
  Target: ATXN2; (-) strand; PAM type: YTN; PAM sequence: CTT
cttattcaacttccatcgac

SEQ ID NO: 84719 - DNA, 20 bp, Artificial Sequence
  Description of Artificial Sequence: Synthetic oligonucleotide
  Target: ATXN2; (-) strand; PAM type: YTN; PAM sequence: CTA
ggccttcttattcaacttcc

SEQ ID NO: 84720 - DNA, 20 bp, Artificial Sequence
  Description of Artificial Sequence: Synthetic oligonucleotide
  Target: ATXN2; (-) strand; PAM type: YTN; PAM sequence: CTG
tatccagcctaggccttctt

SEQ ID NO: 84721 - DNA, 20 bp, Artificial Sequence
  Description of Artificial Sequence: Synthetic oligonucleotide
  Target: ATXN2; (-) strand; PAM type: YTN; PAM sequence: TTA
taggtgtaggccactgtatc

SEQ ID NO: 84722 - DNA, 20 bp, Artificial Sequence
  Description of Artificial Sequence: Synthetic oligonucleotide
  Target: ATXN2; (-) strand; PAM type: YTN; PAM sequence: CTG
ggattataggtgtaggccac

SEQ ID NO: 84723 - DNA, 20 bp, Artificial Sequence
  Description of Artificial Sequence: Synthetic oligonucleotide
  Target: ATXN2; (-) strand; PAM type: YTN; PAM sequence: TTC
caaagtgctgggattatagg

SEQ ID NO: 84724 - DNA, 20 bp, Artificial Sequence
  Description of Artificial Sequence: Synthetic oligonucleotide
  Target: ATXN2; (-) strand; PAM type: YTN; PAM sequence: CTT
ccaaagtgctgggattatag

SEQ ID NO: 84725 - DNA, 20 bp, Artificial Sequence
  Description of Artificial Sequence: Synthetic oligonucleotide
  Target: ATXN2; (-) strand; PAM type: YTN; PAM sequence: TTG
gccttccaaagtgctgggat

SEQ ID NO: 84726 - DNA, 20 bp, Artificial Sequence
  Description of Artificial Sequence: Synthetic oligonucleotide
  Target: ATXN2; (-) strand; PAM type: YTN; PAM sequence: CTT
ggccttccaaagtgctggga

SEQ ID NO: 84727 - DNA, 20 bp, Artificial Sequence
  Description of Artificial Sequence: Synthetic oligonucleotide
  Target: ATXN2; (-) strand; PAM type: YTN; PAM sequence: CTG
ccttggccttccaaagtgct

SEQ ID NO: 84728 - DNA, 20 bp, Artificial Sequence
  Description of Artificial Sequence: Synthetic oligonucleotide
  Target: ATXN2; (-) strand; PAM type: YTN; PAM sequence: CTG
cctgccttggccttccaaag

SEQ ID NO: 84729 - DNA, 20 bp, Artificial Sequence
  Description of Artificial Sequence: Synthetic oligonucleotide
  Target: ATXN2; (-) strand; PAM type: YTN; PAM sequence: TTC
aaaggatctgcctgccttgg

SEQ ID NO: 84730 - DNA, 20 bp, Artificial Sequence
  Description of Artificial Sequence: Synthetic oligonucleotide
  Target: ATXN2; (-) strand; PAM type: YTN; PAM sequence: TTG
gttcaaaggatctgcctgcc

SEQ ID NO: 84731 - DNA, 20 bp, Artificial Sequence
  Description of Artificial Sequence: Synthetic oligonucleotide
  Target: ATXN2; (-) strand; PAM type: YTN; PAM sequence: CTT
ggttcaaaggatctgcctgc

SEQ ID NO: 84732 - DNA, 20 bp, Artificial Sequence
  Description of Artificial Sequence: Synthetic oligonucleotide
  Target: ATXN2; (-) strand; PAM type: YTN; PAM sequence: CTC
cttggttcaaaggatctgcc

SEQ ID NO: 84733 - DNA, 20 bp, Artificial Sequence
  Description of Artificial Sequence: Synthetic oligonucleotide
  Target: ATXN2; (-) strand; PAM type: YTN; PAM sequence: CTA
ctccttggttcaaaggatct

SEQ ID NO: 84734 - DNA, 20 bp, Artificial Sequence
  Description of Artificial Sequence: Synthetic oligonucleotide
  Target: ATXN2; (-) strand; PAM type: YTN; PAM sequence: CTC
ctactccttggttcaaagga

SEQ ID NO: 84735 - DNA, 20 bp, Artificial Sequence
  Description of Artificial Sequence: Synthetic oligonucleotide
  Target: ATXN2; (-) strand; PAM type: YTN; PAM sequence: CTG
gtctcctactccttggttca

SEQ ID NO: 84736 - DNA, 20 bp, Artificial Sequence
  Description of Artificial Sequence: Synthetic oligonucleotide
  Target: ATXN2; (-) strand; PAM type: YTN; PAM sequence: TTG
cccaggctggtctcctactc

SEQ ID NO: 84737 - DNA, 20 bp, Artificial Sequence
  Description of Artificial Sequence: Synthetic oligonucleotide
  Target: ATXN2; (-) strand; PAM type: YTN; PAM sequence: CTA
tgttgcccaggctggtctcc

SEQ ID NO: 84738 - DNA, 20 bp, Artificial Sequence
  Description of Artificial Sequence: Synthetic oligonucleotide
  Target: ATXN2; (-) strand; PAM type: YTN; PAM sequence: CTC
actatgttgcccaggctggt

SEQ ID NO: 84739 - DNA, 20 bp, Artificial Sequence
  Description of Artificial Sequence: Synthetic oligonucleotide
  Target: ATXN2; (-) strand; PAM type: YTN; PAM sequence: TTA
tggagaggagggtctcacta

SEQ ID NO: 84740 - DNA, 20 bp, Artificial Sequence
  Description of Artificial Sequence: Synthetic oligonucleotide
  Target: ATXN2; (-) strand; PAM type: YTN; PAM sequence: TTT
atggagaggagggtctcact

SEQ ID NO: 84741 - DNA, 20 bp, Artificial Sequence
  Description of Artificial Sequence: Synthetic oligonucleotide
  Target: ATXN2; (-) strand; PAM type: YTN; PAM sequence: TTT
tatggagaggagggtctcac

SEQ ID NO: 84742 - DNA, 20 bp, Artificial Sequence
  Description of Artificial Sequence: Synthetic oligonucleotide
  Target: ATXN2; (-) strand; PAM type: YTN; PAM sequence: TTT
ttatggagaggagggtctca

SEQ ID NO: 84743 - DNA, 20 bp, Artificial Sequence
  Description of Artificial Sequence: Synthetic oligonucleotide
  Target: ATXN2; (-) strand; PAM type: YTN; PAM sequence: TTT
tttatggagaggagggtctc

SEQ ID NO: 84744 - DNA, 20 bp, Artificial Sequence
  Description of Artificial Sequence: Synthetic oligonucleotide
  Target: ATXN2; (-) strand; PAM type: YTN; PAM sequence: TTG
aaaaattttttatggagagg

SEQ ID NO: 84745 - DNA, 20 bp, Artificial Sequence
  Description of Artificial Sequence: Synthetic oligonucleotide
  Target: ATXN2; (-) strand; PAM type: YTN; PAM sequence: TTT
gaaaaattttttatggagag

SEQ ID NO: 84746 - DNA, 20 bp, Artificial Sequence
  Description of Artificial Sequence: Synthetic oligonucleotide
  Target: ATXN2; (-) strand; PAM type: YTN; PAM sequence: TTT
tgaaaaattttttatggaga

SEQ ID NO: 84747 - DNA, 20 bp, Artificial Sequence
  Description of Artificial Sequence: Synthetic oligonucleotide
  Target: ATXN2; (-) strand; PAM type: YTN; PAM sequence: TTA
attttgaaaaattttttatg

SEQ ID NO: 84748 - DNA, 20 bp, Artificial Sequence
  Description of Artificial Sequence: Synthetic oligonucleotide
  Target: ATXN2; (-) strand; PAM type: YTN; PAM sequence: TTT
aattttgaaaaattttttat

SEQ ID NO: 84749 - DNA, 20 bp, Artificial Sequence
  Description of Artificial Sequence: Synthetic oligonucleotide
  Target: ATXN2; (-) strand; PAM type: YTN; PAM sequence: TTT
taattttgaaaaatttttta

SEQ ID NO: 84750 - DNA, 20 bp, Artificial Sequence
  Description of Artificial Sequence: Synthetic oligonucleotide
  Target: ATXN2; (-) strand; PAM type: YTN; PAM sequence: TTT
ttaattttgaaaaatttttt

SEQ ID NO: 84751 - DNA, 20 bp, Artificial Sequence
  Description of Artificial Sequence: Synthetic oligonucleotide
  Target: ATXN2; (-) strand; PAM type: YTN; PAM sequence: TTT
tttaattttgaaaaattttt

SEQ ID NO: 84752 - DNA, 20 bp, Artificial Sequence
  Description of Artificial Sequence: Synthetic oligonucleotide
  Target: ATXN2; (-) strand; PAM type: YTN; PAM sequence: TTT
ttttaattttgaaaaatttt

SEQ ID NO: 84753 - DNA, 20 bp, Artificial Sequence
  Description of Artificial Sequence: Synthetic oligonucleotide
  Target: ATXN2; (-) strand; PAM type: YTN; PAM sequence: TTT
tttttaattttgaaaaattt

SEQ ID NO: 84754 - DNA, 20 bp, Artificial Sequence
  Description of Artificial Sequence: Synthetic oligonucleotide
  Target: ATXN2; (-) strand; PAM type: YTN; PAM sequence: TTT
ttttttaattttgaaaaatt

SEQ ID NO: 84755 - DNA, 20 bp, Artificial Sequence
  Description of Artificial Sequence: Synthetic oligonucleotide
  Target: ATXN2; (-) strand; PAM type: YTN; PAM sequence: CTT
tttttttaattttgaaaaat

SEQ ID NO: 84756 - DNA, 20 bp, Artificial Sequence
  Description of Artificial Sequence: Synthetic oligonucleotide
  Target: ATXN2; (-) strand; PAM type: YTN; PAM sequence: TTC
tttttttttaattttgaaaa

SEQ ID NO: 84757 - DNA, 20 bp, Artificial Sequence
  Description of Artificial Sequence: Synthetic oligonucleotide
  Target: ATXN2; (-) strand; PAM type: YTN; PAM sequence: CTT
ctttttttttaattttgaaa

SEQ ID NO: 84758 - DNA, 20 bp, Artificial Sequence
  Description of Artificial Sequence: Synthetic oligonucleotide
  Target: ATXN2; (-) strand; PAM type: YTN; PAM sequence: TTC
aggccttctttttttttaat

SEQ ID NO: 84759 - DNA, 20 bp, Artificial Sequence
  Description of Artificial Sequence: Synthetic oligonucleotide
  Target: ATXN2; (-) strand; PAM type: YTN; PAM sequence: CTT
caggccttctttttttttaa

SEQ ID NO: 84760 - DNA, 20 bp, Artificial Sequence
  Description of Artificial Sequence: Synthetic oligonucleotide
  Target: ATXN2; (-) strand; PAM type: YTN; PAM sequence: CTA
tgtcagcttcaggccttctt

SEQ ID NO: 84761 - DNA, 20 bp, Artificial Sequence
  Description of Artificial Sequence: Synthetic oligonucleotide
  Target: ATXN2; (-) strand; PAM type: YTN; PAM sequence: CTC
agctatgtcagcttcaggcc

SEQ ID NO: 84762 - DNA, 20 bp, Artificial Sequence
  Description of Artificial Sequence: Synthetic oligonucleotide
  Target: ATXN2; (-) strand; PAM type: YTN; PAM sequence: TTC
tcagctatgtcagcttcagg

SEQ ID NO: 84763 - DNA, 20 bp, Artificial Sequence
  Description of Artificial Sequence: Synthetic oligonucleotide
  Target: ATXN2; (-) strand; PAM type: YTN; PAM sequence: TTT
ctcagctatgtcagcttcag

SEQ ID NO: 84764 - DNA, 20 bp, Artificial Sequence
  Description of Artificial Sequence: Synthetic oligonucleotide
  Target: ATXN2; (-) strand; PAM type: YTN; PAM sequence: CTT
tctcagctatgtcagcttca

SEQ ID NO: 84765 - DNA, 20 bp, Artificial Sequence
  Description of Artificial Sequence: Synthetic oligonucleotide
  Target: ATXN2; (-) strand; PAM type: YTN; PAM sequence: TTA
aaacaaactttctcagctat

SEQ ID NO: 84766 - DNA, 20 bp, Artificial Sequence
  Description of Artificial Sequence: Synthetic oligonucleotide
  Target: ATXN2; (-) strand; PAM type: YTN; PAM sequence: TTC
aatggtagtgagttaaaaca

SEQ ID NO: 84767 - DNA, 20 bp, Artificial Sequence
  Description of Artificial Sequence: Synthetic oligonucleotide
  Target: ATXN2; (-) strand; PAM type: YTN; PAM sequence: TTA
ttcaatggtagtgagttaaa

SEQ ID NO: 84768 - DNA, 20 bp, Artificial Sequence
  Description of Artificial Sequence: Synthetic oligonucleotide
  Target: ATXN2; (-) strand; PAM type: YTN; PAM sequence: TTT
attcaatggtagtgagttaa

SEQ ID NO: 84769 - DNA, 20 bp, Artificial Sequence
  Description of Artificial Sequence: Synthetic oligonucleotide
  Target: ATXN2; (-) strand; PAM type: YTN; PAM sequence: TTT
tattcaatggtagtgagtta

SEQ ID NO: 84770 - DNA, 20 bp, Artificial Sequence
  Description of Artificial Sequence: Synthetic oligonucleotide
  Target: ATXN2; (-) strand; PAM type: YTN; PAM sequence: TTT
ttattcaatggtagtgagtt

SEQ ID NO: 84771 - DNA, 20 bp, Artificial Sequence
  Description of Artificial Sequence: Synthetic oligonucleotide
  Target: ATXN2; (-) strand; PAM type: YTN; PAM sequence: TTA
agtttttattcaatggtagt

SEQ ID NO: 84772 - DNA, 20 bp, Artificial Sequence
  Description of Artificial Sequence: Synthetic oligonucleotide
  Target: ATXN2; (-) strand; PAM type: YTN; PAM sequence: CTA
ttaagtttttattcaatggt

SEQ ID NO: 84773 - DNA, 20 bp, Artificial Sequence
  Description of Artificial Sequence: Synthetic oligonucleotide
  Target: ATXN2; (-) strand; PAM type: YTN; PAM sequence: TTG
ataaaactattaagttttta

SEQ ID NO: 84774 - DNA, 20 bp, Artificial Sequence
  Description of Artificial Sequence: Synthetic oligonucleotide
  Target: ATXN2; (-) strand; PAM type: YTN; PAM sequence: CTT
gataaaactattaagttttt

SEQ ID NO: 84775 - DNA, 20 bp, Artificial Sequence
  Description of Artificial Sequence: Synthetic oligonucleotide
  Target: ATXN2; (-) strand; PAM type: YTN; PAM sequence: TTA
tatcttgataaaactattaa

SEQ ID NO: 84776 - DNA, 20 bp, Artificial Sequence
  Description of Artificial Sequence: Synthetic oligonucleotide
  Target: ATXN2; (-) strand; PAM type: YTN; PAM sequence: TTC
atagtatgtaaattatatct

SEQ ID NO: 84777 - DNA, 20 bp, Artificial Sequence
  Description of Artificial Sequence: Synthetic oligonucleotide
  Target: ATXN2; (-) strand; PAM type: YTN; PAM sequence: TTT
catagtatgtaaattatatc

SEQ ID NO: 84778 - DNA, 20 bp, Artificial Sequence
  Description of Artificial Sequence: Synthetic oligonucleotide
  Target: ATXN2; (-) strand; PAM type: YTN; PAM sequence: TTG
tacacaaaataggtgaattt

SEQ ID NO: 84779 - DNA, 20 bp, Artificial Sequence
  Description of Artificial Sequence: Synthetic oligonucleotide
  Target: ATXN2; (-) strand; PAM type: YTN; PAM sequence: TTA
aattgtacacaaaataggtg

SEQ ID NO: 84780 - DNA, 20 bp, Artificial Sequence
  Description of Artificial Sequence: Synthetic oligonucleotide
  Target: ATXN2; (-) strand; PAM type: YTN; PAM sequence: CTG
agaatcattaaattgtacac

SEQ ID NO: 84781 - DNA, 20 bp, Artificial Sequence
  Description of Artificial Sequence: Synthetic oligonucleotide
  Target: ATXN2; (-) strand; PAM type: YTN; PAM sequence: TTA
ctgagaatcattaaattgta

SEQ ID NO: 84782 - DNA, 20 bp, Artificial Sequence
  Description of Artificial Sequence: Synthetic oligonucleotide
  Target: ATXN2; (-) strand; PAM type: YTN; PAM sequence: TTT
actgagaatcattaaattgt

SEQ ID NO: 84783 - DNA, 20 bp, Artificial Sequence
  Description of Artificial Sequence: Synthetic oligonucleotide
  Target: ATXN2; (-) strand; PAM type: YTN; PAM sequence: CTG
tgtaaatttactgagaatca

SEQ ID NO: 84784 - DNA, 20 bp, Artificial Sequence
  Description of Artificial Sequence: Synthetic oligonucleotide
  Target: ATXN2; (-) strand; PAM type: YTN; PAM sequence: TTA
ctgtgtaaatttactgagaa

SEQ ID NO: 84785 - DNA, 20 bp, Artificial Sequence
  Description of Artificial Sequence: Synthetic oligonucleotide
  Target: ATXN2; (-) strand; PAM type: YTN; PAM sequence: TTT
actgtgtaaatttactgaga

SEQ ID NO: 84786 - DNA, 20 bp, Artificial Sequence
  Description of Artificial Sequence: Synthetic oligonucleotide
  Target: ATXN2; (-) strand; PAM type: YTN; PAM sequence: TTG
tgcaaatttactgtgtaaat

SEQ ID NO: 84787 - DNA, 20 bp, Artificial Sequence
  Description of Artificial Sequence: Synthetic oligonucleotide
  Target: ATXN2; (-) strand; PAM type: YTN; PAM sequence: TTA
gtggcaatggttgtgcaaat

SEQ ID NO: 84788 - DNA, 20 bp, Artificial Sequence
  Description of Artificial Sequence: Synthetic oligonucleotide
  Target: ATXN2; (-) strand; PAM type: YTN; PAM sequence: CTG
aaattagtggcaatggttgt

SEQ ID NO: 84789 - DNA, 20 bp, Artificial Sequence
  Description of Artificial Sequence: Synthetic oligonucleotide
  Target: ATXN2; (-) strand; PAM type: YTN; PAM sequence: TTC
tgaaattagtggcaatggtt

SEQ ID NO: 84790 - DNA, 20 bp, Artificial Sequence
  Description of Artificial Sequence: Synthetic oligonucleotide
  Target: ATXN2; (-) strand; PAM type: YTN; PAM sequence: TTG
gggtaatggaaatgttctga

SEQ ID NO: 84791 - DNA, 20 bp, Artificial Sequence
  Description of Artificial Sequence: Synthetic oligonucleotide
  Target: ATXN2; (-) strand; PAM type: YTN; PAM sequence: TTT
ggggtaatggaaatgttctg

SEQ ID NO: 84792 - DNA, 20 bp, Artificial Sequence
  Description of Artificial Sequence: Synthetic oligonucleotide
  Target: ATXN2; (-) strand; PAM type: YTN; PAM sequence: TTT
tggggtaatggaaatgttct

SEQ ID NO: 84793 - DNA, 20 bp, Artificial Sequence
  Description of Artificial Sequence: Synthetic oligonucleotide
  Target: ATXN2; (-) strand; PAM type: YTN; PAM sequence: TTT
ttggggtaatggaaatgttc

SEQ ID NO: 84794 - DNA, 20 bp, Artificial Sequence
  Description of Artificial Sequence: Synthetic oligonucleotide
  Target: ATXN2; (-) strand; PAM type: YTN; PAM sequence: CTT
tttggggtaatggaaatgtt

SEQ ID NO: 84795 - DNA, 20 bp, Artificial Sequence
  Description of Artificial Sequence: Synthetic oligonucleotide
  Target: ATXN2; (-) strand; PAM type: YTN; PAM sequence: CTG
cccaccatcgtgaaggatct

SEQ ID NO: 84796 - DNA, 20 bp, Artificial Sequence
  Description of Artificial Sequence: Synthetic oligonucleotide
  Target: ATXN2; (-) strand; PAM type: YTN; PAM sequence: CTA
aggatgggaaccaaactgcc

SEQ ID NO: 84797 - DNA, 20 bp, Artificial Sequence
  Description of Artificial Sequence: Synthetic oligonucleotide
  Target: ATXN2; (-) strand; PAM type: YTN; PAM sequence: CTG
gggctaaggatgggaaccaa

SEQ ID NO: 84798 - DNA, 20 bp, Artificial Sequence
  Description of Artificial Sequence: Synthetic oligonucleotide
  Target: ATXN2; (-) strand; PAM type: YTN; PAM sequence: TTG
cctggggctaaggatgggaa

SEQ ID NO: 84799 - DNA, 20 bp, Artificial Sequence
  Description of Artificial Sequence: Synthetic oligonucleotide
  Target: ATXN2; (-) strand; PAM type: YTN; PAM sequence: CTG
gacaaatccatagagagaaa

SEQ ID NO: 84800 - DNA, 20 bp, Artificial Sequence
  Description of Artificial Sequence: Synthetic oligonucleotide
  Target: ATXN2; (-) strand; PAM type: YTN; PAM sequence: TTA
tgtgaaaaatctggacaaat

SEQ ID NO: 84801 - DNA, 20 bp, Artificial Sequence
  Description of Artificial Sequence: Synthetic oligonucleotide
  Target: ATXN2; (-) strand; PAM type: YTN; PAM sequence: CTT
atgtgaaaaatctggacaaa

SEQ ID NO: 84802 - DNA, 20 bp, Artificial Sequence
  Description of Artificial Sequence: Synthetic oligonucleotide
  Target: ATXN2; (-) strand; PAM type: YTN; PAM sequence: CTA
cttatgtgaaaaatctggac

SEQ ID NO: 84803 - DNA, 20 bp, Artificial Sequence
  Description of Artificial Sequence: Synthetic oligonucleotide
  Target: ATXN2; (-) strand; PAM type: YTN; PAM sequence: TTC
tacttatgtgaaaaatctgg

SEQ ID NO: 84804 - DNA, 20 bp, Artificial Sequence
  Description of Artificial Sequence: Synthetic oligonucleotide
  Target: ATXN2; (-) strand; PAM type: YTN; PAM sequence: CTG
taagattctacttatgtgaa

SEQ ID NO: 84805 - DNA, 20 bp, Artificial Sequence
  Description of Artificial Sequence: Synthetic oligonucleotide
  Target: ATXN2; (-) strand; PAM type: YTN; PAM sequence: CTG
catgctgtaagattctactt

SEQ ID NO: 84806 - DNA, 20 bp, Artificial Sequence
  Description of Artificial Sequence: Synthetic oligonucleotide
  Target: ATXN2; (-) strand; PAM type: YTN; PAM sequence: TTA
tgacaaatgaaagaaggcag

SEQ ID NO: 84807 - DNA, 20 bp, Artificial Sequence
  Description of Artificial Sequence: Synthetic oligonucleotide
  Target: ATXN2; (-) strand; PAM type: YTN; PAM sequence: CTC
aaaaacattatgacaaatga

SEQ ID NO: 84808 - DNA, 20 bp, Artificial Sequence
  Description of Artificial Sequence: Synthetic oligonucleotide
  Target: ATXN2; (-) strand; PAM type: YTN; PAM sequence: TTA
gataaacctcaaaaacatta

SEQ ID NO: 84809 - DNA, 20 bp, Artificial Sequence
  Description of Artificial Sequence: Synthetic oligonucleotide
  Target: ATXN2; (-) strand; PAM type: YTN; PAM sequence: CTT
agataaacctcaaaaacatt

SEQ ID NO: 84810 - DNA, 20 bp, Artificial Sequence
  Description of Artificial Sequence: Synthetic oligonucleotide
  Target: ATXN2; (-) strand; PAM type: YTN; PAM sequence: CTA
catgccacaaccttagataa

SEQ ID NO: 84811 - DNA, 20 bp, Artificial Sequence
  Description of Artificial Sequence: Synthetic oligonucleotide
  Target: ATXN2; (-) strand; PAM type: YTN; PAM sequence: CTG
ctacatgccacaaccttaga

SEQ ID NO: 84812 - DNA, 20 bp, Artificial Sequence
  Description of Artificial Sequence: Synthetic oligonucleotide
  Target: ATXN2; (-) strand; PAM type: YTN; PAM sequence: TTG
gaaagtagacacaaaatgtg

SEQ ID NO: 84813 - DNA, 20 bp, Artificial Sequence
  Description of Artificial Sequence: Synthetic oligonucleotide
  Target: ATXN2; (-) strand; PAM type: YTN; PAM sequence: CTA
aacatccacaattggaaagt

SEQ ID NO: 84814 - DNA, 20 bp, Artificial Sequence
  Description of Artificial Sequence: Synthetic oligonucleotide
  Target: ATXN2; (-) strand; PAM type: YTN; PAM sequence: TTG
acacaatctaaacatccaca

SEQ ID NO: 84815 - DNA, 20 bp, Artificial Sequence
  Description of Artificial Sequence: Synthetic oligonucleotide
  Target: ATXN2; (-) strand; PAM type: YTN; PAM sequence: CTC
aaaaagttgacacaatctaa

SEQ ID NO: 84816 - DNA, 20 bp, Artificial Sequence
  Description of Artificial Sequence: Synthetic oligonucleotide
  Target: ATXN2; (-) strand; PAM type: YTN; PAM sequence: TTC
ataatactcaaaaagttgac

SEQ ID NO: 84817 - DNA, 20 bp, Artificial Sequence
  Description of Artificial Sequence: Synthetic oligonucleotide
  Target: ATXN2; (-) strand; PAM type: YTN; PAM sequence: TTT
cataatactcaaaaagttga

SEQ ID NO: 84818 - DNA, 20 bp, Artificial Sequence
  Description of Artificial Sequence: Synthetic oligonucleotide
  Target: ATXN2; (-) strand; PAM type: YTN; PAM sequence: TTT
tcataatactcaaaaagttg

SEQ ID NO: 84819 - DNA, 20 bp, Artificial Sequence
  Description of Artificial Sequence: Synthetic oligonucleotide
  Target: ATXN2; (-) strand; PAM type: YTN; PAM sequence: CTC
agccccagcagcattttcat

SEQ ID NO: 84820 - DNA, 20 bp, Artificial Sequence
  Description of Artificial Sequence: Synthetic oligonucleotide
  Target: ATXN2; (-) strand; PAM type: YTN; PAM sequence: TTA
caggagtgagccaccaatct

SEQ ID NO: 84821 - DNA, 20 bp, Artificial Sequence
  Description of Artificial Sequence: Synthetic oligonucleotide
  Target: ATXN2; (-) strand; PAM type: YTN; PAM sequence: TTG
ggattacaggagtgagccac

SEQ ID NO: 84822 - DNA, 20 bp, Artificial Sequence
  Description of Artificial Sequence: Synthetic oligonucleotide
  Target: ATXN2; (-) strand; PAM type: YTN; PAM sequence: CTA
aagtgttgggattacaggag

SEQ ID NO: 84823 - DNA, 20 bp, Artificial Sequence
  Description of Artificial Sequence: Synthetic oligonucleotide
  Target: ATXN2; (-) strand; PAM type: YTN; PAM sequence: CTC
ggtatcctaaagtgttggga

SEQ ID NO: 84824 - DNA, 20 bp, Artificial Sequence
  Description of Artificial Sequence: Synthetic oligonucleotide
  Target: ATXN2; (-) strand; PAM type: YTN; PAM sequence: CTC
ccatctcggtatcctaaagt

SEQ ID NO: 84825 - DNA, 20 bp, Artificial Sequence
  Description of Artificial Sequence: Synthetic oligonucleotide
  Target: ATXN2; (-) strand; PAM type: YTN; PAM sequence: TTC
aagtgatcctcccatctcgg

SEQ ID NO: 84826 - DNA, 20 bp, Artificial Sequence
  Description of Artificial Sequence: Synthetic oligonucleotide
  Target: ATXN2; (-) strand; PAM type: YTN; PAM sequence: CTC
cggggtattcaagtgatcct

SEQ ID NO: 84827 - DNA, 20 bp, Artificial Sequence
  Description of Artificial Sequence: Synthetic oligonucleotide
  Target: ATXN2; (-) strand; PAM type: YTN; PAM sequence: TTC
aaactccggggtattcaagt

SEQ ID NO: 84828 - DNA, 20 bp, Artificial Sequence
  Description of Artificial Sequence: Synthetic oligonucleotide
  Target: ATXN2; (-) strand; PAM type: YTN; PAM sequence: TTT
caaactccggggtattcaag

SEQ ID NO: 84829 - DNA, 20 bp, Artificial Sequence
  Description of Artificial Sequence: Synthetic oligonucleotide
  Target: ATXN2; (-) strand; PAM type: YTN; PAM sequence: CTG
gtttcaaactccggggtatt

SEQ ID NO: 84830 - DNA, 20 bp, Artificial Sequence
  Description of Artificial Sequence: Synthetic oligonucleotide
  Target: ATXN2; (-) strand; PAM type: YTN; PAM sequence: TTG
cccaggctggtttcaaactc

SEQ ID NO: 84831 - DNA, 20 bp, Artificial Sequence
  Description of Artificial Sequence: Synthetic oligonucleotide
  Target: ATXN2; (-) strand; PAM type: YTN; PAM sequence: CTA
tgttgcccaggctggtttca

SEQ ID NO: 84832 - DNA, 20 bp, Artificial Sequence
  Description of Artificial Sequence: Synthetic oligonucleotide
  Target: ATXN2; (-) strand; PAM type: YTN; PAM sequence: CTC
tatgttgcccaggctggttt

SEQ ID NO: 84833 - DNA, 20 bp, Artificial Sequence
  Description of Artificial Sequence: Synthetic oligonucleotide
  Target: ATXN2; (-) strand; PAM type: YTN; PAM sequence: CTC
tctatgttgcccaggctggt

SEQ ID NO: 84834 - DNA, 20 bp, Artificial Sequence
  Description of Artificial Sequence: Synthetic oligonucleotide
  Target: ATXN2; (-) strand; PAM type: YTN; PAM sequence: TTC
atagagacagggtctctcta

SEQ ID NO: 84835 - DNA, 20 bp, Artificial Sequence
  Description of Artificial Sequence: Synthetic oligonucleotide
  Target: ATXN2; (-) strand; PAM type: YTN; PAM sequence: TTT
catagagacagggtctctct

SEQ ID NO: 84836 - DNA, 20 bp, Artificial Sequence
  Description of Artificial Sequence: Synthetic oligonucleotide
  Target: ATXN2; (-) strand; PAM type: YTN; PAM sequence: TTT
tcatagagacagggtctctc

SEQ ID NO: 84837 - DNA, 20 bp, Artificial Sequence
  Description of Artificial Sequence: Synthetic oligonucleotide
  Target: ATXN2; (-) strand; PAM type: YTN; PAM sequence: TTT
ttcatagagacagggtctct

SEQ ID NO: 84838 - DNA, 20 bp, Artificial Sequence
  Description of Artificial Sequence: Synthetic oligonucleotide
  Target: ATXN2; (-) strand; PAM type: YTN; PAM sequence: TTA
aagtttttcatagagacagg

SEQ ID NO: 84839 - DNA, 20 bp, Artificial Sequence
  Description of Artificial Sequence: Synthetic oligonucleotide
  Target: ATXN2; (-) strand; PAM type: YTN; PAM sequence: TTT
aaagtttttcatagagacag

SEQ ID NO: 84840 - DNA, 20 bp, Artificial Sequence
  Description of Artificial Sequence: Synthetic oligonucleotide
  Target: ATXN2; (-) strand; PAM type: YTN; PAM sequence: TTT
taaagtttttcatagagaca

SEQ ID NO: 84841 - DNA, 20 bp, Artificial Sequence
  Description of Artificial Sequence: Synthetic oligonucleotide
  Target: ATXN2; (-) strand; PAM type: YTN; PAM sequence: TTT
ttaaagtttttcatagagac

SEQ ID NO: 84842 - DNA, 20 bp, Artificial Sequence
  Description of Artificial Sequence: Synthetic oligonucleotide
  Target: ATXN2; (-) strand; PAM type: YTN; PAM sequence: TTA
tttttaaagtttttcataga

SEQ ID NO: 84843 - DNA, 20 bp, Artificial Sequence
  Description of Artificial Sequence: Synthetic oligonucleotide
  Target: ATXN2; (-) strand; PAM type: YTN; PAM sequence: TTT
atttttaaagtttttcatag

SEQ ID NO: 84844 - DNA, 20 bp, Artificial Sequence
  Description of Artificial Sequence: Synthetic oligonucleotide
  Target: ATXN2; (-) strand; PAM type: YTN; PAM sequence: TTT
tatttttaaagtttttcata

SEQ ID NO: 84845 - DNA, 20 bp, Artificial Sequence
  Description of Artificial Sequence: Synthetic oligonucleotide
  Target: ATXN2; (-) strand; PAM type: YTN; PAM sequence: TTT
ttatttttaaagtttttcat

SEQ ID NO: 84846 - DNA, 20 bp, Artificial Sequence
  Description of Artificial Sequence: Synthetic oligonucleotide
  Target: ATXN2; (-) strand; PAM type: YTN; PAM sequence: TTT
tttatttttaaagtttttca

SEQ ID NO: 84847 - DNA, 20 bp, Artificial Sequence
  Description of Artificial Sequence: Synthetic oligonucleotide
  Target: ATXN2; (-) strand; PAM type: YTN; PAM sequence: CTA
attttttatttttaaagttt

SEQ ID NO: 84848 - DNA, 20 bp, Artificial Sequence
  Description of Artificial Sequence: Synthetic oligonucleotide
  Target: ATXN2; (-) strand; PAM type: YTN; PAM sequence: TTA
taggcatgagccaccacgcc

SEQ ID NO: 84849 - DNA, 20 bp, Artificial Sequence
  Description of Artificial Sequence: Synthetic oligonucleotide
  Target: ATXN2; (-) strand; PAM type: YTN; PAM sequence: CTG
ggattataggcatgagccac

SEQ ID NO: 84850 - DNA, 20 bp, Artificial Sequence
  Description of Artificial Sequence: Synthetic oligonucleotide
  Target: ATXN2; (-) strand; PAM type: YTN; PAM sequence: CTC
ccaaagtgctgggattatag

SEQ ID NO: 84851 - DNA, 20 bp, Artificial Sequence
  Description of Artificial Sequence: Synthetic oligonucleotide
  Target: ATXN2; (-) strand; PAM type: YTN; PAM sequence: CTC
ggcctcccaaagtgctggga

SEQ ID NO: 84852 - DNA, 20 bp, Artificial Sequence
  Description of Artificial Sequence: Synthetic oligonucleotide
  Target: ATXN2; (-) strand; PAM type: YTN; PAM sequence: CTC
aggtgatccacccacctcgg

SEQ ID NO: 84853 - DNA, 20 bp, Artificial Sequence
  Description of Artificial Sequence: Synthetic oligonucleotide
  Target: ATXN2; (-) strand; PAM type: YTN; PAM sequence: CTG
atctcaggtgatccacccac

SEQ ID NO: 84854 - DNA, 20 bp, Artificial Sequence
  Description of Artificial Sequence: Synthetic oligonucleotide
  Target: ATXN2; (-) strand; PAM type: YTN; PAM sequence: CTC
ctgatctcaggtgatccacc

SEQ ID NO: 84855 - DNA, 20 bp, Artificial Sequence
  Description of Artificial Sequence: Synthetic oligonucleotide
  Target: ATXN2; (-) strand; PAM type: YTN; PAM sequence: CTC
gaactcctgatctcaggtga

SEQ ID NO: 84856 - DNA, 20 bp, Artificial Sequence
  Description of Artificial Sequence: Synthetic oligonucleotide
  Target: ATXN2; (-) strand; PAM type: YTN; PAM sequence: CTG
gtctcgaactcctgatctca

SEQ ID NO: 84857 - DNA, 20 bp, Artificial Sequence
  Description of Artificial Sequence: Synthetic oligonucleotide
  Target: ATXN2; (-) strand; PAM type: YTN; PAM sequence: TTC
accatgtaggccaggctggt

SEQ ID NO: 84858 - DNA, 20 bp, Artificial Sequence
  Description of Artificial Sequence: Synthetic oligonucleotide
  Target: ATXN2; (-) strand; PAM type: YTN; PAM sequence: TTT
caccatgtaggccaggctgg

SEQ ID NO: 84859 - DNA, 20 bp, Artificial Sequence
  Description of Artificial Sequence: Synthetic oligonucleotide
  Target: ATXN2; (-) strand; PAM type: YTN; PAM sequence: TTA
gtagagacgggatttcacca

SEQ ID NO: 84860 - DNA, 20 bp, Artificial Sequence
  Description of Artificial Sequence: Synthetic oligonucleotide
  Target: ATXN2; (-) strand; PAM type: YTN; PAM sequence: TTT
agtagagacgggatttcacc

SEQ ID NO: 84861 - DNA, 20 bp, Artificial Sequence
  Description of Artificial Sequence: Synthetic oligonucleotide
  Target: ATXN2; (-) strand; PAM type: YTN; PAM sequence: TTT
tagtagagacgggatttcac

SEQ ID NO: 84862 - DNA, 20 bp, Artificial Sequence
  Description of Artificial Sequence: Synthetic oligonucleotide
  Target: ATXN2; (-) strand; PAM type: YTN; PAM sequence: TTT
ttagtagagacgggatttca

SEQ ID NO: 84863 - DNA, 20 bp, Artificial Sequence
  Description of Artificial Sequence: Synthetic oligonucleotide
  Target: ATXN2; (-) strand; PAM type: YTN; PAM sequence: TTG
tatttttagtagagacggga

SEQ ID NO: 84864 - DNA, 20 bp, Artificial Sequence
  Description of Artificial Sequence: Synthetic oligonucleotide
  Target: ATXN2; (-) strand; PAM type: YTN; PAM sequence: TTT
gtatttttagtagagacggg

SEQ ID NO: 84865 - DNA, 20 bp, Artificial Sequence
  Description of Artificial Sequence: Synthetic oligonucleotide
  Target: ATXN2; (-) strand; PAM type: YTN; PAM sequence: TTT
tgtatttttagtagagacgg

SEQ ID NO: 84866 - DNA, 20 bp, Artificial Sequence
  Description of Artificial Sequence: Synthetic oligonucleotide
  Target: ATXN2; (-) strand; PAM type: YTN; PAM sequence: TTT
ttgtatttttagtagagacg

SEQ ID NO: 84867 - DNA, 20 bp, Artificial Sequence
  Description of Artificial Sequence: Synthetic oligonucleotide
  Target: ATXN2; (-) strand; PAM type: YTN; PAM sequence: TTT
tttgtatttttagtagagac

SEQ ID NO: 84868 - DNA, 20 bp, Artificial Sequence
  Description of Artificial Sequence: Synthetic oligonucleotide
  Target: ATXN2; (-) strand; PAM type: YTN; PAM sequence: CTA
attttttgtatttttagtag

SEQ ID NO: 84869 - DNA, 20 bp, Artificial Sequence
  Description of Artificial Sequence: Synthetic oligonucleotide
  Target: ATXN2; (-) strand; PAM type: YTN; PAM sequence: CTG
gctaattttttgtattttta

SEQ ID NO: 84870 - DNA, 20 bp, Artificial Sequence
  Description of Artificial Sequence: Synthetic oligonucleotide
  Target: ATXN2; (-) strand; PAM type: YTN; PAM sequence: TTA
caggtgcccgccaccacgcc

SEQ ID NO: 84871 - DNA, 20 bp, Artificial Sequence
  Description of Artificial Sequence: Synthetic oligonucleotide
  Target: ATXN2; (-) strand; PAM type: YTN; PAM sequence: CTG
agattacaggtgcccgccac

SEQ ID NO: 84872 - DNA, 20 bp, Artificial Sequence
  Description of Artificial Sequence: Synthetic oligonucleotide
  Target: ATXN2; (-) strand; PAM type: YTN; PAM sequence: CTC
ccaagtagctgagattacag

SEQ ID NO: 84873 - DNA, 20 bp, Artificial Sequence
  Description of Artificial Sequence: Synthetic oligonucleotide
  Target: ATXN2; (-) strand; PAM type: YTN; PAM sequence: CTC
agcctcccaagtagctgaga

SEQ ID NO: 84874 - DNA, 20 bp, Artificial Sequence
  Description of Artificial Sequence: Synthetic oligonucleotide
  Target: ATXN2; (-) strand; PAM type: YTN; PAM sequence: CTG
cctcagcctcccaagtagct

SEQ ID NO: 84875 - DNA, 20 bp, Artificial Sequence
  Description of Artificial Sequence: Synthetic oligonucleotide
  Target: ATXN2; (-) strand; PAM type: YTN; PAM sequence: CTC
ctgcctcagcctcccaagta

SEQ ID NO: 84876 - DNA, 20 bp, Artificial Sequence
  Description of Artificial Sequence: Synthetic oligonucleotide
  Target: ATXN2; (-) strand; PAM type: YTN; PAM sequence: TTC
tcctgcctcagcctcccaag

SEQ ID NO: 84877 - DNA, 20 bp, Artificial Sequence
  Description of Artificial Sequence: Synthetic oligonucleotide
  Target: ATXN2; (-) strand; PAM type: YTN; PAM sequence: TTC
aagcaattctcctgcctcag

SEQ ID NO: 84878 - DNA, 20 bp, Artificial Sequence
  Description of Artificial Sequence: Synthetic oligonucleotide
  Target: ATXN2; (-) strand; PAM type: YTN; PAM sequence: CTG
ggttcaagcaattctcctgc

SEQ ID NO: 84879 - DNA, 20 bp, Artificial Sequence
  Description of Artificial Sequence: Synthetic oligonucleotide
  Target: ATXN2; (-) strand; PAM type: YTN; PAM sequence: CTC
ctgggttcaagcaattctcc

SEQ ID NO: 84880 - DNA, 20 bp, Artificial Sequence
  Description of Artificial Sequence: Synthetic oligonucleotide
  Target: ATXN2; (-) strand; PAM type: YTN; PAM sequence: CTC
cgcctcctgggttcaagcaa

SEQ ID NO: 84881 - DNA, 20 bp, Artificial Sequence
  Description of Artificial Sequence: Synthetic oligonucleotide
  Target: ATXN2; (-) strand; PAM type: YTN; PAM sequence: CTG
taacctccgcctcctgggtt

SEQ ID NO: 84882 - DNA, 20 bp, Artificial Sequence
  Description of Artificial Sequence: Synthetic oligonucleotide
  Target: ATXN2; (-) strand; PAM type: YTN; PAM sequence: CTC
actgtaacctccgcctcctg

SEQ ID NO: 84883 - DNA, 20 bp, Artificial Sequence
  Description of Artificial Sequence: Synthetic oligonucleotide
  Target: ATXN2; (-) strand; PAM type: YTN; PAM sequence: CTC
ggctcactgtaacctccgcc

SEQ ID NO: 84884 - DNA, 20 bp, Artificial Sequence
  Description of Artificial Sequence: Synthetic oligonucleotide
  Target: ATXN2; (-) strand; PAM type: YTN; PAM sequence: TTC
agtgcaatggtgcaatctcg

SEQ ID NO: 84885 - DNA, 20 bp, Artificial Sequence
  Description of Artificial Sequence: Synthetic oligonucleotide
  Target: ATXN2; (-) strand; PAM type: YTN; PAM sequence: CTT
cagtgcaatggtgcaatctc

SEQ ID NO: 84886 - DNA, 20 bp, Artificial Sequence
  Description of Artificial Sequence: Synthetic oligonucleotide
  Target: ATXN2; (-) strand; PAM type: YTN; PAM sequence: CTG
tgtcacccaggcttcagtgc

SEQ ID NO: 84887 - DNA, 20 bp, Artificial Sequence
  Description of Artificial Sequence: Synthetic oligonucleotide
  Target: ATXN2; (-) strand; PAM type: YTN; PAM sequence: TTG
ctgtgtcacccaggcttcag

SEQ ID NO: 84888 - DNA, 20 bp, Artificial Sequence
  Description of Artificial Sequence: Synthetic oligonucleotide
  Target: ATXN2; (-) strand; PAM type: YTN; PAM sequence: TTG
gagacagagtattgctgtgt

SEQ ID NO: 84889 - DNA, 20 bp, Artificial Sequence
  Description of Artificial Sequence: Synthetic oligonucleotide
  Target: ATXN2; (-) strand; PAM type: YTN; PAM sequence: TTT
ggagacagagtattgctgtg

SEQ ID NO: 84890 - DNA, 20 bp, Artificial Sequence
  Description of Artificial Sequence: Synthetic oligonucleotide
  Target: ATXN2; (-) strand; PAM type: YTN; PAM sequence: TTT
tggagacagagtattgctgt

SEQ ID NO: 84891 - DNA, 20 bp, Artificial Sequence
  Description of Artificial Sequence: Synthetic oligonucleotide
  Target: ATXN2; (-) strand; PAM type: YTN; PAM sequence: TTT
ttggagacagagtattgctg

SEQ ID NO: 84892 - DNA, 20 bp, Artificial Sequence
  Description of Artificial Sequence: Synthetic oligonucleotide
  Target: ATXN2; (-) strand; PAM type: YTN; PAM sequence: TTT
tttggagacagagtattgct

SEQ ID NO: 84893 - DNA, 20 bp, Artificial Sequence
  Description of Artificial Sequence: Synthetic oligonucleotide
  Target: ATXN2; (-) strand; PAM type: YTN; PAM sequence: TTT
ttttggagacagagtattgc

SEQ ID NO: 84894 - DNA, 20 bp, Artificial Sequence
  Description of Artificial Sequence: Synthetic oligonucleotide
  Target: ATXN2; (-) strand; PAM type: YTN; PAM sequence: TTT
tttttggagacagagtattg

SEQ ID NO: 84895 - DNA, 20 bp, Artificial Sequence
  Description of Artificial Sequence: Synthetic oligonucleotide
  Target: ATXN2; (-) strand; PAM type: YTN; PAM sequence: TTT
ttttttggagacagagtatt

SEQ ID NO: 84896 - DNA, 20 bp, Artificial Sequence
  Description of Artificial Sequence: Synthetic oligonucleotide
  Target: ATXN2; (-) strand; PAM type: YTN; PAM sequence: TTT
tttttttggagacagagtat

SEQ ID NO: 84897 - DNA, 20 bp, Artificial Sequence
  Description of Artificial Sequence: Synthetic oligonucleotide
  Target: ATXN2; (-) strand; PAM type: YTN; PAM sequence: TTT
ttttttttggagacagagta

SEQ ID NO: 84898 - DNA, 20 bp, Artificial Sequence
  Description of Artificial Sequence: Synthetic oligonucleotide
  Target: ATXN2; (-) strand; PAM type: YTN; PAM sequence: TTT
tttttttttggagacagagt

SEQ ID NO: 84899 - DNA, 20 bp, Artificial Sequence
  Description of Artificial Sequence: Synthetic oligonucleotide
  Target: ATXN2; (-) strand; PAM type: YTN; PAM sequence: TTT
ttttttttttggagacagag

SEQ ID NO: 84900 - DNA, 20 bp, Artificial Sequence
  Description of Artificial Sequence: Synthetic oligonucleotide
  Target: ATXN2; (-) strand; PAM type: YTN; PAM sequence: TTT
tttttttttttggagacaga

SEQ ID NO: 84901 - DNA, 20 bp, Artificial Sequence
  Description of Artificial Sequence: Synthetic oligonucleotide
  Target: ATXN2; (-) strand; PAM type: YTN; PAM sequence: TTT
ttttttttttttggagacag

SEQ ID NO: 84902 - DNA, 20 bp, Artificial Sequence
  Description of Artificial Sequence: Synthetic oligonucleotide
  Target: ATXN2; (-) strand; PAM type: YTN; PAM sequence: TTT
tttttttttttttggagaca

SEQ ID NO: 84903 - DNA, 20 bp, Artificial Sequence
  Description of Artificial Sequence: Synthetic oligonucleotide
  Target: ATXN2; (-) strand; PAM type: YTN; PAM sequence: TTT
ttttttttttttttggagac

SEQ ID NO: 84904 - DNA, 20 bp, Artificial Sequence
  Description of Artificial Sequence: Synthetic oligonucleotide
  Target: ATXN2; (-) strand; PAM type: YTN; PAM sequence: TTT
tttttttttttttttggaga

SEQ ID NO: 84905 - DNA, 20 bp, Artificial Sequence
  Description of Artificial Sequence: Synthetic oligonucleotide
  Target: ATXN2; (-) strand; PAM type: YTN; PAM sequence: TTT
ttttttttttttttttggag

SEQ ID NO: 84906 - DNA, 20 bp, Artificial Sequence
  Description of Artificial Sequence: Synthetic oligonucleotide
  Target: ATXN2; (-) strand; PAM type: YTN; PAM sequence: TTT
tttttttttttttttttgga

SEQ ID NO: 84907 - DNA, 20 bp, Artificial Sequence
  Description of Artificial Sequence: Synthetic oligonucleotide
  Target: ATXN2; (-) strand; PAM type: YTN; PAM sequence: TTT
ttttttttttttttttttgg

SEQ ID NO: 84908 - DNA, 20 bp, Artificial Sequence
  Description of Artificial Sequence: Synthetic oligonucleotide
  Target: ATXN2; (-) strand; PAM type: YTN; PAM sequence: CTA
attttttttttttttttttt

SEQ ID NO: 84909 - DNA, 20 bp, Artificial Sequence
  Description of Artificial Sequence: Synthetic oligonucleotide
  Target: ATXN2; (-) strand; PAM type: YTN; PAM sequence: CTA
taggtgcgtgtcaccatgac

SEQ ID NO: 84910 - DNA, 20 bp, Artificial Sequence
  Description of Artificial Sequence: Synthetic oligonucleotide
  Target: ATXN2; (-) strand; PAM type: YTN; PAM sequence: CTG
ggactataggtgcgtgtcac

SEQ ID NO: 84911 - DNA, 20 bp, Artificial Sequence
  Description of Artificial Sequence: Synthetic oligonucleotide
  Target: ATXN2; (-) strand; PAM type: YTN; PAM sequence: CTA
gtagctgggactataggtgc

SEQ ID NO: 84912 - DNA, 20 bp, Artificial Sequence
  Description of Artificial Sequence: Synthetic oligonucleotide
  Target: ATXN2; (-) strand; PAM type: YTN; PAM sequence: CTC
cctagtagctgggactatag

SEQ ID NO: 84913 - DNA, 20 bp, Artificial Sequence
  Description of Artificial Sequence: Synthetic oligonucleotide
  Target: ATXN2; (-) strand; PAM type: YTN; PAM sequence: TTC
agcctccctagtagctggga

SEQ ID NO: 84914 - DNA, 20 bp, Artificial Sequence
  Description of Artificial Sequence: Synthetic oligonucleotide
  Target: ATXN2; (-) strand; PAM type: YTN; PAM sequence: CTT
cagcctccctagtagctggg

SEQ ID NO: 84915 - DNA, 20 bp, Artificial Sequence
  Description of Artificial Sequence: Synthetic oligonucleotide
  Target: ATXN2; (-) strand; PAM type: YTN; PAM sequence: CTG
cttcagcctccctagtagct

SEQ ID NO: 84916 - DNA, 20 bp, Artificial Sequence
  Description of Artificial Sequence: Synthetic oligonucleotide
  Target: ATXN2; (-) strand; PAM type: YTN; PAM sequence: TTC
tgcttcagcctccctagtag

SEQ ID NO: 84917 - DNA, 20 bp, Artificial Sequence
  Description of Artificial Sequence: Synthetic oligonucleotide
  Target: ATXN2; (-) strand; PAM type: YTN; PAM sequence: CTT
ctgcttcagcctccctagta

SEQ ID NO: 84918 - DNA, 20 bp, Artificial Sequence
  Description of Artificial Sequence: Synthetic oligonucleotide
  Target: ATXN2; (-) strand; PAM type: YTN; PAM sequence: CTC
aagcggtccttctgcttcag

SEQ ID NO: 84919 - DNA, 20 bp, Artificial Sequence
  Description of Artificial Sequence: Synthetic oligonucleotide
  Target: ATXN2; (-) strand; PAM type: YTN; PAM sequence: CTG
ggctcaagcggtccttctgc

SEQ ID NO: 84920 - DNA, 20 bp, Artificial Sequence
  Description of Artificial Sequence: Synthetic oligonucleotide
  Target: ATXN2; (-) strand; PAM type: YTN; PAM sequence: CTC
ctgggctcaagcggtccttc

SEQ ID NO: 84921 - DNA, 20 bp, Artificial Sequence
  Description of Artificial Sequence: Synthetic oligonucleotide
  Target: ATXN2; (-) strand; PAM type: YTN; PAM sequence: CTC
gatctcctgggctcaagcgg

SEQ ID NO: 84922 - DNA, 20 bp, Artificial Sequence
  Description of Artificial Sequence: Synthetic oligonucleotide
  Target: ATXN2; (-) strand; PAM type: YTN; PAM sequence: CTC
acagcaacctcgatctcctg

SEQ ID NO: 84923 - DNA, 20 bp, Artificial Sequence
  Description of Artificial Sequence: Synthetic oligonucleotide
  Target: ATXN2; (-) strand; PAM type: YTN; PAM sequence: TTC
gtagctcacagcaacctcga

SEQ ID NO: 84924 - DNA, 20 bp, Artificial Sequence
  Description of Artificial Sequence: Synthetic oligonucleotide
  Target: ATXN2; (-) strand; PAM type: YTN; PAM sequence: CTA
gagtgcagtggcgcattcgt

SEQ ID NO: 84925 - DNA, 20 bp, Artificial Sequence
  Description of Artificial Sequence: Synthetic oligonucleotide
  Target: ATXN2; (-) strand; PAM type: YTN; PAM sequence: TTG
cccaggctagagtgcagtgg

SEQ ID NO: 84926 - DNA, 20 bp, Artificial Sequence
  Description of Artificial Sequence: Synthetic oligonucleotide
  Target: ATXN2; (-) strand; PAM type: YTN; PAM sequence: CTG
ttgcccaggctagagtgcag

SEQ ID NO: 84927 - DNA, 20 bp, Artificial Sequence
  Description of Artificial Sequence: Synthetic oligonucleotide
  Target: ATXN2; (-) strand; PAM type: YTN; PAM sequence: TTG
gtctgttgcccaggctagag

SEQ ID NO: 84928 - DNA, 20 bp, Artificial Sequence
  Description of Artificial Sequence: Synthetic oligonucleotide
  Target: ATXN2; (-) strand; PAM type: YTN; PAM sequence: CTT
ggtctgttgcccaggctaga

SEQ ID NO: 84929 - DNA, 20 bp, Artificial Sequence
  Description of Artificial Sequence: Synthetic oligonucleotide
  Target: ATXN2; (-) strand; PAM type: YTN; PAM sequence: CTG
aacgagacagggtcttggtc

SEQ ID NO: 84930 - DNA, 20 bp, Artificial Sequence
  Description of Artificial Sequence: Synthetic oligonucleotide
  Target: ATXN2; (-) strand; PAM type: YTN; PAM sequence: TTA
actgaacgagacagggtctt

SEQ ID NO: 84931 - DNA, 20 bp, Artificial Sequence
  Description of Artificial Sequence: Synthetic oligonucleotide
  Target: ATXN2; (-) strand; PAM type: YTN; PAM sequence: CTA
ttaactgaacgagacagggt

SEQ ID NO: 84932 - DNA, 20 bp, Artificial Sequence
  Description of Artificial Sequence: Synthetic oligonucleotide
  Target: ATXN2; (-) strand; PAM type: YTN; PAM sequence: CTC
tattaactgaacgagacagg

SEQ ID NO: 84933 - DNA, 20 bp, Artificial Sequence
  Description of Artificial Sequence: Synthetic oligonucleotide
  Target: ATXN2; (-) strand; PAM type: YTN; PAM sequence: TTA
gcaactctattaactgaacg

SEQ ID NO: 84934 - DNA, 20 bp, Artificial Sequence
  Description of Artificial Sequence: Synthetic oligonucleotide
  Target: ATXN2; (-) strand; PAM type: YTN; PAM sequence: TTT
agcaactctattaactgaac

SEQ ID NO: 84935 - DNA, 20 bp, Artificial Sequence
  Description of Artificial Sequence: Synthetic oligonucleotide
  Target: ATXN2; (-) strand; PAM type: YTN; PAM sequence: TTT
tagcaactctattaactgaa

SEQ ID NO: 84936 - DNA, 20 bp, Artificial Sequence
  Description of Artificial Sequence: Synthetic oligonucleotide
  Target: ATXN2; (-) strand; PAM type: YTN; PAM sequence: TTG
tgtgtgtgtgtgtgtgtttt

SEQ ID NO: 84937 - DNA, 20 bp, Artificial Sequence
  Description of Artificial Sequence: Synthetic oligonucleotide
  Target: ATXN2; (-) strand; PAM type: YTN; PAM sequence: TTT
gtgtgtgtgtgtgtgtgttt

SEQ ID NO: 84938 - DNA, 20 bp, Artificial Sequence
  Description of Artificial Sequence: Synthetic oligonucleotide
  Target: ATXN2; (-) strand; PAM type: YTN; PAM sequence: CTT
tgtgtgtgtgtgtgtgtgtt

SEQ ID NO: 84939 - DNA, 20 bp, Artificial Sequence
  Description of Artificial Sequence: Synthetic oligonucleotide
  Target: ATXN2; (-) strand; PAM type: YTN; PAM sequence: TTC
tttgtgtgtgtgtgtgtgtg

SEQ ID NO: 84940 - DNA, 20 bp, Artificial Sequence
  Description of Artificial Sequence: Synthetic oligonucleotide
  Target: ATXN2; (-) strand; PAM type: YTN; PAM sequence: CTT
ctttgtgtgtgtgtgtgtgt

SEQ ID NO: 84941 - DNA, 20 bp, Artificial Sequence
  Description of Artificial Sequence: Synthetic oligonucleotide
  Target: ATXN2; (-) strand; PAM type: YTN; PAM sequence: TTC
ttctttgtgtgtgtgtgtgt

SEQ ID NO: 84942 - DNA, 20 bp, Artificial Sequence
  Description of Artificial Sequence: Synthetic oligonucleotide
  Target: ATXN2; (-) strand; PAM type: YTN; PAM sequence: CTT
cttctttgtgtgtgtgtgtg

SEQ ID NO: 84943 - DNA, 20 bp, Artificial Sequence
  Description of Artificial Sequence: Synthetic oligonucleotide
  Target: ATXN2; (-) strand; PAM type: YTN; PAM sequence: TTC
ttcttctttgtgtgtgtgtg

SEQ ID NO: 84944 - DNA, 20 bp, Artificial Sequence
  Description of Artificial Sequence: Synthetic oligonucleotide
  Target: ATXN2; (-) strand; PAM type: YTN; PAM sequence: TTT
cttcttctttgtgtgtgtgt

SEQ ID NO: 84945 - DNA, 20 bp, Artificial Sequence
  Description of Artificial Sequence: Synthetic oligonucleotide
  Target: ATXN2; (-) strand; PAM type: YTN; PAM sequence: CTT
tcttcttctttgtgtgtgtg

SEQ ID NO: 84946 - DNA, 20 bp, Artificial Sequence
  Description of Artificial Sequence: Synthetic oligonucleotide
  Target: ATXN2; (-) strand; PAM type: YTN; PAM sequence: TTC
tttcttcttctttgtgtgtg

SEQ ID NO: 84947 - DNA, 20 bp, Artificial Sequence
  Description of Artificial Sequence: Synthetic oligonucleotide
  Target: ATXN2; (-) strand; PAM type: YTN; PAM sequence: TTT
ctttcttcttctttgtgtgt

SEQ ID NO: 84948 - DNA, 20 bp, Artificial Sequence
  Description of Artificial Sequence: Synthetic oligonucleotide
  Target: ATXN2; (-) strand; PAM type: YTN; PAM sequence: TTT
tctttcttcttctttgtgtg

SEQ ID NO: 84949 - DNA, 20 bp, Artificial Sequence
  Description of Artificial Sequence: Synthetic oligonucleotide
  Target: ATXN2; (-) strand; PAM type: YTN; PAM sequence: TTT
ttctttcttcttctttgtgt

SEQ ID NO: 84950 - DNA, 20 bp, Artificial Sequence
  Description of Artificial Sequence: Synthetic oligonucleotide
  Target: ATXN2; (-) strand; PAM type: YTN; PAM sequence: TTA
tttttctttcttcttctttg

SEQ ID NO: 84951 - DNA, 20 bp, Artificial Sequence
  Description of Artificial Sequence: Synthetic oligonucleotide
  Target: ATXN2; (-) strand; PAM type: YTN; PAM sequence: TTA
ttatttttctttcttcttct

SEQ ID NO: 84952 - DNA, 20 bp, Artificial Sequence
  Description of Artificial Sequence: Synthetic oligonucleotide
  Target: ATXN2; (-) strand; PAM type: YTN; PAM sequence: TTC
atagcagcattattattttt

SEQ ID NO: 84953 - DNA, 20 bp, Artificial Sequence
  Description of Artificial Sequence: Synthetic oligonucleotide
  Target: ATXN2; (-) strand; PAM type: YTN; PAM sequence: TTC
acaaatgttcatagcagcat

SEQ ID NO: 84954 - DNA, 20 bp, Artificial Sequence
  Description of Artificial Sequence: Synthetic oligonucleotide
  Target: ATXN2; (-) strand; PAM type: YTN; PAM sequence: TTG
taggaaccaacccaagataa

SEQ ID NO: 84955 - DNA, 20 bp, Artificial Sequence
  Description of Artificial Sequence: Synthetic oligonucleotide
  Target: ATXN2; (-) strand; PAM type: YTN; PAM sequence: TTT
gtaggaaccaacccaagata

SEQ ID NO: 84956 - DNA, 20 bp, Artificial Sequence
  Description of Artificial Sequence: Synthetic oligonucleotide
  Target: ATXN2; (-) strand; PAM type: YTN; PAM sequence: TTC
gtttgtaggaaccaacccaa

SEQ ID NO: 84957 - DNA, 20 bp, Artificial Sequence
  Description of Artificial Sequence: Synthetic oligonucleotide
  Target: ATXN2; (-) strand; PAM type: YTN; PAM sequence: TTT
cgtttgtaggaaccaaccca

SEQ ID NO: 84958 - DNA, 20 bp, Artificial Sequence
  Description of Artificial Sequence: Synthetic oligonucleotide
  Target: ATXN2; (-) strand; PAM type: YTN; PAM sequence: TTA
ccacatcacccaacaatttc

SEQ ID NO: 84959 - DNA, 20 bp, Artificial Sequence
  Description of Artificial Sequence: Synthetic oligonucleotide
  Target: ATXN2; (-) strand; PAM type: YTN; PAM sequence: CTT
accacatcacccaacaattt

SEQ ID NO: 84960 - DNA, 20 bp, Artificial Sequence
  Description of Artificial Sequence: Synthetic oligonucleotide
  Target: ATXN2; (-) strand; PAM type: YTN; PAM sequence: CTA
aataaacttaccacatcacc

SEQ ID NO: 84961 - DNA, 20 bp, Artificial Sequence
  Description of Artificial Sequence: Synthetic oligonucleotide
  Target: ATXN2; (-) strand; PAM type: YTN; PAM sequence: TTC
cataaataaataaataaaat

SEQ ID NO: 84962 - DNA, 20 bp, Artificial Sequence
  Description of Artificial Sequence: Synthetic oligonucleotide
  Target: ATXN2; (-) strand; PAM type: YTN; PAM sequence: TTT
ccataaataaataaataaaa

SEQ ID NO: 84963 - DNA, 20 bp, Artificial Sequence
  Description of Artificial Sequence: Synthetic oligonucleotide
  Target: ATXN2; (-) strand; PAM type: YTN; PAM sequence: CTG
aagtccagagaaaaggtagt

SEQ ID NO: 84964 - DNA, 20 bp, Artificial Sequence
  Description of Artificial Sequence: Synthetic oligonucleotide
  Target: ATXN2; (-) strand; PAM type: YTN; PAM sequence: TTC
tgaagtccagagaaaaggta

SEQ ID NO: 84965 - DNA, 20 bp, Artificial Sequence
  Description of Artificial Sequence: Synthetic oligonucleotide
  Target: ATXN2; (-) strand; PAM type: YTN; PAM sequence: CTT
ctgaagtccagagaaaaggt

SEQ ID NO: 84966 - DNA, 20 bp, Artificial Sequence
  Description of Artificial Sequence: Synthetic oligonucleotide
  Target: ATXN2; (-) strand; PAM type: YTN; PAM sequence: TTA
agccttctgaagtccagaga

SEQ ID NO: 84967 - DNA, 20 bp, Artificial Sequence
  Description of Artificial Sequence: Synthetic oligonucleotide
  Target: ATXN2; (-) strand; PAM type: YTN; PAM sequence: CTT
aagccttctgaagtccagag

SEQ ID NO: 84968 - DNA, 20 bp, Artificial Sequence
  Description of Artificial Sequence: Synthetic oligonucleotide
  Target: ATXN2; (-) strand; PAM type: YTN; PAM sequence: TTC
atataaagcttaagccttct

SEQ ID NO: 84969 - DNA, 20 bp, Artificial Sequence
  Description of Artificial Sequence: Synthetic oligonucleotide
  Target: ATXN2; (-) strand; PAM type: YTN; PAM sequence: TTT
catataaagcttaagccttc

SEQ ID NO: 84970 - DNA, 20 bp, Artificial Sequence
  Description of Artificial Sequence: Synthetic oligonucleotide
  Target: ATXN2; (-) strand; PAM type: YTN; PAM sequence: TTT
tcatataaagcttaagcctt

SEQ ID NO: 84971 - DNA, 20 bp, Artificial Sequence
  Description of Artificial Sequence: Synthetic oligonucleotide
  Target: ATXN2; (-) strand; PAM type: YTN; PAM sequence: CTG
atattttcatataaagctta

SEQ ID NO: 84972 - DNA, 20 bp, Artificial Sequence
  Description of Artificial Sequence: Synthetic oligonucleotide
  Target: ATXN2; (-) strand; PAM type: YTN; PAM sequence: CTC
tgatattttcatataaagct

SEQ ID NO: 84973 - DNA, 20 bp, Artificial Sequence
  Description of Artificial Sequence: Synthetic oligonucleotide
  Target: ATXN2; (-) strand; PAM type: YTN; PAM sequence: CTA
ctctgatattttcatataaa

SEQ ID NO: 84974 - DNA, 20 bp, Artificial Sequence
  Description of Artificial Sequence: Synthetic oligonucleotide
  Target: ATXN2; (-) strand; PAM type: YTN; PAM sequence: TTA
caggcatgagccaccgtgcc

SEQ ID NO: 84975 - DNA, 20 bp, Artificial Sequence
  Description of Artificial Sequence: Synthetic oligonucleotide
  Target: ATXN2; (-) strand; PAM type: YTN; PAM sequence: CTG
ggattacaggcatgagccac

SEQ ID NO: 84976 - DNA, 20 bp, Artificial Sequence
  Description of Artificial Sequence: Synthetic oligonucleotide
  Target: ATXN2; (-) strand; PAM type: YTN; PAM sequence: CTC
ccaaagtgctgggattacag

SEQ ID NO: 84977 - DNA, 20 bp, Artificial Sequence
  Description of Artificial Sequence: Synthetic oligonucleotide
  Target: ATXN2; (-) strand; PAM type: YTN; PAM sequence: CTC
agtctcccaaagtgctggga

SEQ ID NO: 84978 - DNA, 20 bp, Artificial Sequence
  Description of Artificial Sequence: Synthetic oligonucleotide
  Target: ATXN2; (-) strand; PAM type: YTN; PAM sequence: CTC
aggtgatcagcccacctcag

SEQ ID NO: 84979 - DNA, 20 bp, Artificial Sequence
  Description of Artificial Sequence: Synthetic oligonucleotide
  Target: ATXN2; (-) strand; PAM type: YTN; PAM sequence: TTG
acctcaggtgatcagcccac

SEQ ID NO: 84980 - DNA, 20 bp, Artificial Sequence
  Description of Artificial Sequence: Synthetic oligonucleotide
  Target: ATXN2; (-) strand; PAM type: YTN; PAM sequence: CTT
gacctcaggtgatcagccca

SEQ ID NO: 84981 - DNA, 20 bp, Artificial Sequence
  Description of Artificial Sequence: Synthetic oligonucleotide
  Target: ATXN2; (-) strand; PAM type: YTN; PAM sequence: CTC
ttgacctcaggtgatcagcc

SEQ ID NO: 84982 - DNA, 20 bp, Artificial Sequence
  Description of Artificial Sequence: Synthetic oligonucleotide
  Target: ATXN2; (-) strand; PAM type: YTN; PAM sequence: CTC
gatctcttgacctcaggtga

SEQ ID NO: 84983 - DNA, 20 bp, Artificial Sequence
  Description of Artificial Sequence: Synthetic oligonucleotide
  Target: ATXN2; (-) strand; PAM type: YTN; PAM sequence: TTG
gcaaggatggtctcgatctc

SEQ ID NO: 84984 - DNA, 20 bp, Artificial Sequence
  Description of Artificial Sequence: Synthetic oligonucleotide
  Target: ATXN2; (-) strand; PAM type: YTN; PAM sequence: TTC
accatgttggcaaggatggt

SEQ ID NO: 84985 - DNA, 20 bp, Artificial Sequence
  Description of Artificial Sequence: Synthetic oligonucleotide
  Target: ATXN2; (-) strand; PAM type: YTN; PAM sequence: TTT
caccatgttggcaaggatgg

SEQ ID NO: 84986 - DNA, 20 bp, Artificial Sequence
  Description of Artificial Sequence: Synthetic oligonucleotide
  Target: ATXN2; (-) strand; PAM type: YTN; PAM sequence: TTA
atagagacagggtttcacca

SEQ ID NO: 84987 - DNA, 20 bp, Artificial Sequence
  Description of Artificial Sequence: Synthetic oligonucleotide
  Target: ATXN2; (-) strand; PAM type: YTN; PAM sequence: TTT
aatagagacagggtttcacc

SEQ ID NO: 84988 - DNA, 20 bp, Artificial Sequence
  Description of Artificial Sequence: Synthetic oligonucleotide
  Target: ATXN2; (-) strand; PAM type: YTN; PAM sequence: TTT
taatagagacagggtttcac

SEQ ID NO: 84989 - DNA, 20 bp, Artificial Sequence
  Description of Artificial Sequence: Synthetic oligonucleotide
  Target: ATXN2; (-) strand; PAM type: YTN; PAM sequence: TTT
ttaatagagacagggtttca

SEQ ID NO: 84990 - DNA, 20 bp, Artificial Sequence
  Description of Artificial Sequence: Synthetic oligonucleotide
  Target: ATXN2; (-) strand; PAM type: YTN; PAM sequence: TTG
tatttttaatagagacaggg

SEQ ID NO: 84991 - DNA, 20 bp, Artificial Sequence
  Description of Artificial Sequence: Synthetic oligonucleotide
  Target: ATXN2; (-) strand; PAM type: YTN; PAM sequence: TTT
gtatttttaatagagacagg

SEQ ID NO: 84992 - DNA, 20 bp, Artificial Sequence
  Description of Artificial Sequence: Synthetic oligonucleotide
  Target: ATXN2; (-) strand; PAM type: YTN; PAM sequence: TTT
tgtatttttaatagagacag

SEQ ID NO: 84993 - DNA, 20 bp, Artificial Sequence
  Description of Artificial Sequence: Synthetic oligonucleotide
  Target: ATXN2; (-) strand; PAM type: YTN; PAM sequence: TTT
ttgtatttttaatagagaca

SEQ ID NO: 84994 - DNA, 20 bp, Artificial Sequence
  Description of Artificial Sequence: Synthetic oligonucleotide
  Target: ATXN2; (-) strand; PAM type: YTN; PAM sequence: CTA
atttttgtatttttaataga

SEQ ID NO: 84995 - DNA, 20 bp, Artificial Sequence
  Description of Artificial Sequence: Synthetic oligonucleotide
  Target: ATXN2; (-) strand; PAM type: YTN; PAM sequence: CTG
gctaatttttgtatttttaa

SEQ ID NO: 84996 - DNA, 20 bp, Artificial Sequence
  Description of Artificial Sequence: Synthetic oligonucleotide
  Target: ATXN2; (-) strand; PAM type: YTN; PAM sequence: TTA
caggtgtgagccaccatgcc

SEQ ID NO: 84997 - DNA, 20 bp, Artificial Sequence
  Description of Artificial Sequence: Synthetic oligonucleotide
  Target: ATXN2; (-) strand; PAM type: YTN; PAM sequence: CTG
ggattacaggtgtgagccac

SEQ ID NO: 84998 - DNA, 20 bp, Artificial Sequence
  Description of Artificial Sequence: Synthetic oligonucleotide
  Target: ATXN2; (-) strand; PAM type: YTN; PAM sequence: CTC
ccaaagtgctgggattacag

SEQ ID NO: 84999 - DNA, 20 bp, Artificial Sequence
  Description of Artificial Sequence: Synthetic oligonucleotide
  Target: ATXN2; (-) strand; PAM type: YTN; PAM sequence: TTG
gcctcccaaagtgctgggat

SEQ ID NO: 85000 - DNA, 20 bp, Artificial Sequence
  Description of Artificial Sequence: Synthetic oligonucleotide
  Target: ATXN2; (-) strand; PAM type: YTN; PAM sequence: CTT
ggcctcccaaagtgctggga

SEQ ID NO: 85001 - DNA, 20 bp, Artificial Sequence
  Description of Artificial Sequence: Synthetic oligonucleotide
  Target: ATXN2; (-) strand; PAM type: YTN; PAM sequence: CTG
cccgccttggcctcccaaag

SEQ ID NO: 85002 - DNA, 20 bp, Artificial Sequence
  Description of Artificial Sequence: Synthetic oligonucleotide
  Target: ATXN2; (-) strand; PAM type: YTN; PAM sequence: CTC
gtgatctgcccgccttggcc

SEQ ID NO: 85003 - DNA, 20 bp, Artificial Sequence
  Description of Artificial Sequence: Synthetic oligonucleotide
  Target: ATXN2; (-) strand; PAM type: YTN; PAM sequence: CTG
acctcgtgatctgcccgcct

SEQ ID NO: 85004 - DNA, 20 bp, Artificial Sequence
  Description of Artificial Sequence: Synthetic oligonucleotide
  Target: ATXN2; (-) strand; PAM type: YTN; PAM sequence: CTC
ctgacctcgtgatctgcccg

SEQ ID NO: 85005 - DNA, 20 bp, Artificial Sequence
  Description of Artificial Sequence: Synthetic oligonucleotide
  Target: ATXN2; (-) strand; PAM type: YTN; PAM sequence: TTG
atctcctgacctcgtgatct

SEQ ID NO: 85006 - DNA, 20 bp, Artificial Sequence
  Description of Artificial Sequence: Synthetic oligonucleotide
  Target: ATXN2; (-) strand; PAM type: YTN; PAM sequence: CTT
gatctcctgacctcgtgatc

SEQ ID NO: 85007 - DNA, 20 bp, Artificial Sequence
  Description of Artificial Sequence: Synthetic oligonucleotide
  Target: ATXN2; (-) strand; PAM type: YTN; PAM sequence: TTA
gccaggatggccttgatctc

SEQ ID NO: 85008 - DNA, 20 bp, Artificial Sequence
  Description of Artificial Sequence: Synthetic oligonucleotide
  Target: ATXN2; (-) strand; PAM type: YTN; PAM sequence: CTG
tgttagccaggatggccttg

SEQ ID NO: 85009 - DNA, 20 bp, Artificial Sequence
  Description of Artificial Sequence: Synthetic oligonucleotide
  Target: ATXN2; (-) strand; PAM type: YTN; PAM sequence: TTC
actgtgttagccaggatggc

SEQ ID NO: 85010 - DNA, 20 bp, Artificial Sequence
  Description of Artificial Sequence: Synthetic oligonucleotide
  Target: ATXN2; (-) strand; PAM type: YTN; PAM sequence: TTT
cactgtgttagccaggatgg

SEQ ID NO: 85011 - DNA, 20 bp, Artificial Sequence
  Description of Artificial Sequence: Synthetic oligonucleotide
  Target: ATXN2; (-) strand; PAM type: YTN; PAM sequence: TTA
gtagagacggggtttcactg

SEQ ID NO: 85012 - DNA, 20 bp, Artificial Sequence
  Description of Artificial Sequence: Synthetic oligonucleotide
  Target: ATXN2; (-) strand; PAM type: YTN; PAM sequence: TTT
agtagagacggggtttcact

SEQ ID NO: 85013 - DNA, 20 bp, Artificial Sequence
  Description of Artificial Sequence: Synthetic oligonucleotide
  Target: ATXN2; (-) strand; PAM type: YTN; PAM sequence: TTT
tagtagagacggggtttcac

SEQ ID NO: 85014 - DNA, 20 bp, Artificial Sequence
  Description of Artificial Sequence: Synthetic oligonucleotide
  Target: ATXN2; (-) strand; PAM type: YTN; PAM sequence: TTT
ttagtagagacggggtttca

SEQ ID NO: 85015 - DNA, 20 bp, Artificial Sequence
  Description of Artificial Sequence: Synthetic oligonucleotide
  Target: ATXN2; (-) strand; PAM type: YTN; PAM sequence: TTG
tatttttagtagagacgggg

SEQ ID NO: 85016 - DNA, 20 bp, Artificial Sequence
  Description of Artificial Sequence: Synthetic oligonucleotide
  Target: ATXN2; (-) strand; PAM type: YTN; PAM sequence: TTT
gtatttttagtagagacggg

SEQ ID NO: 85017 - DNA, 20 bp, Artificial Sequence
  Description of Artificial Sequence: Synthetic oligonucleotide
  Target: ATXN2; (-) strand; PAM type: YTN; PAM sequence: TTT
tgtatttttagtagagacgg

SEQ ID NO: 85018 - DNA, 20 bp, Artificial Sequence
  Description of Artificial Sequence: Synthetic oligonucleotide
  Target: ATXN2; (-) strand; PAM type: YTN; PAM sequence: TTT
ttgtatttttagtagagacg

SEQ ID NO: 85019 - DNA, 20 bp, Artificial Sequence
  Description of Artificial Sequence: Synthetic oligonucleotide
  Target: ATXN2; (-) strand; PAM type: YTN; PAM sequence: TTT
tttgtatttttagtagagac

SEQ ID NO: 85020 - DNA, 20 bp, Artificial Sequence
  Description of Artificial Sequence: Synthetic oligonucleotide
  Target: ATXN2; (-) strand; PAM type: YTN; PAM sequence: TTT
ttttgtatttttagtagaga

SEQ ID NO: 85021 - DNA, 20 bp, Artificial Sequence
  Description of Artificial Sequence: Synthetic oligonucleotide
  Target: ATXN2; (-) strand; PAM type: YTN; PAM sequence: CTA
tttttttgtatttttagtag

SEQ ID NO: 85022 - DNA, 20 bp, Artificial Sequence
  Description of Artificial Sequence: Synthetic oligonucleotide
  Target: ATXN2; (-) strand; PAM type: YTN; PAM sequence: CTA
caggcgcccgccaccacacc

SEQ ID NO: 85023 - DNA, 20 bp, Artificial Sequence
  Description of Artificial Sequence: Synthetic oligonucleotide
  Target: ATXN2; (-) strand; PAM type: YTN; PAM sequence: CTG
ggactacaggcgcccgccac

SEQ ID NO: 85024 - DNA, 20 bp, Artificial Sequence
  Description of Artificial Sequence: Synthetic oligonucleotide
  Target: ATXN2; (-) strand; PAM type: YTN; PAM sequence: CTC
ccaagtagctgggactacag

SEQ ID NO: 85025 - DNA, 20 bp, Artificial Sequence
  Description of Artificial Sequence: Synthetic oligonucleotide
  Target: ATXN2; (-) strand; PAM type: YTN; PAM sequence: CTC
agcctcccaagtagctggga

SEQ ID NO: 85026 - DNA, 20 bp, Artificial Sequence
  Description of Artificial Sequence: Synthetic oligonucleotide
  Target: ATXN2; (-) strand; PAM type: YTN; PAM sequence: CTG
cctcagcctcccaagtagct

SEQ ID NO: 85027 - DNA, 20 bp, Artificial Sequence
  Description of Artificial Sequence: Synthetic oligonucleotide
  Target: ATXN2; (-) strand; PAM type: YTN; PAM sequence: CTC
ctgcctcagcctcccaagta

SEQ ID NO: 85028 - DNA, 20 bp, Artificial Sequence
  Description of Artificial Sequence: Synthetic oligonucleotide
  Target: ATXN2; (-) strand; PAM type: YTN; PAM sequence: TTC
tcctgcctcagcctcccaag

SEQ ID NO: 85029 - DNA, 20 bp, Artificial Sequence
  Description of Artificial Sequence: Synthetic oligonucleotide
  Target: ATXN2; (-) strand; PAM type: YTN; PAM sequence: TTC
atgccattctcctgcctcag

SEQ ID NO: 85030 - DNA, 20 bp, Artificial Sequence
  Description of Artificial Sequence: Synthetic oligonucleotide
  Target: ATXN2; (-) strand; PAM type: YTN; PAM sequence: CTC
ccgagttcatgccattctcc

SEQ ID NO: 85031 - DNA, 20 bp, Artificial Sequence
  Description of Artificial Sequence: Synthetic oligonucleotide
  Target: ATXN2; (-) strand; PAM type: YTN; PAM sequence: CTC
cgcctcccgagttcatgcca

SEQ ID NO: 85032 - DNA, 20 bp, Artificial Sequence
  Description of Artificial Sequence: Synthetic oligonucleotide
  Target: ATXN2; (-) strand; PAM type: YTN; PAM sequence: CTG
caagctccgcctcccgagtt

SEQ ID NO: 85033 - DNA, 20 bp, Artificial Sequence
  Description of Artificial Sequence: Synthetic oligonucleotide
  Target: ATXN2; (-) strand; PAM type: YTN; PAM sequence: CTC
actgcaagctccgcctcccg

SEQ ID NO: 85034 - DNA, 20 bp, Artificial Sequence
  Description of Artificial Sequence: Synthetic oligonucleotide
  Target: ATXN2; (-) strand; PAM type: YTN; PAM sequence: CTC
acctcactgcaagctccgcc

SEQ ID NO: 85035 - DNA, 20 bp, Artificial Sequence
  Description of Artificial Sequence: Synthetic oligonucleotide
  Target: ATXN2; (-) strand; PAM type: YTN; PAM sequence: CTG
gagtgcagtggcgccatctc

SEQ ID NO: 85036 - DNA, 20 bp, Artificial Sequence
  Description of Artificial Sequence: Synthetic oligonucleotide
  Target: ATXN2; (-) strand; PAM type: YTN; PAM sequence: TTG
cccaggctggagtgcagtgg

SEQ ID NO: 85037 - DNA, 20 bp, Artificial Sequence
  Description of Artificial Sequence: Synthetic oligonucleotide
  Target: ATXN2; (-) strand; PAM type: YTN; PAM sequence: CTG
ttgcccaggctggagtgcag

SEQ ID NO: 85038 - DNA, 20 bp, Artificial Sequence
  Description of Artificial Sequence: Synthetic oligonucleotide
  Target: ATXN2; (-) strand; PAM type: YTN; PAM sequence: CTC
tgttgcccaggctggagtgc

SEQ ID NO: 85039 - DNA, 20 bp, Artificial Sequence
  Description of Artificial Sequence: Synthetic oligonucleotide
  Target: ATXN2; (-) strand; PAM type: YTN; PAM sequence: CTC
gctctgttgcccaggctgga

SEQ ID NO: 85040 - DNA, 20 bp, Artificial Sequence
  Description of Artificial Sequence: Synthetic oligonucleotide
  Target: ATXN2; (-) strand; PAM type: YTN; PAM sequence: TTG
agacagagtctcgctctgtt

SEQ ID NO: 85041 - DNA, 20 bp, Artificial Sequence
  Description of Artificial Sequence: Synthetic oligonucleotide
  Target: ATXN2; (-) strand; PAM type: YTN; PAM sequence: TTT
gagacagagtctcgctctgt

SEQ ID NO: 85042 - DNA, 20 bp, Artificial Sequence
  Description of Artificial Sequence: Synthetic oligonucleotide
  Target: ATXN2; (-) strand; PAM type: YTN; PAM sequence: TTT
tgagacagagtctcgctctg

SEQ ID NO: 85043 - DNA, 20 bp, Artificial Sequence
  Description of Artificial Sequence: Synthetic oligonucleotide
  Target: ATXN2; (-) strand; PAM type: YTN; PAM sequence: TTT
ttgagacagagtctcgctct

SEQ ID NO: 85044 - DNA, 20 bp, Artificial Sequence
  Description of Artificial Sequence: Synthetic oligonucleotide
  Target: ATXN2; (-) strand; PAM type: YTN; PAM sequence: TTT
tttgagacagagtctcgctc

SEQ ID NO: 85045 - DNA, 20 bp, Artificial Sequence
  Description of Artificial Sequence: Synthetic oligonucleotide
  Target: ATXN2; (-) strand; PAM type: YTN; PAM sequence: TTT
ttttgagacagagtctcgct

SEQ ID NO: 85046 - DNA, 20 bp, Artificial Sequence
  Description of Artificial Sequence: Synthetic oligonucleotide
  Target: ATXN2; (-) strand; PAM type: YTN; PAM sequence: TTT
tttttgagacagagtctcgc

SEQ ID NO: 85047 - DNA, 20 bp, Artificial Sequence
  Description of Artificial Sequence: Synthetic oligonucleotide
  Target: ATXN2; (-) strand; PAM type: YTN; PAM sequence: CTT
ttttttgagacagagtctcg

SEQ ID NO: 85048 - DNA, 20 bp, Artificial Sequence
  Description of Artificial Sequence: Synthetic oligonucleotide
  Target: ATXN2; (-) strand; PAM type: YTN; PAM sequence: TTC
ttttttttgagacagagtct

SEQ ID NO: 85049 - DNA, 20 bp, Artificial Sequence
  Description of Artificial Sequence: Synthetic oligonucleotide
  Target: ATXN2; (-) strand; PAM type: YTN; PAM sequence: TTT
cttttttttgagacagagtc

SEQ ID NO: 85050 - DNA, 20 bp, Artificial Sequence
  Description of Artificial Sequence: Synthetic oligonucleotide
  Target: ATXN2; (-) strand; PAM type: YTN; PAM sequence: TTT
tcttttttttgagacagagt

SEQ ID NO: 85051 - DNA, 20 bp, Artificial Sequence
  Description of Artificial Sequence: Synthetic oligonucleotide
  Target: ATXN2; (-) strand; PAM type: YTN; PAM sequence: TTG
tattttcttttttttgagac

SEQ ID NO: 85052 - DNA, 20 bp, Artificial Sequence
  Description of Artificial Sequence: Synthetic oligonucleotide
  Target: ATXN2; (-) strand; PAM type: YTN; PAM sequence: TTT
gtattttcttttttttgaga

SEQ ID NO: 85053 - DNA, 20 bp, Artificial Sequence
  Description of Artificial Sequence: Synthetic oligonucleotide
  Target: ATXN2; (-) strand; PAM type: YTN; PAM sequence: TTT
tgtattttcttttttttgag

SEQ ID NO: 85054 - DNA, 20 bp, Artificial Sequence
  Description of Artificial Sequence: Synthetic oligonucleotide
  Target: ATXN2; (-) strand; PAM type: YTN; PAM sequence: TTT
ttgtattttcttttttttga

SEQ ID NO: 85055 - DNA, 20 bp, Artificial Sequence
  Description of Artificial Sequence: Synthetic oligonucleotide
  Target: ATXN2; (-) strand; PAM type: YTN; PAM sequence: CTA
atttttgtattttctttttt

SEQ ID NO: 85056 - DNA, 20 bp, Artificial Sequence
  Description of Artificial Sequence: Synthetic oligonucleotide
  Target: ATXN2; (-) strand; PAM type: YTN; PAM sequence: CTA
caggcgcacaccaccatgcc

SEQ ID NO: 85057 - DNA, 20 bp, Artificial Sequence
  Description of Artificial Sequence: Synthetic oligonucleotide
  Target: ATXN2; (-) strand; PAM type: YTN; PAM sequence: TTA
ggactacaggcgcacaccac

SEQ ID NO: 85058 - DNA, 20 bp, Artificial Sequence
  Description of Artificial Sequence: Synthetic oligonucleotide
  Target: ATXN2; (-) strand; PAM type: YTN; PAM sequence: CTC
ccgagtagttaggactacag

SEQ ID NO: 85059 - DNA, 20 bp, Artificial Sequence
  Description of Artificial Sequence: Synthetic oligonucleotide
  Target: ATXN2; (-) strand; PAM type: YTN; PAM sequence: CTC
agcctcccgagtagttagga

SEQ ID NO: 85060 - DNA, 20 bp, Artificial Sequence
  Description of Artificial Sequence: Synthetic oligonucleotide
  Target: ATXN2; (-) strand; PAM type: YTN; PAM sequence: CTG
cctcagcctcccgagtagtt

SEQ ID NO: 85061 - DNA, 20 bp, Artificial Sequence
  Description of Artificial Sequence: Synthetic oligonucleotide
  Target: ATXN2; (-) strand; PAM type: YTN; PAM sequence: CTC
ctgcctcagcctcccgagta

SEQ ID NO: 85062 - DNA, 20 bp, Artificial Sequence
  Description of Artificial Sequence: Synthetic oligonucleotide
  Target: ATXN2; (-) strand; PAM type: YTN; PAM sequence: TTC
tcctgcctcagcctcccgag

SEQ ID NO: 85063 - DNA, 20 bp, Artificial Sequence
  Description of Artificial Sequence: Synthetic oligonucleotide
  Target: ATXN2; (-) strand; PAM type: YTN; PAM sequence: TTC
aagcgattctcctgcctcag

SEQ ID NO: 85064 - DNA, 20 bp, Artificial Sequence
  Description of Artificial Sequence: Synthetic oligonucleotide
  Target: ATXN2; (-) strand; PAM type: YTN; PAM sequence: CTG
ccaggttcaagcgattctcc

SEQ ID NO: 85065 - DNA, 20 bp, Artificial Sequence
  Description of Artificial Sequence: Synthetic oligonucleotide
  Target: ATXN2; (-) strand; PAM type: YTN; PAM sequence: CTG
cctgccaggttcaagcgatt

SEQ ID NO: 85066 - DNA, 20 bp, Artificial Sequence
  Description of Artificial Sequence: Synthetic oligonucleotide
  Target: ATXN2; (-) strand; PAM type: YTN; PAM sequence: CTC
tgcctgccaggttcaagcga

SEQ ID NO: 85067 - DNA, 20 bp, Artificial Sequence
  Description of Artificial Sequence: Synthetic oligonucleotide
  Target: ATXN2; (-) strand; PAM type: YTN; PAM sequence: CTG
caacctctgcctgccaggtt

SEQ ID NO: 85068 - DNA, 20 bp, Artificial Sequence
  Description of Artificial Sequence: Synthetic oligonucleotide
  Target: ATXN2; (-) strand; PAM type: YTN; PAM sequence: CTC
actgcaacctctgcctgcca

SEQ ID NO: 85069 - DNA, 20 bp, Artificial Sequence
  Description of Artificial Sequence: Synthetic oligonucleotide
  Target: ATXN2; (-) strand; PAM type: YTN; PAM sequence: TTG
actcactgcaacctctgcct

SEQ ID NO: 85070 - DNA, 20 bp, Artificial Sequence
  Description of Artificial Sequence: Synthetic oligonucleotide
  Target: ATXN2; (-) strand; PAM type: YTN; PAM sequence: CTT
gactcactgcaacctctgcc

SEQ ID NO: 85071 - DNA, 20 bp, Artificial Sequence
  Description of Artificial Sequence: Synthetic oligonucleotide
  Target: ATXN2; (-) strand; PAM type: YTN; PAM sequence: CTG
gagtgcagtggcatgatctt

SEQ ID NO: 85072 - DNA, 20 bp, Artificial Sequence
  Description of Artificial Sequence: Synthetic oligonucleotide
  Target: ATXN2; (-) strand; PAM type: YTN; PAM sequence: CTG
tcaccaggctggagtgcagt

SEQ ID NO: 85073 - DNA, 20 bp, Artificial Sequence
  Description of Artificial Sequence: Synthetic oligonucleotide
  Target: ATXN2; (-) strand; PAM type: YTN; PAM sequence: CTC
tgtcaccaggctggagtgca

SEQ ID NO: 85074 - DNA, 20 bp, Artificial Sequence
  Description of Artificial Sequence: Synthetic oligonucleotide
  Target: ATXN2; (-) strand; PAM type: YTN; PAM sequence: TTG
agatggagtgtcactctgtc

SEQ ID NO: 85075 - DNA, 20 bp, Artificial Sequence
  Description of Artificial Sequence: Synthetic oligonucleotide
  Target: ATXN2; (-) strand; PAM type: YTN; PAM sequence: TTT
gagatggagtgtcactctgt

SEQ ID NO: 85076 - DNA, 20 bp, Artificial Sequence
  Description of Artificial Sequence: Synthetic oligonucleotide
  Target: ATXN2; (-) strand; PAM type: YTN; PAM sequence: TTT
tgagatggagtgtcactctg

SEQ ID NO: 85077 - DNA, 20 bp, Artificial Sequence
  Description of Artificial Sequence: Synthetic oligonucleotide
  Target: ATXN2; (-) strand; PAM type: YTN; PAM sequence: TTT
ttgagatggagtgtcactct

SEQ ID NO: 85078 - DNA, 20 bp, Artificial Sequence
  Description of Artificial Sequence: Synthetic oligonucleotide
  Target: ATXN2; (-) strand; PAM type: YTN; PAM sequence: TTT
tttgagatggagtgtcactc

SEQ ID NO: 85079 - DNA, 20 bp, Artificial Sequence
  Description of Artificial Sequence: Synthetic oligonucleotide
  Target: ATXN2; (-) strand; PAM type: YTN; PAM sequence: TTT
ttttgagatggagtgtcact

SEQ ID NO: 85080 - DNA, 20 bp, Artificial Sequence
  Description of Artificial Sequence: Synthetic oligonucleotide
  Target: ATXN2; (-) strand; PAM type: YTN; PAM sequence: TTA
tttttttgagatggagtgtc

SEQ ID NO: 85081 - DNA, 20 bp, Artificial Sequence
  Description of Artificial Sequence: Synthetic oligonucleotide
  Target: ATXN2; (-) strand; PAM type: YTN; PAM sequence: CTA
atatatatatatatatatat

SEQ ID NO: 85082 - DNA, 20 bp, Artificial Sequence
  Description of Artificial Sequence: Synthetic oligonucleotide
  Target: ATXN2; (-) strand; PAM type: YTN; PAM sequence: CTC
taatatatatatatatatat

SEQ ID NO: 85083 - DNA, 20 bp, Artificial Sequence
  Description of Artificial Sequence: Synthetic oligonucleotide
  Target: ATXN2; (-) strand; PAM type: YTN; PAM sequence: TTA
ctctaatatatatatatata

SEQ ID NO: 85084 - DNA, 20 bp, Artificial Sequence
  Description of Artificial Sequence: Synthetic oligonucleotide
  Target: ATXN2; (-) strand; PAM type: YTN; PAM sequence: TTA
aggtgcattactctaatata

SEQ ID NO: 85085 - DNA, 20 bp, Artificial Sequence
  Description of Artificial Sequence: Synthetic oligonucleotide
  Target: ATXN2; (-) strand; PAM type: YTN; PAM sequence: TTT
aaggtgcattactctaatat

SEQ ID NO: 85086 - DNA, 20 bp, Artificial Sequence
  Description of Artificial Sequence: Synthetic oligonucleotide
  Target: ATXN2; (-) strand; PAM type: YTN; PAM sequence: TTT
taaggtgcattactctaata

SEQ ID NO: 85087 - DNA, 20 bp, Artificial Sequence
  Description of Artificial Sequence: Synthetic oligonucleotide
  Target: ATXN2; (-) strand; PAM type: YTN; PAM sequence: CTT
ttaaggtgcattactctaat

SEQ ID NO: 85088 - DNA, 20 bp, Artificial Sequence
  Description of Artificial Sequence: Synthetic oligonucleotide
  Target: ATXN2; (-) strand; PAM type: YTN; PAM sequence: TTC
ttttaaggtgcattactcta

SEQ ID NO: 85089 - DNA, 20 bp, Artificial Sequence
  Description of Artificial Sequence: Synthetic oligonucleotide
  Target: ATXN2; (-) strand; PAM type: YTN; PAM sequence: CTT
cttttaaggtgcattactct

SEQ ID NO: 85090 - DNA, 20 bp, Artificial Sequence
  Description of Artificial Sequence: Synthetic oligonucleotide
  Target: ATXN2; (-) strand; PAM type: YTN; PAM sequence: CTG
acacaccacttcttttaagg

SEQ ID NO: 85091 - DNA, 20 bp, Artificial Sequence
  Description of Artificial Sequence: Synthetic oligonucleotide
  Target: ATXN2; (-) strand; PAM type: YTN; PAM sequence: CTG
cctgacacaccacttctttt

SEQ ID NO: 85092 - DNA, 20 bp, Artificial Sequence
  Description of Artificial Sequence: Synthetic oligonucleotide
  Target: ATXN2; (-) strand; PAM type: YTN; PAM sequence: TTG
ggaccgccatagaggctgcc

SEQ ID NO: 85093 - DNA, 20 bp, Artificial Sequence
  Description of Artificial Sequence: Synthetic oligonucleotide
  Target: ATXN2; (-) strand; PAM type: YTN; PAM sequence: TTT
gggaccgccatagaggctgc

SEQ ID NO: 85094 - DNA, 20 bp, Artificial Sequence
  Description of Artificial Sequence: Synthetic oligonucleotide
  Target: ATXN2; (-) strand; PAM type: YTN; PAM sequence: CTG
aacaccaggaggcaagaatc

SEQ ID NO: 85095 - DNA, 20 bp, Artificial Sequence
  Description of Artificial Sequence: Synthetic oligonucleotide
  Target: ATXN2; (-) strand; PAM type: YTN; PAM sequence: TTC
acagtgtctgaacaccagga

SEQ ID NO: 85096 - DNA, 20 bp, Artificial Sequence
  Description of Artificial Sequence: Synthetic oligonucleotide
  Target: ATXN2; (-) strand; PAM type: YTN; PAM sequence: TTT
cacagtgtctgaacaccagg

SEQ ID NO: 85097 - DNA, 20 bp, Artificial Sequence
  Description of Artificial Sequence: Synthetic oligonucleotide
  Target: ATXN2; (-) strand; PAM type: YTN; PAM sequence: TTC
aggtggggaggatttcacag

SEQ ID NO: 85098 - DNA, 20 bp, Artificial Sequence
  Description of Artificial Sequence: Synthetic oligonucleotide
  Target: ATXN2; (-) strand; PAM type: YTN; PAM sequence: TTA
aaattcaggtggggaggatt

SEQ ID NO: 85099 - DNA, 20 bp, Artificial Sequence
  Description of Artificial Sequence: Synthetic oligonucleotide
  Target: ATXN2; (-) strand; PAM type: YTN; PAM sequence: TTT
aaaattcaggtggggaggat

SEQ ID NO: 85100 - DNA, 20 bp, Artificial Sequence
  Description of Artificial Sequence: Synthetic oligonucleotide
  Target: ATXN2; (-) strand; PAM type: YTN; PAM sequence: TTT
taaaattcaggtggggagga

SEQ ID NO: 85101 - DNA, 20 bp, Artificial Sequence
  Description of Artificial Sequence: Synthetic oligonucleotide
  Target: ATXN2; (-) strand; PAM type: YTN; PAM sequence: TTG
ttttaaaattcaggtgggga

SEQ ID NO: 85102 - DNA, 20 bp, Artificial Sequence
  Description of Artificial Sequence: Synthetic oligonucleotide
  Target: ATXN2; (-) strand; PAM type: YTN; PAM sequence: CTC
gaaaaaaaaaaaaaaaagta

SEQ ID NO: 85103 - DNA, 20 bp, Artificial Sequence
  Description of Artificial Sequence: Synthetic oligonucleotide
  Target: ATXN2; (-) strand; PAM type: YTN; PAM sequence: CTG
tctcgaaaaaaaaaaaaaaa

SEQ ID NO: 85104 - DNA, 20 bp, Artificial Sequence
  Description of Artificial Sequence: Synthetic oligonucleotide
  Target: ATXN2; (-) strand; PAM type: YTN; PAM sequence: TTG
gcagagtaagaccctgtctc

SEQ ID NO: 85105 - DNA, 20 bp, Artificial Sequence
  Description of Artificial Sequence: Synthetic oligonucleotide
  Target: ATXN2; (-) strand; PAM type: YTN; PAM sequence: CTG
gttggcagagtaagaccctg

SEQ ID NO: 85106 - DNA, 20 bp, Artificial Sequence
  Description of Artificial Sequence: Synthetic oligonucleotide
  Target: ATXN2; (-) strand; PAM type: YTN; PAM sequence: CTC
cagcctggttggcagagtaa

SEQ ID NO: 85107 - DNA, 20 bp, Artificial Sequence
  Description of Artificial Sequence: Synthetic oligonucleotide
  Target: ATXN2; (-) strand; PAM type: YTN; PAM sequence: CTG
tactccagcctggttggcag

SEQ ID NO: 85108 - DNA, 20 bp, Artificial Sequence
  Description of Artificial Sequence: Synthetic oligonucleotide
  Target: ATXN2; (-) strand; PAM type: YTN; PAM sequence: CTG
tggaactgtactccagcctg

SEQ ID NO: 85109 - DNA, 20 bp, Artificial Sequence
  Description of Artificial Sequence: Synthetic oligonucleotide
  Target: ATXN2; (-) strand; PAM type: YTN; PAM sequence: CTG
cagtgagccagactgtggaa

SEQ ID NO: 85110 - DNA, 20 bp, Artificial Sequence
  Description of Artificial Sequence: Synthetic oligonucleotide
  Target: ATXN2; (-) strand; PAM type: YTN; PAM sequence: CTG
ggaggcagacgctgcagtga

SEQ ID NO: 85111 - DNA, 20 bp, Artificial Sequence
  Description of Artificial Sequence: Synthetic oligonucleotide
  Target: ATXN2; (-) strand; PAM type: YTN; PAM sequence: CTC
gggaccgcctgggaggcaga

SEQ ID NO: 85112 - DNA, 20 bp, Artificial Sequence
  Description of Artificial Sequence: Synthetic oligonucleotide
  Target: ATXN2; (-) strand; PAM type: YTN; PAM sequence: TTG
ctcgggaccgcctgggaggc

SEQ ID NO: 85113 - DNA, 20 bp, Artificial Sequence
  Description of Artificial Sequence: Synthetic oligonucleotide
  Target: ATXN2; (-) strand; PAM type: YTN; PAM sequence: CTG
agatgggaggattgctcggg

SEQ ID NO: 85114 - DNA, 20 bp, Artificial Sequence
  Description of Artificial Sequence: Synthetic oligonucleotide
  Target: ATXN2; (-) strand; PAM type: YTN; PAM sequence: CTG
aaggctgagatgggaggatt

SEQ ID NO: 85115 - DNA, 20 bp, Artificial Sequence
  Description of Artificial Sequence: Synthetic oligonucleotide
  Target: ATXN2; (-) strand; PAM type: YTN; PAM sequence: CTC
tgaaggctgagatgggagga

SEQ ID NO: 85116 - DNA, 20 bp, Artificial Sequence
  Description of Artificial Sequence: Synthetic oligonucleotide
  Target: ATXN2; (-) strand; PAM type: YTN; PAM sequence: CTG
atactctgaaggctgagatg

SEQ ID NO: 85117 - DNA, 20 bp, Artificial Sequence
  Description of Artificial Sequence: Synthetic oligonucleotide
  Target: ATXN2; (-) strand; PAM type: YTN; PAM sequence: CTG
tagtccctgatactctgaag

SEQ ID NO: 85118 - DNA, 20 bp, Artificial Sequence
  Description of Artificial Sequence: Synthetic oligonucleotide
  Target: ATXN2; (-) strand; PAM type: YTN; PAM sequence: CTG
ggtgtggtggtgcacgcctg

SEQ ID NO: 85119 - DNA, 20 bp, Artificial Sequence
  Description of Artificial Sequence: Synthetic oligonucleotide
  Target: ATXN2; (-) strand; PAM type: YTN; PAM sequence: TTA
gctgggtgtggtggtgcacg

SEQ ID NO: 85120 - DNA, 20 bp, Artificial Sequence
  Description of Artificial Sequence: Synthetic oligonucleotide
  Target: ATXN2; (-) strand; PAM type: YTN; PAM sequence: CTA
acaaaaattagctgggtgtg

SEQ ID NO: 85121 - DNA, 20 bp, Artificial Sequence
  Description of Artificial Sequence: Synthetic oligonucleotide
  Target: ATXN2; (-) strand; PAM type: YTN; PAM sequence: CTA
aaaacaaacaaacaaatccc

SEQ ID NO: 85122 - DNA, 20 bp, Artificial Sequence
  Description of Artificial Sequence: Synthetic oligonucleotide
  Target: ATXN2; (-) strand; PAM type: YTN; PAM sequence: CTG
cctaaaaacaaacaaacaaa

SEQ ID NO: 85123 - DNA, 20 bp, Artificial Sequence
  Description of Artificial Sequence: Synthetic oligonucleotide
  Target: ATXN2; (-) strand; PAM type: YTN; PAM sequence: CTC
tgcctaaaaacaaacaaaca

SEQ ID NO: 85124 - DNA, 20 bp, Artificial Sequence
  Description of Artificial Sequence: Synthetic oligonucleotide
  Target: ATXN2; (-) strand; PAM type: YTN; PAM sequence: CTG
ggcaagacagcaagactctg

SEQ ID NO: 85125 - DNA, 20 bp, Artificial Sequence
  Description of Artificial Sequence: Synthetic oligonucleotide
  Target: ATXN2; (-) strand; PAM type: YTN; PAM sequence: TTC
cagcctgggcaagacagcaa

SEQ ID NO: 85126 - DNA, 20 bp, Artificial Sequence
  Description of Artificial Sequence: Synthetic oligonucleotide
  Target: ATXN2; (-) strand; PAM type: YTN; PAM sequence: CTG
cattccagcctgggcaagac

SEQ ID NO: 85127 - DNA, 20 bp, Artificial Sequence
  Description of Artificial Sequence: Synthetic oligonucleotide
  Target: ATXN2; (-) strand; PAM type: YTN; PAM sequence: TTG
tgccactgcattccagcctg

SEQ ID NO: 85128 - DNA, 20 bp, Artificial Sequence
  Description of Artificial Sequence: Synthetic oligonucleotide
  Target: ATXN2; (-) strand; PAM type: YTN; PAM sequence: CTG
agattgtgccactgcattcc

SEQ ID NO: 85129 - DNA, 20 bp, Artificial Sequence
  Description of Artificial Sequence: Synthetic oligonucleotide
  Target: ATXN2; (-) strand; PAM type: YTN; PAM sequence: TTA
cagtgaactgagattgtgcc

SEQ ID NO: 85130 - DNA, 20 bp, Artificial Sequence
  Description of Artificial Sequence: Synthetic oligonucleotide
  Target: ATXN2; (-) strand; PAM type: YTN; PAM sequence: TTG
aacccaggaggtggaggtta

SEQ ID NO: 85131 - DNA, 20 bp, Artificial Sequence
  Description of Artificial Sequence: Synthetic oligonucleotide
  Target: ATXN2; (-) strand; PAM type: YTN; PAM sequence: CTT
gaacccaggaggtggaggtt

SEQ ID NO: 85132 - DNA, 20 bp, Artificial Sequence
  Description of Artificial Sequence: Synthetic oligonucleotide
  Target: ATXN2; (-) strand; PAM type: YTN; PAM sequence: CTG
agcggggaggatcacttgaa

SEQ ID NO: 85133 - DNA, 20 bp, Artificial Sequence
  Description of Artificial Sequence: Synthetic oligonucleotide
  Target: ATXN2; (-) strand; PAM type: YTN; PAM sequence: CTA
catggaaggctgagcgggga

SEQ ID NO: 85134 - DNA, 20 bp, Artificial Sequence
  Description of Artificial Sequence: Synthetic oligonucleotide
  Target: ATXN2; (-) strand; PAM type: YTN; PAM sequence: CTA
taatcccagctacatggaag

SEQ ID NO: 85135 - DNA, 20 bp, Artificial Sequence
  Description of Artificial Sequence: Synthetic oligonucleotide
  Target: ATXN2; (-) strand; PAM type: YTN; PAM sequence: CTG
gacatggtggtgagtgccta

SEQ ID NO: 85136 - DNA, 20 bp, Artificial Sequence
  Description of Artificial Sequence: Synthetic oligonucleotide
  Target: ATXN2; (-) strand; PAM type: YTN; PAM sequence: TTA
gctggacatggtggtgagtg

SEQ ID NO: 85137 - DNA, 20 bp, Artificial Sequence
  Description of Artificial Sequence: Synthetic oligonucleotide
  Target: ATXN2; (-) strand; PAM type: YTN; PAM sequence: CTA
aaaatacaaaaattagctgg

SEQ ID NO: 85138 - DNA, 20 bp, Artificial Sequence
  Description of Artificial Sequence: Synthetic oligonucleotide
  Target: ATXN2; (-) strand; PAM type: YTN; PAM sequence: CTA
ctaaaaatacaaaaattagc

SEQ ID NO: 85139 - DNA, 20 bp, Artificial Sequence
  Description of Artificial Sequence: Synthetic oligonucleotide
  Target: ATXN2; (-) strand; PAM type: YTN; PAM sequence: CTC
tactaaaaatacaaaaatta

SEQ ID NO: 85140 - DNA, 20 bp, Artificial Sequence
  Description of Artificial Sequence: Synthetic oligonucleotide
  Target: ATXN2; (-) strand; PAM type: YTN; PAM sequence: CTG
gccaacacgaaaaaatgtcg

SEQ ID NO: 85141 - DNA, 20 bp, Artificial Sequence
  Description of Artificial Sequence: Synthetic oligonucleotide
  Target: ATXN2; (-) strand; PAM type: YTN; PAM sequence: TTC
tggccaacacgaaaaaatgt

SEQ ID NO: 85142 - DNA, 20 bp, Artificial Sequence
  Description of Artificial Sequence: Synthetic oligonucleotide
  Target: ATXN2; (-) strand; PAM type: YTN; PAM sequence: TTG
aggtgaggagttctggccaa

SEQ ID NO: 85143 - DNA, 20 bp, Artificial Sequence
  Description of Artificial Sequence: Synthetic oligonucleotide
  Target: ATXN2; (-) strand; PAM type: YTN; PAM sequence: CTT
gaggtgaggagttctggcca

SEQ ID NO: 85144 - DNA, 20 bp, Artificial Sequence
  Description of Artificial Sequence: Synthetic oligonucleotide
  Target: ATXN2; (-) strand; PAM type: YTN; PAM sequence: TTG
ggaggccaaggcaggcagat

SEQ ID NO: 85145 - DNA, 20 bp, Artificial Sequence
  Description of Artificial Sequence: Synthetic oligonucleotide
  Target: ATXN2; (-) strand; PAM type: YTN; PAM sequence: TTT
gggaggccaaggcaggcaga

SEQ ID NO: 85146 - DNA, 20 bp, Artificial Sequence
  Description of Artificial Sequence: Synthetic oligonucleotide
  Target: ATXN2; (-) strand; PAM type: YTN; PAM sequence: CTT
tgggaggccaaggcaggcag

SEQ ID NO: 85147 - DNA, 20 bp, Artificial Sequence
  Description of Artificial Sequence: Synthetic oligonucleotide
  Target: ATXN2; (+) strand; PAM type: YTN; PAM sequence: CTA
ggccattgtcttctgggtac

SEQ ID NO: 85148 - DNA, 20 bp, Artificial Sequence
  Description of Artificial Sequence: Synthetic oligonucleotide
  Target: ATXN2; (+) strand; PAM type: YTN; PAM sequence: TTG
tcttctgggtacgctggaac

SEQ ID NO: 85149 - DNA, 20 bp, Artificial Sequence
  Description of Artificial Sequence: Synthetic oligonucleotide
  Target: ATXN2; (+) strand; PAM type: YTN; PAM sequence: CTT
ctgggtacgctggaacccag

SEQ ID NO: 85150 - DNA, 20 bp, Artificial Sequence
  Description of Artificial Sequence: Synthetic oligonucleotide
  Target: ATXN2; (+) strand; PAM type: YTN; PAM sequence: TTC
tgggtacgctggaacccaga

SEQ ID NO: 85151 - DNA, 20 bp, Artificial Sequence
  Description of Artificial Sequence: Synthetic oligonucleotide
  Target: ATXN2; (+) strand; PAM type: YTN; PAM sequence: CTG
ggtacgctggaacccagact

SEQ ID NO: 85152 - DNA, 20 bp, Artificial Sequence
  Description of Artificial Sequence: Synthetic oligonucleotide
  Target: ATXN2; (+) strand; PAM type: YTN; PAM sequence: CTG
gaacccagactcagcccagg

SEQ ID NO: 85153 - DNA, 20 bp, Artificial Sequence
  Description of Artificial Sequence: Synthetic oligonucleotide
  Target: ATXN2; (+) strand; PAM type: YTN; PAM sequence: CTC
agcccaggacataaggtagc

SEQ ID NO: 85154 - DNA, 20 bp, Artificial Sequence
  Description of Artificial Sequence: Synthetic oligonucleotide
  Target: ATXN2; (+) strand; PAM type: YTN; PAM sequence: CTG
cgaccaccatcacccatctt

SEQ ID NO: 85155 - DNA, 20 bp, Artificial Sequence
  Description of Artificial Sequence: Synthetic oligonucleotide
  Target: ATXN2; (+) strand; PAM type: YTN; PAM sequence: CTT
atctaacaggtgcttctcct

SEQ ID NO: 85156 - DNA, 20 bp, Artificial Sequence
  Description of Artificial Sequence: Synthetic oligonucleotide
  Target: ATXN2; (+) strand; PAM type: YTN; PAM sequence: TTA
tctaacaggtgcttctcctg

SEQ ID NO: 85157 - DNA, 20 bp, Artificial Sequence
  Description of Artificial Sequence: Synthetic oligonucleotide
  Target: ATXN2; (+) strand; PAM type: YTN; PAM sequence: CTA
acaggtgcttctcctggggg

SEQ ID NO: 85158 - DNA, 20 bp, Artificial Sequence
  Description of Artificial Sequence: Synthetic oligonucleotide
  Target: ATXN2; (+) strand; PAM type: YTN; PAM sequence: CTT
ctcctggggggctgctggac

SEQ ID NO: 85159 - DNA, 20 bp, Artificial Sequence
  Description of Artificial Sequence: Synthetic oligonucleotide
  Target: ATXN2; (+) strand; PAM type: YTN; PAM sequence: TTC
tcctggggggctgctggacc

SEQ ID NO: 85160 - DNA, 20 bp, Artificial Sequence
  Description of Artificial Sequence: Synthetic oligonucleotide
  Target: ATXN2; (+) strand; PAM type: YTN; PAM sequence: CTC
ctggggggctgctggacccg

SEQ ID NO: 85161 - DNA, 20 bp, Artificial Sequence
  Description of Artificial Sequence: Synthetic oligonucleotide
  Target: ATXN2; (+) strand; PAM type: YTN; PAM sequence: CTG
gggggctgctggacccggcc

SEQ ID NO: 85162 - DNA, 20 bp, Artificial Sequence
  Description of Artificial Sequence: Synthetic oligonucleotide
  Target: ATXN2; (+) strand; PAM type: YTN; PAM sequence: CTG
ctggacccggcctgccagaa

SEQ ID NO: 85163 - DNA, 20 bp, Artificial Sequence
  Description of Artificial Sequence: Synthetic oligonucleotide
  Target: ATXN2; (+) strand; PAM type: YTN; PAM sequence: CTG
gacccggcctgccagaagac

SEQ ID NO: 85164 - DNA, 20 bp, Artificial Sequence
  Description of Artificial Sequence: Synthetic oligonucleotide
  Target: ATXN2; (+) strand; PAM type: YTN; PAM sequence: CTG
ccagaagacggaccatttcc

SEQ ID NO: 85165 - DNA, 20 bp, Artificial Sequence
  Description of Artificial Sequence: Synthetic oligonucleotide
  Target: ATXN2; (+) strand; PAM type: YTN; PAM sequence: TTT
cctgtcctgctacccctggt

SEQ ID NO: 85166 - DNA, 20 bp, Artificial Sequence
  Description of Artificial Sequence: Synthetic oligonucleotide
  Target: ATXN2; (+) strand; PAM type: YTN; PAM sequence: TTC
ctgtcctgctacccctggtt

SEQ ID NO: 85167 - DNA, 20 bp, Artificial Sequence
  Description of Artificial Sequence: Synthetic oligonucleotide
  Target: ATXN2; (+) strand; PAM type: YTN; PAM sequence: CTG
tcctgctacccctggttcca

SEQ ID NO: 85168 - DNA, 20 bp, Artificial Sequence
  Description of Artificial Sequence: Synthetic oligonucleotide
  Target: ATXN2; (+) strand; PAM type: YTN; PAM sequence: CTG
ctacccctggttccacggcc

SEQ ID NO: 85169 - DNA, 20 bp, Artificial Sequence
  Description of Artificial Sequence: Synthetic oligonucleotide
  Target: ATXN2; (+) strand; PAM type: YTN; PAM sequence: CTA
cccctggttccacggcccca

SEQ ID NO: 85170 - DNA, 20 bp, Artificial Sequence
  Description of Artificial Sequence: Synthetic oligonucleotide
  Target: ATXN2; (+) strand; PAM type: YTN; PAM sequence: CTG
gttccacggccccatctcca

SEQ ID NO: 85171 - DNA, 20 bp, Artificial Sequence
  Description of Artificial Sequence: Synthetic oligonucleotide
  Target: ATXN2; (+) strand; PAM type: YTN; PAM sequence: TTC
cacggccccatctccagagt

SEQ ID NO: 85172 - DNA, 20 bp, Artificial Sequence
  Description of Artificial Sequence: Synthetic oligonucleotide
  Target: ATXN2; (+) strand; PAM type: YTN; PAM sequence: CTC
cagagtgaaagcagctcagc

SEQ ID NO: 85173 - DNA, 20 bp, Artificial Sequence
  Description of Artificial Sequence: Synthetic oligonucleotide
  Target: ATXN2; (+) strand; PAM type: YTN; PAM sequence: CTC
agctggttcagctgcagggc

SEQ ID NO: 85174 - DNA, 20 bp, Artificial Sequence
  Description of Artificial Sequence: Synthetic oligonucleotide
  Target: ATXN2; (+) strand; PAM type: YTN; PAM sequence: CTG
gttcagctgcagggccctga

SEQ ID NO: 85175 - DNA, 20 bp, Artificial Sequence
  Description of Artificial Sequence: Synthetic oligonucleotide
  Target: ATXN2; (+) strand; PAM type: YTN; PAM sequence: TTC
agctgcagggccctgatgct

SEQ ID NO: 85176 - DNA, 20 bp, Artificial Sequence
  Description of Artificial Sequence: Synthetic oligonucleotide
  Target: ATXN2; (+) strand; PAM type: YTN; PAM sequence: CTG
cagggccctgatgctcatgg

SEQ ID NO: 85177 - DNA, 20 bp, Artificial Sequence
  Description of Artificial Sequence: Synthetic oligonucleotide
  Target: ATXN2; (+) strand; PAM type: YTN; PAM sequence: CTG
atgctcatggagtgttcctg

SEQ ID NO: 85178 - DNA, 20 bp, Artificial Sequence
  Description of Artificial Sequence: Synthetic oligonucleotide
  Target: ATXN2; (+) strand; PAM type: YTN; PAM sequence: CTC
atggagtgttcctggtgcgg

SEQ ID NO: 85179 - DNA, 20 bp, Artificial Sequence
  Description of Artificial Sequence: Synthetic oligonucleotide
  Target: ATXN2; (+) strand; PAM type: YTN; PAM sequence: TTC
ctggtgcggcagagcgagac

SEQ ID NO: 85180 - DNA, 20 bp, Artificial Sequence
  Description of Artificial Sequence: Synthetic oligonucleotide
  Target: ATXN2; (+) strand; PAM type: YTN; PAM sequence: CTG
gtgcggcagagcgagacgcg

SEQ ID NO: 85181 - DNA, 20 bp, Artificial Sequence
  Description of Artificial Sequence: Synthetic oligonucleotide
  Target: ATXN2; (+) strand; PAM type: YTN; PAM sequence: CTC
actttcaactttcaggggat

SEQ ID NO: 85182 - DNA, 20 bp, Artificial Sequence
  Description of Artificial Sequence: Synthetic oligonucleotide
  Target: ATXN2; (+) strand; PAM type: YTN; PAM sequence: CTT
tcaactttcaggggatagcc

SEQ ID NO: 85183 - DNA, 20 bp, Artificial Sequence
  Description of Artificial Sequence: Synthetic oligonucleotide
  Target: ATXN2; (+) strand; PAM type: YTN; PAM sequence: TTT
caactttcaggggatagcca

SEQ ID NO: 85184 - DNA, 20 bp, Artificial Sequence
  Description of Artificial Sequence: Synthetic oligonucleotide
  Target: ATXN2; (+) strand; PAM type: YTN; PAM sequence: TTC
aactttcaggggatagccaa

SEQ ID NO: 85185 - DNA, 20 bp, Artificial Sequence
  Description of Artificial Sequence: Synthetic oligonucleotide
  Target: ATXN2; (+) strand; PAM type: YTN; PAM sequence: CTT
tcaggggatagccaaggtat

SEQ ID NO: 85186 - DNA, 20 bp, Artificial Sequence
  Description of Artificial Sequence: Synthetic oligonucleotide
  Target: ATXN2; (+) strand; PAM type: YTN; PAM sequence: TTT
caggggatagccaaggtatg

SEQ ID NO: 85187 - DNA, 20 bp, Artificial Sequence
  Description of Artificial Sequence: Synthetic oligonucleotide
  Target: ATXN2; (+) strand; PAM type: YTN; PAM sequence: TTC
aggggatagccaaggtatgg

SEQ ID NO: 85188 - DNA, 20 bp, Artificial Sequence
  Description of Artificial Sequence: Synthetic oligonucleotide
  Target: ATXN2; (+) strand; PAM type: YTN; PAM sequence: CTC
tccactggagttcagggtcc

SEQ ID NO: 85189 - DNA, 20 bp, Artificial Sequence
  Description of Artificial Sequence: Synthetic oligonucleotide
  Target: ATXN2; (+) strand; PAM type: YTN; PAM sequence: CTC
cactggagttcagggtccta

SEQ ID NO: 85190 - DNA, 20 bp, Artificial Sequence
  Description of Artificial Sequence: Synthetic oligonucleotide
  Target: ATXN2; (+) strand; PAM type: YTN; PAM sequence: CTG
gagttcagggtcctagaggg

SEQ ID NO: 85191 - DNA, 20 bp, Artificial Sequence
  Description of Artificial Sequence: Synthetic oligonucleotide
  Target: ATXN2; (+) strand; PAM type: YTN; PAM sequence: TTC
agggtcctagagggacagcc

SEQ ID NO: 85192 - DNA, 20 bp, Artificial Sequence
  Description of Artificial Sequence: Synthetic oligonucleotide
  Target: ATXN2; (+) strand; PAM type: YTN; PAM sequence: CTA
gagggacagcccgagcccac

SEQ ID NO: 85193 - DNA, 20 bp, Artificial Sequence
  Description of Artificial Sequence: Synthetic oligonucleotide
  Target: ATXN2; (+) strand; PAM type: YTN; PAM sequence: CTC
tcctcccacagcacctgcgc

SEQ ID NO: 85194 - DNA, 20 bp, Artificial Sequence
  Description of Artificial Sequence: Synthetic oligonucleotide
  Target: ATXN2; (+) strand; PAM type: YTN; PAM sequence: CTC
ctcccacagcacctgcgcct

SEQ ID NO: 85195 - DNA, 20 bp, Artificial Sequence
  Description of Artificial Sequence: Synthetic oligonucleotide
  Target: ATXN2; (+) strand; PAM type: YTN; PAM sequence: CTC
ccacagcacctgcgcctgtc

SEQ ID NO: 85196 - DNA, 20 bp, Artificial Sequence
  Description of Artificial Sequence: Synthetic oligonucleotide
  Target: ATXN2; (+) strand; PAM type: YTN; PAM sequence: CTG
cgcctgtcgctgacagagcg

SEQ ID NO: 85197 - DNA, 20 bp, Artificial Sequence
  Description of Artificial Sequence: Synthetic oligonucleotide
  Target: ATXN2; (+) strand; PAM type: YTN; PAM sequence: CTG
tcgctgacagagcggggcca

SEQ ID NO: 85198 - DNA, 20 bp, Artificial Sequence
  Description of Artificial Sequence: Synthetic oligonucleotide
  Target: ATXN2; (+) strand; PAM type: YTN; PAM sequence: CTG
acagagcggggccagtgccg

SEQ ID NO: 85199 - DNA, 20 bp, Artificial Sequence
  Description of Artificial Sequence: Synthetic oligonucleotide
  Target: ATXN2; (+) strand; PAM type: YTN; PAM sequence: CTC
cactttccctcggtcgtgga

SEQ ID NO: 85200 - DNA, 20 bp, Artificial Sequence
  Description of Artificial Sequence: Synthetic oligonucleotide
  Target: ATXN2; (+) strand; PAM type: YTN; PAM sequence: CTT
tccctcggtcgtggacatgc

SEQ ID NO: 85201 - DNA, 20 bp, Artificial Sequence
  Description of Artificial Sequence: Synthetic oligonucleotide
  Target: ATXN2; (+) strand; PAM type: YTN; PAM sequence: TTT
ccctcggtcgtggacatgct

SEQ ID NO: 85202 - DNA, 20 bp, Artificial Sequence
  Description of Artificial Sequence: Synthetic oligonucleotide
  Target: ATXN2; (+) strand; PAM type: YTN; PAM sequence: TTC
cctcggtcgtggacatgctc

SEQ ID NO: 85203 - DNA, 20 bp, Artificial Sequence
  Description of Artificial Sequence: Synthetic oligonucleotide
  Target: ATXN2; (+) strand; PAM type: YTN; PAM sequence: CTC
ggtcgtggacatgctccacc

SEQ ID NO: 85204 - DNA, 20 bp, Artificial Sequence
  Description of Artificial Sequence: Synthetic oligonucleotide
  Target: ATXN2; (+) strand; PAM type: YTN; PAM sequence: CTC
caccacttccagcgctcgcc

SEQ ID NO: 85205 - DNA, 20 bp, Artificial Sequence
  Description of Artificial Sequence: Synthetic oligonucleotide
  Target: ATXN2; (+) strand; PAM type: YTN; PAM sequence: CTT
ccagcgctcgcccatcccac

SEQ ID NO: 85206 - DNA, 20 bp, Artificial Sequence
  Description of Artificial Sequence: Synthetic oligonucleotide
  Target: ATXN2; (+) strand; PAM type: YTN; PAM sequence: TTC
cagcgctcgcccatcccact

SEQ ID NO: 85207 - DNA, 20 bp, Artificial Sequence
  Description of Artificial Sequence: Synthetic oligonucleotide
  Target: ATXN2; (+) strand; PAM type: YTN; PAM sequence: CTC
gcccatcccactcgagtgcg

SEQ ID NO: 85208 - DNA, 20 bp, Artificial Sequence
  Description of Artificial Sequence: Synthetic oligonucleotide
  Target: ATXN2; (+) strand; PAM type: YTN; PAM sequence: CTC
gagtgcggcgccgcctgtga

SEQ ID NO: 85209 - DNA, 20 bp, Artificial Sequence
  Description of Artificial Sequence: Synthetic oligonucleotide
  Target: ATXN2; (+) strand; PAM type: YTN; PAM sequence: CTG
tgatgtccggctctccagct

SEQ ID NO: 85210 - DNA, 20 bp, Artificial Sequence
  Description of Artificial Sequence: Synthetic oligonucleotide
  Target: ATXN2; (+) strand; PAM type: YTN; PAM sequence: CTC
tccagctacgtggtagtcgt

SEQ ID NO: 85211 - DNA, 20 bp, Artificial Sequence
  Description of Artificial Sequence: Synthetic oligonucleotide
  Target: ATXN2; (+) strand; PAM type: YTN; PAM sequence: CTC
cagctacgtggtagtcgtct

SEQ ID NO: 85212 - DNA, 20 bp, Artificial Sequence
  Description of Artificial Sequence: Synthetic oligonucleotide
  Target: ATXN2; (+) strand; PAM type: YTN; PAM sequence: CTA
cgtggtagtcgtctcccaac

SEQ ID NO: 85213 - DNA, 20 bp, Artificial Sequence
  Description of Artificial Sequence: Synthetic oligonucleotide
  Target: ATXN2; (+) strand; PAM type: YTN; PAM sequence: CTC
ccaaccaccaggtctgaccc

SEQ ID NO: 85214 - DNA, 20 bp, Artificial Sequence
  Description of Artificial Sequence: Synthetic oligonucleotide
  Target: ATXN2; (+) strand; PAM type: YTN; PAM sequence: CTG
accctactgccctttgctga

SEQ ID NO: 85215 - DNA, 20 bp, Artificial Sequence
  Description of Artificial Sequence: Synthetic oligonucleotide
  Target: ATXN2; (+) strand; PAM type: YTN; PAM sequence: CTA
ctgccctttgctgaaggggg

SEQ ID NO: 85216 - DNA, 20 bp, Artificial Sequence
  Description of Artificial Sequence: Synthetic oligonucleotide
  Target: ATXN2; (+) strand; PAM type: YTN; PAM sequence: CTG
ccctttgctgaagggggtgg

SEQ ID NO: 85217 - DNA, 20 bp, Artificial Sequence
  Description of Artificial Sequence: Synthetic oligonucleotide
  Target: ATXN2; (+) strand; PAM type: YTN; PAM sequence: CTT
tgctgaagggggtggctgac

SEQ ID NO: 85218 - DNA, 20 bp, Artificial Sequence
  Description of Artificial Sequence: Synthetic oligonucleotide
  Target: ATXN2; (+) strand; PAM type: YTN; PAM sequence: TTT
gctgaagggggtggctgaca

SEQ ID NO: 85219 - DNA, 20 bp, Artificial Sequence
  Description of Artificial Sequence: Synthetic oligonucleotide
  Target: ATXN2; (+) strand; PAM type: YTN; PAM sequence: TTG
ctgaagggggtggctgacac

SEQ ID NO: 85220 - DNA, 20 bp, Artificial Sequence
  Description of Artificial Sequence: Synthetic oligonucleotide
  Target: ATXN2; (+) strand; PAM type: YTN; PAM sequence: CTG
aagggggtggctgacactgg

SEQ ID NO: 85221 - DNA, 20 bp, Artificial Sequence
  Description of Artificial Sequence: Synthetic oligonucleotide
  Target: ATXN2; (+) strand; PAM type: YTN; PAM sequence: CTG
acactgggtagagggtagag

SEQ ID NO: 85222 - DNA, 20 bp, Artificial Sequence
  Description of Artificial Sequence: Synthetic oligonucleotide
  Target: ATXN2; (+) strand; PAM type: YTN; PAM sequence: CTG
ggtagagggtagaggcttgc

SEQ ID NO: 85223 - DNA, 20 bp, Artificial Sequence
  Description of Artificial Sequence: Synthetic oligonucleotide
  Target: ATXN2; (+) strand; PAM type: YTN; PAM sequence: CTT
gctgcagacccaggggtaca

SEQ ID NO: 85224 - DNA, 20 bp, Artificial Sequence
  Description of Artificial Sequence: Synthetic oligonucleotide
  Target: ATXN2; (+) strand; PAM type: YTN; PAM sequence: TTG
ctgcagacccaggggtacag

SEQ ID NO: 85225 - DNA, 20 bp, Artificial Sequence
  Description of Artificial Sequence: Synthetic oligonucleotide
  Target: ATXN2; (+) strand; PAM type: YTN; PAM sequence: CTG
cagacccaggggtacaggta

SEQ ID NO: 85226 - DNA, 20 bp, Artificial Sequence
  Description of Artificial Sequence: Synthetic oligonucleotide
  Target: ATXN2; (+) strand; PAM type: YTN; PAM sequence: CTT
gttctgtgtcctgtcagcac

SEQ ID NO: 85227 - DNA, 20 bp, Artificial Sequence
  Description of Artificial Sequence: Synthetic oligonucleotide
  Target: ATXN2; (+) strand; PAM type: YTN; PAM sequence: TTG
ttctgtgtcctgtcagcact

SEQ ID NO: 85228 - DNA, 20 bp, Artificial Sequence
  Description of Artificial Sequence: Synthetic oligonucleotide
  Target: ATXN2; (+) strand; PAM type: YTN; PAM sequence: TTC
tgtgtcctgtcagcacttgc

SEQ ID NO: 85229 - DNA, 20 bp, Artificial Sequence
  Description of Artificial Sequence: Synthetic oligonucleotide
  Target: ATXN2; (+) strand; PAM type: YTN; PAM sequence: CTG
tgtcctgtcagcacttgcct

SEQ ID NO: 85230 - DNA, 20 bp, Artificial Sequence
  Description of Artificial Sequence: Synthetic oligonucleotide
  Target: ATXN2; (+) strand; PAM type: YTN; PAM sequence: CTG
tcagcacttgcctcaagact

SEQ ID NO: 85231 - DNA, 20 bp, Artificial Sequence
  Description of Artificial Sequence: Synthetic oligonucleotide
  Target: ATXN2; (+) strand; PAM type: YTN; PAM sequence: CTT
gcctcaagactgatggtgtg

SEQ ID NO: 85232 - DNA, 20 bp, Artificial Sequence
  Description of Artificial Sequence: Synthetic oligonucleotide
  Target: ATXN2; (+) strand; PAM type: YTN; PAM sequence: TTG
cctcaagactgatggtgtgg

SEQ ID NO: 85233 - DNA, 20 bp, Artificial Sequence
  Description of Artificial Sequence: Synthetic oligonucleotide
  Target: ATXN2; (+) strand; PAM type: YTN; PAM sequence: CTC
aagactgatggtgtggtctc

SEQ ID NO: 85234 - DNA, 20 bp, Artificial Sequence
  Description of Artificial Sequence: Synthetic oligonucleotide
  Target: ATXN2; (+) strand; PAM type: YTN; PAM sequence: CTG
atggtgtggtctctcttggt

SEQ ID NO: 85235 - DNA, 20 bp, Artificial Sequence
  Description of Artificial Sequence: Synthetic oligonucleotide
  Target: ATXN2; (+) strand; PAM type: YTN; PAM sequence: CTC
tcttggtcacttgtcctagg

SEQ ID NO: 85236 - DNA, 20 bp, Artificial Sequence
  Description of Artificial Sequence: Synthetic oligonucleotide
  Target: ATXN2; (+) strand; PAM type: YTN; PAM sequence: CTC
ttggtcacttgtcctaggtt

SEQ ID NO: 85237 - DNA, 20 bp, Artificial Sequence
  Description of Artificial Sequence: Synthetic oligonucleotide
  Target: ATXN2; (+) strand; PAM type: YTN; PAM sequence: CTT
ggtcacttgtcctaggttcc

SEQ ID NO: 85238 - DNA, 20 bp, Artificial Sequence
  Description of Artificial Sequence: Synthetic oligonucleotide
  Target: ATXN2; (+) strand; PAM type: YTN; PAM sequence: TTG
gtcacttgtcctaggttcct

SEQ ID NO: 85239 - DNA, 20 bp, Artificial Sequence
  Description of Artificial Sequence: Synthetic oligonucleotide
  Target: ATXN2; (+) strand; PAM type: YTN; PAM sequence: CTT
gtcctaggttcctgcaacac

SEQ ID NO: 85240 - DNA, 20 bp, Artificial Sequence
  Description of Artificial Sequence: Synthetic oligonucleotide
  Target: ATXN2; (+) strand; PAM type: YTN; PAM sequence: TTG
tcctaggttcctgcaacacg

SEQ ID NO: 85241 - DNA, 20 bp, Artificial Sequence
  Description of Artificial Sequence: Synthetic oligonucleotide
  Target: ATXN2; (+) strand; PAM type: YTN; PAM sequence: CTA
ggttcctgcaacacggtcct

SEQ ID NO: 85242 - DNA, 20 bp, Artificial Sequence
  Description of Artificial Sequence: Synthetic oligonucleotide
  Target: ATXN2; (+) strand; PAM type: YTN; PAM sequence: TTC
ctgcaacacggtcctcttcc

SEQ ID NO: 85243 - DNA, 20 bp, Artificial Sequence
  Description of Artificial Sequence: Synthetic oligonucleotide
  Target: ATXN2; (+) strand; PAM type: YTN; PAM sequence: CTG
caacacggtcctcttccctt

SEQ ID NO: 85244 - DNA, 20 bp, Artificial Sequence
  Description of Artificial Sequence: Synthetic oligonucleotide
  Target: ATXN2; (+) strand; PAM type: YTN; PAM sequence: CTC
ttccctttctcccttcctca

SEQ ID NO: 85245 - DNA, 20 bp, Artificial Sequence
  Description of Artificial Sequence: Synthetic oligonucleotide
  Target: ATXN2; (+) strand; PAM type: YTN; PAM sequence: CTT
ccctttctcccttcctcact

SEQ ID NO: 85246 - DNA, 20 bp, Artificial Sequence
  Description of Artificial Sequence: Synthetic oligonucleotide
  Target: ATXN2; (+) strand; PAM type: YTN; PAM sequence: TTC
cctttctcccttcctcactg

SEQ ID NO: 85247 - DNA, 20 bp, Artificial Sequence
  Description of Artificial Sequence: Synthetic oligonucleotide
  Target: ATXN2; (+) strand; PAM type: YTN; PAM sequence: CTT
tctcccttcctcactgggat

SEQ ID NO: 85248 - DNA, 20 bp, Artificial Sequence
  Description of Artificial Sequence: Synthetic oligonucleotide
  Target: ATXN2; (+) strand; PAM type: YTN; PAM sequence: TTT
ctcccttcctcactgggatt

SEQ ID NO: 85249 - DNA, 20 bp, Artificial Sequence
  Description of Artificial Sequence: Synthetic oligonucleotide
  Target: ATXN2; (+) strand; PAM type: YTN; PAM sequence: TTC
tcccttcctcactgggattc

SEQ ID NO: 85250 - DNA, 20 bp, Artificial Sequence
  Description of Artificial Sequence: Synthetic oligonucleotide
  Target: ATXN2; (+) strand; PAM type: YTN; PAM sequence: CTC
ccttcctcactgggattcag

SEQ ID NO: 85251 - DNA, 20 bp, Artificial Sequence
  Description of Artificial Sequence: Synthetic oligonucleotide
  Target: ATXN2; (+) strand; PAM type: YTN; PAM sequence: CTT
cctcactgggattcagagtc

SEQ ID NO: 85252 - DNA, 20 bp, Artificial Sequence
  Description of Artificial Sequence: Synthetic oligonucleotide
  Target: ATXN2; (+) strand; PAM type: YTN; PAM sequence: TTC
ctcactgggattcagagtcc

SEQ ID NO: 85253 - DNA, 20 bp, Artificial Sequence
  Description of Artificial Sequence: Synthetic oligonucleotide
  Target: ATXN2; (+) strand; PAM type: YTN; PAM sequence: CTC
actgggattcagagtccctt

SEQ ID NO: 85254 - DNA, 20 bp, Artificial Sequence
  Description of Artificial Sequence: Synthetic oligonucleotide
  Target: ATXN2; (+) strand; PAM type: YTN; PAM sequence: CTG
ggattcagagtcccttcctc

SEQ ID NO: 85255 - DNA, 20 bp, Artificial Sequence
  Description of Artificial Sequence: Synthetic oligonucleotide
  Target: ATXN2; (+) strand; PAM type: YTN; PAM sequence: TTC
agagtcccttcctcactggg

SEQ ID NO: 85256 - DNA, 20 bp, Artificial Sequence
  Description of Artificial Sequence: Synthetic oligonucleotide
  Target: ATXN2; (+) strand; PAM type: YTN; PAM sequence: CTT
cctcactggggttcagagtt

SEQ ID NO: 85257 - DNA, 20 bp, Artificial Sequence
  Description of Artificial Sequence: Synthetic oligonucleotide
  Target: ATXN2; (+) strand; PAM type: YTN; PAM sequence: TTC
ctcactggggttcagagttg

SEQ ID NO: 85258 - DNA, 20 bp, Artificial Sequence
  Description of Artificial Sequence: Synthetic oligonucleotide
  Target: ATXN2; (+) strand; PAM type: YTN; PAM sequence: CTC
actggggttcagagttgggc

SEQ ID NO: 85259 - DNA, 20 bp, Artificial Sequence
  Description of Artificial Sequence: Synthetic oligonucleotide
  Target: ATXN2; (+) strand; PAM type: YTN; PAM sequence: CTG
gggttcagagttgggccttc

SEQ ID NO: 85260 - DNA, 20 bp, Artificial Sequence
  Description of Artificial Sequence: Synthetic oligonucleotide
  Target: ATXN2; (+) strand; PAM type: YTN; PAM sequence: TTC
agagttgggccttccccacc

SEQ ID NO: 85261 - DNA, 20 bp, Artificial Sequence
  Description of Artificial Sequence: Synthetic oligonucleotide
  Target: ATXN2; (+) strand; PAM type: YTN; PAM sequence: TTG
ggccttccccaccttagttc

SEQ ID NO: 85262 - DNA, 20 bp, Artificial Sequence
  Description of Artificial Sequence: Synthetic oligonucleotide
  Target: ATXN2; (+) strand; PAM type: YTN; PAM sequence: CTT
ccccaccttagttcttctgg

SEQ ID NO: 85263 - DNA, 20 bp, Artificial Sequence
  Description of Artificial Sequence: Synthetic oligonucleotide
  Target: ATXN2; (+) strand; PAM type: YTN; PAM sequence: TTC
cccaccttagttcttctggc

SEQ ID NO: 85264 - DNA, 20 bp, Artificial Sequence
  Description of Artificial Sequence: Synthetic oligonucleotide
  Target: ATXN2; (+) strand; PAM type: YTN; PAM sequence: CTT
agttcttctggctgtccccg

SEQ ID NO: 85265 - DNA, 20 bp, Artificial Sequence
  Description of Artificial Sequence: Synthetic oligonucleotide
  Target: ATXN2; (+) strand; PAM type: YTN; PAM sequence: TTA
gttcttctggctgtccccgg

SEQ ID NO: 85266 - DNA, 20 bp, Artificial Sequence
  Description of Artificial Sequence: Synthetic oligonucleotide
  Target: ATXN2; (+) strand; PAM type: YTN; PAM sequence: TTC
ttctggctgtccccgggggc

SEQ ID NO: 85267 - DNA, 20 bp, Artificial Sequence
  Description of Artificial Sequence: Synthetic oligonucleotide
  Target: ATXN2; (+) strand; PAM type: YTN; PAM sequence: CTT
ctggctgtccccgggggctc

SEQ ID NO: 85268 - DNA, 20 bp, Artificial Sequence
  Description of Artificial Sequence: Synthetic oligonucleotide
  Target: ATXN2; (+) strand; PAM type: YTN; PAM sequence: TTC
tggctgtccccgggggctca

SEQ ID NO: 85269 - DNA, 20 bp, Artificial Sequence
  Description of Artificial Sequence: Synthetic oligonucleotide
  Target: ATXN2; (+) strand; PAM type: YTN; PAM sequence: CTG
gctgtccccgggggctcagc

SEQ ID NO: 85270 - DNA, 20 bp, Artificial Sequence
  Description of Artificial Sequence: Synthetic oligonucleotide
  Target: ATXN2; (+) strand; PAM type: YTN; PAM sequence: CTG
tccccgggggctcagcccag

SEQ ID NO: 85271 - DNA, 20 bp, Artificial Sequence
  Description of Artificial Sequence: Synthetic oligonucleotide
  Target: ATXN2; (+) strand; PAM type: YTN; PAM sequence: CTC
agcccagagggtctcccagg

SEQ ID NO: 85272 - DNA, 20 bp, Artificial Sequence
  Description of Artificial Sequence: Synthetic oligonucleotide
  Target: ATXN2; (+) strand; PAM type: YTN; PAM sequence: CTC
ccagggcgatcctcaccccc

SEQ ID NO: 85273 - DNA, 20 bp, Artificial Sequence
  Description of Artificial Sequence: Synthetic oligonucleotide
  Target: ATXN2; (+) strand; PAM type: YTN; PAM sequence: CTC
accccccgagcagatcttcc

SEQ ID NO: 85274 - DNA, 20 bp, Artificial Sequence
  Description of Artificial Sequence: Synthetic oligonucleotide
  Target: ATXN2; (+) strand; PAM type: YTN; PAM sequence: CTT
ccacctggtgccttcgcccg

SEQ ID NO: 85275 - DNA, 20 bp, Artificial Sequence
  Description of Artificial Sequence: Synthetic oligonucleotide
  Target: ATXN2; (+) strand; PAM type: YTN; PAM sequence: TTC
cacctggtgccttcgcccga

SEQ ID NO: 85276 - DNA, 20 bp, Artificial Sequence
  Description of Artificial Sequence: Synthetic oligonucleotide
  Target: ATXN2; (+) strand; PAM type: YTN; PAM sequence: CTG
gtgccttcgcccgaagaact

SEQ ID NO: 85277 - DNA, 20 bp, Artificial Sequence
  Description of Artificial Sequence: Synthetic oligonucleotide
  Target: ATXN2; (+) strand; PAM type: YTN; PAM sequence: CTT
cgcccgaagaactggccaac

SEQ ID NO: 85278 - DNA, 20 bp, Artificial Sequence
  Description of Artificial Sequence: Synthetic oligonucleotide
  Target: ATXN2; (+) strand; PAM type: YTN; PAM sequence: TTC
gcccgaagaactggccaaca

SEQ ID NO: 85279 - DNA, 20 bp, Artificial Sequence
  Description of Artificial Sequence: Synthetic oligonucleotide
  Target: ATXN2; (+) strand; PAM type: YTN; PAM sequence: CTG
gccaacagcctgcagcacct

SEQ ID NO: 85280 - DNA, 20 bp, Artificial Sequence
  Description of Artificial Sequence: Synthetic oligonucleotide
  Target: ATXN2; (+) strand; PAM type: YTN; PAM sequence: CTG
cagcacctggagcatgagcc

SEQ ID NO: 85281 - DNA, 20 bp, Artificial Sequence
  Description of Artificial Sequence: Synthetic oligonucleotide
  Target: ATXN2; (+) strand; PAM type: YTN; PAM sequence: CTG
gagcatgagcctgtgaatcg

SEQ ID NO: 85282 - DNA, 20 bp, Artificial Sequence
  Description of Artificial Sequence: Synthetic oligonucleotide
  Target: ATXN2; (+) strand; PAM type: YTN; PAM sequence: CTG
tgaatcgagcccgggactcg

SEQ ID NO: 85283 - DNA, 20 bp, Artificial Sequence
  Description of Artificial Sequence: Synthetic oligonucleotide
  Target: ATXN2; (+) strand; PAM type: YTN; PAM sequence: CTC
ggactacgaaatggactcat

SEQ ID NO: 85284 - DNA, 20 bp, Artificial Sequence
  Description of Artificial Sequence: Synthetic oligonucleotide
  Target: ATXN2; (+) strand; PAM type: YTN; PAM sequence: CTA
cgaaatggactcatcctccc

SEQ ID NO: 85285 - DNA, 20 bp, Artificial Sequence
  Description of Artificial Sequence: Synthetic oligonucleotide
  Target: ATXN2; (+) strand; PAM type: YTN; PAM sequence: CTC
atcctcccggagccacctgc

SEQ ID NO: 85286 - DNA, 20 bp, Artificial Sequence
  Description of Artificial Sequence: Synthetic oligonucleotide
  Target: ATXN2; (+) strand; PAM type: YTN; PAM sequence: CTC
ccggagccacctgcgggcca

SEQ ID NO: 85287 - DNA, 20 bp, Artificial Sequence
  Description of Artificial Sequence: Synthetic oligonucleotide
  Target: ATXN2; (+) strand; PAM type: YTN; PAM sequence: CTG
cgggccatagacaatcagta

SEQ ID NO: 85288 - DNA, 20 bp, Artificial Sequence
  Description of Artificial Sequence: Synthetic oligonucleotide
  Target: ATXN2; (+) strand; PAM type: YTN; PAM sequence: CTC
tctgaccagtgaggaattcc

SEQ ID NO: 85289 - DNA, 20 bp, Artificial Sequence
  Description of Artificial Sequence: Synthetic oligonucleotide
  Target: ATXN2; (+) strand; PAM type: YTN; PAM sequence: CTC
tgaccagtgaggaattccag

SEQ ID NO: 85290 - DNA, 20 bp, Artificial Sequence
  Description of Artificial Sequence: Synthetic oligonucleotide
  Target: ATXN2; (+) strand; PAM type: YTN; PAM sequence: CTG
accagtgaggaattccaggc

SEQ ID NO: 85291 - DNA, 20 bp, Artificial Sequence
  Description of Artificial Sequence: Synthetic oligonucleotide
  Target: ATXN2; (+) strand; PAM type: YTN; PAM sequence: TTC
caggcctcaacagctgccct

SEQ ID NO: 85292 - DNA, 20 bp, Artificial Sequence
  Description of Artificial Sequence: Synthetic oligonucleotide
  Target: ATXN2; (+) strand; PAM type: YTN; PAM sequence: CTC
aacagctgcccttgaggagc

SEQ ID NO: 85293 - DNA, 20 bp, Artificial Sequence
  Description of Artificial Sequence: Synthetic oligonucleotide
  Target: ATXN2; (+) strand; PAM type: YTN; PAM sequence: CTG
cccttgaggagcacaggcag

SEQ ID NO: 85294 - DNA, 20 bp, Artificial Sequence
  Description of Artificial Sequence: Synthetic oligonucleotide
  Target: ATXN2; (+) strand; PAM type: YTN; PAM sequence: CTT
gaggagcacaggcagaagtg

SEQ ID NO: 85295 - DNA, 20 bp, Artificial Sequence
  Description of Artificial Sequence: Synthetic oligonucleotide
  Target: ATXN2; (+) strand; PAM type: YTN; PAM sequence: TTG
aggagcacaggcagaagtgt

SEQ ID NO: 85296 - DNA, 20 bp, Artificial Sequence
  Description of Artificial Sequence: Synthetic oligonucleotide
  Target: ATXN2; (+) strand; PAM type: YTN; PAM sequence: CTT
gtgaatgtaattgatctttc

SEQ ID NO: 85297 - DNA, 20 bp, Artificial Sequence
  Description of Artificial Sequence: Synthetic oligonucleotide
  Target: ATXN2; (+) strand; PAM type: YTN; PAM sequence: TTG
tgaatgtaattgatctttcc

SEQ ID NO: 85298 - DNA, 20 bp, Artificial Sequence
  Description of Artificial Sequence: Synthetic oligonucleotide
  Target: ATXN2; (+) strand; PAM type: YTN; PAM sequence: TTG
atctttccttccttccagag

SEQ ID NO: 85299 - DNA, 20 bp, Artificial Sequence
  Description of Artificial Sequence: Synthetic oligonucleotide
  Target: ATXN2; (+) strand; PAM type: YTN; PAM sequence: CTT
tccttccttccagagaaaga

SEQ ID NO: 85300 - DNA, 20 bp, Artificial Sequence
  Description of Artificial Sequence: Synthetic oligonucleotide
  Target: ATXN2; (+) strand; PAM type: YTN; PAM sequence: TTT
ccttccttccagagaaagat

SEQ ID NO: 85301 - DNA, 20 bp, Artificial Sequence
  Description of Artificial Sequence: Synthetic oligonucleotide
  Target: ATXN2; (+) strand; PAM type: YTN; PAM sequence: TTC
cttccttccagagaaagatt

SEQ ID NO: 85302 - DNA, 20 bp, Artificial Sequence
  Description of Artificial Sequence: Synthetic oligonucleotide
  Target: ATXN2; (+) strand; PAM type: YTN; PAM sequence: CTT
ccttccagagaaagatttaa

SEQ ID NO: 85303 - DNA, 20 bp, Artificial Sequence
  Description of Artificial Sequence: Synthetic oligonucleotide
  Target: ATXN2; (+) strand; PAM type: YTN; PAM sequence: TTC
cttccagagaaagatttaag

SEQ ID NO: 85304 - DNA, 20 bp, Artificial Sequence
  Description of Artificial Sequence: Synthetic oligonucleotide
  Target: ATXN2; (+) strand; PAM type: YTN; PAM sequence: CTT
ccagagaaagatttaaggga

SEQ ID NO: 85305 - DNA, 20 bp, Artificial Sequence
  Description of Artificial Sequence: Synthetic oligonucleotide
  Target: ATXN2; (+) strand; PAM type: YTN; PAM sequence: TTC
cagagaaagatttaagggac

SEQ ID NO: 85306 - DNA, 20 bp, Artificial Sequence
  Description of Artificial Sequence: Synthetic oligonucleotide
  Target: ATXN2; (+) strand; PAM type: YTN; PAM sequence: TTT
aagggacactgttaactgct

SEQ ID NO: 85307 - DNA, 20 bp, Artificial Sequence
  Description of Artificial Sequence: Synthetic oligonucleotide
  Target: ATXN2; (+) strand; PAM type: YTN; PAM sequence: TTA
agggacactgttaactgctc

SEQ ID NO: 85308 - DNA, 20 bp, Artificial Sequence
  Description of Artificial Sequence: Synthetic oligonucleotide
  Target: ATXN2; (+) strand; PAM type: YTN; PAM sequence: CTG
ttaactgctcgtgccagttt

SEQ ID NO: 85309 - DNA, 20 bp, Artificial Sequence
  Description of Artificial Sequence: Synthetic oligonucleotide
  Target: ATXN2; (+) strand; PAM type: YTN; PAM sequence: TTA
actgctcgtgccagtttgga

SEQ ID NO: 85310 - DNA, 20 bp, Artificial Sequence
  Description of Artificial Sequence: Synthetic oligonucleotide
  Target: ATXN2; (+) strand; PAM type: YTN; PAM sequence: CTG
ctcgtgccagtttggaagtg

SEQ ID NO: 85311 - DNA, 20 bp, Artificial Sequence
  Description of Artificial Sequence: Synthetic oligonucleotide
  Target: ATXN2; (+) strand; PAM type: YTN; PAM sequence: CTC
gtgccagtttggaagtgacc

SEQ ID NO: 85312 - DNA, 20 bp, Artificial Sequence
  Description of Artificial Sequence: Synthetic oligonucleotide
  Target: ATXN2; (+) strand; PAM type: YTN; PAM sequence: TTT
ggaagtgacccttctattag

SEQ ID NO: 85313 - DNA, 20 bp, Artificial Sequence
  Description of Artificial Sequence: Synthetic oligonucleotide
  Target: ATXN2; (+) strand; PAM type: YTN; PAM sequence: TTG
gaagtgacccttctattagg

SEQ ID NO: 85314 - DNA, 20 bp, Artificial Sequence
  Description of Artificial Sequence: Synthetic oligonucleotide
  Target: ATXN2; (+) strand; PAM type: YTN; PAM sequence: CTT
ctattaggcctgttgaaggg

SEQ ID NO: 85315 - DNA, 20 bp, Artificial Sequence
  Description of Artificial Sequence: Synthetic oligonucleotide
  Target: ATXN2; (+) strand; PAM type: YTN; PAM sequence: TTC
tattaggcctgttgaagggc

SEQ ID NO: 85316 - DNA, 20 bp, Artificial Sequence
  Description of Artificial Sequence: Synthetic oligonucleotide
  Target: ATXN2; (+) strand; PAM type: YTN; PAM sequence: CTA
ttaggcctgttgaagggccc

SEQ ID NO: 85317 - DNA, 20 bp, Artificial Sequence
  Description of Artificial Sequence: Synthetic oligonucleotide
  Target: ATXN2; (+) strand; PAM type: YTN; PAM sequence: TTA
ggcctgttgaagggccctcc

SEQ ID NO: 85318 - DNA, 20 bp, Artificial Sequence
  Description of Artificial Sequence: Synthetic oligonucleotide
  Target: ATXN2; (+) strand; PAM type: YTN; PAM sequence: CTG
ttgaagggccctcctgtagg

SEQ ID NO: 85319 - DNA, 20 bp, Artificial Sequence
  Description of Artificial Sequence: Synthetic oligonucleotide
  Target: ATXN2; (+) strand; PAM type: YTN; PAM sequence: TTG
aagggccctcctgtaggttt

SEQ ID NO: 85320 - DNA, 20 bp, Artificial Sequence
  Description of Artificial Sequence: Synthetic oligonucleotide
  Target: ATXN2; (+) strand; PAM type: YTN; PAM sequence: CTC
ctgtaggtttcatctatcca

SEQ ID NO: 85321 - DNA, 20 bp, Artificial Sequence
  Description of Artificial Sequence: Synthetic oligonucleotide
  Target: ATXN2; (+) strand; PAM type: YTN; PAM sequence: CTG
taggtttcatctatccacct

SEQ ID NO: 85322 - DNA, 20 bp, Artificial Sequence
  Description of Artificial Sequence: Synthetic oligonucleotide
  Target: ATXN2; (+) strand; PAM type: YTN; PAM sequence: TTT
catctatccacctggctttc

SEQ ID NO: 85323 - DNA, 20 bp, Artificial Sequence
  Description of Artificial Sequence: Synthetic oligonucleotide
  Target: ATXN2; (+) strand; PAM type: YTN; PAM sequence: TTC
atctatccacctggctttct

SEQ ID NO: 85324 - DNA, 20 bp, Artificial Sequence
  Description of Artificial Sequence: Synthetic oligonucleotide
  Target: ATXN2; (+) strand; PAM type: YTN; PAM sequence: CTA
tccacctggctttctcctta

SEQ ID NO: 85325 - DNA, 20 bp, Artificial Sequence
  Description of Artificial Sequence: Synthetic oligonucleotide
  Target: ATXN2; (+) strand; PAM type: YTN; PAM sequence: CTG
gctttctccttattgtttac

SEQ ID NO: 85326 - DNA, 20 bp, Artificial Sequence
  Description of Artificial Sequence: Synthetic oligonucleotide
  Target: ATXN2; (+) strand; PAM type: YTN; PAM sequence: CTT
tctccttattgtttacagat

SEQ ID NO: 85327 - DNA, 20 bp, Artificial Sequence
  Description of Artificial Sequence: Synthetic oligonucleotide
  Target: ATXN2; (+) strand; PAM type: YTN; PAM sequence: TTT
ctccttattgtttacagatg

SEQ ID NO: 85328 - DNA, 20 bp, Artificial Sequence
  Description of Artificial Sequence: Synthetic oligonucleotide
  Target: ATXN2; (+) strand; PAM type: YTN; PAM sequence: TTC
tccttattgtttacagatgt

SEQ ID NO: 85329 - DNA, 20 bp, Artificial Sequence
  Description of Artificial Sequence: Synthetic oligonucleotide
  Target: ATXN2; (+) strand; PAM type: YTN; PAM sequence: CTC
cttattgtttacagatgtag

SEQ ID NO: 85330 - DNA, 20 bp, Artificial Sequence
  Description of Artificial Sequence: Synthetic oligonucleotide
  Target: ATXN2; (+) strand; PAM type: YTN; PAM sequence: CTT
attgtttacagatgtagttc

SEQ ID NO: 85331 - DNA, 20 bp, Artificial Sequence
  Description of Artificial Sequence: Synthetic oligonucleotide
  Target: ATXN2; (+) strand; PAM type: YTN; PAM sequence: TTA
ttgtttacagatgtagttct

SEQ ID NO: 85332 - DNA, 20 bp, Artificial Sequence
  Description of Artificial Sequence: Synthetic oligonucleotide
  Target: ATXN2; (+) strand; PAM type: YTN; PAM sequence: TTG
tttacagatgtagttcttgt

SEQ ID NO: 85333 - DNA, 20 bp, Artificial Sequence
  Description of Artificial Sequence: Synthetic oligonucleotide
  Target: ATXN2; (+) strand; PAM type: YTN; PAM sequence: TTT
acagatgtagttcttgttag

SEQ ID NO: 85334 - DNA, 20 bp, Artificial Sequence
  Description of Artificial Sequence: Synthetic oligonucleotide
  Target: ATXN2; (+) strand; PAM type: YTN; PAM sequence: TTA
cagatgtagttcttgttaga

SEQ ID NO: 85335 - DNA, 20 bp, Artificial Sequence
  Description of Artificial Sequence: Synthetic oligonucleotide
  Target: ATXN2; (+) strand; PAM type: YTN; PAM sequence: TTC
ttgttagaggatgccgctag

SEQ ID NO: 85336 - DNA, 20 bp, Artificial Sequence
  Description of Artificial Sequence: Synthetic oligonucleotide
  Target: ATXN2; (+) strand; PAM type: YTN; PAM sequence: CTT
gttagaggatgccgctagct

SEQ ID NO: 85337 - DNA, 20 bp, Artificial Sequence
  Description of Artificial Sequence: Synthetic oligonucleotide
  Target: ATXN2; (+) strand; PAM type: YTN; PAM sequence: TTG
ttagaggatgccgctagctc

SEQ ID NO: 85338 - DNA, 20 bp, Artificial Sequence
  Description of Artificial Sequence: Synthetic oligonucleotide
  Target: ATXN2; (+) strand; PAM type: YTN; PAM sequence: TTA
gaggatgccgctagctcctg

SEQ ID NO: 85339 - DNA, 20 bp, Artificial Sequence
  Description of Artificial Sequence: Synthetic oligonucleotide
  Target: ATXN2; (+) strand; PAM type: YTN; PAM sequence: CTA
gctcctgcccggggtcccta

SEQ ID NO: 85340 - DNA, 20 bp, Artificial Sequence
  Description of Artificial Sequence: Synthetic oligonucleotide
  Target: ATXN2; (+) strand; PAM type: YTN; PAM sequence: CTC
ctgcccggggtccctatgcc

SEQ ID NO: 85341 - DNA, 20 bp, Artificial Sequence
  Description of Artificial Sequence: Synthetic oligonucleotide
  Target: ATXN2; (+) strand; PAM type: YTN; PAM sequence: CTG
cccggggtccctatgcccag

SEQ ID NO: 85342 - DNA, 20 bp, Artificial Sequence
  Description of Artificial Sequence: Synthetic oligonucleotide
  Target: ATXN2; (+) strand; PAM type: YTN; PAM sequence: CTA
tgcccagtccccgttactct

SEQ ID NO: 85343 - DNA, 20 bp, Artificial Sequence
  Description of Artificial Sequence: Synthetic oligonucleotide
  Target: ATXN2; (+) strand; PAM type: YTN; PAM sequence: TTA
ctcttagagaaaggagttgg

SEQ ID NO: 85344 - DNA, 20 bp, Artificial Sequence
  Description of Artificial Sequence: Synthetic oligonucleotide
  Target: ATXN2; (+) strand; PAM type: YTN; PAM sequence: CTC
ttagagaaaggagttggggt

SEQ ID NO: 85345 - DNA, 20 bp, Artificial Sequence
  Description of Artificial Sequence: Synthetic oligonucleotide
  Target: ATXN2; (+) strand; PAM type: YTN; PAM sequence: CTT
agagaaaggagttggggtga

SEQ ID NO: 85346 - DNA, 20 bp, Artificial Sequence
  Description of Artificial Sequence: Synthetic oligonucleotide
  Target: ATXN2; (+) strand; PAM type: YTN; PAM sequence: TTA
gagaaaggagttggggtgag

SEQ ID NO: 85347 - DNA, 20 bp, Artificial Sequence
  Description of Artificial Sequence: Synthetic oligonucleotide
  Target: ATXN2; (+) strand; PAM type: YTN; PAM sequence: TTG
gggtgagggccagagctggc

SEQ ID NO: 85348 - DNA, 20 bp, Artificial Sequence
  Description of Artificial Sequence: Synthetic oligonucleotide
  Target: ATXN2; (+) strand; PAM type: YTN; PAM sequence: CTG
gcagtggaaacttgttctct

SEQ ID NO: 85349 - DNA, 20 bp, Artificial Sequence
  Description of Artificial Sequence: Synthetic oligonucleotide
  Target: ATXN2; (+) strand; PAM type: YTN; PAM sequence: CTT
gttctctttttcactgacac

SEQ ID NO: 85350 - DNA, 20 bp, Artificial Sequence
  Description of Artificial Sequence: Synthetic oligonucleotide
  Target: ATXN2; (+) strand; PAM type: YTN; PAM sequence: TTG
ttctctttttcactgacact

SEQ ID NO: 85351 - DNA, 20 bp, Artificial Sequence
  Description of Artificial Sequence: Synthetic oligonucleotide
  Target: ATXN2; (+) strand; PAM type: YTN; PAM sequence: TTC
tctttttcactgacactgtc

SEQ ID NO: 85352 - DNA, 20 bp, Artificial Sequence
  Description of Artificial Sequence: Synthetic oligonucleotide
  Target: ATXN2; (+) strand; PAM type: YTN; PAM sequence: CTC
tttttcactgacactgtcac

SEQ ID NO: 85353 - DNA, 20 bp, Artificial Sequence
  Description of Artificial Sequence: Synthetic oligonucleotide
  Target: ATXN2; (+) strand; PAM type: YTN; PAM sequence: CTT
tttcactgacactgtcacag

SEQ ID NO: 85354 - DNA, 20 bp, Artificial Sequence
  Description of Artificial Sequence: Synthetic oligonucleotide
  Target: ATXN2; (+) strand; PAM type: YTN; PAM sequence: TTT
ttcactgacactgtcacagc

SEQ ID NO: 85355 - DNA, 20 bp, Artificial Sequence
  Description of Artificial Sequence: Synthetic oligonucleotide
  Target: ATXN2; (+) strand; PAM type: YTN; PAM sequence: TTT
tcactgacactgtcacagcg

SEQ ID NO: 85356 - DNA, 20 bp, Artificial Sequence
  Description of Artificial Sequence: Synthetic oligonucleotide
  Target: ATXN2; (+) strand; PAM type: YTN; PAM sequence: TTT
cactgacactgtcacagcgg

SEQ ID NO: 85357 - DNA, 20 bp, Artificial Sequence
  Description of Artificial Sequence: Synthetic oligonucleotide
  Target: ATXN2; (+) strand; PAM type: YTN; PAM sequence: TTC
actgacactgtcacagcgga

SEQ ID NO: 85358 - DNA, 20 bp, Artificial Sequence
  Description of Artificial Sequence: Synthetic oligonucleotide
  Target: ATXN2; (+) strand; PAM type: YTN; PAM sequence: CTG
acactgtcacagcggatgac

SEQ ID NO: 85359 - DNA, 20 bp, Artificial Sequence
  Description of Artificial Sequence: Synthetic oligonucleotide
  Target: ATXN2; (+) strand; PAM type: YTN; PAM sequence: CTG
tcacagcggatgacagactt

SEQ ID NO: 85360 - DNA, 20 bp, Artificial Sequence
  Description of Artificial Sequence: Synthetic oligonucleotide
  Target: ATXN2; (+) strand; PAM type: YTN; PAM sequence: CTT
tctacggggaggaggggggg

SEQ ID NO: 85361 - DNA, 20 bp, Artificial Sequence
  Description of Artificial Sequence: Synthetic oligonucleotide
  Target: ATXN2; (+) strand; PAM type: YTN; PAM sequence: TTT
ctacggggaggaggggggga

SEQ ID NO: 85362 - DNA, 20 bp, Artificial Sequence
  Description of Artificial Sequence: Synthetic oligonucleotide
  Target: ATXN2; (+) strand; PAM type: YTN; PAM sequence: TTC
tacggggaggagggggggat

SEQ ID NO: 85363 - DNA, 20 bp, Artificial Sequence
  Description of Artificial Sequence: Synthetic oligonucleotide
  Target: ATXN2; (+) strand; PAM type: YTN; PAM sequence: CTA
cggggaggagggggggatca

SEQ ID NO: 85364 - DNA, 20 bp, Artificial Sequence
  Description of Artificial Sequence: Synthetic oligonucleotide
  Target: ATXN2; (+) strand; PAM type: YTN; PAM sequence: CTA
acaagcggttctcccatcta

SEQ ID NO: 85365 - DNA, 20 bp, Artificial Sequence
  Description of Artificial Sequence: Synthetic oligonucleotide
  Target: ATXN2; (+) strand; PAM type: YTN; PAM sequence: TTC
tcccatctaccgtcagtcca

SEQ ID NO: 85366 - DNA, 20 bp, Artificial Sequence
  Description of Artificial Sequence: Synthetic oligonucleotide
  Target: ATXN2; (+) strand; PAM type: YTN; PAM sequence: CTC
ccatctaccgtcagtccaca

SEQ ID NO: 85367 - DNA, 20 bp, Artificial Sequence
  Description of Artificial Sequence: Synthetic oligonucleotide
  Target: ATXN2; (+) strand; PAM type: YTN; PAM sequence: CTA
ccgtcagtccacatggcagg

SEQ ID NO: 85368 - DNA, 20 bp, Artificial Sequence
  Description of Artificial Sequence: Synthetic oligonucleotide
  Target: ATXN2; (+) strand; PAM type: YTN; PAM sequence: CTG
ctgtgtccacaccacagatg

SEQ ID NO: 85369 - DNA, 20 bp, Artificial Sequence
  Description of Artificial Sequence: Synthetic oligonucleotide
  Target: ATXN2; (+) strand; PAM type: YTN; PAM sequence: CTG
tgtccacaccacagatgacc

SEQ ID NO: 85370 - DNA, 20 bp, Artificial Sequence
  Description of Artificial Sequence: Synthetic oligonucleotide
  Target: ATXN2; (+) strand; PAM type: YTN; PAM sequence: CTA
atcctgcttctactctcagc

SEQ ID NO: 85371 - DNA, 20 bp, Artificial Sequence
  Description of Artificial Sequence: Synthetic oligonucleotide
  Target: ATXN2; (+) strand; PAM type: YTN; PAM sequence: CTG
cttctactctcagctttagg

SEQ ID NO: 85372 - DNA, 20 bp, Artificial Sequence
  Description of Artificial Sequence: Synthetic oligonucleotide
  Target: ATXN2; (+) strand; PAM type: YTN; PAM sequence: CTT
ctactctcagctttaggaca

SEQ ID NO: 85373 - DNA, 20 bp, Artificial Sequence
  Description of Artificial Sequence: Synthetic oligonucleotide
  Target: ATXN2; (+) strand; PAM type: YTN; PAM sequence: TTC
tactctcagctttaggacaa

SEQ ID NO: 85374 - DNA, 20 bp, Artificial Sequence
  Description of Artificial Sequence: Synthetic oligonucleotide
  Target: ATXN2; (+) strand; PAM type: YTN; PAM sequence: CTA
ctctcagctttaggacaaaa

SEQ ID NO: 85375 - DNA, 20 bp, Artificial Sequence
  Description of Artificial Sequence: Synthetic oligonucleotide
  Target: ATXN2; (+) strand; PAM type: YTN; PAM sequence: CTC
tcagctttaggacaaaagct

SEQ ID NO: 85376 - DNA, 20 bp, Artificial Sequence
  Description of Artificial Sequence: Synthetic oligonucleotide
  Target: ATXN2; (+) strand; PAM type: YTN; PAM sequence: CTC
agctttaggacaaaagctct

SEQ ID NO: 85377 - DNA, 20 bp, Artificial Sequence
  Description of Artificial Sequence: Synthetic oligonucleotide
  Target: ATXN2; (+) strand; PAM type: YTN; PAM sequence: CTT
taggacaaaagctctgtcag

SEQ ID NO: 85378 - DNA, 20 bp, Artificial Sequence
  Description of Artificial Sequence: Synthetic oligonucleotide
  Target: ATXN2; (+) strand; PAM type: YTN; PAM sequence: TTT
aggacaaaagctctgtcaga

SEQ ID NO: 85379 - DNA, 20 bp, Artificial Sequence
  Description of Artificial Sequence: Synthetic oligonucleotide
  Target: ATXN2; (+) strand; PAM type: YTN; PAM sequence: TTA
ggacaaaagctctgtcagag

SEQ ID NO: 85380 - DNA, 20 bp, Artificial Sequence
  Description of Artificial Sequence: Synthetic oligonucleotide
  Target: ATXN2; (+) strand; PAM type: YTN; PAM sequence: CTC
tgtcagaggcacaagctgaa

SEQ ID NO: 85381 - DNA, 20 bp, Artificial Sequence
  Description of Artificial Sequence: Synthetic oligonucleotide
  Target: ATXN2; (+) strand; PAM type: YTN; PAM sequence: CTG
tcagaggcacaagctgaagg

SEQ ID NO: 85382 - DNA, 20 bp, Artificial Sequence
  Description of Artificial Sequence: Synthetic oligonucleotide
  Target: ATXN2; (+) strand; PAM type: YTN; PAM sequence: CTG
aaggtcaaaaatgatttaaa

SEQ ID NO: 85383 - DNA, 20 bp, Artificial Sequence
  Description of Artificial Sequence: Synthetic oligonucleotide
  Target: ATXN2; (+) strand; PAM type: YTN; PAM sequence: TTT
aaaacattttacctcagact

SEQ ID NO: 85384 - DNA, 20 bp, Artificial Sequence
  Description of Artificial Sequence: Synthetic oligonucleotide
  Target: ATXN2; (+) strand; PAM type: YTN; PAM sequence: TTA
aaacattttacctcagacta

SEQ ID NO: 85385 - DNA, 20 bp, Artificial Sequence
  Description of Artificial Sequence: Synthetic oligonucleotide
  Target: ATXN2; (+) strand; PAM type: YTN; PAM sequence: TTT
tacctcagactaatttcttt

SEQ ID NO: 85386 - DNA, 20 bp, Artificial Sequence
  Description of Artificial Sequence: Synthetic oligonucleotide
  Target: ATXN2; (+) strand; PAM type: YTN; PAM sequence: TTT
acctcagactaatttcttta

SEQ ID NO: 85387 - DNA, 20 bp, Artificial Sequence
  Description of Artificial Sequence: Synthetic oligonucleotide
  Target: ATXN2; (+) strand; PAM type: YTN; PAM sequence: TTA
cctcagactaatttctttaa

SEQ ID NO: 85388 - DNA, 20 bp, Artificial Sequence
  Description of Artificial Sequence: Synthetic oligonucleotide
  Target: ATXN2; (+) strand; PAM type: YTN; PAM sequence: CTC
agactaatttctttaaagga

SEQ ID NO: 85389 - DNA, 20 bp, Artificial Sequence
  Description of Artificial Sequence: Synthetic oligonucleotide
  Target: ATXN2; (+) strand; PAM type: YTN; PAM sequence: CTA
atttctttaaaggattcagg

SEQ ID NO: 85390 - DNA, 20 bp, Artificial Sequence
  Description of Artificial Sequence: Synthetic oligonucleotide
  Target: ATXN2; (+) strand; PAM type: YTN; PAM sequence: TTT
ctttaaaggattcaggttca

SEQ ID NO: 85391 - DNA, 20 bp, Artificial Sequence
  Description of Artificial Sequence: Synthetic oligonucleotide
  Target: ATXN2; (+) strand; PAM type: YTN; PAM sequence: TTC
tttaaaggattcaggttcaa

SEQ ID NO: 85392 - DNA, 20 bp, Artificial Sequence
  Description of Artificial Sequence: Synthetic oligonucleotide
  Target: ATXN2; (+) strand; PAM type: YTN; PAM sequence: CTT
taaaggattcaggttcaaaa

SEQ ID NO: 85393 - DNA, 20 bp, Artificial Sequence
  Description of Artificial Sequence: Synthetic oligonucleotide
  Target: ATXN2; (+) strand; PAM type: YTN; PAM sequence: TTT
aaaggattcaggttcaaaac

SEQ ID NO: 85394 - DNA, 20 bp, Artificial Sequence
  Description of Artificial Sequence: Synthetic oligonucleotide
  Target: ATXN2; (+) strand; PAM type: YTN; PAM sequence: TTA
aaggattcaggttcaaaact

SEQ ID NO: 85395 - DNA, 20 bp, Artificial Sequence
  Description of Artificial Sequence: Synthetic oligonucleotide
  Target: ATXN2; (+) strand; PAM type: YTN; PAM sequence: TTC
aggttcaaaacttaaccact

SEQ ID NO: 85396 - DNA, 20 bp, Artificial Sequence
  Description of Artificial Sequence: Synthetic oligonucleotide
  Target: ATXN2; (+) strand; PAM type: YTN; PAM sequence: TTC
aaaacttaaccactgcttat

SEQ ID NO: 85397 - DNA, 20 bp, Artificial Sequence
  Description of Artificial Sequence: Synthetic oligonucleotide
  Target: ATXN2; (+) strand; PAM type: YTN; PAM sequence: CTT
aaccactgcttatttcagtg

SEQ ID NO: 85398 - DNA, 20 bp, Artificial Sequence
  Description of Artificial Sequence: Synthetic oligonucleotide
  Target: ATXN2; (+) strand; PAM type: YTN; PAM sequence: TTA
accactgcttatttcagtgc

SEQ ID NO: 85399 - DNA, 20 bp, Artificial Sequence
  Description of Artificial Sequence: Synthetic oligonucleotide
  Target: ATXN2; (+) strand; PAM type: YTN; PAM sequence: CTG
cttatttcagtgcactgttt

SEQ ID NO: 85400 - DNA, 20 bp, Artificial Sequence
  Description of Artificial Sequence: Synthetic oligonucleotide
  Target: ATXN2; (+) strand; PAM type: YTN; PAM sequence: CTT
atttcagtgcactgtttcaa

SEQ ID NO: 85401 - DNA, 20 bp, Artificial Sequence
  Description of Artificial Sequence: Synthetic oligonucleotide
  Target: ATXN2; (+) strand; PAM type: YTN; PAM sequence: TTA
tttcagtgcactgtttcaac

SEQ ID NO: 85402 - DNA, 20 bp, Artificial Sequence
  Description of Artificial Sequence: Synthetic oligonucleotide
  Target: ATXN2; (+) strand; PAM type: YTN; PAM sequence: TTT
cagtgcactgtttcaactaa

SEQ ID NO: 85403 - DNA, 20 bp, Artificial Sequence
  Description of Artificial Sequence: Synthetic oligonucleotide
  Target: ATXN2; (+) strand; PAM type: YTN; PAM sequence: TTC
agtgcactgtttcaactaac

SEQ ID NO: 85404 - DNA, 20 bp, Artificial Sequence
  Description of Artificial Sequence: Synthetic oligonucleotide
  Target: ATXN2; (+) strand; PAM type: YTN; PAM sequence: CTG
tttcaactaacacccatgct

SEQ ID NO: 85405 - DNA, 20 bp, Artificial Sequence
  Description of Artificial Sequence: Synthetic oligonucleotide
  Target: ATXN2; (+) strand; PAM type: YTN; PAM sequence: TTT
caactaacacccatgctatt

SEQ ID NO: 85406 - DNA, 20 bp, Artificial Sequence
  Description of Artificial Sequence: Synthetic oligonucleotide
  Target: ATXN2; (+) strand; PAM type: YTN; PAM sequence: TTC
aactaacacccatgctattt

SEQ ID NO: 85407 - DNA, 20 bp, Artificial Sequence
  Description of Artificial Sequence: Synthetic oligonucleotide
  Target: ATXN2; (+) strand; PAM type: YTN; PAM sequence: CTA
acacccatgctatttttgta

SEQ ID NO: 85408 - DNA, 20 bp, Artificial Sequence
  Description of Artificial Sequence: Synthetic oligonucleotide
  Target: ATXN2; (+) strand; PAM type: YTN; PAM sequence: CTA
tttttgtagtcagaaacagc

SEQ ID NO: 85409 - DNA, 20 bp, Artificial Sequence
  Description of Artificial Sequence: Synthetic oligonucleotide
  Target: ATXN2; (+) strand; PAM type: YTN; PAM sequence: TTT
ttgtagtcagaaacagctat

SEQ ID NO: 85410 - DNA, 20 bp, Artificial Sequence
  Description of Artificial Sequence: Synthetic oligonucleotide
  Target: ATXN2; (+) strand; PAM type: YTN; PAM sequence: TTT
tgtagtcagaaacagctatg

SEQ ID NO: 85411 - DNA, 20 bp, Artificial Sequence
  Description of Artificial Sequence: Synthetic oligonucleotide
  Target: ATXN2; (+) strand; PAM type: YTN; PAM sequence: TTT
gtagtcagaaacagctatgc

SEQ ID NO: 85412 - DNA, 20 bp, Artificial Sequence
  Description of Artificial Sequence: Synthetic oligonucleotide
  Target: ATXN2; (+) strand; PAM type: YTN; PAM sequence: TTG
tagtcagaaacagctatgca

SEQ ID NO: 85413 - DNA, 20 bp, Artificial Sequence
  Description of Artificial Sequence: Synthetic oligonucleotide
  Target: ATXN2; (+) strand; PAM type: YTN; PAM sequence: CTA
tgcaaaccctacctaattta

SEQ ID NO: 85414 - DNA, 20 bp, Artificial Sequence
  Description of Artificial Sequence: Synthetic oligonucleotide
  Target: ATXN2; (+) strand; PAM type: YTN; PAM sequence: CTA
cctaatttacagtctgagcc

SEQ ID NO: 85415 - DNA, 20 bp, Artificial Sequence
  Description of Artificial Sequence: Synthetic oligonucleotide
  Target: ATXN2; (+) strand; PAM type: YTN; PAM sequence: CTA
atttacagtctgagccagca

SEQ ID NO: 85416 - DNA, 20 bp, Artificial Sequence
  Description of Artificial Sequence: Synthetic oligonucleotide
  Target: ATXN2; (+) strand; PAM type: YTN; PAM sequence: TTT
acagtctgagccagcatgct

SEQ ID NO: 85417 - DNA, 20 bp, Artificial Sequence
  Description of Artificial Sequence: Synthetic oligonucleotide
  Target: ATXN2; (+) strand; PAM type: YTN; PAM sequence: TTA
cagtctgagccagcatgctg

SEQ ID NO: 85418 - DNA, 20 bp, Artificial Sequence
  Description of Artificial Sequence: Synthetic oligonucleotide
  Target: ATXN2; (+) strand; PAM type: YTN; PAM sequence: CTG
agccagcatgctggcttgtc

SEQ ID NO: 85419 - DNA, 20 bp, Artificial Sequence
  Description of Artificial Sequence: Synthetic oligonucleotide
  Target: ATXN2; (+) strand; PAM type: YTN; PAM sequence: CTG
gcttgtctactgcatcctcg

SEQ ID NO: 85420 - DNA, 20 bp, Artificial Sequence
  Description of Artificial Sequence: Synthetic oligonucleotide
  Target: ATXN2; (+) strand; PAM type: YTN; PAM sequence: CTT
gtctactgcatcctcgggac

SEQ ID NO: 85421 - DNA, 20 bp, Artificial Sequence
  Description of Artificial Sequence: Synthetic oligonucleotide
  Target: ATXN2; (+) strand; PAM type: YTN; PAM sequence: TTG
tctactgcatcctcgggaca

SEQ ID NO: 85422 - DNA, 20 bp, Artificial Sequence
  Description of Artificial Sequence: Synthetic oligonucleotide
  Target: ATXN2; (+) strand; PAM type: YTN; PAM sequence: CTA
ctgcatcctcgggacagtca

SEQ ID NO: 85423 - DNA, 20 bp, Artificial Sequence
  Description of Artificial Sequence: Synthetic oligonucleotide
  Target: ATXN2; (+) strand; PAM type: YTN; PAM sequence: CTG
catcctcgggacagtcacct

SEQ ID NO: 85424 - DNA, 20 bp, Artificial Sequence
  Description of Artificial Sequence: Synthetic oligonucleotide
  Target: ATXN2; (+) strand; PAM type: YTN; PAM sequence: CTC
gggacagtcacctgccactg

SEQ ID NO: 85425 - DNA, 20 bp, Artificial Sequence
  Description of Artificial Sequence: Synthetic oligonucleotide
  Target: ATXN2; (+) strand; PAM type: YTN; PAM sequence: CTG
ccactgagtggccactgtcc

SEQ ID NO: 85426 - DNA, 20 bp, Artificial Sequence
  Description of Artificial Sequence: Synthetic oligonucleotide
  Target: ATXN2; (+) strand; PAM type: YTN; PAM sequence: CTG
agtggccactgtccttccta

SEQ ID NO: 85427 - DNA, 20 bp, Artificial Sequence
  Description of Artificial Sequence: Synthetic oligonucleotide
  Target: ATXN2; (+) strand; PAM type: YTN; PAM sequence: CTG
tccttcctaaatgtcaagaa

SEQ ID NO: 85428 - DNA, 20 bp, Artificial Sequence
  Description of Artificial Sequence: Synthetic oligonucleotide
  Target: ATXN2; (+) strand; PAM type: YTN; PAM sequence: CTT
cctaaatgtcaagaagtgaa

SEQ ID NO: 85429 - DNA, 20 bp, Artificial Sequence
  Description of Artificial Sequence: Synthetic oligonucleotide
  Target: ATXN2; (+) strand; PAM type: YTN; PAM sequence: TTC
ctaaatgtcaagaagtgaag

SEQ ID NO: 85430 - DNA, 20 bp, Artificial Sequence
  Description of Artificial Sequence: Synthetic oligonucleotide
  Target: ATXN2; (+) strand; PAM type: YTN; PAM sequence: CTA
aatgtcaagaagtgaagtat

SEQ ID NO: 85431 - DNA, 20 bp, Artificial Sequence
  Description of Artificial Sequence: Synthetic oligonucleotide
  Target: ATXN2; (+) strand; PAM type: YTN; PAM sequence: CTT
tcagggaaattcaggcaatt

SEQ ID NO: 85432 - DNA, 20 bp, Artificial Sequence
  Description of Artificial Sequence: Synthetic oligonucleotide
  Target: ATXN2; (+) strand; PAM type: YTN; PAM sequence: TTT
cagggaaattcaggcaatta

SEQ ID NO: 85433 - DNA, 20 bp, Artificial Sequence
  Description of Artificial Sequence: Synthetic oligonucleotide
  Target: ATXN2; (+) strand; PAM type: YTN; PAM sequence: TTC
agggaaattcaggcaattac

SEQ ID NO: 85434 - DNA, 20 bp, Artificial Sequence
  Description of Artificial Sequence: Synthetic oligonucleotide
  Target: ATXN2; (+) strand; PAM type: YTN; PAM sequence: TTC
aggcaattactgaaatagga

SEQ ID NO: 85435 - DNA, 20 bp, Artificial Sequence
  Description of Artificial Sequence: Synthetic oligonucleotide
  Target: ATXN2; (+) strand; PAM type: YTN; PAM sequence: TTA
ctgaaataggagggtggcaa

SEQ ID NO: 85436 - DNA, 20 bp, Artificial Sequence
  Description of Artificial Sequence: Synthetic oligonucleotide
  Target: ATXN2; (+) strand; PAM type: YTN; PAM sequence: CTG
aaataggagggtggcaagaa

SEQ ID NO: 85437 - DNA, 20 bp, Artificial Sequence
  Description of Artificial Sequence: Synthetic oligonucleotide
  Target: ATXN2; (+) strand; PAM type: YTN; PAM sequence: TTC
tatcctggtgccttacgaat

SEQ ID NO: 85438 - DNA, 20 bp, Artificial Sequence
  Description of Artificial Sequence: Synthetic oligonucleotide
  Target: ATXN2; (+) strand; PAM type: YTN; PAM sequence: CTA
tcctggtgccttacgaataa

SEQ ID NO: 85439 - DNA, 20 bp, Artificial Sequence
  Description of Artificial Sequence: Synthetic oligonucleotide
  Target: ATXN2; (+) strand; PAM type: YTN; PAM sequence: CTG
gtgccttacgaataaaaaac

SEQ ID NO: 85440 - DNA, 20 bp, Artificial Sequence
  Description of Artificial Sequence: Synthetic oligonucleotide
  Target: ATXN2; (+) strand; PAM type: YTN; PAM sequence: CTT
acgaataaaaaactggattc

SEQ ID NO: 85441 - DNA, 20 bp, Artificial Sequence
  Description of Artificial Sequence: Synthetic oligonucleotide
  Target: ATXN2; (+) strand; PAM type: YTN; PAM sequence: TTA
cgaataaaaaactggattct

SEQ ID NO: 85442 - DNA, 20 bp, Artificial Sequence
  Description of Artificial Sequence: Synthetic oligonucleotide
  Target: ATXN2; (+) strand; PAM type: YTN; PAM sequence: CTG
gattctggtttacagcagct

SEQ ID NO: 85443 - DNA, 20 bp, Artificial Sequence
  Description of Artificial Sequence: Synthetic oligonucleotide
  Target: ATXN2; (+) strand; PAM type: YTN; PAM sequence: TTC
tggtttacagcagctttaca

SEQ ID NO: 85444 - DNA, 20 bp, Artificial Sequence
  Description of Artificial Sequence: Synthetic oligonucleotide
  Target: ATXN2; (+) strand; PAM type: YTN; PAM sequence: CTG
gtttacagcagctttacagt

SEQ ID NO: 85445 - DNA, 20 bp, Artificial Sequence
  Description of Artificial Sequence: Synthetic oligonucleotide
  Target: ATXN2; (+) strand; PAM type: YTN; PAM sequence: TTT
acagcagctttacagtgata

SEQ ID NO: 85446 - DNA, 20 bp, Artificial Sequence
  Description of Artificial Sequence: Synthetic oligonucleotide
  Target: ATXN2; (+) strand; PAM type: YTN; PAM sequence: TTA
cagcagctttacagtgatag

SEQ ID NO: 85447 - DNA, 20 bp, Artificial Sequence
  Description of Artificial Sequence: Synthetic oligonucleotide
  Target: ATXN2; (+) strand; PAM type: YTN; PAM sequence: CTT
tacagtgatagttaaattaa

SEQ ID NO: 85448 - DNA, 20 bp, Artificial Sequence
  Description of Artificial Sequence: Synthetic oligonucleotide
  Target: ATXN2; (+) strand; PAM type: YTN; PAM sequence: TTT
acagtgatagttaaattaac

SEQ ID NO: 85449 - DNA, 20 bp, Artificial Sequence
  Description of Artificial Sequence: Synthetic oligonucleotide
  Target: ATXN2; (+) strand; PAM type: YTN; PAM sequence: TTA
cagtgatagttaaattaact

SEQ ID NO: 85450 - DNA, 20 bp, Artificial Sequence
  Description of Artificial Sequence: Synthetic oligonucleotide
  Target: ATXN2; (+) strand; PAM type: YTN; PAM sequence: TTA
aattaactggggctagggga

SEQ ID NO: 85451 - DNA, 20 bp, Artificial Sequence
  Description of Artificial Sequence: Synthetic oligonucleotide
  Target: ATXN2; (+) strand; PAM type: YTN; PAM sequence: TTA
actggggctaggggaagagc

SEQ ID NO: 85452 - DNA, 20 bp, Artificial Sequence
  Description of Artificial Sequence: Synthetic oligonucleotide
  Target: ATXN2; (+) strand; PAM type: YTN; PAM sequence: CTG
gggctaggggaagagcaagc

SEQ ID NO: 85453 - DNA, 20 bp, Artificial Sequence
  Description of Artificial Sequence: Synthetic oligonucleotide
  Target: ATXN2; (+) strand; PAM type: YTN; PAM sequence: CTA
ggggaagagcaagcaaaaag

SEQ ID NO: 85454 - DNA, 20 bp, Artificial Sequence
  Description of Artificial Sequence: Synthetic oligonucleotide
  Target: ATXN2; (+) strand; PAM type: YTN; PAM sequence: CTC
ctaggccctttctagtaaat

SEQ ID NO: 85455 - DNA, 20 bp, Artificial Sequence
  Description of Artificial Sequence: Synthetic oligonucleotide
  Target: ATXN2; (+) strand; PAM type: YTN; PAM sequence: CTA
ggccctttctagtaaatcct

SEQ ID NO: 85456 - DNA, 20 bp, Artificial Sequence
  Description of Artificial Sequence: Synthetic oligonucleotide
  Target: ATXN2; (+) strand; PAM type: YTN; PAM sequence: CTT
tctagtaaatccttcagcaa

SEQ ID NO: 85457 - DNA, 20 bp, Artificial Sequence
  Description of Artificial Sequence: Synthetic oligonucleotide
  Target: ATXN2; (+) strand; PAM type: YTN; PAM sequence: TTT
ctagtaaatccttcagcaac

SEQ ID NO: 85458 - DNA, 20 bp, Artificial Sequence
  Description of Artificial Sequence: Synthetic oligonucleotide
  Target: ATXN2; (+) strand; PAM type: YTN; PAM sequence: TTC
tagtaaatccttcagcaaca

SEQ ID NO: 85459 - DNA, 20 bp, Artificial Sequence
  Description of Artificial Sequence: Synthetic oligonucleotide
  Target: ATXN2; (+) strand; PAM type: YTN; PAM sequence: CTA
gtaaatccttcagcaacaag

SEQ ID NO: 85460 - DNA, 20 bp, Artificial Sequence
  Description of Artificial Sequence: Synthetic oligonucleotide
  Target: ATXN2; (+) strand; PAM type: YTN; PAM sequence: CTT
cagcaacaaggctggcttgg

SEQ ID NO: 85461 - DNA, 20 bp, Artificial Sequence
  Description of Artificial Sequence: Synthetic oligonucleotide
  Target: ATXN2; (+) strand; PAM type: YTN; PAM sequence: TTC
agcaacaaggctggcttggt

SEQ ID NO: 85462 - DNA, 20 bp, Artificial Sequence
  Description of Artificial Sequence: Synthetic oligonucleotide
  Target: ATXN2; (+) strand; PAM type: YTN; PAM sequence: CTG
gcttggtgccctccaagcat

SEQ ID NO: 85463 - DNA, 20 bp, Artificial Sequence
  Description of Artificial Sequence: Synthetic oligonucleotide
  Target: ATXN2; (+) strand; PAM type: YTN; PAM sequence: CTT
ggtgccctccaagcatctaa

SEQ ID NO: 85464 - DNA, 20 bp, Artificial Sequence
  Description of Artificial Sequence: Synthetic oligonucleotide
  Target: ATXN2; (+) strand; PAM type: YTN; PAM sequence: TTG
gtgccctccaagcatctaat

SEQ ID NO: 85465 - DNA, 20 bp, Artificial Sequence
  Description of Artificial Sequence: Synthetic oligonucleotide
  Target: ATXN2; (+) strand; PAM type: YTN; PAM sequence: CTC
caagcatctaatggcttatt

SEQ ID NO: 85466 - DNA, 20 bp, Artificial Sequence
  Description of Artificial Sequence: Synthetic oligonucleotide
  Target: ATXN2; (+) strand; PAM type: YTN; PAM sequence: CTA
atggcttattaaattatccc

SEQ ID NO: 85467 - DNA, 20 bp, Artificial Sequence
  Description of Artificial Sequence: Synthetic oligonucleotide
  Target: ATXN2; (+) strand; PAM type: YTN; PAM sequence: CTT
attaaattatcccacaagtg

SEQ ID NO: 85468 - DNA, 20 bp, Artificial Sequence
  Description of Artificial Sequence: Synthetic oligonucleotide
  Target: ATXN2; (+) strand; PAM type: YTN; PAM sequence: TTA
ttaaattatcccacaagtgg

SEQ ID NO: 85469 - DNA, 20 bp, Artificial Sequence
  Description of Artificial Sequence: Synthetic oligonucleotide
  Target: ATXN2; (+) strand; PAM type: YTN; PAM sequence: TTA
aattatcccacaagtgggtt

SEQ ID NO: 85470 - DNA, 20 bp, Artificial Sequence
  Description of Artificial Sequence: Synthetic oligonucleotide
  Target: ATXN2; (+) strand; PAM type: YTN; PAM sequence: TTA
tcccacaagtgggttttagg

SEQ ID NO: 85471 - DNA, 20 bp, Artificial Sequence
  Description of Artificial Sequence: Synthetic oligonucleotide
  Target: ATXN2; (+) strand; PAM type: YTN; PAM sequence: TTT
taggctccttttttgagcca

SEQ ID NO: 85472 - DNA, 20 bp, Artificial Sequence
  Description of Artificial Sequence: Synthetic oligonucleotide
  Target: ATXN2; (+) strand; PAM type: YTN; PAM sequence: TTT
aggctccttttttgagccaa

SEQ ID NO: 85473 - DNA, 20 bp, Artificial Sequence
  Description of Artificial Sequence: Synthetic oligonucleotide
  Target: ATXN2; (+) strand; PAM type: YTN; PAM sequence: TTA
ggctccttttttgagccaaa

SEQ ID NO: 85474 - DNA, 20 bp, Artificial Sequence
  Description of Artificial Sequence: Synthetic oligonucleotide
  Target: ATXN2; (+) strand; PAM type: YTN; PAM sequence: CTC
cttttttgagccaaaatgga

SEQ ID NO: 85475 - DNA, 20 bp, Artificial Sequence
  Description of Artificial Sequence: Synthetic oligonucleotide
  Target: ATXN2; (+) strand; PAM type: YTN; PAM sequence: CTT
ttttgagccaaaatggaagc

SEQ ID NO: 85476 - DNA, 20 bp, Artificial Sequence
  Description of Artificial Sequence: Synthetic oligonucleotide
  Target: ATXN2; (+) strand; PAM type: YTN; PAM sequence: TTT
tttgagccaaaatggaagct

SEQ ID NO: 85477 - DNA, 20 bp, Artificial Sequence
  Description of Artificial Sequence: Synthetic oligonucleotide
  Target: ATXN2; (+) strand; PAM type: YTN; PAM sequence: TTT
ttgagccaaaatggaagctg

SEQ ID NO: 85478 - DNA, 20 bp, Artificial Sequence
  Description of Artificial Sequence: Synthetic oligonucleotide
  Target: ATXN2; (+) strand; PAM type: YTN; PAM sequence: TTT
tgagccaaaatggaagctgg

SEQ ID NO: 85479 - DNA, 20 bp, Artificial Sequence
  Description of Artificial Sequence: Synthetic oligonucleotide
  Target: ATXN2; (+) strand; PAM type: YTN; PAM sequence: TTT
gagccaaaatggaagctggg

SEQ ID NO: 85480 - DNA, 20 bp, Artificial Sequence
  Description of Artificial Sequence: Synthetic oligonucleotide
  Target: ATXN2; (+) strand; PAM type: YTN; PAM sequence: TTG
agccaaaatggaagctggga

SEQ ID NO: 85481 - DNA, 20 bp, Artificial Sequence
  Description of Artificial Sequence: Synthetic oligonucleotide
  Target: ATXN2; (+) strand; PAM type: YTN; PAM sequence: CTG
ggaatctggtgccataacta

SEQ ID NO: 85482 - DNA, 20 bp, Artificial Sequence
  Description of Artificial Sequence: Synthetic oligonucleotide
  Target: ATXN2; (+) strand; PAM type: YTN; PAM sequence: CTG
gtgccataactaatgagaaa

SEQ ID NO: 85483 - DNA, 20 bp, Artificial Sequence
  Description of Artificial Sequence: Synthetic oligonucleotide
  Target: ATXN2; (+) strand; PAM type: YTN; PAM sequence: CTA
atgagaaactcctttaatag

SEQ ID NO: 85484 - DNA, 20 bp, Artificial Sequence
  Description of Artificial Sequence: Synthetic oligonucleotide
  Target: ATXN2; (+) strand; PAM type: YTN; PAM sequence: CTC
ctttaatagcccacaatcag

SEQ ID NO: 85485 - DNA, 20 bp, Artificial Sequence
  Description of Artificial Sequence: Synthetic oligonucleotide
  Target: ATXN2; (+) strand; PAM type: YTN; PAM sequence: CTT
taatagcccacaatcagtgt

SEQ ID NO: 85486 - DNA, 20 bp, Artificial Sequence
  Description of Artificial Sequence: Synthetic oligonucleotide
  Target: ATXN2; (+) strand; PAM type: YTN; PAM sequence: TTT
aatagcccacaatcagtgtt

SEQ ID NO: 85487 - DNA, 20 bp, Artificial Sequence
  Description of Artificial Sequence: Synthetic oligonucleotide
  Target: ATXN2; (+) strand; PAM type: YTN; PAM sequence: TTA
atagcccacaatcagtgttc

SEQ ID NO: 85488 - DNA, 20 bp, Artificial Sequence
  Description of Artificial Sequence: Synthetic oligonucleotide
  Target: ATXN2; (+) strand; PAM type: YTN; PAM sequence: TTC
tgttctagctggctactgct

SEQ ID NO: 85489 - DNA, 20 bp, Artificial Sequence
  Description of Artificial Sequence: Synthetic oligonucleotide
  Target: ATXN2; (+) strand; PAM type: YTN; PAM sequence: CTG
ttctagctggctactgcttc

SEQ ID NO: 85490 - DNA, 20 bp, Artificial Sequence
  Description of Artificial Sequence: Synthetic oligonucleotide
  Target: ATXN2; (+) strand; PAM type: YTN; PAM sequence: TTC
tagctggctactgcttcact

SEQ ID NO: 85491 - DNA, 20 bp, Artificial Sequence
  Description of Artificial Sequence: Synthetic oligonucleotide
  Target: ATXN2; (+) strand; PAM type: YTN; PAM sequence: CTA
gctggctactgcttcactgg

SEQ ID NO: 85492 - DNA, 20 bp, Artificial Sequence
  Description of Artificial Sequence: Synthetic oligonucleotide
  Target: ATXN2; (+) strand; PAM type: YTN; PAM sequence: CTG
gctactgcttcactggattg

SEQ ID NO: 85493 - DNA, 20 bp, Artificial Sequence
  Description of Artificial Sequence: Synthetic oligonucleotide
  Target: ATXN2; (+) strand; PAM type: YTN; PAM sequence: CTA
ctgcttcactggattgagaa

SEQ ID NO: 85494 - DNA, 20 bp, Artificial Sequence
  Description of Artificial Sequence: Synthetic oligonucleotide
  Target: ATXN2; (+) strand; PAM type: YTN; PAM sequence: CTG
cttcactggattgagaatct

SEQ ID NO: 85495 - DNA, 20 bp, Artificial Sequence
  Description of Artificial Sequence: Synthetic oligonucleotide
  Target: ATXN2; (+) strand; PAM type: YTN; PAM sequence: CTT
cactggattgagaatctatc

SEQ ID NO: 85496 - DNA, 20 bp, Artificial Sequence
  Description of Artificial Sequence: Synthetic oligonucleotide
  Target: ATXN2; (+) strand; PAM type: YTN; PAM sequence: TTC
actggattgagaatctatct

SEQ ID NO: 85497 - DNA, 20 bp, Artificial Sequence
  Description of Artificial Sequence: Synthetic oligonucleotide
  Target: ATXN2; (+) strand; PAM type: YTN; PAM sequence: CTG
gattgagaatctatctatct

SEQ ID NO: 85498 - DNA, 20 bp, Artificial Sequence
  Description of Artificial Sequence: Synthetic oligonucleotide
  Target: ATXN2; (+) strand; PAM type: YTN; PAM sequence: TTG
agaatctatctatctccttg

SEQ ID NO: 85499 - DNA, 20 bp, Artificial Sequence
  Description of Artificial Sequence: Synthetic oligonucleotide
  Target: ATXN2; (+) strand; PAM type: YTN; PAM sequence: CTA
tctatctccttgcacacatg

SEQ ID NO: 85500 - DNA, 20 bp, Artificial Sequence
  Description of Artificial Sequence: Synthetic oligonucleotide
  Target: ATXN2; (+) strand; PAM type: YTN; PAM sequence: CTA
tctccttgcacacatgggca

SEQ ID NO: 85501 - DNA, 20 bp, Artificial Sequence
  Description of Artificial Sequence: Synthetic oligonucleotide
  Target: ATXN2; (+) strand; PAM type: YTN; PAM sequence: CTC
cttgcacacatgggcacaca

SEQ ID NO: 85502 - DNA, 20 bp, Artificial Sequence
  Description of Artificial Sequence: Synthetic oligonucleotide
  Target: ATXN2; (+) strand; PAM type: YTN; PAM sequence: CTT
gcacacatgggcacacacaa

SEQ ID NO: 85503 - DNA, 20 bp, Artificial Sequence
  Description of Artificial Sequence: Synthetic oligonucleotide
  Target: ATXN2; (+) strand; PAM type: YTN; PAM sequence: TTG
cacacatgggcacacacaat

SEQ ID NO: 85504 - DNA, 20 bp, Artificial Sequence
  Description of Artificial Sequence: Synthetic oligonucleotide
  Target: ATXN2; (+) strand; PAM type: YTN; PAM sequence: CTC
caccatccagggaggtcctg

SEQ ID NO: 85505 - DNA, 20 bp, Artificial Sequence
  Description of Artificial Sequence: Synthetic oligonucleotide
  Target: ATXN2; (+) strand; PAM type: YTN; PAM sequence: CTG
aagtcaaatctctatctata

SEQ ID NO: 85506 - DNA, 20 bp, Artificial Sequence
  Description of Artificial Sequence: Synthetic oligonucleotide
  Target: ATXN2; (+) strand; PAM type: YTN; PAM sequence: CTC
tatctatacaagtgatacaa

SEQ ID NO: 85507 - DNA, 20 bp, Artificial Sequence
  Description of Artificial Sequence: Synthetic oligonucleotide
  Target: ATXN2; (+) strand; PAM type: YTN; PAM sequence: CTA
tctatacaagtgatacaatt

SEQ ID NO: 85508 - DNA, 20 bp, Artificial Sequence
  Description of Artificial Sequence: Synthetic oligonucleotide
  Target: ATXN2; (+) strand; PAM type: YTN; PAM sequence: CTA
tacaagtgatacaattcata

SEQ ID NO: 85509 - DNA, 20 bp, Artificial Sequence
  Description of Artificial Sequence: Synthetic oligonucleotide
  Target: ATXN2; (+) strand; PAM type: YTN; PAM sequence: TTC
atagggggctggctcctccc

SEQ ID NO: 85510 - DNA, 20 bp, Artificial Sequence
  Description of Artificial Sequence: Synthetic oligonucleotide
  Target: ATXN2; (+) strand; PAM type: YTN; PAM sequence: CTG
gctcctcccagaacctgtct

SEQ ID NO: 85511 - DNA, 20 bp, Artificial Sequence
  Description of Artificial Sequence: Synthetic oligonucleotide
  Target: ATXN2; (+) strand; PAM type: YTN; PAM sequence: CTC
ctcccagaacctgtctggag

SEQ ID NO: 85512 - DNA, 20 bp, Artificial Sequence
  Description of Artificial Sequence: Synthetic oligonucleotide
  Target: ATXN2; (+) strand; PAM type: YTN; PAM sequence: CTC
ccagaacctgtctggaggct

SEQ ID NO: 85513 - DNA, 20 bp, Artificial Sequence
  Description of Artificial Sequence: Synthetic oligonucleotide
  Target: ATXN2; (+) strand; PAM type: YTN; PAM sequence: CTG
tctggaggctcagaaacggg

SEQ ID NO: 85514 - DNA, 20 bp, Artificial Sequence
  Description of Artificial Sequence: Synthetic oligonucleotide
  Target: ATXN2; (+) strand; PAM type: YTN; PAM sequence: CTG
gaggctcagaaacgggggca

SEQ ID NO: 85515 - DNA, 20 bp, Artificial Sequence
  Description of Artificial Sequence: Synthetic oligonucleotide
  Target: ATXN2; (+) strand; PAM type: YTN; PAM sequence: CTC
agaaacgggggcagtgacag

SEQ ID NO: 85516 - DNA, 20 bp, Artificial Sequence
  Description of Artificial Sequence: Synthetic oligonucleotide
  Target: ATXN2; (+) strand; PAM type: YTN; PAM sequence: CTG
ctcttgggtgccagcagagc

SEQ ID NO: 85517 - DNA, 20 bp, Artificial Sequence
  Description of Artificial Sequence: Synthetic oligonucleotide
  Target: ATXN2; (+) strand; PAM type: YTN; PAM sequence: CTC
ttgggtgccagcagagccat

SEQ ID NO: 85518 - DNA, 20 bp, Artificial Sequence
  Description of Artificial Sequence: Synthetic oligonucleotide
  Target: ATXN2; (+) strand; PAM type: YTN; PAM sequence: CTT
gggtgccagcagagccattc

SEQ ID NO: 85519 - DNA, 20 bp, Artificial Sequence
  Description of Artificial Sequence: Synthetic oligonucleotide
  Target: ATXN2; (+) strand; PAM type: YTN; PAM sequence: TTG
ggtgccagcagagccattca

SEQ ID NO: 85520 - DNA, 20 bp, Artificial Sequence
  Description of Artificial Sequence: Synthetic oligonucleotide
  Target: ATXN2; (+) strand; PAM type: YTN; PAM sequence: TTC
agtacaacccccaggctcac

SEQ ID NO: 85521 - DNA, 20 bp, Artificial Sequence
  Description of Artificial Sequence: Synthetic oligonucleotide
  Target: ATXN2; (+) strand; PAM type: YTN; PAM sequence: CTC
acagcagtggcttctaggaa

SEQ ID NO: 85522 - DNA, 20 bp, Artificial Sequence
  Description of Artificial Sequence: Synthetic oligonucleotide
  Target: ATXN2; (+) strand; PAM type: YTN; PAM sequence: CTT
ctaggaaactgggagtttag

SEQ ID NO: 85523 - DNA, 20 bp, Artificial Sequence
  Description of Artificial Sequence: Synthetic oligonucleotide
  Target: ATXN2; (+) strand; PAM type: YTN; PAM sequence: TTC
taggaaactgggagtttaga

SEQ ID NO: 85524 - DNA, 20 bp, Artificial Sequence
  Description of Artificial Sequence: Synthetic oligonucleotide
  Target: ATXN2; (+) strand; PAM type: YTN; PAM sequence: CTA
ggaaactgggagtttagatc

SEQ ID NO: 85525 - DNA, 20 bp, Artificial Sequence
  Description of Artificial Sequence: Synthetic oligonucleotide
  Target: ATXN2; (+) strand; PAM type: YTN; PAM sequence: CTG
ggagtttagatcagctttac

SEQ ID NO: 85526 - DNA, 20 bp, Artificial Sequence
  Description of Artificial Sequence: Synthetic oligonucleotide
  Target: ATXN2; (+) strand; PAM type: YTN; PAM sequence: TTT
agatcagctttacagataca

SEQ ID NO: 85527 - DNA, 20 bp, Artificial Sequence
  Description of Artificial Sequence: Synthetic oligonucleotide
  Target: ATXN2; (+) strand; PAM type: YTN; PAM sequence: TTA
gatcagctttacagatacat

SEQ ID NO: 85528 - DNA, 20 bp, Artificial Sequence
  Description of Artificial Sequence: Synthetic oligonucleotide
  Target: ATXN2; (+) strand; PAM type: YTN; PAM sequence: CTT
tacagatacatcgatcagag

SEQ ID NO: 85529 - DNA, 20 bp, Artificial Sequence
  Description of Artificial Sequence: Synthetic oligonucleotide
  Target: ATXN2; (+) strand; PAM type: YTN; PAM sequence: TTT
acagatacatcgatcagagg

SEQ ID NO: 85530 - DNA, 20 bp, Artificial Sequence
  Description of Artificial Sequence: Synthetic oligonucleotide
  Target: ATXN2; (+) strand; PAM type: YTN; PAM sequence: TTA
cagatacatcgatcagaggc

SEQ ID NO: 85531 - DNA, 20 bp, Artificial Sequence
  Description of Artificial Sequence: Synthetic oligonucleotide
  Target: ATXN2; (+) strand; PAM type: YTN; PAM sequence: CTA
aaatgaaacctcagcctaaa

SEQ ID NO: 85532 - DNA, 20 bp, Artificial Sequence
  Description of Artificial Sequence: Synthetic oligonucleotide
  Target: ATXN2; (+) strand; PAM type: YTN; PAM sequence: CTC
agcctaaaactcataggact

SEQ ID NO: 85533 - DNA, 20 bp, Artificial Sequence
  Description of Artificial Sequence: Synthetic oligonucleotide
  Target: ATXN2; (+) strand; PAM type: YTN; PAM sequence: CTA
aaactcataggactgactgc

SEQ ID NO: 85534 - DNA, 20 bp, Artificial Sequence
  Description of Artificial Sequence: Synthetic oligonucleotide
  Target: ATXN2; (+) strand; PAM type: YTN; PAM sequence: CTC
ataggactgactgcctggga

SEQ ID NO: 85535 - DNA, 20 bp, Artificial Sequence
  Description of Artificial Sequence: Synthetic oligonucleotide
  Target: ATXN2; (+) strand; PAM type: YTN; PAM sequence: CTG
actgcctgggaggagggtta

SEQ ID NO: 85536 - DNA, 20 bp, Artificial Sequence
  Description of Artificial Sequence: Synthetic oligonucleotide
  Target: ATXN2; (+) strand; PAM type: YTN; PAM sequence: CTG
cctgggaggagggttaggtc

SEQ ID NO: 85537 - DNA, 20 bp, Artificial Sequence
  Description of Artificial Sequence: Synthetic oligonucleotide
  Target: ATXN2; (+) strand; PAM type: YTN; PAM sequence: CTG
ggaggagggttaggtctgct

SEQ ID NO: 85538 - DNA, 20 bp, Artificial Sequence
  Description of Artificial Sequence: Synthetic oligonucleotide
  Target: ATXN2; (+) strand; PAM type: YTN; PAM sequence: TTA
ggtctgcttcttccacttat

SEQ ID NO: 85539 - DNA, 20 bp, Artificial Sequence
  Description of Artificial Sequence: Synthetic oligonucleotide
  Target: ATXN2; (+) strand; PAM type: YTN; PAM sequence: CTG
cttcttccacttatacttag

SEQ ID NO: 85540 - DNA, 20 bp, Artificial Sequence
  Description of Artificial Sequence: Synthetic oligonucleotide
  Target: ATXN2; (+) strand; PAM type: YTN; PAM sequence: CTT
cttccacttatacttagtct

SEQ ID NO: 85541 - DNA, 20 bp, Artificial Sequence
  Description of Artificial Sequence: Synthetic oligonucleotide
  Target: ATXN2; (+) strand; PAM type: YTN; PAM sequence: TTC
ttccacttatacttagtctc

SEQ ID NO: 85542 - DNA, 20 bp, Artificial Sequence
  Description of Artificial Sequence: Synthetic oligonucleotide
  Target: ATXN2; (+) strand; PAM type: YTN; PAM sequence: CTT
ccacttatacttagtctctg

SEQ ID NO: 85543 - DNA, 20 bp, Artificial Sequence
  Description of Artificial Sequence: Synthetic oligonucleotide
  Target: ATXN2; (+) strand; PAM type: YTN; PAM sequence: TTC
cacttatacttagtctctgt

SEQ ID NO: 85544 - DNA, 20 bp, Artificial Sequence
  Description of Artificial Sequence: Synthetic oligonucleotide
  Target: ATXN2; (+) strand; PAM type: YTN; PAM sequence: CTT
atacttagtctctgtgctcc

SEQ ID NO: 85545 - DNA, 20 bp, Artificial Sequence
  Description of Artificial Sequence: Synthetic oligonucleotide
  Target: ATXN2; (+) strand; PAM type: YTN; PAM sequence: TTA
tacttagtctctgtgctcca

SEQ ID NO: 85546 - DNA, 20 bp, Artificial Sequence
  Description of Artificial Sequence: Synthetic oligonucleotide
  Target: ATXN2; (+) strand; PAM type: YTN; PAM sequence: CTT
agtctctgtgctccaagagg

SEQ ID NO: 85547 - DNA, 20 bp, Artificial Sequence
  Description of Artificial Sequence: Synthetic oligonucleotide
  Target: ATXN2; (+) strand; PAM type: YTN; PAM sequence: TTA
gtctctgtgctccaagaggt

SEQ ID NO: 85548 - DNA, 20 bp, Artificial Sequence
  Description of Artificial Sequence: Synthetic oligonucleotide
  Target: ATXN2; (+) strand; PAM type: YTN; PAM sequence: CTC
tgtgctccaagaggtcaaat

SEQ ID NO: 85549 - DNA, 20 bp, Artificial Sequence
  Description of Artificial Sequence: Synthetic oligonucleotide
  Target: ATXN2; (+) strand; PAM type: YTN; PAM sequence: CTG
tgctccaagaggtcaaattt

SEQ ID NO: 85550 - DNA, 20 bp, Artificial Sequence
  Description of Artificial Sequence: Synthetic oligonucleotide
  Target: ATXN2; (+) strand; PAM type: YTN; PAM sequence: CTC
caagaggtcaaatttttgct

SEQ ID NO: 85551 - DNA, 20 bp, Artificial Sequence
  Description of Artificial Sequence: Synthetic oligonucleotide
  Target: ATXN2; (+) strand; PAM type: YTN; PAM sequence: TTT
ttgcttctagaatttccttg

SEQ ID NO: 85552 - DNA, 20 bp, Artificial Sequence
  Description of Artificial Sequence: Synthetic oligonucleotide
  Target: ATXN2; (+) strand; PAM type: YTN; PAM sequence: TTT
tgcttctagaatttccttgg

SEQ ID NO: 85553 - DNA, 20 bp, Artificial Sequence
  Description of Artificial Sequence: Synthetic oligonucleotide
  Target: ATXN2; (+) strand; PAM type: YTN; PAM sequence: TTT
gcttctagaatttccttggg

SEQ ID NO: 85554 - DNA, 20 bp, Artificial Sequence
  Description of Artificial Sequence: Synthetic oligonucleotide
  Target: ATXN2; (+) strand; PAM type: YTN; PAM sequence: TTG
cttctagaatttccttgggg

SEQ ID NO: 85555 - DNA, 20 bp, Artificial Sequence
  Description of Artificial Sequence: Synthetic oligonucleotide
  Target: ATXN2; (+) strand; PAM type: YTN; PAM sequence: CTT
ctagaatttccttggggtct

SEQ ID NO: 85556 - DNA, 20 bp, Artificial Sequence
  Description of Artificial Sequence: Synthetic oligonucleotide
  Target: ATXN2; (+) strand; PAM type: YTN; PAM sequence: TTC
tagaatttccttggggtctt

SEQ ID NO: 85557 - DNA, 20 bp, Artificial Sequence
  Description of Artificial Sequence: Synthetic oligonucleotide
  Target: ATXN2; (+) strand; PAM type: YTN; PAM sequence: CTA
gaatttccttggggtctttc

SEQ ID NO: 85558 - DNA, 20 bp, Artificial Sequence
  Description of Artificial Sequence: Synthetic oligonucleotide
  Target: ATXN2; (+) strand; PAM type: YTN; PAM sequence: TTT
ccttggggtctttcagaggg

SEQ ID NO: 85559 - DNA, 20 bp, Artificial Sequence
  Description of Artificial Sequence: Synthetic oligonucleotide
  Target: ATXN2; (+) strand; PAM type: YTN; PAM sequence: TTC
cttggggtctttcagagggt

SEQ ID NO: 85560 - DNA, 20 bp, Artificial Sequence
  Description of Artificial Sequence: Synthetic oligonucleotide
  Target: ATXN2; (+) strand; PAM type: YTN; PAM sequence: CTT
ggggtctttcagagggtggg

SEQ ID NO: 85561 - DNA, 20 bp, Artificial Sequence
  Description of Artificial Sequence: Synthetic oligonucleotide
  Target: ATXN2; (+) strand; PAM type: YTN; PAM sequence: TTG
gggtctttcagagggtgggg

SEQ ID NO: 85562 - DNA, 20 bp, Artificial Sequence
  Description of Artificial Sequence: Synthetic oligonucleotide
  Target: ATXN2; (+) strand; PAM type: YTN; PAM sequence: CTT
tcagagggtgggggaacaaa

SEQ ID NO: 85563 - DNA, 20 bp, Artificial Sequence
  Description of Artificial Sequence: Synthetic oligonucleotide
  Target: ATXN2; (+) strand; PAM type: YTN; PAM sequence: TTT
cagagggtgggggaacaaac

SEQ ID NO: 85564 - DNA, 20 bp, Artificial Sequence
  Description of Artificial Sequence: Synthetic oligonucleotide
  Target: ATXN2; (+) strand; PAM type: YTN; PAM sequence: TTC
agagggtgggggaacaaacc

SEQ ID NO: 85565 - DNA, 20 bp, Artificial Sequence
  Description of Artificial Sequence: Synthetic oligonucleotide
  Target: ATXN2; (+) strand; PAM type: YTN; PAM sequence: CTA
tgcacttttctttttttttt

SEQ ID NO: 85566 - DNA, 20 bp, Artificial Sequence
  Description of Artificial Sequence: Synthetic oligonucleotide
  Target: ATXN2; (+) strand; PAM type: YTN; PAM sequence: CTT
ttcttttttttttttttgag

SEQ ID NO: 85567 - DNA, 20 bp, Artificial Sequence
  Description of Artificial Sequence: Synthetic oligonucleotide
  Target: ATXN2; (+) strand; PAM type: YTN; PAM sequence: TTT
tcttttttttttttttgaga

SEQ ID NO: 85568 - DNA, 20 bp, Artificial Sequence
  Description of Artificial Sequence: Synthetic oligonucleotide
  Target: ATXN2; (+) strand; PAM type: YTN; PAM sequence: TTT
cttttttttttttttgagat

SEQ ID NO: 85569 - DNA, 20 bp, Artificial Sequence
  Description of Artificial Sequence: Synthetic oligonucleotide
  Target: ATXN2; (+) strand; PAM type: YTN; PAM sequence: TTC
ttttttttttttttgagatg

SEQ ID NO: 85570 - DNA, 20 bp, Artificial Sequence
  Description of Artificial Sequence: Synthetic oligonucleotide
  Target: ATXN2; (+) strand; PAM type: YTN; PAM sequence: CTT
ttttttttttttgagatgga

SEQ ID NO: 85571 - DNA, 20 bp, Artificial Sequence
  Description of Artificial Sequence: Synthetic oligonucleotide
  Target: ATXN2; (+) strand; PAM type: YTN; PAM sequence: TTT
tttttttttttgagatggag

SEQ ID NO: 85572 - DNA, 20 bp, Artificial Sequence
  Description of Artificial Sequence: Synthetic oligonucleotide
  Target: ATXN2; (+) strand; PAM type: YTN; PAM sequence: TTT
ttttttttttgagatggagt

SEQ ID NO: 85573 - DNA, 20 bp, Artificial Sequence
  Description of Artificial Sequence: Synthetic oligonucleotide
  Target: ATXN2; (+) strand; PAM type: YTN; PAM sequence: TTT
tttttttttgagatggagtt

SEQ ID NO: 85574 - DNA, 20 bp, Artificial Sequence
  Description of Artificial Sequence: Synthetic oligonucleotide
  Target: ATXN2; (+) strand; PAM type: YTN; PAM sequence: TTT
ttttttttgagatggagttt

SEQ ID NO: 85575 - DNA, 20 bp, Artificial Sequence
  Description of Artificial Sequence: Synthetic oligonucleotide
  Target: ATXN2; (+) strand; PAM type: YTN; PAM sequence: TTT
tttttttgagatggagtttc

SEQ ID NO: 85576 - DNA, 20 bp, Artificial Sequence
  Description of Artificial Sequence: Synthetic oligonucleotide
  Target: ATXN2; (+) strand; PAM type: YTN; PAM sequence: TTT
ttttttgagatggagtttct

SEQ ID NO: 85577 - DNA, 20 bp, Artificial Sequence
  Description of Artificial Sequence: Synthetic oligonucleotide
  Target: ATXN2; (+) strand; PAM type: YTN; PAM sequence: TTT
tttttgagatggagtttctc

SEQ ID NO: 85578 - DNA, 20 bp, Artificial Sequence
  Description of Artificial Sequence: Synthetic oligonucleotide
  Target: ATXN2; (+) strand; PAM type: YTN; PAM sequence: TTT
ttttgagatggagtttctct

SEQ ID NO: 85579 - DNA, 20 bp, Artificial Sequence
  Description of Artificial Sequence: Synthetic oligonucleotide
  Target: ATXN2; (+) strand; PAM type: YTN; PAM sequence: TTT
tttgagatggagtttctctt

SEQ ID NO: 85580 - DNA, 20 bp, Artificial Sequence
  Description of Artificial Sequence: Synthetic oligonucleotide
  Target: ATXN2; (+) strand; PAM type: YTN; PAM sequence: TTT
ttgagatggagtttctcttg

SEQ ID NO: 85581 - DNA, 20 bp, Artificial Sequence
  Description of Artificial Sequence: Synthetic oligonucleotide
  Target: ATXN2; (+) strand; PAM type: YTN; PAM sequence: TTT
tgagatggagtttctcttgt

SEQ ID NO: 85582 - DNA, 20 bp, Artificial Sequence
  Description of Artificial Sequence: Synthetic oligonucleotide
  Target: ATXN2; (+) strand; PAM type: YTN; PAM sequence: TTT
gagatggagtttctcttgtc

SEQ ID NO: 85583 - DNA, 20 bp, Artificial Sequence
  Description of Artificial Sequence: Synthetic oligonucleotide
  Target: ATXN2; (+) strand; PAM type: YTN; PAM sequence: TTG
agatggagtttctcttgtca

SEQ ID NO: 85584 - DNA, 20 bp, Artificial Sequence
  Description of Artificial Sequence: Synthetic oligonucleotide
  Target: ATXN2; (+) strand; PAM type: YTN; PAM sequence: TTT
ctcttgtcaaccgggctgga

SEQ ID NO: 85585 - DNA, 20 bp, Artificial Sequence
  Description of Artificial Sequence: Synthetic oligonucleotide
  Target: ATXN2; (+) strand; PAM type: YTN; PAM sequence: TTC
tcttgtcaaccgggctggag

SEQ ID NO: 85586 - DNA, 20 bp, Artificial Sequence
  Description of Artificial Sequence: Synthetic oligonucleotide
  Target: ATXN2; (+) strand; PAM type: YTN; PAM sequence: CTC
ttgtcaaccgggctggagtg

SEQ ID NO: 85587 - DNA, 20 bp, Artificial Sequence
  Description of Artificial Sequence: Synthetic oligonucleotide
  Target: ATXN2; (+) strand; PAM type: YTN; PAM sequence: CTT
gtcaaccgggctggagtgca

SEQ ID NO: 85588 - DNA, 20 bp, Artificial Sequence
  Description of Artificial Sequence: Synthetic oligonucleotide
  Target: ATXN2; (+) strand; PAM type: YTN; PAM sequence: TTG
tcaaccgggctggagtgcag

SEQ ID NO: 85589 - DNA, 20 bp, Artificial Sequence
  Description of Artificial Sequence: Synthetic oligonucleotide
  Target: ATXN2; (+) strand; PAM type: YTN; PAM sequence: CTG
gagtgcagtggtgcaatctt

SEQ ID NO: 85590 - DNA, 20 bp, Artificial Sequence
  Description of Artificial Sequence: Synthetic oligonucleotide
  Target: ATXN2; (+) strand; PAM type: YTN; PAM sequence: CTT
ggctcactgcaacctccacc

SEQ ID NO: 85591 - DNA, 20 bp, Artificial Sequence
  Description of Artificial Sequence: Synthetic oligonucleotide
  Target: ATXN2; (+) strand; PAM type: YTN; PAM sequence: TTG
gctcactgcaacctccacct

SEQ ID NO: 85592 - DNA, 20 bp, Artificial Sequence
  Description of Artificial Sequence: Synthetic oligonucleotide
  Target: ATXN2; (+) strand; PAM type: YTN; PAM sequence: CTC
actgcaacctccaccttcct

SEQ ID NO: 85593 - DNA, 20 bp, Artificial Sequence
  Description of Artificial Sequence: Synthetic oligonucleotide
  Target: ATXN2; (+) strand; PAM type: YTN; PAM sequence: CTG
caacctccaccttcctggtt

SEQ ID NO: 85594 - DNA, 20 bp, Artificial Sequence
  Description of Artificial Sequence: Synthetic oligonucleotide
  Target: ATXN2; (+) strand; PAM type: YTN; PAM sequence: CTC
caccttcctggttcaagcga

SEQ ID NO: 85595 - DNA, 20 bp, Artificial Sequence
  Description of Artificial Sequence: Synthetic oligonucleotide
  Target: ATXN2; (+) strand; PAM type: YTN; PAM sequence: CTT
cctggttcaagcgattctgc

SEQ ID NO: 85596 - DNA, 20 bp, Artificial Sequence
  Description of Artificial Sequence: Synthetic oligonucleotide
  Target: ATXN2; (+) strand; PAM type: YTN; PAM sequence: TTC
ctggttcaagcgattctgcc

SEQ ID NO: 85597 - DNA, 20 bp, Artificial Sequence
  Description of Artificial Sequence: Synthetic oligonucleotide
  Target: ATXN2; (+) strand; PAM type: YTN; PAM sequence: CTG
gttcaagcgattctgcctcg

SEQ ID NO: 85598 - DNA, 20 bp, Artificial Sequence
  Description of Artificial Sequence: Synthetic oligonucleotide
  Target: ATXN2; (+) strand; PAM type: YTN; PAM sequence: TTC
aagcgattctgcctcgacct

SEQ ID NO: 85599 - DNA, 20 bp, Artificial Sequence
  Description of Artificial Sequence: Synthetic oligonucleotide
  Target: ATXN2; (+) strand; PAM type: YTN; PAM sequence: TTC
tgcctcgacctctcaagtag

SEQ ID NO: 85600 - DNA, 20 bp, Artificial Sequence
  Description of Artificial Sequence: Synthetic oligonucleotide
  Target: ATXN2; (+) strand; PAM type: YTN; PAM sequence: CTG
cctcgacctctcaagtagct

SEQ ID NO: 85601 - DNA, 20 bp, Artificial Sequence
  Description of Artificial Sequence: Synthetic oligonucleotide
  Target: ATXN2; (+) strand; PAM type: YTN; PAM sequence: CTC
gacctctcaagtagctggga

SEQ ID NO: 85602 - DNA, 20 bp, Artificial Sequence
  Description of Artificial Sequence: Synthetic oligonucleotide
  Target: ATXN2; (+) strand; PAM type: YTN; PAM sequence: CTC
tcaagtagctgggattacaa

SEQ ID NO: 85603 - DNA, 20 bp, Artificial Sequence
  Description of Artificial Sequence: Synthetic oligonucleotide
  Target: ATXN2; (+) strand; PAM type: YTN; PAM sequence: CTC
aagtagctgggattacaagc

SEQ ID NO: 85604 - DNA, 20 bp, Artificial Sequence
  Description of Artificial Sequence: Synthetic oligonucleotide
  Target: ATXN2; (+) strand; PAM type: YTN; PAM sequence: CTG
ggattacaagcaccagccac

SEQ ID NO: 85605 - DNA, 20 bp, Artificial Sequence
  Description of Artificial Sequence: Synthetic oligonucleotide
  Target: ATXN2; (+) strand; PAM type: YTN; PAM sequence: TTA
caagcaccagccaccatgcc

SEQ ID NO: 85606 - DNA, 20 bp, Artificial Sequence
  Description of Artificial Sequence: Synthetic oligonucleotide
  Target: ATXN2; (+) strand; PAM type: YTN; PAM sequence: CTG
gctaattttgtatttttagt

SEQ ID NO: 85607 - DNA, 20 bp, Artificial Sequence
  Description of Artificial Sequence: Synthetic oligonucleotide
  Target: ATXN2; (+) strand; PAM type: YTN; PAM sequence: CTA
attttgtatttttagtagag

SEQ ID NO: 85608 - DNA, 20 bp, Artificial Sequence
  Description of Artificial Sequence: Synthetic oligonucleotide
  Target: ATXN2; (+) strand; PAM type: YTN; PAM sequence: TTT
tgtatttttagtagagacag

SEQ ID NO: 85609 - DNA, 20 bp, Artificial Sequence
  Description of Artificial Sequence: Synthetic oligonucleotide
  Target: ATXN2; (+) strand; PAM type: YTN; PAM sequence: TTT
gtatttttagtagagacagg

SEQ ID NO: 85610 - DNA, 20 bp, Artificial Sequence
  Description of Artificial Sequence: Synthetic oligonucleotide
  Target: ATXN2; (+) strand; PAM type: YTN; PAM sequence: TTG
tatttttagtagagacaggg

SEQ ID NO: 85611 - DNA, 20 bp, Artificial Sequence
  Description of Artificial Sequence: Synthetic oligonucleotide
  Target: ATXN2; (+) strand; PAM type: YTN; PAM sequence: TTT
ttagtagagacagggtttca

SEQ ID NO: 85612 - DNA, 20 bp, Artificial Sequence
  Description of Artificial Sequence: Synthetic oligonucleotide
  Target: ATXN2; (+) strand; PAM type: YTN; PAM sequence: TTT
tagtagagacagggtttcac

SEQ ID NO: 85613 - DNA, 20 bp, Artificial Sequence
  Description of Artificial Sequence: Synthetic oligonucleotide
  Target: ATXN2; (+) strand; PAM type: YTN; PAM sequence: TTT
agtagagacagggtttcacc

SEQ ID NO: 85614 - DNA, 20 bp, Artificial Sequence
  Description of Artificial Sequence: Synthetic oligonucleotide
  Target: ATXN2; (+) strand; PAM type: YTN; PAM sequence: TTA
gtagagacagggtttcacca

SEQ ID NO: 85615 - DNA, 20 bp, Artificial Sequence
  Description of Artificial Sequence: Synthetic oligonucleotide
  Target: ATXN2; (+) strand; PAM type: YTN; PAM sequence: TTT
caccatgttggccaggctgg

SEQ ID NO: 85616 - DNA, 20 bp, Artificial Sequence
  Description of Artificial Sequence: Synthetic oligonucleotide
  Target: ATXN2; (+) strand; PAM type: YTN; PAM sequence: TTC
accatgttggccaggctggt

SEQ ID NO: 85617 - DNA, 20 bp, Artificial Sequence
  Description of Artificial Sequence: Synthetic oligonucleotide
  Target: ATXN2; (+) strand; PAM type: YTN; PAM sequence: TTG
gccaggctggtctcgaatgt

SEQ ID NO: 85618 - DNA, 20 bp, Artificial Sequence
  Description of Artificial Sequence: Synthetic oligonucleotide
  Target: ATXN2; (+) strand; PAM type: YTN; PAM sequence: CTG
gtctcgaatgtctgacctca

SEQ ID NO: 85619 - DNA, 20 bp, Artificial Sequence
  Description of Artificial Sequence: Synthetic oligonucleotide
  Target: ATXN2; (+) strand; PAM type: YTN; PAM sequence: CTC
gaatgtctgacctcaggtga

SEQ ID NO: 85620 - DNA, 20 bp, Artificial Sequence
  Description of Artificial Sequence: Synthetic oligonucleotide
  Target: ATXN2; (+) strand; PAM type: YTN; PAM sequence: CTG
acctcaggtgatccacccgc

SEQ ID NO: 85621 - DNA, 20 bp, Artificial Sequence
  Description of Artificial Sequence: Synthetic oligonucleotide
  Target: ATXN2; (+) strand; PAM type: YTN; PAM sequence: CTC
aggtgatccacccgccttgg

SEQ ID NO: 85622 - DNA, 20 bp, Artificial Sequence
  Description of Artificial Sequence: Synthetic oligonucleotide
  Target: ATXN2; (+) strand; PAM type: YTN; PAM sequence: CTT
ggcctcccaaagtgctggga

SEQ ID NO: 85623 - DNA, 20 bp, Artificial Sequence
  Description of Artificial Sequence: Synthetic oligonucleotide
  Target: ATXN2; (+) strand; PAM type: YTN; PAM sequence: TTG
gcctcccaaagtgctgggat

SEQ ID NO: 85624 - DNA, 20 bp, Artificial Sequence
  Description of Artificial Sequence: Synthetic oligonucleotide
  Target: ATXN2; (+) strand; PAM type: YTN; PAM sequence: CTC
ccaaagtgctgggattacag

SEQ ID NO: 85625 - DNA, 20 bp, Artificial Sequence
  Description of Artificial Sequence: Synthetic oligonucleotide
  Target: ATXN2; (+) strand; PAM type: YTN; PAM sequence: CTG
ggattacaggcgcgagccac

SEQ ID NO: 85626 - DNA, 20 bp, Artificial Sequence
  Description of Artificial Sequence: Synthetic oligonucleotide
  Target: ATXN2; (+) strand; PAM type: YTN; PAM sequence: TTA
caggcgcgagccaccgcgcc

SEQ ID NO: 85627 - DNA, 20 bp, Artificial Sequence
  Description of Artificial Sequence: Synthetic oligonucleotide
  Target: ATXN2; (+) strand; PAM type: YTN; PAM sequence: CTA
caccacttttagtaccaaca

SEQ ID NO: 85628 - DNA, 20 bp, Artificial Sequence
  Description of Artificial Sequence: Synthetic oligonucleotide
  Target: ATXN2; (+) strand; PAM type: YTN; PAM sequence: CTT
ttagtaccaacactcttggg

SEQ ID NO: 85629 - DNA, 20 bp, Artificial Sequence
  Description of Artificial Sequence: Synthetic oligonucleotide
  Target: ATXN2; (+) strand; PAM type: YTN; PAM sequence: TTT
tagtaccaacactcttgggt

SEQ ID NO: 85630 - DNA, 20 bp, Artificial Sequence
  Description of Artificial Sequence: Synthetic oligonucleotide
  Target: ATXN2; (+) strand; PAM type: YTN; PAM sequence: TTT
agtaccaacactcttgggtg

SEQ ID NO: 85631 - DNA, 20 bp, Artificial Sequence
  Description of Artificial Sequence: Synthetic oligonucleotide
  Target: ATXN2; (+) strand; PAM type: YTN; PAM sequence: TTA
gtaccaacactcttgggtga

SEQ ID NO: 85632 - DNA, 20 bp, Artificial Sequence
  Description of Artificial Sequence: Synthetic oligonucleotide
  Target: ATXN2; (+) strand; PAM type: YTN; PAM sequence: CTC
ttgggtgatttcatggaccc

SEQ ID NO: 85633 - DNA, 20 bp, Artificial Sequence
  Description of Artificial Sequence: Synthetic oligonucleotide
  Target: ATXN2; (+) strand; PAM type: YTN; PAM sequence: CTT
gggtgatttcatggacccta

SEQ ID NO: 85634 - DNA, 20 bp, Artificial Sequence
  Description of Artificial Sequence: Synthetic oligonucleotide
  Target: ATXN2; (+) strand; PAM type: YTN; PAM sequence: TTG
ggtgatttcatggaccctaa

SEQ ID NO: 85635 - DNA, 20 bp, Artificial Sequence
  Description of Artificial Sequence: Synthetic oligonucleotide
  Target: ATXN2; (+) strand; PAM type: YTN; PAM sequence: TTT
catggaccctaaagcagacc

SEQ ID NO: 85636 - DNA, 20 bp, Artificial Sequence
  Description of Artificial Sequence: Synthetic oligonucleotide
  Target: ATXN2; (+) strand; PAM type: YTN; PAM sequence: TTC
atggaccctaaagcagacct

SEQ ID NO: 85637 - DNA, 20 bp, Artificial Sequence
  Description of Artificial Sequence: Synthetic oligonucleotide
  Target: ATXN2; (+) strand; PAM type: YTN; PAM sequence: CTA
aagcagacctgacactgatc

SEQ ID NO: 85638 - DNA, 20 bp, Artificial Sequence
  Description of Artificial Sequence: Synthetic oligonucleotide
  Target: ATXN2; (+) strand; PAM type: YTN; PAM sequence: CTG
acactgatccagatttgcag

SEQ ID NO: 85639 - DNA, 20 bp, Artificial Sequence
  Description of Artificial Sequence: Synthetic oligonucleotide
  Target: ATXN2; (+) strand; PAM type: YTN; PAM sequence: CTG
atccagatttgcagtccatt

SEQ ID NO: 85640 - DNA, 20 bp, Artificial Sequence
  Description of Artificial Sequence: Synthetic oligonucleotide
  Target: ATXN2; (+) strand; PAM type: YTN; PAM sequence: TTT
gcagtccatttttaaggaca

SEQ ID NO: 85641 - DNA, 20 bp, Artificial Sequence
  Description of Artificial Sequence: Synthetic oligonucleotide
  Target: ATXN2; (+) strand; PAM type: YTN; PAM sequence: TTG
cagtccatttttaaggacac

SEQ ID NO: 85642 - DNA, 20 bp, Artificial Sequence
  Description of Artificial Sequence: Synthetic oligonucleotide
  Target: ATXN2; (+) strand; PAM type: YTN; PAM sequence: TTT
ttaaggacacctgtctttat

SEQ ID NO: 85643 - DNA, 20 bp, Artificial Sequence
  Description of Artificial Sequence: Synthetic oligonucleotide
  Target: ATXN2; (+) strand; PAM type: YTN; PAM sequence: TTT
taaggacacctgtctttatt

SEQ ID NO: 85644 - DNA, 20 bp, Artificial Sequence
  Description of Artificial Sequence: Synthetic oligonucleotide
  Target: ATXN2; (+) strand; PAM type: YTN; PAM sequence: TTT
aaggacacctgtctttattt

SEQ ID NO: 85645 - DNA, 20 bp, Artificial Sequence
  Description of Artificial Sequence: Synthetic oligonucleotide
  Target: ATXN2; (+) strand; PAM type: YTN; PAM sequence: TTA
aggacacctgtctttatttc

SEQ ID NO: 85646 - DNA, 20 bp, Artificial Sequence
  Description of Artificial Sequence: Synthetic oligonucleotide
  Target: ATXN2; (+) strand; PAM type: YTN; PAM sequence: CTG
tctttatttcctcaaagtca

SEQ ID NO: 85647 - DNA, 20 bp, Artificial Sequence
  Description of Artificial Sequence: Synthetic oligonucleotide
  Target: ATXN2; (+) strand; PAM type: YTN; PAM sequence: CTT
tatttcctcaaagtcaagca

SEQ ID NO: 85648 - DNA, 20 bp, Artificial Sequence
  Description of Artificial Sequence: Synthetic oligonucleotide
  Target: ATXN2; (+) strand; PAM type: YTN; PAM sequence: TTT
atttcctcaaagtcaagcag

SEQ ID NO: 85649 - DNA, 20 bp, Artificial Sequence
  Description of Artificial Sequence: Synthetic oligonucleotide
  Target: ATXN2; (+) strand; PAM type: YTN; PAM sequence: TTA
tttcctcaaagtcaagcagc

SEQ ID NO: 85650 - DNA, 20 bp, Artificial Sequence
  Description of Artificial Sequence: Synthetic oligonucleotide
  Target: ATXN2; (+) strand; PAM type: YTN; PAM sequence: TTT
cctcaaagtcaagcagcttt

SEQ ID NO: 85651 - DNA, 20 bp, Artificial Sequence
  Description of Artificial Sequence: Synthetic oligonucleotide
  Target: ATXN2; (+) strand; PAM type: YTN; PAM sequence: TTC
ctcaaagtcaagcagctttc

SEQ ID NO: 85652 - DNA, 20 bp, Artificial Sequence
  Description of Artificial Sequence: Synthetic oligonucleotide
  Target: ATXN2; (+) strand; PAM type: YTN; PAM sequence: CTC
aaagtcaagcagctttctct

SEQ ID NO: 85653 - DNA, 20 bp, Artificial Sequence
  Description of Artificial Sequence: Synthetic oligonucleotide
  Target: ATXN2; (+) strand; PAM type: YTN; PAM sequence: CTT
tctctggaaaatgaatgcta

SEQ ID NO: 85654 - DNA, 20 bp, Artificial Sequence
  Description of Artificial Sequence: Synthetic oligonucleotide
  Target: ATXN2; (+) strand; PAM type: YTN; PAM sequence: TTT
ctctggaaaatgaatgctaa

SEQ ID NO: 85655 - DNA, 20 bp, Artificial Sequence
  Description of Artificial Sequence: Synthetic oligonucleotide
  Target: ATXN2; (+) strand; PAM type: YTN; PAM sequence: TTC
tctggaaaatgaatgctaat

SEQ ID NO: 85656 - DNA, 20 bp, Artificial Sequence
  Description of Artificial Sequence: Synthetic oligonucleotide
  Target: ATXN2; (+) strand; PAM type: YTN; PAM sequence: CTC
tggaaaatgaatgctaatta

SEQ ID NO: 85657 - DNA, 20 bp, Artificial Sequence
  Description of Artificial Sequence: Synthetic oligonucleotide
  Target: ATXN2; (+) strand; PAM type: YTN; PAM sequence: CTG
gaaaatgaatgctaattagt

SEQ ID NO: 85658 - DNA, 20 bp, Artificial Sequence
  Description of Artificial Sequence: Synthetic oligonucleotide
  Target: ATXN2; (+) strand; PAM type: YTN; PAM sequence: CTA
attagtgtgaaccaaaagag

SEQ ID NO: 85659 - DNA, 20 bp, Artificial Sequence
  Description of Artificial Sequence: Synthetic oligonucleotide
  Target: ATXN2; (+) strand; PAM type: YTN; PAM sequence: TTA
gtgtgaaccaaaagagtaag

SEQ ID NO: 85660 - DNA, 20 bp, Artificial Sequence
  Description of Artificial Sequence: Synthetic oligonucleotide
  Target: ATXN2; (+) strand; PAM type: YTN; PAM sequence: CTG
aagtttttttaaaggagaaa

SEQ ID NO: 85661 - DNA, 20 bp, Artificial Sequence
  Description of Artificial Sequence: Synthetic oligonucleotide
  Target: ATXN2; (+) strand; PAM type: YTN; PAM sequence: TTT
ttttaaaggagaaagcttat

SEQ ID NO: 85662 - DNA, 20 bp, Artificial Sequence
  Description of Artificial Sequence: Synthetic oligonucleotide
  Target: ATXN2; (+) strand; PAM type: YTN; PAM sequence: TTT
tttaaaggagaaagcttatt

SEQ ID NO: 85663 - DNA, 20 bp, Artificial Sequence
  Description of Artificial Sequence: Synthetic oligonucleotide
  Target: ATXN2; (+) strand; PAM type: YTN; PAM sequence: TTT
ttaaaggagaaagcttatta

SEQ ID NO: 85664 - DNA, 20 bp, Artificial Sequence
  Description of Artificial Sequence: Synthetic oligonucleotide
  Target: ATXN2; (+) strand; PAM type: YTN; PAM sequence: TTT
taaaggagaaagcttattat

SEQ ID NO: 85665 - DNA, 20 bp, Artificial Sequence
  Description of Artificial Sequence: Synthetic oligonucleotide
  Target: ATXN2; (+) strand; PAM type: YTN; PAM sequence: TTT
aaaggagaaagcttattatg

SEQ ID NO: 85666 - DNA, 20 bp, Artificial Sequence
  Description of Artificial Sequence: Synthetic oligonucleotide
  Target: ATXN2; (+) strand; PAM type: YTN; PAM sequence: TTA
aaggagaaagcttattatgg

SEQ ID NO: 85667 - DNA, 20 bp, Artificial Sequence
  Description of Artificial Sequence: Synthetic oligonucleotide
  Target: ATXN2; (+) strand; PAM type: YTN; PAM sequence: CTT
attatggaaagtcactggtc

SEQ ID NO: 85668 - DNA, 20 bp, Artificial Sequence
  Description of Artificial Sequence: Synthetic oligonucleotide
  Target: ATXN2; (+) strand; PAM type: YTN; PAM sequence: TTA
ttatggaaagtcactggtcc

SEQ ID NO: 85669 - DNA, 20 bp, Artificial Sequence
  Description of Artificial Sequence: Synthetic oligonucleotide
  Target: ATXN2; (+) strand; PAM type: YTN; PAM sequence: TTA
tggaaagtcactggtcctcc

SEQ ID NO: 85670 - DNA, 20 bp, Artificial Sequence
  Description of Artificial Sequence: Synthetic oligonucleotide
  Target: ATXN2; (+) strand; PAM type: YTN; PAM sequence: CTG
gtcctcccctccgcacagga

SEQ ID NO: 85671 - DNA, 20 bp, Artificial Sequence
  Description of Artificial Sequence: Synthetic oligonucleotide
  Target: ATXN2; (+) strand; PAM type: YTN; PAM sequence: CTC
ccctccgcacaggaaaggta

SEQ ID NO: 85672 - DNA, 20 bp, Artificial Sequence
  Description of Artificial Sequence: Synthetic oligonucleotide
  Target: ATXN2; (+) strand; PAM type: YTN; PAM sequence: CTC
cgcacaggaaaggtacccag

SEQ ID NO: 85673 - DNA, 20 bp, Artificial Sequence
  Description of Artificial Sequence: Synthetic oligonucleotide
  Target: ATXN2; (+) strand; PAM type: YTN; PAM sequence: TTA
agttccctccctccagccag

SEQ ID NO: 85674 - DNA, 20 bp, Artificial Sequence
  Description of Artificial Sequence: Synthetic oligonucleotide
  Target: ATXN2; (+) strand; PAM type: YTN; PAM sequence: TTC
cctccctccagccagaagtt

SEQ ID NO: 85675 - DNA, 20 bp, Artificial Sequence
  Description of Artificial Sequence: Synthetic oligonucleotide
  Target: ATXN2; (+) strand; PAM type: YTN; PAM sequence: CTC
cctccagccagaagttaaac

SEQ ID NO: 85676 - DNA, 20 bp, Artificial Sequence
  Description of Artificial Sequence: Synthetic oligonucleotide
  Target: ATXN2; (+) strand; PAM type: YTN; PAM sequence: CTC
cagccagaagttaaacatct

SEQ ID NO: 85677 - DNA, 20 bp, Artificial Sequence
  Description of Artificial Sequence: Synthetic oligonucleotide
  Target: ATXN2; (+) strand; PAM type: YTN; PAM sequence: TTA
aacatctgggatatgacgtc

SEQ ID NO: 85678 - DNA, 20 bp, Artificial Sequence
  Description of Artificial Sequence: Synthetic oligonucleotide
  Target: ATXN2; (+) strand; PAM type: YTN; PAM sequence: CTG
ggatatgacgtcttcatgcc

SEQ ID NO: 85679 - DNA, 20 bp, Artificial Sequence
  Description of Artificial Sequence: Synthetic oligonucleotide
  Target: ATXN2; (+) strand; PAM type: YTN; PAM sequence: CTT
catgccaggggcactcattt

SEQ ID NO: 85680 - DNA, 20 bp, Artificial Sequence
  Description of Artificial Sequence: Synthetic oligonucleotide
  Target: ATXN2; (+) strand; PAM type: YTN; PAM sequence: TTC
atgccaggggcactcatttc

SEQ ID NO: 85681 - DNA, 20 bp, Artificial Sequence
  Description of Artificial Sequence: Synthetic oligonucleotide
  Target: ATXN2; (+) strand; PAM type: YTN; PAM sequence: CTC
atttcttagcagcctctcta

SEQ ID NO: 85682 - DNA, 20 bp, Artificial Sequence
  Description of Artificial Sequence: Synthetic oligonucleotide
  Target: ATXN2; (+) strand; PAM type: YTN; PAM sequence: TTT
cttagcagcctctctacata

SEQ ID NO: 85683 - DNA, 20 bp, Artificial Sequence
  Description of Artificial Sequence: Synthetic oligonucleotide
  Target: ATXN2; (+) strand; PAM type: YTN; PAM sequence: TTC
ttagcagcctctctacatac

SEQ ID NO: 85684 - DNA, 20 bp, Artificial Sequence
  Description of Artificial Sequence: Synthetic oligonucleotide
  Target: ATXN2; (+) strand; PAM type: YTN; PAM sequence: CTT
agcagcctctctacatacat

SEQ ID NO: 85685 - DNA, 20 bp, Artificial Sequence
  Description of Artificial Sequence: Synthetic oligonucleotide
  Target: ATXN2; (+) strand; PAM type: YTN; PAM sequence: TTA
gcagcctctctacatacatc

SEQ ID NO: 85686 - DNA, 20 bp, Artificial Sequence
  Description of Artificial Sequence: Synthetic oligonucleotide
  Target: ATXN2; (+) strand; PAM type: YTN; PAM sequence: CTC
tctacatacatctctcaggt

SEQ ID NO: 85687 - DNA, 20 bp, Artificial Sequence
  Description of Artificial Sequence: Synthetic oligonucleotide
  Target: ATXN2; (+) strand; PAM type: YTN; PAM sequence: CTC
tacatacatctctcaggtgg

SEQ ID NO: 85688 - DNA, 20 bp, Artificial Sequence
  Description of Artificial Sequence: Synthetic oligonucleotide
  Target: ATXN2; (+) strand; PAM type: YTN; PAM sequence: CTA
catacatctctcaggtggtg

SEQ ID NO: 85689 - DNA, 20 bp, Artificial Sequence
  Description of Artificial Sequence: Synthetic oligonucleotide
  Target: ATXN2; (+) strand; PAM type: YTN; PAM sequence: CTC
tcaggtggtgccaagaggca

SEQ ID NO: 85690 - DNA, 20 bp, Artificial Sequence
  Description of Artificial Sequence: Synthetic oligonucleotide
  Target: ATXN2; (+) strand; PAM type: YTN; PAM sequence: CTC
aggtggtgccaagaggcaca

SEQ ID NO: 85691 - DNA, 20 bp, Artificial Sequence
  Description of Artificial Sequence: Synthetic oligonucleotide
  Target: ATXN2; (+) strand; PAM type: YTN; PAM sequence: CTT
agcagctctgactaacaggc

SEQ ID NO: 85692 - DNA, 20 bp, Artificial Sequence
  Description of Artificial Sequence: Synthetic oligonucleotide
  Target: ATXN2; (+) strand; PAM type: YTN; PAM sequence: TTA
gcagctctgactaacaggct

SEQ ID NO: 85693 - DNA, 20 bp, Artificial Sequence
  Description of Artificial Sequence: Synthetic oligonucleotide
  Target: ATXN2; (+) strand; PAM type: YTN; PAM sequence: CTC
tgactaacaggctgcaaagt

SEQ ID NO: 85694 - DNA, 20 bp, Artificial Sequence
  Description of Artificial Sequence: Synthetic oligonucleotide
  Target: ATXN2; (+) strand; PAM type: YTN; PAM sequence: CTG
actaacaggctgcaaagtgc

SEQ ID NO: 85695 - DNA, 20 bp, Artificial Sequence
  Description of Artificial Sequence: Synthetic oligonucleotide
  Target: ATXN2; (+) strand; PAM type: YTN; PAM sequence: CTA
acaggctgcaaagtgcaagt

SEQ ID NO: 85696 - DNA, 20 bp, Artificial Sequence
  Description of Artificial Sequence: Synthetic oligonucleotide
  Target: ATXN2; (+) strand; PAM type: YTN; PAM sequence: CTG
caaagtgcaagttcagattc

SEQ ID NO: 85697 - DNA, 20 bp, Artificial Sequence
  Description of Artificial Sequence: Synthetic oligonucleotide
  Target: ATXN2; (+) strand; PAM type: YTN; PAM sequence: TTC
agattctgtggcagagattt

SEQ ID NO: 85698 - DNA, 20 bp, Artificial Sequence
  Description of Artificial Sequence: Synthetic oligonucleotide
  Target: ATXN2; (+) strand; PAM type: YTN; PAM sequence: TTC
tgtggcagagatttggaagg

SEQ ID NO: 85699 - DNA, 20 bp, Artificial Sequence
  Description of Artificial Sequence: Synthetic oligonucleotide
  Target: ATXN2; (+) strand; PAM type: YTN; PAM sequence: CTG
tggcagagatttggaaggca

SEQ ID NO: 85700 - DNA, 20 bp, Artificial Sequence
  Description of Artificial Sequence: Synthetic oligonucleotide
  Target: ATXN2; (+) strand; PAM type: YTN; PAM sequence: TTT
ggaaggcacccacctccaga

SEQ ID NO: 85701 - DNA, 20 bp, Artificial Sequence
  Description of Artificial Sequence: Synthetic oligonucleotide
  Target: ATXN2; (+) strand; PAM type: YTN; PAM sequence: TTG
gaaggcacccacctccagac

SEQ ID NO: 85702 - DNA, 20 bp, Artificial Sequence
  Description of Artificial Sequence: Synthetic oligonucleotide
  Target: ATXN2; (+) strand; PAM type: YTN; PAM sequence: CTC
cagactgcttcccgtccaag

SEQ ID NO: 85703 - DNA, 20 bp, Artificial Sequence
  Description of Artificial Sequence: Synthetic oligonucleotide
  Target: ATXN2; (+) strand; PAM type: YTN; PAM sequence: CTG
cttcccgtccaagttaccag

SEQ ID NO: 85704 - DNA, 20 bp, Artificial Sequence
  Description of Artificial Sequence: Synthetic oligonucleotide
  Target: ATXN2; (+) strand; PAM type: YTN; PAM sequence: CTT
cccgtccaagttaccaggac

SEQ ID NO: 85705 - DNA, 20 bp, Artificial Sequence
  Description of Artificial Sequence: Synthetic oligonucleotide
  Target: ATXN2; (+) strand; PAM type: YTN; PAM sequence: TTC
ccgtccaagttaccaggaca

SEQ ID NO: 85706 - DNA, 20 bp, Artificial Sequence
  Description of Artificial Sequence: Synthetic oligonucleotide
  Target: ATXN2; (+) strand; PAM type: YTN; PAM sequence: TTA
ccaggacagctcaaaaacat

SEQ ID NO: 85707 - DNA, 20 bp, Artificial Sequence
  Description of Artificial Sequence: Synthetic oligonucleotide
  Target: ATXN2; (+) strand; PAM type: YTN; PAM sequence: CTC
aaaaacatgctgacagaaaa

SEQ ID NO: 85708 - DNA, 20 bp, Artificial Sequence
  Description of Artificial Sequence: Synthetic oligonucleotide
  Target: ATXN2; (+) strand; PAM type: YTN; PAM sequence: CTG
acagaaaactcccatggctc

SEQ ID NO: 85709 - DNA, 20 bp, Artificial Sequence
  Description of Artificial Sequence: Synthetic oligonucleotide
  Target: ATXN2; (+) strand; PAM type: YTN; PAM sequence: CTC
ccatggctctaggaagaagt

SEQ ID NO: 85710 - DNA, 20 bp, Artificial Sequence
  Description of Artificial Sequence: Synthetic oligonucleotide
  Target: ATXN2; (+) strand; PAM type: YTN; PAM sequence: CTC
taggaagaagtgacactaag

SEQ ID NO: 85711 - DNA, 20 bp, Artificial Sequence
  Description of Artificial Sequence: Synthetic oligonucleotide
  Target: ATXN2; (+) strand; PAM type: YTN; PAM sequence: CTA
ggaagaagtgacactaagcc

SEQ ID NO: 85712 - DNA, 20 bp, Artificial Sequence
  Description of Artificial Sequence: Synthetic oligonucleotide
  Target: ATXN2; (+) strand; PAM type: YTN; PAM sequence: CTA
agccaacacctttctttatg

SEQ ID NO: 85713 - DNA, 20 bp, Artificial Sequence
  Description of Artificial Sequence: Synthetic oligonucleotide
  Target: ATXN2; (+) strand; PAM type: YTN; PAM sequence: CTT
tctttatgtgggagcagaat

SEQ ID NO: 85714 - DNA, 20 bp, Artificial Sequence
  Description of Artificial Sequence: Synthetic oligonucleotide
  Target: ATXN2; (+) strand; PAM type: YTN; PAM sequence: TTT
ctttatgtgggagcagaatc

SEQ ID NO: 85715 - DNA, 20 bp, Artificial Sequence
  Description of Artificial Sequence: Synthetic oligonucleotide
  Target: ATXN2; (+) strand; PAM type: YTN; PAM sequence: TTC
tttatgtgggagcagaatca

SEQ ID NO: 85716 - DNA, 20 bp, Artificial Sequence
  Description of Artificial Sequence: Synthetic oligonucleotide
  Target: ATXN2; (+) strand; PAM type: YTN; PAM sequence: CTT
tatgtgggagcagaatcagc

SEQ ID NO: 85717 - DNA, 20 bp, Artificial Sequence
  Description of Artificial Sequence: Synthetic oligonucleotide
  Target: ATXN2; (+) strand; PAM type: YTN; PAM sequence: TTT
atgtgggagcagaatcagct

SEQ ID NO: 85718 - DNA, 20 bp, Artificial Sequence
  Description of Artificial Sequence: Synthetic oligonucleotide
  Target: ATXN2; (+) strand; PAM type: YTN; PAM sequence: TTA
tgtgggagcagaatcagctg

SEQ ID NO: 85719 - DNA, 20 bp, Artificial Sequence
  Description of Artificial Sequence: Synthetic oligonucleotide
  Target: ATXN2; (+) strand; PAM type: YTN; PAM sequence: CTG
atgaaggggtgggcagcagt

SEQ ID NO: 85720 - DNA, 20 bp, Artificial Sequence
  Description of Artificial Sequence: Synthetic oligonucleotide
  Target: ATXN2; (+) strand; PAM type: YTN; PAM sequence: CTG
gctgcagctagcccaccata

SEQ ID NO: 85721 - DNA, 20 bp, Artificial Sequence
  Description of Artificial Sequence: Synthetic oligonucleotide
  Target: ATXN2; (+) strand; PAM type: YTN; PAM sequence: CTG
cagctagcccaccataggca

SEQ ID NO: 85722 - DNA, 20 bp, Artificial Sequence
  Description of Artificial Sequence: Synthetic oligonucleotide
  Target: ATXN2; (+) strand; PAM type: YTN; PAM sequence: CTA
gcccaccataggcacagcac

SEQ ID NO: 85723 - DNA, 20 bp, Artificial Sequence
  Description of Artificial Sequence: Synthetic oligonucleotide
  Target: ATXN2; (+) strand; PAM type: YTN; PAM sequence: CTC
tccttccagtcctgaccagg

SEQ ID NO: 85724 - DNA, 20 bp, Artificial Sequence
  Description of Artificial Sequence: Synthetic oligonucleotide
  Target: ATXN2; (+) strand; PAM type: YTN; PAM sequence: CTC
cttccagtcctgaccaggcc

SEQ ID NO: 85725 - DNA, 20 bp, Artificial Sequence
  Description of Artificial Sequence: Synthetic oligonucleotide
  Target: ATXN2; (+) strand; PAM type: YTN; PAM sequence: CTT
ccagtcctgaccaggcccca

SEQ ID NO: 85726 - DNA, 20 bp, Artificial Sequence
  Description of Artificial Sequence: Synthetic oligonucleotide
  Target: ATXN2; (+) strand; PAM type: YTN; PAM sequence: TTC
cagtcctgaccaggccccag

SEQ ID NO: 85727 - DNA, 20 bp, Artificial Sequence
  Description of Artificial Sequence: Synthetic oligonucleotide
  Target: ATXN2; (+) strand; PAM type: YTN; PAM sequence: CTG
accaggccccagccggcaac

SEQ ID NO: 85728 - DNA, 20 bp, Artificial Sequence
  Description of Artificial Sequence: Synthetic oligonucleotide
  Target: ATXN2; (+) strand; PAM type: YTN; PAM sequence: CTT
ctaccgagagccatggctca

SEQ ID NO: 85729 - DNA, 20 bp, Artificial Sequence
  Description of Artificial Sequence: Synthetic oligonucleotide
  Target: ATXN2; (+) strand; PAM type: YTN; PAM sequence: TTC
taccgagagccatggctcaa

SEQ ID NO: 85730 - DNA, 20 bp, Artificial Sequence
  Description of Artificial Sequence: Synthetic oligonucleotide
  Target: ATXN2; (+) strand; PAM type: YTN; PAM sequence: CTA
ccgagagccatggctcaaca

SEQ ID NO: 85731 - DNA, 20 bp, Artificial Sequence
  Description of Artificial Sequence: Synthetic oligonucleotide
  Target: ATXN2; (+) strand; PAM type: YTN; PAM sequence: CTC
aacaccaaactggacagtag

SEQ ID NO: 85732 - DNA, 20 bp, Artificial Sequence
  Description of Artificial Sequence: Synthetic oligonucleotide
  Target: ATXN2; (+) strand; PAM type: YTN; PAM sequence: CTG
gacagtagacatcatgatcc

SEQ ID NO: 85733 - DNA, 20 bp, Artificial Sequence
  Description of Artificial Sequence: Synthetic oligonucleotide
  Target: ATXN2; (+) strand; PAM type: YTN; PAM sequence: CTC
cagttagctctaattacaga

SEQ ID NO: 85734 - DNA, 20 bp, Artificial Sequence
  Description of Artificial Sequence: Synthetic oligonucleotide
  Target: ATXN2; (+) strand; PAM type: YTN; PAM sequence: TTA
gctctaattacagaccccac

SEQ ID NO: 85735 - DNA, 20 bp, Artificial Sequence
  Description of Artificial Sequence: Synthetic oligonucleotide
  Target: ATXN2; (+) strand; PAM type: YTN; PAM sequence: CTC
taattacagaccccaccagt

SEQ ID NO: 85736 - DNA, 20 bp, Artificial Sequence
  Description of Artificial Sequence: Synthetic oligonucleotide
  Target: ATXN2; (+) strand; PAM type: YTN; PAM sequence: CTA
attacagaccccaccagtac

SEQ ID NO: 85737 - DNA, 20 bp, Artificial Sequence
  Description of Artificial Sequence: Synthetic oligonucleotide
  Target: ATXN2; (+) strand; PAM type: YTN; PAM sequence: TTA
cagaccccaccagtacagct

SEQ ID NO: 85738 - DNA, 20 bp, Artificial Sequence
  Description of Artificial Sequence: Synthetic oligonucleotide
  Target: ATXN2; (+) strand; PAM type: YTN; PAM sequence: CTT
gacagctcccggcaccatcc

SEQ ID NO: 85739 - DNA, 20 bp, Artificial Sequence
  Description of Artificial Sequence: Synthetic oligonucleotide
  Target: ATXN2; (+) strand; PAM type: YTN; PAM sequence: TTG
acagctcccggcaccatccc

SEQ ID NO: 85740 - DNA, 20 bp, Artificial Sequence
  Description of Artificial Sequence: Synthetic oligonucleotide
  Target: ATXN2; (+) strand; PAM type: YTN; PAM sequence: CTC
ccggcaccatcccttccttc

SEQ ID NO: 85741 - DNA, 20 bp, Artificial Sequence
  Description of Artificial Sequence: Synthetic oligonucleotide
  Target: ATXN2; (+) strand; PAM type: YTN; PAM sequence: CTT
ccttcatctgacttattgaa

SEQ ID NO: 85742 - DNA, 20 bp, Artificial Sequence
  Description of Artificial Sequence: Synthetic oligonucleotide
  Target: ATXN2; (+) strand; PAM type: YTN; PAM sequence: TTC
cttcatctgacttattgaac

SEQ ID NO: 85743 - DNA, 20 bp, Artificial Sequence
  Description of Artificial Sequence: Synthetic oligonucleotide
  Target: ATXN2; (+) strand; PAM type: YTN; PAM sequence: CTT
catctgacttattgaacttt

SEQ ID NO: 85744 - DNA, 20 bp, Artificial Sequence
  Description of Artificial Sequence: Synthetic oligonucleotide
  Target: ATXN2; (+) strand; PAM type: YTN; PAM sequence: TTC
atctgacttattgaactttt

SEQ ID NO: 85745 - DNA, 20 bp, Artificial Sequence
  Description of Artificial Sequence: Synthetic oligonucleotide
  Target: ATXN2; (+) strand; PAM type: YTN; PAM sequence: CTG
acttattgaacttttacaaa

SEQ ID NO: 85746 - DNA, 20 bp, Artificial Sequence
  Description of Artificial Sequence: Synthetic oligonucleotide
  Target: ATXN2; (+) strand; PAM type: YTN; PAM sequence: CTT
attgaacttttacaaactaa

SEQ ID NO: 85747 - DNA, 20 bp, Artificial Sequence
  Description of Artificial Sequence: Synthetic oligonucleotide
  Target: ATXN2; (+) strand; PAM type: YTN; PAM sequence: TTA
ttgaacttttacaaactaac

SEQ ID NO: 85748 - DNA, 20 bp, Artificial Sequence
  Description of Artificial Sequence: Synthetic oligonucleotide
  Target: ATXN2; (+) strand; PAM type: YTN; PAM sequence: TTG
aacttttacaaactaacagt

SEQ ID NO: 85749 - DNA, 20 bp, Artificial Sequence
  Description of Artificial Sequence: Synthetic oligonucleotide
  Target: ATXN2; (+) strand; PAM type: YTN; PAM sequence: CTT
ttacaaactaacagtcacca

SEQ ID NO: 85750 - DNA, 20 bp, Artificial Sequence
  Description of Artificial Sequence: Synthetic oligonucleotide
  Target: ATXN2; (+) strand; PAM type: YTN; PAM sequence: TTT
tacaaactaacagtcaccag

SEQ ID NO: 85751 - DNA, 20 bp, Artificial Sequence
  Description of Artificial Sequence: Synthetic oligonucleotide
  Target: ATXN2; (+) strand; PAM type: YTN; PAM sequence: TTT
acaaactaacagtcaccagc

SEQ ID NO: 85752 - DNA, 20 bp, Artificial Sequence
  Description of Artificial Sequence: Synthetic oligonucleotide
  Target: ATXN2; (+) strand; PAM type: YTN; PAM sequence: TTA
caaactaacagtcaccagca

SEQ ID NO: 85753 - DNA, 20 bp, Artificial Sequence
  Description of Artificial Sequence: Synthetic oligonucleotide
  Target: ATXN2; (+) strand; PAM type: YTN; PAM sequence: CTA
acagtcaccagcaccaaaga

SEQ ID NO: 85754 - DNA, 20 bp, Artificial Sequence
  Description of Artificial Sequence: Synthetic oligonucleotide
  Target: ATXN2; (+) strand; PAM type: YTN; PAM sequence: TTA
agtcaactaacctgccttga

SEQ ID NO: 85755 - DNA, 20 bp, Artificial Sequence
  Description of Artificial Sequence: Synthetic oligonucleotide
  Target: ATXN2; (+) strand; PAM type: YTN; PAM sequence: CTA
acctgccttgaattttagac

SEQ ID NO: 85756 - DNA, 20 bp, Artificial Sequence
  Description of Artificial Sequence: Synthetic oligonucleotide
  Target: ATXN2; (+) strand; PAM type: YTN; PAM sequence: CTG
ccttgaattttagaccagca

SEQ ID NO: 85757 - DNA, 20 bp, Artificial Sequence
  Description of Artificial Sequence: Synthetic oligonucleotide
  Target: ATXN2; (+) strand; PAM type: YTN; PAM sequence: CTT
gaattttagaccagcaatcc

SEQ ID NO: 85758 - DNA, 20 bp, Artificial Sequence
  Description of Artificial Sequence: Synthetic oligonucleotide
  Target: ATXN2; (+) strand; PAM type: YTN; PAM sequence: TTG
aattttagaccagcaatcca

SEQ ID NO: 85759 - DNA, 20 bp, Artificial Sequence
  Description of Artificial Sequence: Synthetic oligonucleotide
  Target: ATXN2; (+) strand; PAM type: YTN; PAM sequence: TTT
tagaccagcaatccatatgg

SEQ ID NO: 85760 - DNA, 20 bp, Artificial Sequence
  Description of Artificial Sequence: Synthetic oligonucleotide
  Target: ATXN2; (+) strand; PAM type: YTN; PAM sequence: TTT
agaccagcaatccatatggc

SEQ ID NO: 85761 - DNA, 20 bp, Artificial Sequence
  Description of Artificial Sequence: Synthetic oligonucleotide
  Target: ATXN2; (+) strand; PAM type: YTN; PAM sequence: TTA
gaccagcaatccatatggct

SEQ ID NO: 85762 - DNA, 20 bp, Artificial Sequence
  Description of Artificial Sequence: Synthetic oligonucleotide
  Target: ATXN2; (+) strand; PAM type: YTN; PAM sequence: CTT
tatctggtataaatcttctg

SEQ ID NO: 85763 - DNA, 20 bp, Artificial Sequence
  Description of Artificial Sequence: Synthetic oligonucleotide
  Target: ATXN2; (+) strand; PAM type: YTN; PAM sequence: TTT
atctggtataaatcttctgc

SEQ ID NO: 85764 - DNA, 20 bp, Artificial Sequence
  Description of Artificial Sequence: Synthetic oligonucleotide
  Target: ATXN2; (+) strand; PAM type: YTN; PAM sequence: TTA
tctggtataaatcttctgcc

SEQ ID NO: 85765 - DNA, 20 bp, Artificial Sequence
  Description of Artificial Sequence: Synthetic oligonucleotide
  Target: ATXN2; (+) strand; PAM type: YTN; PAM sequence: CTG
gtataaatcttctgcctttg

SEQ ID NO: 85766 - DNA, 20 bp, Artificial Sequence
  Description of Artificial Sequence: Synthetic oligonucleotide
  Target: ATXN2; (+) strand; PAM type: YTN; PAM sequence: CTT
ctgcctttgatcatttctgg

SEQ ID NO: 85767 - DNA, 20 bp, Artificial Sequence
  Description of Artificial Sequence: Synthetic oligonucleotide
  Target: ATXN2; (+) strand; PAM type: YTN; PAM sequence: TTC
tgcctttgatcatttctgga

SEQ ID NO: 85768 - DNA, 20 bp, Artificial Sequence
  Description of Artificial Sequence: Synthetic oligonucleotide
  Target: ATXN2; (+) strand; PAM type: YTN; PAM sequence: CTG
cctttgatcatttctggacc

SEQ ID NO: 85769 - DNA, 20 bp, Artificial Sequence
  Description of Artificial Sequence: Synthetic oligonucleotide
  Target: ATXN2; (+) strand; PAM type: YTN; PAM sequence: CTT
tgatcatttctggaccgtag

SEQ ID NO: 85770 - DNA, 20 bp, Artificial Sequence
  Description of Artificial Sequence: Synthetic oligonucleotide
  Target: ATXN2; (+) strand; PAM type: YTN; PAM sequence: TTT
gatcatttctggaccgtagg

SEQ ID NO: 85771 - DNA, 20 bp, Artificial Sequence
  Description of Artificial Sequence: Synthetic oligonucleotide
  Target: ATXN2; (+) strand; PAM type: YTN; PAM sequence: TTG
atcatttctggaccgtagga

SEQ ID NO: 85772 - DNA, 20 bp, Artificial Sequence
  Description of Artificial Sequence: Synthetic oligonucleotide
  Target: ATXN2; (+) strand; PAM type: YTN; PAM sequence: TTT
ctggaccgtaggaaaaagga

SEQ ID NO: 85773 - DNA, 20 bp, Artificial Sequence
  Description of Artificial Sequence: Synthetic oligonucleotide
  Target: ATXN2; (+) strand; PAM type: YTN; PAM sequence: TTC
tggaccgtaggaaaaaggaa

SEQ ID NO: 85774 - DNA, 20 bp, Artificial Sequence
  Description of Artificial Sequence: Synthetic oligonucleotide
  Target: ATXN2; (+) strand; PAM type: YTN; PAM sequence: CTG
gaccgtaggaaaaaggaata

SEQ ID NO: 85775 - DNA, 20 bp, Artificial Sequence
  Description of Artificial Sequence: Synthetic oligonucleotide
  Target: ATXN2; (+) strand; PAM type: YTN; PAM sequence: TTA
aaatcttgggccagagaaca

SEQ ID NO: 85776 - DNA, 20 bp, Artificial Sequence
  Description of Artificial Sequence: Synthetic oligonucleotide
  Target: ATXN2; (+) strand; PAM type: YTN; PAM sequence: CTT
gggccagagaacactatttt

SEQ ID NO: 85777 - DNA, 20 bp, Artificial Sequence
  Description of Artificial Sequence: Synthetic oligonucleotide
  Target: ATXN2; (+) strand; PAM type: YTN; PAM sequence: TTG
ggccagagaacactattttt

SEQ ID NO: 85778 - DNA, 20 bp, Artificial Sequence
  Description of Artificial Sequence: Synthetic oligonucleotide
  Target: ATXN2; (+) strand; PAM type: YTN; PAM sequence: CTA
tttttacataacagtttctt

SEQ ID NO: 85779 - DNA, 20 bp, Artificial Sequence
  Description of Artificial Sequence: Synthetic oligonucleotide
  Target: ATXN2; (+) strand; PAM type: YTN; PAM sequence: TTT
ttacataacagtttcttaac

SEQ ID NO: 85780 - DNA, 20 bp, Artificial Sequence
  Description of Artificial Sequence: Synthetic oligonucleotide
  Target: ATXN2; (+) strand; PAM type: YTN; PAM sequence: TTT
tacataacagtttcttaacc

SEQ ID NO: 85781 - DNA, 20 bp, Artificial Sequence
  Description of Artificial Sequence: Synthetic oligonucleotide
  Target: ATXN2; (+) strand; PAM type: YTN; PAM sequence: TTT
acataacagtttcttaacct

SEQ ID NO: 85782 - DNA, 20 bp, Artificial Sequence
  Description of Artificial Sequence: Synthetic oligonucleotide
  Target: ATXN2; (+) strand; PAM type: YTN; PAM sequence: TTA
cataacagtttcttaaccta

SEQ ID NO: 85783 - DNA, 20 bp, Artificial Sequence
  Description of Artificial Sequence: Synthetic oligonucleotide
  Target: ATXN2; (+) strand; PAM type: YTN; PAM sequence: TTT
cttaacctaaagtcaaggcc

SEQ ID NO: 85784 - DNA, 20 bp, Artificial Sequence
  Description of Artificial Sequence: Synthetic oligonucleotide
  Target: ATXN2; (+) strand; PAM type: YTN; PAM sequence: TTC
ttaacctaaagtcaaggcct

SEQ ID NO: 85785 - DNA, 20 bp, Artificial Sequence
  Description of Artificial Sequence: Synthetic oligonucleotide
  Target: ATXN2; (+) strand; PAM type: YTN; PAM sequence: CTT
aacctaaagtcaaggccttg

SEQ ID NO: 85786 - DNA, 20 bp, Artificial Sequence
  Description of Artificial Sequence: Synthetic oligonucleotide
  Target: ATXN2; (+) strand; PAM type: YTN; PAM sequence: TTA
acctaaagtcaaggccttgg

SEQ ID NO: 85787 - DNA, 20 bp, Artificial Sequence
  Description of Artificial Sequence: Synthetic oligonucleotide
  Target: ATXN2; (+) strand; PAM type: YTN; PAM sequence: CTA
aagtcaaggccttggactct

SEQ ID NO: 85788 - DNA, 20 bp, Artificial Sequence
  Description of Artificial Sequence: Synthetic oligonucleotide
  Target: ATXN2; (+) strand; PAM type: YTN; PAM sequence: CTT
ggactcttccctgagggttg

SEQ ID NO: 85789 - DNA, 20 bp, Artificial Sequence
  Description of Artificial Sequence: Synthetic oligonucleotide
  Target: ATXN2; (+) strand; PAM type: YTN; PAM sequence: TTG
gactcttccctgagggttgc

SEQ ID NO: 85790 - DNA, 20 bp, Artificial Sequence
  Description of Artificial Sequence: Synthetic oligonucleotide
  Target: ATXN2; (+) strand; PAM type: YTN; PAM sequence: CTC
ttccctgagggttgcctgag

SEQ ID NO: 85791 - DNA, 20 bp, Artificial Sequence
  Description of Artificial Sequence: Synthetic oligonucleotide
  Target: ATXN2; (+) strand; PAM type: YTN; PAM sequence: CTT
ccctgagggttgcctgagat

SEQ ID NO: 85792 - DNA, 20 bp, Artificial Sequence
  Description of Artificial Sequence: Synthetic oligonucleotide
  Target: ATXN2; (+) strand; PAM type: YTN; PAM sequence: TTC
cctgagggttgcctgagatt

SEQ ID NO: 85793 - DNA, 20 bp, Artificial Sequence
  Description of Artificial Sequence: Synthetic oligonucleotide
  Target: ATXN2; (+) strand; PAM type: YTN; PAM sequence: CTG
agggttgcctgagattcctt

SEQ ID NO: 85794 - DNA, 20 bp, Artificial Sequence
  Description of Artificial Sequence: Synthetic oligonucleotide
  Target: ATXN2; (+) strand; PAM type: YTN; PAM sequence: TTG
cctgagattccttcatgctt

SEQ ID NO: 85795 - DNA, 20 bp, Artificial Sequence
  Description of Artificial Sequence: Synthetic oligonucleotide
  Target: ATXN2; (+) strand; PAM type: YTN; PAM sequence: CTG
agattccttcatgctttcta

SEQ ID NO: 85796 - DNA, 20 bp, Artificial Sequence
  Description of Artificial Sequence: Synthetic oligonucleotide
  Target: ATXN2; (+) strand; PAM type: YTN; PAM sequence: TTC
cttcatgctttctattcagg

SEQ ID NO: 85797 - DNA, 20 bp, Artificial Sequence
  Description of Artificial Sequence: Synthetic oligonucleotide
  Target: ATXN2; (+) strand; PAM type: YTN; PAM sequence: CTT
catgctttctattcaggact

SEQ ID NO: 85798 - DNA, 20 bp, Artificial Sequence
  Description of Artificial Sequence: Synthetic oligonucleotide
  Target: ATXN2; (+) strand; PAM type: YTN; PAM sequence: TTC
atgctttctattcaggacta

SEQ ID NO: 85799 - DNA, 20 bp, Artificial Sequence
  Description of Artificial Sequence: Synthetic oligonucleotide
  Target: ATXN2; (+) strand; PAM type: YTN; PAM sequence: CTT
tctattcaggactaagtccc

SEQ ID NO: 85800 - DNA, 20 bp, Artificial Sequence
  Description of Artificial Sequence: Synthetic oligonucleotide
  Target: ATXN2; (+) strand; PAM type: YTN; PAM sequence: TTT
ctattcaggactaagtccct

SEQ ID NO: 85801 - DNA, 20 bp, Artificial Sequence
  Description of Artificial Sequence: Synthetic oligonucleotide
  Target: ATXN2; (+) strand; PAM type: YTN; PAM sequence: TTC
tattcaggactaagtccctt

SEQ ID NO: 85802 - DNA, 20 bp, Artificial Sequence
  Description of Artificial Sequence: Synthetic oligonucleotide
  Target: ATXN2; (+) strand; PAM type: YTN; PAM sequence: CTA
ttcaggactaagtcccttac

SEQ ID NO: 85803 - DNA, 20 bp, Artificial Sequence
  Description of Artificial Sequence: Synthetic oligonucleotide
  Target: ATXN2; (+) strand; PAM type: YTN; PAM sequence: TTC
aggactaagtcccttactgc

SEQ ID NO: 85804 - DNA, 20 bp, Artificial Sequence
  Description of Artificial Sequence: Synthetic oligonucleotide
  Target: ATXN2; (+) strand; PAM type: YTN; PAM sequence: CTA
agtcccttactgcaaatgtg

SEQ ID NO: 85805 - DNA, 20 bp, Artificial Sequence
  Description of Artificial Sequence: Synthetic oligonucleotide
  Target: ATXN2; (+) strand; PAM type: YTN; PAM sequence: CTT
actgcaaatgtgttagctct

SEQ ID NO: 85806 - DNA, 20 bp, Artificial Sequence
  Description of Artificial Sequence: Synthetic oligonucleotide
  Target: ATXN2; (+) strand; PAM type: YTN; PAM sequence: TTA
ctgcaaatgtgttagctcta

SEQ ID NO: 85807 - DNA, 20 bp, Artificial Sequence
  Description of Artificial Sequence: Synthetic oligonucleotide
  Target: ATXN2; (+) strand; PAM type: YTN; PAM sequence: CTG
caaatgtgttagctctaaca

SEQ ID NO: 85808 - DNA, 20 bp, Artificial Sequence
  Description of Artificial Sequence: Synthetic oligonucleotide
  Target: ATXN2; (+) strand; PAM type: YTN; PAM sequence: TTA
gctctaacatctcccacaag

SEQ ID NO: 85809 - DNA, 20 bp, Artificial Sequence
  Description of Artificial Sequence: Synthetic oligonucleotide
  Target: ATXN2; (+) strand; PAM type: YTN; PAM sequence: CTC
taacatctcccacaagctag

SEQ ID NO: 85810 - DNA, 20 bp, Artificial Sequence
  Description of Artificial Sequence: Synthetic oligonucleotide
  Target: ATXN2; (+) strand; PAM type: YTN; PAM sequence: CTA
acatctcccacaagctagag

SEQ ID NO: 85811 - DNA, 20 bp, Artificial Sequence
  Description of Artificial Sequence: Synthetic oligonucleotide
  Target: ATXN2; (+) strand; PAM type: YTN; PAM sequence: CTC
ccacaagctagaggaacttg

SEQ ID NO: 85812 - DNA, 20 bp, Artificial Sequence
  Description of Artificial Sequence: Synthetic oligonucleotide
  Target: ATXN2; (+) strand; PAM type: YTN; PAM sequence: CTA
gaggaacttgcgagtatatt

SEQ ID NO: 85813 - DNA, 20 bp, Artificial Sequence
  Description of Artificial Sequence: Synthetic oligonucleotide
  Target: ATXN2; (+) strand; PAM type: YTN; PAM sequence: CTT
gcgagtatattaacaaggac

SEQ ID NO: 85814 - DNA, 20 bp, Artificial Sequence
  Description of Artificial Sequence: Synthetic oligonucleotide
  Target: ATXN2; (+) strand; PAM type: YTN; PAM sequence: TTG
cgagtatattaacaaggaca

SEQ ID NO: 85815 - DNA, 20 bp, Artificial Sequence
  Description of Artificial Sequence: Synthetic oligonucleotide
  Target: ATXN2; (+) strand; PAM type: YTN; PAM sequence: TTA
acaaggacacatctgacatc

SEQ ID NO: 85816 - DNA, 20 bp, Artificial Sequence
  Description of Artificial Sequence: Synthetic oligonucleotide
  Target: ATXN2; (+) strand; PAM type: YTN; PAM sequence: CTG
acatcctgtgtttggttaga

SEQ ID NO: 85817 - DNA, 20 bp, Artificial Sequence
  Description of Artificial Sequence: Synthetic oligonucleotide
  Target: ATXN2; (+) strand; PAM type: YTN; PAM sequence: CTG
tgtttggttagaatatacag

SEQ ID NO: 85818 - DNA, 20 bp, Artificial Sequence
  Description of Artificial Sequence: Synthetic oligonucleotide
  Target: ATXN2; (+) strand; PAM type: YTN; PAM sequence: TTT
ggttagaatatacagcacat

SEQ ID NO: 85819 - DNA, 20 bp, Artificial Sequence
  Description of Artificial Sequence: Synthetic oligonucleotide
  Target: ATXN2; (+) strand; PAM type: YTN; PAM sequence: TTG
gttagaatatacagcacatt

SEQ ID NO: 85820 - DNA, 20 bp, Artificial Sequence
  Description of Artificial Sequence: Synthetic oligonucleotide
  Target: ATXN2; (+) strand; PAM type: YTN; PAM sequence: TTA
gaatatacagcacattgtga

SEQ ID NO: 85821 - DNA, 20 bp, Artificial Sequence
  Description of Artificial Sequence: Synthetic oligonucleotide
  Target: ATXN2; (+) strand; PAM type: YTN; PAM sequence: TTG
tgataacataaagtggattc

SEQ ID NO: 85822 - DNA, 20 bp, Artificial Sequence
  Description of Artificial Sequence: Synthetic oligonucleotide
  Target: ATXN2; (+) strand; PAM type: YTN; PAM sequence: TTC
atcttgtatcattataggca

SEQ ID NO: 85823 - DNA, 20 bp, Artificial Sequence
  Description of Artificial Sequence: Synthetic oligonucleotide
  Target: ATXN2; (+) strand; PAM type: YTN; PAM sequence: CTT
gtatcattataggcagaagg

SEQ ID NO: 85824 - DNA, 20 bp, Artificial Sequence
  Description of Artificial Sequence: Synthetic oligonucleotide
  Target: ATXN2; (+) strand; PAM type: YTN; PAM sequence: TTG
tatcattataggcagaaggt

SEQ ID NO: 85825 - DNA, 20 bp, Artificial Sequence
  Description of Artificial Sequence: Synthetic oligonucleotide
  Target: ATXN2; (+) strand; PAM type: YTN; PAM sequence: TTA
taggcagaaggtatttggca

SEQ ID NO: 85826 - DNA, 20 bp, Artificial Sequence
  Description of Artificial Sequence: Synthetic oligonucleotide
  Target: ATXN2; (+) strand; PAM type: YTN; PAM sequence: TTT
ggcaaatttttatgtattgt

SEQ ID NO: 85827 - DNA, 20 bp, Artificial Sequence
  Description of Artificial Sequence: Synthetic oligonucleotide
  Target: ATXN2; (+) strand; PAM type: YTN; PAM sequence: TTG
gcaaatttttatgtattgtt

SEQ ID NO: 85828 - DNA, 20 bp, Artificial Sequence
  Description of Artificial Sequence: Synthetic oligonucleotide
  Target: ATXN2; (+) strand; PAM type: YTN; PAM sequence: TTT
ttatgtattgttttatgtac

SEQ ID NO: 85829 - DNA, 20 bp, Artificial Sequence
  Description of Artificial Sequence: Synthetic oligonucleotide
  Target: ATXN2; (+) strand; PAM type: YTN; PAM sequence: TTT
tatgtattgttttatgtact

SEQ ID NO: 85830 - DNA, 20 bp, Artificial Sequence
  Description of Artificial Sequence: Synthetic oligonucleotide
  Target: ATXN2; (+) strand; PAM type: YTN; PAM sequence: TTT
atgtattgttttatgtactg

SEQ ID NO: 85831 - DNA, 20 bp, Artificial Sequence
  Description of Artificial Sequence: Synthetic oligonucleotide
  Target: ATXN2; (+) strand; PAM type: YTN; PAM sequence: TTA
tgtattgttttatgtactgt

SEQ ID NO: 85832 - DNA, 20 bp, Artificial Sequence
  Description of Artificial Sequence: Synthetic oligonucleotide
  Target: ATXN2; (+) strand; PAM type: YTN; PAM sequence: TTG
ttttatgtactgtacaagta

SEQ ID NO: 85833 - DNA, 20 bp, Artificial Sequence
  Description of Artificial Sequence: Synthetic oligonucleotide
  Target: ATXN2; (+) strand; PAM type: YTN; PAM sequence: TTT
tatgtactgtacaagtaact

SEQ ID NO: 85834 - DNA, 20 bp, Artificial Sequence
  Description of Artificial Sequence: Synthetic oligonucleotide
  Target: ATXN2; (+) strand; PAM type: YTN; PAM sequence: TTT
atgtactgtacaagtaactt

SEQ ID NO: 85835 - DNA, 20 bp, Artificial Sequence
  Description of Artificial Sequence: Synthetic oligonucleotide
  Target: ATXN2; (+) strand; PAM type: YTN; PAM sequence: TTA
tgtactgtacaagtaactta

SEQ ID NO: 85836 - DNA, 20 bp, Artificial Sequence
  Description of Artificial Sequence: Synthetic oligonucleotide
  Target: ATXN2; (+) strand; PAM type: YTN; PAM sequence: CTG
tacaagtaacttattcttga

SEQ ID NO: 85837 - DNA, 20 bp, Artificial Sequence
  Description of Artificial Sequence: Synthetic oligonucleotide
  Target: ATXN2; (+) strand; PAM type: YTN; PAM sequence: CTT
attcttgaataatgcaaatt

SEQ ID NO: 85838 - DNA, 20 bp, Artificial Sequence
  Description of Artificial Sequence: Synthetic oligonucleotide
  Target: ATXN2; (+) strand; PAM type: YTN; PAM sequence: TTA
ttcttgaataatgcaaattt

SEQ ID NO: 85839 - DNA, 20 bp, Artificial Sequence
  Description of Artificial Sequence: Synthetic oligonucleotide
  Target: ATXN2; (+) strand; PAM type: YTN; PAM sequence: TTC
ttgaataatgcaaattttgc

SEQ ID NO: 85840 - DNA, 20 bp, Artificial Sequence
  Description of Artificial Sequence: Synthetic oligonucleotide
  Target: ATXN2; (+) strand; PAM type: YTN; PAM sequence: CTT
gaataatgcaaattttgcta

SEQ ID NO: 85841 - DNA, 20 bp, Artificial Sequence
  Description of Artificial Sequence: Synthetic oligonucleotide
  Target: ATXN2; (+) strand; PAM type: YTN; PAM sequence: TTG
aataatgcaaattttgctat

SEQ ID NO: 85842 - DNA, 20 bp, Artificial Sequence
  Description of Artificial Sequence: Synthetic oligonucleotide
  Target: ATXN2; (+) strand; PAM type: YTN; PAM sequence: TTT
tgctataatgtacaaattgc

SEQ ID NO: 85843 - DNA, 20 bp, Artificial Sequence
  Description of Artificial Sequence: Synthetic oligonucleotide
  Target: ATXN2; (+) strand; PAM type: YTN; PAM sequence: TTT
gctataatgtacaaattgct

SEQ ID NO: 85844 - DNA, 20 bp, Artificial Sequence
  Description of Artificial Sequence: Synthetic oligonucleotide
  Target: ATXN2; (+) strand; PAM type: YTN; PAM sequence: TTG
ctataatgtacaaattgcta

SEQ ID NO: 85845 - DNA, 20 bp, Artificial Sequence
  Description of Artificial Sequence: Synthetic oligonucleotide
  Target: ATXN2; (+) strand; PAM type: YTN; PAM sequence: CTA
taatgtacaaattgctatat

SEQ ID NO: 85846 - DNA, 20 bp, Artificial Sequence
  Description of Artificial Sequence: Synthetic oligonucleotide
  Target: ATXN2; (+) strand; PAM type: YTN; PAM sequence: TTG
ctatatgtgaattaaaaagt

SEQ ID NO: 85847 - DNA, 20 bp, Artificial Sequence
  Description of Artificial Sequence: Synthetic oligonucleotide
  Target: ATXN2; (+) strand; PAM type: YTN; PAM sequence: CTA
tatgtgaattaaaaagtttt

SEQ ID NO: 85848 - DNA, 20 bp, Artificial Sequence
  Description of Artificial Sequence: Synthetic oligonucleotide
  Target: ATXN2; (+) strand; PAM type: YTN; PAM sequence: TTA
aaaagttttcagaatcttga

SEQ ID NO: 85849 - DNA, 20 bp, Artificial Sequence
  Description of Artificial Sequence: Synthetic oligonucleotide
  Target: ATXN2; (+) strand; PAM type: YTN; PAM sequence: TTT
tcagaatcttgatttgctgt

SEQ ID NO: 85850 - DNA, 20 bp, Artificial Sequence
  Description of Artificial Sequence: Synthetic oligonucleotide
  Target: ATXN2; (+) strand; PAM type: YTN; PAM sequence: TTT
cagaatcttgatttgctgtc

SEQ ID NO: 85851 - DNA, 20 bp, Artificial Sequence
  Description of Artificial Sequence: Synthetic oligonucleotide
  Target: ATXN2; (+) strand; PAM type: YTN; PAM sequence: TTC
agaatcttgatttgctgtca

SEQ ID NO: 85852 - DNA, 20 bp, Artificial Sequence
  Description of Artificial Sequence: Synthetic oligonucleotide
  Target: ATXN2; (+) strand; PAM type: YTN; PAM sequence: CTT
gatttgctgtcataatattt

SEQ ID NO: 85853 - DNA, 20 bp, Artificial Sequence
  Description of Artificial Sequence: Synthetic oligonucleotide
  Target: ATXN2; (+) strand; PAM type: YTN; PAM sequence: TTG
atttgctgtcataatattta

SEQ ID NO: 85854 - DNA, 20 bp, Artificial Sequence
  Description of Artificial Sequence: Synthetic oligonucleotide
  Target: ATXN2; (+) strand; PAM type: YTN; PAM sequence: TTT
gctgtcataatatttaaagg

SEQ ID NO: 85855 - DNA, 20 bp, Artificial Sequence
  Description of Artificial Sequence: Synthetic oligonucleotide
  Target: ATXN2; (+) strand; PAM type: YTN; PAM sequence: TTG
ctgtcataatatttaaaggc

SEQ ID NO: 85856 - DNA, 20 bp, Artificial Sequence
  Description of Artificial Sequence: Synthetic oligonucleotide
  Target: ATXN2; (+) strand; PAM type: YTN; PAM sequence: CTG
tcataatatttaaaggctct

SEQ ID NO: 85857 - DNA, 20 bp, Artificial Sequence
  Description of Artificial Sequence: Synthetic oligonucleotide
  Target: ATXN2; (+) strand; PAM type: YTN; PAM sequence: TTT
aaaggctctattaagaccat

SEQ ID NO: 85858 - DNA, 20 bp, Artificial Sequence
  Description of Artificial Sequence: Synthetic oligonucleotide
  Target: ATXN2; (+) strand; PAM type: YTN; PAM sequence: TTA
aaggctctattaagaccatg

SEQ ID NO: 85859 - DNA, 20 bp, Artificial Sequence
  Description of Artificial Sequence: Synthetic oligonucleotide
  Target: ATXN2; (+) strand; PAM type: YTN; PAM sequence: CTC
tattaagaccatggtgtctc

SEQ ID NO: 85860 - DNA, 20 bp, Artificial Sequence
  Description of Artificial Sequence: Synthetic oligonucleotide
  Target: ATXN2; (+) strand; PAM type: YTN; PAM sequence: CTA
ttaagaccatggtgtctcta

SEQ ID NO: 85861 - DNA, 20 bp, Artificial Sequence
  Description of Artificial Sequence: Synthetic oligonucleotide
  Target: ATXN2; (+) strand; PAM type: YTN; PAM sequence: TTA
agaccatggtgtctctacaa

SEQ ID NO: 85862 - DNA, 20 bp, Artificial Sequence
  Description of Artificial Sequence: Synthetic oligonucleotide
  Target: ATXN2; (+) strand; PAM type: YTN; PAM sequence: CTC
tacaaaatccttgccctgcc

SEQ ID NO: 85863 - DNA, 20 bp, Artificial Sequence
  Description of Artificial Sequence: Synthetic oligonucleotide
  Target: ATXN2; (+) strand; PAM type: YTN; PAM sequence: CTA
caaaatccttgccctgccca

SEQ ID NO: 85864 - DNA, 20 bp, Artificial Sequence
  Description of Artificial Sequence: Synthetic oligonucleotide
  Target: ATXN2; (+) strand; PAM type: YTN; PAM sequence: CTT
gccctgcccaaatactcgct

SEQ ID NO: 85865 - DNA, 20 bp, Artificial Sequence
  Description of Artificial Sequence: Synthetic oligonucleotide
  Target: ATXN2; (+) strand; PAM type: YTN; PAM sequence: TTG
ccctgcccaaatactcgctc

SEQ ID NO: 85866 - DNA, 20 bp, Artificial Sequence
  Description of Artificial Sequence: Synthetic oligonucleotide
  Target: ATXN2; (+) strand; PAM type: YTN; PAM sequence: CTG
cccaaatactcgctcttccc

SEQ ID NO: 85867 - DNA, 20 bp, Artificial Sequence
  Description of Artificial Sequence: Synthetic oligonucleotide
  Target: ATXN2; (+) strand; PAM type: YTN; PAM sequence: CTC
gctcttccctttgtcctccc

SEQ ID NO: 85868 - DNA, 20 bp, Artificial Sequence
  Description of Artificial Sequence: Synthetic oligonucleotide
  Target: ATXN2; (+) strand; PAM type: YTN; PAM sequence: CTC
ttccctttgtcctccccgtt

SEQ ID NO: 85869 - DNA, 20 bp, Artificial Sequence
  Description of Artificial Sequence: Synthetic oligonucleotide
  Target: ATXN2; (+) strand; PAM type: YTN; PAM sequence: CTT
ccctttgtcctccccgttgc

SEQ ID NO: 85870 - DNA, 20 bp, Artificial Sequence
  Description of Artificial Sequence: Synthetic oligonucleotide
  Target: ATXN2; (+) strand; PAM type: YTN; PAM sequence: TTC
cctttgtcctccccgttgca

SEQ ID NO: 85871 - DNA, 20 bp, Artificial Sequence
  Description of Artificial Sequence: Synthetic oligonucleotide
  Target: ATXN2; (+) strand; PAM type: YTN; PAM sequence: CTT
tgtcctccccgttgcaatct

SEQ ID NO: 85872 - DNA, 20 bp, Artificial Sequence
  Description of Artificial Sequence: Synthetic oligonucleotide
  Target: ATXN2; (+) strand; PAM type: YTN; PAM sequence: TTT
gtcctccccgttgcaatctg

SEQ ID NO: 85873 - DNA, 20 bp, Artificial Sequence
  Description of Artificial Sequence: Synthetic oligonucleotide
  Target: ATXN2; (+) strand; PAM type: YTN; PAM sequence: TTG
tcctccccgttgcaatctgg

SEQ ID NO: 85874 - DNA, 20 bp, Artificial Sequence
  Description of Artificial Sequence: Synthetic oligonucleotide
  Target: ATXN2; (+) strand; PAM type: YTN; PAM sequence: CTC
cccgttgcaatctgggaata

SEQ ID NO: 85875 - DNA, 20 bp, Artificial Sequence
  Description of Artificial Sequence: Synthetic oligonucleotide
  Target: ATXN2; (+) strand; PAM type: YTN; PAM sequence: TTG
caatctgggaatactaacaa

SEQ ID NO: 85876 - DNA, 20 bp, Artificial Sequence
  Description of Artificial Sequence: Synthetic oligonucleotide
  Target: ATXN2; (+) strand; PAM type: YTN; PAM sequence: CTG
ggaatactaacaaatgctta

SEQ ID NO: 85877 - DNA, 20 bp, Artificial Sequence
  Description of Artificial Sequence: Synthetic oligonucleotide
  Target: ATXN2; (+) strand; PAM type: YTN; PAM sequence: CTA
acaaatgcttatgagtccat

SEQ ID NO: 85878 - DNA, 20 bp, Artificial Sequence
  Description of Artificial Sequence: Synthetic oligonucleotide
  Target: ATXN2; (+) strand; PAM type: YTN; PAM sequence: CTT
atgagtccatccatgtcaat

SEQ ID NO: 85879 - DNA, 20 bp, Artificial Sequence
  Description of Artificial Sequence: Synthetic oligonucleotide
  Target: ATXN2; (+) strand; PAM type: YTN; PAM sequence: TTA
tgagtccatccatgtcaata

SEQ ID NO: 85880 - DNA, 20 bp, Artificial Sequence
  Description of Artificial Sequence: Synthetic oligonucleotide
  Target: ATXN2; (+) strand; PAM type: YTN; PAM sequence: CTT
tgtacatctttgtatctttt

SEQ ID NO: 85881 - DNA, 20 bp, Artificial Sequence
  Description of Artificial Sequence: Synthetic oligonucleotide
  Target: ATXN2; (+) strand; PAM type: YTN; PAM sequence: TTT
gtacatctttgtatcttttc

SEQ ID NO: 85882 - DNA, 20 bp, Artificial Sequence
  Description of Artificial Sequence: Synthetic oligonucleotide
  Target: ATXN2; (+) strand; PAM type: YTN; PAM sequence: TTG
tacatctttgtatcttttca

SEQ ID NO: 85883 - DNA, 20 bp, Artificial Sequence
  Description of Artificial Sequence: Synthetic oligonucleotide
  Target: ATXN2; (+) strand; PAM type: YTN; PAM sequence: CTT
tgtatcttttcagccttcat

SEQ ID NO: 85884 - DNA, 20 bp, Artificial Sequence
  Description of Artificial Sequence: Synthetic oligonucleotide
  Target: ATXN2; (+) strand; PAM type: YTN; PAM sequence: TTT
gtatcttttcagccttcatg

SEQ ID NO: 85885 - DNA, 20 bp, Artificial Sequence
  Description of Artificial Sequence: Synthetic oligonucleotide
  Target: ATXN2; (+) strand; PAM type: YTN; PAM sequence: TTG
tatcttttcagccttcatgc

SEQ ID NO: 85886 - DNA, 20 bp, Artificial Sequence
  Description of Artificial Sequence: Synthetic oligonucleotide
  Target: ATXN2; (+) strand; PAM type: YTN; PAM sequence: CTT
ttcagccttcatgccctctg

SEQ ID NO: 85887 - DNA, 20 bp, Artificial Sequence
  Description of Artificial Sequence: Synthetic oligonucleotide
  Target: ATXN2; (+) strand; PAM type: YTN; PAM sequence: TTT
tcagccttcatgccctctgg

SEQ ID NO: 85888 - DNA, 20 bp, Artificial Sequence
  Description of Artificial Sequence: Synthetic oligonucleotide
  Target: ATXN2; (+) strand; PAM type: YTN; PAM sequence: TTT
cagccttcatgccctctgga

SEQ ID NO: 85889 - DNA, 20 bp, Artificial Sequence
  Description of Artificial Sequence: Synthetic oligonucleotide
  Target: ATXN2; (+) strand; PAM type: YTN; PAM sequence: TTC
agccttcatgccctctggat

SEQ ID NO: 85890 - DNA, 20 bp, Artificial Sequence
  Description of Artificial Sequence: Synthetic oligonucleotide
  Target: ATXN2; (+) strand; PAM type: YTN; PAM sequence: CTT
catgccctctggatttcttt

SEQ ID NO: 85891 - DNA, 20 bp, Artificial Sequence
  Description of Artificial Sequence: Synthetic oligonucleotide
  Target: ATXN2; (+) strand; PAM type: YTN; PAM sequence: TTC
atgccctctggatttcttta

SEQ ID NO: 85892 - DNA, 20 bp, Artificial Sequence
  Description of Artificial Sequence: Synthetic oligonucleotide
  Target: ATXN2; (+) strand; PAM type: YTN; PAM sequence: CTC
tggatttctttattgcaatt

SEQ ID NO: 85893 - DNA, 20 bp, Artificial Sequence
  Description of Artificial Sequence: Synthetic oligonucleotide
  Target: ATXN2; (+) strand; PAM type: YTN; PAM sequence: CTG
gatttctttattgcaatttt

SEQ ID NO: 85894 - DNA, 20 bp, Artificial Sequence
  Description of Artificial Sequence: Synthetic oligonucleotide
  Target: ATXN2; (+) strand; PAM type: YTN; PAM sequence: TTT
ctttattgcaatttttttct

SEQ ID NO: 85895 - DNA, 20 bp, Artificial Sequence
  Description of Artificial Sequence: Synthetic oligonucleotide
  Target: ATXN2; (+) strand; PAM type: YTN; PAM sequence: TTC
tttattgcaatttttttctg

SEQ ID NO: 85896 - DNA, 20 bp, Artificial Sequence
  Description of Artificial Sequence: Synthetic oligonucleotide
  Target: ATXN2; (+) strand; PAM type: YTN; PAM sequence: CTT
tattgcaatttttttctgag

SEQ ID NO: 85897 - DNA, 20 bp, Artificial Sequence
  Description of Artificial Sequence: Synthetic oligonucleotide
  Target: ATXN2; (+) strand; PAM type: YTN; PAM sequence: TTT
attgcaatttttttctgagt

SEQ ID NO: 85898 - DNA, 20 bp, Artificial Sequence
  Description of Artificial Sequence: Synthetic oligonucleotide
  Target: ATXN2; (+) strand; PAM type: YTN; PAM sequence: TTA
ttgcaatttttttctgagtg

SEQ ID NO: 85899 - DNA, 20 bp, Artificial Sequence
  Description of Artificial Sequence: Synthetic oligonucleotide
  Target: ATXN2; (+) strand; PAM type: YTN; PAM sequence: TTG
caatttttttctgagtgtct

SEQ ID NO: 85900 - DNA, 20 bp, Artificial Sequence
  Description of Artificial Sequence: Synthetic oligonucleotide
  Target: ATXN2; (+) strand; PAM type: YTN; PAM sequence: TTT
ttttctgagtgtctcctgcc

SEQ ID NO: 85901 - DNA, 20 bp, Artificial Sequence
  Description of Artificial Sequence: Synthetic oligonucleotide
  Target: ATXN2; (+) strand; PAM type: YTN; PAM sequence: TTT
tttctgagtgtctcctgccc

SEQ ID NO: 85902 - DNA, 20 bp, Artificial Sequence
  Description of Artificial Sequence: Synthetic oligonucleotide
  Target: ATXN2; (+) strand; PAM type: YTN; PAM sequence: TTT
ttctgagtgtctcctgcccc

SEQ ID NO: 85903 - DNA, 20 bp, Artificial Sequence
  Description of Artificial Sequence: Synthetic oligonucleotide
  Target: ATXN2; (+) strand; PAM type: YTN; PAM sequence: TTT
tctgagtgtctcctgccccc

SEQ ID NO: 85904 - DNA, 20 bp, Artificial Sequence
  Description of Artificial Sequence: Synthetic oligonucleotide
  Target: ATXN2; (+) strand; PAM type: YTN; PAM sequence: TTT
ctgagtgtctcctgccccct

SEQ ID NO: 85905 - DNA, 20 bp, Artificial Sequence
  Description of Artificial Sequence: Synthetic oligonucleotide
  Target: ATXN2; (+) strand; PAM type: YTN; PAM sequence: TTC
tgagtgtctcctgcccccta

SEQ ID NO: 85906 - DNA, 20 bp, Artificial Sequence
  Description of Artificial Sequence: Synthetic oligonucleotide
  Target: ATXN2; (+) strand; PAM type: YTN; PAM sequence: CTG
agtgtctcctgccccctact

SEQ ID NO: 85907 - DNA, 20 bp, Artificial Sequence
  Description of Artificial Sequence: Synthetic oligonucleotide
  Target: ATXN2; (+) strand; PAM type: YTN; PAM sequence: CTC
ctgccccctactggtaaagt

SEQ ID NO: 85908 - DNA, 20 bp, Artificial Sequence
  Description of Artificial Sequence: Synthetic oligonucleotide
  Target: ATXN2; (+) strand; PAM type: YTN; PAM sequence: CTG
ccccctactggtaaagtaga

SEQ ID NO: 85909 - DNA, 20 bp, Artificial Sequence
  Description of Artificial Sequence: Synthetic oligonucleotide
  Target: ATXN2; (+) strand; PAM type: YTN; PAM sequence: CTA
ctggtaaagtagaaaaatgc

SEQ ID NO: 85910 - DNA, 20 bp, Artificial Sequence
  Description of Artificial Sequence: Synthetic oligonucleotide
  Target: ATXN2; (+) strand; PAM type: YTN; PAM sequence: CTG
gtaaagtagaaaaatgcccg

SEQ ID NO: 85911 - DNA, 20 bp, Artificial Sequence
  Description of Artificial Sequence: Synthetic oligonucleotide
  Target: ATXN2; (+) strand; PAM type: YTN; PAM sequence: TTG
ggaacttccagctaatgaca

SEQ ID NO: 85912 - DNA, 20 bp, Artificial Sequence
  Description of Artificial Sequence: Synthetic oligonucleotide
  Target: ATXN2; (+) strand; PAM type: YTN; PAM sequence: CTT
ccagctaatgacactcattt

SEQ ID NO: 85913 - DNA, 20 bp, Artificial Sequence
  Description of Artificial Sequence: Synthetic oligonucleotide
  Target: ATXN2; (+) strand; PAM type: YTN; PAM sequence: TTC
cagctaatgacactcatttt

SEQ ID NO: 85914 - DNA, 20 bp, Artificial Sequence
  Description of Artificial Sequence: Synthetic oligonucleotide
  Target: ATXN2; (+) strand; PAM type: YTN; PAM sequence: CTA
atgacactcattttggttca

SEQ ID NO: 85915 - DNA, 20 bp, Artificial Sequence
  Description of Artificial Sequence: Synthetic oligonucleotide
  Target: ATXN2; (+) strand; PAM type: YTN; PAM sequence: CTC
attttggttcaggagatatt

SEQ ID NO: 85916 - DNA, 20 bp, Artificial Sequence
  Description of Artificial Sequence: Synthetic oligonucleotide
  Target: ATXN2; (+) strand; PAM type: YTN; PAM sequence: TTT
tggttcaggagatattaaaa

SEQ ID NO: 85917 - DNA, 20 bp, Artificial Sequence
  Description of Artificial Sequence: Synthetic oligonucleotide
  Target: ATXN2; (+) strand; PAM type: YTN; PAM sequence: TTT
ggttcaggagatattaaaaa

SEQ ID NO: 85918 - DNA, 20 bp, Artificial Sequence
  Description of Artificial Sequence: Synthetic oligonucleotide
  Target: ATXN2; (+) strand; PAM type: YTN; PAM sequence: TTG
gttcaggagatattaaaaag

SEQ ID NO: 85919 - DNA, 20 bp, Artificial Sequence
  Description of Artificial Sequence: Synthetic oligonucleotide
  Target: ATXN2; (+) strand; PAM type: YTN; PAM sequence: TTC
aggagatattaaaaaggaag

SEQ ID NO: 85920 - DNA, 20 bp, Artificial Sequence
  Description of Artificial Sequence: Synthetic oligonucleotide
  Target: ATXN2; (+) strand; PAM type: YTN; PAM sequence: TTA
aaaaggaagcttacagaatc

SEQ ID NO: 85921 - DNA, 20 bp, Artificial Sequence
  Description of Artificial Sequence: Synthetic oligonucleotide
  Target: ATXN2; (+) strand; PAM type: YTN; PAM sequence: CTT
acagaatcggtgtcagcccg

SEQ ID NO: 85922 - DNA, 20 bp, Artificial Sequence
  Description of Artificial Sequence: Synthetic oligonucleotide
  Target: ATXN2; (+) strand; PAM type: YTN; PAM sequence: TTA
cagaatcggtgtcagcccga

SEQ ID NO: 85923 - DNA, 20 bp, Artificial Sequence
  Description of Artificial Sequence: Synthetic oligonucleotide
  Target: ATXN2; (+) strand; PAM type: YTN; PAM sequence: TTT
cagtgctgcccaactctggc

SEQ ID NO: 85924 - DNA, 20 bp, Artificial Sequence
  Description of Artificial Sequence: Synthetic oligonucleotide
  Target: ATXN2; (+) strand; PAM type: YTN; PAM sequence: TTC
agtgctgcccaactctggcc

SEQ ID NO: 85925 - DNA, 20 bp, Artificial Sequence
  Description of Artificial Sequence: Synthetic oligonucleotide
  Target: ATXN2; (+) strand; PAM type: YTN; PAM sequence: CTG
cccaactctggccaaccttc

SEQ ID NO: 85926 - DNA, 20 bp, Artificial Sequence
  Description of Artificial Sequence: Synthetic oligonucleotide
  Target: ATXN2; (+) strand; PAM type: YTN; PAM sequence: CTC
tggccaaccttcctcctcct

SEQ ID NO: 85927 - DNA, 20 bp, Artificial Sequence
  Description of Artificial Sequence: Synthetic oligonucleotide
  Target: ATXN2; (+) strand; PAM type: YTN; PAM sequence: CTG
gccaaccttcctcctcctga

SEQ ID NO: 85928 - DNA, 20 bp, Artificial Sequence
  Description of Artificial Sequence: Synthetic oligonucleotide
  Target: ATXN2; (+) strand; PAM type: YTN; PAM sequence: CTT
cctcctcctgaagcagatct

SEQ ID NO: 85929 - DNA, 20 bp, Artificial Sequence
  Description of Artificial Sequence: Synthetic oligonucleotide
  Target: ATXN2; (+) strand; PAM type: YTN; PAM sequence: TTC
ctcctcctgaagcagatctc

SEQ ID NO: 85930 - DNA, 20 bp, Artificial Sequence
  Description of Artificial Sequence: Synthetic oligonucleotide
  Target: ATXN2; (+) strand; PAM type: YTN; PAM sequence: CTC
ctcctgaagcagatctctaa

SEQ ID NO: 85931 - DNA, 20 bp, Artificial Sequence
  Description of Artificial Sequence: Synthetic oligonucleotide
  Target: ATXN2; (+) strand; PAM type: YTN; PAM sequence: CTC
ctgaagcagatctctaatcc

SEQ ID NO: 85932 - DNA, 20 bp, Artificial Sequence
  Description of Artificial Sequence: Synthetic oligonucleotide
  Target: ATXN2; (+) strand; PAM type: YTN; PAM sequence: CTG
aagcagatctctaatccacc

SEQ ID NO: 85933 - DNA, 20 bp, Artificial Sequence
  Description of Artificial Sequence: Synthetic oligonucleotide
  Target: ATXN2; (+) strand; PAM type: YTN; PAM sequence: CTC
taatccaccaaagagaatag

SEQ ID NO: 85934 - DNA, 20 bp, Artificial Sequence
  Description of Artificial Sequence: Synthetic oligonucleotide
  Target: ATXN2; (+) strand; PAM type: YTN; PAM sequence: CTA
atccaccaaagagaatagct

SEQ ID NO: 85935 - DNA, 20 bp, Artificial Sequence
  Description of Artificial Sequence: Synthetic oligonucleotide
  Target: ATXN2; (+) strand; PAM type: YTN; PAM sequence: CTC
agtcttgtctttttctagag

SEQ ID NO: 85936 - DNA, 20 bp, Artificial Sequence
  Description of Artificial Sequence: Synthetic oligonucleotide
  Target: ATXN2; (+) strand; PAM type: YTN; PAM sequence: CTT
gtctttttctagagatacct

SEQ ID NO: 85937 - DNA, 20 bp, Artificial Sequence
  Description of Artificial Sequence: Synthetic oligonucleotide
  Target: ATXN2; (+) strand; PAM type: YTN; PAM sequence: TTG
tctttttctagagatacctt

SEQ ID NO: 85938 - DNA, 20 bp, Artificial Sequence
  Description of Artificial Sequence: Synthetic oligonucleotide
  Target: ATXN2; (+) strand; PAM type: YTN; PAM sequence: CTT
tttctagagataccttgaac

SEQ ID NO: 85939 - DNA, 20 bp, Artificial Sequence
  Description of Artificial Sequence: Synthetic oligonucleotide
  Target: ATXN2; (+) strand; PAM type: YTN; PAM sequence: TTT
ttctagagataccttgaacc

SEQ ID NO: 85940 - DNA, 20 bp, Artificial Sequence
  Description of Artificial Sequence: Synthetic oligonucleotide
  Target: ATXN2; (+) strand; PAM type: YTN; PAM sequence: TTT
tctagagataccttgaacca

SEQ ID NO: 85941 - DNA, 20 bp, Artificial Sequence
  Description of Artificial Sequence: Synthetic oligonucleotide
  Target: ATXN2; (+) strand; PAM type: YTN; PAM sequence: TTT
ctagagataccttgaaccag

SEQ ID NO: 85942 - DNA, 20 bp, Artificial Sequence
  Description of Artificial Sequence: Synthetic oligonucleotide
  Target: ATXN2; (+) strand; PAM type: YTN; PAM sequence: TTC
tagagataccttgaaccaga

SEQ ID NO: 85943 - DNA, 20 bp, Artificial Sequence
  Description of Artificial Sequence: Synthetic oligonucleotide
  Target: ATXN2; (+) strand; PAM type: YTN; PAM sequence: CTA
gagataccttgaaccagaac

SEQ ID NO: 85944 - DNA, 20 bp, Artificial Sequence
  Description of Artificial Sequence: Synthetic oligonucleotide
  Target: ATXN2; (+) strand; PAM type: YTN; PAM sequence: CTT
gaaccagaactaagggtgaa

SEQ ID NO: 85945 - DNA, 20 bp, Artificial Sequence
  Description of Artificial Sequence: Synthetic oligonucleotide
  Target: ATXN2; (+) strand; PAM type: YTN; PAM sequence: TTG
aaccagaactaagggtgaag

SEQ ID NO: 85946 - DNA, 20 bp, Artificial Sequence
  Description of Artificial Sequence: Synthetic oligonucleotide
  Target: ATXN2; (+) strand; PAM type: YTN; PAM sequence: CTA
agggtgaagaagaaaaatca

SEQ ID NO: 85947 - DNA, 20 bp, Artificial Sequence
  Description of Artificial Sequence: Synthetic oligonucleotide
  Target: ATXN2; (+) strand; PAM type: YTN; PAM sequence: TTT
cacagctaccttccgggata

SEQ ID NO: 85948 - DNA, 20 bp, Artificial Sequence
  Description of Artificial Sequence: Synthetic oligonucleotide
  Target: ATXN2; (+) strand; PAM type: YTN; PAM sequence: TTC
acagctaccttccgggatat

SEQ ID NO: 85949 - DNA, 20 bp, Artificial Sequence
  Description of Artificial Sequence: Synthetic oligonucleotide
  Target: ATXN2; (+) strand; PAM type: YTN; PAM sequence: CTA
ccttccgggatattcaaaat

SEQ ID NO: 85950 - DNA, 20 bp, Artificial Sequence
  Description of Artificial Sequence: Synthetic oligonucleotide
  Target: ATXN2; (+) strand; PAM type: YTN; PAM sequence: CTT
ccgggatattcaaaatgcac

SEQ ID NO: 85951 - DNA, 20 bp, Artificial Sequence
  Description of Artificial Sequence: Synthetic oligonucleotide
  Target: ATXN2; (+) strand; PAM type: YTN; PAM sequence: TTC
cgggatattcaaaatgcacc

SEQ ID NO: 85952 - DNA, 20 bp, Artificial Sequence
  Description of Artificial Sequence: Synthetic oligonucleotide
  Target: ATXN2; (+) strand; PAM type: YTN; PAM sequence: TTC
aaaatgcacccttagcacac

SEQ ID NO: 85953 - DNA, 20 bp, Artificial Sequence
  Description of Artificial Sequence: Synthetic oligonucleotide
  Target: ATXN2; (+) strand; PAM type: YTN; PAM sequence: CTT
agcacacctgctttgatatt

SEQ ID NO: 85954 - DNA, 20 bp, Artificial Sequence
  Description of Artificial Sequence: Synthetic oligonucleotide
  Target: ATXN2; (+) strand; PAM type: YTN; PAM sequence: TTA
gcacacctgctttgatatta

SEQ ID NO: 85955 - DNA, 20 bp, Artificial Sequence
  Description of Artificial Sequence: Synthetic oligonucleotide
  Target: ATXN2; (+) strand; PAM type: YTN; PAM sequence: CTG
ctttgatattaagtatccta

SEQ ID NO: 85956 - DNA, 20 bp, Artificial Sequence
  Description of Artificial Sequence: Synthetic oligonucleotide
  Target: ATXN2; (+) strand; PAM type: YTN; PAM sequence: CTT
tgatattaagtatcctacaa

SEQ ID NO: 85957 - DNA, 20 bp, Artificial Sequence
  Description of Artificial Sequence: Synthetic oligonucleotide
  Target: ATXN2; (+) strand; PAM type: YTN; PAM sequence: TTT
gatattaagtatcctacaaa

SEQ ID NO: 85958 - DNA, 20 bp, Artificial Sequence
  Description of Artificial Sequence: Synthetic oligonucleotide
  Target: ATXN2; (+) strand; PAM type: YTN; PAM sequence: TTG
atattaagtatcctacaaag

SEQ ID NO: 85959 - DNA, 20 bp, Artificial Sequence
  Description of Artificial Sequence: Synthetic oligonucleotide
  Target: ATXN2; (+) strand; PAM type: YTN; PAM sequence: TTA
agtatcctacaaagaagtag

SEQ ID NO: 85960 - DNA, 20 bp, Artificial Sequence
  Description of Artificial Sequence: Synthetic oligonucleotide
  Target: ATXN2; (+) strand; PAM type: YTN; PAM sequence: CTA
caaagaagtagcttatacag

SEQ ID NO: 85961 - DNA, 20 bp, Artificial Sequence
  Description of Artificial Sequence: Synthetic oligonucleotide
  Target: ATXN2; (+) strand; PAM type: YTN; PAM sequence: CTT
atacagacacacactaactt

SEQ ID NO: 85962 - DNA, 20 bp, Artificial Sequence
  Description of Artificial Sequence: Synthetic oligonucleotide
  Target: ATXN2; (+) strand; PAM type: YTN; PAM sequence: TTA
tacagacacacactaacttg

SEQ ID NO: 85963 - DNA, 20 bp, Artificial Sequence
  Description of Artificial Sequence: Synthetic oligonucleotide
  Target: ATXN2; (+) strand; PAM type: YTN; PAM sequence: CTA
acttgatcagtttttaaaac

SEQ ID NO: 85964 - DNA, 20 bp, Artificial Sequence
  Description of Artificial Sequence: Synthetic oligonucleotide
  Target: ATXN2; (+) strand; PAM type: YTN; PAM sequence: CTT
gatcagtttttaaaactttt

SEQ ID NO: 85965 - DNA, 20 bp, Artificial Sequence
  Description of Artificial Sequence: Synthetic oligonucleotide
  Target: ATXN2; (+) strand; PAM type: YTN; PAM sequence: TTG
atcagtttttaaaacttttt

SEQ ID NO: 85966 - DNA, 20 bp, Artificial Sequence
  Description of Artificial Sequence: Synthetic oligonucleotide
  Target: ATXN2; (+) strand; PAM type: YTN; PAM sequence: TTT
ttaaaactttttttattttt

SEQ ID NO: 85967 - DNA, 20 bp, Artificial Sequence
  Description of Artificial Sequence: Synthetic oligonucleotide
  Target: ATXN2; (+) strand; PAM type: YTN; PAM sequence: TTT
taaaactttttttatttttt

SEQ ID NO: 85968 - DNA, 20 bp, Artificial Sequence
  Description of Artificial Sequence: Synthetic oligonucleotide
  Target: ATXN2; (+) strand; PAM type: YTN; PAM sequence: TTT
aaaactttttttatttttta

SEQ ID NO: 85969 - DNA, 20 bp, Artificial Sequence
  Description of Artificial Sequence: Synthetic oligonucleotide
  Target: ATXN2; (+) strand; PAM type: YTN; PAM sequence: TTA
aaactttttttattttttaa

SEQ ID NO: 85970 - DNA, 20 bp, Artificial Sequence
  Description of Artificial Sequence: Synthetic oligonucleotide
  Target: ATXN2; (+) strand; PAM type: YTN; PAM sequence: CTT
tttttattttttaaattttt

SEQ ID NO: 85971 - DNA, 20 bp, Artificial Sequence
  Description of Artificial Sequence: Synthetic oligonucleotide
  Target: ATXN2; (+) strand; PAM type: YTN; PAM sequence: TTT
ttttattttttaaatttttt

SEQ ID NO: 85972 - DNA, 20 bp, Artificial Sequence
  Description of Artificial Sequence: Synthetic oligonucleotide
  Target: ATXN2; (+) strand; PAM type: YTN; PAM sequence: TTT
tttattttttaaattttttt

SEQ ID NO: 85973 - DNA, 20 bp, Artificial Sequence
  Description of Artificial Sequence: Synthetic oligonucleotide
  Target: ATXN2; (+) strand; PAM type: YTN; PAM sequence: TTT
ttattttttaaatttttttt

SEQ ID NO: 85974 - DNA, 20 bp, Artificial Sequence
  Description of Artificial Sequence: Synthetic oligonucleotide
  Target: ATXN2; (+) strand; PAM type: YTN; PAM sequence: TTT
tattttttaaatttttttta

SEQ ID NO: 85975 - DNA, 20 bp, Artificial Sequence
  Description of Artificial Sequence: Synthetic oligonucleotide
  Target: ATXN2; (+) strand; PAM type: YTN; PAM sequence: TTT
attttttaaattttttttaa

SEQ ID NO: 85976 - DNA, 20 bp, Artificial Sequence
  Description of Artificial Sequence: Synthetic oligonucleotide
  Target: ATXN2; (+) strand; PAM type: YTN; PAM sequence: TTA
ttttttaaattttttttaag

SEQ ID NO: 85977 - DNA, 20 bp, Artificial Sequence
  Description of Artificial Sequence: Synthetic oligonucleotide
  Target: ATXN2; (+) strand; PAM type: YTN; PAM sequence: TTT
tttaaattttttttaagttt

SEQ ID NO: 85978 - DNA, 20 bp, Artificial Sequence
  Description of Artificial Sequence: Synthetic oligonucleotide
  Target: ATXN2; (+) strand; PAM type: YTN; PAM sequence: TTT
ttaaattttttttaagtttt

SEQ ID NO: 85979 - DNA, 20 bp, Artificial Sequence
  Description of Artificial Sequence: Synthetic oligonucleotide
  Target: ATXN2; (+) strand; PAM type: YTN; PAM sequence: TTT
taaattttttttaagttttt

SEQ ID NO: 85980 - DNA, 20 bp, Artificial Sequence
  Description of Artificial Sequence: Synthetic oligonucleotide
  Target: ATXN2; (+) strand; PAM type: YTN; PAM sequence: TTT
aaattttttttaagttttta

SEQ ID NO: 85981 - DNA, 20 bp, Artificial Sequence
  Description of Artificial Sequence: Synthetic oligonucleotide
  Target: ATXN2; (+) strand; PAM type: YTN; PAM sequence: TTA
aattttttttaagtttttat

SEQ ID NO: 85982 - DNA, 20 bp, Artificial Sequence
  Description of Artificial Sequence: Synthetic oligonucleotide
  Target: ATXN2; (+) strand; PAM type: YTN; PAM sequence: TTT
tttttaagtttttattttat

SEQ ID NO: 85983 - DNA, 20 bp, Artificial Sequence
  Description of Artificial Sequence: Synthetic oligonucleotide
  Target: ATXN2; (+) strand; PAM type: YTN; PAM sequence: TTT
ttttaagtttttattttata

SEQ ID NO: 85984 - DNA, 20 bp, Artificial Sequence
  Description of Artificial Sequence: Synthetic oligonucleotide
  Target: ATXN2; (+) strand; PAM type: YTN; PAM sequence: TTT
tttaagtttttattttatat

SEQ ID NO: 85985 - DNA, 20 bp, Artificial Sequence
  Description of Artificial Sequence: Synthetic oligonucleotide
  Target: ATXN2; (+) strand; PAM type: YTN; PAM sequence: TTT
ttaagtttttattttatatt

SEQ ID NO: 85986 - DNA, 20 bp, Artificial Sequence
  Description of Artificial Sequence: Synthetic oligonucleotide
  Target: ATXN2; (+) strand; PAM type: YTN; PAM sequence: TTT
taagtttttattttatatta

SEQ ID NO: 85987 - DNA, 20 bp, Artificial Sequence
  Description of Artificial Sequence: Synthetic oligonucleotide
  Target: ATXN2; (+) strand; PAM type: YTN; PAM sequence: TTT
aagtttttattttatattat

SEQ ID NO: 85988 - DNA, 20 bp, Artificial Sequence
  Description of Artificial Sequence: Synthetic oligonucleotide
  Target: ATXN2; (+) strand; PAM type: YTN; PAM sequence: TTA
agtttttattttatattatc

SEQ ID NO: 85989 - DNA, 20 bp, Artificial Sequence
  Description of Artificial Sequence: Synthetic oligonucleotide
  Target: ATXN2; (+) strand; PAM type: YTN; PAM sequence: TTT
ttattttatattatctacaa

SEQ ID NO: 85990 - DNA, 20 bp, Artificial Sequence
  Description of Artificial Sequence: Synthetic oligonucleotide
  Target: ATXN2; (+) strand; PAM type: YTN; PAM sequence: TTT
tattttatattatctacaaa

SEQ ID NO: 85991 - DNA, 20 bp, Artificial Sequence
  Description of Artificial Sequence: Synthetic oligonucleotide
  Target: ATXN2; (+) strand; PAM type: YTN; PAM sequence: TTT
attttatattatctacaaag

SEQ ID NO: 85992 - DNA, 20 bp, Artificial Sequence
  Description of Artificial Sequence: Synthetic oligonucleotide
  Target: ATXN2; (+) strand; PAM type: YTN; PAM sequence: TTA
ttttatattatctacaaagt

SEQ ID NO: 85993 - DNA, 20 bp, Artificial Sequence
  Description of Artificial Sequence: Synthetic oligonucleotide
  Target: ATXN2; (+) strand; PAM type: YTN; PAM sequence: TTT
tatattatctacaaagtaaa

SEQ ID NO: 85994 - DNA, 20 bp, Artificial Sequence
  Description of Artificial Sequence: Synthetic oligonucleotide
  Target: ATXN2; (+) strand; PAM type: YTN; PAM sequence: TTT
atattatctacaaagtaaaa

SEQ ID NO: 85995 - DNA, 20 bp, Artificial Sequence
  Description of Artificial Sequence: Synthetic oligonucleotide
  Target: ATXN2; (+) strand; PAM type: YTN; PAM sequence: TTA
tattatctacaaagtaaaag

SEQ ID NO: 85996 - DNA, 20 bp, Artificial Sequence
  Description of Artificial Sequence: Synthetic oligonucleotide
  Target: ATXN2; (+) strand; PAM type: YTN; PAM sequence: TTA
tctacaaagtaaaagttttt

SEQ ID NO: 85997 - DNA, 20 bp, Artificial Sequence
  Description of Artificial Sequence: Synthetic oligonucleotide
  Target: ATXN2; (+) strand; PAM type: YTN; PAM sequence: CTA
caaagtaaaagtttttccct

SEQ ID NO: 85998 - DNA, 20 bp, Artificial Sequence
  Description of Artificial Sequence: Synthetic oligonucleotide
  Target: ATXN2; (+) strand; PAM type: YTN; PAM sequence: TTT
ttcccttaacttaaaagttg

SEQ ID NO: 85999 - DNA, 20 bp, Artificial Sequence
  Description of Artificial Sequence: Synthetic oligonucleotide
  Target: ATXN2; (+) strand; PAM type: YTN; PAM sequence: TTT
tcccttaacttaaaagttga

SEQ ID NO: 86000 - DNA, 20 bp, Artificial Sequence
  Description of Artificial Sequence: Synthetic oligonucleotide
  Target: ATXN2; (+) strand; PAM type: YTN; PAM sequence: TTT
cccttaacttaaaagttgaa

SEQ ID NO: 86001 - DNA, 20 bp, Artificial Sequence
  Description of Artificial Sequence: Synthetic oligonucleotide
  Target: ATXN2; (+) strand; PAM type: YTN; PAM sequence: TTC
ccttaacttaaaagttgaac

SEQ ID NO: 86002 - DNA, 20 bp, Artificial Sequence
  Description of Artificial Sequence: Synthetic oligonucleotide
  Target: ATXN2; (+) strand; PAM type: YTN; PAM sequence: CTT
aacttaaaagttgaaccact

SEQ ID NO: 86003 - DNA, 20 bp, Artificial Sequence
  Description of Artificial Sequence: Synthetic oligonucleotide
  Target: ATXN2; (+) strand; PAM type: YTN; PAM sequence: TTA
acttaaaagttgaaccactg

SEQ ID NO: 86004 - DNA, 20 bp, Artificial Sequence
  Description of Artificial Sequence: Synthetic oligonucleotide
  Target: ATXN2; (+) strand; PAM type: YTN; PAM sequence: CTT
aaaagttgaaccactgtaga

SEQ ID NO: 86005 - DNA, 20 bp, Artificial Sequence
  Description of Artificial Sequence: Synthetic oligonucleotide
  Target: ATXN2; (+) strand; PAM type: YTN; PAM sequence: TTA
aaagttgaaccactgtagac

SEQ ID NO: 86006 - DNA, 20 bp, Artificial Sequence
  Description of Artificial Sequence: Synthetic oligonucleotide
  Target: ATXN2; (+) strand; PAM type: YTN; PAM sequence: TTG
aaccactgtagacagtgatc

SEQ ID NO: 86007 - DNA, 20 bp, Artificial Sequence
  Description of Artificial Sequence: Synthetic oligonucleotide
  Target: ATXN2; (+) strand; PAM type: YTN; PAM sequence: CTG
tagacagtgatcacctcatc

SEQ ID NO: 86008 - DNA, 20 bp, Artificial Sequence
  Description of Artificial Sequence: Synthetic oligonucleotide
  Target: ATXN2; (+) strand; PAM type: YTN; PAM sequence: CTC
atcaaacttgatttataaat

SEQ ID NO: 86009 - DNA, 20 bp, Artificial Sequence
  Description of Artificial Sequence: Synthetic oligonucleotide
  Target: ATXN2; (+) strand; PAM type: YTN; PAM sequence: CTT
gatttataaataataatccg

SEQ ID NO: 86010 - DNA, 20 bp, Artificial Sequence
  Description of Artificial Sequence: Synthetic oligonucleotide
  Target: ATXN2; (+) strand; PAM type: YTN; PAM sequence: TTG
atttataaataataatccgt

SEQ ID NO: 86011 - DNA, 20 bp, Artificial Sequence
  Description of Artificial Sequence: Synthetic oligonucleotide
  Target: ATXN2; (+) strand; PAM type: YTN; PAM sequence: TTT
ataaataataatccgtcagt

SEQ ID NO: 86012 - DNA, 20 bp, Artificial Sequence
  Description of Artificial Sequence: Synthetic oligonucleotide
  Target: ATXN2; (+) strand; PAM type: YTN; PAM sequence: TTA
taaataataatccgtcagtt

SEQ ID NO: 86013 - DNA, 20 bp, Artificial Sequence
  Description of Artificial Sequence: Synthetic oligonucleotide
  Target: ATXN2; (+) strand; PAM type: YTN; PAM sequence: TTT
gacggtaagaatttactgaa

SEQ ID NO: 86014 - DNA, 20 bp, Artificial Sequence
  Description of Artificial Sequence: Synthetic oligonucleotide
  Target: ATXN2; (+) strand; PAM type: YTN; PAM sequence: TTG
acggtaagaatttactgaaa

SEQ ID NO: 86015 - DNA, 20 bp, Artificial Sequence
  Description of Artificial Sequence: Synthetic oligonucleotide
  Target: ATXN2; (+) strand; PAM type: YTN; PAM sequence: TTT
actgaaactttgtcaagttt

SEQ ID NO: 86016 - DNA, 20 bp, Artificial Sequence
  Description of Artificial Sequence: Synthetic oligonucleotide
  Target: ATXN2; (+) strand; PAM type: YTN; PAM sequence: TTA
ctgaaactttgtcaagttta

SEQ ID NO: 86017 - DNA, 20 bp, Artificial Sequence
  Description of Artificial Sequence: Synthetic oligonucleotide
  Target: ATXN2; (+) strand; PAM type: YTN; PAM sequence: CTG
aaactttgtcaagtttagta

SEQ ID NO: 86018 - DNA, 20 bp, Artificial Sequence
  Description of Artificial Sequence: Synthetic oligonucleotide
  Target: ATXN2; (+) strand; PAM type: YTN; PAM sequence: CTT
tgtcaagtttagtaaaaggg

SEQ ID NO: 86019 - DNA, 20 bp, Artificial Sequence
  Description of Artificial Sequence: Synthetic oligonucleotide
  Target: ATXN2; (+) strand; PAM type: YTN; PAM sequence: TTT
gtcaagtttagtaaaagggc

SEQ ID NO: 86020 - DNA, 20 bp, Artificial Sequence
  Description of Artificial Sequence: Synthetic oligonucleotide
  Target: ATXN2; (+) strand; PAM type: YTN; PAM sequence: TTG
tcaagtttagtaaaagggcg

SEQ ID NO: 86021 - DNA, 20 bp, Artificial Sequence
  Description of Artificial Sequence: Synthetic oligonucleotide
  Target: ATXN2; (+) strand; PAM type: YTN; PAM sequence: TTT
agtaaaagggcgttccaagt

SEQ ID NO: 86022 - DNA, 20 bp, Artificial Sequence
  Description of Artificial Sequence: Synthetic oligonucleotide
  Target: ATXN2; (+) strand; PAM type: YTN; PAM sequence: TTA
gtaaaagggcgttccaagtc

SEQ ID NO: 86023 - DNA, 20 bp, Artificial Sequence
  Description of Artificial Sequence: Synthetic oligonucleotide
  Target: ATXN2; (+) strand; PAM type: YTN; PAM sequence: TTC
caagtcttgatttttttttt

SEQ ID NO: 86024 - DNA, 20 bp, Artificial Sequence
  Description of Artificial Sequence: Synthetic oligonucleotide
  Target: ATXN2; (+) strand; PAM type: YTN; PAM sequence: CTT
gatttttttttttttttttt

SEQ ID NO: 86025 - DNA, 20 bp, Artificial Sequence
  Description of Artificial Sequence: Synthetic oligonucleotide
  Target: ATXN2; (+) strand; PAM type: YTN; PAM sequence: TTG
attttttttttttttttttt

SEQ ID NO: 86026 - DNA, 20 bp, Artificial Sequence
  Description of Artificial Sequence: Synthetic oligonucleotide
  Target: ATXN2; (+) strand; PAM type: YTN; PAM sequence: TTT
ttttttttttttttttttag

SEQ ID NO: 86027 - DNA, 20 bp, Artificial Sequence
  Description of Artificial Sequence: Synthetic oligonucleotide
  Target: ATXN2; (+) strand; PAM type: YTN; PAM sequence: TTT
tttttttttttttttttagc

SEQ ID NO: 86028 - DNA, 20 bp, Artificial Sequence
  Description of Artificial Sequence: Synthetic oligonucleotide
  Target: ATXN2; (+) strand; PAM type: YTN; PAM sequence: TTT
ttttttttttttttttagca

SEQ ID NO: 86029 - DNA, 20 bp, Artificial Sequence
  Description of Artificial Sequence: Synthetic oligonucleotide
  Target: ATXN2; (+) strand; PAM type: YTN; PAM sequence: TTT
tttttttttttttttagcag

SEQ ID NO: 86030 - DNA, 20 bp, Artificial Sequence
  Description of Artificial Sequence: Synthetic oligonucleotide
  Target: ATXN2; (+) strand; PAM type: YTN; PAM sequence: TTT
ttttttttttttttagcagt

SEQ ID NO: 86031 - DNA, 20 bp, Artificial Sequence
  Description of Artificial Sequence: Synthetic oligonucleotide
  Target: ATXN2; (+) strand; PAM type: YTN; PAM sequence: TTT
tttttttttttttagcagta

SEQ ID NO: 86032 - DNA, 20 bp, Artificial Sequence
  Description of Artificial Sequence: Synthetic oligonucleotide
  Target: ATXN2; (+) strand; PAM type: YTN; PAM sequence: TTT
ttttttttttttagcagtaa

SEQ ID NO: 86033 - DNA, 20 bp, Artificial Sequence
  Description of Artificial Sequence: Synthetic oligonucleotide
  Target: ATXN2; (+) strand; PAM type: YTN; PAM sequence: TTT
tttttttttttagcagtaat

SEQ ID NO: 86034 - DNA, 20 bp, Artificial Sequence
  Description of Artificial Sequence: Synthetic oligonucleotide
  Target: ATXN2; (+) strand; PAM type: YTN; PAM sequence: TTT
ttttttttttagcagtaata

SEQ ID NO: 86035 - DNA, 20 bp, Artificial Sequence
  Description of Artificial Sequence: Synthetic oligonucleotide
  Target: ATXN2; (+) strand; PAM type: YTN; PAM sequence: TTT
tttttttttagcagtaatag

SEQ ID NO: 86036 - DNA, 20 bp, Artificial Sequence
  Description of Artificial Sequence: Synthetic oligonucleotide
  Target: ATXN2; (+) strand; PAM type: YTN; PAM sequence: TTT
ttttttttagcagtaatagc

SEQ ID NO: 86037 - DNA, 20 bp, Artificial Sequence
  Description of Artificial Sequence: Synthetic oligonucleotide
  Target: ATXN2; (+) strand; PAM type: YTN; PAM sequence: TTT
tttttttagcagtaatagca

SEQ ID NO: 86038 - DNA, 20 bp, Artificial Sequence
  Description of Artificial Sequence: Synthetic oligonucleotide
  Target: ATXN2; (+) strand; PAM type: YTN; PAM sequence: TTT
ttttttagcagtaatagcag

SEQ ID NO: 86039 - DNA, 20 bp, Artificial Sequence
  Description of Artificial Sequence: Synthetic oligonucleotide
  Target: ATXN2; (+) strand; PAM type: YTN; PAM sequence: TTT
tttttagcagtaatagcagc

SEQ ID NO: 86040 - DNA, 20 bp, Artificial Sequence
  Description of Artificial Sequence: Synthetic oligonucleotide
  Target: ATXN2; (+) strand; PAM type: YTN; PAM sequence: TTT
ttttagcagtaatagcagca

SEQ ID NO: 86041 - DNA, 20 bp, Artificial Sequence
  Description of Artificial Sequence: Synthetic oligonucleotide
  Target: ATXN2; (+) strand; PAM type: YTN; PAM sequence: TTT
tttagcagtaatagcagcaa

SEQ ID NO: 86042 - DNA, 20 bp, Artificial Sequence
  Description of Artificial Sequence: Synthetic oligonucleotide
  Target: ATXN2; (+) strand; PAM type: YTN; PAM sequence: TTT
ttagcagtaatagcagcaag

SEQ ID NO: 86043 - DNA, 20 bp, Artificial Sequence
  Description of Artificial Sequence: Synthetic oligonucleotide
  Target: ATXN2; (+) strand; PAM type: YTN; PAM sequence: TTT
tagcagtaatagcagcaaga

SEQ ID NO: 86044 - DNA, 20 bp, Artificial Sequence
  Description of Artificial Sequence: Synthetic oligonucleotide
  Target: ATXN2; (+) strand; PAM type: YTN; PAM sequence: TTT
agcagtaatagcagcaagaa

SEQ ID NO: 86045 - DNA, 20 bp, Artificial Sequence
  Description of Artificial Sequence: Synthetic oligonucleotide
  Target: ATXN2; (+) strand; PAM type: YTN; PAM sequence: TTA
gcagtaatagcagcaagaat

SEQ ID NO: 86046 - DNA, 20 bp, Artificial Sequence
  Description of Artificial Sequence: Synthetic oligonucleotide
  Target: ATXN2; (+) strand; PAM type: YTN; PAM sequence: CTC
ttgttacttcttttgctagc

SEQ ID NO: 86047 - DNA, 20 bp, Artificial Sequence
  Description of Artificial Sequence: Synthetic oligonucleotide
  Target: ATXN2; (+) strand; PAM type: YTN; PAM sequence: CTT
gttacttcttttgctagctg

SEQ ID NO: 86048 - DNA, 20 bp, Artificial Sequence
  Description of Artificial Sequence: Synthetic oligonucleotide
  Target: ATXN2; (+) strand; PAM type: YTN; PAM sequence: TTG
ttacttcttttgctagctga

SEQ ID NO: 86049 - DNA, 20 bp, Artificial Sequence
  Description of Artificial Sequence: Synthetic oligonucleotide
  Target: ATXN2; (+) strand; PAM type: YTN; PAM sequence: TTA
cttcttttgctagctgatgt

SEQ ID NO: 86050 - DNA, 20 bp, Artificial Sequence
  Description of Artificial Sequence: Synthetic oligonucleotide
  Target: ATXN2; (+) strand; PAM type: YTN; PAM sequence: CTT
cttttgctagctgatgtgtt

SEQ ID NO: 86051 - DNA, 20 bp, Artificial Sequence
  Description of Artificial Sequence: Synthetic oligonucleotide
  Target: ATXN2; (+) strand; PAM type: YTN; PAM sequence: TTC
ttttgctagctgatgtgttc

SEQ ID NO: 86052 - DNA, 20 bp, Artificial Sequence
  Description of Artificial Sequence: Synthetic oligonucleotide
  Target: ATXN2; (+) strand; PAM type: YTN; PAM sequence: CTT
ttgctagctgatgtgttcat

SEQ ID NO: 86053 - DNA, 20 bp, Artificial Sequence
  Description of Artificial Sequence: Synthetic oligonucleotide
  Target: ATXN2; (+) strand; PAM type: YTN; PAM sequence: TTT
tgctagctgatgtgttcatg

SEQ ID NO: 86054 - DNA, 20 bp, Artificial Sequence
  Description of Artificial Sequence: Synthetic oligonucleotide
  Target: ATXN2; (+) strand; PAM type: YTN; PAM sequence: TTT
gctagctgatgtgttcatga

SEQ ID NO: 86055 - DNA, 20 bp, Artificial Sequence
  Description of Artificial Sequence: Synthetic oligonucleotide
  Target: ATXN2; (+) strand; PAM type: YTN; PAM sequence: TTG
ctagctgatgtgttcatgac

SEQ ID NO: 86056 - DNA, 20 bp, Artificial Sequence
  Description of Artificial Sequence: Synthetic oligonucleotide
  Target: ATXN2; (+) strand; PAM type: YTN; PAM sequence: CTA
gctgatgtgttcatgacttt

SEQ ID NO: 86057 - DNA, 20 bp, Artificial Sequence
  Description of Artificial Sequence: Synthetic oligonucleotide
  Target: ATXN2; (+) strand; PAM type: YTN; PAM sequence: CTG
atgtgttcatgactttcaag

SEQ ID NO: 86058 - DNA, 20 bp, Artificial Sequence
  Description of Artificial Sequence: Synthetic oligonucleotide
  Target: ATXN2; (+) strand; PAM type: YTN; PAM sequence: TTC
atgactttcaagggttatta

SEQ ID NO: 86059 - DNA, 20 bp, Artificial Sequence
  Description of Artificial Sequence: Synthetic oligonucleotide
  Target: ATXN2; (+) strand; PAM type: YTN; PAM sequence: CTT
tcaagggttattaaaaaata

SEQ ID NO: 86060 - DNA, 20 bp, Artificial Sequence
  Description of Artificial Sequence: Synthetic oligonucleotide
  Target: ATXN2; (+) strand; PAM type: YTN; PAM sequence: TTT
caagggttattaaaaaataa

SEQ ID NO: 86061 - DNA, 20 bp, Artificial Sequence
  Description of Artificial Sequence: Synthetic oligonucleotide
  Target: ATXN2; (+) strand; PAM type: YTN; PAM sequence: TTC
aagggttattaaaaaataaa

SEQ ID NO: 86062 - DNA, 20 bp, Artificial Sequence
  Description of Artificial Sequence: Synthetic oligonucleotide
  Target: ATXN2; (+) strand; PAM type: YTN; PAM sequence: TTA
ttaaaaaataaataacttcc

SEQ ID NO: 86063 - DNA, 20 bp, Artificial Sequence
  Description of Artificial Sequence: Synthetic oligonucleotide
  Target: ATXN2; (+) strand; PAM type: YTN; PAM sequence: TTA
aaaaataaataacttccagt

SEQ ID NO: 86064 - DNA, 20 bp, Artificial Sequence
  Description of Artificial Sequence: Synthetic oligonucleotide
  Target: ATXN2; (+) strand; PAM type: YTN; PAM sequence: CTT
ccagtttcggcaagcagagc

SEQ ID NO: 86065 - DNA, 20 bp, Artificial Sequence
  Description of Artificial Sequence: Synthetic oligonucleotide
  Target: ATXN2; (+) strand; PAM type: YTN; PAM sequence: TTC
cagtttcggcaagcagagct

SEQ ID NO: 86066 - DNA, 20 bp, Artificial Sequence
  Description of Artificial Sequence: Synthetic oligonucleotide
  Target: ATXN2; (+) strand; PAM type: YTN; PAM sequence: TTT
cggcaagcagagctggggta

SEQ ID NO: 86067 - DNA, 20 bp, Artificial Sequence
  Description of Artificial Sequence: Synthetic oligonucleotide
  Target: ATXN2; (+) strand; PAM type: YTN; PAM sequence: TTC
ggcaagcagagctggggtac

SEQ ID NO: 86068 - DNA, 20 bp, Artificial Sequence
  Description of Artificial Sequence: Synthetic oligonucleotide
  Target: ATXN2; (+) strand; PAM type: YTN; PAM sequence: CTG
gggtacctgcgggactctga

SEQ ID NO: 86069 - DNA, 20 bp, Artificial Sequence
  Description of Artificial Sequence: Synthetic oligonucleotide
  Target: ATXN2; (+) strand; PAM type: YTN; PAM sequence: CTG
cgggactctgaaacagcata

SEQ ID NO: 86070 - DNA, 20 bp, Artificial Sequence
  Description of Artificial Sequence: Synthetic oligonucleotide
  Target: ATXN2; (+) strand; PAM type: YTN; PAM sequence: CTC
tgaaacagcatatggaatta

SEQ ID NO: 86071 - DNA, 20 bp, Artificial Sequence
  Description of Artificial Sequence: Synthetic oligonucleotide
  Target: ATXN2; (+) strand; PAM type: YTN; PAM sequence: CTG
aaacagcatatggaattatg

SEQ ID NO: 86072 - DNA, 20 bp, Artificial Sequence
  Description of Artificial Sequence: Synthetic oligonucleotide
  Target: ATXN2; (+) strand; PAM type: YTN; PAM sequence: TTA
tggaatagcccccaagttcc

SEQ ID NO: 86073 - DNA, 20 bp, Artificial Sequence
  Description of Artificial Sequence: Synthetic oligonucleotide
  Target: ATXN2; (+) strand; PAM type: YTN; PAM sequence: TTC
ctaaatgcctctactcggtc

SEQ ID NO: 86074 - DNA, 20 bp, Artificial Sequence
  Description of Artificial Sequence: Synthetic oligonucleotide
  Target: ATXN2; (+) strand; PAM type: YTN; PAM sequence: CTA
aatgcctctactcggtccaa

SEQ ID NO: 86075 - DNA, 20 bp, Artificial Sequence
  Description of Artificial Sequence: Synthetic oligonucleotide
  Target: ATXN2; (+) strand; PAM type: YTN; PAM sequence: CTC
tactcggtccaagtatcttc

SEQ ID NO: 86076 - DNA, 20 bp, Artificial Sequence
  Description of Artificial Sequence: Synthetic oligonucleotide
  Target: ATXN2; (+) strand; PAM type: YTN; PAM sequence: CTA
ctcggtccaagtatcttcca

SEQ ID NO: 86077 - DNA, 20 bp, Artificial Sequence
  Description of Artificial Sequence: Synthetic oligonucleotide
  Target: ATXN2; (+) strand; PAM type: YTN; PAM sequence: CTC
ggtccaagtatcttccactg

SEQ ID NO: 86078 - DNA, 20 bp, Artificial Sequence
  Description of Artificial Sequence: Synthetic oligonucleotide
  Target: ATXN2; (+) strand; PAM type: YTN; PAM sequence: CTT
ccactgcaagtgaactgtta

SEQ ID NO: 86079 - DNA, 20 bp, Artificial Sequence
  Description of Artificial Sequence: Synthetic oligonucleotide
  Target: ATXN2; (+) strand; PAM type: YTN; PAM sequence: TTC
cactgcaagtgaactgttag

SEQ ID NO: 86080 - DNA, 20 bp, Artificial Sequence
  Description of Artificial Sequence: Synthetic oligonucleotide
  Target: ATXN2; (+) strand; PAM type: YTN; PAM sequence: CTG
caagtgaactgttagcattc

SEQ ID NO: 86081 - DNA, 20 bp, Artificial Sequence
  Description of Artificial Sequence: Synthetic oligonucleotide
  Target: ATXN2; (+) strand; PAM type: YTN; PAM sequence: CTG
ttagcattcctattggatgt

SEQ ID NO: 86082 - DNA, 20 bp, Artificial Sequence
  Description of Artificial Sequence: Synthetic oligonucleotide
  Target: ATXN2; (+) strand; PAM type: YTN; PAM sequence: TTA
gcattcctattggatgttac

SEQ ID NO: 86083 - DNA, 20 bp, Artificial Sequence
  Description of Artificial Sequence: Synthetic oligonucleotide
  Target: ATXN2; (+) strand; PAM type: YTN; PAM sequence: TTC
ctattggatgttacaagaaa

SEQ ID NO: 86084 - DNA, 20 bp, Artificial Sequence
  Description of Artificial Sequence: Synthetic oligonucleotide
  Target: ATXN2; (+) strand; PAM type: YTN; PAM sequence: CTA
ttggatgttacaagaaatca

SEQ ID NO: 86085 - DNA, 20 bp, Artificial Sequence
  Description of Artificial Sequence: Synthetic oligonucleotide
  Target: ATXN2; (+) strand; PAM type: YTN; PAM sequence: TTG
gatgttacaagaaatcaaca

SEQ ID NO: 86086 - DNA, 20 bp, Artificial Sequence
  Description of Artificial Sequence: Synthetic oligonucleotide
  Target: ATXN2; (+) strand; PAM type: YTN; PAM sequence: TTA
caagaaatcaacatatatat

SEQ ID NO: 86087 - DNA, 20 bp, Artificial Sequence
  Description of Artificial Sequence: Synthetic oligonucleotide
  Target: ATXN2; (+) strand; PAM type: YTN; PAM sequence: TTT
taaaaacaaaataaatgaaa

SEQ ID NO: 86088 - DNA, 20 bp, Artificial Sequence
  Description of Artificial Sequence: Synthetic oligonucleotide
  Target: ATXN2; (+) strand; PAM type: YTN; PAM sequence: TTT
aaaaacaaaataaatgaaat

SEQ ID NO: 86089 - DNA, 20 bp, Artificial Sequence
  Description of Artificial Sequence: Synthetic oligonucleotide
  Target: ATXN2; (+) strand; PAM type: YTN; PAM sequence: TTA
aaaacaaaataaatgaaatt

SEQ ID NO: 86090 - DNA, 20 bp, Artificial Sequence
  Description of Artificial Sequence: Synthetic oligonucleotide
  Target: ATXN2; (+) strand; PAM type: YTN; PAM sequence: TTC
tagttttctgtgcttccagt

SEQ ID NO: 86091 - DNA, 20 bp, Artificial Sequence
  Description of Artificial Sequence: Synthetic oligonucleotide
  Target: ATXN2; (+) strand; PAM type: YTN; PAM sequence: CTA
gttttctgtgcttccagttg

SEQ ID NO: 86092 - DNA, 20 bp, Artificial Sequence
  Description of Artificial Sequence: Synthetic oligonucleotide
  Target: ATXN2; (+) strand; PAM type: YTN; PAM sequence: TTT
tctgtgcttccagttggtag

SEQ ID NO: 86093 - DNA, 20 bp, Artificial Sequence
  Description of Artificial Sequence: Synthetic oligonucleotide
  Target: ATXN2; (+) strand; PAM type: YTN; PAM sequence: TTT
ctgtgcttccagttggtaga

SEQ ID NO: 86094 - DNA, 20 bp, Artificial Sequence
  Description of Artificial Sequence: Synthetic oligonucleotide
  Target: ATXN2; (+) strand; PAM type: YTN; PAM sequence: TTC
tgtgcttccagttggtagaa

SEQ ID NO: 86095 - DNA, 20 bp, Artificial Sequence
  Description of Artificial Sequence: Synthetic oligonucleotide
  Target: ATXN2; (+) strand; PAM type: YTN; PAM sequence: CTG
tgcttccagttggtagaagc

SEQ ID NO: 86096 - DNA, 20 bp, Artificial Sequence
  Description of Artificial Sequence: Synthetic oligonucleotide
  Target: ATXN2; (+) strand; PAM type: YTN; PAM sequence: CTT
ccagttggtagaagcagtag

SEQ ID NO: 86097 - DNA, 20 bp, Artificial Sequence
  Description of Artificial Sequence: Synthetic oligonucleotide
  Target: ATXN2; (+) strand; PAM type: YTN; PAM sequence: TTC
cagttggtagaagcagtaga

SEQ ID NO: 86098 - DNA, 20 bp, Artificial Sequence
  Description of Artificial Sequence: Synthetic oligonucleotide
  Target: ATXN2; (+) strand; PAM type: YTN; PAM sequence: TTG
gtagaagcagtagaagggag

SEQ ID NO: 86099 - DNA, 20 bp, Artificial Sequence
  Description of Artificial Sequence: Synthetic oligonucleotide
  Target: ATXN2; (+) strand; PAM type: YTN; PAM sequence: TTT
ggcctttcggttcctccagg

SEQ ID NO: 86100 - DNA, 20 bp, Artificial Sequence
  Description of Artificial Sequence: Synthetic oligonucleotide
  Target: ATXN2; (+) strand; PAM type: YTN; PAM sequence: TTG
gcctttcggttcctccaggg

SEQ ID NO: 86101 - DNA, 20 bp, Artificial Sequence
  Description of Artificial Sequence: Synthetic oligonucleotide
  Target: ATXN2; (+) strand; PAM type: YTN; PAM sequence: CTT
tcggttcctccagggcagcc

SEQ ID NO: 86102 - DNA, 20 bp, Artificial Sequence
  Description of Artificial Sequence: Synthetic oligonucleotide
  Target: ATXN2; (+) strand; PAM type: YTN; PAM sequence: TTT
cggttcctccagggcagcct

SEQ ID NO: 86103 - DNA, 20 bp, Artificial Sequence
  Description of Artificial Sequence: Synthetic oligonucleotide
  Target: ATXN2; (+) strand; PAM type: YTN; PAM sequence: TTC
ggttcctccagggcagcctt

SEQ ID NO: 86104 - DNA, 20 bp, Artificial Sequence
  Description of Artificial Sequence: Synthetic oligonucleotide
  Target: ATXN2; (+) strand; PAM type: YTN; PAM sequence: TTC
ctccagggcagccttacaac

SEQ ID NO: 86105 - DNA, 20 bp, Artificial Sequence
  Description of Artificial Sequence: Synthetic oligonucleotide
  Target: ATXN2; (+) strand; PAM type: YTN; PAM sequence: CTC
cagggcagccttacaactgc

SEQ ID NO: 86106 - DNA, 20 bp, Artificial Sequence
  Description of Artificial Sequence: Synthetic oligonucleotide
  Target: ATXN2; (+) strand; PAM type: YTN; PAM sequence: CTT
acaactgctgttggtggtgg

SEQ ID NO: 86107 - DNA, 20 bp, Artificial Sequence
  Description of Artificial Sequence: Synthetic oligonucleotide
  Target: ATXN2; (+) strand; PAM type: YTN; PAM sequence: TTA
caactgctgttggtggtggg

SEQ ID NO: 86108 - DNA, 20 bp, Artificial Sequence
  Description of Artificial Sequence: Synthetic oligonucleotide
  Target: ATXN2; (+) strand; PAM type: YTN; PAM sequence: CTG
ctgttggtggtgggcttgta

SEQ ID NO: 86109 - DNA, 20 bp, Artificial Sequence
  Description of Artificial Sequence: Synthetic oligonucleotide
  Target: ATXN2; (+) strand; PAM type: YTN; PAM sequence: CTG
ttggtggtgggcttgtactg

SEQ ID NO: 86110 - DNA, 20 bp, Artificial Sequence
  Description of Artificial Sequence: Synthetic oligonucleotide
  Target: ATXN2; (+) strand; PAM type: YTN; PAM sequence: TTG
gtggtgggcttgtactgtaa

SEQ ID NO: 86111 - DNA, 20 bp, Artificial Sequence
  Description of Artificial Sequence: Synthetic oligonucleotide
  Target: ATXN2; (+) strand; PAM type: YTN; PAM sequence: CTT
gtactgtaaaaagaaaagcg

SEQ ID NO: 86112 - DNA, 20 bp, Artificial Sequence
  Description of Artificial Sequence: Synthetic oligonucleotide
  Target: ATXN2; (+) strand; PAM type: YTN; PAM sequence: TTG
tactgtaaaaagaaaagcga

SEQ ID NO: 86113 - DNA, 20 bp, Artificial Sequence
  Description of Artificial Sequence: Synthetic oligonucleotide
  Target: ATXN2; (+) strand; PAM type: YTN; PAM sequence: CTG
taaaaagaaaagcgaacatt

SEQ ID NO: 86114 - DNA, 20 bp, Artificial Sequence
  Description of Artificial Sequence: Synthetic oligonucleotide
  Target: ATXN2; (+) strand; PAM type: YTN; PAM sequence: TTG
aaacagaaaactggcaacac

SEQ ID NO: 86115 - DNA, 20 bp, Artificial Sequence
  Description of Artificial Sequence: Synthetic oligonucleotide
  Target: ATXN2; (+) strand; PAM type: YTN; PAM sequence: CTG
gcaacaccacacatcagcct

SEQ ID NO: 86116 - DNA, 20 bp, Artificial Sequence
  Description of Artificial Sequence: Synthetic oligonucleotide
  Target: ATXN2; (+) strand; PAM type: YTN; PAM sequence: CTA
gtgtctctgcagcacatgat

SEQ ID NO: 86117 - DNA, 20 bp, Artificial Sequence
  Description of Artificial Sequence: Synthetic oligonucleotide
  Target: ATXN2; (+) strand; PAM type: YTN; PAM sequence: CTC
tgcagcacatgattgtaaac

SEQ ID NO: 86118 - DNA, 20 bp, Artificial Sequence
  Description of Artificial Sequence: Synthetic oligonucleotide
  Target: ATXN2; (+) strand; PAM type: YTN; PAM sequence: CTG
cagcacatgattgtaaacta

SEQ ID NO: 86119 - DNA, 20 bp, Artificial Sequence
  Description of Artificial Sequence: Synthetic oligonucleotide
  Target: ATXN2; (+) strand; PAM type: YTN; PAM sequence: TTG
taaactatcctcgtgctagc

SEQ ID NO: 86120 - DNA, 20 bp, Artificial Sequence
  Description of Artificial Sequence: Synthetic oligonucleotide
  Target: ATXN2; (+) strand; PAM type: YTN; PAM sequence: CTA
tcctcgtgctagctgaacaa

SEQ ID NO: 86121 - DNA, 20 bp, Artificial Sequence
  Description of Artificial Sequence: Synthetic oligonucleotide
  Target: ATXN2; (+) strand; PAM type: YTN; PAM sequence: CTC
gtgctagctgaacaaaactc

SEQ ID NO: 86122 - DNA, 20 bp, Artificial Sequence
  Description of Artificial Sequence: Synthetic oligonucleotide
  Target: ATXN2; (+) strand; PAM type: YTN; PAM sequence: CTA
gctgaacaaaactcaaaatt

SEQ ID NO: 86123 - DNA, 20 bp, Artificial Sequence
  Description of Artificial Sequence: Synthetic oligonucleotide
  Target: ATXN2; (+) strand; PAM type: YTN; PAM sequence: CTG
aacaaaactcaaaattgaat

SEQ ID NO: 86124 - DNA, 20 bp, Artificial Sequence
  Description of Artificial Sequence: Synthetic oligonucleotide
  Target: ATXN2; (+) strand; PAM type: YTN; PAM sequence: CTC
aaaattgaattcgcttttcc

SEQ ID NO: 86125 - DNA, 20 bp, Artificial Sequence
  Description of Artificial Sequence: Synthetic oligonucleotide
  Target: ATXN2; (+) strand; PAM type: YTN; PAM sequence: TTG
aattcgcttttccccctccc

SEQ ID NO: 86126 - DNA, 20 bp, Artificial Sequence
  Description of Artificial Sequence: Synthetic oligonucleotide
  Target: ATXN2; (+) strand; PAM type: YTN; PAM sequence: TTC
gcttttccccctcccatctg

SEQ ID NO: 86127 - DNA, 20 bp, Artificial Sequence
  Description of Artificial Sequence: Synthetic oligonucleotide
  Target: ATXN2; (+) strand; PAM type: YTN; PAM sequence: CTT
ttccccctcccatctgcacc

SEQ ID NO: 86128 - DNA, 20 bp, Artificial Sequence
  Description of Artificial Sequence: Synthetic oligonucleotide
  Target: ATXN2; (+) strand; PAM type: YTN; PAM sequence: TTT
tccccctcccatctgcacca

SEQ ID NO: 86129 - DNA, 20 bp, Artificial Sequence
  Description of Artificial Sequence: Synthetic oligonucleotide
  Target: ATXN2; (+) strand; PAM type: YTN; PAM sequence: TTT
ccccctcccatctgcaccaa

SEQ ID NO: 86130 - DNA, 20 bp, Artificial Sequence
  Description of Artificial Sequence: Synthetic oligonucleotide
  Target: ATXN2; (+) strand; PAM type: YTN; PAM sequence: TTC
cccctcccatctgcaccaaa

SEQ ID NO: 86131 - DNA, 20 bp, Artificial Sequence
  Description of Artificial Sequence: Synthetic oligonucleotide
  Target: ATXN2; (+) strand; PAM type: YTN; PAM sequence: CTC
ccatctgcaccaaagtgggg

SEQ ID NO: 86132 - DNA, 20 bp, Artificial Sequence
  Description of Artificial Sequence: Synthetic oligonucleotide
  Target: ATXN2; (+) strand; PAM type: YTN; PAM sequence: CTG
caccaaagtggggagggttg

SEQ ID NO: 86133 - DNA, 20 bp, Artificial Sequence
  Description of Artificial Sequence: Synthetic oligonucleotide
  Target: ATXN2; (+) strand; PAM type: YTN; PAM sequence: TTG
ggtgggtgggtagaaacaaa

SEQ ID NO: 86134 - DNA, 20 bp, Artificial Sequence
  Description of Artificial Sequence: Synthetic oligonucleotide
  Target: ATXN2; (+) strand; PAM type: YTN; PAM sequence: CTT
cagataaaactcccagaaga

SEQ ID NO: 86135 - DNA, 20 bp, Artificial Sequence
  Description of Artificial Sequence: Synthetic oligonucleotide
  Target: ATXN2; (+) strand; PAM type: YTN; PAM sequence: TTC
agataaaactcccagaagac

SEQ ID NO: 86136 - DNA, 20 bp, Artificial Sequence
  Description of Artificial Sequence: Synthetic oligonucleotide
  Target: ATXN2; (+) strand; PAM type: YTN; PAM sequence: CTC
ccagaagacttgttcatggg

SEQ ID NO: 86137 - DNA, 20 bp, Artificial Sequence
  Description of Artificial Sequence: Synthetic oligonucleotide
  Target: ATXN2; (+) strand; PAM type: YTN; PAM sequence: CTT
gttcatggggtagaaaaaaa

SEQ ID NO: 86138 - DNA, 20 bp, Artificial Sequence
  Description of Artificial Sequence: Synthetic oligonucleotide
  Target: ATXN2; (+) strand; PAM type: YTN; PAM sequence: TTG
ttcatggggtagaaaaaaag

SEQ ID NO: 86139 - DNA, 20 bp, Artificial Sequence
  Description of Artificial Sequence: Synthetic oligonucleotide
  Target: ATXN2; (+) strand; PAM type: YTN; PAM sequence: TTC
atggggtagaaaaaaaggcc

SEQ ID NO: 86140 - DNA, 20 bp, Artificial Sequence
  Description of Artificial Sequence: Synthetic oligonucleotide
  Target: ATXN2; (+) strand; PAM type: YTN; PAM sequence: CTT
aacaaaccccctccccaaat

SEQ ID NO: 86141 - DNA, 20 bp, Artificial Sequence
  Description of Artificial Sequence: Synthetic oligonucleotide
  Target: ATXN2; (+) strand; PAM type: YTN; PAM sequence: TTA
acaaaccccctccccaaata

SEQ ID NO: 86142 - DNA, 20 bp, Artificial Sequence
  Description of Artificial Sequence: Synthetic oligonucleotide
  Target: ATXN2; (+) strand; PAM type: YTN; PAM sequence: CTC
cccaaatattagccaagcac

SEQ ID NO: 86143 - DNA, 20 bp, Artificial Sequence
  Description of Artificial Sequence: Synthetic oligonucleotide
  Target: ATXN2; (+) strand; PAM type: YTN; PAM sequence: TTA
gccaagcaccagtattgctt

SEQ ID NO: 86144 - DNA, 20 bp, Artificial Sequence
  Description of Artificial Sequence: Synthetic oligonucleotide
  Target: ATXN2; (+) strand; PAM type: YTN; PAM sequence: TTG
ctttcagaataacaggtcag

SEQ ID NO: 86145 - DNA, 20 bp, Artificial Sequence
  Description of Artificial Sequence: Synthetic oligonucleotide
  Target: ATXN2; (+) strand; PAM type: YTN; PAM sequence: CTT
tcagaataacaggtcagact

SEQ ID NO: 86146 - DNA, 20 bp, Artificial Sequence
  Description of Artificial Sequence: Synthetic oligonucleotide
  Target: ATXN2; (+) strand; PAM type: YTN; PAM sequence: TTT
cagaataacaggtcagactg

SEQ ID NO: 86147 - DNA, 20 bp, Artificial Sequence
  Description of Artificial Sequence: Synthetic oligonucleotide
  Target: ATXN2; (+) strand; PAM type: YTN; PAM sequence: TTC
agaataacaggtcagactgt

SEQ ID NO: 86148 - DNA, 20 bp, Artificial Sequence
  Description of Artificial Sequence: Synthetic oligonucleotide
  Target: ATXN2; (+) strand; PAM type: YTN; PAM sequence: CTG
tgaagtatcgccatggcagc

SEQ ID NO: 86149 - DNA, 20 bp, Artificial Sequence
  Description of Artificial Sequence: Synthetic oligonucleotide
  Target: ATXN2; (+) strand; PAM type: YTN; PAM sequence: CTC
tcccctgttcaggggctggg

SEQ ID NO: 86150 - DNA, 20 bp, Artificial Sequence
  Description of Artificial Sequence: Synthetic oligonucleotide
  Target: ATXN2; (+) strand; PAM type: YTN; PAM sequence: CTC
ccctgttcaggggctggggc

SEQ ID NO: 86151 - DNA, 20 bp, Artificial Sequence
  Description of Artificial Sequence: Synthetic oligonucleotide
  Target: ATXN2; (+) strand; PAM type: YTN; PAM sequence: CTG
ttcaggggctggggctaacg

SEQ ID NO: 86152 - DNA, 20 bp, Artificial Sequence
  Description of Artificial Sequence: Synthetic oligonucleotide
  Target: ATXN2; (+) strand; PAM type: YTN; PAM sequence: TTC
aggggctggggctaacgcta

SEQ ID NO: 86153 - DNA, 20 bp, Artificial Sequence
  Description of Artificial Sequence: Synthetic oligonucleotide
  Target: ATXN2; (+) strand; PAM type: YTN; PAM sequence: CTG
gggctaacgctacactcaaa

SEQ ID NO: 86154 - DNA, 20 bp, Artificial Sequence
  Description of Artificial Sequence: Synthetic oligonucleotide
  Target: ATXN2; (+) strand; PAM type: YTN; PAM sequence: CTA
acgctacactcaaagccagt

SEQ ID NO: 86155 - DNA, 20 bp, Artificial Sequence
  Description of Artificial Sequence: Synthetic oligonucleotide
  Target: ATXN2; (+) strand; PAM type: YTN; PAM sequence: CTA
cactcaaagccagtccatcc

SEQ ID NO: 86156 - DNA, 20 bp, Artificial Sequence
  Description of Artificial Sequence: Synthetic oligonucleotide
  Target: ATXN2; (+) strand; PAM type: YTN; PAM sequence: CTC
aaagccagtccatccacagc

SEQ ID NO: 86157 - DNA, 20 bp, Artificial Sequence
  Description of Artificial Sequence: Synthetic oligonucleotide
  Target: ATXN2; (+) strand; PAM type: YTN; PAM sequence: CTT
tctcagcagtatcttctcca

SEQ ID NO: 86158 - DNA, 20 bp, Artificial Sequence
  Description of Artificial Sequence: Synthetic oligonucleotide
  Target: ATXN2; (+) strand; PAM type: YTN; PAM sequence: TTT
ctcagcagtatcttctccag

SEQ ID NO: 86159 - DNA, 20 bp, Artificial Sequence
  Description of Artificial Sequence: Synthetic oligonucleotide
  Target: ATXN2; (+) strand; PAM type: YTN; PAM sequence: TTC
tcagcagtatcttctccaga

SEQ ID NO: 86160 - DNA, 20 bp, Artificial Sequence
  Description of Artificial Sequence: Synthetic oligonucleotide
  Target: ATXN2; (+) strand; PAM type: YTN; PAM sequence: CTC
agcagtatcttctccagagc

SEQ ID NO: 86161 - DNA, 20 bp, Artificial Sequence
  Description of Artificial Sequence: Synthetic oligonucleotide
  Target: ATXN2; (+) strand; PAM type: YTN; PAM sequence: CTT
ctccagagctacaatcaaac

SEQ ID NO: 86162 - DNA, 20 bp, Artificial Sequence
  Description of Artificial Sequence: Synthetic oligonucleotide
  Target: ATXN2; (+) strand; PAM type: YTN; PAM sequence: TTC
tccagagctacaatcaaact

SEQ ID NO: 86163 - DNA, 20 bp, Artificial Sequence
  Description of Artificial Sequence: Synthetic oligonucleotide
  Target: ATXN2; (+) strand; PAM type: YTN; PAM sequence: CTC
cagagctacaatcaaactct

SEQ ID NO: 86164 - DNA, 20 bp, Artificial Sequence
  Description of Artificial Sequence: Synthetic oligonucleotide
  Target: ATXN2; (+) strand; PAM type: YTN; PAM sequence: CTA
caatcaaactctgccatggt

SEQ ID NO: 86165 - DNA, 20 bp, Artificial Sequence
  Description of Artificial Sequence: Synthetic oligonucleotide
  Target: ATXN2; (+) strand; PAM type: YTN; PAM sequence: CTC
tgccatggtaataacccccc

SEQ ID NO: 86166 - DNA, 20 bp, Artificial Sequence
  Description of Artificial Sequence: Synthetic oligonucleotide
  Target: ATXN2; (+) strand; PAM type: YTN; PAM sequence: CTG
ccatggtaataaccccccac

SEQ ID NO: 86167 - DNA, 20 bp, Artificial Sequence
  Description of Artificial Sequence: Synthetic oligonucleotide
  Target: ATXN2; (+) strand; PAM type: YTN; PAM sequence: CTT
ttgggactcaggaaggaaaa

SEQ ID NO: 86168 - DNA, 20 bp, Artificial Sequence
  Description of Artificial Sequence: Synthetic oligonucleotide
  Target: ATXN2; (+) strand; PAM type: YTN; PAM sequence: TTT
tgggactcaggaaggaaaac

SEQ ID NO: 86169 - DNA, 20 bp, Artificial Sequence
  Description of Artificial Sequence: Synthetic oligonucleotide
  Target: ATXN2; (+) strand; PAM type: YTN; PAM sequence: TTT
gggactcaggaaggaaaaca

SEQ ID NO: 86170 - DNA, 20 bp, Artificial Sequence
  Description of Artificial Sequence: Synthetic oligonucleotide
  Target: ATXN2; (+) strand; PAM type: YTN; PAM sequence: TTG
ggactcaggaaggaaaacac

SEQ ID NO: 86171 - DNA, 20 bp, Artificial Sequence
  Description of Artificial Sequence: Synthetic oligonucleotide
  Target: ATXN2; (+) strand; PAM type: YTN; PAM sequence: CTC
aggaaggaaaacactgccct

SEQ ID NO: 86172 - DNA, 20 bp, Artificial Sequence
  Description of Artificial Sequence: Synthetic oligonucleotide
  Target: ATXN2; (+) strand; PAM type: YTN; PAM sequence: CTG
ccctgtccagcctgtcataa

SEQ ID NO: 86173 - DNA, 20 bp, Artificial Sequence
  Description of Artificial Sequence: Synthetic oligonucleotide
  Target: ATXN2; (+) strand; PAM type: YTN; PAM sequence: CTG
tccagcctgtcataacaagg

SEQ ID NO: 86174 - DNA, 20 bp, Artificial Sequence
  Description of Artificial Sequence: Synthetic oligonucleotide
  Target: ATXN2; (+) strand; PAM type: YTN; PAM sequence: CTG
tcataacaaggaaggccaac

SEQ ID NO: 86175 - DNA, 20 bp, Artificial Sequence
  Description of Artificial Sequence: Synthetic oligonucleotide
  Target: ATXN2; (+) strand; PAM type: YTN; PAM sequence: CTG
agtcctaggcatgcatcagg

SEQ ID NO: 86176 - DNA, 20 bp, Artificial Sequence
  Description of Artificial Sequence: Synthetic oligonucleotide
  Target: ATXN2; (+) strand; PAM type: YTN; PAM sequence: CTA
ggcatgcatcaggctgctgt

SEQ ID NO: 86177 - DNA, 20 bp, Artificial Sequence
  Description of Artificial Sequence: Synthetic oligonucleotide
  Target: ATXN2; (+) strand; PAM type: YTN; PAM sequence: CTG
ctgttgctgctgctgctgct

SEQ ID NO: 86178 - DNA, 20 bp, Artificial Sequence
  Description of Artificial Sequence: Synthetic oligonucleotide
  Target: ATXN2; (+) strand; PAM type: YTN; PAM sequence: CTG
ttgctgctgctgctgcttct

SEQ ID NO: 86179 - DNA, 20 bp, Artificial Sequence
  Description of Artificial Sequence: Synthetic oligonucleotide
  Target: ATXN2; (+) strand; PAM type: YTN; PAM sequence: TTG
ctgctgctgctgcttctcat

SEQ ID NO: 86180 - DNA, 20 bp, Artificial Sequence
  Description of Artificial Sequence: Synthetic oligonucleotide
  Target: ATXN2; (+) strand; PAM type: YTN; PAM sequence: CTG
ctgctgctgcttctcatcaa

SEQ ID NO: 86181 - DNA, 20 bp, Artificial Sequence
  Description of Artificial Sequence: Synthetic oligonucleotide
  Target: ATXN2; (+) strand; PAM type: YTN; PAM sequence: CTG
ctgctgcttctcatcaagcc

SEQ ID NO: 86182 - DNA, 20 bp, Artificial Sequence
  Description of Artificial Sequence: Synthetic oligonucleotide
  Target: ATXN2; (+) strand; PAM type: YTN; PAM sequence: CTG
ctgcttctcatcaagccaaa

SEQ ID NO: 86183 - DNA, 20 bp, Artificial Sequence
  Description of Artificial Sequence: Synthetic oligonucleotide
  Target: ATXN2; (+) strand; PAM type: YTN; PAM sequence: CTG
cttctcatcaagccaaatcc

SEQ ID NO: 86184 - DNA, 20 bp, Artificial Sequence
  Description of Artificial Sequence: Synthetic oligonucleotide
  Target: ATXN2; (+) strand; PAM type: YTN; PAM sequence: CTT
ctcatcaagccaaatcctgt

SEQ ID NO: 86185 - DNA, 20 bp, Artificial Sequence
  Description of Artificial Sequence: Synthetic oligonucleotide
  Target: ATXN2; (+) strand; PAM type: YTN; PAM sequence: TTC
tcatcaagccaaatcctgta

SEQ ID NO: 86186 - DNA, 20 bp, Artificial Sequence
  Description of Artificial Sequence: Synthetic oligonucleotide
  Target: ATXN2; (+) strand; PAM type: YTN; PAM sequence: CTC
atcaagccaaatcctgtata

SEQ ID NO: 86187 - DNA, 20 bp, Artificial Sequence
  Description of Artificial Sequence: Synthetic oligonucleotide
  Target: ATXN2; (+) strand; PAM type: YTN; PAM sequence: CTG
tataccatcagaacacacac

SEQ ID NO: 86188 - DNA, 20 bp, Artificial Sequence
  Description of Artificial Sequence: Synthetic oligonucleotide
  Target: ATXN2; (+) strand; PAM type: YTN; PAM sequence: CTC
ggctcccggaagcctcaggc

SEQ ID NO: 86189 - DNA, 20 bp, Artificial Sequence
  Description of Artificial Sequence: Synthetic oligonucleotide
  Target: ATXN2; (+) strand; PAM type: YTN; PAM sequence: CTC
ccggaagcctcaggccctga

SEQ ID NO: 86190 - DNA, 20 bp, Artificial Sequence
  Description of Artificial Sequence: Synthetic oligonucleotide
  Target: ATXN2; (+) strand; PAM type: YTN; PAM sequence: CTC
aggccctgatgctgaactga

SEQ ID NO: 86191 - DNA, 20 bp, Artificial Sequence
  Description of Artificial Sequence: Synthetic oligonucleotide
  Target: ATXN2; (+) strand; PAM type: YTN; PAM sequence: CTG
atgctgaactgatcgtcaca

SEQ ID NO: 86192 - DNA, 20 bp, Artificial Sequence
  Description of Artificial Sequence: Synthetic oligonucleotide
  Target: ATXN2; (+) strand; PAM type: YTN; PAM sequence: CTG
aactgatcgtcacagtccct

SEQ ID NO: 86193 - DNA, 20 bp, Artificial Sequence
  Description of Artificial Sequence: Synthetic oligonucleotide
  Target: ATXN2; (+) strand; PAM type: YTN; PAM sequence: CTG
atcgtcacagtccctcctgt

SEQ ID NO: 86194 - DNA, 20 bp, Artificial Sequence
  Description of Artificial Sequence: Synthetic oligonucleotide
  Target: ATXN2; (+) strand; PAM type: YTN; PAM sequence: CTC
ctgtgcacactcctggacgg

SEQ ID NO: 86195 - DNA, 20 bp, Artificial Sequence
  Description of Artificial Sequence: Synthetic oligonucleotide
  Target: ATXN2; (+) strand; PAM type: YTN; PAM sequence: CTG
tgcacactcctggacgggtc

SEQ ID NO: 86196 - DNA, 20 bp, Artificial Sequence
  Description of Artificial Sequence: Synthetic oligonucleotide
  Target: ATXN2; (+) strand; PAM type: YTN; PAM sequence: CTC
ctggacgggtcttgctagtt

SEQ ID NO: 86197 - DNA, 20 bp, Artificial Sequence
  Description of Artificial Sequence: Synthetic oligonucleotide
  Target: ATXN2; (+) strand; PAM type: YTN; PAM sequence: CTG
gacgggtcttgctagttctc

SEQ ID NO: 86198 - DNA, 20 bp, Artificial Sequence
  Description of Artificial Sequence: Synthetic oligonucleotide
  Target: ATXN2; (+) strand; PAM type: YTN; PAM sequence: CTT
gctagttctcaaatgcgggg

SEQ ID NO: 86199 - DNA, 20 bp, Artificial Sequence
  Description of Artificial Sequence: Synthetic oligonucleotide
  Target: ATXN2; (+) strand; PAM type: YTN; PAM sequence: TTG
ctagttctcaaatgcggggc

SEQ ID NO: 86200 - DNA, 20 bp, Artificial Sequence
  Description of Artificial Sequence: Synthetic oligonucleotide
  Target: ATXN2; (+) strand; PAM type: YTN; PAM sequence: CTA
gttctcaaatgcggggcttg

SEQ ID NO: 86201 - DNA, 20 bp, Artificial Sequence
  Description of Artificial Sequence: Synthetic oligonucleotide
  Target: ATXN2; (+) strand; PAM type: YTN; PAM sequence: TTC
tcaaatgcggggcttgaagc

SEQ ID NO: 86202 - DNA, 20 bp, Artificial Sequence
  Description of Artificial Sequence: Synthetic oligonucleotide
  Target: ATXN2; (+) strand; PAM type: YTN; PAM sequence: CTC
aaatgcggggcttgaagcac

SEQ ID NO: 86203 - DNA, 20 bp, Artificial Sequence
  Description of Artificial Sequence: Synthetic oligonucleotide
  Target: ATXN2; (+) strand; PAM type: YTN; PAM sequence: CTT
gaagcactggccctgcctgc

SEQ ID NO: 86204 - DNA, 20 bp, Artificial Sequence
  Description of Artificial Sequence: Synthetic oligonucleotide
  Target: ATXN2; (+) strand; PAM type: YTN; PAM sequence: TTG
aagcactggccctgcctgcc

SEQ ID NO: 86205 - DNA, 20 bp, Artificial Sequence
  Description of Artificial Sequence: Synthetic oligonucleotide
  Target: ATXN2; (+) strand; PAM type: YTN; PAM sequence: CTG
gccctgcctgccattccacc

SEQ ID NO: 86206 - DNA, 20 bp, Artificial Sequence
  Description of Artificial Sequence: Synthetic oligonucleotide
  Target: ATXN2; (+) strand; PAM type: YTN; PAM sequence: CTG
cctgccattccacctgtgcg

SEQ ID NO: 86207 - DNA, 20 bp, Artificial Sequence
  Description of Artificial Sequence: Synthetic oligonucleotide
  Target: ATXN2; (+) strand; PAM type: YTN; PAM sequence: CTG
ccattccacctgtgcgagca

SEQ ID NO: 86208 - DNA, 20 bp, Artificial Sequence
  Description of Artificial Sequence: Synthetic oligonucleotide
  Target: ATXN2; (+) strand; PAM type: YTN; PAM sequence: TTC
cacctgtgcgagcagaatgc

SEQ ID NO: 86209 - DNA, 20 bp, Artificial Sequence
  Description of Artificial Sequence: Synthetic oligonucleotide
  Target: ATXN2; (+) strand; PAM type: YTN; PAM sequence: CTG
tgcgagcagaatgctttggg

SEQ ID NO: 86210 - DNA, 20 bp, Artificial Sequence
  Description of Artificial Sequence: Synthetic oligonucleotide
  Target: ATXN2; (+) strand; PAM type: YTN; PAM sequence: CTT
tggggtgccccggcggcccc

SEQ ID NO: 86211 - DNA, 20 bp, Artificial Sequence
  Description of Artificial Sequence: Synthetic oligonucleotide
  Target: ATXN2; (+) strand; PAM type: YTN; PAM sequence: TTT
ggggtgccccggcggcccct

SEQ ID NO: 86212 - DNA, 20 bp, Artificial Sequence
  Description of Artificial Sequence: Synthetic oligonucleotide
  Target: ATXN2; (+) strand; PAM type: YTN; PAM sequence: TTG
gggtgccccggcggcccctg

SEQ ID NO: 86213 - DNA, 20 bp, Artificial Sequence
  Description of Artificial Sequence: Synthetic oligonucleotide
  Target: ATXN2; (+) strand; PAM type: YTN; PAM sequence: CTG
cacacacacgcctcacctga

SEQ ID NO: 86214 - DNA, 20 bp, Artificial Sequence
  Description of Artificial Sequence: Synthetic oligonucleotide
  Target: ATXN2; (+) strand; PAM type: YTN; PAM sequence: CTC
acctgaagggtgcgtcatat

SEQ ID NO: 86215 - DNA, 20 bp, Artificial Sequence
  Description of Artificial Sequence: Synthetic oligonucleotide
  Target: ATXN2; (+) strand; PAM type: YTN; PAM sequence: CTG
aagggtgcgtcatatagggg

SEQ ID NO: 86216 - DNA, 20 bp, Artificial Sequence
  Description of Artificial Sequence: Synthetic oligonucleotide
  Target: ATXN2; (+) strand; PAM type: YTN; PAM sequence: CTG
ttgtcgagactggaatgggc

SEQ ID NO: 86217 - DNA, 20 bp, Artificial Sequence
  Description of Artificial Sequence: Synthetic oligonucleotide
  Target: ATXN2; (+) strand; PAM type: YTN; PAM sequence: TTG
tcgagactggaatgggctgt

SEQ ID NO: 86218 - DNA, 20 bp, Artificial Sequence
  Description of Artificial Sequence: Synthetic oligonucleotide
  Target: ATXN2; (+) strand; PAM type: YTN; PAM sequence: CTG
gaatgggctgtagtgcactt

SEQ ID NO: 86219 - DNA, 20 bp, Artificial Sequence
  Description of Artificial Sequence: Synthetic oligonucleotide
  Target: ATXN2; (+) strand; PAM type: YTN; PAM sequence: CTG
tagtgcactttgagcgaggg

SEQ ID NO: 86220 - DNA, 20 bp, Artificial Sequence
  Description of Artificial Sequence: Synthetic oligonucleotide
  Target: ATXN2; (+) strand; PAM type: YTN; PAM sequence: CTT
tgagcgagggcggcctgggg

SEQ ID NO: 86221 - DNA, 20 bp, Artificial Sequence
  Description of Artificial Sequence: Synthetic oligonucleotide
  Target: ATXN2; (+) strand; PAM type: YTN; PAM sequence: TTT
gagcgagggcggcctgggga

SEQ ID NO: 86222 - DNA, 20 bp, Artificial Sequence
  Description of Artificial Sequence: Synthetic oligonucleotide
  Target: ATXN2; (+) strand; PAM type: YTN; PAM sequence: TTG
agcgagggcggcctggggac

SEQ ID NO: 86223 - DNA, 20 bp, Artificial Sequence
  Description of Artificial Sequence: Synthetic oligonucleotide
  Target: ATXN2; (+) strand; PAM type: YTN; PAM sequence: CTG
gggaccgccgggtggctgtg

SEQ ID NO: 86224 - DNA, 20 bp, Artificial Sequence
  Description of Artificial Sequence: Synthetic oligonucleotide
  Target: ATXN2; (+) strand; PAM type: YTN; PAM sequence: CTG
tgtcgtcattagcatcattg

SEQ ID NO: 86225 - DNA, 20 bp, Artificial Sequence
  Description of Artificial Sequence: Synthetic oligonucleotide
  Target: ATXN2; (+) strand; PAM type: YTN; PAM sequence: TTA
gcatcattggcgcatgggca

SEQ ID NO: 86226 - DNA, 20 bp, Artificial Sequence
  Description of Artificial Sequence: Synthetic oligonucleotide
  Target: ATXN2; (+) strand; PAM type: YTN; PAM sequence: TTG
gcgcatgggcagttggatga

SEQ ID NO: 86227 - DNA, 20 bp, Artificial Sequence
  Description of Artificial Sequence: Synthetic oligonucleotide
  Target: ATXN2; (+) strand; PAM type: YTN; PAM sequence: TTG
gatgagaaggaaccattcct

SEQ ID NO: 86228 - DNA, 20 bp, Artificial Sequence
  Description of Artificial Sequence: Synthetic oligonucleotide
  Target: ATXN2; (+) strand; PAM type: YTN; PAM sequence: TTC
ctgactgtacatgagcctga

SEQ ID NO: 86229 - DNA, 20 bp, Artificial Sequence
  Description of Artificial Sequence: Synthetic oligonucleotide
  Target: ATXN2; (+) strand; PAM type: YTN; PAM sequence: CTG
actgtacatgagcctgaaac

SEQ ID NO: 86230 - DNA, 20 bp, Artificial Sequence
  Description of Artificial Sequence: Synthetic oligonucleotide
  Target: ATXN2; (+) strand; PAM type: YTN; PAM sequence: CTG
tacatgagcctgaaacagag

SEQ ID NO: 86231 - DNA, 20 bp, Artificial Sequence
  Description of Artificial Sequence: Synthetic oligonucleotide
  Target: ATXN2; (+) strand; PAM type: YTN; PAM sequence: CTG
aaacagagagctcttttacg

SEQ ID NO: 86232 - DNA, 20 bp, Artificial Sequence
  Description of Artificial Sequence: Synthetic oligonucleotide
  Target: ATXN2; (+) strand; PAM type: YTN; PAM sequence: CTC
ttttacgcatacaggcaaca

SEQ ID NO: 86233 - DNA, 20 bp, Artificial Sequence
  Description of Artificial Sequence: Synthetic oligonucleotide
  Target: ATXN2; (+) strand; PAM type: YTN; PAM sequence: CTT
ttacgcatacaggcaacatc

SEQ ID NO: 86234 - DNA, 20 bp, Artificial Sequence
  Description of Artificial Sequence: Synthetic oligonucleotide
  Target: ATXN2; (+) strand; PAM type: YTN; PAM sequence: TTT
tacgcatacaggcaacatct

SEQ ID NO: 86235 - DNA, 20 bp, Artificial Sequence
  Description of Artificial Sequence: Synthetic oligonucleotide
  Target: ATXN2; (+) strand; PAM type: YTN; PAM sequence: TTT
acgcatacaggcaacatctc

SEQ ID NO: 86236 - DNA, 20 bp, Artificial Sequence
  Description of Artificial Sequence: Synthetic oligonucleotide
  Target: ATXN2; (+) strand; PAM type: YTN; PAM sequence: TTA
cgcatacaggcaacatctcc

SEQ ID NO: 86237 - DNA, 20 bp, Artificial Sequence
  Description of Artificial Sequence: Synthetic oligonucleotide
  Target: ATXN2; (+) strand; PAM type: YTN; PAM sequence: CTC
cggcttcaacaacatgtcaa

SEQ ID NO: 86238 - DNA, 20 bp, Artificial Sequence
  Description of Artificial Sequence: Synthetic oligonucleotide
  Target: ATXN2; (+) strand; PAM type: YTN; PAM sequence: CTT
caacaacatgtcaactgtgt

SEQ ID NO: 86239 - DNA, 20 bp, Artificial Sequence
  Description of Artificial Sequence: Synthetic oligonucleotide
  Target: ATXN2; (+) strand; PAM type: YTN; PAM sequence: TTC
aacaacatgtcaactgtgtt

SEQ ID NO: 86240 - DNA, 20 bp, Artificial Sequence
  Description of Artificial Sequence: Synthetic oligonucleotide
  Target: ATXN2; (+) strand; PAM type: YTN; PAM sequence: CTG
tgttcctttcactgggctgg

SEQ ID NO: 86241 - DNA, 20 bp, Artificial Sequence
  Description of Artificial Sequence: Synthetic oligonucleotide
  Target: ATXN2; (+) strand; PAM type: YTN; PAM sequence: TTC
ctttcactgggctgggactc

SEQ ID NO: 86242 - DNA, 20 bp, Artificial Sequence
  Description of Artificial Sequence: Synthetic oligonucleotide
  Target: ATXN2; (+) strand; PAM type: YTN; PAM sequence: CTT
tcactgggctgggactctca

SEQ ID NO: 86243 - DNA, 20 bp, Artificial Sequence
  Description of Artificial Sequence: Synthetic oligonucleotide
  Target: ATXN2; (+) strand; PAM type: YTN; PAM sequence: TTT
cactgggctgggactctcag

SEQ ID NO: 86244 - DNA, 20 bp, Artificial Sequence
  Description of Artificial Sequence: Synthetic oligonucleotide
  Target: ATXN2; (+) strand; PAM type: YTN; PAM sequence: TTC
actgggctgggactctcagg

SEQ ID NO: 86245 - DNA, 20 bp, Artificial Sequence
  Description of Artificial Sequence: Synthetic oligonucleotide
  Target: ATXN2; (+) strand; PAM type: YTN; PAM sequence: CTG
ggctgggactctcaggaaag

SEQ ID NO: 86246 - DNA, 20 bp, Artificial Sequence
  Description of Artificial Sequence: Synthetic oligonucleotide
  Target: ATXN2; (+) strand; PAM type: YTN; PAM sequence: CTG
ggactctcaggaaagggcaa

SEQ ID NO: 86247 - DNA, 20 bp, Artificial Sequence
  Description of Artificial Sequence: Synthetic oligonucleotide
  Target: ATXN2; (+) strand; PAM type: YTN; PAM sequence: CTC
tcaggaaagggcaacggtgg

SEQ ID NO: 86248 - DNA, 20 bp, Artificial Sequence
  Description of Artificial Sequence: Synthetic oligonucleotide
  Target: ATXN2; (+) strand; PAM type: YTN; PAM sequence: CTC
aggaaagggcaacggtgggc

SEQ ID NO: 86249 - DNA, 20 bp, Artificial Sequence
  Description of Artificial Sequence: Synthetic oligonucleotide
  Target: ATXN2; (+) strand; PAM type: YTN; PAM sequence: CTC
agggcccagttctgttctct

SEQ ID NO: 86250 - DNA, 20 bp, Artificial Sequence
  Description of Artificial Sequence: Synthetic oligonucleotide
  Target: ATXN2; (+) strand; PAM type: YTN; PAM sequence: TTC
tgttctctggggacaatctc

SEQ ID NO: 86251 - DNA, 20 bp, Artificial Sequence
  Description of Artificial Sequence: Synthetic oligonucleotide
  Target: ATXN2; (+) strand; PAM type: YTN; PAM sequence: CTG
ttctctggggacaatctcta

SEQ ID NO: 86252 - DNA, 20 bp, Artificial Sequence
  Description of Artificial Sequence: Synthetic oligonucleotide
  Target: ATXN2; (+) strand; PAM type: YTN; PAM sequence: TTC
tctggggacaatctctagta

SEQ ID NO: 86253 - DNA, 20 bp, Artificial Sequence
  Description of Artificial Sequence: Synthetic oligonucleotide
  Target: ATXN2; (+) strand; PAM type: YTN; PAM sequence: CTC
tggggacaatctctagtaga

SEQ ID NO: 86254 - DNA, 20 bp, Artificial Sequence
  Description of Artificial Sequence: Synthetic oligonucleotide
  Target: ATXN2; (+) strand; PAM type: YTN; PAM sequence: CTG
gggacaatctctagtagatt

SEQ ID NO: 86255 - DNA, 20 bp, Artificial Sequence
  Description of Artificial Sequence: Synthetic oligonucleotide
  Target: ATXN2; (+) strand; PAM type: YTN; PAM sequence: CTC
tagtagattatctattgacc

SEQ ID NO: 86256 - DNA, 20 bp, Artificial Sequence
  Description of Artificial Sequence: Synthetic oligonucleotide
  Target: ATXN2; (+) strand; PAM type: YTN; PAM sequence: CTA
gtagattatctattgacctg

SEQ ID NO: 86257 - DNA, 20 bp, Artificial Sequence
  Description of Artificial Sequence: Synthetic oligonucleotide
  Target: ATXN2; (+) strand; PAM type: YTN; PAM sequence: TTA
tctattgacctgaagacgcg

SEQ ID NO: 86258 - DNA, 20 bp, Artificial Sequence
  Description of Artificial Sequence: Synthetic oligonucleotide
  Target: ATXN2; (+) strand; PAM type: YTN; PAM sequence: CTA
ttgacctgaagacgcgcttc

SEQ ID NO: 86259 - DNA, 20 bp, Artificial Sequence
  Description of Artificial Sequence: Synthetic oligonucleotide
  Target: ATXN2; (+) strand; PAM type: YTN; PAM sequence: TTG
acctgaagacgcgcttcacc

SEQ ID NO: 86260 - DNA, 20 bp, Artificial Sequence
  Description of Artificial Sequence: Synthetic oligonucleotide
  Target: ATXN2; (+) strand; PAM type: YTN; PAM sequence: CTG
aagacgcgcttcacctttgg

SEQ ID NO: 86261 - DNA, 20 bp, Artificial Sequence
  Description of Artificial Sequence: Synthetic oligonucleotide
  Target: ATXN2; (+) strand; PAM type: YTN; PAM sequence: CTT
cacctttgggcagatcctgc

SEQ ID NO: 86262 - DNA, 20 bp, Artificial Sequence
  Description of Artificial Sequence: Synthetic oligonucleotide
  Target: ATXN2; (+) strand; PAM type: YTN; PAM sequence: TTC
acctttgggcagatcctgca

SEQ ID NO: 86263 - DNA, 20 bp, Artificial Sequence
  Description of Artificial Sequence: Synthetic oligonucleotide
  Target: ATXN2; (+) strand; PAM type: YTN; PAM sequence: CTT
tgggcagatcctgcaagggt

SEQ ID NO: 86264 - DNA, 20 bp, Artificial Sequence
  Description of Artificial Sequence: Synthetic oligonucleotide
  Target: ATXN2; (+) strand; PAM type: YTN; PAM sequence: TTT
gggcagatcctgcaagggtc

SEQ ID NO: 86265 - DNA, 20 bp, Artificial Sequence
  Description of Artificial Sequence: Synthetic oligonucleotide
  Target: ATXN2; (+) strand; PAM type: YTN; PAM sequence: TTG
ggcagatcctgcaagggtca

SEQ ID NO: 86266 - DNA, 20 bp, Artificial Sequence
  Description of Artificial Sequence: Synthetic oligonucleotide
  Target: ATXN2; (+) strand; PAM type: YTN; PAM sequence: CTG
caagggtcagggagcaggca

SEQ ID NO: 86267 - DNA, 20 bp, Artificial Sequence
  Description of Artificial Sequence: Synthetic oligonucleotide
  Target: ATXN2; (+) strand; PAM type: YTN; PAM sequence: CTG
ggtagaagtcagggctgtgc

SEQ ID NO: 86268 - DNA, 20 bp, Artificial Sequence
  Description of Artificial Sequence: Synthetic oligonucleotide
  Target: ATXN2; (+) strand; PAM type: YTN; PAM sequence: CTG
tgctgtcctaacccttgaca

SEQ ID NO: 86269 - DNA, 20 bp, Artificial Sequence
  Description of Artificial Sequence: Synthetic oligonucleotide
  Target: ATXN2; (+) strand; PAM type: YTN; PAM sequence: CTG
tcctaacccttgacatttct

SEQ ID NO: 86270 - DNA, 20 bp, Artificial Sequence
  Description of Artificial Sequence: Synthetic oligonucleotide
  Target: ATXN2; (+) strand; PAM type: YTN; PAM sequence: CTA
acccttgacatttctgatca

SEQ ID NO: 86271 - DNA, 20 bp, Artificial Sequence
  Description of Artificial Sequence: Synthetic oligonucleotide
  Target: ATXN2; (+) strand; PAM type: YTN; PAM sequence: CTT
gacatttctgatcattgtat

SEQ ID NO: 86272 - DNA, 20 bp, Artificial Sequence
  Description of Artificial Sequence: Synthetic oligonucleotide
  Target: ATXN2; (+) strand; PAM type: YTN; PAM sequence: TTG
acatttctgatcattgtatt

SEQ ID NO: 86273 - DNA, 20 bp, Artificial Sequence
  Description of Artificial Sequence: Synthetic oligonucleotide
  Target: ATXN2; (+) strand; PAM type: YTN; PAM sequence: TTT
ctgatcattgtattctatgt

SEQ ID NO: 86274 - DNA, 20 bp, Artificial Sequence
  Description of Artificial Sequence: Synthetic oligonucleotide
  Target: ATXN2; (+) strand; PAM type: YTN; PAM sequence: TTC
tgatcattgtattctatgta

SEQ ID NO: 86275 - DNA, 20 bp, Artificial Sequence
  Description of Artificial Sequence: Synthetic oligonucleotide
  Target: ATXN2; (+) strand; PAM type: YTN; PAM sequence: CTG
atcattgtattctatgtatg

SEQ ID NO: 86276 - DNA, 20 bp, Artificial Sequence
  Description of Artificial Sequence: Synthetic oligonucleotide
  Target: ATXN2; (+) strand; PAM type: YTN; PAM sequence: TTG
tattctatgtatggggtaag

SEQ ID NO: 86277 - DNA, 20 bp, Artificial Sequence
  Description of Artificial Sequence: Synthetic oligonucleotide
  Target: ATXN2; (+) strand; PAM type: YTN; PAM sequence: TTC
tatgtatggggtaagatctt

SEQ ID NO: 86278 - DNA, 20 bp, Artificial Sequence
  Description of Artificial Sequence: Synthetic oligonucleotide
  Target: ATXN2; (+) strand; PAM type: YTN; PAM sequence: CTA
tgtatggggtaagatcttca

SEQ ID NO: 86279 - DNA, 20 bp, Artificial Sequence
  Description of Artificial Sequence: Synthetic oligonucleotide
  Target: ATXN2; (+) strand; PAM type: YTN; PAM sequence: CTT
cacaaagattagacactgga

SEQ ID NO: 86280 - DNA, 20 bp, Artificial Sequence
  Description of Artificial Sequence: Synthetic oligonucleotide
  Target: ATXN2; (+) strand; PAM type: YTN; PAM sequence: TTC
acaaagattagacactggat

SEQ ID NO: 86281 - DNA, 20 bp, Artificial Sequence
  Description of Artificial Sequence: Synthetic oligonucleotide
  Target: ATXN2; (+) strand; PAM type: YTN; PAM sequence: TTA
gacactggatccaagggcag

SEQ ID NO: 86282 - DNA, 20 bp, Artificial Sequence
  Description of Artificial Sequence: Synthetic oligonucleotide
  Target: ATXN2; (+) strand; PAM type: YTN; PAM sequence: CTG
gatccaagggcagctttctc

SEQ ID NO: 86283 - DNA, 20 bp, Artificial Sequence
  Description of Artificial Sequence: Synthetic oligonucleotide
  Target: ATXN2; (+) strand; PAM type: YTN; PAM sequence: CTT
tctcaacttaatatcataca

SEQ ID NO: 86284 - DNA, 20 bp, Artificial Sequence
  Description of Artificial Sequence: Synthetic oligonucleotide
  Target: ATXN2; (+) strand; PAM type: YTN; PAM sequence: TTT
ctcaacttaatatcatacaa

SEQ ID NO: 86285 - DNA, 20 bp, Artificial Sequence
  Description of Artificial Sequence: Synthetic oligonucleotide
  Target: ATXN2; (+) strand; PAM type: YTN; PAM sequence: TTC
tcaacttaatatcatacaag

SEQ ID NO: 86286 - DNA, 20 bp, Artificial Sequence
  Description of Artificial Sequence: Synthetic oligonucleotide
  Target: ATXN2; (+) strand; PAM type: YTN; PAM sequence: CTC
aacttaatatcatacaagat

SEQ ID NO: 86287 - DNA, 20 bp, Artificial Sequence
  Description of Artificial Sequence: Synthetic oligonucleotide
  Target: ATXN2; (+) strand; PAM type: YTN; PAM sequence: CTT
aatatcatacaagattcaat

SEQ ID NO: 86288 - DNA, 20 bp, Artificial Sequence
  Description of Artificial Sequence: Synthetic oligonucleotide
  Target: ATXN2; (+) strand; PAM type: YTN; PAM sequence: TTA
atatcatacaagattcaatg

SEQ ID NO: 86289 - DNA, 20 bp, Artificial Sequence
  Description of Artificial Sequence: Synthetic oligonucleotide
  Target: ATXN2; (+) strand; PAM type: YTN; PAM sequence: TTC
aatgatgcttcagaatcagg

SEQ ID NO: 86290 - DNA, 20 bp, Artificial Sequence
  Description of Artificial Sequence: Synthetic oligonucleotide
  Target: ATXN2; (+) strand; PAM type: YTN; PAM sequence: CTT
cagaatcaggctgccatgtg

SEQ ID NO: 86291 - DNA, 20 bp, Artificial Sequence
  Description of Artificial Sequence: Synthetic oligonucleotide
  Target: ATXN2; (+) strand; PAM type: YTN; PAM sequence: TTC
agaatcaggctgccatgtgg

SEQ ID NO: 86292 - DNA, 20 bp, Artificial Sequence
  Description of Artificial Sequence: Synthetic oligonucleotide
  Target: ATXN2; (+) strand; PAM type: YTN; PAM sequence: CTG
ccatgtggggcctgaggtag

SEQ ID NO: 86293 - DNA, 20 bp, Artificial Sequence
  Description of Artificial Sequence: Synthetic oligonucleotide
  Target: ATXN2; (+) strand; PAM type: YTN; PAM sequence: CTG
aggtagttttgcagataaca

SEQ ID NO: 86294 - DNA, 20 bp, Artificial Sequence
  Description of Artificial Sequence: Synthetic oligonucleotide
  Target: ATXN2; (+) strand; PAM type: YTN; PAM sequence: TTT
tgcagataacatccctttca

SEQ ID NO: 86295 - DNA, 20 bp, Artificial Sequence
  Description of Artificial Sequence: Synthetic oligonucleotide
  Target: ATXN2; (+) strand; PAM type: YTN; PAM sequence: TTT
gcagataacatccctttcaa

SEQ ID NO: 86296 - DNA, 20 bp, Artificial Sequence
  Description of Artificial Sequence: Synthetic oligonucleotide
  Target: ATXN2; (+) strand; PAM type: YTN; PAM sequence: TTG
cagataacatccctttcaaa

SEQ ID NO: 86297 - DNA, 20 bp, Artificial Sequence
  Description of Artificial Sequence: Synthetic oligonucleotide
  Target: ATXN2; (+) strand; PAM type: YTN; PAM sequence: CTT
tcaaataggaaaacagatta

SEQ ID NO: 86298 - DNA, 20 bp, Artificial Sequence
  Description of Artificial Sequence: Synthetic oligonucleotide
  Target: ATXN2; (+) strand; PAM type: YTN; PAM sequence: TTT
caaataggaaaacagattac

SEQ ID NO: 86299 - DNA, 20 bp, Artificial Sequence
  Description of Artificial Sequence: Synthetic oligonucleotide
  Target: ATXN2; (+) strand; PAM type: YTN; PAM sequence: TTC
aaataggaaaacagattaca

SEQ ID NO: 86300 - DNA, 20 bp, Artificial Sequence
  Description of Artificial Sequence: Synthetic oligonucleotide
  Target: ATXN2; (+) strand; PAM type: YTN; PAM sequence: TTA
cattaataagcagagactgt

SEQ ID NO: 86301 - DNA, 20 bp, Artificial Sequence
  Description of Artificial Sequence: Synthetic oligonucleotide
  Target: ATXN2; (+) strand; PAM type: YTN; PAM sequence: TTA
ataagcagagactgtcacag

SEQ ID NO: 86302 - DNA, 20 bp, Artificial Sequence
  Description of Artificial Sequence: Synthetic oligonucleotide
  Target: ATXN2; (+) strand; PAM type: YTN; PAM sequence: CTG
tcacagtcaagtatgtgaat

SEQ ID NO: 86303 - DNA, 20 bp, Artificial Sequence
  Description of Artificial Sequence: Synthetic oligonucleotide
  Target: ATXN2; (+) strand; PAM type: YTN; PAM sequence: TTA
cttggacctctgttcatttg

SEQ ID NO: 86304 - DNA, 20 bp, Artificial Sequence
  Description of Artificial Sequence: Synthetic oligonucleotide
  Target: ATXN2; (+) strand; PAM type: YTN; PAM sequence: CTT
ggacctctgttcatttgcct

SEQ ID NO: 86305 - DNA, 20 bp, Artificial Sequence
  Description of Artificial Sequence: Synthetic oligonucleotide
  Target: ATXN2; (+) strand; PAM type: YTN; PAM sequence: TTG
gacctctgttcatttgcctc

SEQ ID NO: 86306 - DNA, 20 bp, Artificial Sequence
  Description of Artificial Sequence: Synthetic oligonucleotide
  Target: ATXN2; (+) strand; PAM type: YTN; PAM sequence: CTC
tgttcatttgcctctctccc

SEQ ID NO: 86307 - DNA, 20 bp, Artificial Sequence
  Description of Artificial Sequence: Synthetic oligonucleotide
  Target: ATXN2; (+) strand; PAM type: YTN; PAM sequence: CTG
ttcatttgcctctctccctc

SEQ ID NO: 86308 - DNA, 20 bp, Artificial Sequence
  Description of Artificial Sequence: Synthetic oligonucleotide
  Target: ATXN2; (+) strand; PAM type: YTN; PAM sequence: TTC
atttgcctctctccctctgc

SEQ ID NO: 86309 - DNA, 20 bp, Artificial Sequence
  Description of Artificial Sequence: Synthetic oligonucleotide
  Target: ATXN2; (+) strand; PAM type: YTN; PAM sequence: TTT
gcctctctccctctgcttct

SEQ ID NO: 86310 - DNA, 20 bp, Artificial Sequence
  Description of Artificial Sequence: Synthetic oligonucleotide
  Target: ATXN2; (+) strand; PAM type: YTN; PAM sequence: TTG
cctctctccctctgcttctg

SEQ ID NO: 86311 - DNA, 20 bp, Artificial Sequence
  Description of Artificial Sequence: Synthetic oligonucleotide
  Target: ATXN2; (+) strand; PAM type: YTN; PAM sequence: CTC
tctccctctgcttctggtct

SEQ ID NO: 86312 - DNA, 20 bp, Artificial Sequence
  Description of Artificial Sequence: Synthetic oligonucleotide
  Target: ATXN2; (+) strand; PAM type: YTN; PAM sequence: CTC
tccctctgcttctggtctgc

SEQ ID NO: 86313 - DNA, 20 bp, Artificial Sequence
  Description of Artificial Sequence: Synthetic oligonucleotide
  Target: ATXN2; (+) strand; PAM type: YTN; PAM sequence: CTC
cctctgcttctggtctgctc

SEQ ID NO: 86314 - DNA, 20 bp, Artificial Sequence
  Description of Artificial Sequence: Synthetic oligonucleotide
  Target: ATXN2; (+) strand; PAM type: YTN; PAM sequence: CTC
tgcttctggtctgctcacca

SEQ ID NO: 86315 - DNA, 20 bp, Artificial Sequence
  Description of Artificial Sequence: Synthetic oligonucleotide
  Target: ATXN2; (+) strand; PAM type: YTN; PAM sequence: CTG
cttctggtctgctcaccagg

SEQ ID NO: 86316 - DNA, 20 bp, Artificial Sequence
  Description of Artificial Sequence: Synthetic oligonucleotide
  Target: ATXN2; (+) strand; PAM type: YTN; PAM sequence: CTT
ctggtctgctcaccaggcag

SEQ ID NO: 86317 - DNA, 20 bp, Artificial Sequence
  Description of Artificial Sequence: Synthetic oligonucleotide
  Target: ATXN2; (+) strand; PAM type: YTN; PAM sequence: TTC
tggtctgctcaccaggcagt

SEQ ID NO: 86318 - DNA, 20 bp, Artificial Sequence
  Description of Artificial Sequence: Synthetic oligonucleotide
  Target: ATXN2; (+) strand; PAM type: YTN; PAM sequence: CTG
gtctgctcaccaggcagtga

SEQ ID NO: 86319 - DNA, 20 bp, Artificial Sequence
  Description of Artificial Sequence: Synthetic oligonucleotide
  Target: ATXN2; (+) strand; PAM type: YTN; PAM sequence: CTG
ctcaccaggcagtgaaaaga

SEQ ID NO: 86320 - DNA, 20 bp, Artificial Sequence
  Description of Artificial Sequence: Synthetic oligonucleotide
  Target: ATXN2; (+) strand; PAM type: YTN; PAM sequence: CTC
accaggcagtgaaaagagac

SEQ ID NO: 86321 - DNA, 20 bp, Artificial Sequence
  Description of Artificial Sequence: Synthetic oligonucleotide
  Target: ATXN2; (+) strand; PAM type: YTN; PAM sequence: CTC
ttaggcccccgtgactctct

SEQ ID NO: 86322 - DNA, 20 bp, Artificial Sequence
  Description of Artificial Sequence: Synthetic oligonucleotide
  Target: ATXN2; (+) strand; PAM type: YTN; PAM sequence: CTT
aggcccccgtgactctctca

SEQ ID NO: 86323 - DNA, 20 bp, Artificial Sequence
  Description of Artificial Sequence: Synthetic oligonucleotide
  Target: ATXN2; (+) strand; PAM type: YTN; PAM sequence: TTA
ggcccccgtgactctctcag

SEQ ID NO: 86324 - DNA, 20 bp, Artificial Sequence
  Description of Artificial Sequence: Synthetic oligonucleotide
  Target: ATXN2; (+) strand; PAM type: YTN; PAM sequence: CTC
tctcagagatatgctgatgg

SEQ ID NO: 86325 - DNA, 20 bp, Artificial Sequence
  Description of Artificial Sequence: Synthetic oligonucleotide
  Target: ATXN2; (+) strand; PAM type: YTN; PAM sequence: CTC
tcagagatatgctgatggag

SEQ ID NO: 86326 - DNA, 20 bp, Artificial Sequence
  Description of Artificial Sequence: Synthetic oligonucleotide
  Target: ATXN2; (+) strand; PAM type: YTN; PAM sequence: CTC
agagatatgctgatggagca

SEQ ID NO: 86327 - DNA, 20 bp, Artificial Sequence
  Description of Artificial Sequence: Synthetic oligonucleotide
  Target: ATXN2; (+) strand; PAM type: YTN; PAM sequence: CTG
atggagcaggaggaggagga

SEQ ID NO: 86328 - DNA, 20 bp, Artificial Sequence
  Description of Artificial Sequence: Synthetic oligonucleotide
  Target: ATXN2; (+) strand; PAM type: YTN; PAM sequence: TTG
gagtttttaatggctccagt

SEQ ID NO: 86329 - DNA, 20 bp, Artificial Sequence
  Description of Artificial Sequence: Synthetic oligonucleotide
  Target: ATXN2; (+) strand; PAM type: YTN; PAM sequence: TTT
ttaatggctccagtgagatg

SEQ ID NO: 86330 - DNA, 20 bp, Artificial Sequence
  Description of Artificial Sequence: Synthetic oligonucleotide
  Target: ATXN2; (+) strand; PAM type: YTN; PAM sequence: TTT
taatggctccagtgagatgg

SEQ ID NO: 86331 - DNA, 20 bp, Artificial Sequence
  Description of Artificial Sequence: Synthetic oligonucleotide
  Target: ATXN2; (+) strand; PAM type: YTN; PAM sequence: TTT
aatggctccagtgagatgga

SEQ ID NO: 86332 - DNA, 20 bp, Artificial Sequence
  Description of Artificial Sequence: Synthetic oligonucleotide
  Target: ATXN2; (+) strand; PAM type: YTN; PAM sequence: TTA
atggctccagtgagatggaa

SEQ ID NO: 86333 - DNA, 20 bp, Artificial Sequence
  Description of Artificial Sequence: Synthetic oligonucleotide
  Target: ATXN2; (+) strand; PAM type: YTN; PAM sequence: CTC
cagtgagatggaaaggagta

SEQ ID NO: 86334 - DNA, 20 bp, Artificial Sequence
  Description of Artificial Sequence: Synthetic oligonucleotide
  Target: ATXN2; (+) strand; PAM type: YTN; PAM sequence: CTG
aagtcatctgggccagccca

SEQ ID NO: 86335 - DNA, 20 bp, Artificial Sequence
  Description of Artificial Sequence: Synthetic oligonucleotide
  Target: ATXN2; (+) strand; PAM type: YTN; PAM sequence: CTG
ggccagcccagcgtctctgt

SEQ ID NO: 86336 - DNA, 20 bp, Artificial Sequence
  Description of Artificial Sequence: Synthetic oligonucleotide
  Target: ATXN2; (+) strand; PAM type: YTN; PAM sequence: CTC
tgtaccaagttcaacctggt

SEQ ID NO: 86337 - DNA, 20 bp, Artificial Sequence
  Description of Artificial Sequence: Synthetic oligonucleotide
  Target: ATXN2; (+) strand; PAM type: YTN; PAM sequence: CTG
taccaagttcaacctggtct

SEQ ID NO: 86338 - DNA, 20 bp, Artificial Sequence
  Description of Artificial Sequence: Synthetic oligonucleotide
  Target: ATXN2; (+) strand; PAM type: YTN; PAM sequence: TTC
aacctggtctcactcactgt

SEQ ID NO: 86339 - DNA, 20 bp, Artificial Sequence
  Description of Artificial Sequence: Synthetic oligonucleotide
  Target: ATXN2; (+) strand; PAM type: YTN; PAM sequence: CTG
gtctcactcactgtcaagtt

SEQ ID NO: 86340 - DNA, 20 bp, Artificial Sequence
  Description of Artificial Sequence: Synthetic oligonucleotide
  Target: ATXN2; (+) strand; PAM type: YTN; PAM sequence: CTC
actcactgtcaagttggaaa

SEQ ID NO: 86341 - DNA, 20 bp, Artificial Sequence
  Description of Artificial Sequence: Synthetic oligonucleotide
  Target: ATXN2; (+) strand; PAM type: YTN; PAM sequence: CTC
actgtcaagttggaaaggtg

SEQ ID NO: 86342 - DNA, 20 bp, Artificial Sequence
  Description of Artificial Sequence: Synthetic oligonucleotide
  Target: ATXN2; (+) strand; PAM type: YTN; PAM sequence: CTG
tcaagttggaaaggtgattt

SEQ ID NO: 86343 - DNA, 20 bp, Artificial Sequence
  Description of Artificial Sequence: Synthetic oligonucleotide
  Target: ATXN2; (+) strand; PAM type: YTN; PAM sequence: TTG
gaaaggtgattttagtcagc

SEQ ID NO: 86344 - DNA, 20 bp, Artificial Sequence
  Description of Artificial Sequence: Synthetic oligonucleotide
  Target: ATXN2; (+) strand; PAM type: YTN; PAM sequence: TTT
tagtcagcccaaacagctgg

SEQ ID NO: 86345 - DNA, 20 bp, Artificial Sequence
  Description of Artificial Sequence: Synthetic oligonucleotide
  Target: ATXN2; (+) strand; PAM type: YTN; PAM sequence: TTT
agtcagcccaaacagctgga

SEQ ID NO: 86346 - DNA, 20 bp, Artificial Sequence
  Description of Artificial Sequence: Synthetic oligonucleotide
  Target: ATXN2; (+) strand; PAM type: YTN; PAM sequence: TTA
gtcagcccaaacagctggat

SEQ ID NO: 86347 - DNA, 20 bp, Artificial Sequence
  Description of Artificial Sequence: Synthetic oligonucleotide
  Target: ATXN2; (+) strand; PAM type: YTN; PAM sequence: CTG
gattccagctctgcaggggg

SEQ ID NO: 86348 - DNA, 20 bp, Artificial Sequence
  Description of Artificial Sequence: Synthetic oligonucleotide
  Target: ATXN2; (+) strand; PAM type: YTN; PAM sequence: TTC
cagctctgcagggggttggc

SEQ ID NO: 86349 - DNA, 20 bp, Artificial Sequence
  Description of Artificial Sequence: Synthetic oligonucleotide
  Target: ATXN2; (+) strand; PAM type: YTN; PAM sequence: CTC
tgcagggggttggcagggcc

SEQ ID NO: 86350 - DNA, 20 bp, Artificial Sequence
  Description of Artificial Sequence: Synthetic oligonucleotide
  Target: ATXN2; (+) strand; PAM type: YTN; PAM sequence: CTG
cagggggttggcagggccag

SEQ ID NO: 86351 - DNA, 20 bp, Artificial Sequence
  Description of Artificial Sequence: Synthetic oligonucleotide
  Target: ATXN2; (+) strand; PAM type: YTN; PAM sequence: TTG
gcagggccaggaagagccct

SEQ ID NO: 86352 - DNA, 20 bp, Artificial Sequence
  Description of Artificial Sequence: Synthetic oligonucleotide
  Target: ATXN2; (+) strand; PAM type: YTN; PAM sequence: CTT
gtttcctttttcccacactg

SEQ ID NO: 86353 - DNA, 20 bp, Artificial Sequence
  Description of Artificial Sequence: Synthetic oligonucleotide
  Target: ATXN2; (+) strand; PAM type: YTN; PAM sequence: TTG
tttcctttttcccacactgt

SEQ ID NO: 86354 - DNA, 20 bp, Artificial Sequence
  Description of Artificial Sequence: Synthetic oligonucleotide
  Target: ATXN2; (+) strand; PAM type: YTN; PAM sequence: TTT
cctttttcccacactgtgca

SEQ ID NO: 86355 - DNA, 20 bp, Artificial Sequence
  Description of Artificial Sequence: Synthetic oligonucleotide
  Target: ATXN2; (+) strand; PAM type: YTN; PAM sequence: TTC
ctttttcccacactgtgcac

SEQ ID NO: 86356 - DNA, 20 bp, Artificial Sequence
  Description of Artificial Sequence: Synthetic oligonucleotide
  Target: ATXN2; (+) strand; PAM type: YTN; PAM sequence: CTT
tttcccacactgtgcactgt

SEQ ID NO: 86357 - DNA, 20 bp, Artificial Sequence
  Description of Artificial Sequence: Synthetic oligonucleotide
  Target: ATXN2; (+) strand; PAM type: YTN; PAM sequence: TTT
ttcccacactgtgcactgtt

SEQ ID NO: 86358 - DNA, 20 bp, Artificial Sequence
  Description of Artificial Sequence: Synthetic oligonucleotide
  Target: ATXN2; (+) strand; PAM type: YTN; PAM sequence: TTT
tcccacactgtgcactgttc

SEQ ID NO: 86359 - DNA, 20 bp, Artificial Sequence
  Description of Artificial Sequence: Synthetic oligonucleotide
  Target: ATXN2; (+) strand; PAM type: YTN; PAM sequence: TTT
cccacactgtgcactgttct

SEQ ID NO: 86360 - DNA, 20 bp, Artificial Sequence
  Description of Artificial Sequence: Synthetic oligonucleotide
  Target: ATXN2; (+) strand; PAM type: YTN; PAM sequence: TTC
ccacactgtgcactgttcta

SEQ ID NO: 86361 - DNA, 20 bp, Artificial Sequence
  Description of Artificial Sequence: Synthetic oligonucleotide
  Target: ATXN2; (+) strand; PAM type: YTN; PAM sequence: CTG
tgcactgttctagactacga

SEQ ID NO: 86362 - DNA, 20 bp, Artificial Sequence
  Description of Artificial Sequence: Synthetic oligonucleotide
  Target: ATXN2; (+) strand; PAM type: YTN; PAM sequence: CTG
ttctagactacgataagcct

SEQ ID NO: 86363 - DNA, 20 bp, Artificial Sequence
  Description of Artificial Sequence: Synthetic oligonucleotide
  Target: ATXN2; (+) strand; PAM type: YTN; PAM sequence: TTC
tagactacgataagccttgg

SEQ ID NO: 86364 - DNA, 20 bp, Artificial Sequence
  Description of Artificial Sequence: Synthetic oligonucleotide
  Target: ATXN2; (+) strand; PAM type: YTN; PAM sequence: CTA
gactacgataagccttggat

SEQ ID NO: 86365 - DNA, 20 bp, Artificial Sequence
  Description of Artificial Sequence: Synthetic oligonucleotide
  Target: ATXN2; (+) strand; PAM type: YTN; PAM sequence: CTA
cgataagccttggatgaaat

SEQ ID NO: 86366 - DNA, 20 bp, Artificial Sequence
  Description of Artificial Sequence: Synthetic oligonucleotide
  Target: ATXN2; (+) strand; PAM type: YTN; PAM sequence: CTT
ggatgaaatgccgtttttac

SEQ ID NO: 86367 - DNA, 20 bp, Artificial Sequence
  Description of Artificial Sequence: Synthetic oligonucleotide
  Target: ATXN2; (+) strand; PAM type: YTN; PAM sequence: TTG
gatgaaatgccgtttttact

SEQ ID NO: 86368 - DNA, 20 bp, Artificial Sequence
  Description of Artificial Sequence: Synthetic oligonucleotide
  Target: ATXN2; (+) strand; PAM type: YTN; PAM sequence: TTT
ttactctcacatattcaaac

SEQ ID NO: 86369 - DNA, 20 bp, Artificial Sequence
  Description of Artificial Sequence: Synthetic oligonucleotide
  Target: ATXN2; (+) strand; PAM type: YTN; PAM sequence: TTT
tactctcacatattcaaacg

SEQ ID NO: 86370 - DNA, 20 bp, Artificial Sequence
  Description of Artificial Sequence: Synthetic oligonucleotide
  Target: ATXN2; (+) strand; PAM type: YTN; PAM sequence: TTT
actctcacatattcaaacgg

SEQ ID NO: 86371 - DNA, 20 bp, Artificial Sequence
  Description of Artificial Sequence: Synthetic oligonucleotide
  Target: ATXN2; (+) strand; PAM type: YTN; PAM sequence: TTA
ctctcacatattcaaacggg

SEQ ID NO: 86372 - DNA, 20 bp, Artificial Sequence
  Description of Artificial Sequence: Synthetic oligonucleotide
  Target: ATXN2; (+) strand; PAM type: YTN; PAM sequence: CTC
tcacatattcaaacgggcac

SEQ ID NO: 86373 - DNA, 20 bp, Artificial Sequence
  Description of Artificial Sequence: Synthetic oligonucleotide
  Target: ATXN2; (+) strand; PAM type: YTN; PAM sequence: CTC
acatattcaaacgggcacat

SEQ ID NO: 86374 - DNA, 20 bp, Artificial Sequence
  Description of Artificial Sequence: Synthetic oligonucleotide
  Target: ATXN2; (+) strand; PAM type: YTN; PAM sequence: TTC
aaacgggcacatggcaaatt

SEQ ID NO: 86375 - DNA, 20 bp, Artificial Sequence
  Description of Artificial Sequence: Synthetic oligonucleotide
  Target: ATXN2; (+) strand; PAM type: YTN; PAM sequence: TTT
gagcttccctgtgttaacct

SEQ ID NO: 86376 - DNA, 20 bp, Artificial Sequence
  Description of Artificial Sequence: Synthetic oligonucleotide
  Target: ATXN2; (+) strand; PAM type: YTN; PAM sequence: TTG
agcttccctgtgttaacctt

SEQ ID NO: 86377 - DNA, 20 bp, Artificial Sequence
  Description of Artificial Sequence: Synthetic oligonucleotide
  Target: ATXN2; (+) strand; PAM type: YTN; PAM sequence: CTT
ccctgtgttaacctttttgc

SEQ ID NO: 86378 - DNA, 20 bp, Artificial Sequence
  Description of Artificial Sequence: Synthetic oligonucleotide
  Target: ATXN2; (+) strand; PAM type: YTN; PAM sequence: TTC
cctgtgttaacctttttgcc

SEQ ID NO: 86379 - DNA, 20 bp, Artificial Sequence
  Description of Artificial Sequence: Synthetic oligonucleotide
  Target: ATXN2; (+) strand; PAM type: YTN; PAM sequence: CTG
tgttaacctttttgcccttt

SEQ ID NO: 86380 - DNA, 20 bp, Artificial Sequence
  Description of Artificial Sequence: Synthetic oligonucleotide
  Target: ATXN2; (+) strand; PAM type: YTN; PAM sequence: TTA
acctttttgccctttcagca

SEQ ID NO: 86381 - DNA, 20 bp, Artificial Sequence
  Description of Artificial Sequence: Synthetic oligonucleotide
  Target: ATXN2; (+) strand; PAM type: YTN; PAM sequence: CTT
tttgccctttcagcacaaaa

SEQ ID NO: 86382 - DNA, 20 bp, Artificial Sequence
  Description of Artificial Sequence: Synthetic oligonucleotide
  Target: ATXN2; (+) strand; PAM type: YTN; PAM sequence: TTT
ttgccctttcagcacaaaaa

SEQ ID NO: 86383 - DNA, 20 bp, Artificial Sequence
  Description of Artificial Sequence: Synthetic oligonucleotide
  Target: ATXN2; (+) strand; PAM type: YTN; PAM sequence: TTT
tgccctttcagcacaaaaac

SEQ ID NO: 86384 - DNA, 20 bp, Artificial Sequence
  Description of Artificial Sequence: Synthetic oligonucleotide
  Target: ATXN2; (+) strand; PAM type: YTN; PAM sequence: TTT
gccctttcagcacaaaaaca

SEQ ID NO: 86385 - DNA, 20 bp, Artificial Sequence
  Description of Artificial Sequence: Synthetic oligonucleotide
  Target: ATXN2; (+) strand; PAM type: YTN; PAM sequence: TTG
ccctttcagcacaaaaacag

SEQ ID NO: 86386 - DNA, 20 bp, Artificial Sequence
  Description of Artificial Sequence: Synthetic oligonucleotide
  Target: ATXN2; (+) strand; PAM type: YTN; PAM sequence: CTT
tcagcacaaaaacagagtga

SEQ ID NO: 86387 - DNA, 20 bp, Artificial Sequence
  Description of Artificial Sequence: Synthetic oligonucleotide
  Target: ATXN2; (+) strand; PAM type: YTN; PAM sequence: TTT
cagcacaaaaacagagtgag

SEQ ID NO: 86388 - DNA, 20 bp, Artificial Sequence
  Description of Artificial Sequence: Synthetic oligonucleotide
  Target: ATXN2; (+) strand; PAM type: YTN; PAM sequence: TTC
agcacaaaaacagagtgagg

SEQ ID NO: 86389 - DNA, 20 bp, Artificial Sequence
  Description of Artificial Sequence: Synthetic oligonucleotide
  Target: ATXN2; (+) strand; PAM type: YTN; PAM sequence: TTT
tagggatccctgacttacat

SEQ ID NO: 86390 - DNA, 20 bp, Artificial Sequence
  Description of Artificial Sequence: Synthetic oligonucleotide
  Target: ATXN2; (+) strand; PAM type: YTN; PAM sequence: TTT
agggatccctgacttacatg

SEQ ID NO: 86391 - DNA, 20 bp, Artificial Sequence
  Description of Artificial Sequence: Synthetic oligonucleotide
  Target: ATXN2; (+) strand; PAM type: YTN; PAM sequence: TTA
gggatccctgacttacatgt

SEQ ID NO: 86392 - DNA, 20 bp, Artificial Sequence
  Description of Artificial Sequence: Synthetic oligonucleotide
  Target: ATXN2; (+) strand; PAM type: YTN; PAM sequence: CTG
acttacatgtaagttcacat

SEQ ID NO: 86393 - DNA, 20 bp, Artificial Sequence
  Description of Artificial Sequence: Synthetic oligonucleotide
  Target: ATXN2; (+) strand; PAM type: YTN; PAM sequence: CTT
acatgtaagttcacatgcct

SEQ ID NO: 86394 - DNA, 20 bp, Artificial Sequence
  Description of Artificial Sequence: Synthetic oligonucleotide
  Target: ATXN2; (+) strand; PAM type: YTN; PAM sequence: TTA
catgtaagttcacatgccta

SEQ ID NO: 86395 - DNA, 20 bp, Artificial Sequence
  Description of Artificial Sequence: Synthetic oligonucleotide
  Target: ATXN2; (+) strand; PAM type: YTN; PAM sequence: TTC
acatgcctacttagccacca

SEQ ID NO: 86396 - DNA, 20 bp, Artificial Sequence
  Description of Artificial Sequence: Synthetic oligonucleotide
  Target: ATXN2; (+) strand; PAM type: YTN; PAM sequence: CTA
cttagccaccagcctctggt

SEQ ID NO: 86397 - DNA, 20 bp, Artificial Sequence
  Description of Artificial Sequence: Synthetic oligonucleotide
  Target: ATXN2; (+) strand; PAM type: YTN; PAM sequence: CTT
agccaccagcctctggtaga

SEQ ID NO: 86398 - DNA, 20 bp, Artificial Sequence
  Description of Artificial Sequence: Synthetic oligonucleotide
  Target: ATXN2; (+) strand; PAM type: YTN; PAM sequence: TTA
gccaccagcctctggtagac

SEQ ID NO: 86399 - DNA, 20 bp, Artificial Sequence
  Description of Artificial Sequence: Synthetic oligonucleotide
  Target: ATXN2; (+) strand; PAM type: YTN; PAM sequence: CTC
tggtagacacctacaggacc

SEQ ID NO: 86400 - DNA, 20 bp, Artificial Sequence
  Description of Artificial Sequence: Synthetic oligonucleotide
  Target: ATXN2; (+) strand; PAM type: YTN; PAM sequence: CTG
gtagacacctacaggacccc

SEQ ID NO: 86401 - DNA, 20 bp, Artificial Sequence
  Description of Artificial Sequence: Synthetic oligonucleotide
  Target: ATXN2; (+) strand; PAM type: YTN; PAM sequence: CTA
caggaccccagctcttatga

SEQ ID NO: 86402 - DNA, 20 bp, Artificial Sequence
  Description of Artificial Sequence: Synthetic oligonucleotide
  Target: ATXN2; (+) strand; PAM type: YTN; PAM sequence: CTC
ttatgaagctgactccacca

SEQ ID NO: 86403 - DNA, 20 bp, Artificial Sequence
  Description of Artificial Sequence: Synthetic oligonucleotide
  Target: ATXN2; (+) strand; PAM type: YTN; PAM sequence: CTT
atgaagctgactccaccaaa

SEQ ID NO: 86404 - DNA, 20 bp, Artificial Sequence
  Description of Artificial Sequence: Synthetic oligonucleotide
  Target: ATXN2; (+) strand; PAM type: YTN; PAM sequence: TTA
tgaagctgactccaccaaac

SEQ ID NO: 86405 - DNA, 20 bp, Artificial Sequence
  Description of Artificial Sequence: Synthetic oligonucleotide
  Target: ATXN2; (+) strand; PAM type: YTN; PAM sequence: CTG
actccaccaaaccacgctgg

SEQ ID NO: 86406 - DNA, 20 bp, Artificial Sequence
  Description of Artificial Sequence: Synthetic oligonucleotide
  Target: ATXN2; (+) strand; PAM type: YTN; PAM sequence: CTC
caccaaaccacgctggccca

SEQ ID NO: 86407 - DNA, 20 bp, Artificial Sequence
  Description of Artificial Sequence: Synthetic oligonucleotide
  Target: ATXN2; (+) strand; PAM type: YTN; PAM sequence: CTG
gcccacacggaccaaaccgg

SEQ ID NO: 86408 - DNA, 20 bp, Artificial Sequence
  Description of Artificial Sequence: Synthetic oligonucleotide
  Target: ATXN2; (+) strand; PAM type: YTN; PAM sequence: CTT
ccctccccactatcaaaaag

SEQ ID NO: 86409 - DNA, 20 bp, Artificial Sequence
  Description of Artificial Sequence: Synthetic oligonucleotide
  Target: ATXN2; (+) strand; PAM type: YTN; PAM sequence: TTC
cctccccactatcaaaaagc

SEQ ID NO: 86410 - DNA, 20 bp, Artificial Sequence
  Description of Artificial Sequence: Synthetic oligonucleotide
  Target: ATXN2; (+) strand; PAM type: YTN; PAM sequence: CTC
cccactatcaaaaagcaaat

SEQ ID NO: 86411 - DNA, 20 bp, Artificial Sequence
  Description of Artificial Sequence: Synthetic oligonucleotide
  Target: ATXN2; (+) strand; PAM type: YTN; PAM sequence: CTA
tcaaaaagcaaatcaactgc

SEQ ID NO: 86412 - DNA, 20 bp, Artificial Sequence
  Description of Artificial Sequence: Synthetic oligonucleotide
  Target: ATXN2; (+) strand; PAM type: YTN; PAM sequence: CTG
cagtgcgctacaccacagaa

SEQ ID NO: 86413 - DNA, 20 bp, Artificial Sequence
  Description of Artificial Sequence: Synthetic oligonucleotide
  Target: ATXN2; (+) strand; PAM type: YTN; PAM sequence: CTA
caccacagaacctaaacttt

SEQ ID NO: 86414 - DNA, 20 bp, Artificial Sequence
  Description of Artificial Sequence: Synthetic oligonucleotide
  Target: ATXN2; (+) strand; PAM type: YTN; PAM sequence: CTA
aactttgcagggtgaggacg

SEQ ID NO: 86415 - DNA, 20 bp, Artificial Sequence
  Description of Artificial Sequence: Synthetic oligonucleotide
  Target: ATXN2; (+) strand; PAM type: YTN; PAM sequence: CTT
tgcagggtgaggacgcccaa

SEQ ID NO: 86416 - DNA, 20 bp, Artificial Sequence
  Description of Artificial Sequence: Synthetic oligonucleotide
  Target: ATXN2; (+) strand; PAM type: YTN; PAM sequence: TTT
gcagggtgaggacgcccaaa

SEQ ID NO: 86417 - DNA, 20 bp, Artificial Sequence
  Description of Artificial Sequence: Synthetic oligonucleotide
  Target: ATXN2; (+) strand; PAM type: YTN; PAM sequence: TTG
cagggtgaggacgcccaaac

SEQ ID NO: 86418 - DNA, 20 bp, Artificial Sequence
  Description of Artificial Sequence: Synthetic oligonucleotide
  Target: ATXN2; (+) strand; PAM type: YTN; PAM sequence: CTT
cccagagctgtggaactcta

SEQ ID NO: 86419 - DNA, 20 bp, Artificial Sequence
  Description of Artificial Sequence: Synthetic oligonucleotide
  Target: ATXN2; (+) strand; PAM type: YTN; PAM sequence: TTC
ccagagctgtggaactctac

SEQ ID NO: 86420 - DNA, 20 bp, Artificial Sequence
  Description of Artificial Sequence: Synthetic oligonucleotide
  Target: ATXN2; (+) strand; PAM type: YTN; PAM sequence: CTG
tggaactctacttacaaggt

SEQ ID NO: 86421 - DNA, 20 bp, Artificial Sequence
  Description of Artificial Sequence: Synthetic oligonucleotide
  Target: ATXN2; (+) strand; PAM type: YTN; PAM sequence: CTC
tacttacaaggtagccttct

SEQ ID NO: 86422 - DNA, 20 bp, Artificial Sequence
  Description of Artificial Sequence: Synthetic oligonucleotide
  Target: ATXN2; (+) strand; PAM type: YTN; PAM sequence: CTA
cttacaaggtagccttctga

SEQ ID NO: 86423 - DNA, 20 bp, Artificial Sequence
  Description of Artificial Sequence: Synthetic oligonucleotide
  Target: ATXN2; (+) strand; PAM type: YTN; PAM sequence: CTT
acaaggtagccttctgagag

SEQ ID NO: 86424 - DNA, 20 bp, Artificial Sequence
  Description of Artificial Sequence: Synthetic oligonucleotide
  Target: ATXN2; (+) strand; PAM type: YTN; PAM sequence: TTA
caaggtagccttctgagaga

SEQ ID NO: 86425 - DNA, 20 bp, Artificial Sequence
  Description of Artificial Sequence: Synthetic oligonucleotide
  Target: ATXN2; (+) strand; PAM type: YTN; PAM sequence: CTT
ctgagagatagatccaactg

SEQ ID NO: 86426 - DNA, 20 bp, Artificial Sequence
  Description of Artificial Sequence: Synthetic oligonucleotide
  Target: ATXN2; (+) strand; PAM type: YTN; PAM sequence: TTC
tgagagatagatccaactga

SEQ ID NO: 86427 - DNA, 20 bp, Artificial Sequence
  Description of Artificial Sequence: Synthetic oligonucleotide
  Target: ATXN2; (+) strand; PAM type: YTN; PAM sequence: CTG
agagatagatccaactgagt

SEQ ID NO: 86428 - DNA, 20 bp, Artificial Sequence
  Description of Artificial Sequence: Synthetic oligonucleotide
  Target: ATXN2; (+) strand; PAM type: YTN; PAM sequence: CTG
agtcgcatctctagcccaca

SEQ ID NO: 86429 - DNA, 20 bp, Artificial Sequence
  Description of Artificial Sequence: Synthetic oligonucleotide
  Target: ATXN2; (+) strand; PAM type: YTN; PAM sequence: CTC
tagcccacaccttgccagag

SEQ ID NO: 86430 - DNA, 20 bp, Artificial Sequence
  Description of Artificial Sequence: Synthetic oligonucleotide
  Target: ATXN2; (+) strand; PAM type: YTN; PAM sequence: CTA
gcccacaccttgccagagcc

SEQ ID NO: 86431 - DNA, 20 bp, Artificial Sequence
  Description of Artificial Sequence: Synthetic oligonucleotide
  Target: ATXN2; (+) strand; PAM type: YTN; PAM sequence: CTT
gccagagcctcactggcgca

SEQ ID NO: 86432 - DNA, 20 bp, Artificial Sequence
  Description of Artificial Sequence: Synthetic oligonucleotide
  Target: ATXN2; (+) strand; PAM type: YTN; PAM sequence: TTG
ccagagcctcactggcgcac

SEQ ID NO: 86433 - DNA, 20 bp, Artificial Sequence
  Description of Artificial Sequence: Synthetic oligonucleotide
  Target: ATXN2; (+) strand; PAM type: YTN; PAM sequence: CTC
actggcgcactatttaacag

SEQ ID NO: 86434 - DNA, 20 bp, Artificial Sequence
  Description of Artificial Sequence: Synthetic oligonucleotide
  Target: ATXN2; (+) strand; PAM type: YTN; PAM sequence: CTG
gcgcactatttaacaggaaa

SEQ ID NO: 86435 - DNA, 20 bp, Artificial Sequence
  Description of Artificial Sequence: Synthetic oligonucleotide
  Target: ATXN2; (+) strand; PAM type: YTN; PAM sequence: CTA
tttaacaggaaatggaattc

SEQ ID NO: 86436 - DNA, 20 bp, Artificial Sequence
  Description of Artificial Sequence: Synthetic oligonucleotide
  Target: ATXN2; (+) strand; PAM type: YTN; PAM sequence: TTT
aacaggaaatggaattcatt

SEQ ID NO: 86437 - DNA, 20 bp, Artificial Sequence
  Description of Artificial Sequence: Synthetic oligonucleotide
  Target: ATXN2; (+) strand; PAM type: YTN; PAM sequence: TTA
acaggaaatggaattcattg

SEQ ID NO: 86438 - DNA, 20 bp, Artificial Sequence
  Description of Artificial Sequence: Synthetic oligonucleotide
  Target: ATXN2; (+) strand; PAM type: YTN; PAM sequence: TTC
attgtggcaggtctcactta

SEQ ID NO: 86439 - DNA, 20 bp, Artificial Sequence
  Description of Artificial Sequence: Synthetic oligonucleotide
  Target: ATXN2; (+) strand; PAM type: YTN; PAM sequence: TTG
tggcaggtctcacttagacc

SEQ ID NO: 86440 - DNA, 20 bp, Artificial Sequence
  Description of Artificial Sequence: Synthetic oligonucleotide
  Target: ATXN2; (+) strand; PAM type: YTN; PAM sequence: CTC
acttagacccgcctcagaga

SEQ ID NO: 86441 - DNA, 20 bp, Artificial Sequence
  Description of Artificial Sequence: Synthetic oligonucleotide
  Target: ATXN2; (+) strand; PAM type: YTN; PAM sequence: CTT
agacccgcctcagagagttc

SEQ ID NO: 86442 - DNA, 20 bp, Artificial Sequence
  Description of Artificial Sequence: Synthetic oligonucleotide
  Target: ATXN2; (+) strand; PAM type: YTN; PAM sequence: TTA
gacccgcctcagagagttct

SEQ ID NO: 86443 - DNA, 20 bp, Artificial Sequence
  Description of Artificial Sequence: Synthetic oligonucleotide
  Target: ATXN2; (+) strand; PAM type: YTN; PAM sequence: CTC
agagagttctgttatgaaag

SEQ ID NO: 86444 - DNA, 20 bp, Artificial Sequence
  Description of Artificial Sequence: Synthetic oligonucleotide
  Target: ATXN2; (+) strand; PAM type: YTN; PAM sequence: TTC
tgttatgaaagtagcagaga

SEQ ID NO: 86445 - DNA, 20 bp, Artificial Sequence
  Description of Artificial Sequence: Synthetic oligonucleotide
  Target: ATXN2; (+) strand; PAM type: YTN; PAM sequence: CTG
ttatgaaagtagcagagaca

SEQ ID NO: 86446 - DNA, 20 bp, Artificial Sequence
  Description of Artificial Sequence: Synthetic oligonucleotide
  Target: ATXN2; (+) strand; PAM type: YTN; PAM sequence: TTA
tgaaagtagcagagacatct

SEQ ID NO: 86447 - DNA, 20 bp, Artificial Sequence
  Description of Artificial Sequence: Synthetic oligonucleotide
  Target: ATXN2; (+) strand; PAM type: YTN; PAM sequence: CTA
atacagccaattcacccgta

SEQ ID NO: 86448 - DNA, 20 bp, Artificial Sequence
  Description of Artificial Sequence: Synthetic oligonucleotide
  Target: ATXN2; (+) strand; PAM type: YTN; PAM sequence: TTC
acccgtaacagccccaggga

SEQ ID NO: 86449 - DNA, 20 bp, Artificial Sequence
  Description of Artificial Sequence: Synthetic oligonucleotide
  Target: ATXN2; (+) strand; PAM type: YTN; PAM sequence: CTC
aaggccagcgttagagccca

SEQ ID NO: 86450 - DNA, 20 bp, Artificial Sequence
  Description of Artificial Sequence: Synthetic oligonucleotide
  Target: ATXN2; (+) strand; PAM type: YTN; PAM sequence: TTA
gagcccaacttcagtgcagc

SEQ ID NO: 86451 - DNA, 20 bp, Artificial Sequence
  Description of Artificial Sequence: Synthetic oligonucleotide
  Target: ATXN2; (+) strand; PAM type: YTN; PAM sequence: CTT
cagtgcagctccttctcctc

SEQ ID NO: 86452 - DNA, 20 bp, Artificial Sequence
  Description of Artificial Sequence: Synthetic oligonucleotide
  Target: ATXN2; (+) strand; PAM type: YTN; PAM sequence: TTC
agtgcagctccttctcctca

SEQ ID NO: 86453 - DNA, 20 bp, Artificial Sequence
  Description of Artificial Sequence: Synthetic oligonucleotide
  Target: ATXN2; (+) strand; PAM type: YTN; PAM sequence: CTC
cttctcctcattaagacaat

SEQ ID NO: 86454 - DNA, 20 bp, Artificial Sequence
  Description of Artificial Sequence: Synthetic oligonucleotide
  Target: ATXN2; (+) strand; PAM type: YTN; PAM sequence: CTT
ctcctcattaagacaatccc

SEQ ID NO: 86455 - DNA, 20 bp, Artificial Sequence
  Description of Artificial Sequence: Synthetic oligonucleotide
  Target: ATXN2; (+) strand; PAM type: YTN; PAM sequence: TTC
tcctcattaagacaatcccc

SEQ ID NO: 86456 - DNA, 20 bp, Artificial Sequence
  Description of Artificial Sequence: Synthetic oligonucleotide
  Target: ATXN2; (+) strand; PAM type: YTN; PAM sequence: CTC
ctcattaagacaatcccctg

SEQ ID NO: 86457 - DNA, 20 bp, Artificial Sequence
  Description of Artificial Sequence: Synthetic oligonucleotide
  Target: ATXN2; (+) strand; PAM type: YTN; PAM sequence: CTC
attaagacaatcccctgggc

SEQ ID NO: 86458 - DNA, 20 bp, Artificial Sequence
  Description of Artificial Sequence: Synthetic oligonucleotide
  Target: ATXN2; (+) strand; PAM type: YTN; PAM sequence: TTA
agacaatcccctgggccctg

SEQ ID NO: 86459 - DNA, 20 bp, Artificial Sequence
  Description of Artificial Sequence: Synthetic oligonucleotide
  Target: ATXN2; (+) strand; PAM type: YTN; PAM sequence: CTG
ggccctggagtgcagggacc

SEQ ID NO: 86460 - DNA, 20 bp, Artificial Sequence
  Description of Artificial Sequence: Synthetic oligonucleotide
  Target: ATXN2; (+) strand; PAM type: YTN; PAM sequence: CTG
gagtgcagggacctttgtca

SEQ ID NO: 86461 - DNA, 20 bp, Artificial Sequence
  Description of Artificial Sequence: Synthetic oligonucleotide
  Target: ATXN2; (+) strand; PAM type: YTN; PAM sequence: CTT
tgtcagcagctgatgcagac

SEQ ID NO: 86462 - DNA, 20 bp, Artificial Sequence
  Description of Artificial Sequence: Synthetic oligonucleotide
  Target: ATXN2; (+) strand; PAM type: YTN; PAM sequence: TTT
gtcagcagctgatgcagaca

SEQ ID NO: 86463 - DNA, 20 bp, Artificial Sequence
  Description of Artificial Sequence: Synthetic oligonucleotide
  Target: ATXN2; (+) strand; PAM type: YTN; PAM sequence: TTG
tcagcagctgatgcagacag

SEQ ID NO: 86464 - DNA, 20 bp, Artificial Sequence
  Description of Artificial Sequence: Synthetic oligonucleotide
  Target: ATXN2; (+) strand; PAM type: YTN; PAM sequence: CTG
atgcagacagcaaccactga

SEQ ID NO: 86465 - DNA, 20 bp, Artificial Sequence
  Description of Artificial Sequence: Synthetic oligonucleotide
  Target: ATXN2; (+) strand; PAM type: YTN; PAM sequence: CTG
agatggcaagcacacctttc

SEQ ID NO: 86466 - DNA, 20 bp, Artificial Sequence
  Description of Artificial Sequence: Synthetic oligonucleotide
  Target: ATXN2; (+) strand; PAM type: YTN; PAM sequence: CTT
tcacctgtagcagcttacac

SEQ ID NO: 86467 - DNA, 20 bp, Artificial Sequence
  Description of Artificial Sequence: Synthetic oligonucleotide
  Target: ATXN2; (+) strand; PAM type: YTN; PAM sequence: TTT
cacctgtagcagcttacact

SEQ ID NO: 86468 - DNA, 20 bp, Artificial Sequence
  Description of Artificial Sequence: Synthetic oligonucleotide
  Target: ATXN2; (+) strand; PAM type: YTN; PAM sequence: TTC
acctgtagcagcttacactg

SEQ ID NO: 86469 - DNA, 20 bp, Artificial Sequence
  Description of Artificial Sequence: Synthetic oligonucleotide
  Target: ATXN2; (+) strand; PAM type: YTN; PAM sequence: CTG
tagcagcttacactggaggt

SEQ ID NO: 86470 - DNA, 20 bp, Artificial Sequence
  Description of Artificial Sequence: Synthetic oligonucleotide
  Target: ATXN2; (+) strand; PAM type: YTN; PAM sequence: CTT
acactggaggtgagctccaa

SEQ ID NO: 86471 - DNA, 20 bp, Artificial Sequence
  Description of Artificial Sequence: Synthetic oligonucleotide
  Target: ATXN2; (+) strand; PAM type: YTN; PAM sequence: TTA
cactggaggtgagctccaaa

SEQ ID NO: 86472 - DNA, 20 bp, Artificial Sequence
  Description of Artificial Sequence: Synthetic oligonucleotide
  Target: ATXN2; (+) strand; PAM type: YTN; PAM sequence: CTG
gaggtgagctccaaagtgct

SEQ ID NO: 86473 - DNA, 20 bp, Artificial Sequence
  Description of Artificial Sequence: Synthetic oligonucleotide
  Target: ATXN2; (+) strand; PAM type: YTN; PAM sequence: CTC
caaagtgcttccagggctgc

SEQ ID NO: 86474 - DNA, 20 bp, Artificial Sequence
  Description of Artificial Sequence: Synthetic oligonucleotide
  Target: ATXN2; (+) strand; PAM type: YTN; PAM sequence: CTT
ccagggctgctcttaaagaa

SEQ ID NO: 86475 - DNA, 20 bp, Artificial Sequence
  Description of Artificial Sequence: Synthetic oligonucleotide
  Target: ATXN2; (+) strand; PAM type: YTN; PAM sequence: TTC
cagggctgctcttaaagaaa

SEQ ID NO: 86476 - DNA, 20 bp, Artificial Sequence
  Description of Artificial Sequence: Synthetic oligonucleotide
  Target: ATXN2; (+) strand; PAM type: YTN; PAM sequence: CTG
ctcttaaagaaaaatgggac

SEQ ID NO: 86477 - DNA, 20 bp, Artificial Sequence
  Description of Artificial Sequence: Synthetic oligonucleotide
  Target: ATXN2; (+) strand; PAM type: YTN; PAM sequence: CTC
ttaaagaaaaatgggaccac

SEQ ID NO: 86478 - DNA, 20 bp, Artificial Sequence
  Description of Artificial Sequence: Synthetic oligonucleotide
  Target: ATXN2; (+) strand; PAM type: YTN; PAM sequence: CTT
aaagaaaaatgggaccacct

SEQ ID NO: 86479 - DNA, 20 bp, Artificial Sequence
  Description of Artificial Sequence: Synthetic oligonucleotide
  Target: ATXN2; (+) strand; PAM type: YTN; PAM sequence: TTA
aagaaaaatgggaccacctg

SEQ ID NO: 86480 - DNA, 20 bp, Artificial Sequence
  Description of Artificial Sequence: Synthetic oligonucleotide
  Target: ATXN2; (+) strand; PAM type: YTN; PAM sequence: CTG
ggtgcttccagcttctagtt

SEQ ID NO: 86481 - DNA, 20 bp, Artificial Sequence
  Description of Artificial Sequence: Synthetic oligonucleotide
  Target: ATXN2; (+) strand; PAM type: YTN; PAM sequence: CTT
ccagcttctagttacactgc

SEQ ID NO: 86482 - DNA, 20 bp, Artificial Sequence
  Description of Artificial Sequence: Synthetic oligonucleotide
  Target: ATXN2; (+) strand; PAM type: YTN; PAM sequence: TTC
cagcttctagttacactgca

SEQ ID NO: 86483 - DNA, 20 bp, Artificial Sequence
  Description of Artificial Sequence: Synthetic oligonucleotide
  Target: ATXN2; (+) strand; PAM type: YTN; PAM sequence: CTT
ctagttacactgcaccaatg

SEQ ID NO: 86484 - DNA, 20 bp, Artificial Sequence
  Description of Artificial Sequence: Synthetic oligonucleotide
  Target: ATXN2; (+) strand; PAM type: YTN; PAM sequence: TTC
tagttacactgcaccaatgt

SEQ ID NO: 86485 - DNA, 20 bp, Artificial Sequence
  Description of Artificial Sequence: Synthetic oligonucleotide
  Target: ATXN2; (+) strand; PAM type: YTN; PAM sequence: CTA
gttacactgcaccaatgtcc

SEQ ID NO: 86486 - DNA, 20 bp, Artificial Sequence
  Description of Artificial Sequence: Synthetic oligonucleotide
  Target: ATXN2; (+) strand; PAM type: YTN; PAM sequence: TTA
cactgcaccaatgtccaagg

SEQ ID NO: 86487 - DNA, 20 bp, Artificial Sequence
  Description of Artificial Sequence: Synthetic oligonucleotide
  Target: ATXN2; (+) strand; PAM type: YTN; PAM sequence: CTG
caccaatgtccaaggccaag

SEQ ID NO: 86488 - DNA, 20 bp, Artificial Sequence
  Description of Artificial Sequence: Synthetic oligonucleotide
  Target: ATXN2; (+) strand; PAM type: YTN; PAM sequence: CTC
tcaagagtacaacttatggt

SEQ ID NO: 86489 - DNA, 20 bp, Artificial Sequence
  Description of Artificial Sequence: Synthetic oligonucleotide
  Target: ATXN2; (+) strand; PAM type: YTN; PAM sequence: CTC
aagagtacaacttatggtca

SEQ ID NO: 86490 - DNA, 20 bp, Artificial Sequence
  Description of Artificial Sequence: Synthetic oligonucleotide
  Target: ATXN2; (+) strand; PAM type: YTN; PAM sequence: CTT
atggtcaaagcagatatatg

SEQ ID NO: 86491 - DNA, 20 bp, Artificial Sequence
  Description of Artificial Sequence: Synthetic oligonucleotide
  Target: ATXN2; (+) strand; PAM type: YTN; PAM sequence: TTA
tggtcaaagcagatatatgg

SEQ ID NO: 86492 - DNA, 20 bp, Artificial Sequence
  Description of Artificial Sequence: Synthetic oligonucleotide
  Target: ATXN2; (+) strand; PAM type: YTN; PAM sequence: TTG
gagagatgtgtctggaactc

SEQ ID NO: 86493 - DNA, 20 bp, Artificial Sequence
  Description of Artificial Sequence: Synthetic oligonucleotide
  Target: ATXN2; (+) strand; PAM type: YTN; PAM sequence: CTG
gaactcatgtgagtaacaat

SEQ ID NO: 86494 - DNA, 20 bp, Artificial Sequence
  Description of Artificial Sequence: Synthetic oligonucleotide
  Target: ATXN2; (+) strand; PAM type: YTN; PAM sequence: CTC
atgtgagtaacaatcaagtt

SEQ ID NO: 86495 - DNA, 20 bp, Artificial Sequence
  Description of Artificial Sequence: Synthetic oligonucleotide
  Target: ATXN2; (+) strand; PAM type: YTN; PAM sequence: TTG
acaggccccggtagtcactt

SEQ ID NO: 86496 - DNA, 20 bp, Artificial Sequence
  Description of Artificial Sequence: Synthetic oligonucleotide
  Target: ATXN2; (+) strand; PAM type: YTN; PAM sequence: CTT
cggagagctgagactctgtg

SEQ ID NO: 86497 - DNA, 20 bp, Artificial Sequence
  Description of Artificial Sequence: Synthetic oligonucleotide
  Target: ATXN2; (+) strand; PAM type: YTN; PAM sequence: TTC
ggagagctgagactctgtga

SEQ ID NO: 86498 - DNA, 20 bp, Artificial Sequence
  Description of Artificial Sequence: Synthetic oligonucleotide
  Target: ATXN2; (+) strand; PAM type: YTN; PAM sequence: CTG
agactctgtgaaggccatca

SEQ ID NO: 86499 - DNA, 20 bp, Artificial Sequence
  Description of Artificial Sequence: Synthetic oligonucleotide
  Target: ATXN2; (+) strand; PAM type: YTN; PAM sequence: CTC
tgtgaaggccatcatccctg

SEQ ID NO: 86500 - DNA, 20 bp, Artificial Sequence
  Description of Artificial Sequence: Synthetic oligonucleotide
  Target: ATXN2; (+) strand; PAM type: YTN; PAM sequence: CTG
tgaaggccatcatccctgcc

SEQ ID NO: 86501 - DNA, 20 bp, Artificial Sequence
  Description of Artificial Sequence: Synthetic oligonucleotide
  Target: ATXN2; (+) strand; PAM type: YTN; PAM sequence: CTG
cctggcttccaaggtaagtg

SEQ ID NO: 86502 - DNA, 20 bp, Artificial Sequence
  Description of Artificial Sequence: Synthetic oligonucleotide
  Target: ATXN2; (+) strand; PAM type: YTN; PAM sequence: CTG
gcttccaaggtaagtgtgta

SEQ ID NO: 86503 - DNA, 20 bp, Artificial Sequence
  Description of Artificial Sequence: Synthetic oligonucleotide
  Target: ATXN2; (+) strand; PAM type: YTN; PAM sequence: CTT
ccaaggtaagtgtgtagggg

SEQ ID NO: 86504 - DNA, 20 bp, Artificial Sequence
  Description of Artificial Sequence: Synthetic oligonucleotide
  Target: ATXN2; (+) strand; PAM type: YTN; PAM sequence: TTC
caaggtaagtgtgtagggga

SEQ ID NO: 86505 - DNA, 20 bp, Artificial Sequence
  Description of Artificial Sequence: Synthetic oligonucleotide
  Target: ATXN2; (+) strand; PAM type: YTN; PAM sequence: CTA
tatagacatagcaaagcaga

SEQ ID NO: 86506 - DNA, 20 bp, Artificial Sequence
  Description of Artificial Sequence: Synthetic oligonucleotide
  Target: ATXN2; (+) strand; PAM type: YTN; PAM sequence: CTG
ggttgcattccagagtcaaa

SEQ ID NO: 86507 - DNA, 20 bp, Artificial Sequence
  Description of Artificial Sequence: Synthetic oligonucleotide
  Target: ATXN2; (+) strand; PAM type: YTN; PAM sequence: TTG
cattccagagtcaaagatat

SEQ ID NO: 86508 - DNA, 20 bp, Artificial Sequence
  Description of Artificial Sequence: Synthetic oligonucleotide
  Target: ATXN2; (+) strand; PAM type: YTN; PAM sequence: TTC
cagagtcaaagatattttta

SEQ ID NO: 86509 - DNA, 20 bp, Artificial Sequence
  Description of Artificial Sequence: Synthetic oligonucleotide
  Target: ATXN2; (+) strand; PAM type: YTN; PAM sequence: TTT
ttaaggtctcagttggaaaa

SEQ ID NO: 86510 - DNA, 20 bp, Artificial Sequence
  Description of Artificial Sequence: Synthetic oligonucleotide
  Target: ATXN2; (+) strand; PAM type: YTN; PAM sequence: TTT
taaggtctcagttggaaaac

SEQ ID NO: 86511 - DNA, 20 bp, Artificial Sequence
  Description of Artificial Sequence: Synthetic oligonucleotide
  Target: ATXN2; (+) strand; PAM type: YTN; PAM sequence: TTT
aaggtctcagttggaaaact

SEQ ID NO: 86512 - DNA, 20 bp, Artificial Sequence
  Description of Artificial Sequence: Synthetic oligonucleotide
  Target: ATXN2; (+) strand; PAM type: YTN; PAM sequence: TTA
aggtctcagttggaaaacta

SEQ ID NO: 86513 - DNA, 20 bp, Artificial Sequence
  Description of Artificial Sequence: Synthetic oligonucleotide
  Target: ATXN2; (+) strand; PAM type: YTN; PAM sequence: CTC
agttggaaaactaaaggact

SEQ ID NO: 86514 - DNA, 20 bp, Artificial Sequence
  Description of Artificial Sequence: Synthetic oligonucleotide
  Target: ATXN2; (+) strand; PAM type: YTN; PAM sequence: TTG
gaaaactaaaggactgacca

SEQ ID NO: 86515 - DNA, 20 bp, Artificial Sequence
  Description of Artificial Sequence: Synthetic oligonucleotide
  Target: ATXN2; (+) strand; PAM type: YTN; PAM sequence: CTA
aaggactgaccaatcagcac

SEQ ID NO: 86516 - DNA, 20 bp, Artificial Sequence
  Description of Artificial Sequence: Synthetic oligonucleotide
  Target: ATXN2; (+) strand; PAM type: YTN; PAM sequence: CTG
accaatcagcaccttcactg

SEQ ID NO: 86517 - DNA, 20 bp, Artificial Sequence
  Description of Artificial Sequence: Synthetic oligonucleotide
  Target: ATXN2; (+) strand; PAM type: YTN; PAM sequence: CTT
cactgatcccatgacaaaac

SEQ ID NO: 86518 - DNA, 20 bp, Artificial Sequence
  Description of Artificial Sequence: Synthetic oligonucleotide
  Target: ATXN2; (+) strand; PAM type: YTN; PAM sequence: TTC
actgatcccatgacaaaacc

SEQ ID NO: 86519 - DNA, 20 bp, Artificial Sequence
  Description of Artificial Sequence: Synthetic oligonucleotide
  Target: ATXN2; (+) strand; PAM type: YTN; PAM sequence: CTG
atcccatgacaaaaccacac

SEQ ID NO: 86520 - DNA, 20 bp, Artificial Sequence
  Description of Artificial Sequence: Synthetic oligonucleotide
  Target: ATXN2; (+) strand; PAM type: YTN; PAM sequence: TTC
ccttagggccagatcacgtg

SEQ ID NO: 86521 - DNA, 20 bp, Artificial Sequence
  Description of Artificial Sequence: Synthetic oligonucleotide
  Target: ATXN2; (+) strand; PAM type: YTN; PAM sequence: CTT
agggccagatcacgtgtatt

SEQ ID NO: 86522 - DNA, 20 bp, Artificial Sequence
  Description of Artificial Sequence: Synthetic oligonucleotide
  Target: ATXN2; (+) strand; PAM type: YTN; PAM sequence: TTA
gggccagatcacgtgtattt

SEQ ID NO: 86523 - DNA, 20 bp, Artificial Sequence
  Description of Artificial Sequence: Synthetic oligonucleotide
  Target: ATXN2; (+) strand; PAM type: YTN; PAM sequence: TTT
gagagggaaagggagacagg

SEQ ID NO: 86524 - DNA, 20 bp, Artificial Sequence
  Description of Artificial Sequence: Synthetic oligonucleotide
  Target: ATXN2; (+) strand; PAM type: YTN; PAM sequence: TTG
agagggaaagggagacaggc

SEQ ID NO: 86525 - DNA, 20 bp, Artificial Sequence
  Description of Artificial Sequence: Synthetic oligonucleotide
  Target: ATXN2; (+) strand; PAM type: YTN; PAM sequence: TTT
cctagctgggagagcctcta

SEQ ID NO: 86526 - DNA, 20 bp, Artificial Sequence
  Description of Artificial Sequence: Synthetic oligonucleotide
  Target: ATXN2; (+) strand; PAM type: YTN; PAM sequence: TTC
ctagctgggagagcctctag

SEQ ID NO: 86527 - DNA, 20 bp, Artificial Sequence
  Description of Artificial Sequence: Synthetic oligonucleotide
  Target: ATXN2; (+) strand; PAM type: YTN; PAM sequence: CTA
gctgggagagcctctagctg

SEQ ID NO: 86528 - DNA, 20 bp, Artificial Sequence
  Description of Artificial Sequence: Synthetic oligonucleotide
  Target: ATXN2; (+) strand; PAM type: YTN; PAM sequence: CTG
ggagagcctctagctgctta

SEQ ID NO: 86529 - DNA, 20 bp, Artificial Sequence
  Description of Artificial Sequence: Synthetic oligonucleotide
  Target: ATXN2; (+) strand; PAM type: YTN; PAM sequence: CTC
tagctgcttactgataacct

SEQ ID NO: 86530 - DNA, 20 bp, Artificial Sequence
  Description of Artificial Sequence: Synthetic oligonucleotide
  Target: ATXN2; (+) strand; PAM type: YTN; PAM sequence: CTA
gctgcttactgataaccttc

SEQ ID NO: 86531 - DNA, 20 bp, Artificial Sequence
  Description of Artificial Sequence: Synthetic oligonucleotide
  Target: ATXN2; (+) strand; PAM type: YTN; PAM sequence: CTG
cttactgataaccttcacat

SEQ ID NO: 86532 - DNA, 20 bp, Artificial Sequence
  Description of Artificial Sequence: Synthetic oligonucleotide
  Target: ATXN2; (+) strand; PAM type: YTN; PAM sequence: CTT
actgataaccttcacattct

SEQ ID NO: 86533 - DNA, 20 bp, Artificial Sequence
  Description of Artificial Sequence: Synthetic oligonucleotide
  Target: ATXN2; (+) strand; PAM type: YTN; PAM sequence: TTA
ctgataaccttcacattcta

SEQ ID NO: 86534 - DNA, 20 bp, Artificial Sequence
  Description of Artificial Sequence: Synthetic oligonucleotide
  Target: ATXN2; (+) strand; PAM type: YTN; PAM sequence: CTG
ataaccttcacattctactt

SEQ ID NO: 86535 - DNA, 20 bp, Artificial Sequence
  Description of Artificial Sequence: Synthetic oligonucleotide
  Target: ATXN2; (+) strand; PAM type: YTN; PAM sequence: CTT
cacattctacttggccttca

SEQ ID NO: 86536 - DNA, 20 bp, Artificial Sequence
  Description of Artificial Sequence: Synthetic oligonucleotide
  Target: ATXN2; (+) strand; PAM type: YTN; PAM sequence: TTC
acattctacttggccttcac

SEQ ID NO: 86537 - DNA, 20 bp, Artificial Sequence
  Description of Artificial Sequence: Synthetic oligonucleotide
  Target: ATXN2; (+) strand; PAM type: YTN; PAM sequence: TTC
tacttggccttcacagaaag

SEQ ID NO: 86538 - DNA, 20 bp, Artificial Sequence
  Description of Artificial Sequence: Synthetic oligonucleotide
  Target: ATXN2; (+) strand; PAM type: YTN; PAM sequence: CTA
cttggccttcacagaaagtt

SEQ ID NO: 86539 - DNA, 20 bp, Artificial Sequence
  Description of Artificial Sequence: Synthetic oligonucleotide
  Target: ATXN2; (+) strand; PAM type: YTN; PAM sequence: CTT
ggccttcacagaaagttggc

SEQ ID NO: 86540 - DNA, 20 bp, Artificial Sequence
  Description of Artificial Sequence: Synthetic oligonucleotide
  Target: ATXN2; (+) strand; PAM type: YTN; PAM sequence: TTG
gccttcacagaaagttggct

SEQ ID NO: 86541 - DNA, 20 bp, Artificial Sequence
  Description of Artificial Sequence: Synthetic oligonucleotide
  Target: ATXN2; (+) strand; PAM type: YTN; PAM sequence: CTT
cacagaaagttggctaaagc

SEQ ID NO: 86542 - DNA, 20 bp, Artificial Sequence
  Description of Artificial Sequence: Synthetic oligonucleotide
  Target: ATXN2; (+) strand; PAM type: YTN; PAM sequence: TTC
acagaaagttggctaaagct

SEQ ID NO: 86543 - DNA, 20 bp, Artificial Sequence
  Description of Artificial Sequence: Synthetic oligonucleotide
  Target: ATXN2; (+) strand; PAM type: YTN; PAM sequence: TTG
gctaaagctggtattacctg

SEQ ID NO: 86544 - DNA, 20 bp, Artificial Sequence
  Description of Artificial Sequence: Synthetic oligonucleotide
  Target: ATXN2; (+) strand; PAM type: YTN; PAM sequence: CTA
aagctggtattacctgaggt

SEQ ID NO: 86545 - DNA, 20 bp, Artificial Sequence
  Description of Artificial Sequence: Synthetic oligonucleotide
  Target: ATXN2; (+) strand; PAM type: YTN; PAM sequence: CTG
gtattacctgaggtacgtgg

SEQ ID NO: 86546 - DNA, 20 bp, Artificial Sequence
  Description of Artificial Sequence: Synthetic oligonucleotide
  Target: ATXN2; (+) strand; PAM type: YTN; PAM sequence: TTA
cctgaggtacgtgggccatg

SEQ ID NO: 86547 - DNA, 20 bp, Artificial Sequence
  Description of Artificial Sequence: Synthetic oligonucleotide
  Target: ATXN2; (+) strand; PAM type: YTN; PAM sequence: CTG
aggtacgtgggccatgtggg

SEQ ID NO: 86548 - DNA, 20 bp, Artificial Sequence
  Description of Artificial Sequence: Synthetic oligonucleotide
  Target: ATXN2; (+) strand; PAM type: YTN; PAM sequence: TTG
gtatacgccggctgaacgtg

SEQ ID NO: 86549 - DNA, 20 bp, Artificial Sequence
  Description of Artificial Sequence: Synthetic oligonucleotide
  Target: ATXN2; (+) strand; PAM type: YTN; PAM sequence: CTG
aacgtgagaaggatggatcg

SEQ ID NO: 86550 - DNA, 20 bp, Artificial Sequence
  Description of Artificial Sequence: Synthetic oligonucleotide
  Target: ATXN2; (+) strand; PAM type: YTN; PAM sequence: CTG
ttgtgctgctgggaaactat

SEQ ID NO: 86551 - DNA, 20 bp, Artificial Sequence
  Description of Artificial Sequence: Synthetic oligonucleotide
  Target: ATXN2; (+) strand; PAM type: YTN; PAM sequence: TTG
tgctgctgggaaactattct

SEQ ID NO: 86552 - DNA, 20 bp, Artificial Sequence
  Description of Artificial Sequence: Synthetic oligonucleotide
  Target: ATXN2; (+) strand; PAM type: YTN; PAM sequence: CTG
ctgggaaactattctgtggc

SEQ ID NO: 86553 - DNA, 20 bp, Artificial Sequence
  Description of Artificial Sequence: Synthetic oligonucleotide
  Target: ATXN2; (+) strand; PAM type: YTN; PAM sequence: CTG
ggaaactattctgtggcgac

SEQ ID NO: 86554 - DNA, 20 bp, Artificial Sequence
  Description of Artificial Sequence: Synthetic oligonucleotide
  Target: ATXN2; (+) strand; PAM type: YTN; PAM sequence: CTA
ttctgtggcgactgcgtgtt

SEQ ID NO: 86555 - DNA, 20 bp, Artificial Sequence
  Description of Artificial Sequence: Synthetic oligonucleotide
  Target: ATXN2; (+) strand; PAM type: YTN; PAM sequence: TTC
tgtggcgactgcgtgttgga

SEQ ID NO: 86556 - DNA, 20 bp, Artificial Sequence
  Description of Artificial Sequence: Synthetic oligonucleotide
  Target: ATXN2; (+) strand; PAM type: YTN; PAM sequence: CTG
tggcgactgcgtgttggagg

SEQ ID NO: 86557 - DNA, 20 bp, Artificial Sequence
  Description of Artificial Sequence: Synthetic oligonucleotide
  Target: ATXN2; (+) strand; PAM type: YTN; PAM sequence: CTG
cgtgttggaggcaggtgtca

SEQ ID NO: 86558 - DNA, 20 bp, Artificial Sequence
  Description of Artificial Sequence: Synthetic oligonucleotide
  Target: ATXN2; (+) strand; PAM type: YTN; PAM sequence: TTG
gaggcaggtgtcatggaggg

SEQ ID NO: 86559 - DNA, 20 bp, Artificial Sequence
  Description of Artificial Sequence: Synthetic oligonucleotide
  Target: ATXN2; (+) strand; PAM type: YTN; PAM sequence: TTG
gcgcaagccccgcgtggtaa

SEQ ID NO: 86560 - DNA, 20 bp, Artificial Sequence
  Description of Artificial Sequence: Synthetic oligonucleotide
  Target: ATXN2; (+) strand; PAM type: YTN; PAM sequence: CTG
actgctgctgtggactggcc

SEQ ID NO: 86561 - DNA, 20 bp, Artificial Sequence
  Description of Artificial Sequence: Synthetic oligonucleotide
  Target: ATXN2; (+) strand; PAM type: YTN; PAM sequence: CTG
ctgctgtggactggccagat

SEQ ID NO: 86562 - DNA, 20 bp, Artificial Sequence
  Description of Artificial Sequence: Synthetic oligonucleotide
  Target: ATXN2; (+) strand; PAM type: YTN; PAM sequence: CTG
ctgtggactggccagatgga

SEQ ID NO: 86563 - DNA, 20 bp, Artificial Sequence
  Description of Artificial Sequence: Synthetic oligonucleotide
  Target: ATXN2; (+) strand; PAM type: YTN; PAM sequence: CTG
tggactggccagatggagag

SEQ ID NO: 86564 - DNA, 20 bp, Artificial Sequence
  Description of Artificial Sequence: Synthetic oligonucleotide
  Target: ATXN2; (+) strand; PAM type: YTN; PAM sequence: CTG
gccagatggagagcctgggc

SEQ ID NO: 86565 - DNA, 20 bp, Artificial Sequence
  Description of Artificial Sequence: Synthetic oligonucleotide
  Target: ATXN2; (+) strand; PAM type: YTN; PAM sequence: CTG
ggcggcctggtgctgatggt

SEQ ID NO: 86566 - DNA, 20 bp, Artificial Sequence
  Description of Artificial Sequence: Synthetic oligonucleotide
  Target: ATXN2; (+) strand; PAM type: YTN; PAM sequence: CTG
gtgctgatggtgctgcaaag

SEQ ID NO: 86567 - DNA, 20 bp, Artificial Sequence
  Description of Artificial Sequence: Synthetic oligonucleotide
  Target: ATXN2; (+) strand; PAM type: YTN; PAM sequence: CTG
atggtgctgcaaagcgacag

SEQ ID NO: 86568 - DNA, 20 bp, Artificial Sequence
  Description of Artificial Sequence: Synthetic oligonucleotide
  Target: ATXN2; (+) strand; PAM type: YTN; PAM sequence: CTG
caaagcgacaggaaagaatt

SEQ ID NO: 86569 - DNA, 20 bp, Artificial Sequence
  Description of Artificial Sequence: Synthetic oligonucleotide
  Target: ATXN2; (+) strand; PAM type: YTN; PAM sequence: TTG
agaggaaaacttctttaatg

SEQ ID NO: 86570 - DNA, 20 bp, Artificial Sequence
  Description of Artificial Sequence: Synthetic oligonucleotide
  Target: ATXN2; (+) strand; PAM type: YTN; PAM sequence: CTT
ctttaatgaaaagcagccaa

SEQ ID NO: 86571 - DNA, 20 bp, Artificial Sequence
  Description of Artificial Sequence: Synthetic oligonucleotide
  Target: ATXN2; (+) strand; PAM type: YTN; PAM sequence: TTC
tttaatgaaaagcagccaag

SEQ ID NO: 86572 - DNA, 20 bp, Artificial Sequence
  Description of Artificial Sequence: Synthetic oligonucleotide
  Target: ATXN2; (+) strand; PAM type: YTN; PAM sequence: CTT
taatgaaaagcagccaaggg

SEQ ID NO: 86573 - DNA, 20 bp, Artificial Sequence
  Description of Artificial Sequence: Synthetic oligonucleotide
  Target: ATXN2; (+) strand; PAM type: YTN; PAM sequence: TTT
aatgaaaagcagccaaggga

SEQ ID NO: 86574 - DNA, 20 bp, Artificial Sequence
  Description of Artificial Sequence: Synthetic oligonucleotide
  Target: ATXN2; (+) strand; PAM type: YTN; PAM sequence: TTA
atgaaaagcagccaagggat

SEQ ID NO: 86575 - DNA, 20 bp, Artificial Sequence
  Description of Artificial Sequence: Synthetic oligonucleotide
  Target: ATXN2; (+) strand; PAM type: YTN; PAM sequence: CTA
agctttgcacacttgggcct

SEQ ID NO: 86576 - DNA, 20 bp, Artificial Sequence
  Description of Artificial Sequence: Synthetic oligonucleotide
  Target: ATXN2; (+) strand; PAM type: YTN; PAM sequence: CTT
tgcacacttgggcctatgat

SEQ ID NO: 86577 - DNA, 20 bp, Artificial Sequence
  Description of Artificial Sequence: Synthetic oligonucleotide
  Target: ATXN2; (+) strand; PAM type: YTN; PAM sequence: TTT
gcacacttgggcctatgatg

SEQ ID NO: 86578 - DNA, 20 bp, Artificial Sequence
  Description of Artificial Sequence: Synthetic oligonucleotide
  Target: ATXN2; (+) strand; PAM type: YTN; PAM sequence: TTG
cacacttgggcctatgatga

SEQ ID NO: 86579 - DNA, 20 bp, Artificial Sequence
  Description of Artificial Sequence: Synthetic oligonucleotide
  Target: ATXN2; (+) strand; PAM type: YTN; PAM sequence: CTT
gggcctatgatgagggtcac

SEQ ID NO: 86580 - DNA, 20 bp, Artificial Sequence
  Description of Artificial Sequence: Synthetic oligonucleotide
  Target: ATXN2; (+) strand; PAM type: YTN; PAM sequence: TTG
ggcctatgatgagggtcact

SEQ ID NO: 86581 - DNA, 20 bp, Artificial Sequence
  Description of Artificial Sequence: Synthetic oligonucleotide
  Target: ATXN2; (+) strand; PAM type: YTN; PAM sequence: CTA
tgatgagggtcactggaaag

SEQ ID NO: 86582 - DNA, 20 bp, Artificial Sequence
  Description of Artificial Sequence: Synthetic oligonucleotide
  Target: ATXN2; (+) strand; PAM type: YTN; PAM sequence: CTG
gaaagtacaggagaatgtac

SEQ ID NO: 86583 - DNA, 20 bp, Artificial Sequence
  Description of Artificial Sequence: Synthetic oligonucleotide
  Target: ATXN2; (+) strand; PAM type: YTN; PAM sequence: CTG
gaggtgcctcccatctggac

SEQ ID NO: 86584 - DNA, 20 bp, Artificial Sequence
  Description of Artificial Sequence: Synthetic oligonucleotide
  Target: ATXN2; (+) strand; PAM type: YTN; PAM sequence: CTC
ccatctggacaactcctttc

SEQ ID NO: 86585 - DNA, 20 bp, Artificial Sequence
  Description of Artificial Sequence: Synthetic oligonucleotide
  Target: ATXN2; (+) strand; PAM type: YTN; PAM sequence: CTG
gacaactcctttctagggta

SEQ ID NO: 86586 - DNA, 20 bp, Artificial Sequence
  Description of Artificial Sequence: Synthetic oligonucleotide
  Target: ATXN2; (+) strand; PAM type: YTN; PAM sequence: CTC
ctttctagggtacagaagcc

SEQ ID NO: 86587 - DNA, 20 bp, Artificial Sequence
  Description of Artificial Sequence: Synthetic oligonucleotide
  Target: ATXN2; (+) strand; PAM type: YTN; PAM sequence: CTT
tctagggtacagaagcctga

SEQ ID NO: 86588 - DNA, 20 bp, Artificial Sequence
  Description of Artificial Sequence: Synthetic oligonucleotide
  Target: ATXN2; (+) strand; PAM type: YTN; PAM sequence: TTT
ctagggtacagaagcctgat

SEQ ID NO: 86589 - DNA, 20 bp, Artificial Sequence
  Description of Artificial Sequence: Synthetic oligonucleotide
  Target: ATXN2; (+) strand; PAM type: YTN; PAM sequence: TTC
tagggtacagaagcctgatt

SEQ ID NO: 86590 - DNA, 20 bp, Artificial Sequence
  Description of Artificial Sequence: Synthetic oligonucleotide
  Target: ATXN2; (+) strand; PAM type: YTN; PAM sequence: CTA
gggtacagaagcctgattct

SEQ ID NO: 86591 - DNA, 20 bp, Artificial Sequence
  Description of Artificial Sequence: Synthetic oligonucleotide
  Target: ATXN2; (+) strand; PAM type: YTN; PAM sequence: CTG
attctcagtctggcagttag

SEQ ID NO: 86592 - DNA, 20 bp, Artificial Sequence
  Description of Artificial Sequence: Synthetic oligonucleotide
  Target: ATXN2; (+) strand; PAM type: YTN; PAM sequence: TTC
tcagtctggcagttagaaac

SEQ ID NO: 86593 - DNA, 20 bp, Artificial Sequence
  Description of Artificial Sequence: Synthetic oligonucleotide
  Target: ATXN2; (+) strand; PAM type: YTN; PAM sequence: CTC
agtctggcagttagaaactt

SEQ ID NO: 86594 - DNA, 20 bp, Artificial Sequence
  Description of Artificial Sequence: Synthetic oligonucleotide
  Target: ATXN2; (+) strand; PAM type: YTN; PAM sequence: CTG
gcagttagaaacttctgagc

SEQ ID NO: 86595 - DNA, 20 bp, Artificial Sequence
  Description of Artificial Sequence: Synthetic oligonucleotide
  Target: ATXN2; (+) strand; PAM type: YTN; PAM sequence: TTA
gaaacttctgagcatacata

SEQ ID NO: 86596 - DNA, 20 bp, Artificial Sequence
  Description of Artificial Sequence: Synthetic oligonucleotide
  Target: ATXN2; (+) strand; PAM type: YTN; PAM sequence: CTT
ctgagcatacatactaaagt

SEQ ID NO: 86597 - DNA, 20 bp, Artificial Sequence
  Description of Artificial Sequence: Synthetic oligonucleotide
  Target: ATXN2; (+) strand; PAM type: YTN; PAM sequence: TTC
tgagcatacatactaaagtc

SEQ ID NO: 86598 - DNA, 20 bp, Artificial Sequence
  Description of Artificial Sequence: Synthetic oligonucleotide
  Target: ATXN2; (+) strand; PAM type: YTN; PAM sequence: CTG
agcatacatactaaagtcaa

SEQ ID NO: 86599 - DNA, 20 bp, Artificial Sequence
  Description of Artificial Sequence: Synthetic oligonucleotide
  Target: ATXN2; (+) strand; PAM type: YTN; PAM sequence: CTA
aagtcaaaaaagactactgc

SEQ ID NO: 86600 - DNA, 20 bp, Artificial Sequence
  Description of Artificial Sequence: Synthetic oligonucleotide
  Target: ATXN2; (+) strand; PAM type: YTN; PAM sequence: CTA
ctgccccagggaactgatag

SEQ ID NO: 86601 - DNA, 20 bp, Artificial Sequence
  Description of Artificial Sequence: Synthetic oligonucleotide
  Target: ATXN2; (+) strand; PAM type: YTN; PAM sequence: CTG
ccccagggaactgatagata

SEQ ID NO: 86602 - DNA, 20 bp, Artificial Sequence
  Description of Artificial Sequence: Synthetic oligonucleotide
  Target: ATXN2; (+) strand; PAM type: YTN; PAM sequence: CTG
atagatatcaaagacatctt

SEQ ID NO: 86603 - DNA, 20 bp, Artificial Sequence
  Description of Artificial Sequence: Synthetic oligonucleotide
  Target: ATXN2; (+) strand; PAM type: YTN; PAM sequence: CTT
taactgcctccattagcaaa

SEQ ID NO: 86604 - DNA, 20 bp, Artificial Sequence
  Description of Artificial Sequence: Synthetic oligonucleotide
  Target: ATXN2; (+) strand; PAM type: YTN; PAM sequence: TTT
aactgcctccattagcaaac

SEQ ID NO: 86605 - DNA, 20 bp, Artificial Sequence
  Description of Artificial Sequence: Synthetic oligonucleotide
  Target: ATXN2; (+) strand; PAM type: YTN; PAM sequence: TTA
actgcctccattagcaaaca

SEQ ID NO: 86606 - DNA, 20 bp, Artificial Sequence
  Description of Artificial Sequence: Synthetic oligonucleotide
  Target: ATXN2; (+) strand; PAM type: YTN; PAM sequence: CTG
cctccattagcaaacataat

SEQ ID NO: 86607 - DNA, 20 bp, Artificial Sequence
  Description of Artificial Sequence: Synthetic oligonucleotide
  Target: ATXN2; (+) strand; PAM type: YTN; PAM sequence: CTC
cattagcaaacataattcaa

SEQ ID NO: 86608 - DNA, 20 bp, Artificial Sequence
  Description of Artificial Sequence: Synthetic oligonucleotide
  Target: ATXN2; (+) strand; PAM type: YTN; PAM sequence: TTA
gcaaacataattcaagaagc

SEQ ID NO: 86609 - DNA, 20 bp, Artificial Sequence
  Description of Artificial Sequence: Synthetic oligonucleotide
  Target: ATXN2; (+) strand; PAM type: YTN; PAM sequence: TTC
aagaagctcataggaaaata

SEQ ID NO: 86610 - DNA, 20 bp, Artificial Sequence
  Description of Artificial Sequence: Synthetic oligonucleotide
  Target: ATXN2; (+) strand; PAM type: YTN; PAM sequence: CTC
ataggaaaataacctcatca

SEQ ID NO: 86611 - DNA, 20 bp, Artificial Sequence
  Description of Artificial Sequence: Synthetic oligonucleotide
  Target: ATXN2; (+) strand; PAM type: YTN; PAM sequence: CTC
atcacataaaccttagaaat

SEQ ID NO: 86612 - DNA, 20 bp, Artificial Sequence
  Description of Artificial Sequence: Synthetic oligonucleotide
  Target: ATXN2; (+) strand; PAM type: YTN; PAM sequence: CTT
agaaattaaaaagtcccaag

SEQ ID NO: 86613 - DNA, 20 bp, Artificial Sequence
  Description of Artificial Sequence: Synthetic oligonucleotide
  Target: ATXN2; (+) strand; PAM type: YTN; PAM sequence: TTA
gaaattaaaaagtcccaagc

SEQ ID NO: 86614 - DNA, 20 bp, Artificial Sequence
  Description of Artificial Sequence: Synthetic oligonucleotide
  Target: ATXN2; (+) strand; PAM type: YTN; PAM sequence: TTA
aaaagtcccaagcaaatagg

SEQ ID NO: 86615 - DNA, 20 bp, Artificial Sequence
  Description of Artificial Sequence: Synthetic oligonucleotide
  Target: ATXN2; (+) strand; PAM type: YTN; PAM sequence: TTT
gccttatgaactttatgtta

SEQ ID NO: 86616 - DNA, 20 bp, Artificial Sequence
  Description of Artificial Sequence: Synthetic oligonucleotide
  Target: ATXN2; (+) strand; PAM type: YTN; PAM sequence: TTG
ccttatgaactttatgttaa

SEQ ID NO: 86617 - DNA, 20 bp, Artificial Sequence
  Description of Artificial Sequence: Synthetic oligonucleotide
  Target: ATXN2; (+) strand; PAM type: YTN; PAM sequence: CTT
atgaactttatgttaaattt

SEQ ID NO: 86618 - DNA, 20 bp, Artificial Sequence
  Description of Artificial Sequence: Synthetic oligonucleotide
  Target: ATXN2; (+) strand; PAM type: YTN; PAM sequence: TTA
tgaactttatgttaaatttg

SEQ ID NO: 86619 - DNA, 20 bp, Artificial Sequence
  Description of Artificial Sequence: Synthetic oligonucleotide
  Target: ATXN2; (+) strand; PAM type: YTN; PAM sequence: CTT
tatgttaaatttgatttttc

SEQ ID NO: 86620 - DNA, 20 bp, Artificial Sequence
  Description of Artificial Sequence: Synthetic oligonucleotide
  Target: ATXN2; (+) strand; PAM type: YTN; PAM sequence: TTT
atgttaaatttgatttttca

SEQ ID NO: 86621 - DNA, 20 bp, Artificial Sequence
  Description of Artificial Sequence: Synthetic oligonucleotide
  Target: ATXN2; (+) strand; PAM type: YTN; PAM sequence: TTA
tgttaaatttgatttttcat

SEQ ID NO: 86622 - DNA, 20 bp, Artificial Sequence
  Description of Artificial Sequence: Synthetic oligonucleotide
  Target: ATXN2; (+) strand; PAM type: YTN; PAM sequence: TTA
aatttgatttttcattactg

SEQ ID NO: 86623 - DNA, 20 bp, Artificial Sequence
  Description of Artificial Sequence: Synthetic oligonucleotide
  Target: ATXN2; (+) strand; PAM type: YTN; PAM sequence: TTT
gatttttcattactgcaagt

SEQ ID NO: 86624 - DNA, 20 bp, Artificial Sequence
  Description of Artificial Sequence: Synthetic oligonucleotide
  Target: ATXN2; (+) strand; PAM type: YTN; PAM sequence: TTG
atttttcattactgcaagtt

SEQ ID NO: 86625 - DNA, 20 bp, Artificial Sequence
  Description of Artificial Sequence: Synthetic oligonucleotide
  Target: ATXN2; (+) strand; PAM type: YTN; PAM sequence: TTT
ttcattactgcaagtttcca

SEQ ID NO: 86626 - DNA, 20 bp, Artificial Sequence
  Description of Artificial Sequence: Synthetic oligonucleotide
  Target: ATXN2; (+) strand; PAM type: YTN; PAM sequence: TTT
tcattactgcaagtttccag

SEQ ID NO: 86627 - DNA, 20 bp, Artificial Sequence
  Description of Artificial Sequence: Synthetic oligonucleotide
  Target: ATXN2; (+) strand; PAM type: YTN; PAM sequence: TTT
cattactgcaagtttccaga

SEQ ID NO: 86628 - DNA, 20 bp, Artificial Sequence
  Description of Artificial Sequence: Synthetic oligonucleotide
  Target: ATXN2; (+) strand; PAM type: YTN; PAM sequence: TTC
attactgcaagtttccagag

SEQ ID NO: 86629 - DNA, 20 bp, Artificial Sequence
  Description of Artificial Sequence: Synthetic oligonucleotide
  Target: ATXN2; (+) strand; PAM type: YTN; PAM sequence: TTA
ctgcaagtttccagagctta

SEQ ID NO: 86630 - DNA, 20 bp, Artificial Sequence
  Description of Artificial Sequence: Synthetic oligonucleotide
  Target: ATXN2; (+) strand; PAM type: YTN; PAM sequence: CTG
caagtttccagagcttatcc

SEQ ID NO: 86631 - DNA, 20 bp, Artificial Sequence
  Description of Artificial Sequence: Synthetic oligonucleotide
  Target: ATXN2; (+) strand; PAM type: YTN; PAM sequence: TTT
ccagagcttatccaatcacc

SEQ ID NO: 86632 - DNA, 20 bp, Artificial Sequence
  Description of Artificial Sequence: Synthetic oligonucleotide
  Target: ATXN2; (+) strand; PAM type: YTN; PAM sequence: TTC
cagagcttatccaatcacct

SEQ ID NO: 86633 - DNA, 20 bp, Artificial Sequence
  Description of Artificial Sequence: Synthetic oligonucleotide
  Target: ATXN2; (+) strand; PAM type: YTN; PAM sequence: CTT
atccaatcaccttattatca

SEQ ID NO: 86634 - DNA, 20 bp, Artificial Sequence
  Description of Artificial Sequence: Synthetic oligonucleotide
  Target: ATXN2; (+) strand; PAM type: YTN; PAM sequence: TTA
tccaatcaccttattatcaa

SEQ ID NO: 86635 - DNA, 20 bp, Artificial Sequence
  Description of Artificial Sequence: Synthetic oligonucleotide
  Target: ATXN2; (+) strand; PAM type: YTN; PAM sequence: CTT
attatcaacatgtatcttaa

SEQ ID NO: 86636 - DNA, 20 bp, Artificial Sequence
  Description of Artificial Sequence: Synthetic oligonucleotide
  Target: ATXN2; (+) strand; PAM type: YTN; PAM sequence: TTA
ttatcaacatgtatcttaaa

SEQ ID NO: 86637 - DNA, 20 bp, Artificial Sequence
  Description of Artificial Sequence: Synthetic oligonucleotide
  Target: ATXN2; (+) strand; PAM type: YTN; PAM sequence: TTA
tcaacatgtatcttaaatgt

SEQ ID NO: 86638 - DNA, 20 bp, Artificial Sequence
  Description of Artificial Sequence: Synthetic oligonucleotide
  Target: ATXN2; (+) strand; PAM type: YTN; PAM sequence: CTT
aaatgtgattttttttaatt

SEQ ID NO: 86639 - DNA, 20 bp, Artificial Sequence
  Description of Artificial Sequence: Synthetic oligonucleotide
  Target: ATXN2; (+) strand; PAM type: YTN; PAM sequence: TTA
aatgtgattttttttaattt

SEQ ID NO: 86640 - DNA, 20 bp, Artificial Sequence
  Description of Artificial Sequence: Synthetic oligonucleotide
  Target: ATXN2; (+) strand; PAM type: YTN; PAM sequence: TTT
tttttaattttttatttttt

SEQ ID NO: 86641 - DNA, 20 bp, Artificial Sequence
  Description of Artificial Sequence: Synthetic oligonucleotide
  Target: ATXN2; (+) strand; PAM type: YTN; PAM sequence: TTT
ttttaattttttattttttt

SEQ ID NO: 86642 - DNA, 20 bp, Artificial Sequence
  Description of Artificial Sequence: Synthetic oligonucleotide
  Target: ATXN2; (+) strand; PAM type: YTN; PAM sequence: TTT
tttaattttttatttttttg

SEQ ID NO: 86643 - DNA, 20 bp, Artificial Sequence
  Description of Artificial Sequence: Synthetic oligonucleotide
  Target: ATXN2; (+) strand; PAM type: YTN; PAM sequence: TTT
ttaattttttatttttttga

SEQ ID NO: 86644 - DNA, 20 bp, Artificial Sequence
  Description of Artificial Sequence: Synthetic oligonucleotide
  Target: ATXN2; (+) strand; PAM type: YTN; PAM sequence: TTT
taattttttatttttttgag

SEQ ID NO: 86645 - DNA, 20 bp, Artificial Sequence
  Description of Artificial Sequence: Synthetic oligonucleotide
  Target: ATXN2; (+) strand; PAM type: YTN; PAM sequence: TTT
aattttttatttttttgaga

SEQ ID NO: 86646 - DNA, 20 bp, Artificial Sequence
  Description of Artificial Sequence: Synthetic oligonucleotide
  Target: ATXN2; (+) strand; PAM type: YTN; PAM sequence: TTA
attttttatttttttgagac

SEQ ID NO: 86647 - DNA, 20 bp, Artificial Sequence
  Description of Artificial Sequence: Synthetic oligonucleotide
  Target: ATXN2; (+) strand; PAM type: YTN; PAM sequence: TTT
tttatttttttgagacagag

SEQ ID NO: 86648 - DNA, 20 bp, Artificial Sequence
  Description of Artificial Sequence: Synthetic oligonucleotide
  Target: ATXN2; (+) strand; PAM type: YTN; PAM sequence: TTT
ttatttttttgagacagagt

SEQ ID NO: 86649 - DNA, 20 bp, Artificial Sequence
  Description of Artificial Sequence: Synthetic oligonucleotide
  Target: ATXN2; (+) strand; PAM type: YTN; PAM sequence: TTT
tatttttttgagacagagtc

SEQ ID NO: 86650 - DNA, 20 bp, Artificial Sequence
  Description of Artificial Sequence: Synthetic oligonucleotide
  Target: ATXN2; (+) strand; PAM type: YTN; PAM sequence: TTT
atttttttgagacagagtct

SEQ ID NO: 86651 - DNA, 20 bp, Artificial Sequence
  Description of Artificial Sequence: Synthetic oligonucleotide
  Target: ATXN2; (+) strand; PAM type: YTN; PAM sequence: TTA
tttttttgagacagagtctc

SEQ ID NO: 86652 - DNA, 20 bp, Artificial Sequence
  Description of Artificial Sequence: Synthetic oligonucleotide
  Target: ATXN2; (+) strand; PAM type: YTN; PAM sequence: TTT
ttttgagacagagtctcgct

SEQ ID NO: 86653 - DNA, 20 bp, Artificial Sequence
  Description of Artificial Sequence: Synthetic oligonucleotide
  Target: ATXN2; (+) strand; PAM type: YTN; PAM sequence: TTT
tttgagacagagtctcgctg

SEQ ID NO: 86654 - DNA, 20 bp, Artificial Sequence
  Description of Artificial Sequence: Synthetic oligonucleotide
  Target: ATXN2; (+) strand; PAM type: YTN; PAM sequence: TTT
ttgagacagagtctcgctgt

SEQ ID NO: 86655 - DNA, 20 bp, Artificial Sequence
  Description of Artificial Sequence: Synthetic oligonucleotide
  Target: ATXN2; (+) strand; PAM type: YTN; PAM sequence: TTT
tgagacagagtctcgctgtt

SEQ ID NO: 86656 - DNA, 20 bp, Artificial Sequence
  Description of Artificial Sequence: Synthetic oligonucleotide
  Target: ATXN2; (+) strand; PAM type: YTN; PAM sequence: TTT
gagacagagtctcgctgttg

SEQ ID NO: 86657 - DNA, 20 bp, Artificial Sequence
  Description of Artificial Sequence: Synthetic oligonucleotide
  Target: ATXN2; (+) strand; PAM type: YTN; PAM sequence: TTG
agacagagtctcgctgttgt

SEQ ID NO: 86658 - DNA, 20 bp, Artificial Sequence
  Description of Artificial Sequence: Synthetic oligonucleotide
  Target: ATXN2; (+) strand; PAM type: YTN; PAM sequence: CTC
gctgttgtccaagctggagt

SEQ ID NO: 86659 - DNA, 20 bp, Artificial Sequence
  Description of Artificial Sequence: Synthetic oligonucleotide
  Target: ATXN2; (+) strand; PAM type: YTN; PAM sequence: CTG
ttgtccaagctggagtgcag

SEQ ID NO: 86660 - DNA, 20 bp, Artificial Sequence
  Description of Artificial Sequence: Synthetic oligonucleotide
  Target: ATXN2; (+) strand; PAM type: YTN; PAM sequence: TTG
tccaagctggagtgcagtgg

SEQ ID NO: 86661 - DNA, 20 bp, Artificial Sequence
  Description of Artificial Sequence: Synthetic oligonucleotide
  Target: ATXN2; (+) strand; PAM type: YTN; PAM sequence: CTG
gagtgcagtggcgcgatctc

SEQ ID NO: 86662 - DNA, 20 bp, Artificial Sequence
  Description of Artificial Sequence: Synthetic oligonucleotide
  Target: ATXN2; (+) strand; PAM type: YTN; PAM sequence: CTC
tgctcactgcaagctccgcc

SEQ ID NO: 86663 - DNA, 20 bp, Artificial Sequence
  Description of Artificial Sequence: Synthetic oligonucleotide
  Target: ATXN2; (+) strand; PAM type: YTN; PAM sequence: CTG
ctcactgcaagctccgcctc

SEQ ID NO: 86664 - DNA, 20 bp, Artificial Sequence
  Description of Artificial Sequence: Synthetic oligonucleotide
  Target: ATXN2; (+) strand; PAM type: YTN; PAM sequence: CTC
actgcaagctccgcctcccg

SEQ ID NO: 86665 - DNA, 20 bp, Artificial Sequence
  Description of Artificial Sequence: Synthetic oligonucleotide
  Target: ATXN2; (+) strand; PAM type: YTN; PAM sequence: CTG
caagctccgcctcccgggtt

SEQ ID NO: 86666 - DNA, 20 bp, Artificial Sequence
  Description of Artificial Sequence: Synthetic oligonucleotide
  Target: ATXN2; (+) strand; PAM type: YTN; PAM sequence: CTC
cgcctcccgggttcacgcca

SEQ ID NO: 86667 - DNA, 20 bp, Artificial Sequence
  Description of Artificial Sequence: Synthetic oligonucleotide
  Target: ATXN2; (+) strand; PAM type: YTN; PAM sequence: CTC
ccgggttcacgccattctcc

SEQ ID NO: 86668 - DNA, 20 bp, Artificial Sequence
  Description of Artificial Sequence: Synthetic oligonucleotide
  Target: ATXN2; (+) strand; PAM type: YTN; PAM sequence: TTC
acgccattctccttcctcag

SEQ ID NO: 86669 - DNA, 20 bp, Artificial Sequence
  Description of Artificial Sequence: Synthetic oligonucleotide
  Target: ATXN2; (+) strand; PAM type: YTN; PAM sequence: TTC
tccttcctcagcctcccgag

SEQ ID NO: 86670 - DNA, 20 bp, Artificial Sequence
  Description of Artificial Sequence: Synthetic oligonucleotide
  Target: ATXN2; (+) strand; PAM type: YTN; PAM sequence: CTC
cttcctcagcctcccgagaa

SEQ ID NO: 86671 - DNA, 20 bp, Artificial Sequence
  Description of Artificial Sequence: Synthetic oligonucleotide
  Target: ATXN2; (+) strand; PAM type: YTN; PAM sequence: CTT
cctcagcctcccgagaagct

SEQ ID NO: 86672 - DNA, 20 bp, Artificial Sequence
  Description of Artificial Sequence: Synthetic oligonucleotide
  Target: ATXN2; (+) strand; PAM type: YTN; PAM sequence: TTC
ctcagcctcccgagaagctg

SEQ ID NO: 86673 - DNA, 20 bp, Artificial Sequence
  Description of Artificial Sequence: Synthetic oligonucleotide
  Target: ATXN2; (+) strand; PAM type: YTN; PAM sequence: CTC
agcctcccgagaagctggga

SEQ ID NO: 86674 - DNA, 20 bp, Artificial Sequence
  Description of Artificial Sequence: Synthetic oligonucleotide
  Target: ATXN2; (+) strand; PAM type: YTN; PAM sequence: CTC
ccgagaagctgggactacag

SEQ ID NO: 86675 - DNA, 20 bp, Artificial Sequence
  Description of Artificial Sequence: Synthetic oligonucleotide
  Target: ATXN2; (+) strand; PAM type: YTN; PAM sequence: CTG
ggactacaggcgcccaccac

SEQ ID NO: 86676 - DNA, 20 bp, Artificial Sequence
  Description of Artificial Sequence: Synthetic oligonucleotide
  Target: ATXN2; (+) strand; PAM type: YTN; PAM sequence: CTA
caggcgcccaccaccacgcc

SEQ ID NO: 86677 - DNA, 20 bp, Artificial Sequence
  Description of Artificial Sequence: Synthetic oligonucleotide
  Target: ATXN2; (+) strand; PAM type: YTN; PAM sequence: CTA
atttttttgtatttttatta

SEQ ID NO: 86678 - DNA, 20 bp, Artificial Sequence
  Description of Artificial Sequence: Synthetic oligonucleotide
  Target: ATXN2; (+) strand; PAM type: YTN; PAM sequence: TTT
ttttgtatttttattagaga

SEQ ID NO: 86679 - DNA, 20 bp, Artificial Sequence
  Description of Artificial Sequence: Synthetic oligonucleotide
  Target: ATXN2; (+) strand; PAM type: YTN; PAM sequence: TTT
tttgtatttttattagagac

SEQ ID NO: 86680 - DNA, 20 bp, Artificial Sequence
  Description of Artificial Sequence: Synthetic oligonucleotide
  Target: ATXN2; (+) strand; PAM type: YTN; PAM sequence: TTT
ttgtatttttattagagacg

SEQ ID NO: 86681 - DNA, 20 bp, Artificial Sequence
  Description of Artificial Sequence: Synthetic oligonucleotide
  Target: ATXN2; (+) strand; PAM type: YTN; PAM sequence: TTT
tgtatttttattagagacgg

SEQ ID NO: 86682 - DNA, 20 bp, Artificial Sequence
  Description of Artificial Sequence: Synthetic oligonucleotide
  Target: ATXN2; (+) strand; PAM type: YTN; PAM sequence: TTT
gtatttttattagagacgga

SEQ ID NO: 86683 - DNA, 20 bp, Artificial Sequence
  Description of Artificial Sequence: Synthetic oligonucleotide
  Target: ATXN2; (+) strand; PAM type: YTN; PAM sequence: TTG
tatttttattagagacggag

SEQ ID NO: 86684 - DNA, 20 bp, Artificial Sequence
  Description of Artificial Sequence: Synthetic oligonucleotide
  Target: ATXN2; (+) strand; PAM type: YTN; PAM sequence: TTT
ttattagagacggagtttca

SEQ ID NO: 86685 - DNA, 20 bp, Artificial Sequence
  Description of Artificial Sequence: Synthetic oligonucleotide
  Target: ATXN2; (+) strand; PAM type: YTN; PAM sequence: TTT
tattagagacggagtttcac

SEQ ID NO: 86686 - DNA, 20 bp, Artificial Sequence
  Description of Artificial Sequence: Synthetic oligonucleotide
  Target: ATXN2; (+) strand; PAM type: YTN; PAM sequence: TTT
attagagacggagtttcaca

SEQ ID NO: 86687 - DNA, 20 bp, Artificial Sequence
  Description of Artificial Sequence: Synthetic oligonucleotide
  Target: ATXN2; (+) strand; PAM type: YTN; PAM sequence: TTA
ttagagacggagtttcacag

SEQ ID NO: 86688 - DNA, 20 bp, Artificial Sequence
  Description of Artificial Sequence: Synthetic oligonucleotide
  Target: ATXN2; (+) strand; PAM type: YTN; PAM sequence: TTA
gagacggagtttcacagtgt

SEQ ID NO: 86689 - DNA, 20 bp, Artificial Sequence
  Description of Artificial Sequence: Synthetic oligonucleotide
  Target: ATXN2; (+) strand; PAM type: YTN; PAM sequence: TTT
cacagtgttcgccaggatgg

SEQ ID NO: 86690 - DNA, 20 bp, Artificial Sequence
  Description of Artificial Sequence: Synthetic oligonucleotide
  Target: ATXN2; (+) strand; PAM type: YTN; PAM sequence: TTC
acagtgttcgccaggatggt

SEQ ID NO: 86691 - DNA, 20 bp, Artificial Sequence
  Description of Artificial Sequence: Synthetic oligonucleotide
  Target: ATXN2; (+) strand; PAM type: YTN; PAM sequence: TTC
gccaggatggtctcaatctc

SEQ ID NO: 86692 - DNA, 20 bp, Artificial Sequence
  Description of Artificial Sequence: Synthetic oligonucleotide
  Target: ATXN2; (+) strand; PAM type: YTN; PAM sequence: CTC
aatctcctgacctcgtgatc

SEQ ID NO: 86693 - DNA, 20 bp, Artificial Sequence
  Description of Artificial Sequence: Synthetic oligonucleotide
  Target: ATXN2; (+) strand; PAM type: YTN; PAM sequence: CTC
ctgacctcgtgatccacccg

SEQ ID NO: 86694 - DNA, 20 bp, Artificial Sequence
  Description of Artificial Sequence: Synthetic oligonucleotide
  Target: ATXN2; (+) strand; PAM type: YTN; PAM sequence: CTG
acctcgtgatccacccgcct

SEQ ID NO: 86695 - DNA, 20 bp, Artificial Sequence
  Description of Artificial Sequence: Synthetic oligonucleotide
  Target: ATXN2; (+) strand; PAM type: YTN; PAM sequence: CTC
gtgatccacccgcctcggcc

SEQ ID NO: 86696 - DNA, 20 bp, Artificial Sequence
  Description of Artificial Sequence: Synthetic oligonucleotide
  Target: ATXN2; (+) strand; PAM type: YTN; PAM sequence: CTC
ggcctcccaaagtggtggga

SEQ ID NO: 86697 - DNA, 20 bp, Artificial Sequence
  Description of Artificial Sequence: Synthetic oligonucleotide
  Target: ATXN2; (+) strand; PAM type: YTN; PAM sequence: CTC
ccaaagtggtgggattacag

SEQ ID NO: 86698 - DNA, 20 bp, Artificial Sequence
  Description of Artificial Sequence: Synthetic oligonucleotide
  Target: ATXN2; (+) strand; PAM type: YTN; PAM sequence: TTA
caggcgtgagccactgcgcc

SEQ ID NO: 86699 - DNA, 20 bp, Artificial Sequence
  Description of Artificial Sequence: Synthetic oligonucleotide
  Target: ATXN2; (+) strand; PAM type: YTN; PAM sequence: CTG
cgcccagcctttaaatgtga

SEQ ID NO: 86700 - DNA, 20 bp, Artificial Sequence
  Description of Artificial Sequence: Synthetic oligonucleotide
  Target: ATXN2; (+) strand; PAM type: YTN; PAM sequence: CTT
taaatgtgattcttaaaacc

SEQ ID NO: 86701 - DNA, 20 bp, Artificial Sequence
  Description of Artificial Sequence: Synthetic oligonucleotide
  Target: ATXN2; (+) strand; PAM type: YTN; PAM sequence: TTT
aaatgtgattcttaaaacca

SEQ ID NO: 86702 - DNA, 20 bp, Artificial Sequence
  Description of Artificial Sequence: Synthetic oligonucleotide
  Target: ATXN2; (+) strand; PAM type: YTN; PAM sequence: TTA
aatgtgattcttaaaaccac

SEQ ID NO: 86703 - DNA, 20 bp, Artificial Sequence
  Description of Artificial Sequence: Synthetic oligonucleotide
  Target: ATXN2; (+) strand; PAM type: YTN; PAM sequence: TTC
ttaaaaccaccaccccaggg

SEQ ID NO: 86704 - DNA, 20 bp, Artificial Sequence
  Description of Artificial Sequence: Synthetic oligonucleotide
  Target: ATXN2; (+) strand; PAM type: YTN; PAM sequence: CTT
aaaaccaccaccccaggggc

SEQ ID NO: 86705 - DNA, 20 bp, Artificial Sequence
  Description of Artificial Sequence: Synthetic oligonucleotide
  Target: ATXN2; (+) strand; PAM type: YTN; PAM sequence: TTA
aaaccaccaccccaggggca

SEQ ID NO: 86706 - DNA, 20 bp, Artificial Sequence
  Description of Artificial Sequence: Synthetic oligonucleotide
  Target: ATXN2; (+) strand; PAM type: YTN; PAM sequence: CTG
tatccatcttcacgagggtg

SEQ ID NO: 86707 - DNA, 20 bp, Artificial Sequence
  Description of Artificial Sequence: Synthetic oligonucleotide
  Target: ATXN2; (+) strand; PAM type: YTN; PAM sequence: CTT
cacgagggtggacatgccat

SEQ ID NO: 86708 - DNA, 20 bp, Artificial Sequence
  Description of Artificial Sequence: Synthetic oligonucleotide
  Target: ATXN2; (+) strand; PAM type: YTN; PAM sequence: TTC
acgagggtggacatgccatg

SEQ ID NO: 86709 - DNA, 20 bp, Artificial Sequence
  Description of Artificial Sequence: Synthetic oligonucleotide
  Target: ATXN2; (+) strand; PAM type: YTN; PAM sequence: TTC
tgacgatgcgatacctggca

SEQ ID NO: 86710 - DNA, 20 bp, Artificial Sequence
  Description of Artificial Sequence: Synthetic oligonucleotide
  Target: ATXN2; (+) strand; PAM type: YTN; PAM sequence: CTG
acgatgcgatacctggcacc

SEQ ID NO: 86711 - DNA, 20 bp, Artificial Sequence
  Description of Artificial Sequence: Synthetic oligonucleotide
  Target: ATXN2; (+) strand; PAM type: YTN; PAM sequence: CTG
gcacctgaagaaagcactca

SEQ ID NO: 86712 - DNA, 20 bp, Artificial Sequence
  Description of Artificial Sequence: Synthetic oligonucleotide
  Target: ATXN2; (+) strand; PAM type: YTN; PAM sequence: CTG
aagaaagcactcagatacta

SEQ ID NO: 86713 - DNA, 20 bp, Artificial Sequence
  Description of Artificial Sequence: Synthetic oligonucleotide
  Target: ATXN2; (+) strand; PAM type: YTN; PAM sequence: CTC
agatactaggataaagaagc

SEQ ID NO: 86714 - DNA, 20 bp, Artificial Sequence
  Description of Artificial Sequence: Synthetic oligonucleotide
  Target: ATXN2; (+) strand; PAM type: YTN; PAM sequence: CTA
ggataaagaagccactccat

SEQ ID NO: 86715 - DNA, 20 bp, Artificial Sequence
  Description of Artificial Sequence: Synthetic oligonucleotide
  Target: ATXN2; (+) strand; PAM type: YTN; PAM sequence: CTC
catgcagacctctgagttgc

SEQ ID NO: 86716 - DNA, 20 bp, Artificial Sequence
  Description of Artificial Sequence: Synthetic oligonucleotide
  Target: ATXN2; (+) strand; PAM type: YTN; PAM sequence: CTC
tgagttgcccttacctgaac

SEQ ID NO: 86717 - DNA, 20 bp, Artificial Sequence
  Description of Artificial Sequence: Synthetic oligonucleotide
  Target: ATXN2; (+) strand; PAM type: YTN; PAM sequence: CTG
agttgcccttacctgaacag

SEQ ID NO: 86718 - DNA, 20 bp, Artificial Sequence
  Description of Artificial Sequence: Synthetic oligonucleotide
  Target: ATXN2; (+) strand; PAM type: YTN; PAM sequence: TTG
cccttacctgaacaggactg

SEQ ID NO: 86719 - DNA, 20 bp, Artificial Sequence
  Description of Artificial Sequence: Synthetic oligonucleotide
  Target: ATXN2; (+) strand; PAM type: YTN; PAM sequence: CTT
acctgaacaggactgggtgc

SEQ ID NO: 86720 - DNA, 20 bp, Artificial Sequence
  Description of Artificial Sequence: Synthetic oligonucleotide
  Target: ATXN2; (+) strand; PAM type: YTN; PAM sequence: TTA
cctgaacaggactgggtgca

SEQ ID NO: 86721 - DNA, 20 bp, Artificial Sequence
  Description of Artificial Sequence: Synthetic oligonucleotide
  Target: ATXN2; (+) strand; PAM type: YTN; PAM sequence: CTG
aacaggactgggtgcaggat

SEQ ID NO: 86722 - DNA, 20 bp, Artificial Sequence
  Description of Artificial Sequence: Synthetic oligonucleotide
  Target: ATXN2; (+) strand; PAM type: YTN; PAM sequence: CTG
ggtgcaggatgacttccacc

SEQ ID NO: 86723 - DNA, 20 bp, Artificial Sequence
  Description of Artificial Sequence: Synthetic oligonucleotide
  Target: ATXN2; (+) strand; PAM type: YTN; PAM sequence: CTT
ccaccatgttggctttgctg

SEQ ID NO: 86724 - DNA, 20 bp, Artificial Sequence
  Description of Artificial Sequence: Synthetic oligonucleotide
  Target: ATXN2; (+) strand; PAM type: YTN; PAM sequence: TTC
caccatgttggctttgctgc

SEQ ID NO: 86725 - DNA, 20 bp, Artificial Sequence
  Description of Artificial Sequence: Synthetic oligonucleotide
  Target: ATXN2; (+) strand; PAM type: YTN; PAM sequence: TTG
gctttgctgctgtccagtgg

SEQ ID NO: 86726 - DNA, 20 bp, Artificial Sequence
  Description of Artificial Sequence: Synthetic oligonucleotide
  Target: ATXN2; (+) strand; PAM type: YTN; PAM sequence: CTT
tgctgctgtccagtgggggt

SEQ ID NO: 86727 - DNA, 20 bp, Artificial Sequence
  Description of Artificial Sequence: Synthetic oligonucleotide
  Target: ATXN2; (+) strand; PAM type: YTN; PAM sequence: TTT
gctgctgtccagtgggggta

SEQ ID NO: 86728 - DNA, 20 bp, Artificial Sequence
  Description of Artificial Sequence: Synthetic oligonucleotide
  Target: ATXN2; (+) strand; PAM type: YTN; PAM sequence: TTG
ctgctgtccagtgggggtag

SEQ ID NO: 86729 - DNA, 20 bp, Artificial Sequence
  Description of Artificial Sequence: Synthetic oligonucleotide
  Target: ATXN2; (+) strand; PAM type: YTN; PAM sequence: CTG
ctgtccagtgggggtagctg

SEQ ID NO: 86730 - DNA, 20 bp, Artificial Sequence
  Description of Artificial Sequence: Synthetic oligonucleotide
  Target: ATXN2; (+) strand; PAM type: YTN; PAM sequence: CTG
tccagtgggggtagctgaag

SEQ ID NO: 86731 - DNA, 20 bp, Artificial Sequence
  Description of Artificial Sequence: Synthetic oligonucleotide
  Target: ATXN2; (+) strand; PAM type: YTN; PAM sequence: CTG
aaggctgagggtgtggagta

SEQ ID NO: 86732 - DNA, 20 bp, Artificial Sequence
  Description of Artificial Sequence: Synthetic oligonucleotide
  Target: ATXN2; (+) strand; PAM type: YTN; PAM sequence: CTG
agggtgtggagtatgtgggt

SEQ ID NO: 86733 - DNA, 20 bp, Artificial Sequence
  Description of Artificial Sequence: Synthetic oligonucleotide
  Target: ATXN2; (+) strand; PAM type: YTN; PAM sequence: TTA
gggtgcgcatactgctgagc

SEQ ID NO: 86734 - DNA, 20 bp, Artificial Sequence
  Description of Artificial Sequence: Synthetic oligonucleotide
  Target: ATXN2; (+) strand; PAM type: YTN; PAM sequence: CTG
ctgagcaagggagcccgtgg

SEQ ID NO: 86735 - DNA, 20 bp, Artificial Sequence
  Description of Artificial Sequence: Synthetic oligonucleotide
  Target: ATXN2; (+) strand; PAM type: YTN; PAM sequence: CTG
agcaagggagcccgtggaaa

SEQ ID NO: 86736 - DNA, 20 bp, Artificial Sequence
  Description of Artificial Sequence: Synthetic oligonucleotide
  Target: ATXN2; (+) strand; PAM type: YTN; PAM sequence: CTA
aagtgaaagaaaaaggagca

SEQ ID NO: 86737 - DNA, 20 bp, Artificial Sequence
  Description of Artificial Sequence: Synthetic oligonucleotide
  Target: ATXN2; (+) strand; PAM type: YTN; PAM sequence: CTG
acaacctccatcgctcctct

SEQ ID NO: 86738 - DNA, 20 bp, Artificial Sequence
  Description of Artificial Sequence: Synthetic oligonucleotide
  Target: ATXN2; (+) strand; PAM type: YTN; PAM sequence: CTC
catcgctcctctacacttca

SEQ ID NO: 86739 - DNA, 20 bp, Artificial Sequence
  Description of Artificial Sequence: Synthetic oligonucleotide
  Target: ATXN2; (+) strand; PAM type: YTN; PAM sequence: CTC
ctctacacttcatcaactga

SEQ ID NO: 86740 - DNA, 20 bp, Artificial Sequence
  Description of Artificial Sequence: Synthetic oligonucleotide
  Target: ATXN2; (+) strand; PAM type: YTN; PAM sequence: CTC
tacacttcatcaactgaact

SEQ ID NO: 86741 - DNA, 20 bp, Artificial Sequence
  Description of Artificial Sequence: Synthetic oligonucleotide
  Target: ATXN2; (+) strand; PAM type: YTN; PAM sequence: CTA
cacttcatcaactgaacttt

SEQ ID NO: 86742 - DNA, 20 bp, Artificial Sequence
  Description of Artificial Sequence: Synthetic oligonucleotide
  Target: ATXN2; (+) strand; PAM type: YTN; PAM sequence: CTT
catcaactgaactttcttga

SEQ ID NO: 86743 - DNA, 20 bp, Artificial Sequence
  Description of Artificial Sequence: Synthetic oligonucleotide
  Target: ATXN2; (+) strand; PAM type: YTN; PAM sequence: TTC
atcaactgaactttcttgat

SEQ ID NO: 86744 - DNA, 20 bp, Artificial Sequence
  Description of Artificial Sequence: Synthetic oligonucleotide
  Target: ATXN2; (+) strand; PAM type: YTN; PAM sequence: CTG
aactttcttgatggttacaa

SEQ ID NO: 86745 - DNA, 20 bp, Artificial Sequence
  Description of Artificial Sequence: Synthetic oligonucleotide
  Target: ATXN2; (+) strand; PAM type: YTN; PAM sequence: CTT
tcttgatggttacaatgcat

SEQ ID NO: 86746 - DNA, 20 bp, Artificial Sequence
  Description of Artificial Sequence: Synthetic oligonucleotide
  Target: ATXN2; (+) strand; PAM type: YTN; PAM sequence: TTT
cttgatggttacaatgcata

SEQ ID NO: 86747 - DNA, 20 bp, Artificial Sequence
  Description of Artificial Sequence: Synthetic oligonucleotide
  Target: ATXN2; (+) strand; PAM type: YTN; PAM sequence: TTC
ttgatggttacaatgcataa

SEQ ID NO: 86748 - DNA, 20 bp, Artificial Sequence
  Description of Artificial Sequence: Synthetic oligonucleotide
  Target: ATXN2; (+) strand; PAM type: YTN; PAM sequence: CTT
gatggttacaatgcataact

SEQ ID NO: 86749 - DNA, 20 bp, Artificial Sequence
  Description of Artificial Sequence: Synthetic oligonucleotide
  Target: ATXN2; (+) strand; PAM type: YTN; PAM sequence: TTG
atggttacaatgcataactc

SEQ ID NO: 86750 - DNA, 20 bp, Artificial Sequence
  Description of Artificial Sequence: Synthetic oligonucleotide
  Target: ATXN2; (+) strand; PAM type: YTN; PAM sequence: TTA
caatgcataactcacgccac

SEQ ID NO: 86751 - DNA, 20 bp, Artificial Sequence
  Description of Artificial Sequence: Synthetic oligonucleotide
  Target: ATXN2; (+) strand; PAM type: YTN; PAM sequence: CTC
acgccactaccaatttctat

SEQ ID NO: 86752 - DNA, 20 bp, Artificial Sequence
  Description of Artificial Sequence: Synthetic oligonucleotide
  Target: ATXN2; (+) strand; PAM type: YTN; PAM sequence: CTA
ccaatttctatagatgactc

SEQ ID NO: 86753 - DNA, 20 bp, Artificial Sequence
  Description of Artificial Sequence: Synthetic oligonucleotide
  Target: ATXN2; (+) strand; PAM type: YTN; PAM sequence: TTT
ctatagatgactccatttaa

SEQ ID NO: 86754 - DNA, 20 bp, Artificial Sequence
  Description of Artificial Sequence: Synthetic oligonucleotide
  Target: ATXN2; (+) strand; PAM type: YTN; PAM sequence: TTC
tatagatgactccatttaaa

SEQ ID NO: 86755 - DNA, 20 bp, Artificial Sequence
  Description of Artificial Sequence: Synthetic oligonucleotide
  Target: ATXN2; (+) strand; PAM type: YTN; PAM sequence: CTA
tagatgactccatttaaacc

SEQ ID NO: 86756 - DNA, 20 bp, Artificial Sequence
  Description of Artificial Sequence: Synthetic oligonucleotide
  Target: ATXN2; (+) strand; PAM type: YTN; PAM sequence: CTC
catttaaaccatccattgtc

SEQ ID NO: 86757 - DNA, 20 bp, Artificial Sequence
  Description of Artificial Sequence: Synthetic oligonucleotide
  Target: ATXN2; (+) strand; PAM type: YTN; PAM sequence: TTT
aaaccatccattgtcttgaa

SEQ ID NO: 86758 - DNA, 20 bp, Artificial Sequence
  Description of Artificial Sequence: Synthetic oligonucleotide
  Target: ATXN2; (+) strand; PAM type: YTN; PAM sequence: TTA
aaccatccattgtcttgaaa

SEQ ID NO: 86759 - DNA, 20 bp, Artificial Sequence
  Description of Artificial Sequence: Synthetic oligonucleotide
  Target: ATXN2; (+) strand; PAM type: YTN; PAM sequence: TTG
tcttgaaaaaataagtgtag

SEQ ID NO: 86760 - DNA, 20 bp, Artificial Sequence
  Description of Artificial Sequence: Synthetic oligonucleotide
  Target: ATXN2; (+) strand; PAM type: YTN; PAM sequence: CTT
gaaaaaataagtgtagctat

SEQ ID NO: 86761 - DNA, 20 bp, Artificial Sequence
  Description of Artificial Sequence: Synthetic oligonucleotide
  Target: ATXN2; (+) strand; PAM type: YTN; PAM sequence: TTG
aaaaaataagtgtagctatt

SEQ ID NO: 86762 - DNA, 20 bp, Artificial Sequence
  Description of Artificial Sequence: Synthetic oligonucleotide
  Target: ATXN2; (+) strand; PAM type: YTN; PAM sequence: CTA
ttgcttaacagactagcatt

SEQ ID NO: 86763 - DNA, 20 bp, Artificial Sequence
  Description of Artificial Sequence: Synthetic oligonucleotide
  Target: ATXN2; (+) strand; PAM type: YTN; PAM sequence: TTG
cttaacagactagcatttgg

SEQ ID NO: 86764 - DNA, 20 bp, Artificial Sequence
  Description of Artificial Sequence: Synthetic oligonucleotide
  Target: ATXN2; (+) strand; PAM type: YTN; PAM sequence: CTT
aacagactagcatttggttc

SEQ ID NO: 86765 - DNA, 20 bp, Artificial Sequence
  Description of Artificial Sequence: Synthetic oligonucleotide
  Target: ATXN2; (+) strand; PAM type: YTN; PAM sequence: TTA
acagactagcatttggttca

SEQ ID NO: 86766 - DNA, 20 bp, Artificial Sequence
  Description of Artificial Sequence: Synthetic oligonucleotide
  Target: ATXN2; (+) strand; PAM type: YTN; PAM sequence: CTA
gcatttggttcatataatac

SEQ ID NO: 86767 - DNA, 20 bp, Artificial Sequence
  Description of Artificial Sequence: Synthetic oligonucleotide
  Target: ATXN2; (+) strand; PAM type: YTN; PAM sequence: TTT
ggttcatataatacagctct

SEQ ID NO: 86768 - DNA, 20 bp, Artificial Sequence
  Description of Artificial Sequence: Synthetic oligonucleotide
  Target: ATXN2; (+) strand; PAM type: YTN; PAM sequence: TTG
gttcatataatacagctcta

SEQ ID NO: 86769 - DNA, 20 bp, Artificial Sequence
  Description of Artificial Sequence: Synthetic oligonucleotide
  Target: ATXN2; (+) strand; PAM type: YTN; PAM sequence: TTC
atataatacagctctacata

SEQ ID NO: 86770 - DNA, 20 bp, Artificial Sequence
  Description of Artificial Sequence: Synthetic oligonucleotide
  Target: ATXN2; (+) strand; PAM type: YTN; PAM sequence: CTC
tacatatgatattaaaatca

SEQ ID NO: 86771 - DNA, 20 bp, Artificial Sequence
  Description of Artificial Sequence: Synthetic oligonucleotide
  Target: ATXN2; (+) strand; PAM type: YTN; PAM sequence: CTA
catatgatattaaaatcaaa

SEQ ID NO: 86772 - DNA, 20 bp, Artificial Sequence
  Description of Artificial Sequence: Synthetic oligonucleotide
  Target: ATXN2; (+) strand; PAM type: YTN; PAM sequence: TTA
aaatcaaattagtttgcatt

SEQ ID NO: 86773 - DNA, 20 bp, Artificial Sequence
  Description of Artificial Sequence: Synthetic oligonucleotide
  Target: ATXN2; (+) strand; PAM type: YTN; PAM sequence: TTA
gtttgcatttactcttaacg

SEQ ID NO: 86774 - DNA, 20 bp, Artificial Sequence
  Description of Artificial Sequence: Synthetic oligonucleotide
  Target: ATXN2; (+) strand; PAM type: YTN; PAM sequence: TTT
gcatttactcttaacggtca

SEQ ID NO: 86775 - DNA, 20 bp, Artificial Sequence
  Description of Artificial Sequence: Synthetic oligonucleotide
  Target: ATXN2; (+) strand; PAM type: YTN; PAM sequence: TTG
catttactcttaacggtcac

SEQ ID NO: 86776 - DNA, 20 bp, Artificial Sequence
  Description of Artificial Sequence: Synthetic oligonucleotide
  Target: ATXN2; (+) strand; PAM type: YTN; PAM sequence: TTT
actcttaacggtcactaggt

SEQ ID NO: 86777 - DNA, 20 bp, Artificial Sequence
  Description of Artificial Sequence: Synthetic oligonucleotide
  Target: ATXN2; (+) strand; PAM type: YTN; PAM sequence: TTA
ctcttaacggtcactaggtt

SEQ ID NO: 86778 - DNA, 20 bp, Artificial Sequence
  Description of Artificial Sequence: Synthetic oligonucleotide
  Target: ATXN2; (+) strand; PAM type: YTN; PAM sequence: CTC
ttaacggtcactaggttttc

SEQ ID NO: 86779 - DNA, 20 bp, Artificial Sequence
  Description of Artificial Sequence: Synthetic oligonucleotide
  Target: ATXN2; (+) strand; PAM type: YTN; PAM sequence: CTT
aacggtcactaggttttccc

SEQ ID NO: 86780 - DNA, 20 bp, Artificial Sequence
  Description of Artificial Sequence: Synthetic oligonucleotide
  Target: ATXN2; (+) strand; PAM type: YTN; PAM sequence: TTA
acggtcactaggttttccca

SEQ ID NO: 86781 - DNA, 20 bp, Artificial Sequence
  Description of Artificial Sequence: Synthetic oligonucleotide
  Target: ATXN2; (+) strand; PAM type: YTN; PAM sequence: CTA
ggttttcccaaaaaggcaac

SEQ ID NO: 86782 - DNA, 20 bp, Artificial Sequence
  Description of Artificial Sequence: Synthetic oligonucleotide
  Target: ATXN2; (+) strand; PAM type: YTN; PAM sequence: TTT
tcccaaaaaggcaacttgaa

SEQ ID NO: 86783 - DNA, 20 bp, Artificial Sequence
  Description of Artificial Sequence: Synthetic oligonucleotide
  Target: ATXN2; (+) strand; PAM type: YTN; PAM sequence: TTT
cccaaaaaggcaacttgaag

SEQ ID NO: 86784 - DNA, 20 bp, Artificial Sequence
  Description of Artificial Sequence: Synthetic oligonucleotide
  Target: ATXN2; (+) strand; PAM type: YTN; PAM sequence: TTC
ccaaaaaggcaacttgaagg

SEQ ID NO: 86785 - DNA, 20 bp, Artificial Sequence
  Description of Artificial Sequence: Synthetic oligonucleotide
  Target: ATXN2; (+) strand; PAM type: YTN; PAM sequence: CTT
gaaggcataggcagaaacta

SEQ ID NO: 86786 - DNA, 20 bp, Artificial Sequence
  Description of Artificial Sequence: Synthetic oligonucleotide
  Target: ATXN2; (+) strand; PAM type: YTN; PAM sequence: TTG
aaggcataggcagaaactac

SEQ ID NO: 86787 - DNA, 20 bp, Artificial Sequence
  Description of Artificial Sequence: Synthetic oligonucleotide
  Target: ATXN2; (+) strand; PAM type: YTN; PAM sequence: CTA
ctcaaacaagtgcattttag

SEQ ID NO: 86788 - DNA, 20 bp, Artificial Sequence
  Description of Artificial Sequence: Synthetic oligonucleotide
  Target: ATXN2; (+) strand; PAM type: YTN; PAM sequence: CTC
aaacaagtgcattttaggtg

SEQ ID NO: 86789 - DNA, 20 bp, Artificial Sequence
  Description of Artificial Sequence: Synthetic oligonucleotide
  Target: ATXN2; (+) strand; PAM type: YTN; PAM sequence: TTT
taggtgcacactctttagct

SEQ ID NO: 86790 - DNA, 20 bp, Artificial Sequence
  Description of Artificial Sequence: Synthetic oligonucleotide
  Target: ATXN2; (+) strand; PAM type: YTN; PAM sequence: TTT
aggtgcacactctttagctc

SEQ ID NO: 86791 - DNA, 20 bp, Artificial Sequence
  Description of Artificial Sequence: Synthetic oligonucleotide
  Target: ATXN2; (+) strand; PAM type: YTN; PAM sequence: TTA
ggtgcacactctttagctca

SEQ ID NO: 86792 - DNA, 20 bp, Artificial Sequence
  Description of Artificial Sequence: Synthetic oligonucleotide
  Target: ATXN2; (+) strand; PAM type: YTN; PAM sequence: CTC
tttagctcaaggccatcatc

SEQ ID NO: 86793 - DNA, 20 bp, Artificial Sequence
  Description of Artificial Sequence: Synthetic oligonucleotide
  Target: ATXN2; (+) strand; PAM type: YTN; PAM sequence: CTT
tagctcaaggccatcatcag

SEQ ID NO: 86794 - DNA, 20 bp, Artificial Sequence
  Description of Artificial Sequence: Synthetic oligonucleotide
  Target: ATXN2; (+) strand; PAM type: YTN; PAM sequence: TTT
agctcaaggccatcatcagg

SEQ ID NO: 86795 - DNA, 20 bp, Artificial Sequence
  Description of Artificial Sequence: Synthetic oligonucleotide
  Target: ATXN2; (+) strand; PAM type: YTN; PAM sequence: TTA
gctcaaggccatcatcaggc

SEQ ID NO: 86796 - DNA, 20 bp, Artificial Sequence
  Description of Artificial Sequence: Synthetic oligonucleotide
  Target: ATXN2; (+) strand; PAM type: YTN; PAM sequence: CTC
aaggccatcatcaggctaac

SEQ ID NO: 86797 - DNA, 20 bp, Artificial Sequence
  Description of Artificial Sequence: Synthetic oligonucleotide
  Target: ATXN2; (+) strand; PAM type: YTN; PAM sequence: CTA
acctcaccatgctactgccc

SEQ ID NO: 86798 - DNA, 20 bp, Artificial Sequence
  Description of Artificial Sequence: Synthetic oligonucleotide
  Target: ATXN2; (+) strand; PAM type: YTN; PAM sequence: CTC
accatgctactgccctggag

SEQ ID NO: 86799 - DNA, 20 bp, Artificial Sequence
  Description of Artificial Sequence: Synthetic oligonucleotide
  Target: ATXN2; (+) strand; PAM type: YTN; PAM sequence: CTA
ctgccctggagcaatgtcct

SEQ ID NO: 86800 - DNA, 20 bp, Artificial Sequence
  Description of Artificial Sequence: Synthetic oligonucleotide
  Target: ATXN2; (+) strand; PAM type: YTN; PAM sequence: CTG
ccctggagcaatgtcctgag

SEQ ID NO: 86801 - DNA, 20 bp, Artificial Sequence
  Description of Artificial Sequence: Synthetic oligonucleotide
  Target: ATXN2; (+) strand; PAM type: YTN; PAM sequence: CTG
gagcaatgtcctgagggcac

SEQ ID NO: 86802 - DNA, 20 bp, Artificial Sequence
  Description of Artificial Sequence: Synthetic oligonucleotide
  Target: ATXN2; (+) strand; PAM type: YTN; PAM sequence: CTG
agggcacagactatattggg

SEQ ID NO: 86803 - DNA, 20 bp, Artificial Sequence
  Description of Artificial Sequence: Synthetic oligonucleotide
  Target: ATXN2; (+) strand; PAM type: YTN; PAM sequence: CTA
tattgggtgtggtgggggat

SEQ ID NO: 86804 - DNA, 20 bp, Artificial Sequence
  Description of Artificial Sequence: Synthetic oligonucleotide
  Target: ATXN2; (+) strand; PAM type: YTN; PAM sequence: TTG
ggtgtggtgggggatggggg

SEQ ID NO: 86805 - DNA, 20 bp, Artificial Sequence
  Description of Artificial Sequence: Synthetic oligonucleotide
  Target: ATXN2; (+) strand; PAM type: YTN; PAM sequence: CTG
tgtatggtatgtggcaaggc

SEQ ID NO: 86806 - DNA, 20 bp, Artificial Sequence
  Description of Artificial Sequence: Synthetic oligonucleotide
  Target: ATXN2; (+) strand; PAM type: YTN; PAM sequence: CTA
tcatcagggccgaaggacca

SEQ ID NO: 86807 - DNA, 20 bp, Artificial Sequence
  Description of Artificial Sequence: Synthetic oligonucleotide
  Target: ATXN2; (+) strand; PAM type: YTN; PAM sequence: CTC
tctcagctaatcacaggagc

SEQ ID NO: 86808 - DNA, 20 bp, Artificial Sequence
  Description of Artificial Sequence: Synthetic oligonucleotide
  Target: ATXN2; (+) strand; PAM type: YTN; PAM sequence: CTC
tcagctaatcacaggagccc

SEQ ID NO: 86809 - DNA, 20 bp, Artificial Sequence
  Description of Artificial Sequence: Synthetic oligonucleotide
  Target: ATXN2; (+) strand; PAM type: YTN; PAM sequence: CTC
agctaatcacaggagccctt

SEQ ID NO: 86810 - DNA, 20 bp, Artificial Sequence
  Description of Artificial Sequence: Synthetic oligonucleotide
  Target: ATXN2; (+) strand; PAM type: YTN; PAM sequence: CTA
atcacaggagcccttctgcc

SEQ ID NO: 86811 - DNA, 20 bp, Artificial Sequence
  Description of Artificial Sequence: Synthetic oligonucleotide
  Target: ATXN2; (+) strand; PAM type: YTN; PAM sequence: CTT
ctgccactcagtttactttc

SEQ ID NO: 86812 - DNA, 20 bp, Artificial Sequence
  Description of Artificial Sequence: Synthetic oligonucleotide
  Target: ATXN2; (+) strand; PAM type: YTN; PAM sequence: TTC
tgccactcagtttactttcc

SEQ ID NO: 86813 - DNA, 20 bp, Artificial Sequence
  Description of Artificial Sequence: Synthetic oligonucleotide
  Target: ATXN2; (+) strand; PAM type: YTN; PAM sequence: CTG
ccactcagtttactttccca

SEQ ID NO: 86814 - DNA, 20 bp, Artificial Sequence
  Description of Artificial Sequence: Synthetic oligonucleotide
  Target: ATXN2; (+) strand; PAM type: YTN; PAM sequence: CTC
agtttactttcccaagccct

SEQ ID NO: 86815 - DNA, 20 bp, Artificial Sequence
  Description of Artificial Sequence: Synthetic oligonucleotide
  Target: ATXN2; (+) strand; PAM type: YTN; PAM sequence: TTT
actttcccaagccctaatgg

SEQ ID NO: 86816 - DNA, 20 bp, Artificial Sequence
  Description of Artificial Sequence: Synthetic oligonucleotide
  Target: ATXN2; (+) strand; PAM type: YTN; PAM sequence: TTA
ctttcccaagccctaatgga

SEQ ID NO: 86817 - DNA, 20 bp, Artificial Sequence
  Description of Artificial Sequence: Synthetic oligonucleotide
  Target: ATXN2; (+) strand; PAM type: YTN; PAM sequence: CTT
tcccaagccctaatggagga

SEQ ID NO: 86818 - DNA, 20 bp, Artificial Sequence
  Description of Artificial Sequence: Synthetic oligonucleotide
  Target: ATXN2; (+) strand; PAM type: YTN; PAM sequence: TTT
cccaagccctaatggaggat

SEQ ID NO: 86819 - DNA, 20 bp, Artificial Sequence
  Description of Artificial Sequence: Synthetic oligonucleotide
  Target: ATXN2; (+) strand; PAM type: YTN; PAM sequence: TTC
ccaagccctaatggaggatc

SEQ ID NO: 86820 - DNA, 20 bp, Artificial Sequence
  Description of Artificial Sequence: Synthetic oligonucleotide
  Target: ATXN2; (+) strand; PAM type: YTN; PAM sequence: CTA
atggaggatctcccatcttt

SEQ ID NO: 86821 - DNA, 20 bp, Artificial Sequence
  Description of Artificial Sequence: Synthetic oligonucleotide
  Target: ATXN2; (+) strand; PAM type: YTN; PAM sequence: CTC
ccatctttgctttatgaaat

SEQ ID NO: 86822 - DNA, 20 bp, Artificial Sequence
  Description of Artificial Sequence: Synthetic oligonucleotide
  Target: ATXN2; (+) strand; PAM type: YTN; PAM sequence: CTT
tgctttatgaaataaatata

SEQ ID NO: 86823 - DNA, 20 bp, Artificial Sequence
  Description of Artificial Sequence: Synthetic oligonucleotide
  Target: ATXN2; (+) strand; PAM type: YTN; PAM sequence: TTT
gctttatgaaataaatatag

SEQ ID NO: 86824 - DNA, 20 bp, Artificial Sequence
  Description of Artificial Sequence: Synthetic oligonucleotide
  Target: ATXN2; (+) strand; PAM type: YTN; PAM sequence: TTG
ctttatgaaataaatataga

SEQ ID NO: 86825 - DNA, 20 bp, Artificial Sequence
  Description of Artificial Sequence: Synthetic oligonucleotide
  Target: ATXN2; (+) strand; PAM type: YTN; PAM sequence: CTT
tatgaaataaatatagaaaa

SEQ ID NO: 86826 - DNA, 20 bp, Artificial Sequence
  Description of Artificial Sequence: Synthetic oligonucleotide
  Target: ATXN2; (+) strand; PAM type: YTN; PAM sequence: TTT
atgaaataaatatagaaaag

SEQ ID NO: 86827 - DNA, 20 bp, Artificial Sequence
  Description of Artificial Sequence: Synthetic oligonucleotide
  Target: ATXN2; (+) strand; PAM type: YTN; PAM sequence: TTA
tgaaataaatatagaaaagt

SEQ ID NO: 86828 - DNA, 20 bp, Artificial Sequence
  Description of Artificial Sequence: Synthetic oligonucleotide
  Target: ATXN2; (+) strand; PAM type: YTN; PAM sequence: CTC
ccttctgagtgccccagccc

SEQ ID NO: 86829 - DNA, 20 bp, Artificial Sequence
  Description of Artificial Sequence: Synthetic oligonucleotide
  Target: ATXN2; (+) strand; PAM type: YTN; PAM sequence: CTT
ctgagtgccccagccctttg

SEQ ID NO: 86830 - DNA, 20 bp, Artificial Sequence
  Description of Artificial Sequence: Synthetic oligonucleotide
  Target: ATXN2; (+) strand; PAM type: YTN; PAM sequence: TTC
tgagtgccccagccctttgg

SEQ ID NO: 86831 - DNA, 20 bp, Artificial Sequence
  Description of Artificial Sequence: Synthetic oligonucleotide
  Target: ATXN2; (+) strand; PAM type: YTN; PAM sequence: CTG
agtgccccagccctttggaa

SEQ ID NO: 86832 - DNA, 20 bp, Artificial Sequence
  Description of Artificial Sequence: Synthetic oligonucleotide
  Target: ATXN2; (+) strand; PAM type: YTN; PAM sequence: CTT
tggaaagaaatttactagac

SEQ ID NO: 86833 - DNA, 20 bp, Artificial Sequence
  Description of Artificial Sequence: Synthetic oligonucleotide
  Target: ATXN2; (+) strand; PAM type: YTN; PAM sequence: TTT
ggaaagaaatttactagact

SEQ ID NO: 86834 - DNA, 20 bp, Artificial Sequence
  Description of Artificial Sequence: Synthetic oligonucleotide
  Target: ATXN2; (+) strand; PAM type: YTN; PAM sequence: TTG
gaaagaaatttactagacta

SEQ ID NO: 86835 - DNA, 20 bp, Artificial Sequence
  Description of Artificial Sequence: Synthetic oligonucleotide
  Target: ATXN2; (+) strand; PAM type: YTN; PAM sequence: TTT
actagactaacttcaaagga

SEQ ID NO: 86836 - DNA, 20 bp, Artificial Sequence
  Description of Artificial Sequence: Synthetic oligonucleotide
  Target: ATXN2; (+) strand; PAM type: YTN; PAM sequence: TTA
ctagactaacttcaaaggac

SEQ ID NO: 86837 - DNA, 20 bp, Artificial Sequence
  Description of Artificial Sequence: Synthetic oligonucleotide
  Target: ATXN2; (+) strand; PAM type: YTN; PAM sequence: CTA
gactaacttcaaaggacaac

SEQ ID NO: 86838 - DNA, 20 bp, Artificial Sequence
  Description of Artificial Sequence: Synthetic oligonucleotide
  Target: ATXN2; (+) strand; PAM type: YTN; PAM sequence: CTA
acttcaaaggacaacatgat

SEQ ID NO: 86839 - DNA, 20 bp, Artificial Sequence
  Description of Artificial Sequence: Synthetic oligonucleotide
  Target: ATXN2; (+) strand; PAM type: YTN; PAM sequence: CTT
caaaggacaacatgatgggc

SEQ ID NO: 86840 - DNA, 20 bp, Artificial Sequence
  Description of Artificial Sequence: Synthetic oligonucleotide
  Target: ATXN2; (+) strand; PAM type: YTN; PAM sequence: TTC
aaaggacaacatgatgggcc

SEQ ID NO: 86841 - DNA, 20 bp, Artificial Sequence
  Description of Artificial Sequence: Synthetic oligonucleotide
  Target: ATXN2; (+) strand; PAM type: YTN; PAM sequence: TTT
aaatcaaaataaagataaga

SEQ ID NO: 86842 - DNA, 20 bp, Artificial Sequence
  Description of Artificial Sequence: Synthetic oligonucleotide
  Target: ATXN2; (+) strand; PAM type: YTN; PAM sequence: TTA
aatcaaaataaagataagaa

SEQ ID NO: 86843 - DNA, 20 bp, Artificial Sequence
  Description of Artificial Sequence: Synthetic oligonucleotide
  Target: ATXN2; (+) strand; PAM type: YTN; PAM sequence: CTG
aaagccagttctttgtgaat

SEQ ID NO: 86844 - DNA, 20 bp, Artificial Sequence
  Description of Artificial Sequence: Synthetic oligonucleotide
  Target: ATXN2; (+) strand; PAM type: YTN; PAM sequence: TTC
tttgtgaatctcagcgtggg

SEQ ID NO: 86845 - DNA, 20 bp, Artificial Sequence
  Description of Artificial Sequence: Synthetic oligonucleotide
  Target: ATXN2; (+) strand; PAM type: YTN; PAM sequence: CTT
tgtgaatctcagcgtgggcc

SEQ ID NO: 86846 - DNA, 20 bp, Artificial Sequence
  Description of Artificial Sequence: Synthetic oligonucleotide
  Target: ATXN2; (+) strand; PAM type: YTN; PAM sequence: TTT
gtgaatctcagcgtgggcca

SEQ ID NO: 86847 - DNA, 20 bp, Artificial Sequence
  Description of Artificial Sequence: Synthetic oligonucleotide
  Target: ATXN2; (+) strand; PAM type: YTN; PAM sequence: TTG
tgaatctcagcgtgggccaa

SEQ ID NO: 86848 - DNA, 20 bp, Artificial Sequence
  Description of Artificial Sequence: Synthetic oligonucleotide
  Target: ATXN2; (+) strand; PAM type: YTN; PAM sequence: CTC
agcgtgggccaaaccttggt

SEQ ID NO: 86849 - DNA, 20 bp, Artificial Sequence
  Description of Artificial Sequence: Synthetic oligonucleotide
  Target: ATXN2; (+) strand; PAM type: YTN; PAM sequence: CTT
ggtacaaaaaccatttcttc

SEQ ID NO: 86850 - DNA, 20 bp, Artificial Sequence
  Description of Artificial Sequence: Synthetic oligonucleotide
  Target: ATXN2; (+) strand; PAM type: YTN; PAM sequence: TTG
gtacaaaaaccatttcttca

SEQ ID NO: 86851 - DNA, 20 bp, Artificial Sequence
  Description of Artificial Sequence: Synthetic oligonucleotide
  Target: ATXN2; (+) strand; PAM type: YTN; PAM sequence: TTT
cttcatgtctttcagttttt

SEQ ID NO: 86852 - DNA, 20 bp, Artificial Sequence
  Description of Artificial Sequence: Synthetic oligonucleotide
  Target: ATXN2; (+) strand; PAM type: YTN; PAM sequence: TTC
ttcatgtctttcagtttttt

SEQ ID NO: 86853 - DNA, 20 bp, Artificial Sequence
  Description of Artificial Sequence: Synthetic oligonucleotide
  Target: ATXN2; (+) strand; PAM type: YTN; PAM sequence: CTT
catgtctttcagttttttgt

SEQ ID NO: 86854 - DNA, 20 bp, Artificial Sequence
  Description of Artificial Sequence: Synthetic oligonucleotide
  Target: ATXN2; (+) strand; PAM type: YTN; PAM sequence: TTC
atgtctttcagttttttgtt

SEQ ID NO: 86855 - DNA, 20 bp, Artificial Sequence
  Description of Artificial Sequence: Synthetic oligonucleotide
  Target: ATXN2; (+) strand; PAM type: YTN; PAM sequence: CTT
tcagttttttgttttttgtt

SEQ ID NO: 86856 - DNA, 20 bp, Artificial Sequence
  Description of Artificial Sequence: Synthetic oligonucleotide
  Target: ATXN2; (+) strand; PAM type: YTN; PAM sequence: TTT
cagttttttgttttttgttt

SEQ ID NO: 86857 - DNA, 20 bp, Artificial Sequence
  Description of Artificial Sequence: Synthetic oligonucleotide
  Target: ATXN2; (+) strand; PAM type: YTN; PAM sequence: TTC
agttttttgttttttgtttt

SEQ ID NO: 86858 - DNA, 20 bp, Artificial Sequence
  Description of Artificial Sequence: Synthetic oligonucleotide
  Target: ATXN2; (+) strand; PAM type: YTN; PAM sequence: TTT
tttgttttttgttttttttt

SEQ ID NO: 86859 - DNA, 20 bp, Artificial Sequence
  Description of Artificial Sequence: Synthetic oligonucleotide
  Target: ATXN2; (+) strand; PAM type: YTN; PAM sequence: TTT
ttgttttttgtttttttttg

SEQ ID NO: 86860 - DNA, 20 bp, Artificial Sequence
  Description of Artificial Sequence: Synthetic oligonucleotide
  Target: ATXN2; (+) strand; PAM type: YTN; PAM sequence: TTT
tgttttttgtttttttttga

SEQ ID NO: 86861 - DNA, 20 bp, Artificial Sequence
  Description of Artificial Sequence: Synthetic oligonucleotide
  Target: ATXN2; (+) strand; PAM type: YTN; PAM sequence: TTT
gttttttgtttttttttgag

SEQ ID NO: 86862 - DNA, 20 bp, Artificial Sequence
  Description of Artificial Sequence: Synthetic oligonucleotide
  Target: ATXN2; (+) strand; PAM type: YTN; PAM sequence: TTG
ttttttgtttttttttgaga

SEQ ID NO: 86863 - DNA, 20 bp, Artificial Sequence
  Description of Artificial Sequence: Synthetic oligonucleotide
  Target: ATXN2; (+) strand; PAM type: YTN; PAM sequence: TTT
tttgtttttttttgagatat

SEQ ID NO: 86864 - DNA, 20 bp, Artificial Sequence
  Description of Artificial Sequence: Synthetic oligonucleotide
  Target: ATXN2; (+) strand; PAM type: YTN; PAM sequence: TTT
ttgtttttttttgagatata

SEQ ID NO: 86865 - DNA, 20 bp, Artificial Sequence
  Description of Artificial Sequence: Synthetic oligonucleotide
  Target: ATXN2; (+) strand; PAM type: YTN; PAM sequence: TTT
tgtttttttttgagatataa

SEQ ID NO: 86866 - DNA, 20 bp, Artificial Sequence
  Description of Artificial Sequence: Synthetic oligonucleotide
  Target: ATXN2; (+) strand; PAM type: YTN; PAM sequence: TTT
gtttttttttgagatataag

SEQ ID NO: 86867 - DNA, 20 bp, Artificial Sequence
  Description of Artificial Sequence: Synthetic oligonucleotide
  Target: ATXN2; (+) strand; PAM type: YTN; PAM sequence: TTG
tttttttttgagatataagt

SEQ ID NO: 86868 - DNA, 20 bp, Artificial Sequence
  Description of Artificial Sequence: Synthetic oligonucleotide
  Target: ATXN2; (+) strand; PAM type: YTN; PAM sequence: TTT
ttttttgagatataagtctc

SEQ ID NO: 86869 - DNA, 20 bp, Artificial Sequence
  Description of Artificial Sequence: Synthetic oligonucleotide
  Target: ATXN2; (+) strand; PAM type: YTN; PAM sequence: TTT
tttttgagatataagtctca

SEQ ID NO: 86870 - DNA, 20 bp, Artificial Sequence
  Description of Artificial Sequence: Synthetic oligonucleotide
  Target: ATXN2; (+) strand; PAM type: YTN; PAM sequence: TTT
ttttgagatataagtctcac

SEQ ID NO: 86871 - DNA, 20 bp, Artificial Sequence
  Description of Artificial Sequence: Synthetic oligonucleotide
  Target: ATXN2; (+) strand; PAM type: YTN; PAM sequence: TTT
tttgagatataagtctcact

SEQ ID NO: 86872 - DNA, 20 bp, Artificial Sequence
  Description of Artificial Sequence: Synthetic oligonucleotide
  Target: ATXN2; (+) strand; PAM type: YTN; PAM sequence: TTT
ttgagatataagtctcactc

SEQ ID NO: 86873 - DNA, 20 bp, Artificial Sequence
  Description of Artificial Sequence: Synthetic oligonucleotide
  Target: ATXN2; (+) strand; PAM type: YTN; PAM sequence: TTT
tgagatataagtctcactca

SEQ ID NO: 86874 - DNA, 20 bp, Artificial Sequence
  Description of Artificial Sequence: Synthetic oligonucleotide
  Target: ATXN2; (+) strand; PAM type: YTN; PAM sequence: TTT
gagatataagtctcactcac

SEQ ID NO: 86875 - DNA, 20 bp, Artificial Sequence
  Description of Artificial Sequence: Synthetic oligonucleotide
  Target: ATXN2; (+) strand; PAM type: YTN; PAM sequence: TTG
agatataagtctcactcact

SEQ ID NO: 86876 - DNA, 20 bp, Artificial Sequence
  Description of Artificial Sequence: Synthetic oligonucleotide
  Target: ATXN2; (+) strand; PAM type: YTN; PAM sequence: CTC
actcactctgttgcccaggc

SEQ ID NO: 86877 - DNA, 20 bp, Artificial Sequence
  Description of Artificial Sequence: Synthetic oligonucleotide
  Target: ATXN2; (+) strand; PAM type: YTN; PAM sequence: CTC
actctgttgcccaggctcac

SEQ ID NO: 86878 - DNA, 20 bp, Artificial Sequence
  Description of Artificial Sequence: Synthetic oligonucleotide
  Target: ATXN2; (+) strand; PAM type: YTN; PAM sequence: CTC
tgttgcccaggctcactgca

SEQ ID NO: 86879 - DNA, 20 bp, Artificial Sequence
  Description of Artificial Sequence: Synthetic oligonucleotide
  Target: ATXN2; (+) strand; PAM type: YTN; PAM sequence: CTG
ttgcccaggctcactgcaac

SEQ ID NO: 86880 - DNA, 20 bp, Artificial Sequence
  Description of Artificial Sequence: Synthetic oligonucleotide
  Target: ATXN2; (+) strand; PAM type: YTN; PAM sequence: TTG
cccaggctcactgcaacctc

SEQ ID NO: 86881 - DNA, 20 bp, Artificial Sequence
  Description of Artificial Sequence: Synthetic oligonucleotide
  Target: ATXN2; (+) strand; PAM type: YTN; PAM sequence: CTC
actgcaacctctgcctccca

SEQ ID NO: 86882 - DNA, 20 bp, Artificial Sequence
  Description of Artificial Sequence: Synthetic oligonucleotide
  Target: ATXN2; (+) strand; PAM type: YTN; PAM sequence: CTG
caacctctgcctcccaggtt

SEQ ID NO: 86883 - DNA, 20 bp, Artificial Sequence
  Description of Artificial Sequence: Synthetic oligonucleotide
  Target: ATXN2; (+) strand; PAM type: YTN; PAM sequence: CTC
tgcctcccaggttcaagcaa

SEQ ID NO: 86884 - DNA, 20 bp, Artificial Sequence
  Description of Artificial Sequence: Synthetic oligonucleotide
  Target: ATXN2; (+) strand; PAM type: YTN; PAM sequence: CTG
cctcccaggttcaagcaatt

SEQ ID NO: 86885 - DNA, 20 bp, Artificial Sequence
  Description of Artificial Sequence: Synthetic oligonucleotide
  Target: ATXN2; (+) strand; PAM type: YTN; PAM sequence: CTC
ccaggttcaagcaattctcc

SEQ ID NO: 86886 - DNA, 20 bp, Artificial Sequence
  Description of Artificial Sequence: Synthetic oligonucleotide
  Target: ATXN2; (+) strand; PAM type: YTN; PAM sequence: TTC
aagcaattctcctgcctcag

SEQ ID NO: 86887 - DNA, 20 bp, Artificial Sequence
  Description of Artificial Sequence: Synthetic oligonucleotide
  Target: ATXN2; (+) strand; PAM type: YTN; PAM sequence: TTC
tcctgcctcagcctcccgag

SEQ ID NO: 86888 - DNA, 20 bp, Artificial Sequence
  Description of Artificial Sequence: Synthetic oligonucleotide
  Target: ATXN2; (+) strand; PAM type: YTN; PAM sequence: CTC
ctgcctcagcctcccgagta

SEQ ID NO: 86889 - DNA, 20 bp, Artificial Sequence
  Description of Artificial Sequence: Synthetic oligonucleotide
  Target: ATXN2; (+) strand; PAM type: YTN; PAM sequence: CTG
cctcagcctcccgagtagct

SEQ ID NO: 86890 - DNA, 20 bp, Artificial Sequence
  Description of Artificial Sequence: Synthetic oligonucleotide
  Target: ATXN2; (+) strand; PAM type: YTN; PAM sequence: CTC
agcctcccgagtagctgaga

SEQ ID NO: 86891 - DNA, 20 bp, Artificial Sequence
  Description of Artificial Sequence: Synthetic oligonucleotide
  Target: ATXN2; (+) strand; PAM type: YTN; PAM sequence: CTC
ccgagtagctgagattacag

SEQ ID NO: 86892 - DNA, 20 bp, Artificial Sequence
  Description of Artificial Sequence: Synthetic oligonucleotide
  Target: ATXN2; (+) strand; PAM type: YTN; PAM sequence: CTG
agattacaggcatgtgccac

SEQ ID NO: 86893 - DNA, 20 bp, Artificial Sequence
  Description of Artificial Sequence: Synthetic oligonucleotide
  Target: ATXN2; (+) strand; PAM type: YTN; PAM sequence: TTA
caggcatgtgccaccacgcc

SEQ ID NO: 86894 - DNA, 20 bp, Artificial Sequence
  Description of Artificial Sequence: Synthetic oligonucleotide
  Target: ATXN2; (+) strand; PAM type: YTN; PAM sequence: CTA
atttttgtatttttagtaga

SEQ ID NO: 86895 - DNA, 20 bp, Artificial Sequence
  Description of Artificial Sequence: Synthetic oligonucleotide
  Target: ATXN2; (+) strand; PAM type: YTN; PAM sequence: TTT
ttgtatttttagtagagatg

SEQ ID NO: 86896 - DNA, 20 bp, Artificial Sequence
  Description of Artificial Sequence: Synthetic oligonucleotide
  Target: ATXN2; (+) strand; PAM type: YTN; PAM sequence: TTT
tgtatttttagtagagatgg

SEQ ID NO: 86897 - DNA, 20 bp, Artificial Sequence
  Description of Artificial Sequence: Synthetic oligonucleotide
  Target: ATXN2; (+) strand; PAM type: YTN; PAM sequence: TTT
gtatttttagtagagatggg

SEQ ID NO: 86898 - DNA, 20 bp, Artificial Sequence
  Description of Artificial Sequence: Synthetic oligonucleotide
  Target: ATXN2; (+) strand; PAM type: YTN; PAM sequence: TTG
tatttttagtagagatgggg

SEQ ID NO: 86899 - DNA, 20 bp, Artificial Sequence
  Description of Artificial Sequence: Synthetic oligonucleotide
  Target: ATXN2; (+) strand; PAM type: YTN; PAM sequence: TTT
ttagtagagatggggtttcg

SEQ ID NO: 86900 - DNA, 20 bp, Artificial Sequence
  Description of Artificial Sequence: Synthetic oligonucleotide
  Target: ATXN2; (+) strand; PAM type: YTN; PAM sequence: TTT
tagtagagatggggtttcgc

SEQ ID NO: 86901 - DNA, 20 bp, Artificial Sequence
  Description of Artificial Sequence: Synthetic oligonucleotide
  Target: ATXN2; (+) strand; PAM type: YTN; PAM sequence: TTT
agtagagatggggtttcgcc

SEQ ID NO: 86902 - DNA, 20 bp, Artificial Sequence
  Description of Artificial Sequence: Synthetic oligonucleotide
  Target: ATXN2; (+) strand; PAM type: YTN; PAM sequence: TTA
gtagagatggggtttcgcca

SEQ ID NO: 86903 - DNA, 20 bp, Artificial Sequence
  Description of Artificial Sequence: Synthetic oligonucleotide
  Target: ATXN2; (+) strand; PAM type: YTN; PAM sequence: TTT
cgccatgctggccaggctga

SEQ ID NO: 86904 - DNA, 20 bp, Artificial Sequence
  Description of Artificial Sequence: Synthetic oligonucleotide
  Target: ATXN2; (+) strand; PAM type: YTN; PAM sequence: TTC
gccatgctggccaggctgat

SEQ ID NO: 86905 - DNA, 20 bp, Artificial Sequence
  Description of Artificial Sequence: Synthetic oligonucleotide
  Target: ATXN2; (+) strand; PAM type: YTN; PAM sequence: CTG
gccaggctgatctcaaactc

SEQ ID NO: 86906 - DNA, 20 bp, Artificial Sequence
  Description of Artificial Sequence: Synthetic oligonucleotide
  Target: ATXN2; (+) strand; PAM type: YTN; PAM sequence: CTG
atctcaaactcctgacctca

SEQ ID NO: 86907 - DNA, 20 bp, Artificial Sequence
  Description of Artificial Sequence: Synthetic oligonucleotide
  Target: ATXN2; (+) strand; PAM type: YTN; PAM sequence: CTC
aaactcctgacctcaaatga

SEQ ID NO: 86908 - DNA, 20 bp, Artificial Sequence
  Description of Artificial Sequence: Synthetic oligonucleotide
  Target: ATXN2; (+) strand; PAM type: YTN; PAM sequence: CTC
ctgacctcaaatgatccgcc

SEQ ID NO: 86909 - DNA, 20 bp, Artificial Sequence
  Description of Artificial Sequence: Synthetic oligonucleotide
  Target: ATXN2; (+) strand; PAM type: YTN; PAM sequence: CTG
acctcaaatgatccgcccac

SEQ ID NO: 86910 - DNA, 20 bp, Artificial Sequence
  Description of Artificial Sequence: Synthetic oligonucleotide
  Target: ATXN2; (+) strand; PAM type: YTN; PAM sequence: CTC
aaatgatccgcccacttcag

SEQ ID NO: 86911 - DNA, 20 bp, Artificial Sequence
  Description of Artificial Sequence: Synthetic oligonucleotide
  Target: ATXN2; (+) strand; PAM type: YTN; PAM sequence: CTT
cagcctcccaaagtgctggg

SEQ ID NO: 86912 - DNA, 20 bp, Artificial Sequence
  Description of Artificial Sequence: Synthetic oligonucleotide
  Target: ATXN2; (+) strand; PAM type: YTN; PAM sequence: TTC
agcctcccaaagtgctggga

SEQ ID NO: 86913 - DNA, 20 bp, Artificial Sequence
  Description of Artificial Sequence: Synthetic oligonucleotide
  Target: ATXN2; (+) strand; PAM type: YTN; PAM sequence: CTC
ccaaagtgctgggattacag

SEQ ID NO: 86914 - DNA, 20 bp, Artificial Sequence
  Description of Artificial Sequence: Synthetic oligonucleotide
  Target: ATXN2; (+) strand; PAM type: YTN; PAM sequence: CTG
ggattacagacgtgagccac

SEQ ID NO: 86915 - DNA, 20 bp, Artificial Sequence
  Description of Artificial Sequence: Synthetic oligonucleotide
  Target: ATXN2; (+) strand; PAM type: YTN; PAM sequence: TTA
cagacgtgagccaccgtgcc

SEQ ID NO: 86916 - DNA, 20 bp, Artificial Sequence
  Description of Artificial Sequence: Synthetic oligonucleotide
  Target: ATXN2; (+) strand; PAM type: YTN; PAM sequence: CTG
gcctgttcatgtgcttcaaa

SEQ ID NO: 86917 - DNA, 20 bp, Artificial Sequence
  Description of Artificial Sequence: Synthetic oligonucleotide
  Target: ATXN2; (+) strand; PAM type: YTN; PAM sequence: CTG
ttcatgtgcttcaaaaacag

SEQ ID NO: 86918 - DNA, 20 bp, Artificial Sequence
  Description of Artificial Sequence: Synthetic oligonucleotide
  Target: ATXN2; (+) strand; PAM type: YTN; PAM sequence: TTC
atgtgcttcaaaaacagtaa

SEQ ID NO: 86919 - DNA, 20 bp, Artificial Sequence
  Description of Artificial Sequence: Synthetic oligonucleotide
  Target: ATXN2; (+) strand; PAM type: YTN; PAM sequence: CTT
caaaaacagtaagttgagaa

SEQ ID NO: 86920 - DNA, 20 bp, Artificial Sequence
  Description of Artificial Sequence: Synthetic oligonucleotide
  Target: ATXN2; (+) strand; PAM type: YTN; PAM sequence: TTC
aaaaacagtaagttgagaat

SEQ ID NO: 86921 - DNA, 20 bp, Artificial Sequence
  Description of Artificial Sequence: Synthetic oligonucleotide
  Target: ATXN2; (+) strand; PAM type: YTN; PAM sequence: TTG
agaatcagaagcagagtagg

SEQ ID NO: 86922 - DNA, 20 bp, Artificial Sequence
  Description of Artificial Sequence: Synthetic oligonucleotide
  Target: ATXN2; (+) strand; PAM type: YTN; PAM sequence: TTC
actgcttccagtgactatgg

SEQ ID NO: 86923 - DNA, 20 bp, Artificial Sequence
  Description of Artificial Sequence: Synthetic oligonucleotide
  Target: ATXN2; (+) strand; PAM type: YTN; PAM sequence: CTG
cttccagtgactatggacag

SEQ ID NO: 86924 - DNA, 20 bp, Artificial Sequence
  Description of Artificial Sequence: Synthetic oligonucleotide
  Target: ATXN2; (+) strand; PAM type: YTN; PAM sequence: CTT
ccagtgactatggacagcac

SEQ ID NO: 86925 - DNA, 20 bp, Artificial Sequence
  Description of Artificial Sequence: Synthetic oligonucleotide
  Target: ATXN2; (+) strand; PAM type: YTN; PAM sequence: TTC
cagtgactatggacagcaca

SEQ ID NO: 86926 - DNA, 20 bp, Artificial Sequence
  Description of Artificial Sequence: Synthetic oligonucleotide
  Target: ATXN2; (+) strand; PAM type: YTN; PAM sequence: CTA
tggacagcacaccgatgata

SEQ ID NO: 86927 - DNA, 20 bp, Artificial Sequence
  Description of Artificial Sequence: Synthetic oligonucleotide
  Target: ATXN2; (+) strand; PAM type: YTN; PAM sequence: CTA
acctccacgaggcaatgagc

SEQ ID NO: 86928 - DNA, 20 bp, Artificial Sequence
  Description of Artificial Sequence: Synthetic oligonucleotide
  Target: ATXN2; (+) strand; PAM type: YTN; PAM sequence: CTC
cacgaggcaatgagctgaga

SEQ ID NO: 86929 - DNA, 20 bp, Artificial Sequence
  Description of Artificial Sequence: Synthetic oligonucleotide
  Target: ATXN2; (+) strand; PAM type: YTN; PAM sequence: CTG
agaatagagcgttctcaaga

SEQ ID NO: 86930 - DNA, 20 bp, Artificial Sequence
  Description of Artificial Sequence: Synthetic oligonucleotide
  Target: ATXN2; (+) strand; PAM type: YTN; PAM sequence: TTC
tcaagacaactctagcaagg

SEQ ID NO: 86931 - DNA, 20 bp, Artificial Sequence
  Description of Artificial Sequence: Synthetic oligonucleotide
  Target: ATXN2; (+) strand; PAM type: YTN; PAM sequence: CTC
aagacaactctagcaaggta

SEQ ID NO: 86932 - DNA, 20 bp, Artificial Sequence
  Description of Artificial Sequence: Synthetic oligonucleotide
  Target: ATXN2; (+) strand; PAM type: YTN; PAM sequence: CTC
tagcaaggtatagttcccag

SEQ ID NO: 86933 - DNA, 20 bp, Artificial Sequence
  Description of Artificial Sequence: Synthetic oligonucleotide
  Target: ATXN2; (+) strand; PAM type: YTN; PAM sequence: CTA
gcaaggtatagttcccagcc

SEQ ID NO: 86934 - DNA, 20 bp, Artificial Sequence
  Description of Artificial Sequence: Synthetic oligonucleotide
  Target: ATXN2; (+) strand; PAM type: YTN; PAM sequence: TTC
ccagccctctcttgagaaac

SEQ ID NO: 86935 - DNA, 20 bp, Artificial Sequence
  Description of Artificial Sequence: Synthetic oligonucleotide
  Target: ATXN2; (+) strand; PAM type: YTN; PAM sequence: CTC
tcttgagaaacaaatcctaa

SEQ ID NO: 86936 - DNA, 20 bp, Artificial Sequence
  Description of Artificial Sequence: Synthetic oligonucleotide
  Target: ATXN2; (+) strand; PAM type: YTN; PAM sequence: CTC
ttgagaaacaaatcctaaaa

SEQ ID NO: 86937 - DNA, 20 bp, Artificial Sequence
  Description of Artificial Sequence: Synthetic oligonucleotide
  Target: ATXN2; (+) strand; PAM type: YTN; PAM sequence: CTT
gagaaacaaatcctaaaatc

SEQ ID NO: 86938 - DNA, 20 bp, Artificial Sequence
  Description of Artificial Sequence: Synthetic oligonucleotide
  Target: ATXN2; (+) strand; PAM type: YTN; PAM sequence: TTG
agaaacaaatcctaaaatcc

SEQ ID NO: 86939 - DNA, 20 bp, Artificial Sequence
  Description of Artificial Sequence: Synthetic oligonucleotide
  Target: ATXN2; (+) strand; PAM type: YTN; PAM sequence: CTA
aaatccctcaagataataag

SEQ ID NO: 86940 - DNA, 20 bp, Artificial Sequence
  Description of Artificial Sequence: Synthetic oligonucleotide
  Target: ATXN2; (+) strand; PAM type: YTN; PAM sequence: CTC
aagataataagcccatacac

SEQ ID NO: 86941 - DNA, 20 bp, Artificial Sequence
  Description of Artificial Sequence: Synthetic oligonucleotide
  Target: ATXN2; (+) strand; PAM type: YTN; PAM sequence: TTC
caaaatagttccccacattc

SEQ ID NO: 86942 - DNA, 20 bp, Artificial Sequence
  Description of Artificial Sequence: Synthetic oligonucleotide
  Target: ATXN2; (+) strand; PAM type: YTN; PAM sequence: TTC
cccacattcttcatataacg

SEQ ID NO: 86943 - DNA, 20 bp, Artificial Sequence
  Description of Artificial Sequence: Synthetic oligonucleotide
  Target: ATXN2; (+) strand; PAM type: YTN; PAM sequence: TTC
ttcatataacgtgttagcaa

SEQ ID NO: 86944 - DNA, 20 bp, Artificial Sequence
  Description of Artificial Sequence: Synthetic oligonucleotide
  Target: ATXN2; (+) strand; PAM type: YTN; PAM sequence: CTT
catataacgtgttagcaaac

SEQ ID NO: 86945 - DNA, 20 bp, Artificial Sequence
  Description of Artificial Sequence: Synthetic oligonucleotide
  Target: ATXN2; (+) strand; PAM type: YTN; PAM sequence: TTC
atataacgtgttagcaaaca

SEQ ID NO: 86946 - DNA, 20 bp, Artificial Sequence
  Description of Artificial Sequence: Synthetic oligonucleotide
  Target: ATXN2; (+) strand; PAM type: YTN; PAM sequence: TTA
gcaaacacagacatatgcag

SEQ ID NO: 86947 - DNA, 20 bp, Artificial Sequence
  Description of Artificial Sequence: Synthetic oligonucleotide
  Target: ATXN2; (+) strand; PAM type: YTN; PAM sequence: CTG
attggtgagagaagcaagca

SEQ ID NO: 86948 - DNA, 20 bp, Artificial Sequence
  Description of Artificial Sequence: Synthetic oligonucleotide
  Target: ATXN2; (+) strand; PAM type: YTN; PAM sequence: TTG
gtgagagaagcaagcacagc

SEQ ID NO: 86949 - DNA, 20 bp, Artificial Sequence
  Description of Artificial Sequence: Synthetic oligonucleotide
  Target: ATXN2; (+) strand; PAM type: YTN; PAM sequence: CTT
tgggaagaggcaccctagtt

SEQ ID NO: 86950 - DNA, 20 bp, Artificial Sequence
  Description of Artificial Sequence: Synthetic oligonucleotide
  Target: ATXN2; (+) strand; PAM type: YTN; PAM sequence: TTT
gggaagaggcaccctagttc

SEQ ID NO: 86951 - DNA, 20 bp, Artificial Sequence
  Description of Artificial Sequence: Synthetic oligonucleotide
  Target: ATXN2; (+) strand; PAM type: YTN; PAM sequence: TTG
ggaagaggcaccctagttcc

SEQ ID NO: 86952 - DNA, 20 bp, Artificial Sequence
  Description of Artificial Sequence: Synthetic oligonucleotide
  Target: ATXN2; (+) strand; PAM type: YTN; PAM sequence: CTA
gttccagcagtctggtaggc

SEQ ID NO: 86953 - DNA, 20 bp, Artificial Sequence
  Description of Artificial Sequence: Synthetic oligonucleotide
  Target: ATXN2; (+) strand; PAM type: YTN; PAM sequence: TTC
cagcagtctggtaggcaagg

SEQ ID NO: 86954 - DNA, 20 bp, Artificial Sequence
  Description of Artificial Sequence: Synthetic oligonucleotide
  Target: ATXN2; (+) strand; PAM type: YTN; PAM sequence: CTG
gtaggcaaggctgccgagtc

SEQ ID NO: 86955 - DNA, 20 bp, Artificial Sequence
  Description of Artificial Sequence: Synthetic oligonucleotide
  Target: ATXN2; (+) strand; PAM type: YTN; PAM sequence: CTG
ccgagtcaccagcatagacg

SEQ ID NO: 86956 - DNA, 20 bp, Artificial Sequence
  Description of Artificial Sequence: Synthetic oligonucleotide
  Target: ATXN2; (+) strand; PAM type: YTN; PAM sequence: CTC
tgggtatattccacgtaaat

SEQ ID NO: 86957 - DNA, 20 bp, Artificial Sequence
  Description of Artificial Sequence: Synthetic oligonucleotide
  Target: ATXN2; (+) strand; PAM type: YTN; PAM sequence: CTG
ggtatattccacgtaaatgg

SEQ ID NO: 86958 - DNA, 20 bp, Artificial Sequence
  Description of Artificial Sequence: Synthetic oligonucleotide
  Target: ATXN2; (+) strand; PAM type: YTN; PAM sequence: TTC
cacgtaaatggtgtgcagag

SEQ ID NO: 86959 - DNA, 20 bp, Artificial Sequence
  Description of Artificial Sequence: Synthetic oligonucleotide
  Target: ATXN2; (+) strand; PAM type: YTN; PAM sequence: TTA
ggctaggcacatggagcagt

SEQ ID NO: 86960 - DNA, 20 bp, Artificial Sequence
  Description of Artificial Sequence: Synthetic oligonucleotide
  Target: ATXN2; (+) strand; PAM type: YTN; PAM sequence: CTA
ggcacatggagcagttctat

SEQ ID NO: 86961 - DNA, 20 bp, Artificial Sequence
  Description of Artificial Sequence: Synthetic oligonucleotide
  Target: ATXN2; (+) strand; PAM type: YTN; PAM sequence: TTC
tataatcctaggtgttgtag

SEQ ID NO: 86962 - DNA, 20 bp, Artificial Sequence
  Description of Artificial Sequence: Synthetic oligonucleotide
  Target: ATXN2; (+) strand; PAM type: YTN; PAM sequence: CTA
taatcctaggtgttgtaggg

SEQ ID NO: 86963 - DNA, 20 bp, Artificial Sequence
  Description of Artificial Sequence: Synthetic oligonucleotide
  Target: ATXN2; (+) strand; PAM type: YTN; PAM sequence: CTA
ggtgttgtagggctaagggc

SEQ ID NO: 86964 - DNA, 20 bp, Artificial Sequence
  Description of Artificial Sequence: Synthetic oligonucleotide
  Target: ATXN2; (+) strand; PAM type: YTN; PAM sequence: TTG
tagggctaagggccaccaac

SEQ ID NO: 86965 - DNA, 20 bp, Artificial Sequence
  Description of Artificial Sequence: Synthetic oligonucleotide
  Target: ATXN2; (+) strand; PAM type: YTN; PAM sequence: CTA
agggccaccaactctccagc

SEQ ID NO: 86966 - DNA, 20 bp, Artificial Sequence
  Description of Artificial Sequence: Synthetic oligonucleotide
  Target: ATXN2; (+) strand; PAM type: YTN; PAM sequence: CTC
tccagccctaacagttacgt

SEQ ID NO: 86967 - DNA, 20 bp, Artificial Sequence
  Description of Artificial Sequence: Synthetic oligonucleotide
  Target: ATXN2; (+) strand; PAM type: YTN; PAM sequence: CTC
cagccctaacagttacgtct

SEQ ID NO: 86968 - DNA, 20 bp, Artificial Sequence
  Description of Artificial Sequence: Synthetic oligonucleotide
  Target: ATXN2; (+) strand; PAM type: YTN; PAM sequence: CTA
acagttacgtctccagctgc

SEQ ID NO: 86969 - DNA, 20 bp, Artificial Sequence
  Description of Artificial Sequence: Synthetic oligonucleotide
  Target: ATXN2; (+) strand; PAM type: YTN; PAM sequence: TTA
cgtctccagctgcaaagcta

SEQ ID NO: 86970 - DNA, 20 bp, Artificial Sequence
  Description of Artificial Sequence: Synthetic oligonucleotide
  Target: ATXN2; (+) strand; PAM type: YTN; PAM sequence: CTC
cagctgcaaagctatctctt

SEQ ID NO: 86971 - DNA, 20 bp, Artificial Sequence
  Description of Artificial Sequence: Synthetic oligonucleotide
  Target: ATXN2; (+) strand; PAM type: YTN; PAM sequence: CTG
caaagctatctcttagcagg

SEQ ID NO: 86972 - DNA, 20 bp, Artificial Sequence
  Description of Artificial Sequence: Synthetic oligonucleotide
  Target: ATXN2; (+) strand; PAM type: YTN; PAM sequence: CTA
tctcttagcaggggaaaggg

SEQ ID NO: 86973 - DNA, 20 bp, Artificial Sequence
  Description of Artificial Sequence: Synthetic oligonucleotide
  Target: ATXN2; (+) strand; PAM type: YTN; PAM sequence: CTC
ttagcaggggaaagggcaag

SEQ ID NO: 86974 - DNA, 20 bp, Artificial Sequence
  Description of Artificial Sequence: Synthetic oligonucleotide
  Target: ATXN2; (+) strand; PAM type: YTN; PAM sequence: CTT
agcaggggaaagggcaaggc

SEQ ID NO: 86975 - DNA, 20 bp, Artificial Sequence
  Description of Artificial Sequence: Synthetic oligonucleotide
  Target: ATXN2; (+) strand; PAM type: YTN; PAM sequence: TTA
gcaggggaaagggcaaggca

SEQ ID NO: 86976 - DNA, 20 bp, Artificial Sequence
  Description of Artificial Sequence: Synthetic oligonucleotide
  Target: ATXN2; (+) strand; PAM type: YTN; PAM sequence: TTC
taggatcacctgtgcatcca

SEQ ID NO: 86977 - DNA, 20 bp, Artificial Sequence
  Description of Artificial Sequence: Synthetic oligonucleotide
  Target: ATXN2; (+) strand; PAM type: YTN; PAM sequence: CTA
ggatcacctgtgcatccact

SEQ ID NO: 86978 - DNA, 20 bp, Artificial Sequence
  Description of Artificial Sequence: Synthetic oligonucleotide
  Target: ATXN2; (+) strand; PAM type: YTN; PAM sequence: CTG
tgcatccactgccaatgcca

SEQ ID NO: 86979 - DNA, 20 bp, Artificial Sequence
  Description of Artificial Sequence: Synthetic oligonucleotide
  Target: ATXN2; (+) strand; PAM type: YTN; PAM sequence: CTG
ccaatgccacagctggcatt

SEQ ID NO: 86980 - DNA, 20 bp, Artificial Sequence
  Description of Artificial Sequence: Synthetic oligonucleotide
  Target: ATXN2; (+) strand; PAM type: YTN; PAM sequence: CTG
gcattaatattccttcatat

SEQ ID NO: 86981 - DNA, 20 bp, Artificial Sequence
  Description of Artificial Sequence: Synthetic oligonucleotide
  Target: ATXN2; (+) strand; PAM type: YTN; PAM sequence: TTA
atattccttcatatccagtt

SEQ ID NO: 86982 - DNA, 20 bp, Artificial Sequence
  Description of Artificial Sequence: Synthetic oligonucleotide
  Target: ATXN2; (+) strand; PAM type: YTN; PAM sequence: TTC
cttcatatccagtttagact

SEQ ID NO: 86983 - DNA, 20 bp, Artificial Sequence
  Description of Artificial Sequence: Synthetic oligonucleotide
  Target: ATXN2; (+) strand; PAM type: YTN; PAM sequence: CTT
catatccagtttagactgga

SEQ ID NO: 86984 - DNA, 20 bp, Artificial Sequence
  Description of Artificial Sequence: Synthetic oligonucleotide
  Target: ATXN2; (+) strand; PAM type: YTN; PAM sequence: TTC
atatccagtttagactggat

SEQ ID NO: 86985 - DNA, 20 bp, Artificial Sequence
  Description of Artificial Sequence: Synthetic oligonucleotide
  Target: ATXN2; (+) strand; PAM type: YTN; PAM sequence: TTT
agactggatacagcagcttt

SEQ ID NO: 86986 - DNA, 20 bp, Artificial Sequence
  Description of Artificial Sequence: Synthetic oligonucleotide
  Target: ATXN2; (+) strand; PAM type: YTN; PAM sequence: TTA
gactggatacagcagctttg

SEQ ID NO: 86987 - DNA, 20 bp, Artificial Sequence
  Description of Artificial Sequence: Synthetic oligonucleotide
  Target: ATXN2; (+) strand; PAM type: YTN; PAM sequence: CTG
gatacagcagctttgtttat

SEQ ID NO: 86988 - DNA, 20 bp, Artificial Sequence
  Description of Artificial Sequence: Synthetic oligonucleotide
  Target: ATXN2; (+) strand; PAM type: YTN; PAM sequence: CTT
tgtttatacactgggaaaat

SEQ ID NO: 86989 - DNA, 20 bp, Artificial Sequence
  Description of Artificial Sequence: Synthetic oligonucleotide
  Target: ATXN2; (+) strand; PAM type: YTN; PAM sequence: TTT
gtttatacactgggaaaatt

SEQ ID NO: 86990 - DNA, 20 bp, Artificial Sequence
  Description of Artificial Sequence: Synthetic oligonucleotide
  Target: ATXN2; (+) strand; PAM type: YTN; PAM sequence: TTG
tttatacactgggaaaattt

SEQ ID NO: 86991 - DNA, 20 bp, Artificial Sequence
  Description of Artificial Sequence: Synthetic oligonucleotide
  Target: ATXN2; (+) strand; PAM type: YTN; PAM sequence: TTT
atacactgggaaaattttcc

SEQ ID NO: 86992 - DNA, 20 bp, Artificial Sequence
  Description of Artificial Sequence: Synthetic oligonucleotide
  Target: ATXN2; (+) strand; PAM type: YTN; PAM sequence: TTA
tacactgggaaaattttcca

SEQ ID NO: 86993 - DNA, 20 bp, Artificial Sequence
  Description of Artificial Sequence: Synthetic oligonucleotide
  Target: ATXN2; (+) strand; PAM type: YTN; PAM sequence: CTG
ggaaaattttccagactgta

SEQ ID NO: 86994 - DNA, 20 bp, Artificial Sequence
  Description of Artificial Sequence: Synthetic oligonucleotide
  Target: ATXN2; (+) strand; PAM type: YTN; PAM sequence: TTT
tccagactgtaggaattaac

SEQ ID NO: 86995 - DNA, 20 bp, Artificial Sequence
  Description of Artificial Sequence: Synthetic oligonucleotide
  Target: ATXN2; (+) strand; PAM type: YTN; PAM sequence: TTT
ccagactgtaggaattaaca

SEQ ID NO: 86996 - DNA, 20 bp, Artificial Sequence
  Description of Artificial Sequence: Synthetic oligonucleotide
  Target: ATXN2; (+) strand; PAM type: YTN; PAM sequence: TTC
cagactgtaggaattaacat

SEQ ID NO: 86997 - DNA, 20 bp, Artificial Sequence
  Description of Artificial Sequence: Synthetic oligonucleotide
  Target: ATXN2; (+) strand; PAM type: YTN; PAM sequence: CTG
taggaattaacatatgccag

SEQ ID NO: 86998 - DNA, 20 bp, Artificial Sequence
  Description of Artificial Sequence: Synthetic oligonucleotide
  Target: ATXN2; (+) strand; PAM type: YTN; PAM sequence: TTA
acatatgccagaatatttta

SEQ ID NO: 86999 - DNA, 20 bp, Artificial Sequence
  Description of Artificial Sequence: Synthetic oligonucleotide
  Target: ATXN2; (+) strand; PAM type: YTN; PAM sequence: TTT
taacaagaaaactgtggcaa

SEQ ID NO: 87000 - DNA, 20 bp, Artificial Sequence
  Description of Artificial Sequence: Synthetic oligonucleotide
  Target: ATXN2; (+) strand; PAM type: YTN; PAM sequence: TTT
aacaagaaaactgtggcaac

SEQ ID NO: 87001 - DNA, 20 bp, Artificial Sequence
  Description of Artificial Sequence: Synthetic oligonucleotide
  Target: ATXN2; (+) strand; PAM type: YTN; PAM sequence: TTA
acaagaaaactgtggcaaca

SEQ ID NO: 87002 - DNA, 20 bp, Artificial Sequence
  Description of Artificial Sequence: Synthetic oligonucleotide
  Target: ATXN2; (+) strand; PAM type: YTN; PAM sequence: CTG
tggcaacatagtctctgaat

SEQ ID NO: 87003 - DNA, 20 bp, Artificial Sequence
  Description of Artificial Sequence: Synthetic oligonucleotide
  Target: ATXN2; (+) strand; PAM type: YTN; PAM sequence: CTC
tgaatgtttttaagagtagt

SEQ ID NO: 87004 - DNA, 20 bp, Artificial Sequence
  Description of Artificial Sequence: Synthetic oligonucleotide
  Target: ATXN2; (+) strand; PAM type: YTN; PAM sequence: CTG
aatgtttttaagagtagtga

SEQ ID NO: 87005 - DNA, 20 bp, Artificial Sequence
  Description of Artificial Sequence: Synthetic oligonucleotide
  Target: ATXN2; (+) strand; PAM type: YTN; PAM sequence: TTT
ttaagagtagtgaacgtctt

SEQ ID NO: 87006 - DNA, 20 bp, Artificial Sequence
  Description of Artificial Sequence: Synthetic oligonucleotide
  Target: ATXN2; (+) strand; PAM type: YTN; PAM sequence: TTT
taagagtagtgaacgtcttc

SEQ ID NO: 87007 - DNA, 20 bp, Artificial Sequence
  Description of Artificial Sequence: Synthetic oligonucleotide
  Target: ATXN2; (+) strand; PAM type: YTN; PAM sequence: TTT
aagagtagtgaacgtcttct

SEQ ID NO: 87008 - DNA, 20 bp, Artificial Sequence
  Description of Artificial Sequence: Synthetic oligonucleotide
  Target: ATXN2; (+) strand; PAM type: YTN; PAM sequence: TTA
agagtagtgaacgtcttctg

SEQ ID NO: 87009 - DNA, 20 bp, Artificial Sequence
  Description of Artificial Sequence: Synthetic oligonucleotide
  Target: ATXN2; (+) strand; PAM type: YTN; PAM sequence: CTT
ctgggagctagaacaaatga

SEQ ID NO: 87010 - DNA, 20 bp, Artificial Sequence
  Description of Artificial Sequence: Synthetic oligonucleotide
  Target: ATXN2; (+) strand; PAM type: YTN; PAM sequence: TTC
tgggagctagaacaaatgat

SEQ ID NO: 87011 - DNA, 20 bp, Artificial Sequence
  Description of Artificial Sequence: Synthetic oligonucleotide
  Target: ATXN2; (+) strand; PAM type: YTN; PAM sequence: CTG
ggagctagaacaaatgatgt

SEQ ID NO: 87012 - DNA, 20 bp, Artificial Sequence
  Description of Artificial Sequence: Synthetic oligonucleotide
  Target: ATXN2; (+) strand; PAM type: YTN; PAM sequence: CTA
gaacaaatgatgtacaaacg

SEQ ID NO: 87013 - DNA, 20 bp, Artificial Sequence
  Description of Artificial Sequence: Synthetic oligonucleotide
  Target: ATXN2; (+) strand; PAM type: YTN; PAM sequence: CTT
cctgagcttcacagtcccat

SEQ ID NO: 87014 - DNA, 20 bp, Artificial Sequence
  Description of Artificial Sequence: Synthetic oligonucleotide
  Target: ATXN2; (+) strand; PAM type: YTN; PAM sequence: TTC
ctgagcttcacagtcccata

SEQ ID NO: 87015 - DNA, 20 bp, Artificial Sequence
  Description of Artificial Sequence: Synthetic oligonucleotide
  Target: ATXN2; (+) strand; PAM type: YTN; PAM sequence: CTG
agcttcacagtcccataagt

SEQ ID NO: 87016 - DNA, 20 bp, Artificial Sequence
  Description of Artificial Sequence: Synthetic oligonucleotide
  Target: ATXN2; (+) strand; PAM type: YTN; PAM sequence: CTT
cacagtcccataagtctata

SEQ ID NO: 87017 - DNA, 20 bp, Artificial Sequence
  Description of Artificial Sequence: Synthetic oligonucleotide
  Target: ATXN2; (+) strand; PAM type: YTN; PAM sequence: TTC
acagtcccataagtctataa

SEQ ID NO: 87018 - DNA, 20 bp, Artificial Sequence
  Description of Artificial Sequence: Synthetic oligonucleotide
  Target: ATXN2; (+) strand; PAM type: YTN; PAM sequence: CTA
taagacagtcctttttttct

SEQ ID NO: 87019 - DNA, 20 bp, Artificial Sequence
  Description of Artificial Sequence: Synthetic oligonucleotide
  Target: ATXN2; (+) strand; PAM type: YTN; PAM sequence: CTT
tttttctaacttggtggctt

SEQ ID NO: 87020 - DNA, 20 bp, Artificial Sequence
  Description of Artificial Sequence: Synthetic oligonucleotide
  Target: ATXN2; (+) strand; PAM type: YTN; PAM sequence: TTT
ttttctaacttggtggctta

SEQ ID NO: 87021 - DNA, 20 bp, Artificial Sequence
  Description of Artificial Sequence: Synthetic oligonucleotide
  Target: ATXN2; (+) strand; PAM type: YTN; PAM sequence: TTT
tttctaacttggtggcttat

SEQ ID NO: 87022 - DNA, 20 bp, Artificial Sequence
  Description of Artificial Sequence: Synthetic oligonucleotide
  Target: ATXN2; (+) strand; PAM type: YTN; PAM sequence: TTT
ttctaacttggtggcttatt

SEQ ID NO: 87023 - DNA, 20 bp, Artificial Sequence
  Description of Artificial Sequence: Synthetic oligonucleotide
  Target: ATXN2; (+) strand; PAM type: YTN; PAM sequence: TTT
tctaacttggtggcttatta

SEQ ID NO: 87024 - DNA, 20 bp, Artificial Sequence
  Description of Artificial Sequence: Synthetic oligonucleotide
  Target: ATXN2; (+) strand; PAM type: YTN; PAM sequence: TTT
ctaacttggtggcttattaa

SEQ ID NO: 87025 - DNA, 20 bp, Artificial Sequence
  Description of Artificial Sequence: Synthetic oligonucleotide
  Target: ATXN2; (+) strand; PAM type: YTN; PAM sequence: TTC
taacttggtggcttattaac

SEQ ID NO: 87026 - DNA, 20 bp, Artificial Sequence
  Description of Artificial Sequence: Synthetic oligonucleotide
  Target: ATXN2; (+) strand; PAM type: YTN; PAM sequence: CTA
acttggtggcttattaacag

SEQ ID NO: 87027 - DNA, 20 bp, Artificial Sequence
  Description of Artificial Sequence: Synthetic oligonucleotide
  Target: ATXN2; (+) strand; PAM type: YTN; PAM sequence: CTT
ggtggcttattaacaggccc

SEQ ID NO: 87028 - DNA, 20 bp, Artificial Sequence
  Description of Artificial Sequence: Synthetic oligonucleotide
  Target: ATXN2; (+) strand; PAM type: YTN; PAM sequence: TTG
gtggcttattaacaggccct

SEQ ID NO: 87029 - DNA, 20 bp, Artificial Sequence
  Description of Artificial Sequence: Synthetic oligonucleotide
  Target: ATXN2; (+) strand; PAM type: YTN; PAM sequence: CTT
attaacaggccctccatcat

SEQ ID NO: 87030 - DNA, 20 bp, Artificial Sequence
  Description of Artificial Sequence: Synthetic oligonucleotide
  Target: ATXN2; (+) strand; PAM type: YTN; PAM sequence: TTA
ttaacaggccctccatcatc

SEQ ID NO: 87031 - DNA, 20 bp, Artificial Sequence
  Description of Artificial Sequence: Synthetic oligonucleotide
  Target: ATXN2; (+) strand; PAM type: YTN; PAM sequence: TTA
acaggccctccatcatcatc

SEQ ID NO: 87032 - DNA, 20 bp, Artificial Sequence
  Description of Artificial Sequence: Synthetic oligonucleotide
  Target: ATXN2; (+) strand; PAM type: YTN; PAM sequence: CTC
catcatcatcatactcatta

SEQ ID NO: 87033 - DNA, 20 bp, Artificial Sequence
  Description of Artificial Sequence: Synthetic oligonucleotide
  Target: ATXN2; (+) strand; PAM type: YTN; PAM sequence: CTC
attaagtttacttccagctc

SEQ ID NO: 87034 - DNA, 20 bp, Artificial Sequence
  Description of Artificial Sequence: Synthetic oligonucleotide
  Target: ATXN2; (+) strand; PAM type: YTN; PAM sequence: TTA
agtttacttccagctcctcc

SEQ ID NO: 87035 - DNA, 20 bp, Artificial Sequence
  Description of Artificial Sequence: Synthetic oligonucleotide
  Target: ATXN2; (+) strand; PAM type: YTN; PAM sequence: TTT
acttccagctcctccaagtt

SEQ ID NO: 87036 - DNA, 20 bp, Artificial Sequence
  Description of Artificial Sequence: Synthetic oligonucleotide
  Target: ATXN2; (+) strand; PAM type: YTN; PAM sequence: TTA
cttccagctcctccaagttg

SEQ ID NO: 87037 - DNA, 20 bp, Artificial Sequence
  Description of Artificial Sequence: Synthetic oligonucleotide
  Target: ATXN2; (+) strand; PAM type: YTN; PAM sequence: CTT
ccagctcctccaagttgtat

SEQ ID NO: 87038 - DNA, 20 bp, Artificial Sequence
  Description of Artificial Sequence: Synthetic oligonucleotide
  Target: ATXN2; (+) strand; PAM type: YTN; PAM sequence: TTC
cagctcctccaagttgtata

SEQ ID NO: 87039 - DNA, 20 bp, Artificial Sequence
  Description of Artificial Sequence: Synthetic oligonucleotide
  Target: ATXN2; (+) strand; PAM type: YTN; PAM sequence: CTC
ctccaagttgtataggcact

SEQ ID NO: 87040 - DNA, 20 bp, Artificial Sequence
  Description of Artificial Sequence: Synthetic oligonucleotide
  Target: ATXN2; (+) strand; PAM type: YTN; PAM sequence: CTC
caagttgtataggcactgac

SEQ ID NO: 87041 - DNA, 20 bp, Artificial Sequence
  Description of Artificial Sequence: Synthetic oligonucleotide
  Target: ATXN2; (+) strand; PAM type: YTN; PAM sequence: TTG
tataggcactgacttggtct

SEQ ID NO: 87042 - DNA, 20 bp, Artificial Sequence
  Description of Artificial Sequence: Synthetic oligonucleotide
  Target: ATXN2; (+) strand; PAM type: YTN; PAM sequence: CTG
acttggtctaaaagatttga

SEQ ID NO: 87043 - DNA, 20 bp, Artificial Sequence
  Description of Artificial Sequence: Synthetic oligonucleotide
  Target: ATXN2; (+) strand; PAM type: YTN; PAM sequence: CTT
ggtctaaaagatttgatgta

SEQ ID NO: 87044 - DNA, 20 bp, Artificial Sequence
  Description of Artificial Sequence: Synthetic oligonucleotide
  Target: ATXN2; (+) strand; PAM type: YTN; PAM sequence: TTG
gtctaaaagatttgatgtaa

SEQ ID NO: 87045 - DNA, 20 bp, Artificial Sequence
  Description of Artificial Sequence: Synthetic oligonucleotide
  Target: ATXN2; (+) strand; PAM type: YTN; PAM sequence: CTA
aaagatttgatgtaaatttc

SEQ ID NO: 87046 - DNA, 20 bp, Artificial Sequence
  Description of Artificial Sequence: Synthetic oligonucleotide
  Target: ATXN2; (+) strand; PAM type: YTN; PAM sequence: TTT
gatgtaaatttcgaacctga

SEQ ID NO: 87047 - DNA, 20 bp, Artificial Sequence
  Description of Artificial Sequence: Synthetic oligonucleotide
  Target: ATXN2; (+) strand; PAM type: YTN; PAM sequence: TTG
atgtaaatttcgaacctgag

SEQ ID NO: 87048 - DNA, 20 bp, Artificial Sequence
  Description of Artificial Sequence: Synthetic oligonucleotide
  Target: ATXN2; (+) strand; PAM type: YTN; PAM sequence: TTT
cgaacctgagtttgttgtac

SEQ ID NO: 87049 - DNA, 20 bp, Artificial Sequence
  Description of Artificial Sequence: Synthetic oligonucleotide
  Target: ATXN2; (+) strand; PAM type: YTN; PAM sequence: TTC
gaacctgagtttgttgtact

SEQ ID NO: 87050 - DNA, 20 bp, Artificial Sequence
  Description of Artificial Sequence: Synthetic oligonucleotide
  Target: ATXN2; (+) strand; PAM type: YTN; PAM sequence: CTG
agtttgttgtacttgtaaaa

SEQ ID NO: 87051 - DNA, 20 bp, Artificial Sequence
  Description of Artificial Sequence: Synthetic oligonucleotide
  Target: ATXN2; (+) strand; PAM type: YTN; PAM sequence: TTT
gttgtacttgtaaaaatctt

SEQ ID NO: 87052 - DNA, 20 bp, Artificial Sequence
  Description of Artificial Sequence: Synthetic oligonucleotide
  Target: ATXN2; (+) strand; PAM type: YTN; PAM sequence: TTG
ttgtacttgtaaaaatctta

SEQ ID NO: 87053 - DNA, 20 bp, Artificial Sequence
  Description of Artificial Sequence: Synthetic oligonucleotide
  Target: ATXN2; (+) strand; PAM type: YTN; PAM sequence: TTG
tacttgtaaaaatcttacgt

SEQ ID NO: 87054 - DNA, 20 bp, Artificial Sequence
  Description of Artificial Sequence: Synthetic oligonucleotide
  Target: ATXN2; (+) strand; PAM type: YTN; PAM sequence: CTT
gtaaaaatcttacgttcatt

SEQ ID NO: 87055 - DNA, 20 bp, Artificial Sequence
  Description of Artificial Sequence: Synthetic oligonucleotide
  Target: ATXN2; (+) strand; PAM type: YTN; PAM sequence: TTG
taaaaatcttacgttcattt

SEQ ID NO: 87056 - DNA, 20 bp, Artificial Sequence
  Description of Artificial Sequence: Synthetic oligonucleotide
  Target: ATXN2; (+) strand; PAM type: YTN; PAM sequence: CTT
acgttcattttaaaaatgta

SEQ ID NO: 87057 - DNA, 20 bp, Artificial Sequence
  Description of Artificial Sequence: Synthetic oligonucleotide
  Target: ATXN2; (+) strand; PAM type: YTN; PAM sequence: TTA
cgttcattttaaaaatgtat

SEQ ID NO: 87058 - DNA, 20 bp, Artificial Sequence
  Description of Artificial Sequence: Synthetic oligonucleotide
  Target: ATXN2; (+) strand; PAM type: YTN; PAM sequence: TTC
attttaaaaatgtatttatt

SEQ ID NO: 87059 - DNA, 20 bp, Artificial Sequence
  Description of Artificial Sequence: Synthetic oligonucleotide
  Target: ATXN2; (+) strand; PAM type: YTN; PAM sequence: TTT
taaaaatgtatttatttgtt

SEQ ID NO: 87060 - DNA, 20 bp, Artificial Sequence
  Description of Artificial Sequence: Synthetic oligonucleotide
  Target: ATXN2; (+) strand; PAM type: YTN; PAM sequence: TTT
aaaaatgtatttatttgttt

SEQ ID NO: 87061 - DNA, 20 bp, Artificial Sequence
  Description of Artificial Sequence: Synthetic oligonucleotide
  Target: ATXN2; (+) strand; PAM type: YTN; PAM sequence: TTA
aaaatgtatttatttgttta

SEQ ID NO: 87062 - DNA, 20 bp, Artificial Sequence
  Description of Artificial Sequence: Synthetic oligonucleotide
  Target: ATXN2; (+) strand; PAM type: YTN; PAM sequence: TTT
atttgtttaatttttgacag

SEQ ID NO: 87063 - DNA, 20 bp, Artificial Sequence
  Description of Artificial Sequence: Synthetic oligonucleotide
  Target: ATXN2; (+) strand; PAM type: YTN; PAM sequence: TTA
tttgtttaatttttgacaga

SEQ ID NO: 87064 - DNA, 20 bp, Artificial Sequence
  Description of Artificial Sequence: Synthetic oligonucleotide
  Target: ATXN2; (+) strand; PAM type: YTN; PAM sequence: TTT
gtttaatttttgacagagtc

SEQ ID NO: 87065 - DNA, 20 bp, Artificial Sequence
  Description of Artificial Sequence: Synthetic oligonucleotide
  Target: ATXN2; (+) strand; PAM type: YTN; PAM sequence: TTG
tttaatttttgacagagtct

SEQ ID NO: 87066 - DNA, 20 bp, Artificial Sequence
  Description of Artificial Sequence: Synthetic oligonucleotide
  Target: ATXN2; (+) strand; PAM type: YTN; PAM sequence: TTT
aatttttgacagagtctcgc

SEQ ID NO: 87067 - DNA, 20 bp, Artificial Sequence
  Description of Artificial Sequence: Synthetic oligonucleotide
  Target: ATXN2; (+) strand; PAM type: YTN; PAM sequence: TTA
atttttgacagagtctcgct

SEQ ID NO: 87068 - DNA, 20 bp, Artificial Sequence
  Description of Artificial Sequence: Synthetic oligonucleotide
  Target: ATXN2; (+) strand; PAM type: YTN; PAM sequence: TTT
ttgacagagtctcgctctgt

SEQ ID NO: 87069 - DNA, 20 bp, Artificial Sequence
  Description of Artificial Sequence: Synthetic oligonucleotide
  Target: ATXN2; (+) strand; PAM type: YTN; PAM sequence: TTT
tgacagagtctcgctctgtt

SEQ ID NO: 87070 - DNA, 20 bp, Artificial Sequence
  Description of Artificial Sequence: Synthetic oligonucleotide
  Target: ATXN2; (+) strand; PAM type: YTN; PAM sequence: TTT
gacagagtctcgctctgttg

SEQ ID NO: 87071 - DNA, 20 bp, Artificial Sequence
  Description of Artificial Sequence: Synthetic oligonucleotide
  Target: ATXN2; (+) strand; PAM type: YTN; PAM sequence: TTG
acagagtctcgctctgttgc

SEQ ID NO: 87072 - DNA, 20 bp, Artificial Sequence
  Description of Artificial Sequence: Synthetic oligonucleotide
  Target: ATXN2; (+) strand; PAM type: YTN; PAM sequence: CTC
gctctgttgcccaggctgga

SEQ ID NO: 87073 - DNA, 20 bp, Artificial Sequence
  Description of Artificial Sequence: Synthetic oligonucleotide
  Target: ATXN2; (+) strand; PAM type: YTN; PAM sequence: CTC
tgttgcccaggctggagtgc

SEQ ID NO: 87074 - DNA, 20 bp, Artificial Sequence
  Description of Artificial Sequence: Synthetic oligonucleotide
  Target: ATXN2; (+) strand; PAM type: YTN; PAM sequence: CTG
ttgcccaggctggagtgcag

SEQ ID NO: 87075 - DNA, 20 bp, Artificial Sequence
  Description of Artificial Sequence: Synthetic oligonucleotide
  Target: ATXN2; (+) strand; PAM type: YTN; PAM sequence: TTG
cccaggctggagtgcagggg

SEQ ID NO: 87076 - DNA, 20 bp, Artificial Sequence
  Description of Artificial Sequence: Synthetic oligonucleotide
  Target: ATXN2; (+) strand; PAM type: YTN; PAM sequence: CTG
gagtgcaggggcaccatctc

SEQ ID NO: 87077 - DNA, 20 bp, Artificial Sequence
  Description of Artificial Sequence: Synthetic oligonucleotide
  Target: ATXN2; (+) strand; PAM type: YTN; PAM sequence: CTC
ggctcactgcaacctccgcc

SEQ ID NO: 87078 - DNA, 20 bp, Artificial Sequence
  Description of Artificial Sequence: Synthetic oligonucleotide
  Target: ATXN2; (+) strand; PAM type: YTN; PAM sequence: CTC
actgcaacctccgcctcccg

SEQ ID NO: 87079 - DNA, 20 bp, Artificial Sequence
  Description of Artificial Sequence: Synthetic oligonucleotide
  Target: ATXN2; (+) strand; PAM type: YTN; PAM sequence: CTG
caacctccgcctcccgggtt

SEQ ID NO: 87080 - DNA, 20 bp, Artificial Sequence
  Description of Artificial Sequence: Synthetic oligonucleotide
  Target: ATXN2; (+) strand; PAM type: YTN; PAM sequence: CTC
cgcctcccgggttcaagcga

SEQ ID NO: 87081 - DNA, 20 bp, Artificial Sequence
  Description of Artificial Sequence: Synthetic oligonucleotide
  Target: ATXN2; (+) strand; PAM type: YTN; PAM sequence: CTC
ccgggttcaagcgattctcc

SEQ ID NO: 87082 - DNA, 20 bp, Artificial Sequence
  Description of Artificial Sequence: Synthetic oligonucleotide
  Target: ATXN2; (+) strand; PAM type: YTN; PAM sequence: TTC
aagcgattctcctgcctcag

SEQ ID NO: 87083 - DNA, 20 bp, Artificial Sequence
  Description of Artificial Sequence: Synthetic oligonucleotide
  Target: ATXN2; (+) strand; PAM type: YTN; PAM sequence: TTC
tcctgcctcagcctgccgag

SEQ ID NO: 87084 - DNA, 20 bp, Artificial Sequence
  Description of Artificial Sequence: Synthetic oligonucleotide
  Target: ATXN2; (+) strand; PAM type: YTN; PAM sequence: CTC
ctgcctcagcctgccgagta

SEQ ID NO: 87085 - DNA, 20 bp, Artificial Sequence
  Description of Artificial Sequence: Synthetic oligonucleotide
  Target: ATXN2; (+) strand; PAM type: YTN; PAM sequence: CTG
cctcagcctgccgagtagct

SEQ ID NO: 87086 - DNA, 20 bp, Artificial Sequence
  Description of Artificial Sequence: Synthetic oligonucleotide
  Target: ATXN2; (+) strand; PAM type: YTN; PAM sequence: CTC
agcctgccgagtagctggaa

SEQ ID NO: 87087 - DNA, 20 bp, Artificial Sequence
  Description of Artificial Sequence: Synthetic oligonucleotide
  Target: ATXN2; (+) strand; PAM type: YTN; PAM sequence: CTG
ccgagtagctggaactatag

SEQ ID NO: 87088 - DNA, 20 bp, Artificial Sequence
  Description of Artificial Sequence: Synthetic oligonucleotide
  Target: ATXN2; (+) strand; PAM type: YTN; PAM sequence: CTG
gaactataggcaagcatcac

SEQ ID NO: 87089 - DNA, 20 bp, Artificial Sequence
  Description of Artificial Sequence: Synthetic oligonucleotide
  Target: ATXN2; (+) strand; PAM type: YTN; PAM sequence: CTA
taggcaagcatcaccatgcc

SEQ ID NO: 87090 - DNA, 20 bp, Artificial Sequence
  Description of Artificial Sequence: Synthetic oligonucleotide
  Target: ATXN2; (+) strand; PAM type: YTN; PAM sequence: CTG
gctgatttttgtatttttag

SEQ ID NO: 87091 - DNA, 20 bp, Artificial Sequence
  Description of Artificial Sequence: Synthetic oligonucleotide
  Target: ATXN2; (+) strand; PAM type: YTN; PAM sequence: CTG
atttttgtatttttagtaga

SEQ ID NO: 87092 - DNA, 20 bp, Artificial Sequence
  Description of Artificial Sequence: Synthetic oligonucleotide
  Target: ATXN2; (+) strand; PAM type: YTN; PAM sequence: TTT
ttgtatttttagtagagacg

SEQ ID NO: 87093 - DNA, 20 bp, Artificial Sequence
  Description of Artificial Sequence: Synthetic oligonucleotide
  Target: ATXN2; (+) strand; PAM type: YTN; PAM sequence: TTT
tgtatttttagtagagacgg

SEQ ID NO: 87094 - DNA, 20 bp, Artificial Sequence
  Description of Artificial Sequence: Synthetic oligonucleotide
  Target: ATXN2; (+) strand; PAM type: YTN; PAM sequence: TTT
gtatttttagtagagacggg

SEQ ID NO: 87095 - DNA, 20 bp, Artificial Sequence
  Description of Artificial Sequence: Synthetic oligonucleotide
  Target: ATXN2; (+) strand; PAM type: YTN; PAM sequence: TTG
tatttttagtagagacgggt

SEQ ID NO: 87096 - DNA, 20 bp, Artificial Sequence
  Description of Artificial Sequence: Synthetic oligonucleotide
  Target: ATXN2; (+) strand; PAM type: YTN; PAM sequence: TTT
ttagtagagacgggtttcac

SEQ ID NO: 87097 - DNA, 20 bp, Artificial Sequence
  Description of Artificial Sequence: Synthetic oligonucleotide
  Target: ATXN2; (+) strand; PAM type: YTN; PAM sequence: TTT
tagtagagacgggtttcacc

SEQ ID NO: 87098 - DNA, 20 bp, Artificial Sequence
  Description of Artificial Sequence: Synthetic oligonucleotide
  Target: ATXN2; (+) strand; PAM type: YTN; PAM sequence: TTT
agtagagacgggtttcacca

SEQ ID NO: 87099 - DNA, 20 bp, Artificial Sequence
  Description of Artificial Sequence: Synthetic oligonucleotide
  Target: ATXN2; (+) strand; PAM type: YTN; PAM sequence: TTA
gtagagacgggtttcaccat

SEQ ID NO: 87100 - DNA, 20 bp, Artificial Sequence
  Description of Artificial Sequence: Synthetic oligonucleotide
  Target: ATXN2; (+) strand; PAM type: YTN; PAM sequence: TTT
caccatgttggccaggctgg

SEQ ID NO: 87101 - DNA, 20 bp, Artificial Sequence
  Description of Artificial Sequence: Synthetic oligonucleotide
  Target: ATXN2; (+) strand; PAM type: YTN; PAM sequence: TTC
accatgttggccaggctggt

SEQ ID NO: 87102 - DNA, 20 bp, Artificial Sequence
  Description of Artificial Sequence: Synthetic oligonucleotide
  Target: ATXN2; (+) strand; PAM type: YTN; PAM sequence: TTG
gccaggctggtctcgaacta

SEQ ID NO: 87103 - DNA, 20 bp, Artificial Sequence
  Description of Artificial Sequence: Synthetic oligonucleotide
  Target: ATXN2; (+) strand; PAM type: YTN; PAM sequence: CTG
gtctcgaactactggcctca

SEQ ID NO: 87104 - DNA, 20 bp, Artificial Sequence
  Description of Artificial Sequence: Synthetic oligonucleotide
  Target: ATXN2; (+) strand; PAM type: YTN; PAM sequence: CTC
gaactactggcctcaagtga

SEQ ID NO: 87105 - DNA, 20 bp, Artificial Sequence
  Description of Artificial Sequence: Synthetic oligonucleotide
  Target: ATXN2; (+) strand; PAM type: YTN; PAM sequence: CTA
ctggcctcaagtgatccatc

SEQ ID NO: 87106 - DNA, 20 bp, Artificial Sequence
  Description of Artificial Sequence: Synthetic oligonucleotide
  Target: ATXN2; (+) strand; PAM type: YTN; PAM sequence: CTG
gcctcaagtgatccatccgc

SEQ ID NO: 87107 - DNA, 20 bp, Artificial Sequence
  Description of Artificial Sequence: Synthetic oligonucleotide
  Target: ATXN2; (+) strand; PAM type: YTN; PAM sequence: CTC
aagtgatccatccgcctcgg

SEQ ID NO: 87108 - DNA, 20 bp, Artificial Sequence
  Description of Artificial Sequence: Synthetic oligonucleotide
  Target: ATXN2; (+) strand; PAM type: YTN; PAM sequence: CTC
ggcctcccaaagtgctggga

SEQ ID NO: 87109 - DNA, 20 bp, Artificial Sequence
  Description of Artificial Sequence: Synthetic oligonucleotide
  Target: ATXN2; (+) strand; PAM type: YTN; PAM sequence: CTC
ccaaagtgctgggattacag

SEQ ID NO: 87110 - DNA, 20 bp, Artificial Sequence
  Description of Artificial Sequence: Synthetic oligonucleotide
  Target: ATXN2; (+) strand; PAM type: YTN; PAM sequence: CTG
ggattacaggcatgagccac

SEQ ID NO: 87111 - DNA, 20 bp, Artificial Sequence
  Description of Artificial Sequence: Synthetic oligonucleotide
  Target: ATXN2; (+) strand; PAM type: YTN; PAM sequence: TTA
caggcatgagccactgcgcc

SEQ ID NO: 87112 - DNA, 20 bp, Artificial Sequence
  Description of Artificial Sequence: Synthetic oligonucleotide
  Target: ATXN2; (+) strand; PAM type: YTN; PAM sequence: CTG
cgcccggccatgtttgttta

SEQ ID NO: 87113 - DNA, 20 bp, Artificial Sequence
  Description of Artificial Sequence: Synthetic oligonucleotide
  Target: ATXN2; (+) strand; PAM type: YTN; PAM sequence: TTT
gtttatttttgagacccagt

SEQ ID NO: 87114 - DNA, 20 bp, Artificial Sequence
  Description of Artificial Sequence: Synthetic oligonucleotide
  Target: ATXN2; (+) strand; PAM type: YTN; PAM sequence: TTG
tttatttttgagacccagtc

SEQ ID NO: 87115 - DNA, 20 bp, Artificial Sequence
  Description of Artificial Sequence: Synthetic oligonucleotide
  Target: ATXN2; (+) strand; PAM type: YTN; PAM sequence: TTT
atttttgagacccagtcttg

SEQ ID NO: 87116 - DNA, 20 bp, Artificial Sequence
  Description of Artificial Sequence: Synthetic oligonucleotide
  Target: ATXN2; (+) strand; PAM type: YTN; PAM sequence: TTA
tttttgagacccagtcttgc

SEQ ID NO: 87117 - DNA, 20 bp, Artificial Sequence
  Description of Artificial Sequence: Synthetic oligonucleotide
  Target: ATXN2; (+) strand; PAM type: YTN; PAM sequence: TTT
ttgagacccagtcttgctgt

SEQ ID NO: 87118 - DNA, 20 bp, Artificial Sequence
  Description of Artificial Sequence: Synthetic oligonucleotide
  Target: ATXN2; (+) strand; PAM type: YTN; PAM sequence: TTT
tgagacccagtcttgctgtc

SEQ ID NO: 87119 - DNA, 20 bp, Artificial Sequence
  Description of Artificial Sequence: Synthetic oligonucleotide
  Target: ATXN2; (+) strand; PAM type: YTN; PAM sequence: TTT
gagacccagtcttgctgtca

SEQ ID NO: 87120 - DNA, 20 bp, Artificial Sequence
  Description of Artificial Sequence: Synthetic oligonucleotide
  Target: ATXN2; (+) strand; PAM type: YTN; PAM sequence: TTG
agacccagtcttgctgtcac

SEQ ID NO: 87121 - DNA, 20 bp, Artificial Sequence
  Description of Artificial Sequence: Synthetic oligonucleotide
  Target: ATXN2; (+) strand; PAM type: YTN; PAM sequence: CTT
gctgtcacccaggctggagt

SEQ ID NO: 87122 - DNA, 20 bp, Artificial Sequence
  Description of Artificial Sequence: Synthetic oligonucleotide
  Target: ATXN2; (+) strand; PAM type: YTN; PAM sequence: TTG
ctgtcacccaggctggagtg

SEQ ID NO: 87123 - DNA, 20 bp, Artificial Sequence
  Description of Artificial Sequence: Synthetic oligonucleotide
  Target: ATXN2; (+) strand; PAM type: YTN; PAM sequence: CTG
tcacccaggctggagtgcag

SEQ ID NO: 87124 - DNA, 20 bp, Artificial Sequence
  Description of Artificial Sequence: Synthetic oligonucleotide
  Target: ATXN2; (+) strand; PAM type: YTN; PAM sequence: CTG
gagtgcagtggagcgatctc

SEQ ID NO: 87125 - DNA, 20 bp, Artificial Sequence
  Description of Artificial Sequence: Synthetic oligonucleotide
  Target: ATXN2; (+) strand; PAM type: YTN; PAM sequence: CTC
ggctcactgcagcctccgcc

SEQ ID NO: 87126 - DNA, 20 bp, Artificial Sequence
  Description of Artificial Sequence: Synthetic oligonucleotide
  Target: ATXN2; (+) strand; PAM type: YTN; PAM sequence: CTC
actgcagcctccgcctcctg

SEQ ID NO: 87127 - DNA, 20 bp, Artificial Sequence
  Description of Artificial Sequence: Synthetic oligonucleotide
  Target: ATXN2; (+) strand; PAM type: YTN; PAM sequence: CTG
cagcctccgcctcctgggtt

SEQ ID NO: 87128 - DNA, 20 bp, Artificial Sequence
  Description of Artificial Sequence: Synthetic oligonucleotide
  Target: ATXN2; (+) strand; PAM type: YTN; PAM sequence: CTC
cgcctcctgggttaaagtga

SEQ ID NO: 87129 - DNA, 20 bp, Artificial Sequence
  Description of Artificial Sequence: Synthetic oligonucleotide
  Target: ATXN2; (+) strand; PAM type: YTN; PAM sequence: CTC
ctgggttaaagtgatactcc

SEQ ID NO: 87130 - DNA, 20 bp, Artificial Sequence
  Description of Artificial Sequence: Synthetic oligonucleotide
  Target: ATXN2; (+) strand; PAM type: YTN; PAM sequence: CTG
ggttaaagtgatactcctgc

SEQ ID NO: 87131 - DNA, 20 bp, Artificial Sequence
  Description of Artificial Sequence: Synthetic oligonucleotide
  Target: ATXN2; (+) strand; PAM type: YTN; PAM sequence: TTA
aagtgatactcctgcttcag

SEQ ID NO: 87132 - DNA, 20 bp, Artificial Sequence
  Description of Artificial Sequence: Synthetic oligonucleotide
  Target: ATXN2; (+) strand; PAM type: YTN; PAM sequence: CTC
ctgcttcagcctctgagtag

SEQ ID NO: 87133 - DNA, 20 bp, Artificial Sequence
  Description of Artificial Sequence: Synthetic oligonucleotide
  Target: ATXN2; (+) strand; PAM type: YTN; PAM sequence: CTG
cttcagcctctgagtagctg

SEQ ID NO: 87134 - DNA, 20 bp, Artificial Sequence
  Description of Artificial Sequence: Synthetic oligonucleotide
  Target: ATXN2; (+) strand; PAM type: YTN; PAM sequence: CTT
cagcctctgagtagctggga

SEQ ID NO: 87135 - DNA, 20 bp, Artificial Sequence
  Description of Artificial Sequence: Synthetic oligonucleotide
  Target: ATXN2; (+) strand; PAM type: YTN; PAM sequence: TTC
agcctctgagtagctgggat

SEQ ID NO: 87136 - DNA, 20 bp, Artificial Sequence
  Description of Artificial Sequence: Synthetic oligonucleotide
  Target: ATXN2; (+) strand; PAM type: YTN; PAM sequence: CTC
tgagtagctgggattacctg

SEQ ID NO: 87137 - DNA, 20 bp, Artificial Sequence
  Description of Artificial Sequence: Synthetic oligonucleotide
  Target: ATXN2; (+) strand; PAM type: YTN; PAM sequence: CTG
agtagctgggattacctggc

SEQ ID NO: 87138 - DNA, 20 bp, Artificial Sequence
  Description of Artificial Sequence: Synthetic oligonucleotide
  Target: ATXN2; (+) strand; PAM type: YTN; PAM sequence: CTG
ggattacctggctaattttt

SEQ ID NO: 87139 - DNA, 20 bp, Artificial Sequence
  Description of Artificial Sequence: Synthetic oligonucleotide
  Target: ATXN2; (+) strand; PAM type: YTN; PAM sequence: TTA
cctggctaatttttgtattt

SEQ ID NO: 87140 - DNA, 20 bp, Artificial Sequence
  Description of Artificial Sequence: Synthetic oligonucleotide
  Target: ATXN2; (+) strand; PAM type: YTN; PAM sequence: CTG
gctaatttttgtatttttag

SEQ ID NO: 87141 - DNA, 20 bp, Artificial Sequence
  Description of Artificial Sequence: Synthetic oligonucleotide
  Target: ATXN2; (+) strand; PAM type: YTN; PAM sequence: CTA
atttttgtatttttagtaga

SEQ ID NO: 87142 - DNA, 20 bp, Artificial Sequence
  Description of Artificial Sequence: Synthetic oligonucleotide
  Target: ATXN2; (+) strand; PAM type: YTN; PAM sequence: TTT
ttgtatttttagtagagacg

SEQ ID NO: 87143 - DNA, 20 bp, Artificial Sequence
  Description of Artificial Sequence: Synthetic oligonucleotide
  Target: ATXN2; (+) strand; PAM type: YTN; PAM sequence: TTT
tgtatttttagtagagacgg

SEQ ID NO: 87144 - DNA, 20 bp, Artificial Sequence
  Description of Artificial Sequence: Synthetic oligonucleotide
  Target: ATXN2; (+) strand; PAM type: YTN; PAM sequence: TTT
gtatttttagtagagacggg

SEQ ID NO: 87145 - DNA, 20 bp, Artificial Sequence
  Description of Artificial Sequence: Synthetic oligonucleotide
  Target: ATXN2; (+) strand; PAM type: YTN; PAM sequence: TTG
tatttttagtagagacgggg

SEQ ID NO: 87146 - DNA, 20 bp, Artificial Sequence
  Description of Artificial Sequence: Synthetic oligonucleotide
  Target: ATXN2; (+) strand; PAM type: YTN; PAM sequence: TTT
ttagtagagacggggtttca

SEQ ID NO: 87147 - DNA, 20 bp, Artificial Sequence
  Description of Artificial Sequence: Synthetic oligonucleotide
  Target: ATXN2; (+) strand; PAM type: YTN; PAM sequence: TTT
tagtagagacggggtttcac

SEQ ID NO: 87148 - DNA, 20 bp, Artificial Sequence
  Description of Artificial Sequence: Synthetic oligonucleotide
  Target: ATXN2; (+) strand; PAM type: YTN; PAM sequence: TTT
agtagagacggggtttcacc

SEQ ID NO: 87149 - DNA, 20 bp, Artificial Sequence
  Description of Artificial Sequence: Synthetic oligonucleotide
  Target: ATXN2; (+) strand; PAM type: YTN; PAM sequence: TTA
gtagagacggggtttcacca

SEQ ID NO: 87150 - DNA, 20 bp, Artificial Sequence
  Description of Artificial Sequence: Synthetic oligonucleotide
  Target: ATXN2; (+) strand; PAM type: YTN; PAM sequence: TTT
caccatgttggccaggctgg

SEQ ID NO: 87151 - DNA, 20 bp, Artificial Sequence
  Description of Artificial Sequence: Synthetic oligonucleotide
  Target: ATXN2; (+) strand; PAM type: YTN; PAM sequence: TTC
accatgttggccaggctggt

SEQ ID NO: 87152 - DNA, 20 bp, Artificial Sequence
  Description of Artificial Sequence: Synthetic oligonucleotide
  Target: ATXN2; (+) strand; PAM type: YTN; PAM sequence: TTG
gccaggctggtctcaaactc

SEQ ID NO: 87153 - DNA, 20 bp, Artificial Sequence
  Description of Artificial Sequence: Synthetic oligonucleotide
  Target: ATXN2; (+) strand; PAM type: YTN; PAM sequence: CTG
gtctcaaactcctggcctca

SEQ ID NO: 87154 - DNA, 20 bp, Artificial Sequence
  Description of Artificial Sequence: Synthetic oligonucleotide
  Target: ATXN2; (+) strand; PAM type: YTN; PAM sequence: CTC
aaactcctggcctcaagtga

SEQ ID NO: 87155 - DNA, 20 bp, Artificial Sequence
  Description of Artificial Sequence: Synthetic oligonucleotide
  Target: ATXN2; (+) strand; PAM type: YTN; PAM sequence: CTC
ctggcctcaagtgatccgtc

SEQ ID NO: 87156 - DNA, 20 bp, Artificial Sequence
  Description of Artificial Sequence: Synthetic oligonucleotide
  Target: ATXN2; (+) strand; PAM type: YTN; PAM sequence: CTG
gcctcaagtgatccgtccat

SEQ ID NO: 87157 - DNA, 20 bp, Artificial Sequence
  Description of Artificial Sequence: Synthetic oligonucleotide
  Target: ATXN2; (+) strand; PAM type: YTN; PAM sequence: CTC
aagtgatccgtccatctcgg

SEQ ID NO: 87158 - DNA, 20 bp, Artificial Sequence
  Description of Artificial Sequence: Synthetic oligonucleotide
  Target: ATXN2; (+) strand; PAM type: YTN; PAM sequence: CTC
ggcctcccaaagtgttggga

SEQ ID NO: 87159 - DNA, 20 bp, Artificial Sequence
  Description of Artificial Sequence: Synthetic oligonucleotide
  Target: ATXN2; (+) strand; PAM type: YTN; PAM sequence: CTC
ccaaagtgttgggattacag

SEQ ID NO: 87160 - DNA, 20 bp, Artificial Sequence
  Description of Artificial Sequence: Synthetic oligonucleotide
  Target: ATXN2; (+) strand; PAM type: YTN; PAM sequence: TTG
ggattacaggtgtgagcaac

SEQ ID NO: 87161 - DNA, 20 bp, Artificial Sequence
  Description of Artificial Sequence: Synthetic oligonucleotide
  Target: ATXN2; (+) strand; PAM type: YTN; PAM sequence: TTA
caggtgtgagcaactgcacc

SEQ ID NO: 87162 - DNA, 20 bp, Artificial Sequence
  Description of Artificial Sequence: Synthetic oligonucleotide
  Target: ATXN2; (+) strand; PAM type: YTN; PAM sequence: CTG
cacccggcctaaaaatttat

SEQ ID NO: 87163 - DNA, 20 bp, Artificial Sequence
  Description of Artificial Sequence: Synthetic oligonucleotide
  Target: ATXN2; (+) strand; PAM type: YTN; PAM sequence: CTA
aaaatttatttttgaataat

SEQ ID NO: 87164 - DNA, 20 bp, Artificial Sequence
  Description of Artificial Sequence: Synthetic oligonucleotide
  Target: ATXN2; (+) strand; PAM type: YTN; PAM sequence: TTT
atttttgaataataaaaaag

SEQ ID NO: 87165 - DNA, 20 bp, Artificial Sequence
  Description of Artificial Sequence: Synthetic oligonucleotide
  Target: ATXN2; (+) strand; PAM type: YTN; PAM sequence: TTA
tttttgaataataaaaaagc

SEQ ID NO: 87166 - DNA, 20 bp, Artificial Sequence
  Description of Artificial Sequence: Synthetic oligonucleotide
  Target: ATXN2; (+) strand; PAM type: YTN; PAM sequence: TTT
ttgaataataaaaaagccac

SEQ ID NO: 87167 - DNA, 20 bp, Artificial Sequence
  Description of Artificial Sequence: Synthetic oligonucleotide
  Target: ATXN2; (+) strand; PAM type: YTN; PAM sequence: TTT
tgaataataaaaaagccaca

SEQ ID NO: 87168 - DNA, 20 bp, Artificial Sequence
  Description of Artificial Sequence: Synthetic oligonucleotide
  Target: ATXN2; (+) strand; PAM type: YTN; PAM sequence: TTT
gaataataaaaaagccacat

SEQ ID NO: 87169 - DNA, 20 bp, Artificial Sequence
  Description of Artificial Sequence: Synthetic oligonucleotide
  Target: ATXN2; (+) strand; PAM type: YTN; PAM sequence: TTG
aataataaaaaagccacatg

SEQ ID NO: 87170 - DNA, 20 bp, Artificial Sequence
  Description of Artificial Sequence: Synthetic oligonucleotide
  Target: ATXN2; (+) strand; PAM type: YTN; PAM sequence: CTA
agtagctaatacggtggaca

SEQ ID NO: 87171 - DNA, 20 bp, Artificial Sequence
  Description of Artificial Sequence: Synthetic oligonucleotide
  Target: ATXN2; (+) strand; PAM type: YTN; PAM sequence: CTA
atacggtggacagtgcagtt

SEQ ID NO: 87172 - DNA, 20 bp, Artificial Sequence
  Description of Artificial Sequence: Synthetic oligonucleotide
  Target: ATXN2; (+) strand; PAM type: YTN; PAM sequence: TTT
tgttgttgttttgagacgga

SEQ ID NO: 87173 - DNA, 20 bp, Artificial Sequence
  Description of Artificial Sequence: Synthetic oligonucleotide
  Target: ATXN2; (+) strand; PAM type: YTN; PAM sequence: TTT
gttgttgttttgagacggag

SEQ ID NO: 87174 - DNA, 20 bp, Artificial Sequence
  Description of Artificial Sequence: Synthetic oligonucleotide
  Target: ATXN2; (+) strand; PAM type: YTN; PAM sequence: TTG
ttgttgttttgagacggagt

SEQ ID NO: 87175 - DNA, 20 bp, Artificial Sequence
  Description of Artificial Sequence: Synthetic oligonucleotide
  Target: ATXN2; (+) strand; PAM type: YTN; PAM sequence: TTG
ttgttttgagacggagtctc

SEQ ID NO: 87176 - DNA, 20 bp, Artificial Sequence
  Description of Artificial Sequence: Synthetic oligonucleotide
  Target: ATXN2; (+) strand; PAM type: YTN; PAM sequence: TTG
ttttgagacggagtctcgct

SEQ ID NO: 87177 - DNA, 20 bp, Artificial Sequence
  Description of Artificial Sequence: Synthetic oligonucleotide
  Target: ATXN2; (+) strand; PAM type: YTN; PAM sequence: TTT
tgagacggagtctcgctctg

SEQ ID NO: 87178 - DNA, 20 bp, Artificial Sequence
  Description of Artificial Sequence: Synthetic oligonucleotide
  Target: ATXN2; (+) strand; PAM type: YTN; PAM sequence: TTT
gagacggagtctcgctctgt

SEQ ID NO: 87179 - DNA, 20 bp, Artificial Sequence
  Description of Artificial Sequence: Synthetic oligonucleotide
  Target: ATXN2; (+) strand; PAM type: YTN; PAM sequence: TTG
agacggagtctcgctctgtt

SEQ ID NO: 87180 - DNA, 20 bp, Artificial Sequence
  Description of Artificial Sequence: Synthetic oligonucleotide
  Target: ATXN2; (+) strand; PAM type: YTN; PAM sequence: CTC
gctctgttgcccagggtgga

SEQ ID NO: 87181 - DNA, 20 bp, Artificial Sequence
  Description of Artificial Sequence: Synthetic oligonucleotide
  Target: ATXN2; (+) strand; PAM type: YTN; PAM sequence: CTC
tgttgcccagggtggagtgc

SEQ ID NO: 87182 - DNA, 20 bp, Artificial Sequence
  Description of Artificial Sequence: Synthetic oligonucleotide
  Target: ATXN2; (+) strand; PAM type: YTN; PAM sequence: CTG
ttgcccagggtggagtgcag

SEQ ID NO: 87183 - DNA, 20 bp, Artificial Sequence
  Description of Artificial Sequence: Synthetic oligonucleotide
  Target: ATXN2; (+) strand; PAM type: YTN; PAM sequence: TTG
cccagggtggagtgcagtgg

SEQ ID NO: 87184 - DNA, 20 bp, Artificial Sequence
  Description of Artificial Sequence: Synthetic oligonucleotide
  Target: ATXN2; (+) strand; PAM type: YTN; PAM sequence: CTC
accgcaacctctgcctcccg

SEQ ID NO: 87185 - DNA, 20 bp, Artificial Sequence
  Description of Artificial Sequence: Synthetic oligonucleotide
  Target: ATXN2; (+) strand; PAM type: YTN; PAM sequence: CTC
tgcctcccgggttcaagcga

SEQ ID NO: 87186 - DNA, 20 bp, Artificial Sequence
  Description of Artificial Sequence: Synthetic oligonucleotide
  Target: ATXN2; (+) strand; PAM type: YTN; PAM sequence: CTG
cctcccgggttcaagcgatt

SEQ ID NO: 87187 - DNA, 20 bp, Artificial Sequence
  Description of Artificial Sequence: Synthetic oligonucleotide
  Target: ATXN2; (+) strand; PAM type: YTN; PAM sequence: CTC
ccgggttcaagcgattctcc

SEQ ID NO: 87188 - DNA, 20 bp, Artificial Sequence
  Description of Artificial Sequence: Synthetic oligonucleotide
  Target: ATXN2; (+) strand; PAM type: YTN; PAM sequence: TTC
aagcgattctcctgtgtcag

SEQ ID NO: 87189 - DNA, 20 bp, Artificial Sequence
  Description of Artificial Sequence: Synthetic oligonucleotide
  Target: ATXN2; (+) strand; PAM type: YTN; PAM sequence: TTC
tcctgtgtcagcctcctgag

SEQ ID NO: 87190 - DNA, 20 bp, Artificial Sequence
  Description of Artificial Sequence: Synthetic oligonucleotide
  Target: ATXN2; (+) strand; PAM type: YTN; PAM sequence: CTC
ctgtgtcagcctcctgagta

SEQ ID NO: 87191 - DNA, 20 bp, Artificial Sequence
  Description of Artificial Sequence: Synthetic oligonucleotide
  Target: ATXN2; (+) strand; PAM type: YTN; PAM sequence: CTG
tgtcagcctcctgagtagct

SEQ ID NO: 87192 - DNA, 20 bp, Artificial Sequence
  Description of Artificial Sequence: Synthetic oligonucleotide
  Target: ATXN2; (+) strand; PAM type: YTN; PAM sequence: CTC
ctgagtagctaggactacag

SEQ ID NO: 87193 - DNA, 20 bp, Artificial Sequence
  Description of Artificial Sequence: Synthetic oligonucleotide
  Target: ATXN2; (+) strand; PAM type: YTN; PAM sequence: CTG
agtagctaggactacaggcg

SEQ ID NO: 87194 - DNA, 20 bp, Artificial Sequence
  Description of Artificial Sequence: Synthetic oligonucleotide
  Target: ATXN2; (+) strand; PAM type: YTN; PAM sequence: CTA
ggactacaggcgcgcctggc

SEQ ID NO: 87195 - DNA, 20 bp, Artificial Sequence
  Description of Artificial Sequence: Synthetic oligonucleotide
  Target: ATXN2; (+) strand; PAM type: YTN; PAM sequence: CTA
caggcgcgcctggctaactt

SEQ ID NO: 87196 - DNA, 20 bp, Artificial Sequence
  Description of Artificial Sequence: Synthetic oligonucleotide
  Target: ATXN2; (+) strand; PAM type: YTN; PAM sequence: CTG
gctaacttttttgtattttt

SEQ ID NO: 87197 - DNA, 20 bp, Artificial Sequence
  Description of Artificial Sequence: Synthetic oligonucleotide
  Target: ATXN2; (+) strand; PAM type: YTN; PAM sequence: CTA
acttttttgtatttttagta

SEQ ID NO: 87198 - DNA, 20 bp, Artificial Sequence
  Description of Artificial Sequence: Synthetic oligonucleotide
  Target: ATXN2; (+) strand; PAM type: YTN; PAM sequence: CTT
ttttgtatttttagtagaga

SEQ ID NO: 87199 - DNA, 20 bp, Artificial Sequence
  Description of Artificial Sequence: Synthetic oligonucleotide
  Target: ATXN2; (+) strand; PAM type: YTN; PAM sequence: TTT
tttgtatttttagtagagac

SEQ ID NO: 87200 - DNA, 20 bp, Artificial Sequence
  Description of Artificial Sequence: Synthetic oligonucleotide
  Target: ATXN2; (+) strand; PAM type: YTN; PAM sequence: TTT
ttgtatttttagtagagaca

SEQ ID NO: 87201 - DNA, 20 bp, Artificial Sequence
  Description of Artificial Sequence: Synthetic oligonucleotide
  Target: ATXN2; (+) strand; PAM type: YTN; PAM sequence: TTT
tgtatttttagtagagacag

SEQ ID NO: 87202 - DNA, 20 bp, Artificial Sequence
  Description of Artificial Sequence: Synthetic oligonucleotide
  Target: ATXN2; (+) strand; PAM type: YTN; PAM sequence: TTT
gtatttttagtagagacagg

SEQ ID NO: 87203 - DNA, 20 bp, Artificial Sequence
  Description of Artificial Sequence: Synthetic oligonucleotide
  Target: ATXN2; (+) strand; PAM type: YTN; PAM sequence: TTG
tatttttagtagagacaggg

SEQ ID NO: 87204 - DNA, 20 bp, Artificial Sequence
  Description of Artificial Sequence: Synthetic oligonucleotide
  Target: ATXN2; (+) strand; PAM type: YTN; PAM sequence: TTT
ttagtagagacagggtttca

SEQ ID NO: 87205 - DNA, 20 bp, Artificial Sequence
  Description of Artificial Sequence: Synthetic oligonucleotide
  Target: ATXN2; (+) strand; PAM type: YTN; PAM sequence: TTT
tagtagagacagggtttcac

SEQ ID NO: 87206 - DNA, 20 bp, Artificial Sequence
  Description of Artificial Sequence: Synthetic oligonucleotide
  Target: ATXN2; (+) strand; PAM type: YTN; PAM sequence: TTT
agtagagacagggtttcacc

SEQ ID NO: 87207 - DNA, 20 bp, Artificial Sequence
  Description of Artificial Sequence: Synthetic oligonucleotide
  Target: ATXN2; (+) strand; PAM type: YTN; PAM sequence: TTA
gtagagacagggtttcacca

SEQ ID NO: 87208 - DNA, 20 bp, Artificial Sequence
  Description of Artificial Sequence: Synthetic oligonucleotide
  Target: ATXN2; (+) strand; PAM type: YTN; PAM sequence: TTT
caccatgttggtctggctgg

SEQ ID NO: 87209 - DNA, 20 bp, Artificial Sequence
  Description of Artificial Sequence: Synthetic oligonucleotide
  Target: ATXN2; (+) strand; PAM type: YTN; PAM sequence: TTC
accatgttggtctggctggt

SEQ ID NO: 87210 - DNA, 20 bp, Artificial Sequence
  Description of Artificial Sequence: Synthetic oligonucleotide
  Target: ATXN2; (+) strand; PAM type: YTN; PAM sequence: TTG
gtctggctggtcttgaactc

SEQ ID NO: 87211 - DNA, 20 bp, Artificial Sequence
  Description of Artificial Sequence: Synthetic oligonucleotide
  Target: ATXN2; (+) strand; PAM type: YTN; PAM sequence: CTG
gctggtcttgaactcctgac

SEQ ID NO: 87212 - DNA, 20 bp, Artificial Sequence
  Description of Artificial Sequence: Synthetic oligonucleotide
  Target: ATXN2; (+) strand; PAM type: YTN; PAM sequence: CTG
gtcttgaactcctgacctca

SEQ ID NO: 87213 - DNA, 20 bp, Artificial Sequence
  Description of Artificial Sequence: Synthetic oligonucleotide
  Target: ATXN2; (+) strand; PAM type: YTN; PAM sequence: CTT
gaactcctgacctcaggtga

SEQ ID NO: 87214 - DNA, 20 bp, Artificial Sequence
  Description of Artificial Sequence: Synthetic oligonucleotide
  Target: ATXN2; (+) strand; PAM type: YTN; PAM sequence: TTG
aactcctgacctcaggtgat

SEQ ID NO: 87215 - DNA, 20 bp, Artificial Sequence
  Description of Artificial Sequence: Synthetic oligonucleotide
  Target: ATXN2; (+) strand; PAM type: YTN; PAM sequence: CTC
ctgacctcaggtgatccact

SEQ ID NO: 87216 - DNA, 20 bp, Artificial Sequence
  Description of Artificial Sequence: Synthetic oligonucleotide
  Target: ATXN2; (+) strand; PAM type: YTN; PAM sequence: CTG
acctcaggtgatccacttgt

SEQ ID NO: 87217 - DNA, 20 bp, Artificial Sequence
  Description of Artificial Sequence: Synthetic oligonucleotide
  Target: ATXN2; (+) strand; PAM type: YTN; PAM sequence: CTC
aggtgatccacttgtcttgg

SEQ ID NO: 87218 - DNA, 20 bp, Artificial Sequence
  Description of Artificial Sequence: Synthetic oligonucleotide
  Target: ATXN2; (+) strand; PAM type: YTN; PAM sequence: CTT
gtcttggcctcccaaagtgc

SEQ ID NO: 87219 - DNA, 20 bp, Artificial Sequence
  Description of Artificial Sequence: Synthetic oligonucleotide
  Target: ATXN2; (+) strand; PAM type: YTN; PAM sequence: TTG
tcttggcctcccaaagtgct

SEQ ID NO: 87220 - DNA, 20 bp, Artificial Sequence
  Description of Artificial Sequence: Synthetic oligonucleotide
  Target: ATXN2; (+) strand; PAM type: YTN; PAM sequence: CTT
ggcctcccaaagtgctggga

SEQ ID NO: 87221 - DNA, 20 bp, Artificial Sequence
  Description of Artificial Sequence: Synthetic oligonucleotide
  Target: ATXN2; (+) strand; PAM type: YTN; PAM sequence: TTG
gcctcccaaagtgctgggac

SEQ ID NO: 87222 - DNA, 20 bp, Artificial Sequence
  Description of Artificial Sequence: Synthetic oligonucleotide
  Target: ATXN2; (+) strand; PAM type: YTN; PAM sequence: CTC
ccaaagtgctgggactacag

SEQ ID NO: 87223 - DNA, 20 bp, Artificial Sequence
  Description of Artificial Sequence: Synthetic oligonucleotide
  Target: ATXN2; (+) strand; PAM type: YTN; PAM sequence: CTG
ggactacaggcgtgagccac

SEQ ID NO: 87224 - DNA, 20 bp, Artificial Sequence
  Description of Artificial Sequence: Synthetic oligonucleotide
  Target: ATXN2; (+) strand; PAM type: YTN; PAM sequence: CTA
caggcgtgagccaccgcgcc

SEQ ID NO: 87225 - DNA, 20 bp, Artificial Sequence
  Description of Artificial Sequence: Synthetic oligonucleotide
  Target: ATXN2; (+) strand; PAM type: YTN; PAM sequence: TTC
tactggatagtgatgtctac

SEQ ID NO: 87226 - DNA, 20 bp, Artificial Sequence
  Description of Artificial Sequence: Synthetic oligonucleotide
  Target: ATXN2; (+) strand; PAM type: YTN; PAM sequence: CTA
ctggatagtgatgtctacag

SEQ ID NO: 87227 - DNA, 20 bp, Artificial Sequence
  Description of Artificial Sequence: Synthetic oligonucleotide
  Target: ATXN2; (+) strand; PAM type: YTN; PAM sequence: CTG
gatagtgatgtctacagttg

SEQ ID NO: 87228 - DNA, 20 bp, Artificial Sequence
  Description of Artificial Sequence: Synthetic oligonucleotide
  Target: ATXN2; (+) strand; PAM type: YTN; PAM sequence: CTA
cagttgtccatggtccccta

SEQ ID NO: 87229 - DNA, 20 bp, Artificial Sequence
  Description of Artificial Sequence: Synthetic oligonucleotide
  Target: ATXN2; (+) strand; PAM type: YTN; PAM sequence: TTG
tccatggtcccctactgtta

SEQ ID NO: 87230 - DNA, 20 bp, Artificial Sequence
  Description of Artificial Sequence: Synthetic oligonucleotide
  Target: ATXN2; (+) strand; PAM type: YTN; PAM sequence: CTA
ctgttaaaccattagcacta

SEQ ID NO: 87231 - DNA, 20 bp, Artificial Sequence
  Description of Artificial Sequence: Synthetic oligonucleotide
  Target: ATXN2; (+) strand; PAM type: YTN; PAM sequence: CTG
ttaaaccattagcactaacc

SEQ ID NO: 87232 - DNA, 20 bp, Artificial Sequence
  Description of Artificial Sequence: Synthetic oligonucleotide
  Target: ATXN2; (+) strand; PAM type: YTN; PAM sequence: TTA
aaccattagcactaacccct

SEQ ID NO: 87233 - DNA, 20 bp, Artificial Sequence
  Description of Artificial Sequence: Synthetic oligonucleotide
  Target: ATXN2; (+) strand; PAM type: YTN; PAM sequence: TTA
gcactaacccctaccgccac

SEQ ID NO: 87234 - DNA, 20 bp, Artificial Sequence
  Description of Artificial Sequence: Synthetic oligonucleotide
  Target: ATXN2; (+) strand; PAM type: YTN; PAM sequence: CTA
acccctaccgccaccccagc

SEQ ID NO: 87235 - DNA, 20 bp, Artificial Sequence
  Description of Artificial Sequence: Synthetic oligonucleotide
  Target: ATXN2; (+) strand; PAM type: YTN; PAM sequence: CTA
ccgccaccccagcctcttaa

SEQ ID NO: 87236 - DNA, 20 bp, Artificial Sequence
  Description of Artificial Sequence: Synthetic oligonucleotide
  Target: ATXN2; (+) strand; PAM type: YTN; PAM sequence: CTC
ttaaaaatgtcatttgtaac

SEQ ID NO: 87237 - DNA, 20 bp, Artificial Sequence
  Description of Artificial Sequence: Synthetic oligonucleotide
  Target: ATXN2; (+) strand; PAM type: YTN; PAM sequence: CTT
aaaaatgtcatttgtaacaa

SEQ ID NO: 87238 - DNA, 20 bp, Artificial Sequence
  Description of Artificial Sequence: Synthetic oligonucleotide
  Target: ATXN2; (+) strand; PAM type: YTN; PAM sequence: TTA
aaaatgtcatttgtaacaat

SEQ ID NO: 87239 - DNA, 20 bp, Artificial Sequence
  Description of Artificial Sequence: Synthetic oligonucleotide
  Target: ATXN2; (+) strand; PAM type: YTN; PAM sequence: TTT
gtaacaatctaaatctgtct

SEQ ID NO: 87240 - DNA, 20 bp, Artificial Sequence
  Description of Artificial Sequence: Synthetic oligonucleotide
  Target: ATXN2; (+) strand; PAM type: YTN; PAM sequence: TTG
taacaatctaaatctgtcta

SEQ ID NO: 87241 - DNA, 20 bp, Artificial Sequence
  Description of Artificial Sequence: Synthetic oligonucleotide
  Target: ATXN2; (+) strand; PAM type: YTN; PAM sequence: CTA
aatctgtctaaggaaaagca

SEQ ID NO: 87242 - DNA, 20 bp, Artificial Sequence
  Description of Artificial Sequence: Synthetic oligonucleotide
  Target: ATXN2; (+) strand; PAM type: YTN; PAM sequence: CTG
tctaaggaaaagcaattccc

SEQ ID NO: 87243 - DNA, 20 bp, Artificial Sequence
  Description of Artificial Sequence: Synthetic oligonucleotide
  Target: ATXN2; (+) strand; PAM type: YTN; PAM sequence: CTA
aggaaaagcaattcccaaat

SEQ ID NO: 87244 - DNA, 20 bp, Artificial Sequence
  Description of Artificial Sequence: Synthetic oligonucleotide
  Target: ATXN2; (+) strand; PAM type: YTN; PAM sequence: TTC
ccaaatcccaaattctgttc

SEQ ID NO: 87245 - DNA, 20 bp, Artificial Sequence
  Description of Artificial Sequence: Synthetic oligonucleotide
  Target: ATXN2; (+) strand; PAM type: YTN; PAM sequence: TTC
tgttcatggaggttcataaa

SEQ ID NO: 87246 - DNA, 20 bp, Artificial Sequence
  Description of Artificial Sequence: Synthetic oligonucleotide
  Target: ATXN2; (+) strand; PAM type: YTN; PAM sequence: CTG
ttcatggaggttcataaaga

SEQ ID NO: 87247 - DNA, 20 bp, Artificial Sequence
  Description of Artificial Sequence: Synthetic oligonucleotide
  Target: ATXN2; (+) strand; PAM type: YTN; PAM sequence: TTC
atggaggttcataaagatac

SEQ ID NO: 87248 - DNA, 20 bp, Artificial Sequence
  Description of Artificial Sequence: Synthetic oligonucleotide
  Target: ATXN2; (+) strand; PAM type: YTN; PAM sequence: TTC
ataaagatacagtacggaat

SEQ ID NO: 87249 - DNA, 20 bp, Artificial Sequence
  Description of Artificial Sequence: Synthetic oligonucleotide
  Target: ATXN2; (+) strand; PAM type: YTN; PAM sequence: CTC
agaggtttttgttttttttt

SEQ ID NO: 87250 - DNA, 20 bp, Artificial Sequence
  Description of Artificial Sequence: Synthetic oligonucleotide
  Target: ATXN2; (+) strand; PAM type: YTN; PAM sequence: TTT
ttgttttttttttgtaactt

SEQ ID NO: 87251 - DNA, 20 bp, Artificial Sequence
  Description of Artificial Sequence: Synthetic oligonucleotide
  Target: ATXN2; (+) strand; PAM type: YTN; PAM sequence: TTT
tgttttttttttgtaacttt

SEQ ID NO: 87252 - DNA, 20 bp, Artificial Sequence
  Description of Artificial Sequence: Synthetic oligonucleotide
  Target: ATXN2; (+) strand; PAM type: YTN; PAM sequence: TTT
gttttttttttgtaacttta

SEQ ID NO: 87253 - DNA, 20 bp, Artificial Sequence
  Description of Artificial Sequence: Synthetic oligonucleotide
  Target: ATXN2; (+) strand; PAM type: YTN; PAM sequence: TTG
ttttttttttgtaactttat

SEQ ID NO: 87254 - DNA, 20 bp, Artificial Sequence
  Description of Artificial Sequence: Synthetic oligonucleotide
  Target: ATXN2; (+) strand; PAM type: YTN; PAM sequence: TTT
tttttttgtaactttattta

SEQ ID NO: 87255 - DNA, 20 bp, Artificial Sequence
  Description of Artificial Sequence: Synthetic oligonucleotide
  Target: ATXN2; (+) strand; PAM type: YTN; PAM sequence: TTT
ttttttgtaactttatttat

SEQ ID NO: 87256 - DNA, 20 bp, Artificial Sequence
  Description of Artificial Sequence: Synthetic oligonucleotide
  Target: ATXN2; (+) strand; PAM type: YTN; PAM sequence: TTT
tttttgtaactttatttatt

SEQ ID NO: 87257 - DNA, 20 bp, Artificial Sequence
  Description of Artificial Sequence: Synthetic oligonucleotide
  Target: ATXN2; (+) strand; PAM type: YTN; PAM sequence: TTT
ttttgtaactttatttattc

SEQ ID NO: 87258 - DNA, 20 bp, Artificial Sequence
  Description of Artificial Sequence: Synthetic oligonucleotide
  Target: ATXN2; (+) strand; PAM type: YTN; PAM sequence: TTT
tttgtaactttatttattca

SEQ ID NO: 87259 - DNA, 20 bp, Artificial Sequence
  Description of Artificial Sequence: Synthetic oligonucleotide
  Target: ATXN2; (+) strand; PAM type: YTN; PAM sequence: TTT
ttgtaactttatttattcaa

SEQ ID NO: 87260 - DNA, 20 bp, Artificial Sequence
  Description of Artificial Sequence: Synthetic oligonucleotide
  Target: ATXN2; (+) strand; PAM type: YTN; PAM sequence: TTT
tgtaactttatttattcaag

SEQ ID NO: 87261 - DNA, 20 bp, Artificial Sequence
  Description of Artificial Sequence: Synthetic oligonucleotide
  Target: ATXN2; (+) strand; PAM type: YTN; PAM sequence: TTT
gtaactttatttattcaaga

SEQ ID NO: 87262 - DNA, 20 bp, Artificial Sequence
  Description of Artificial Sequence: Synthetic oligonucleotide
  Target: ATXN2; (+) strand; PAM type: YTN; PAM sequence: TTG
taactttatttattcaagaa

SEQ ID NO: 87263 - DNA, 20 bp, Artificial Sequence
  Description of Artificial Sequence: Synthetic oligonucleotide
  Target: ATXN2; (+) strand; PAM type: YTN; PAM sequence: CTT
tatttattcaagaaattttg

SEQ ID NO: 87264 - DNA, 20 bp, Artificial Sequence
  Description of Artificial Sequence: Synthetic oligonucleotide
  Target: ATXN2; (+) strand; PAM type: YTN; PAM sequence: TTT
atttattcaagaaattttgt

SEQ ID NO: 87265 - DNA, 20 bp, Artificial Sequence
  Description of Artificial Sequence: Synthetic oligonucleotide
  Target: ATXN2; (+) strand; PAM type: YTN; PAM sequence: TTA
tttattcaagaaattttgta

SEQ ID NO: 87266 - DNA, 20 bp, Artificial Sequence
  Description of Artificial Sequence: Synthetic oligonucleotide
  Target: ATXN2; (+) strand; PAM type: YTN; PAM sequence: TTT
attcaagaaattttgtacta

SEQ ID NO: 87267 - DNA, 20 bp, Artificial Sequence
  Description of Artificial Sequence: Synthetic oligonucleotide
  Target: ATXN2; (+) strand; PAM type: YTN; PAM sequence: TTA
ttcaagaaattttgtactaa

SEQ ID NO: 87268 - DNA, 20 bp, Artificial Sequence
  Description of Artificial Sequence: Synthetic oligonucleotide
  Target: ATXN2; (+) strand; PAM type: YTN; PAM sequence: TTC
aagaaattttgtactaaaaa

SEQ ID NO: 87269 - DNA, 20 bp, Artificial Sequence
  Description of Artificial Sequence: Synthetic oligonucleotide
  Target: ATXN2; (+) strand; PAM type: YTN; PAM sequence: TTT
tgtactaaaaagtttgaaat

SEQ ID NO: 87270 - DNA, 20 bp, Artificial Sequence
  Description of Artificial Sequence: Synthetic oligonucleotide
  Target: ATXN2; (+) strand; PAM type: YTN; PAM sequence: TTT
gtactaaaaagtttgaaatt

SEQ ID NO: 87271 - DNA, 20 bp, Artificial Sequence
  Description of Artificial Sequence: Synthetic oligonucleotide
  Target: ATXN2; (+) strand; PAM type: YTN; PAM sequence: TTG
tactaaaaagtttgaaattt

SEQ ID NO: 87272 - DNA, 20 bp, Artificial Sequence
  Description of Artificial Sequence: Synthetic oligonucleotide
  Target: ATXN2; (+) strand; PAM type: YTN; PAM sequence: CTA
aaaagtttgaaatttcactt

SEQ ID NO: 87273 - DNA, 20 bp, Artificial Sequence
  Description of Artificial Sequence: Synthetic oligonucleotide
  Target: ATXN2; (+) strand; PAM type: YTN; PAM sequence: TTT
gaaatttcacttttaaatac

SEQ ID NO: 87274 - DNA, 20 bp, Artificial Sequence
  Description of Artificial Sequence: Synthetic oligonucleotide
  Target: ATXN2; (+) strand; PAM type: YTN; PAM sequence: TTG
aaatttcacttttaaatacc

SEQ ID NO: 87275 - DNA, 20 bp, Artificial Sequence
  Description of Artificial Sequence: Synthetic oligonucleotide
  Target: ATXN2; (+) strand; PAM type: YTN; PAM sequence: TTT
cacttttaaataccttctaa

SEQ ID NO: 87276 - DNA, 20 bp, Artificial Sequence
  Description of Artificial Sequence: Synthetic oligonucleotide
  Target: ATXN2; (+) strand; PAM type: YTN; PAM sequence: TTC
acttttaaataccttctaag

SEQ ID NO: 87277 - DNA, 20 bp, Artificial Sequence
  Description of Artificial Sequence: Synthetic oligonucleotide
  Target: ATXN2; (+) strand; PAM type: YTN; PAM sequence: CTT
ttaaataccttctaagcaaa

SEQ ID NO: 87278 - DNA, 20 bp, Artificial Sequence
  Description of Artificial Sequence: Synthetic oligonucleotide
  Target: ATXN2; (+) strand; PAM type: YTN; PAM sequence: TTT
taaataccttctaagcaaag

SEQ ID NO: 87279 - DNA, 20 bp, Artificial Sequence
  Description of Artificial Sequence: Synthetic oligonucleotide
  Target: ATXN2; (+) strand; PAM type: YTN; PAM sequence: TTT
aaataccttctaagcaaagt

SEQ ID NO: 87280 - DNA, 20 bp, Artificial Sequence
  Description of Artificial Sequence: Synthetic oligonucleotide
  Target: ATXN2; (+) strand; PAM type: YTN; PAM sequence: TTA
aataccttctaagcaaagta

SEQ ID NO: 87281 - DNA, 20 bp, Artificial Sequence
  Description of Artificial Sequence: Synthetic oligonucleotide
  Target: ATXN2; (+) strand; PAM type: YTN; PAM sequence: CTT
ctaagcaaagtattaagaat

SEQ ID NO: 87282 - DNA, 20 bp, Artificial Sequence
  Description of Artificial Sequence: Synthetic oligonucleotide
  Target: ATXN2; (+) strand; PAM type: YTN; PAM sequence: TTC
taagcaaagtattaagaata

SEQ ID NO: 87283 - DNA, 20 bp, Artificial Sequence
  Description of Artificial Sequence: Synthetic oligonucleotide
  Target: ATXN2; (+) strand; PAM type: YTN; PAM sequence: CTA
agcaaagtattaagaatatt

SEQ ID NO: 87284 - DNA, 20 bp, Artificial Sequence
  Description of Artificial Sequence: Synthetic oligonucleotide
  Target: ATXN2; (+) strand; PAM type: YTN; PAM sequence: TTA
agaatattaaaaagtaacaa

SEQ ID NO: 87285 - DNA, 20 bp, Artificial Sequence
  Description of Artificial Sequence: Synthetic oligonucleotide
  Target: ATXN2; (+) strand; PAM type: YTN; PAM sequence: TTA
aaaagtaacaataaatatag

SEQ ID NO: 87286 - DNA, 20 bp, Artificial Sequence
  Description of Artificial Sequence: Synthetic oligonucleotide
  Target: ATXN2; (+) strand; PAM type: YTN; PAM sequence: TTA
tgcccatgaaatctcataat

SEQ ID NO: 87287 - DNA, 20 bp, Artificial Sequence
  Description of Artificial Sequence: Synthetic oligonucleotide
  Target: ATXN2; (+) strand; PAM type: YTN; PAM sequence: CTC
ataatttaagttattcatca

SEQ ID NO: 87288 - DNA, 20 bp, Artificial Sequence
  Description of Artificial Sequence: Synthetic oligonucleotide
  Target: ATXN2; (+) strand; PAM type: YTN; PAM sequence: TTT
aagttattcatcaactggaa

SEQ ID NO: 87289 - DNA, 20 bp, Artificial Sequence
  Description of Artificial Sequence: Synthetic oligonucleotide
  Target: ATXN2; (+) strand; PAM type: YTN; PAM sequence: TTA
agttattcatcaactggaaa

SEQ ID NO: 87290 - DNA, 20 bp, Artificial Sequence
  Description of Artificial Sequence: Synthetic oligonucleotide
  Target: ATXN2; (+) strand; PAM type: YTN; PAM sequence: TTA
ttcatcaactggaaaaatgt

SEQ ID NO: 87291 - DNA, 20 bp, Artificial Sequence
  Description of Artificial Sequence: Synthetic oligonucleotide
  Target: ATXN2; (+) strand; PAM type: YTN; PAM sequence: TTC
atcaactggaaaaatgtaaa

SEQ ID NO: 87292 - DNA, 20 bp, Artificial Sequence
  Description of Artificial Sequence: Synthetic oligonucleotide
  Target: ATXN2; (+) strand; PAM type: YTN; PAM sequence: CTG
gaaaaatgtaaaaatcttaa

SEQ ID NO: 87293 - DNA, 20 bp, Artificial Sequence
  Description of Artificial Sequence: Synthetic oligonucleotide
  Target: ATXN2; (+) strand; PAM type: YTN; PAM sequence: CTT
aaaatcatttgaagagaaaa

SEQ ID NO: 87294 - DNA, 20 bp, Artificial Sequence
  Description of Artificial Sequence: Synthetic oligonucleotide
  Target: ATXN2; (+) strand; PAM type: YTN; PAM sequence: TTA
aaatcatttgaagagaaaag

SEQ ID NO: 87295 - DNA, 20 bp, Artificial Sequence
  Description of Artificial Sequence: Synthetic oligonucleotide
  Target: ATXN2; (+) strand; PAM type: YTN; PAM sequence: TTT
gaagagaaaagtaaagatga

SEQ ID NO: 87296 - DNA, 20 bp, Artificial Sequence
  Description of Artificial Sequence: Synthetic oligonucleotide
  Target: ATXN2; (+) strand; PAM type: YTN; PAM sequence: TTG
aagagaaaagtaaagatgaa

SEQ ID NO: 87297 - DNA, 20 bp, Artificial Sequence
  Description of Artificial Sequence: Synthetic oligonucleotide
  Target: ATXN2; (+) strand; PAM type: YTN; PAM sequence: TTT
ttactatgcatttttaaaag

SEQ ID NO: 87298 - DNA, 20 bp, Artificial Sequence
  Description of Artificial Sequence: Synthetic oligonucleotide
  Target: ATXN2; (+) strand; PAM type: YTN; PAM sequence: TTT
tactatgcatttttaaaagg

SEQ ID NO: 87299 - DNA, 20 bp, Artificial Sequence
  Description of Artificial Sequence: Synthetic oligonucleotide
  Target: ATXN2; (+) strand; PAM type: YTN; PAM sequence: TTT
actatgcatttttaaaaggc

SEQ ID NO: 87300 - DNA, 20 bp, Artificial Sequence
  Description of Artificial Sequence: Synthetic oligonucleotide
  Target: ATXN2; (+) strand; PAM type: YTN; PAM sequence: TTA
ctatgcatttttaaaaggca

SEQ ID NO: 87301 - DNA, 20 bp, Artificial Sequence
  Description of Artificial Sequence: Synthetic oligonucleotide
  Target: ATXN2; (+) strand; PAM type: YTN; PAM sequence: CTA
tgcatttttaaaaggcatct

SEQ ID NO: 87302 - DNA, 20 bp, Artificial Sequence
  Description of Artificial Sequence: Synthetic oligonucleotide
  Target: ATXN2; (+) strand; PAM type: YTN; PAM sequence: TTT
ttaaaaggcatctctgcaat

SEQ ID NO: 87303 - DNA, 20 bp, Artificial Sequence
  Description of Artificial Sequence: Synthetic oligonucleotide
  Target: ATXN2; (+) strand; PAM type: YTN; PAM sequence: TTT
taaaaggcatctctgcaatt

SEQ ID NO: 87304 - DNA, 20 bp, Artificial Sequence
  Description of Artificial Sequence: Synthetic oligonucleotide
  Target: ATXN2; (+) strand; PAM type: YTN; PAM sequence: TTT
aaaaggcatctctgcaattt

SEQ ID NO: 87305 - DNA, 20 bp, Artificial Sequence
  Description of Artificial Sequence: Synthetic oligonucleotide
  Target: ATXN2; (+) strand; PAM type: YTN; PAM sequence: TTA
aaaggcatctctgcaattta

SEQ ID NO: 87306 - DNA, 20 bp, Artificial Sequence
  Description of Artificial Sequence: Synthetic oligonucleotide
  Target: ATXN2; (+) strand; PAM type: YTN; PAM sequence: CTC
tgcaatttaagtttaccagt

SEQ ID NO: 87307 - DNA, 20 bp, Artificial Sequence
  Description of Artificial Sequence: Synthetic oligonucleotide
  Target: ATXN2; (+) strand; PAM type: YTN; PAM sequence: CTG
caatttaagtttaccagtat

SEQ ID NO: 87308 - DNA, 20 bp, Artificial Sequence
  Description of Artificial Sequence: Synthetic oligonucleotide
  Target: ATXN2; (+) strand; PAM type: YTN; PAM sequence: TTT
aagtttaccagtatttaaag

SEQ ID NO: 87309 - DNA, 20 bp, Artificial Sequence
  Description of Artificial Sequence: Synthetic oligonucleotide
  Target: ATXN2; (+) strand; PAM type: YTN; PAM sequence: TTA
agtttaccagtatttaaaga

SEQ ID NO: 87310 - DNA, 20 bp, Artificial Sequence
  Description of Artificial Sequence: Synthetic oligonucleotide
  Target: ATXN2; (+) strand; PAM type: YTN; PAM sequence: TTT
accagtatttaaagactata

SEQ ID NO: 87311 - DNA, 20 bp, Artificial Sequence
  Description of Artificial Sequence: Synthetic oligonucleotide
  Target: ATXN2; (+) strand; PAM type: YTN; PAM sequence: TTA
ccagtatttaaagactataa

SEQ ID NO: 87312 - DNA, 20 bp, Artificial Sequence
  Description of Artificial Sequence: Synthetic oligonucleotide
  Target: ATXN2; (+) strand; PAM type: YTN; PAM sequence: TTT
aaagactataatacggtttt

SEQ ID NO: 87313 - DNA, 20 bp, Artificial Sequence
  Description of Artificial Sequence: Synthetic oligonucleotide
  Target: ATXN2; (+) strand; PAM type: YTN; PAM sequence: TTA
aagactataatacggttttc

SEQ ID NO: 87314 - DNA, 20 bp, Artificial Sequence
  Description of Artificial Sequence: Synthetic oligonucleotide
  Target: ATXN2; (+) strand; PAM type: YTN; PAM sequence: CTA
taatacggttttctaatcta

SEQ ID NO: 87315 - DNA, 20 bp, Artificial Sequence
  Description of Artificial Sequence: Synthetic oligonucleotide
  Target: ATXN2; (+) strand; PAM type: YTN; PAM sequence: TTT
tctaatctatagctaatttg

SEQ ID NO: 87316 - DNA, 20 bp, Artificial Sequence
  Description of Artificial Sequence: Synthetic oligonucleotide
  Target: ATXN2; (+) strand; PAM type: YTN; PAM sequence: TTT
ctaatctatagctaatttgc

SEQ ID NO: 87317 - DNA, 20 bp, Artificial Sequence
  Description of Artificial Sequence: Synthetic oligonucleotide
  Target: ATXN2; (+) strand; PAM type: YTN; PAM sequence: TTC
taatctatagctaatttgca

SEQ ID NO: 87318 - DNA, 20 bp, Artificial Sequence
  Description of Artificial Sequence: Synthetic oligonucleotide
  Target: ATXN2; (+) strand; PAM type: YTN; PAM sequence: CTA
atctatagctaatttgcatg

SEQ ID NO: 87319 - DNA, 20 bp, Artificial Sequence
  Description of Artificial Sequence: Synthetic oligonucleotide
  Target: ATXN2; (+) strand; PAM type: YTN; PAM sequence: CTA
tagctaatttgcatgcatag

SEQ ID NO: 87320 - DNA, 20 bp, Artificial Sequence
  Description of Artificial Sequence: Synthetic oligonucleotide
  Target: ATXN2; (+) strand; PAM type: YTN; PAM sequence: CTA
atttgcatgcatagcacaaa

SEQ ID NO: 87321 - DNA, 20 bp, Artificial Sequence
  Description of Artificial Sequence: Synthetic oligonucleotide
  Target: ATXN2; (+) strand; PAM type: YTN; PAM sequence: TTT
gcatgcatagcacaaatacc

SEQ ID NO: 87322 - DNA, 20 bp, Artificial Sequence
  Description of Artificial Sequence: Synthetic oligonucleotide
  Target: ATXN2; (+) strand; PAM type: YTN; PAM sequence: TTG
catgcatagcacaaataccc

SEQ ID NO: 87323 - DNA, 20 bp, Artificial Sequence
  Description of Artificial Sequence: Synthetic oligonucleotide
  Target: ATXN2; (+) strand; PAM type: YTN; PAM sequence: CTG
agtgaatgtacataggcttt

SEQ ID NO: 87324 - DNA, 20 bp, Artificial Sequence
  Description of Artificial Sequence: Synthetic oligonucleotide
  Target: ATXN2; (+) strand; PAM type: YTN; PAM sequence: CTT
tgtttaaaaaaacaaaaaca

SEQ ID NO: 87325 - DNA, 20 bp, Artificial Sequence
  Description of Artificial Sequence: Synthetic oligonucleotide
  Target: ATXN2; (+) strand; PAM type: YTN; PAM sequence: TTT
gtttaaaaaaacaaaaacaa

SEQ ID NO: 87326 - DNA, 20 bp, Artificial Sequence
  Description of Artificial Sequence: Synthetic oligonucleotide
  Target: ATXN2; (+) strand; PAM type: YTN; PAM sequence: TTG
tttaaaaaaacaaaaacaaa

SEQ ID NO: 87327 - DNA, 20 bp, Artificial Sequence
  Description of Artificial Sequence: Synthetic oligonucleotide
  Target: ATXN2; (+) strand; PAM type: YTN; PAM sequence: TTT
aaaaaaacaaaaacaaaatc

SEQ ID NO: 87328 - DNA, 20 bp, Artificial Sequence
  Description of Artificial Sequence: Synthetic oligonucleotide
  Target: ATXN2; (+) strand; PAM type: YTN; PAM sequence: TTA
aaaaaacaaaaacaaaatcc

SEQ ID NO: 87329 - DNA, 20 bp, Artificial Sequence
  Description of Artificial Sequence: Synthetic oligonucleotide
  Target: ATXN2; (+) strand; PAM type: YTN; PAM sequence: CTT
tccctacctaaataccggta

SEQ ID NO: 87330 - DNA, 20 bp, Artificial Sequence
  Description of Artificial Sequence: Synthetic oligonucleotide
  Target: ATXN2; (+) strand; PAM type: YTN; PAM sequence: TTT
ccctacctaaataccggtaa

SEQ ID NO: 87331 - DNA, 20 bp, Artificial Sequence
  Description of Artificial Sequence: Synthetic oligonucleotide
  Target: ATXN2; (+) strand; PAM type: YTN; PAM sequence: TTC
cctacctaaataccggtaaa

SEQ ID NO: 87332 - DNA, 20 bp, Artificial Sequence
  Description of Artificial Sequence: Synthetic oligonucleotide
  Target: ATXN2; (+) strand; PAM type: YTN; PAM sequence: CTA
cctaaataccggtaaacttg

SEQ ID NO: 87333 - DNA, 20 bp, Artificial Sequence
  Description of Artificial Sequence: Synthetic oligonucleotide
  Target: ATXN2; (+) strand; PAM type: YTN; PAM sequence: CTA
aataccggtaaacttgcaag

SEQ ID NO: 87334 - DNA, 20 bp, Artificial Sequence
  Description of Artificial Sequence: Synthetic oligonucleotide
  Target: ATXN2; (+) strand; PAM type: YTN; PAM sequence: CTT
gcaaggcattgattaaaaac

SEQ ID NO: 87335 - DNA, 20 bp, Artificial Sequence
  Description of Artificial Sequence: Synthetic oligonucleotide
  Target: ATXN2; (+) strand; PAM type: YTN; PAM sequence: TTG
caaggcattgattaaaaaca

SEQ ID NO: 87336 - DNA, 20 bp, Artificial Sequence
  Description of Artificial Sequence: Synthetic oligonucleotide
  Target: ATXN2; (+) strand; PAM type: YTN; PAM sequence: TTG
attaaaaacaagacgaacaa

SEQ ID NO: 87337 - DNA, 20 bp, Artificial Sequence
  Description of Artificial Sequence: Synthetic oligonucleotide
  Target: ATXN2; (+) strand; PAM type: YTN; PAM sequence: TTA
aaaacaagacgaacaaaaac

SEQ ID NO: 87338 - DNA, 20 bp, Artificial Sequence
  Description of Artificial Sequence: Synthetic oligonucleotide
  Target: ATXN2; (+) strand; PAM type: YTN; PAM sequence: TTG
taaacaaaatttaaaaagag

SEQ ID NO: 87339 - DNA, 20 bp, Artificial Sequence
  Description of Artificial Sequence: Synthetic oligonucleotide
  Target: ATXN2; (+) strand; PAM type: YTN; PAM sequence: TTT
aaaaagagttaattagaaat

SEQ ID NO: 87340 - DNA, 20 bp, Artificial Sequence
  Description of Artificial Sequence: Synthetic oligonucleotide
  Target: ATXN2; (+) strand; PAM type: YTN; PAM sequence: TTA
aaaagagttaattagaaata

SEQ ID NO: 87341 - DNA, 20 bp, Artificial Sequence
  Description of Artificial Sequence: Synthetic oligonucleotide
  Target: ATXN2; (+) strand; PAM type: YTN; PAM sequence: TTA
attagaaatatttccctttg

SEQ ID NO: 87342 - DNA, 20 bp, Artificial Sequence
  Description of Artificial Sequence: Synthetic oligonucleotide
  Target: ATXN2; (+) strand; PAM type: YTN; PAM sequence: TTA
gaaatatttccctttgtttt

SEQ ID NO: 87343 - DNA, 20 bp, Artificial Sequence
  Description of Artificial Sequence: Synthetic oligonucleotide
  Target: ATXN2; (+) strand; PAM type: YTN; PAM sequence: TTT
ccctttgtttttttgttcta

SEQ ID NO: 87344 - DNA, 20 bp, Artificial Sequence
  Description of Artificial Sequence: Synthetic oligonucleotide
  Target: ATXN2; (+) strand; PAM type: YTN; PAM sequence: TTC
cctttgtttttttgttctag

SEQ ID NO: 87345 - DNA, 20 bp, Artificial Sequence
  Description of Artificial Sequence: Synthetic oligonucleotide
  Target: ATXN2; (+) strand; PAM type: YTN; PAM sequence: CTT
tgtttttttgttctagctca

SEQ ID NO: 87346 - DNA, 20 bp, Artificial Sequence
  Description of Artificial Sequence: Synthetic oligonucleotide
  Target: ATXN2; (+) strand; PAM type: YTN; PAM sequence: TTT
gtttttttgttctagctcaa

SEQ ID NO: 87347 - DNA, 20 bp, Artificial Sequence
  Description of Artificial Sequence: Synthetic oligonucleotide
  Target: ATXN2; (+) strand; PAM type: YTN; PAM sequence: TTG
tttttttgttctagctcaaa

SEQ ID NO: 87348 - DNA, 20 bp, Artificial Sequence
  Description of Artificial Sequence: Synthetic oligonucleotide
  Target: ATXN2; (+) strand; PAM type: YTN; PAM sequence: TTT
ttttgttctagctcaaaaga

SEQ ID NO: 87349 - DNA, 20 bp, Artificial Sequence
  Description of Artificial Sequence: Synthetic oligonucleotide
  Target: ATXN2; (+) strand; PAM type: YTN; PAM sequence: TTT
tttgttctagctcaaaagat

SEQ ID NO: 87350 - DNA, 20 bp, Artificial Sequence
  Description of Artificial Sequence: Synthetic oligonucleotide
  Target: ATXN2; (+) strand; PAM type: YTN; PAM sequence: TTT
ttgttctagctcaaaagatc

SEQ ID NO: 87351 - DNA, 20 bp, Artificial Sequence
  Description of Artificial Sequence: Synthetic oligonucleotide
  Target: ATXN2; (+) strand; PAM type: YTN; PAM sequence: TTT
tgttctagctcaaaagatct

SEQ ID NO: 87352 - DNA, 20 bp, Artificial Sequence
  Description of Artificial Sequence: Synthetic oligonucleotide
  Target: ATXN2; (+) strand; PAM type: YTN; PAM sequence: TTT
gttctagctcaaaagatctg

SEQ ID NO: 87353 - DNA, 20 bp, Artificial Sequence
  Description of Artificial Sequence: Synthetic oligonucleotide
  Target: ATXN2; (+) strand; PAM type: YTN; PAM sequence: TTG
ttctagctcaaaagatctga

SEQ ID NO: 87354 - DNA, 20 bp, Artificial Sequence
  Description of Artificial Sequence: Synthetic oligonucleotide
  Target: ATXN2; (+) strand; PAM type: YTN; PAM sequence: TTC
tagctcaaaagatctgaaag

SEQ ID NO: 87355 - DNA, 20 bp, Artificial Sequence
  Description of Artificial Sequence: Synthetic oligonucleotide
  Target: ATXN2; (+) strand; PAM type: YTN; PAM sequence: CTA
gctcaaaagatctgaaagaa

SEQ ID NO: 87356 - DNA, 20 bp, Artificial Sequence
  Description of Artificial Sequence: Synthetic oligonucleotide
  Target: ATXN2; (+) strand; PAM type: YTN; PAM sequence: CTC
aaaagatctgaaagaagtac

SEQ ID NO: 87357 - DNA, 20 bp, Artificial Sequence
  Description of Artificial Sequence: Synthetic oligonucleotide
  Target: ATXN2; (+) strand; PAM type: YTN; PAM sequence: CTG
aaagaagtaccttaatcagg

SEQ ID NO: 87358 - DNA, 20 bp, Artificial Sequence
  Description of Artificial Sequence: Synthetic oligonucleotide
  Target: ATXN2; (+) strand; PAM type: YTN; PAM sequence: CTT
aatcaggaattcttttcctc

SEQ ID NO: 87359 - DNA, 20 bp, Artificial Sequence
  Description of Artificial Sequence: Synthetic oligonucleotide
  Target: ATXN2; (+) strand; PAM type: YTN; PAM sequence: TTA
atcaggaattcttttcctcc

SEQ ID NO: 87360 - DNA, 20 bp, Artificial Sequence
  Description of Artificial Sequence: Synthetic oligonucleotide
  Target: ATXN2; (+) strand; PAM type: YTN; PAM sequence: TTC
ttttcctccttgaatttgaa

SEQ ID NO: 87361 - DNA, 20 bp, Artificial Sequence
  Description of Artificial Sequence: Synthetic oligonucleotide
  Target: ATXN2; (+) strand; PAM type: YTN; PAM sequence: CTT
ttcctccttgaatttgaaat

SEQ ID NO: 87362 - DNA, 20 bp, Artificial Sequence
  Description of Artificial Sequence: Synthetic oligonucleotide
  Target: ATXN2; (+) strand; PAM type: YTN; PAM sequence: TTT
tcctccttgaatttgaaatt

SEQ ID NO: 87363 - DNA, 20 bp, Artificial Sequence
  Description of Artificial Sequence: Synthetic oligonucleotide
  Target: ATXN2; (+) strand; PAM type: YTN; PAM sequence: TTT
cctccttgaatttgaaattg

SEQ ID NO: 87364 - DNA, 20 bp, Artificial Sequence
  Description of Artificial Sequence: Synthetic oligonucleotide
  Target: ATXN2; (+) strand; PAM type: YTN; PAM sequence: TTC
ctccttgaatttgaaattgg

SEQ ID NO: 87365 - DNA, 20 bp, Artificial Sequence
  Description of Artificial Sequence: Synthetic oligonucleotide
  Target: ATXN2; (+) strand; PAM type: YTN; PAM sequence: CTC
cttgaatttgaaattgggag

SEQ ID NO: 87366 - DNA, 20 bp, Artificial Sequence
  Description of Artificial Sequence: Synthetic oligonucleotide
  Target: ATXN2; (+) strand; PAM type: YTN; PAM sequence: CTT
gaatttgaaattgggagaaa

SEQ ID NO: 87367 - DNA, 20 bp, Artificial Sequence
  Description of Artificial Sequence: Synthetic oligonucleotide
  Target: ATXN2; (+) strand; PAM type: YTN; PAM sequence: TTG
aatttgaaattgggagaaat

SEQ ID NO: 87368 - DNA, 20 bp, Artificial Sequence
  Description of Artificial Sequence: Synthetic oligonucleotide
  Target: ATXN2; (+) strand; PAM type: YTN; PAM sequence: TTT
gaaattgggagaaatggagc

SEQ ID NO: 87369 - DNA, 20 bp, Artificial Sequence
  Description of Artificial Sequence: Synthetic oligonucleotide
  Target: ATXN2; (+) strand; PAM type: YTN; PAM sequence: TTG
aaattgggagaaatggagcc

SEQ ID NO: 87370 - DNA, 20 bp, Artificial Sequence
  Description of Artificial Sequence: Synthetic oligonucleotide
  Target: ATXN2; (+) strand; PAM type: YTN; PAM sequence: TTG
ggagaaatggagccgggcac

SEQ ID NO: 87371 - DNA, 20 bp, Artificial Sequence
  Description of Artificial Sequence: Synthetic oligonucleotide
  Target: ATXN2; (+) strand; PAM type: YTN; PAM sequence: CTC
acgcttgtaatcccagcatt

SEQ ID NO: 87372 - DNA, 20 bp, Artificial Sequence
  Description of Artificial Sequence: Synthetic oligonucleotide
  Target: ATXN2; (+) strand; PAM type: YTN; PAM sequence: CTT
gtaatcccagcattttggga

SEQ ID NO: 87373 - DNA, 20 bp, Artificial Sequence
  Description of Artificial Sequence: Synthetic oligonucleotide
  Target: ATXN2; (+) strand; PAM type: YTN; PAM sequence: TTG
taatcccagcattttgggag

SEQ ID NO: 87374 - DNA, 20 bp, Artificial Sequence
  Description of Artificial Sequence: Synthetic oligonucleotide
  Target: ATXN2; (+) strand; PAM type: YTN; PAM sequence: TTT
tgggaggccgaggcgggcgg

SEQ ID NO: 87375 - DNA, 20 bp, Artificial Sequence
  Description of Artificial Sequence: Synthetic oligonucleotide
  Target: ATXN2; (+) strand; PAM type: YTN; PAM sequence: TTT
gggaggccgaggcgggcgga

SEQ ID NO: 87376 - DNA, 20 bp, Artificial Sequence
  Description of Artificial Sequence: Synthetic oligonucleotide
  Target: ATXN2; (+) strand; PAM type: YTN; PAM sequence: TTG
ggaggccgaggcgggcggat

SEQ ID NO: 87377 - DNA, 20 bp, Artificial Sequence
  Description of Artificial Sequence: Synthetic oligonucleotide
  Target: ATXN2; (+) strand; PAM type: YTN; PAM sequence: CTG
aggttaggagttcgagacca

SEQ ID NO: 87378 - DNA, 20 bp, Artificial Sequence
  Description of Artificial Sequence: Synthetic oligonucleotide
  Target: ATXN2; (+) strand; PAM type: YTN; PAM sequence: TTA
ggagttcgagaccagcttgg

SEQ ID NO: 87379 - DNA, 20 bp, Artificial Sequence
  Description of Artificial Sequence: Synthetic oligonucleotide
  Target: ATXN2; (+) strand; PAM type: YTN; PAM sequence: TTC
gagaccagcttggccaacac

SEQ ID NO: 87380 - DNA, 20 bp, Artificial Sequence
  Description of Artificial Sequence: Synthetic oligonucleotide
  Target: ATXN2; (+) strand; PAM type: YTN; PAM sequence: CTT
ggccaacacggcgaaaccct

SEQ ID NO: 87381 - DNA, 20 bp, Artificial Sequence
  Description of Artificial Sequence: Synthetic oligonucleotide
  Target: ATXN2; (+) strand; PAM type: YTN; PAM sequence: TTG
gccaacacggcgaaaccctg

SEQ ID NO: 87382 - DNA, 20 bp, Artificial Sequence
  Description of Artificial Sequence: Synthetic oligonucleotide
  Target: ATXN2; (+) strand; PAM type: YTN; PAM sequence: CTG
tctctactaaaaatacaaaa

SEQ ID NO: 87383 - DNA, 20 bp, Artificial Sequence
  Description of Artificial Sequence: Synthetic oligonucleotide
  Target: ATXN2; (+) strand; PAM type: YTN; PAM sequence: CTC
tactaaaaatacaaaaatta

SEQ ID NO: 87384 - DNA, 20 bp, Artificial Sequence
  Description of Artificial Sequence: Synthetic oligonucleotide
  Target: ATXN2; (+) strand; PAM type: YTN; PAM sequence: CTA
ctaaaaatacaaaaattagc

SEQ ID NO: 87385 - DNA, 20 bp, Artificial Sequence
  Description of Artificial Sequence: Synthetic oligonucleotide
  Target: ATXN2; (+) strand; PAM type: YTN; PAM sequence: CTA
aaaatacaaaaattagctgg

SEQ ID NO: 87386 - DNA, 20 bp, Artificial Sequence
  Description of Artificial Sequence: Synthetic oligonucleotide
  Target: ATXN2; (+) strand; PAM type: YTN; PAM sequence: TTA
gctgggcgtggtggcaggca

SEQ ID NO: 87387 - DNA, 20 bp, Artificial Sequence
  Description of Artificial Sequence: Synthetic oligonucleotide
  Target: ATXN2; (+) strand; PAM type: YTN; PAM sequence: CTG
ggcgtggtggcaggcacctg

SEQ ID NO: 87388 - DNA, 20 bp, Artificial Sequence
  Description of Artificial Sequence: Synthetic oligonucleotide
  Target: ATXN2; (+) strand; PAM type: YTN; PAM sequence: CTG
taatcacagctactagggag

SEQ ID NO: 87389 - DNA, 20 bp, Artificial Sequence
  Description of Artificial Sequence: Synthetic oligonucleotide
  Target: ATXN2; (+) strand; PAM type: YTN; PAM sequence: CTA
ctagggagagtggggaagga

SEQ ID NO: 87390 - DNA, 20 bp, Artificial Sequence
  Description of Artificial Sequence: Synthetic oligonucleotide
  Target: ATXN2; (+) strand; PAM type: YTN; PAM sequence: CTA
gggagagtggggaaggagaa

SEQ ID NO: 87391 - DNA, 20 bp, Artificial Sequence
  Description of Artificial Sequence: Synthetic oligonucleotide
  Target: ATXN2; (+) strand; PAM type: YTN; PAM sequence: CTT
gaacccgggaggtggaggtt

SEQ ID NO: 87392 - DNA, 20 bp, Artificial Sequence
  Description of Artificial Sequence: Synthetic oligonucleotide
  Target: ATXN2; (+) strand; PAM type: YTN; PAM sequence: TTG
aacccgggaggtggaggttg

SEQ ID NO: 87393 - DNA, 20 bp, Artificial Sequence
  Description of Artificial Sequence: Synthetic oligonucleotide
  Target: ATXN2; (+) strand; PAM type: YTN; PAM sequence: TTG
cagtgaaccgacatcacacc

SEQ ID NO: 87394 - DNA, 20 bp, Artificial Sequence
  Description of Artificial Sequence: Synthetic oligonucleotide
  Target: ATXN2; (+) strand; PAM type: YTN; PAM sequence: TTG
cactccagcttgggcaacaa

SEQ ID NO: 87395 - DNA, 20 bp, Artificial Sequence
  Description of Artificial Sequence: Synthetic oligonucleotide
  Target: ATXN2; (+) strand; PAM type: YTN; PAM sequence: CTC
cagcttgggcaacaagagcg

SEQ ID NO: 87396 - DNA, 20 bp, Artificial Sequence
  Description of Artificial Sequence: Synthetic oligonucleotide
  Target: ATXN2; (+) strand; PAM type: YTN; PAM sequence: CTT
gggcaacaagagcgaaactc

SEQ ID NO: 87397 - DNA, 20 bp, Artificial Sequence
  Description of Artificial Sequence: Synthetic oligonucleotide
  Target: ATXN2; (+) strand; PAM type: YTN; PAM sequence: TTG
ggcaacaagagcgaaactcc

SEQ ID NO: 87398 - DNA, 20 bp, Artificial Sequence
  Description of Artificial Sequence: Synthetic oligonucleotide
  Target: ATXN2; (+) strand; PAM type: YTN; PAM sequence: CTC
cgtctcaaaaaataaaataa

SEQ ID NO: 87399 - DNA, 20 bp, Artificial Sequence
  Description of Artificial Sequence: Synthetic oligonucleotide
  Target: ATXN2; (+) strand; PAM type: YTN; PAM sequence: CTC
aaaaaataaaataaacaaat

SEQ ID NO: 87400 - DNA, 20 bp, Artificial Sequence
  Description of Artificial Sequence: Synthetic oligonucleotide
  Target: ATXN2; (+) strand; PAM type: YTN; PAM sequence: TTG
ggagaaatgtgaaacttata

SEQ ID NO: 87401 - DNA, 20 bp, Artificial Sequence
  Description of Artificial Sequence: Synthetic oligonucleotide
  Target: ATXN2; (+) strand; PAM type: YTN; PAM sequence: CTT
atactttaaatcaatactag

SEQ ID NO: 87402 - DNA, 20 bp, Artificial Sequence
  Description of Artificial Sequence: Synthetic oligonucleotide
  Target: ATXN2; (+) strand; PAM type: YTN; PAM sequence: TTA
tactttaaatcaatactagt

SEQ ID NO: 87403 - DNA, 20 bp, Artificial Sequence
  Description of Artificial Sequence: Synthetic oligonucleotide
  Target: ATXN2; (+) strand; PAM type: YTN; PAM sequence: CTT
taaatcaatactagtaacaa

SEQ ID NO: 87404 - DNA, 20 bp, Artificial Sequence
  Description of Artificial Sequence: Synthetic oligonucleotide
  Target: ATXN2; (+) strand; PAM type: YTN; PAM sequence: TTT
aaatcaatactagtaacaaa

SEQ ID NO: 87405 - DNA, 20 bp, Artificial Sequence
  Description of Artificial Sequence: Synthetic oligonucleotide
  Target: ATXN2; (+) strand; PAM type: YTN; PAM sequence: TTA
aatcaatactagtaacaaaa

SEQ ID NO: 87406 - DNA, 20 bp, Artificial Sequence
  Description of Artificial Sequence: Synthetic oligonucleotide
  Target: ATXN2; (+) strand; PAM type: YTN; PAM sequence: CTA
gtaacaaaaatacagttcgg

SEQ ID NO: 87407 - DNA, 20 bp, Artificial Sequence
  Description of Artificial Sequence: Synthetic oligonucleotide
  Target: ATXN2; (+) strand; PAM type: YTN; PAM sequence: TTC
ggttccttgataggccagtt

SEQ ID NO: 87408 - DNA, 20 bp, Artificial Sequence
  Description of Artificial Sequence: Synthetic oligonucleotide
  Target: ATXN2; (+) strand; PAM type: YTN; PAM sequence: TTC
cttgataggccagttaagtg

SEQ ID NO: 87409 - DNA, 20 bp, Artificial Sequence
  Description of Artificial Sequence: Synthetic oligonucleotide
  Target: ATXN2; (+) strand; PAM type: YTN; PAM sequence: CTT
gataggccagttaagtgaca

SEQ ID NO: 87410 - DNA, 20 bp, Artificial Sequence
  Description of Artificial Sequence: Synthetic oligonucleotide
  Target: ATXN2; (+) strand; PAM type: YTN; PAM sequence: TTG
ataggccagttaagtgacag

SEQ ID NO: 87411 - DNA, 20 bp, Artificial Sequence
  Description of Artificial Sequence: Synthetic oligonucleotide
  Target: ATXN2; (+) strand; PAM type: YTN; PAM sequence: TTA
agtgacagtgacacaaagca

SEQ ID NO: 87412 - DNA, 20 bp, Artificial Sequence
  Description of Artificial Sequence: Synthetic oligonucleotide
  Target: ATXN2; (+) strand; PAM type: YTN; PAM sequence: TTT
aaaagccaaggaaaaaaata

SEQ ID NO: 87413 - DNA, 20 bp, Artificial Sequence
  Description of Artificial Sequence: Synthetic oligonucleotide
  Target: ATXN2; (+) strand; PAM type: YTN; PAM sequence: TTA
aaagccaaggaaaaaaatag

SEQ ID NO: 87414 - DNA, 20 bp, Artificial Sequence
  Description of Artificial Sequence: Synthetic oligonucleotide
  Target: ATXN2; (+) strand; PAM type: YTN; PAM sequence: CTT
ggaagacaagagagacaaaa

SEQ ID NO: 87415 - DNA, 20 bp, Artificial Sequence
  Description of Artificial Sequence: Synthetic oligonucleotide
  Target: ATXN2; (+) strand; PAM type: YTN; PAM sequence: TTG
gaagacaagagagacaaaaa

SEQ ID NO: 87416 - DNA, 20 bp, Artificial Sequence
  Description of Artificial Sequence: Synthetic oligonucleotide
  Target: ATXN2; (+) strand; PAM type: YTN; PAM sequence: TTC
aagaccagcctggccaagat

SEQ ID NO: 87417 - DNA, 20 bp, Artificial Sequence
  Description of Artificial Sequence: Synthetic oligonucleotide
  Target: ATXN2; (+) strand; PAM type: YTN; PAM sequence: CTG
gccaagatggtgaaaccctg

SEQ ID NO: 87418 - DNA, 20 bp, Artificial Sequence
  Description of Artificial Sequence: Synthetic oligonucleotide
  Target: ATXN2; (+) strand; PAM type: YTN; PAM sequence: CTG
tctctactaaaaatacaaaa

SEQ ID NO: 87419 - DNA, 20 bp, Artificial Sequence
  Description of Artificial Sequence: Synthetic oligonucleotide
  Target: ATXN2; (+) strand; PAM type: YTN; PAM sequence: CTC
tactaaaaatacaaaaaaaa

SEQ ID NO: 87420 - DNA, 20 bp, Artificial Sequence
  Description of Artificial Sequence: Synthetic oligonucleotide
  Target: ATXN2; (+) strand; PAM type: YTN; PAM sequence: CTA
ctaaaaatacaaaaaaaatt

SEQ ID NO: 87421 - DNA, 20 bp, Artificial Sequence
  Description of Artificial Sequence: Synthetic oligonucleotide
  Target: ATXN2; (+) strand; PAM type: YTN; PAM sequence: CTA
aaaatacaaaaaaaattagc

SEQ ID NO: 87422 - DNA, 20 bp, Artificial Sequence
  Description of Artificial Sequence: Synthetic oligonucleotide
  Target: ATXN2; (+) strand; PAM type: YTN; PAM sequence: TTA
gctgggtgtggcagcaggcg

SEQ ID NO: 87423 - DNA, 20 bp, Artificial Sequence
  Description of Artificial Sequence: Synthetic oligonucleotide
  Target: ATXN2; (+) strand; PAM type: YTN; PAM sequence: CTG
ggtgtggcagcaggcgcctg

SEQ ID NO: 87424 - DNA, 20 bp, Artificial Sequence
  Description of Artificial Sequence: Synthetic oligonucleotide
  Target: ATXN2; (+) strand; PAM type: YTN; PAM sequence: CTG
taatcccagctactctggaa

SEQ ID NO: 87425 - DNA, 20 bp, Artificial Sequence
  Description of Artificial Sequence: Synthetic oligonucleotide
  Target: ATXN2; (+) strand; PAM type: YTN; PAM sequence: CTA
ctctggaagctgaggcagag

SEQ ID NO: 87426 - DNA, 20 bp, Artificial Sequence
  Description of Artificial Sequence: Synthetic oligonucleotide
  Target: ATXN2; (+) strand; PAM type: YTN; PAM sequence: CTC
tggaagctgaggcagagaat

SEQ ID NO: 87427 - DNA, 20 bp, Artificial Sequence
  Description of Artificial Sequence: Synthetic oligonucleotide
  Target: ATXN2; (+) strand; PAM type: YTN; PAM sequence: CTG
gaagctgaggcagagaattg

SEQ ID NO: 87428 - DNA, 20 bp, Artificial Sequence
  Description of Artificial Sequence: Synthetic oligonucleotide
  Target: ATXN2; (+) strand; PAM type: YTN; PAM sequence: CTG
aggcagagaattgcttgaac

SEQ ID NO: 87429 - DNA, 20 bp, Artificial Sequence
  Description of Artificial Sequence: Synthetic oligonucleotide
  Target: ATXN2; (+) strand; PAM type: YTN; PAM sequence: TTG
cttgaacctaggaggcggag

SEQ ID NO: 87430 - DNA, 20 bp, Artificial Sequence
  Description of Artificial Sequence: Synthetic oligonucleotide
  Target: ATXN2; (+) strand; PAM type: YTN; PAM sequence: CTT
gaacctaggaggcggaggtt

SEQ ID NO: 87431 - DNA, 20 bp, Artificial Sequence
  Description of Artificial Sequence: Synthetic oligonucleotide
  Target: ATXN2; (+) strand; PAM type: YTN; PAM sequence: TTG
aacctaggaggcggaggttg

SEQ ID NO: 87432 - DNA, 20 bp, Artificial Sequence
  Description of Artificial Sequence: Synthetic oligonucleotide
  Target: ATXN2; (+) strand; PAM type: YTN; PAM sequence: CTA
ggaggcggaggttgcagtga

SEQ ID NO: 87433 - DNA, 20 bp, Artificial Sequence
  Description of Artificial Sequence: Synthetic oligonucleotide
  Target: ATXN2; (+) strand; PAM type: YTN; PAM sequence: TTG
cagtgagccgagatcgcacc

SEQ ID NO: 87434 - DNA, 20 bp, Artificial Sequence
  Description of Artificial Sequence: Synthetic oligonucleotide
  Target: ATXN2; (+) strand; PAM type: YTN; PAM sequence: CTG
cactccagcctggacgacag

SEQ ID NO: 87435 - DNA, 20 bp, Artificial Sequence
  Description of Artificial Sequence: Synthetic oligonucleotide
  Target: ATXN2; (+) strand; PAM type: YTN; PAM sequence: CTC
cagcctggacgacagagtga

SEQ ID NO: 87436 - DNA, 20 bp, Artificial Sequence
  Description of Artificial Sequence: Synthetic oligonucleotide
  Target: ATXN2; (+) strand; PAM type: YTN; PAM sequence: CTG
gacgacagagtgagactcca

SEQ ID NO: 87437 - DNA, 20 bp, Artificial Sequence
  Description of Artificial Sequence: Synthetic oligonucleotide
  Target: ATXN2; (+) strand; PAM type: YTN; PAM sequence: CTC
catctcaaaagaaaaaaaaa

SEQ ID NO: 87438 - DNA, 20 bp, Artificial Sequence
  Description of Artificial Sequence: Synthetic oligonucleotide
  Target: ATXN2; (+) strand; PAM type: YTN; PAM sequence: CTC
aaaagaaaaaaaaaaaaaaa

SEQ ID NO: 87439 - DNA, 20 bp, Artificial Sequence
  Description of Artificial Sequence: Synthetic oligonucleotide
  Target: ATXN2; (+) strand; PAM type: YTN; PAM sequence: TTC
tgacccacacatattatttc

SEQ ID NO: 87440 - DNA, 20 bp, Artificial Sequence
  Description of Artificial Sequence: Synthetic oligonucleotide
  Target: ATXN2; (+) strand; PAM type: YTN; PAM sequence: CTG
acccacacatattatttcac

SEQ ID NO: 87441 - DNA, 20 bp, Artificial Sequence
  Description of Artificial Sequence: Synthetic oligonucleotide
  Target: ATXN2; (+) strand; PAM type: YTN; PAM sequence: TTA
tttcactgcttttgttatat

SEQ ID NO: 87442 - DNA, 20 bp, Artificial Sequence
  Description of Artificial Sequence: Synthetic oligonucleotide
  Target: ATXN2; (+) strand; PAM type: YTN; PAM sequence: TTT
cactgcttttgttatatatg

SEQ ID NO: 87443 - DNA, 20 bp, Artificial Sequence
  Description of Artificial Sequence: Synthetic oligonucleotide
  Target: ATXN2; (+) strand; PAM type: YTN; PAM sequence: TTC
actgcttttgttatatatgc

SEQ ID NO: 87444 - DNA, 20 bp, Artificial Sequence
  Description of Artificial Sequence: Synthetic oligonucleotide
  Target: ATXN2; (+) strand; PAM type: YTN; PAM sequence: CTG
cttttgttatatatgctcat

SEQ ID NO: 87445 - DNA, 20 bp, Artificial Sequence
  Description of Artificial Sequence: Synthetic oligonucleotide
  Target: ATXN2; (+) strand; PAM type: YTN; PAM sequence: CTT
ttgttatatatgctcattct

SEQ ID NO: 87446 - DNA, 20 bp, Artificial Sequence
  Description of Artificial Sequence: Synthetic oligonucleotide
  Target: ATXN2; (+) strand; PAM type: YTN; PAM sequence: TTT
tgttatatatgctcattctg

SEQ ID NO: 87447 - DNA, 20 bp, Artificial Sequence
  Description of Artificial Sequence: Synthetic oligonucleotide
  Target: ATXN2; (+) strand; PAM type: YTN; PAM sequence: TTT
gttatatatgctcattctgg

SEQ ID NO: 87448 - DNA, 20 bp, Artificial Sequence
  Description of Artificial Sequence: Synthetic oligonucleotide
  Target: ATXN2; (+) strand; PAM type: YTN; PAM sequence: TTG
ttatatatgctcattctggc

SEQ ID NO: 87449 - DNA, 20 bp, Artificial Sequence
  Description of Artificial Sequence: Synthetic oligonucleotide
  Target: ATXN2; (+) strand; PAM type: YTN; PAM sequence: TTA
tatatgctcattctggctaa

SEQ ID NO: 87450 - DNA, 20 bp, Artificial Sequence
  Description of Artificial Sequence: Synthetic oligonucleotide
  Target: ATXN2; (+) strand; PAM type: YTN; PAM sequence: CTC
attctggctaaagatcccag

SEQ ID NO: 87451 - DNA, 20 bp, Artificial Sequence
  Description of Artificial Sequence: Synthetic oligonucleotide
  Target: ATXN2; (+) strand; PAM type: YTN; PAM sequence: TTC
tggctaaagatcccagagag

SEQ ID NO: 87452 - DNA, 20 bp, Artificial Sequence
  Description of Artificial Sequence: Synthetic oligonucleotide
  Target: ATXN2; (+) strand; PAM type: YTN; PAM sequence: CTG
gctaaagatcccagagaggt

SEQ ID NO: 87453 - DNA, 20 bp, Artificial Sequence
  Description of Artificial Sequence: Synthetic oligonucleotide
  Target: ATXN2; (+) strand; PAM type: YTN; PAM sequence: CTA
aagatcccagagaggttaaa

SEQ ID NO: 87454 - DNA, 20 bp, Artificial Sequence
  Description of Artificial Sequence: Synthetic oligonucleotide
  Target: ATXN2; (+) strand; PAM type: YTN; PAM sequence: TTA
aaaataaagttaattttatt

SEQ ID NO: 87455 - DNA, 20 bp, Artificial Sequence
  Description of Artificial Sequence: Synthetic oligonucleotide
  Target: ATXN2; (+) strand; PAM type: YTN; PAM sequence: TTA
attttatttgtaatactgat

SEQ ID NO: 87456 - DNA, 20 bp, Artificial Sequence
  Description of Artificial Sequence: Synthetic oligonucleotide
  Target: ATXN2; (+) strand; PAM type: YTN; PAM sequence: TTT
tatttgtaatactgatttat

SEQ ID NO: 87457 - DNA, 20 bp, Artificial Sequence
  Description of Artificial Sequence: Synthetic oligonucleotide
  Target: ATXN2; (+) strand; PAM type: YTN; PAM sequence: TTT
atttgtaatactgatttatt

SEQ ID NO: 87458 - DNA, 20 bp, Artificial Sequence
  Description of Artificial Sequence: Synthetic oligonucleotide
  Target: ATXN2; (+) strand; PAM type: YTN; PAM sequence: TTA
tttgtaatactgatttattc

SEQ ID NO: 87459 - DNA, 20 bp, Artificial Sequence
  Description of Artificial Sequence: Synthetic oligonucleotide
  Target: ATXN2; (+) strand; PAM type: YTN; PAM sequence: TTT
gtaatactgatttattcatc

SEQ ID NO: 87460 - DNA, 20 bp, Artificial Sequence
  Description of Artificial Sequence: Synthetic oligonucleotide
  Target: ATXN2; (+) strand; PAM type: YTN; PAM sequence: TTG
taatactgatttattcatca

SEQ ID NO: 87461 - DNA, 20 bp, Artificial Sequence
  Description of Artificial Sequence: Synthetic oligonucleotide
  Target: ATXN2; (+) strand; PAM type: YTN; PAM sequence: CTG
atttattcatcagttaaact

SEQ ID NO: 87462 - DNA, 20 bp, Artificial Sequence
  Description of Artificial Sequence: Synthetic oligonucleotide
  Target: ATXN2; (+) strand; PAM type: YTN; PAM sequence: TTT
attcatcagttaaacttcta

SEQ ID NO: 87463 - DNA, 20 bp, Artificial Sequence
  Description of Artificial Sequence: Synthetic oligonucleotide
  Target: ATXN2; (+) strand; PAM type: YTN; PAM sequence: TTA
ttcatcagttaaacttctat

SEQ ID NO: 87464 - DNA, 20 bp, Artificial Sequence
  Description of Artificial Sequence: Synthetic oligonucleotide
  Target: ATXN2; (+) strand; PAM type: YTN; PAM sequence: TTC
atcagttaaacttctattta

SEQ ID NO: 87465 - DNA, 20 bp, Artificial Sequence
  Description of Artificial Sequence: Synthetic oligonucleotide
  Target: ATXN2; (+) strand; PAM type: YTN; PAM sequence: TTA
aacttctatttataaaactt

SEQ ID NO: 87466 - DNA, 20 bp, Artificial Sequence
  Description of Artificial Sequence: Synthetic oligonucleotide
  Target: ATXN2; (+) strand; PAM type: YTN; PAM sequence: CTT
ctatttataaaactttagtc

SEQ ID NO: 87467 - DNA, 20 bp, Artificial Sequence
  Description of Artificial Sequence: Synthetic oligonucleotide
  Target: ATXN2; (+) strand; PAM type: YTN; PAM sequence: TTC
tatttataaaactttagtct

SEQ ID NO: 87468 - DNA, 20 bp, Artificial Sequence
  Description of Artificial Sequence: Synthetic oligonucleotide
  Target: ATXN2; (+) strand; PAM type: YTN; PAM sequence: CTA
tttataaaactttagtcttc

SEQ ID NO: 87469 - DNA, 20 bp, Artificial Sequence
  Description of Artificial Sequence: Synthetic oligonucleotide
  Target: ATXN2; (+) strand; PAM type: YTN; PAM sequence: TTT
ataaaactttagtcttcata

SEQ ID NO: 87470 - DNA, 20 bp, Artificial Sequence
  Description of Artificial Sequence: Synthetic oligonucleotide
  Target: ATXN2; (+) strand; PAM type: YTN; PAM sequence: TTA
taaaactttagtcttcataa

SEQ ID NO: 87471 - DNA, 20 bp, Artificial Sequence
  Description of Artificial Sequence: Synthetic oligonucleotide
  Target: ATXN2; (+) strand; PAM type: YTN; PAM sequence: CTT
tagtcttcataaaatctttt

SEQ ID NO: 87472 - DNA, 20 bp, Artificial Sequence
  Description of Artificial Sequence: Synthetic oligonucleotide
  Target: ATXN2; (+) strand; PAM type: YTN; PAM sequence: TTT
agtcttcataaaatctttta

SEQ ID NO: 87473 - DNA, 20 bp, Artificial Sequence
  Description of Artificial Sequence: Synthetic oligonucleotide
  Target: ATXN2; (+) strand; PAM type: YTN; PAM sequence: TTA
gtcttcataaaatcttttag

SEQ ID NO: 87474 - DNA, 20 bp, Artificial Sequence
  Description of Artificial Sequence: Synthetic oligonucleotide
  Target: ATXN2; (+) strand; PAM type: YTN; PAM sequence: CTT
cataaaatcttttagattaa

SEQ ID NO: 87475 - DNA, 20 bp, Artificial Sequence
  Description of Artificial Sequence: Synthetic oligonucleotide
  Target: ATXN2; (+) strand; PAM type: YTN; PAM sequence: TTC
ataaaatcttttagattaaa

SEQ ID NO: 87476 - DNA, 20 bp, Artificial Sequence
  Description of Artificial Sequence: Synthetic oligonucleotide
  Target: ATXN2; (+) strand; PAM type: YTN; PAM sequence: CTT
ttagattaaagataatcaaa

SEQ ID NO: 87477 - DNA, 20 bp, Artificial Sequence
  Description of Artificial Sequence: Synthetic oligonucleotide
  Target: ATXN2; (+) strand; PAM type: YTN; PAM sequence: TTT
tagattaaagataatcaaag

SEQ ID NO: 87478 - DNA, 20 bp, Artificial Sequence
  Description of Artificial Sequence: Synthetic oligonucleotide
  Target: ATXN2; (+) strand; PAM type: YTN; PAM sequence: TTT
agattaaagataatcaaaga

SEQ ID NO: 87479 - DNA, 20 bp, Artificial Sequence
  Description of Artificial Sequence: Synthetic oligonucleotide
  Target: ATXN2; (+) strand; PAM type: YTN; PAM sequence: TTA
gattaaagataatcaaagac

SEQ ID NO: 87480 - DNA, 20 bp, Artificial Sequence
  Description of Artificial Sequence: Synthetic oligonucleotide
  Target: ATXN2; (+) strand; PAM type: YTN; PAM sequence: TTA
aagataatcaaagacatatg

SEQ ID NO: 87481 - DNA, 20 bp, Artificial Sequence
  Description of Artificial Sequence: Synthetic oligonucleotide
  Target: ATXN2; (+) strand; PAM type: YTN; PAM sequence: CTT
ctttggtccagacctagtcc

SEQ ID NO: 87482 - DNA, 20 bp, Artificial Sequence
  Description of Artificial Sequence: Synthetic oligonucleotide
  Target: ATXN2; (+) strand; PAM type: YTN; PAM sequence: TTC
tttggtccagacctagtcca

SEQ ID NO: 87483 - DNA, 20 bp, Artificial Sequence
  Description of Artificial Sequence: Synthetic oligonucleotide
  Target: ATXN2; (+) strand; PAM type: YTN; PAM sequence: CTT
tggtccagacctagtccaga

SEQ ID NO: 87484 - DNA, 20 bp, Artificial Sequence
  Description of Artificial Sequence: Synthetic oligonucleotide
  Target: ATXN2; (+) strand; PAM type: YTN; PAM sequence: TTT
ggtccagacctagtccagaa

SEQ ID NO: 87485 - DNA, 20 bp, Artificial Sequence
  Description of Artificial Sequence: Synthetic oligonucleotide
  Target: ATXN2; (+) strand; PAM type: YTN; PAM sequence: TTG
gtccagacctagtccagaag

SEQ ID NO: 87486 - DNA, 20 bp, Artificial Sequence
  Description of Artificial Sequence: Synthetic oligonucleotide
  Target: ATXN2; (+) strand; PAM type: YTN; PAM sequence: CTA
gtccagaagtttcccactca

SEQ ID NO: 87487 - DNA, 20 bp, Artificial Sequence
  Description of Artificial Sequence: Synthetic oligonucleotide
  Target: ATXN2; (+) strand; PAM type: YTN; PAM sequence: TTT
cccactcagtgttccttgac

SEQ ID NO: 87488 - DNA, 20 bp, Artificial Sequence
  Description of Artificial Sequence: Synthetic oligonucleotide
  Target: ATXN2; (+) strand; PAM type: YTN; PAM sequence: TTC
ccactcagtgttccttgaca

SEQ ID NO: 87489 - DNA, 20 bp, Artificial Sequence
  Description of Artificial Sequence: Synthetic oligonucleotide
  Target: ATXN2; (+) strand; PAM type: YTN; PAM sequence: CTC
agtgttccttgacataaata

SEQ ID NO: 87490 - DNA, 20 bp, Artificial Sequence
  Description of Artificial Sequence: Synthetic oligonucleotide
  Target: ATXN2; (+) strand; PAM type: YTN; PAM sequence: TTC
cttgacataaatatttaaga

SEQ ID NO: 87491 - DNA, 20 bp, Artificial Sequence
  Description of Artificial Sequence: Synthetic oligonucleotide
  Target: ATXN2; (+) strand; PAM type: YTN; PAM sequence: CTT
gacataaatatttaagattc

SEQ ID NO: 87492 - DNA, 20 bp, Artificial Sequence
  Description of Artificial Sequence: Synthetic oligonucleotide
  Target: ATXN2; (+) strand; PAM type: YTN; PAM sequence: TTG
acataaatatttaagattct

SEQ ID NO: 87493 - DNA, 20 bp, Artificial Sequence
  Description of Artificial Sequence: Synthetic oligonucleotide
  Target: ATXN2; (+) strand; PAM type: YTN; PAM sequence: TTT
aagattctaaacatatgatc

SEQ ID NO: 87494 - DNA, 20 bp, Artificial Sequence
  Description of Artificial Sequence: Synthetic oligonucleotide
  Target: ATXN2; (+) strand; PAM type: YTN; PAM sequence: TTA
agattctaaacatatgatca

SEQ ID NO: 87495 - DNA, 20 bp, Artificial Sequence
  Description of Artificial Sequence: Synthetic oligonucleotide
  Target: ATXN2; (+) strand; PAM type: YTN; PAM sequence: TTC
taaacatatgatcagtcaaa

SEQ ID NO: 87496 - DNA, 20 bp, Artificial Sequence
  Description of Artificial Sequence: Synthetic oligonucleotide
  Target: ATXN2; (+) strand; PAM type: YTN; PAM sequence: CTA
aacatatgatcagtcaaaaa

SEQ ID NO: 87497 - DNA, 20 bp, Artificial Sequence
  Description of Artificial Sequence: Synthetic oligonucleotide
  Target: ATXN2; (+) strand; PAM type: YTN; PAM sequence: CTT
aataacactaaccacattcc

SEQ ID NO: 87498 - DNA, 20 bp, Artificial Sequence
  Description of Artificial Sequence: Synthetic oligonucleotide
  Target: ATXN2; (+) strand; PAM type: YTN; PAM sequence: TTA
ataacactaaccacattcca

SEQ ID NO: 87499 - DNA, 20 bp, Artificial Sequence
  Description of Artificial Sequence: Synthetic oligonucleotide
  Target: ATXN2; (+) strand; PAM type: YTN; PAM sequence: CTA
accacattccagaactagtt

SEQ ID NO: 87500 - DNA, 20 bp, Artificial Sequence
  Description of Artificial Sequence: Synthetic oligonucleotide
  Target: ATXN2; (+) strand; PAM type: YTN; PAM sequence: TTC
cagaactagtttcctcagct

SEQ ID NO: 87501 - DNA, 20 bp, Artificial Sequence
  Description of Artificial Sequence: Synthetic oligonucleotide
  Target: ATXN2; (+) strand; PAM type: YTN; PAM sequence: CTA
gtttcctcagctgtgatctc

SEQ ID NO: 87502 - DNA, 20 bp, Artificial Sequence
  Description of Artificial Sequence: Synthetic oligonucleotide
  Target: ATXN2; (+) strand; PAM type: YTN; PAM sequence: TTT
cctcagctgtgatctcactg

SEQ ID NO: 87503 - DNA, 20 bp, Artificial Sequence
  Description of Artificial Sequence: Synthetic oligonucleotide
  Target: ATXN2; (+) strand; PAM type: YTN; PAM sequence: TTC
ctcagctgtgatctcactga

SEQ ID NO: 87504 - DNA, 20 bp, Artificial Sequence
  Description of Artificial Sequence: Synthetic oligonucleotide
  Target: ATXN2; (+) strand; PAM type: YTN; PAM sequence: CTC
agctgtgatctcactgaagc

SEQ ID NO: 87505 - DNA, 20 bp, Artificial Sequence
  Description of Artificial Sequence: Synthetic oligonucleotide
  Target: ATXN2; (+) strand; PAM type: YTN; PAM sequence: CTG
tgatctcactgaagcaaatt

SEQ ID NO: 87506 - DNA, 20 bp, Artificial Sequence
  Description of Artificial Sequence: Synthetic oligonucleotide
  Target: ATXN2; (+) strand; PAM type: YTN; PAM sequence: CTC
actgaagcaaattaagtaca

SEQ ID NO: 87507 - DNA, 20 bp, Artificial Sequence
  Description of Artificial Sequence: Synthetic oligonucleotide
  Target: ATXN2; (+) strand; PAM type: YTN; PAM sequence: CTG
aagcaaattaagtacagaaa

SEQ ID NO: 87508 - DNA, 20 bp, Artificial Sequence
  Description of Artificial Sequence: Synthetic oligonucleotide
  Target: ATXN2; (+) strand; PAM type: YTN; PAM sequence: TTA
agtacagaaagctgtgtgtt

SEQ ID NO: 87509 - DNA, 20 bp, Artificial Sequence
  Description of Artificial Sequence: Synthetic oligonucleotide
  Target: ATXN2; (+) strand; PAM type: YTN; PAM sequence: CTG
tgtgtttaatttgtaactag

SEQ ID NO: 87510 - DNA, 20 bp, Artificial Sequence
  Description of Artificial Sequence: Synthetic oligonucleotide
  Target: ATXN2; (+) strand; PAM type: YTN; PAM sequence: TTT
aatttgtaactaggttttgt

SEQ ID NO: 87511 - DNA, 20 bp, Artificial Sequence
  Description of Artificial Sequence: Synthetic oligonucleotide
  Target: ATXN2; (+) strand; PAM type: YTN; PAM sequence: TTA
atttgtaactaggttttgtc

SEQ ID NO: 87512 - DNA, 20 bp, Artificial Sequence
  Description of Artificial Sequence: Synthetic oligonucleotide
  Target: ATXN2; (+) strand; PAM type: YTN; PAM sequence: TTT
gtaactaggttttgtcattt

SEQ ID NO: 87513 - DNA, 20 bp, Artificial Sequence
  Description of Artificial Sequence: Synthetic oligonucleotide
  Target: ATXN2; (+) strand; PAM type: YTN; PAM sequence: TTG
taactaggttttgtcatttt

SEQ ID NO: 87514 - DNA, 20 bp, Artificial Sequence
  Description of Artificial Sequence: Synthetic oligonucleotide
  Target: ATXN2; (+) strand; PAM type: YTN; PAM sequence: CTA
ggttttgtcattttgacttt

SEQ ID NO: 87515 - DNA, 20 bp, Artificial Sequence
  Description of Artificial Sequence: Synthetic oligonucleotide
  Target: ATXN2; (+) strand; PAM type: YTN; PAM sequence: TTT
tgtcattttgactttggatg

SEQ ID NO: 87516 - DNA, 20 bp, Artificial Sequence
  Description of Artificial Sequence: Synthetic oligonucleotide
  Target: ATXN2; (+) strand; PAM type: YTN; PAM sequence: TTT
gtcattttgactttggatgc

SEQ ID NO: 87517 - DNA, 20 bp, Artificial Sequence
  Description of Artificial Sequence: Synthetic oligonucleotide
  Target: ATXN2; (+) strand; PAM type: YTN; PAM sequence: TTG
tcattttgactttggatgca

SEQ ID NO: 87518 - DNA, 20 bp, Artificial Sequence
  Description of Artificial Sequence: Synthetic oligonucleotide
  Target: ATXN2; (+) strand; PAM type: YTN; PAM sequence: TTT
tgactttggatgcacaagtc

SEQ ID NO: 87519 - DNA, 20 bp, Artificial Sequence
  Description of Artificial Sequence: Synthetic oligonucleotide
  Target: ATXN2; (+) strand; PAM type: YTN; PAM sequence: TTT
gactttggatgcacaagtca

SEQ ID NO: 87520 - DNA, 20 bp, Artificial Sequence
  Description of Artificial Sequence: Synthetic oligonucleotide
  Target: ATXN2; (+) strand; PAM type: YTN; PAM sequence: TTG
actttggatgcacaagtcat

SEQ ID NO: 87521 - DNA, 20 bp, Artificial Sequence
  Description of Artificial Sequence: Synthetic oligonucleotide
  Target: ATXN2; (+) strand; PAM type: YTN; PAM sequence: CTT
tggatgcacaagtcataaga

SEQ ID NO: 87522 - DNA, 20 bp, Artificial Sequence
  Description of Artificial Sequence: Synthetic oligonucleotide
  Target: ATXN2; (+) strand; PAM type: YTN; PAM sequence: TTT
ggatgcacaagtcataagag

SEQ ID NO: 87523 - DNA, 20 bp, Artificial Sequence
  Description of Artificial Sequence: Synthetic oligonucleotide
  Target: ATXN2; (+) strand; PAM type: YTN; PAM sequence: TTG
gatgcacaagtcataagaga

SEQ ID NO: 87524 - DNA, 20 bp, Artificial Sequence
  Description of Artificial Sequence: Synthetic oligonucleotide
  Target: ATXN2; (+) strand; PAM type: YTN; PAM sequence: TTG
caaaacttataaaacaaaac

SEQ ID NO: 87525 - DNA, 20 bp, Artificial Sequence
  Description of Artificial Sequence: Synthetic oligonucleotide
  Target: ATXN2; (+) strand; PAM type: YTN; PAM sequence: CTT
ataaaacaaaacaaaatctt

SEQ ID NO: 87526 - DNA, 20 bp, Artificial Sequence
  Description of Artificial Sequence: Synthetic oligonucleotide
  Target: ATXN2; (+) strand; PAM type: YTN; PAM sequence: TTA
taaaacaaaacaaaatcttc

SEQ ID NO: 87527 - DNA, 20 bp, Artificial Sequence
  Description of Artificial Sequence: Synthetic oligonucleotide
  Target: ATXN2; (+) strand; PAM type: YTN; PAM sequence: CTT
ccaacttgtaaatctgatgt

SEQ ID NO: 87528 - DNA, 20 bp, Artificial Sequence
  Description of Artificial Sequence: Synthetic oligonucleotide
  Target: ATXN2; (+) strand; PAM type: YTN; PAM sequence: TTC
caacttgtaaatctgatgtt

SEQ ID NO: 87529 - DNA, 20 bp, Artificial Sequence
  Description of Artificial Sequence: Synthetic oligonucleotide
  Target: ATXN2; (+) strand; PAM type: YTN; PAM sequence: CTT
gtaaatctgatgttaaattc

SEQ ID NO: 87530 - DNA, 20 bp, Artificial Sequence
  Description of Artificial Sequence: Synthetic oligonucleotide
  Target: ATXN2; (+) strand; PAM type: YTN; PAM sequence: TTG
taaatctgatgttaaattca

SEQ ID NO: 87531 - DNA, 20 bp, Artificial Sequence
  Description of Artificial Sequence: Synthetic oligonucleotide
  Target: ATXN2; (+) strand; PAM type: YTN; PAM sequence: CTG
atgttaaattcagaaaaagg

SEQ ID NO: 87532 - DNA, 20 bp, Artificial Sequence
  Description of Artificial Sequence: Synthetic oligonucleotide
  Target: ATXN2; (+) strand; PAM type: YTN; PAM sequence: TTA
aattcagaaaaagggaagtg

SEQ ID NO: 87533 - DNA, 20 bp, Artificial Sequence
  Description of Artificial Sequence: Synthetic oligonucleotide
  Target: ATXN2; (+) strand; PAM type: YTN; PAM sequence: TTC
agaaaaagggaagtgaagga

SEQ ID NO: 87534 - DNA, 20 bp, Artificial Sequence
  Description of Artificial Sequence: Synthetic oligonucleotide
  Target: ATXN2; (+) strand; PAM type: YTN; PAM sequence: TTG
aaaactctaaaaggggaata

SEQ ID NO: 87535 - DNA, 20 bp, Artificial Sequence
  Description of Artificial Sequence: Synthetic oligonucleotide
  Target: ATXN2; (+) strand; PAM type: YTN; PAM sequence: CTC
taaaaggggaataaaaggca

SEQ ID NO: 87536 - DNA, 20 bp, Artificial Sequence
  Description of Artificial Sequence: Synthetic oligonucleotide
  Target: ATXN2; (+) strand; PAM type: YTN; PAM sequence: CTA
aaaggggaataaaaggcaac

SEQ ID NO: 87537 - DNA, 20 bp, Artificial Sequence
  Description of Artificial Sequence: Synthetic oligonucleotide
  Target: ATXN2; (+) strand; PAM type: YTN; PAM sequence: CTT
gaccaaaccatcataaaatg

SEQ ID NO: 87538 - DNA, 20 bp, Artificial Sequence
  Description of Artificial Sequence: Synthetic oligonucleotide
  Target: ATXN2; (+) strand; PAM type: YTN; PAM sequence: TTG
accaaaccatcataaaatgg

SEQ ID NO: 87539 - DNA, 20 bp, Artificial Sequence
  Description of Artificial Sequence: Synthetic oligonucleotide
  Target: ATXN2; (+) strand; PAM type: YTN; PAM sequence: CTT
agaacagggggaaatgaagc

SEQ ID NO: 87540 - DNA, 20 bp, Artificial Sequence
  Description of Artificial Sequence: Synthetic oligonucleotide
  Target: ATXN2; (+) strand; PAM type: YTN; PAM sequence: TTA
gaacagggggaaatgaagca

SEQ ID NO: 87541 - DNA, 20 bp, Artificial Sequence
  Description of Artificial Sequence: Synthetic oligonucleotide
  Target: ATXN2; (+) strand; PAM type: YTN; PAM sequence: TTA
aattagcagcccaactgtta

SEQ ID NO: 87542 - DNA, 20 bp, Artificial Sequence
  Description of Artificial Sequence: Synthetic oligonucleotide
  Target: ATXN2; (+) strand; PAM type: YTN; PAM sequence: TTA
gcagcccaactgttagtttc

SEQ ID NO: 87543 - DNA, 20 bp, Artificial Sequence
  Description of Artificial Sequence: Synthetic oligonucleotide
  Target: ATXN2; (+) strand; PAM type: YTN; PAM sequence: CTG
ttagtttcttttaaaaagta

SEQ ID NO: 87544 - DNA, 20 bp, Artificial Sequence
  Description of Artificial Sequence: Synthetic oligonucleotide
  Target: ATXN2; (+) strand; PAM type: YTN; PAM sequence: TTA
gtttcttttaaaaagtactg

SEQ ID NO: 87545 - DNA, 20 bp, Artificial Sequence
  Description of Artificial Sequence: Synthetic oligonucleotide
  Target: ATXN2; (+) strand; PAM type: YTN; PAM sequence: TTT
cttttaaaaagtactgatac

SEQ ID NO: 87546 - DNA, 20 bp, Artificial Sequence
  Description of Artificial Sequence: Synthetic oligonucleotide
  Target: ATXN2; (+) strand; PAM type: YTN; PAM sequence: TTC
ttttaaaaagtactgatact

SEQ ID NO: 87547 - DNA, 20 bp, Artificial Sequence
  Description of Artificial Sequence: Synthetic oligonucleotide
  Target: ATXN2; (+) strand; PAM type: YTN; PAM sequence: CTT
ttaaaaagtactgatactcc

SEQ ID NO: 87548 - DNA, 20 bp, Artificial Sequence
  Description of Artificial Sequence: Synthetic oligonucleotide
  Target: ATXN2; (+) strand; PAM type: YTN; PAM sequence: TTT
taaaaagtactgatactccc

SEQ ID NO: 87549 - DNA, 20 bp, Artificial Sequence
  Description of Artificial Sequence: Synthetic oligonucleotide
  Target: ATXN2; (+) strand; PAM type: YTN; PAM sequence: TTT
aaaaagtactgatactccct

SEQ ID NO: 87550 - DNA, 20 bp, Artificial Sequence
  Description of Artificial Sequence: Synthetic oligonucleotide
  Target: ATXN2; (+) strand; PAM type: YTN; PAM sequence: TTA
aaaagtactgatactccctt

SEQ ID NO: 87551 - DNA, 20 bp, Artificial Sequence
  Description of Artificial Sequence: Synthetic oligonucleotide
  Target: ATXN2; (+) strand; PAM type: YTN; PAM sequence: CTG
atactcccttttaggggaag

SEQ ID NO: 87552 - DNA, 20 bp, Artificial Sequence
  Description of Artificial Sequence: Synthetic oligonucleotide
  Target: ATXN2; (+) strand; PAM type: YTN; PAM sequence: CTC
ccttttaggggaagttgtgc

SEQ ID NO: 87553 - DNA, 20 bp, Artificial Sequence
  Description of Artificial Sequence: Synthetic oligonucleotide
  Target: ATXN2; (+) strand; PAM type: YTN; PAM sequence: CTT
ttaggggaagttgtgctaag

SEQ ID NO: 87554 - DNA, 20 bp, Artificial Sequence
  Description of Artificial Sequence: Synthetic oligonucleotide
  Target: ATXN2; (+) strand; PAM type: YTN; PAM sequence: TTT
taggggaagttgtgctaagg

SEQ ID NO: 87555 - DNA, 20 bp, Artificial Sequence
  Description of Artificial Sequence: Synthetic oligonucleotide
  Target: ATXN2; (+) strand; PAM type: YTN; PAM sequence: TTT
aggggaagttgtgctaaggc

SEQ ID NO: 87556 - DNA, 20 bp, Artificial Sequence
  Description of Artificial Sequence: Synthetic oligonucleotide
  Target: ATXN2; (+) strand; PAM type: YTN; PAM sequence: TTA
ggggaagttgtgctaaggca

SEQ ID NO: 87557 - DNA, 20 bp, Artificial Sequence
  Description of Artificial Sequence: Synthetic oligonucleotide
  Target: ATXN2; (+) strand; PAM type: YTN; PAM sequence: TTG
tgctaaggcaattaaggctt

SEQ ID NO: 87558 - DNA, 20 bp, Artificial Sequence
  Description of Artificial Sequence: Synthetic oligonucleotide
  Target: ATXN2; (+) strand; PAM type: YTN; PAM sequence: CTA
aggcaattaaggcttaggtg

SEQ ID NO: 87559 - DNA, 20 bp, Artificial Sequence
  Description of Artificial Sequence: Synthetic oligonucleotide
  Target: ATXN2; (+) strand; PAM type: YTN; PAM sequence: TTA
aggcttaggtgttaatgatt

SEQ ID NO: 87560 - DNA, 20 bp, Artificial Sequence
  Description of Artificial Sequence: Synthetic oligonucleotide
  Target: ATXN2; (+) strand; PAM type: YTN; PAM sequence: CTT
aggtgttaatgattaaggac

SEQ ID NO: 87561 - DNA, 20 bp, Artificial Sequence
  Description of Artificial Sequence: Synthetic oligonucleotide
  Target: ATXN2; (+) strand; PAM type: YTN; PAM sequence: TTA
ggtgttaatgattaaggacc

SEQ ID NO: 87562 - DNA, 20 bp, Artificial Sequence
  Description of Artificial Sequence: Synthetic oligonucleotide
  Target: ATXN2; (+) strand; PAM type: YTN; PAM sequence: TTA
atgattaaggaccttagcta

SEQ ID NO: 87563 - DNA, 20 bp, Artificial Sequence
  Description of Artificial Sequence: Synthetic oligonucleotide
  Target: ATXN2; (+) strand; PAM type: YTN; PAM sequence: TTA
aggaccttagctacttacca

SEQ ID NO: 87564 - DNA, 20 bp, Artificial Sequence
  Description of Artificial Sequence: Synthetic oligonucleotide
  Target: ATXN2; (+) strand; PAM type: YTN; PAM sequence: CTT
agctacttaccaggaaaaca

SEQ ID NO: 87565 - DNA, 20 bp, Artificial Sequence
  Description of Artificial Sequence: Synthetic oligonucleotide
  Target: ATXN2; (+) strand; PAM type: YTN; PAM sequence: TTA
gctacttaccaggaaaacaa

SEQ ID NO: 87566 - DNA, 20 bp, Artificial Sequence
  Description of Artificial Sequence: Synthetic oligonucleotide
  Target: ATXN2; (+) strand; PAM type: YTN; PAM sequence: CTA
cttaccaggaaaacaacacc

SEQ ID NO: 87567 - DNA, 20 bp, Artificial Sequence
  Description of Artificial Sequence: Synthetic oligonucleotide
  Target: ATXN2; (+) strand; PAM type: YTN; PAM sequence: CTT
accaggaaaacaacaccaaa

SEQ ID NO: 87568 - DNA, 20 bp, Artificial Sequence
  Description of Artificial Sequence: Synthetic oligonucleotide
  Target: ATXN2; (+) strand; PAM type: YTN; PAM sequence: TTA
ccaggaaaacaacaccaaac

SEQ ID NO: 87569 - DNA, 20 bp, Artificial Sequence
  Description of Artificial Sequence: Synthetic oligonucleotide
  Target: ATXN2; (+) strand; PAM type: YTN; PAM sequence: CTA
ctaacagagacagtaagatg

SEQ ID NO: 87570 - DNA, 20 bp, Artificial Sequence
  Description of Artificial Sequence: Synthetic oligonucleotide
  Target: ATXN2; (+) strand; PAM type: YTN; PAM sequence: CTA
acagagacagtaagatggtg

SEQ ID NO: 87571 - DNA, 20 bp, Artificial Sequence
  Description of Artificial Sequence: Synthetic oligonucleotide
  Target: ATXN2; (+) strand; PAM type: YTN; PAM sequence: CTA
catttgagacctcaaattga

SEQ ID NO: 87572 - DNA, 20 bp, Artificial Sequence
  Description of Artificial Sequence: Synthetic oligonucleotide
  Target: ATXN2; (+) strand; PAM type: YTN; PAM sequence: TTT
gagacctcaaattgagtaca

SEQ ID NO: 87573 - DNA, 20 bp, Artificial Sequence
  Description of Artificial Sequence: Synthetic oligonucleotide
  Target: ATXN2; (+) strand; PAM type: YTN; PAM sequence: TTG
agacctcaaattgagtacat

SEQ ID NO: 87574 - DNA, 20 bp, Artificial Sequence
  Description of Artificial Sequence: Synthetic oligonucleotide
  Target: ATXN2; (+) strand; PAM type: YTN; PAM sequence: CTC
aaattgagtacataataaaa

SEQ ID NO: 87575 - DNA, 20 bp, Artificial Sequence
  Description of Artificial Sequence: Synthetic oligonucleotide
  Target: ATXN2; (+) strand; PAM type: YTN; PAM sequence: TTG
agtacataataaaatcacct

SEQ ID NO: 87576 - DNA, 20 bp, Artificial Sequence
  Description of Artificial Sequence: Synthetic oligonucleotide
  Target: ATXN2; (+) strand; PAM type: YTN; PAM sequence: CTA
ctatcttttacacactacaa

SEQ ID NO: 87577 - DNA, 20 bp, Artificial Sequence
  Description of Artificial Sequence: Synthetic oligonucleotide
  Target: ATXN2; (+) strand; PAM type: YTN; PAM sequence: CTA
tcttttacacactacaatca

SEQ ID NO: 87578 - DNA, 20 bp, Artificial Sequence
  Description of Artificial Sequence: Synthetic oligonucleotide
  Target: ATXN2; (+) strand; PAM type: YTN; PAM sequence: CTT
ttacacactacaatcacaga

SEQ ID NO: 87579 - DNA, 20 bp, Artificial Sequence
  Description of Artificial Sequence: Synthetic oligonucleotide
  Target: ATXN2; (+) strand; PAM type: YTN; PAM sequence: TTT
tacacactacaatcacagac

SEQ ID NO: 87580 - DNA, 20 bp, Artificial Sequence
  Description of Artificial Sequence: Synthetic oligonucleotide
  Target: ATXN2; (+) strand; PAM type: YTN; PAM sequence: TTT
acacactacaatcacagaca

SEQ ID NO: 87581 - DNA, 20 bp, Artificial Sequence
  Description of Artificial Sequence: Synthetic oligonucleotide
  Target: ATXN2; (+) strand; PAM type: YTN; PAM sequence: TTA
cacactacaatcacagacat

SEQ ID NO: 87582 - DNA, 20 bp, Artificial Sequence
  Description of Artificial Sequence: Synthetic oligonucleotide
  Target: ATXN2; (+) strand; PAM type: YTN; PAM sequence: CTA
caatcacagacatagtttcc

SEQ ID NO: 87583 - DNA, 20 bp, Artificial Sequence
  Description of Artificial Sequence: Synthetic oligonucleotide
  Target: ATXN2; (+) strand; PAM type: YTN; PAM sequence: TTT
cccctttaatagtatataca

SEQ ID NO: 87584 - DNA, 20 bp, Artificial Sequence
  Description of Artificial Sequence: Synthetic oligonucleotide
  Target: ATXN2; (+) strand; PAM type: YTN; PAM sequence: TTC
ccctttaatagtatatacat

SEQ ID NO: 87585 - DNA, 20 bp, Artificial Sequence
  Description of Artificial Sequence: Synthetic oligonucleotide
  Target: ATXN2; (+) strand; PAM type: YTN; PAM sequence: CTT
taatagtatatacatacagc

SEQ ID NO: 87586 - DNA, 20 bp, Artificial Sequence
  Description of Artificial Sequence: Synthetic oligonucleotide
  Target: ATXN2; (+) strand; PAM type: YTN; PAM sequence: TTT
aatagtatatacatacagca

SEQ ID NO: 87587 - DNA, 20 bp, Artificial Sequence
  Description of Artificial Sequence: Synthetic oligonucleotide
  Target: ATXN2; (+) strand; PAM type: YTN; PAM sequence: TTA
atagtatatacatacagcaa

SEQ ID NO: 87588 - DNA, 20 bp, Artificial Sequence
  Description of Artificial Sequence: Synthetic oligonucleotide
  Target: ATXN2; (+) strand; PAM type: YTN; PAM sequence: CTC
ctttttaaagagcatctatt

SEQ ID NO: 87589 - DNA, 20 bp, Artificial Sequence
  Description of Artificial Sequence: Synthetic oligonucleotide
  Target: ATXN2; (+) strand; PAM type: YTN; PAM sequence: CTT
tttaaagagcatctattaaa

SEQ ID NO: 87590 - DNA, 20 bp, Artificial Sequence
  Description of Artificial Sequence: Synthetic oligonucleotide
  Target: ATXN2; (+) strand; PAM type: YTN; PAM sequence: TTT
ttaaagagcatctattaaag

SEQ ID NO: 87591 - DNA, 20 bp, Artificial Sequence
  Description of Artificial Sequence: Synthetic oligonucleotide
  Target: ATXN2; (+) strand; PAM type: YTN; PAM sequence: TTT
taaagagcatctattaaagg

SEQ ID NO: 87592 - DNA, 20 bp, Artificial Sequence
  Description of Artificial Sequence: Synthetic oligonucleotide
  Target: ATXN2; (+) strand; PAM type: YTN; PAM sequence: TTT
aaagagcatctattaaagga

SEQ ID NO: 87593 - DNA, 20 bp, Artificial Sequence
  Description of Artificial Sequence: Synthetic oligonucleotide
  Target: ATXN2; (+) strand; PAM type: YTN; PAM sequence: TTA
aagagcatctattaaaggat

SEQ ID NO: 87594 - DNA, 20 bp, Artificial Sequence
  Description of Artificial Sequence: Synthetic oligonucleotide
  Target: ATXN2; (+) strand; PAM type: YTN; PAM sequence: CTA
ttaaaggattaaatttaaca

SEQ ID NO: 87595 - DNA, 20 bp, Artificial Sequence
  Description of Artificial Sequence: Synthetic oligonucleotide
  Target: ATXN2; (+) strand; PAM type: YTN; PAM sequence: TTA
aaggattaaatttaacattt

SEQ ID NO: 87596 - DNA, 20 bp, Artificial Sequence
  Description of Artificial Sequence: Synthetic oligonucleotide
  Target: ATXN2; (+) strand; PAM type: YTN; PAM sequence: TTA
aatttaacatttcctagcac

SEQ ID NO: 87597 - DNA, 20 bp, Artificial Sequence
  Description of Artificial Sequence: Synthetic oligonucleotide
  Target: ATXN2; (+) strand; PAM type: YTN; PAM sequence: TTT
aacatttcctagcaccaaat

SEQ ID NO: 87598 - DNA, 20 bp, Artificial Sequence
  Description of Artificial Sequence: Synthetic oligonucleotide
  Target: ATXN2; (+) strand; PAM type: YTN; PAM sequence: TTA
acatttcctagcaccaaata

SEQ ID NO: 87599 - DNA, 20 bp, Artificial Sequence
  Description of Artificial Sequence: Synthetic oligonucleotide
  Target: ATXN2; (+) strand; PAM type: YTN; PAM sequence: TTT
cctagcaccaaataaattat

SEQ ID NO: 87600 - DNA, 20 bp, Artificial Sequence
  Description of Artificial Sequence: Synthetic oligonucleotide
  Target: ATXN2; (+) strand; PAM type: YTN; PAM sequence: TTC
ctagcaccaaataaattata

SEQ ID NO: 87601 - DNA, 20 bp, Artificial Sequence
  Description of Artificial Sequence: Synthetic oligonucleotide
  Target: ATXN2; (+) strand; PAM type: YTN; PAM sequence: CTA
gcaccaaataaattatatat

SEQ ID NO: 87602 - DNA, 20 bp, Artificial Sequence
  Description of Artificial Sequence: Synthetic oligonucleotide
  Target: ATXN2; (+) strand; PAM type: YTN; PAM sequence: TTA
tatatacacacatacatata

SEQ ID NO: 87603 - DNA, 20 bp, Artificial Sequence
  Description of Artificial Sequence: Synthetic oligonucleotide
  Target: ATXN2; (+) strand; PAM type: YTN; PAM sequence: CTT
atttttggataccaagtcat

SEQ ID NO: 87604 - DNA, 20 bp, Artificial Sequence
  Description of Artificial Sequence: Synthetic oligonucleotide
  Target: ATXN2; (+) strand; PAM type: YTN; PAM sequence: TTA
tttttggataccaagtcatg

SEQ ID NO: 87605 - DNA, 20 bp, Artificial Sequence
  Description of Artificial Sequence: Synthetic oligonucleotide
  Target: ATXN2; (+) strand; PAM type: YTN; PAM sequence: TTT
ttggataccaagtcatggca

SEQ ID NO: 87606 - DNA, 20 bp, Artificial Sequence
  Description of Artificial Sequence: Synthetic oligonucleotide
  Target: ATXN2; (+) strand; PAM type: YTN; PAM sequence: TTT
tggataccaagtcatggcat

SEQ ID NO: 87607 - DNA, 20 bp, Artificial Sequence
  Description of Artificial Sequence: Synthetic oligonucleotide
  Target: ATXN2; (+) strand; PAM type: YTN; PAM sequence: TTT
ggataccaagtcatggcata

SEQ ID NO: 87608 - DNA, 20 bp, Artificial Sequence
  Description of Artificial Sequence: Synthetic oligonucleotide
  Target: ATXN2; (+) strand; PAM type: YTN; PAM sequence: TTG
gataccaagtcatggcataa

SEQ ID NO: 87609 - DNA, 20 bp, Artificial Sequence
  Description of Artificial Sequence: Synthetic oligonucleotide
  Target: ATXN2; (+) strand; PAM type: YTN; PAM sequence: TTA
acaaagatttaaggtcaaat

SEQ ID NO: 87610 - DNA, 20 bp, Artificial Sequence
  Description of Artificial Sequence: Synthetic oligonucleotide
  Target: ATXN2; (+) strand; PAM type: YTN; PAM sequence: TTT
aaggtcaaatgcattttaaa

SEQ ID NO: 87611 - DNA, 20 bp, Artificial Sequence
  Description of Artificial Sequence: Synthetic oligonucleotide
  Target: ATXN2; (+) strand; PAM type: YTN; PAM sequence: TTA
aggtcaaatgcattttaaat

SEQ ID NO: 87612 - DNA, 20 bp, Artificial Sequence
  Description of Artificial Sequence: Synthetic oligonucleotide
  Target: ATXN2; (+) strand; PAM type: YTN; PAM sequence: TTT
taaatgctaatatggcattt

SEQ ID NO: 87613 - DNA, 20 bp, Artificial Sequence
  Description of Artificial Sequence: Synthetic oligonucleotide
  Target: ATXN2; (+) strand; PAM type: YTN; PAM sequence: TTT
aaatgctaatatggcattta

SEQ ID NO: 87614 - DNA, 20 bp, Artificial Sequence
  Description of Artificial Sequence: Synthetic oligonucleotide
  Target: ATXN2; (+) strand; PAM type: YTN; PAM sequence: TTA
aatgctaatatggcatttag

SEQ ID NO: 87615 - DNA, 20 bp, Artificial Sequence
  Description of Artificial Sequence: Synthetic oligonucleotide
  Target: ATXN2; (+) strand; PAM type: YTN; PAM sequence: CTA
atatggcatttagtagagtc

SEQ ID NO: 87616 - DNA, 20 bp, Artificial Sequence
  Description of Artificial Sequence: Synthetic oligonucleotide
  Target: ATXN2; (+) strand; PAM type: YTN; PAM sequence: TTT
agtagagtcagacattgagt

SEQ ID NO: 87617 - DNA, 20 bp, Artificial Sequence
  Description of Artificial Sequence: Synthetic oligonucleotide
  Target: ATXN2; (+) strand; PAM type: YTN; PAM sequence: TTA
gtagagtcagacattgagtc

SEQ ID NO: 87618 - DNA, 20 bp, Artificial Sequence
  Description of Artificial Sequence: Synthetic oligonucleotide
  Target: ATXN2; (+) strand; PAM type: YTN; PAM sequence: TTG
agtcaccccaaaataactca

SEQ ID NO: 87619 - DNA, 20 bp, Artificial Sequence
  Description of Artificial Sequence: Synthetic oligonucleotide
  Target: ATXN2; (+) strand; PAM type: YTN; PAM sequence: CTC
aaaatgtgcctaacataaaa

SEQ ID NO: 87620 - DNA, 20 bp, Artificial Sequence
  Description of Artificial Sequence: Synthetic oligonucleotide
  Target: ATXN2; (+) strand; PAM type: YTN; PAM sequence: CTA
acataaaatttgaatcctta

SEQ ID NO: 87621 - DNA, 20 bp, Artificial Sequence
  Description of Artificial Sequence: Synthetic oligonucleotide
  Target: ATXN2; (+) strand; PAM type: YTN; PAM sequence: TTT
gaatccttaatatcctctag

SEQ ID NO: 87622 - DNA, 20 bp, Artificial Sequence
  Description of Artificial Sequence: Synthetic oligonucleotide
  Target: ATXN2; (+) strand; PAM type: YTN; PAM sequence: TTG
aatccttaatatcctctaga

SEQ ID NO: 87623 - DNA, 20 bp, Artificial Sequence
  Description of Artificial Sequence: Synthetic oligonucleotide
  Target: ATXN2; (+) strand; PAM type: YTN; PAM sequence: CTT
aatatcctctagaacacaac

SEQ ID NO: 87624 - DNA, 20 bp, Artificial Sequence
  Description of Artificial Sequence: Synthetic oligonucleotide
  Target: ATXN2; (+) strand; PAM type: YTN; PAM sequence: TTA
atatcctctagaacacaaca

SEQ ID NO: 87625 - DNA, 20 bp, Artificial Sequence
  Description of Artificial Sequence: Synthetic oligonucleotide
  Target: ATXN2; (+) strand; PAM type: YTN; PAM sequence: CTC
tagaacacaacatttcatac

SEQ ID NO: 87626 - DNA, 20 bp, Artificial Sequence
  Description of Artificial Sequence: Synthetic oligonucleotide
  Target: ATXN2; (+) strand; PAM type: YTN; PAM sequence: CTA
gaacacaacatttcatacaa

SEQ ID NO: 87627 - DNA, 20 bp, Artificial Sequence
  Description of Artificial Sequence: Synthetic oligonucleotide
  Target: ATXN2; (+) strand; PAM type: YTN; PAM sequence: TTT
catacaaggtgacaatatta

SEQ ID NO: 87628 - DNA, 20 bp, Artificial Sequence
  Description of Artificial Sequence: Synthetic oligonucleotide
  Target: ATXN2; (+) strand; PAM type: YTN; PAM sequence: TTC
atacaaggtgacaatattaa

SEQ ID NO: 87629 - DNA, 20 bp, Artificial Sequence
  Description of Artificial Sequence: Synthetic oligonucleotide
  Target: ATXN2; (+) strand; PAM type: YTN; PAM sequence: TTA
atggcacaaatttctaaagg

SEQ ID NO: 87630 - DNA, 20 bp, Artificial Sequence
  Description of Artificial Sequence: Synthetic oligonucleotide
  Target: ATXN2; (+) strand; PAM type: YTN; PAM sequence: TTT
ctaaaggatttctacaaata

SEQ ID NO: 87631 - DNA, 20 bp, Artificial Sequence
  Description of Artificial Sequence: Synthetic oligonucleotide
  Target: ATXN2; (+) strand; PAM type: YTN; PAM sequence: TTC
taaaggatttctacaaatat

SEQ ID NO: 87632 - DNA, 20 bp, Artificial Sequence
  Description of Artificial Sequence: Synthetic oligonucleotide
  Target: ATXN2; (+) strand; PAM type: YTN; PAM sequence: CTA
aaggatttctacaaatatta

SEQ ID NO: 87633 - DNA, 20 bp, Artificial Sequence
  Description of Artificial Sequence: Synthetic oligonucleotide
  Target: ATXN2; (+) strand; PAM type: YTN; PAM sequence: TTT
ctacaaatattagtactcct

SEQ ID NO: 87634 - DNA, 20 bp, Artificial Sequence
  Description of Artificial Sequence: Synthetic oligonucleotide
  Target: ATXN2; (+) strand; PAM type: YTN; PAM sequence: TTC
tacaaatattagtactcctt

SEQ ID NO: 87635 - DNA, 20 bp, Artificial Sequence
  Description of Artificial Sequence: Synthetic oligonucleotide
  Target: ATXN2; (+) strand; PAM type: YTN; PAM sequence: CTA
caaatattagtactccttcc

SEQ ID NO: 87636 - DNA, 20 bp, Artificial Sequence
  Description of Artificial Sequence: Synthetic oligonucleotide
  Target: ATXN2; (+) strand; PAM type: YTN; PAM sequence: TTA
gtactccttcctatttaaat

SEQ ID NO: 87637 - DNA, 20 bp, Artificial Sequence
  Description of Artificial Sequence: Synthetic oligonucleotide
  Target: ATXN2; (+) strand; PAM type: YTN; PAM sequence: CTC
cttcctatttaaataccaaa

SEQ ID NO: 87638 - DNA, 20 bp, Artificial Sequence
  Description of Artificial Sequence: Synthetic oligonucleotide
  Target: ATXN2; (+) strand; PAM type: YTN; PAM sequence: CTT
cctatttaaataccaaagtc

SEQ ID NO: 87639 - DNA, 20 bp, Artificial Sequence
  Description of Artificial Sequence: Synthetic oligonucleotide
  Target: ATXN2; (+) strand; PAM type: YTN; PAM sequence: TTC
ctatttaaataccaaagtcc

SEQ ID NO: 87640 - DNA, 20 bp, Artificial Sequence
  Description of Artificial Sequence: Synthetic oligonucleotide
  Target: ATXN2; (+) strand; PAM type: YTN; PAM sequence: CTA
tttaaataccaaagtccaag

SEQ ID NO: 87641 - DNA, 20 bp, Artificial Sequence
  Description of Artificial Sequence: Synthetic oligonucleotide
  Target: ATXN2; (+) strand; PAM type: YTN; PAM sequence: TTT
aaataccaaagtccaagact

SEQ ID NO: 87642 - DNA, 20 bp, Artificial Sequence
  Description of Artificial Sequence: Synthetic oligonucleotide
  Target: ATXN2; (+) strand; PAM type: YTN; PAM sequence: TTA
aataccaaagtccaagacta

SEQ ID NO: 87643 - DNA, 20 bp, Artificial Sequence
  Description of Artificial Sequence: Synthetic oligonucleotide
  Target: ATXN2; (+) strand; PAM type: YTN; PAM sequence: CTA
gccttatttttattttttat

SEQ ID NO: 87644 - DNA, 20 bp, Artificial Sequence
  Description of Artificial Sequence: Synthetic oligonucleotide
  Target: ATXN2; (+) strand; PAM type: YTN; PAM sequence: CTT
atttttattttttattttga

SEQ ID NO: 87645 - DNA, 20 bp, Artificial Sequence
  Description of Artificial Sequence: Synthetic oligonucleotide
  Target: ATXN2; (+) strand; PAM type: YTN; PAM sequence: TTA
tttttattttttattttgag

SEQ ID NO: 87646 - DNA, 20 bp, Artificial Sequence
  Description of Artificial Sequence: Synthetic oligonucleotide
  Target: ATXN2; (+) strand; PAM type: YTN; PAM sequence: TTT
ttattttttattttgagaca

SEQ ID NO: 87647 - DNA, 20 bp, Artificial Sequence
  Description of Artificial Sequence: Synthetic oligonucleotide
  Target: ATXN2; (+) strand; PAM type: YTN; PAM sequence: TTT
tattttttattttgagacag

SEQ ID NO: 87648 - DNA, 20 bp, Artificial Sequence
  Description of Artificial Sequence: Synthetic oligonucleotide
  Target: ATXN2; (+) strand; PAM type: YTN; PAM sequence: TTT
attttttattttgagacaga

SEQ ID NO: 87649 - DNA, 20 bp, Artificial Sequence
  Description of Artificial Sequence: Synthetic oligonucleotide
  Target: ATXN2; (+) strand; PAM type: YTN; PAM sequence: TTA
ttttttattttgagacagag

SEQ ID NO: 87650 - DNA, 20 bp, Artificial Sequence
  Description of Artificial Sequence: Synthetic oligonucleotide
  Target: ATXN2; (+) strand; PAM type: YTN; PAM sequence: TTT
tttattttgagacagagtct

SEQ ID NO: 87651 - DNA, 20 bp, Artificial Sequence
  Description of Artificial Sequence: Synthetic oligonucleotide
  Target: ATXN2; (+) strand; PAM type: YTN; PAM sequence: TTT
ttattttgagacagagtctc

SEQ ID NO: 87652 - DNA, 20 bp, Artificial Sequence
  Description of Artificial Sequence: Synthetic oligonucleotide
  Target: ATXN2; (+) strand; PAM type: YTN; PAM sequence: TTT
tattttgagacagagtctct

SEQ ID NO: 87653 - DNA, 20 bp, Artificial Sequence
  Description of Artificial Sequence: Synthetic oligonucleotide
  Target: ATXN2; (+) strand; PAM type: YTN; PAM sequence: TTT
attttgagacagagtctctc

SEQ ID NO: 87654 - DNA, 20 bp, Artificial Sequence
  Description of Artificial Sequence: Synthetic oligonucleotide
  Target: ATXN2; (+) strand; PAM type: YTN; PAM sequence: TTA
ttttgagacagagtctctct

SEQ ID NO: 87655 - DNA, 20 bp, Artificial Sequence
  Description of Artificial Sequence: Synthetic oligonucleotide
  Target: ATXN2; (+) strand; PAM type: YTN; PAM sequence: TTT
tgagacagagtctctctctg

SEQ ID NO: 87656 - DNA, 20 bp, Artificial Sequence
  Description of Artificial Sequence: Synthetic oligonucleotide
  Target: ATXN2; (+) strand; PAM type: YTN; PAM sequence: TTT
gagacagagtctctctctgt

SEQ ID NO: 87657 - DNA, 20 bp, Artificial Sequence
  Description of Artificial Sequence: Synthetic oligonucleotide
  Target: ATXN2; (+) strand; PAM type: YTN; PAM sequence: TTG
agacagagtctctctctgtt

SEQ ID NO: 87658 - DNA, 20 bp, Artificial Sequence
  Description of Artificial Sequence: Synthetic oligonucleotide
  Target: ATXN2; (+) strand; PAM type: YTN; PAM sequence: CTC
tctctgttgcccaggcctga

SEQ ID NO: 87659 - DNA, 20 bp, Artificial Sequence
  Description of Artificial Sequence: Synthetic oligonucleotide
  Target: ATXN2; (+) strand; PAM type: YTN; PAM sequence: CTC
tctgttgcccaggcctgagt

SEQ ID NO: 87660 - DNA, 20 bp, Artificial Sequence
  Description of Artificial Sequence: Synthetic oligonucleotide
  Target: ATXN2; (+) strand; PAM type: YTN; PAM sequence: CTC
tgttgcccaggcctgagtgc

SEQ ID NO: 87661 - DNA, 20 bp, Artificial Sequence
  Description of Artificial Sequence: Synthetic oligonucleotide
  Target: ATXN2; (+) strand; PAM type: YTN; PAM sequence: CTG
ttgcccaggcctgagtgcag

SEQ ID NO: 87662 - DNA, 20 bp, Artificial Sequence
  Description of Artificial Sequence: Synthetic oligonucleotide
  Target: ATXN2; (+) strand; PAM type: YTN; PAM sequence: TTG
cccaggcctgagtgcagtgg

SEQ ID NO: 87663 - DNA, 20 bp, Artificial Sequence
  Description of Artificial Sequence: Synthetic oligonucleotide
  Target: ATXN2; (+) strand; PAM type: YTN; PAM sequence: CTG
agtgcagtggtacaatctca

SEQ ID NO: 87664 - DNA, 20 bp, Artificial Sequence
  Description of Artificial Sequence: Synthetic oligonucleotide
  Target: ATXN2; (+) strand; PAM type: YTN; PAM sequence: CTC
agctcactgcaacctccacc

SEQ ID NO: 87665 - DNA, 20 bp, Artificial Sequence
  Description of Artificial Sequence: Synthetic oligonucleotide
  Target: ATXN2; (+) strand; PAM type: YTN; PAM sequence: CTC
actgcaacctccacctccag

SEQ ID NO: 87666 - DNA, 20 bp, Artificial Sequence
  Description of Artificial Sequence: Synthetic oligonucleotide
  Target: ATXN2; (+) strand; PAM type: YTN; PAM sequence: CTG
caacctccacctccagggtt

SEQ ID NO: 87667 - DNA, 20 bp, Artificial Sequence
  Description of Artificial Sequence: Synthetic oligonucleotide
  Target: ATXN2; (+) strand; PAM type: YTN; PAM sequence: CTC
cacctccagggttcatggaa

SEQ ID NO: 87668 - DNA, 20 bp, Artificial Sequence
  Description of Artificial Sequence: Synthetic oligonucleotide
  Target: ATXN2; (+) strand; PAM type: YTN; PAM sequence: CTC
cagggttcatggaactcttg

SEQ ID NO: 87669 - DNA, 20 bp, Artificial Sequence
  Description of Artificial Sequence: Synthetic oligonucleotide
  Target: ATXN2; (+) strand; PAM type: YTN; PAM sequence: TTC
atggaactcttgtgcctccg

SEQ ID NO: 87670 - DNA, 20 bp, Artificial Sequence
  Description of Artificial Sequence: Synthetic oligonucleotide
  Target: ATXN2; (+) strand; PAM type: YTN; PAM sequence: CTC
ttgtgcctccgcctcccaag

SEQ ID NO: 87671 - DNA, 20 bp, Artificial Sequence
  Description of Artificial Sequence: Synthetic oligonucleotide
  Target: ATXN2; (+) strand; PAM type: YTN; PAM sequence: CTT
gtgcctccgcctcccaagta

SEQ ID NO: 87672 - DNA, 20 bp, Artificial Sequence
  Description of Artificial Sequence: Synthetic oligonucleotide
  Target: ATXN2; (+) strand; PAM type: YTN; PAM sequence: TTG
tgcctccgcctcccaagtag

SEQ ID NO: 87673 - DNA, 20 bp, Artificial Sequence
  Description of Artificial Sequence: Synthetic oligonucleotide
  Target: ATXN2; (+) strand; PAM type: YTN; PAM sequence: CTC
cgcctcccaagtagctggga

SEQ ID NO: 87674 - DNA, 20 bp, Artificial Sequence
  Description of Artificial Sequence: Synthetic oligonucleotide
  Target: ATXN2; (+) strand; PAM type: YTN; PAM sequence: CTC
ccaagtagctgggactacag

SEQ ID NO: 87675 - DNA, 20 bp, Artificial Sequence
  Description of Artificial Sequence: Synthetic oligonucleotide
  Target: ATXN2; (+) strand; PAM type: YTN; PAM sequence: CTG
ggactacaggtgcgtgccac

SEQ ID NO: 87676 - DNA, 20 bp, Artificial Sequence
  Description of Artificial Sequence: Synthetic oligonucleotide
  Target: ATXN2; (+) strand; PAM type: YTN; PAM sequence: CTA
caggtgcgtgccaccatgct

SEQ ID NO: 87677 - DNA, 20 bp, Artificial Sequence
  Description of Artificial Sequence: Synthetic oligonucleotide
  Target: ATXN2; (+) strand; PAM type: YTN; PAM sequence: CTT
tggtagagatagggtttcac

SEQ ID NO: 87678 - DNA, 20 bp, Artificial Sequence
  Description of Artificial Sequence: Synthetic oligonucleotide
  Target: ATXN2; (+) strand; PAM type: YTN; PAM sequence: TTT
ggtagagatagggtttcacc

SEQ ID NO: 87679 - DNA, 20 bp, Artificial Sequence
  Description of Artificial Sequence: Synthetic oligonucleotide
  Target: ATXN2; (+) strand; PAM type: YTN; PAM sequence: TTG
gtagagatagggtttcacca

SEQ ID NO: 87680 - DNA, 20 bp, Artificial Sequence
  Description of Artificial Sequence: Synthetic oligonucleotide
  Target: ATXN2; (+) strand; PAM type: YTN; PAM sequence: TTT
caccatgttggccaggctgt

SEQ ID NO: 87681 - DNA, 20 bp, Artificial Sequence
  Description of Artificial Sequence: Synthetic oligonucleotide
  Target: ATXN2; (+) strand; PAM type: YTN; PAM sequence: TTC
accatgttggccaggctgtt

SEQ ID NO: 87682 - DNA, 20 bp, Artificial Sequence
  Description of Artificial Sequence: Synthetic oligonucleotide
  Target: ATXN2; (+) strand; PAM type: YTN; PAM sequence: TTG
gccaggctgttctcgaactc

SEQ ID NO: 87683 - DNA, 20 bp, Artificial Sequence
  Description of Artificial Sequence: Synthetic oligonucleotide
  Target: ATXN2; (+) strand; PAM type: YTN; PAM sequence: CTG
ttctcgaactcctggcctca

SEQ ID NO: 87684 - DNA, 20 bp, Artificial Sequence
  Description of Artificial Sequence: Synthetic oligonucleotide
  Target: ATXN2; (+) strand; PAM type: YTN; PAM sequence: TTC
tcgaactcctggcctcaagc

SEQ ID NO: 87685 - DNA, 20 bp, Artificial Sequence
  Description of Artificial Sequence: Synthetic oligonucleotide
  Target: ATXN2; (+) strand; PAM type: YTN; PAM sequence: CTC
gaactcctggcctcaagcaa

SEQ ID NO: 87686 - DNA, 20 bp, Artificial Sequence
  Description of Artificial Sequence: Synthetic oligonucleotide
  Target: ATXN2; (+) strand; PAM type: YTN; PAM sequence: CTC
ctggcctcaagcaatccacc

SEQ ID NO: 87687 - DNA, 20 bp, Artificial Sequence
  Description of Artificial Sequence: Synthetic oligonucleotide
  Target: ATXN2; (+) strand; PAM type: YTN; PAM sequence: CTG
gcctcaagcaatccacccac

SEQ ID NO: 87688 - DNA, 20 bp, Artificial Sequence
  Description of Artificial Sequence: Synthetic oligonucleotide
  Target: ATXN2; (+) strand; PAM type: YTN; PAM sequence: CTC
aagcaatccacccacctcgg

SEQ ID NO: 87689 - DNA, 20 bp, Artificial Sequence
  Description of Artificial Sequence: Synthetic oligonucleotide
  Target: ATXN2; (+) strand; PAM type: YTN; PAM sequence: CTC
ggcctcccaaagtactggga

SEQ ID NO: 87690 - DNA, 20 bp, Artificial Sequence
  Description of Artificial Sequence: Synthetic oligonucleotide
  Target: ATXN2; (+) strand; PAM type: YTN; PAM sequence: CTC
ccaaagtactgggattacag

SEQ ID NO: 87691 - DNA, 20 bp, Artificial Sequence
  Description of Artificial Sequence: Synthetic oligonucleotide
  Target: ATXN2; (+) strand; PAM type: YTN; PAM sequence: CTG
ggattacaggcgtgagccac

SEQ ID NO: 87692 - DNA, 20 bp, Artificial Sequence
  Description of Artificial Sequence: Synthetic oligonucleotide
  Target: ATXN2; (+) strand; PAM type: YTN; PAM sequence: TTA
caggcgtgagccaccacgtc

SEQ ID NO: 87693 - DNA, 20 bp, Artificial Sequence
  Description of Artificial Sequence: Synthetic oligonucleotide
  Target: ATXN2; (+) strand; PAM type: YTN; PAM sequence: CTT
atttttacaaattgccctac

SEQ ID NO: 87694 - DNA, 20 bp, Artificial Sequence
  Description of Artificial Sequence: Synthetic oligonucleotide
  Target: ATXN2; (+) strand; PAM type: YTN; PAM sequence: TTA
tttttacaaattgccctaca

SEQ ID NO: 87695 - DNA, 20 bp, Artificial Sequence
  Description of Artificial Sequence: Synthetic oligonucleotide
  Target: ATXN2; (+) strand; PAM type: YTN; PAM sequence: TTT
ttacaaattgccctacaaat

SEQ ID NO: 87696 - DNA, 20 bp, Artificial Sequence
  Description of Artificial Sequence: Synthetic oligonucleotide
  Target: ATXN2; (+) strand; PAM type: YTN; PAM sequence: TTT
tacaaattgccctacaaata

SEQ ID NO: 87697 - DNA, 20 bp, Artificial Sequence
  Description of Artificial Sequence: Synthetic oligonucleotide
  Target: ATXN2; (+) strand; PAM type: YTN; PAM sequence: TTT
acaaattgccctacaaatag

SEQ ID NO: 87698 - DNA, 20 bp, Artificial Sequence
  Description of Artificial Sequence: Synthetic oligonucleotide
  Target: ATXN2; (+) strand; PAM type: YTN; PAM sequence: TTA
caaattgccctacaaatagg

SEQ ID NO: 87699 - DNA, 20 bp, Artificial Sequence
  Description of Artificial Sequence: Synthetic oligonucleotide
  Target: ATXN2; (+) strand; PAM type: YTN; PAM sequence: TTG
ccctacaaataggaaaaatg

SEQ ID NO: 87700 - DNA, 20 bp, Artificial Sequence
  Description of Artificial Sequence: Synthetic oligonucleotide
  Target: ATXN2; (+) strand; PAM type: YTN; PAM sequence: CTA
caaataggaaaaatgtacct

SEQ ID NO: 87701 - DNA, 20 bp, Artificial Sequence
  Description of Artificial Sequence: Synthetic oligonucleotide
  Target: ATXN2; (+) strand; PAM type: YTN; PAM sequence: CTT
aaaagttcatttccagaaga

SEQ ID NO: 87702 - DNA, 20 bp, Artificial Sequence
  Description of Artificial Sequence: Synthetic oligonucleotide
  Target: ATXN2; (+) strand; PAM type: YTN; PAM sequence: TTA
aaagttcatttccagaagaa

SEQ ID NO: 87703 - DNA, 20 bp, Artificial Sequence
  Description of Artificial Sequence: Synthetic oligonucleotide
  Target: ATXN2; (+) strand; PAM type: YTN; PAM sequence: TTC
atttccagaagaaagctctg

SEQ ID NO: 87704 - DNA, 20 bp, Artificial Sequence
  Description of Artificial Sequence: Synthetic oligonucleotide
  Target: ATXN2; (+) strand; PAM type: YTN; PAM sequence: TTT
ccagaagaaagctctgccca

SEQ ID NO: 87705 - DNA, 20 bp, Artificial Sequence
  Description of Artificial Sequence: Synthetic oligonucleotide
  Target: ATXN2; (+) strand; PAM type: YTN; PAM sequence: TTC
cagaagaaagctctgcccag

SEQ ID NO: 87706 - DNA, 20 bp, Artificial Sequence
  Description of Artificial Sequence: Synthetic oligonucleotide
  Target: ATXN2; (+) strand; PAM type: YTN; PAM sequence: CTC
tgcccagactttctccatga

SEQ ID NO: 87707 - DNA, 20 bp, Artificial Sequence
  Description of Artificial Sequence: Synthetic oligonucleotide
  Target: ATXN2; (+) strand; PAM type: YTN; PAM sequence: CTG
cccagactttctccatgaag

SEQ ID NO: 87708 - DNA, 20 bp, Artificial Sequence
  Description of Artificial Sequence: Synthetic oligonucleotide
  Target: ATXN2; (+) strand; PAM type: YTN; PAM sequence: CTT
tctccatgaaggagcaacta

SEQ ID NO: 87709 - DNA, 20 bp, Artificial Sequence
  Description of Artificial Sequence: Synthetic oligonucleotide
  Target: ATXN2; (+) strand; PAM type: YTN; PAM sequence: TTT
ctccatgaaggagcaactat

SEQ ID NO: 87710 - DNA, 20 bp, Artificial Sequence
  Description of Artificial Sequence: Synthetic oligonucleotide
  Target: ATXN2; (+) strand; PAM type: YTN; PAM sequence: TTC
tccatgaaggagcaactatt

SEQ ID NO: 87711 - DNA, 20 bp, Artificial Sequence
  Description of Artificial Sequence: Synthetic oligonucleotide
  Target: ATXN2; (+) strand; PAM type: YTN; PAM sequence: CTC
catgaaggagcaactatttc

SEQ ID NO: 87712 - DNA, 20 bp, Artificial Sequence
  Description of Artificial Sequence: Synthetic oligonucleotide
  Target: ATXN2; (+) strand; PAM type: YTN; PAM sequence: CTA
tttctgtactttttgccagg

SEQ ID NO: 87713 - DNA, 20 bp, Artificial Sequence
  Description of Artificial Sequence: Synthetic oligonucleotide
  Target: ATXN2; (+) strand; PAM type: YTN; PAM sequence: TTT
ctgtactttttgccaggtgg

SEQ ID NO: 87714 - DNA, 20 bp, Artificial Sequence
  Description of Artificial Sequence: Synthetic oligonucleotide
  Target: ATXN2; (+) strand; PAM type: YTN; PAM sequence: TTC
tgtactttttgccaggtggg

SEQ ID NO: 87715 - DNA, 20 bp, Artificial Sequence
  Description of Artificial Sequence: Synthetic oligonucleotide
  Target: ATXN2; (+) strand; PAM type: YTN; PAM sequence: CTG
tactttttgccaggtgggga

SEQ ID NO: 87716 - DNA, 20 bp, Artificial Sequence
  Description of Artificial Sequence: Synthetic oligonucleotide
  Target: ATXN2; (+) strand; PAM type: YTN; PAM sequence: CTT
tttgccaggtggggagaggg

SEQ ID NO: 87717 - DNA, 20 bp, Artificial Sequence
  Description of Artificial Sequence: Synthetic oligonucleotide
  Target: ATXN2; (+) strand; PAM type: YTN; PAM sequence: TTT
ttgccaggtggggagagggg

SEQ ID NO: 87718 - DNA, 20 bp, Artificial Sequence
  Description of Artificial Sequence: Synthetic oligonucleotide
  Target: ATXN2; (+) strand; PAM type: YTN; PAM sequence: TTT
tgccaggtggggagagggga

SEQ ID NO: 87719 - DNA, 20 bp, Artificial Sequence
  Description of Artificial Sequence: Synthetic oligonucleotide
  Target: ATXN2; (+) strand; PAM type: YTN; PAM sequence: TTT
gccaggtggggagaggggac

SEQ ID NO: 87720 - DNA, 20 bp, Artificial Sequence
  Description of Artificial Sequence: Synthetic oligonucleotide
  Target: ATXN2; (+) strand; PAM type: YTN; PAM sequence: TTG
ccaggtggggagaggggacc

SEQ ID NO: 87721 - DNA, 20 bp, Artificial Sequence
  Description of Artificial Sequence: Synthetic oligonucleotide
  Target: ATXN2; (+) strand; PAM type: YTN; PAM sequence: CTG
tgctgtccaagataatgacc

SEQ ID NO: 87722 - DNA, 20 bp, Artificial Sequence
  Description of Artificial Sequence: Synthetic oligonucleotide
  Target: ATXN2; (+) strand; PAM type: YTN; PAM sequence: CTG
tccaagataatgacctgaga

SEQ ID NO: 87723 - DNA, 20 bp, Artificial Sequence
  Description of Artificial Sequence: Synthetic oligonucleotide
  Target: ATXN2; (+) strand; PAM type: YTN; PAM sequence: CTG
agaggtcatgatctcttgct

SEQ ID NO: 87724 - DNA, 20 bp, Artificial Sequence
  Description of Artificial Sequence: Synthetic oligonucleotide
  Target: ATXN2; (+) strand; PAM type: YTN; PAM sequence: CTC
ttgcttaagctcaagatatc

SEQ ID NO: 87725 - DNA, 20 bp, Artificial Sequence
  Description of Artificial Sequence: Synthetic oligonucleotide
  Target: ATXN2; (+) strand; PAM type: YTN; PAM sequence: CTT
gcttaagctcaagatatcct

SEQ ID NO: 87726 - DNA, 20 bp, Artificial Sequence
  Description of Artificial Sequence: Synthetic oligonucleotide
  Target: ATXN2; (+) strand; PAM type: YTN; PAM sequence: TTG
cttaagctcaagatatcctg

SEQ ID NO: 87727 - DNA, 20 bp, Artificial Sequence
  Description of Artificial Sequence: Synthetic oligonucleotide
  Target: ATXN2; (+) strand; PAM type: YTN; PAM sequence: CTT
aagctcaagatatcctgagg

SEQ ID NO: 87728 - DNA, 20 bp, Artificial Sequence
  Description of Artificial Sequence: Synthetic oligonucleotide
  Target: ATXN2; (+) strand; PAM type: YTN; PAM sequence: TTA
agctcaagatatcctgaggg

SEQ ID NO: 87729 - DNA, 20 bp, Artificial Sequence
  Description of Artificial Sequence: Synthetic oligonucleotide
  Target: ATXN2; (+) strand; PAM type: YTN; PAM sequence: CTC
aagatatcctgaggggtctg

SEQ ID NO: 87730 - DNA, 20 bp, Artificial Sequence
  Description of Artificial Sequence: Synthetic oligonucleotide
  Target: ATXN2; (+) strand; PAM type: YTN; PAM sequence: CTG
aggggtctgcttcctgaata

SEQ ID NO: 87731 - DNA, 20 bp, Artificial Sequence
  Description of Artificial Sequence: Synthetic oligonucleotide
  Target: ATXN2; (+) strand; PAM type: YTN; PAM sequence: CTG
cttcctgaatattttatttt

SEQ ID NO: 87732 - DNA, 20 bp, Artificial Sequence
  Description of Artificial Sequence: Synthetic oligonucleotide
  Target: ATXN2; (+) strand; PAM type: YTN; PAM sequence: CTT
cctgaatattttattttttg

SEQ ID NO: 87733 - DNA, 20 bp, Artificial Sequence
  Description of Artificial Sequence: Synthetic oligonucleotide
  Target: ATXN2; (+) strand; PAM type: YTN; PAM sequence: TTC
ctgaatattttattttttga

SEQ ID NO: 87734 - DNA, 20 bp, Artificial Sequence
  Description of Artificial Sequence: Synthetic oligonucleotide
  Target: ATXN2; (+) strand; PAM type: YTN; PAM sequence: CTG
aatattttattttttgagac

SEQ ID NO: 87735 - DNA, 20 bp, Artificial Sequence
  Description of Artificial Sequence: Synthetic oligonucleotide
  Target: ATXN2; (+) strand; PAM type: YTN; PAM sequence: TTT
tattttttgagacagaattt

SEQ ID NO: 87736 - DNA, 20 bp, Artificial Sequence
  Description of Artificial Sequence: Synthetic oligonucleotide
  Target: ATXN2; (+) strand; PAM type: YTN; PAM sequence: TTT
attttttgagacagaatttc

SEQ ID NO: 87737 - DNA, 20 bp, Artificial Sequence
  Description of Artificial Sequence: Synthetic oligonucleotide
  Target: ATXN2; (+) strand; PAM type: YTN; PAM sequence: TTA
ttttttgagacagaatttcg

SEQ ID NO: 87738 - DNA, 20 bp, Artificial Sequence
  Description of Artificial Sequence: Synthetic oligonucleotide
  Target: ATXN2; (+) strand; PAM type: YTN; PAM sequence: TTT
tttgagacagaatttcgctc

SEQ ID NO: 87739 - DNA, 20 bp, Artificial Sequence
  Description of Artificial Sequence: Synthetic oligonucleotide
  Target: ATXN2; (+) strand; PAM type: YTN; PAM sequence: TTT
ttgagacagaatttcgctct

SEQ ID NO: 87740 - DNA, 20 bp, Artificial Sequence
  Description of Artificial Sequence: Synthetic oligonucleotide
  Target: ATXN2; (+) strand; PAM type: YTN; PAM sequence: TTT
tgagacagaatttcgctctg

SEQ ID NO: 87741 - DNA, 20 bp, Artificial Sequence
  Description of Artificial Sequence: Synthetic oligonucleotide
  Target: ATXN2; (+) strand; PAM type: YTN; PAM sequence: TTT
gagacagaatttcgctctgc

SEQ ID NO: 87742 - DNA, 20 bp, Artificial Sequence
  Description of Artificial Sequence: Synthetic oligonucleotide
  Target: ATXN2; (+) strand; PAM type: YTN; PAM sequence: TTG
agacagaatttcgctctgcc

SEQ ID NO: 87743 - DNA, 20 bp, Artificial Sequence
  Description of Artificial Sequence: Synthetic oligonucleotide
  Target: ATXN2; (+) strand; PAM type: YTN; PAM sequence: TTT
cgctctgccacccaggctgg

SEQ ID NO: 87744 - DNA, 20 bp, Artificial Sequence
  Description of Artificial Sequence: Synthetic oligonucleotide
  Target: ATXN2; (+) strand; PAM type: YTN; PAM sequence: TTC
gctctgccacccaggctgga

SEQ ID NO: 87745 - DNA, 20 bp, Artificial Sequence
  Description of Artificial Sequence: Synthetic oligonucleotide
  Target: ATXN2; (+) strand; PAM type: YTN; PAM sequence: CTC
tgccacccaggctggagtgg

SEQ ID NO: 87746 - DNA, 20 bp, Artificial Sequence
  Description of Artificial Sequence: Synthetic oligonucleotide
  Target: ATXN2; (+) strand; PAM type: YTN; PAM sequence: CTG
ccacccaggctggagtggag

SEQ ID NO: 87747 - DNA, 20 bp, Artificial Sequence
  Description of Artificial Sequence: Synthetic oligonucleotide
  Target: ATXN2; (+) strand; PAM type: YTN; PAM sequence: CTG
gagtggagtggcacgacttc

SEQ ID NO: 87748 - DNA, 20 bp, Artificial Sequence
  Description of Artificial Sequence: Synthetic oligonucleotide
  Target: ATXN2; (+) strand; PAM type: YTN; PAM sequence: CTT
cggctcactgcaacctctgc

SEQ ID NO: 87749 - DNA, 20 bp, Artificial Sequence
  Description of Artificial Sequence: Synthetic oligonucleotide
  Target: ATXN2; (+) strand; PAM type: YTN; PAM sequence: TTC
ggctcactgcaacctctgcc

SEQ ID NO: 87750 - DNA, 20 bp, Artificial Sequence
  Description of Artificial Sequence: Synthetic oligonucleotide
  Target: ATXN2; (+) strand; PAM type: YTN; PAM sequence: CTC
actgcaacctctgcctccca

SEQ ID NO: 87751 - DNA, 20 bp, Artificial Sequence
  Description of Artificial Sequence: Synthetic oligonucleotide
  Target: ATXN2; (+) strand; PAM type: YTN; PAM sequence: CTG
caacctctgcctcccaagtt

SEQ ID NO: 87752 - DNA, 20 bp, Artificial Sequence
  Description of Artificial Sequence: Synthetic oligonucleotide
  Target: ATXN2; (+) strand; PAM type: YTN; PAM sequence: CTC
tgcctcccaagttcaagcaa

SEQ ID NO: 87753 - DNA, 20 bp, Artificial Sequence
  Description of Artificial Sequence: Synthetic oligonucleotide
  Target: ATXN2; (+) strand; PAM type: YTN; PAM sequence: CTG
cctcccaagttcaagcaatt

SEQ ID NO: 87754 - DNA, 20 bp, Artificial Sequence
  Description of Artificial Sequence: Synthetic oligonucleotide
  Target: ATXN2; (+) strand; PAM type: YTN; PAM sequence: CTC
ccaagttcaagcaattctcc

SEQ ID NO: 87755 - DNA, 20 bp, Artificial Sequence
  Description of Artificial Sequence: Synthetic oligonucleotide
  Target: ATXN2; (+) strand; PAM type: YTN; PAM sequence: TTC
aagcaattctcctgtctcag

SEQ ID NO: 87756 - DNA, 20 bp, Artificial Sequence
  Description of Artificial Sequence: Synthetic oligonucleotide
  Target: ATXN2; (+) strand; PAM type: YTN; PAM sequence: TTC
tcctgtctcagcctccctag

SEQ ID NO: 87757 - DNA, 20 bp, Artificial Sequence
  Description of Artificial Sequence: Synthetic oligonucleotide
  Target: ATXN2; (+) strand; PAM type: YTN; PAM sequence: CTC
ctgtctcagcctccctagta

SEQ ID NO: 87758 - DNA, 20 bp, Artificial Sequence
  Description of Artificial Sequence: Synthetic oligonucleotide
  Target: ATXN2; (+) strand; PAM type: YTN; PAM sequence: CTG
tctcagcctccctagtagct

SEQ ID NO: 87759 - DNA, 20 bp, Artificial Sequence
  Description of Artificial Sequence: Synthetic oligonucleotide
  Target: ATXN2; (+) strand; PAM type: YTN; PAM sequence: CTC
agcctccctagtagctgaga

SEQ ID NO: 87760 - DNA, 20 bp, Artificial Sequence
  Description of Artificial Sequence: Synthetic oligonucleotide
  Target: ATXN2; (+) strand; PAM type: YTN; PAM sequence: CTC
cctagtagctgagattatag

SEQ ID NO: 87761 - DNA, 20 bp, Artificial Sequence
  Description of Artificial Sequence: Synthetic oligonucleotide
  Target: ATXN2; (+) strand; PAM type: YTN; PAM sequence: CTA
gtagctgagattataggcgc

SEQ ID NO: 87762 - DNA, 20 bp, Artificial Sequence
  Description of Artificial Sequence: Synthetic oligonucleotide
  Target: ATXN2; (+) strand; PAM type: YTN; PAM sequence: CTG
agattataggcgcatgccag

SEQ ID NO: 87763 - DNA, 20 bp, Artificial Sequence
  Description of Artificial Sequence: Synthetic oligonucleotide
  Target: ATXN2; (+) strand; PAM type: YTN; PAM sequence: TTA
taggcgcatgccagcatgca

SEQ ID NO: 87764 - DNA, 20 bp, Artificial Sequence
  Description of Artificial Sequence: Synthetic oligonucleotide
  Target: ATXN2; (+) strand; PAM type: YTN; PAM sequence: CTG
atttttgtattttttagtag

SEQ ID NO: 87765 - DNA, 20 bp, Artificial Sequence
  Description of Artificial Sequence: Synthetic oligonucleotide
  Target: ATXN2; (+) strand; PAM type: YTN; PAM sequence: TTT
ttgtattttttagtagagat

SEQ ID NO: 87766 - DNA, 20 bp, Artificial Sequence
  Description of Artificial Sequence: Synthetic oligonucleotide
  Target: ATXN2; (+) strand; PAM type: YTN; PAM sequence: TTT
tgtattttttagtagagatg

SEQ ID NO: 87767 - DNA, 20 bp, Artificial Sequence
  Description of Artificial Sequence: Synthetic oligonucleotide
  Target: ATXN2; (+) strand; PAM type: YTN; PAM sequence: TTT
gtattttttagtagagatgg

SEQ ID NO: 87768 - DNA, 20 bp, Artificial Sequence
  Description of Artificial Sequence: Synthetic oligonucleotide
  Target: ATXN2; (+) strand; PAM type: YTN; PAM sequence: TTG
tattttttagtagagatgga

SEQ ID NO: 87769 - DNA, 20 bp, Artificial Sequence
  Description of Artificial Sequence: Synthetic oligonucleotide
  Target: ATXN2; (+) strand; PAM type: YTN; PAM sequence: TTT
tttagtagagatggagtttt

SEQ ID NO: 87770 - DNA, 20 bp, Artificial Sequence
  Description of Artificial Sequence: Synthetic oligonucleotide
  Target: ATXN2; (+) strand; PAM type: YTN; PAM sequence: TTT
ttagtagagatggagtttta

SEQ ID NO: 87771 - DNA, 20 bp, Artificial Sequence
  Description of Artificial Sequence: Synthetic oligonucleotide
  Target: ATXN2; (+) strand; PAM type: YTN; PAM sequence: TTT
tagtagagatggagttttac

SEQ ID NO: 87772 - DNA, 20 bp, Artificial Sequence
  Description of Artificial Sequence: Synthetic oligonucleotide
  Target: ATXN2; (+) strand; PAM type: YTN; PAM sequence: TTT
agtagagatggagttttacc

SEQ ID NO: 87773 - DNA, 20 bp, Artificial Sequence
  Description of Artificial Sequence: Synthetic oligonucleotide
  Target: ATXN2; (+) strand; PAM type: YTN; PAM sequence: TTA
gtagagatggagttttacca

SEQ ID NO: 87774 - DNA, 20 bp, Artificial Sequence
  Description of Artificial Sequence: Synthetic oligonucleotide
  Target: ATXN2; (+) strand; PAM type: YTN; PAM sequence: TTT
taccatgttggctaggctgg

SEQ ID NO: 87775 - DNA, 20 bp, Artificial Sequence
  Description of Artificial Sequence: Synthetic oligonucleotide
  Target: ATXN2; (+) strand; PAM type: YTN; PAM sequence: TTT
accatgttggctaggctggt

SEQ ID NO: 87776 - DNA, 20 bp, Artificial Sequence
  Description of Artificial Sequence: Synthetic oligonucleotide
  Target: ATXN2; (+) strand; PAM type: YTN; PAM sequence: TTA
ccatgttggctaggctggtc

SEQ ID NO: 87777 - DNA, 20 bp, Artificial Sequence
  Description of Artificial Sequence: Synthetic oligonucleotide
  Target: ATXN2; (+) strand; PAM type: YTN; PAM sequence: TTG
gctaggctggtcttgaactg

SEQ ID NO: 87778 - DNA, 20 bp, Artificial Sequence
  Description of Artificial Sequence: Synthetic oligonucleotide
  Target: ATXN2; (+) strand; PAM type: YTN; PAM sequence: CTA
ggctggtcttgaactgctga

SEQ ID NO: 87779 - DNA, 20 bp, Artificial Sequence
  Description of Artificial Sequence: Synthetic oligonucleotide
  Target: ATXN2; (+) strand; PAM type: YTN; PAM sequence: CTG
gtcttgaactgctgacctca

SEQ ID NO: 87780 - DNA, 20 bp, Artificial Sequence
  Description of Artificial Sequence: Synthetic oligonucleotide
  Target: ATXN2; (+) strand; PAM type: YTN; PAM sequence: CTT
gaactgctgacctcagatga

SEQ ID NO: 87781 - DNA, 20 bp, Artificial Sequence
  Description of Artificial Sequence: Synthetic oligonucleotide
  Target: ATXN2; (+) strand; PAM type: YTN; PAM sequence: TTG
aactgctgacctcagatgat

SEQ ID NO: 87782 - DNA, 20 bp, Artificial Sequence
  Description of Artificial Sequence: Synthetic oligonucleotide
  Target: ATXN2; (+) strand; PAM type: YTN; PAM sequence: CTG
ctgacctcagatgatccacc

SEQ ID NO: 87783 - DNA, 20 bp, Artificial Sequence
  Description of Artificial Sequence: Synthetic oligonucleotide
  Target: ATXN2; (+) strand; PAM type: YTN; PAM sequence: CTG
acctcagatgatccacccgc

SEQ ID NO: 87784 - DNA, 20 bp, Artificial Sequence
  Description of Artificial Sequence: Synthetic oligonucleotide
  Target: ATXN2; (+) strand; PAM type: YTN; PAM sequence: CTC
agatgatccacccgcctcag

SEQ ID NO: 87785 - DNA, 20 bp, Artificial Sequence
  Description of Artificial Sequence: Synthetic oligonucleotide
  Target: ATXN2; (+) strand; PAM type: YTN; PAM sequence: CTC
agcctcccaaagcactggga

SEQ ID NO: 87786 - DNA, 20 bp, Artificial Sequence
  Description of Artificial Sequence: Synthetic oligonucleotide
  Target: ATXN2; (+) strand; PAM type: YTN; PAM sequence: CTC
ccaaagcactgggattacag

SEQ ID NO: 87787 - DNA, 20 bp, Artificial Sequence
  Description of Artificial Sequence: Synthetic oligonucleotide
  Target: ATXN2; (+) strand; PAM type: YTN; PAM sequence: CTG
ggattacaggtgtgagccac

SEQ ID NO: 87788 - DNA, 20 bp, Artificial Sequence
  Description of Artificial Sequence: Synthetic oligonucleotide
  Target: ATXN2; (+) strand; PAM type: YTN; PAM sequence: TTA
caggtgtgagccaccgtgcc

SEQ ID NO: 87789 - DNA, 20 bp, Artificial Sequence
  Description of Artificial Sequence: Synthetic oligonucleotide
  Target: ATXN2; (+) strand; PAM type: YTN; PAM sequence: CTG
gcccttcctgagtattttaa

SEQ ID NO: 87790 - DNA, 20 bp, Artificial Sequence
  Description of Artificial Sequence: Synthetic oligonucleotide
  Target: ATXN2; (+) strand; PAM type: YTN; PAM sequence: CTT
cctgagtattttaaaccttt

SEQ ID NO: 87791 - DNA, 20 bp, Artificial Sequence
  Description of Artificial Sequence: Synthetic oligonucleotide
  Target: ATXN2; (+) strand; PAM type: YTN; PAM sequence: TTC
ctgagtattttaaaccttta

SEQ ID NO: 87792 - DNA, 20 bp, Artificial Sequence
  Description of Artificial Sequence: Synthetic oligonucleotide
  Target: ATXN2; (+) strand; PAM type: YTN; PAM sequence: CTG
agtattttaaacctttagcc

SEQ ID NO: 87793 - DNA, 20 bp, Artificial Sequence
  Description of Artificial Sequence: Synthetic oligonucleotide
  Target: ATXN2; (+) strand; PAM type: YTN; PAM sequence: TTT
taaacctttagccatgcaca

SEQ ID NO: 87794 - DNA, 20 bp, Artificial Sequence
  Description of Artificial Sequence: Synthetic oligonucleotide
  Target: ATXN2; (+) strand; PAM type: YTN; PAM sequence: TTT
aaacctttagccatgcacag

SEQ ID NO: 87795 - DNA, 20 bp, Artificial Sequence
  Description of Artificial Sequence: Synthetic oligonucleotide
  Target: ATXN2; (+) strand; PAM type: YTN; PAM sequence: TTA
aacctttagccatgcacagg

SEQ ID NO: 87796 - DNA, 20 bp, Artificial Sequence
  Description of Artificial Sequence: Synthetic oligonucleotide
  Target: ATXN2; (+) strand; PAM type: YTN; PAM sequence: CTT
tagccatgcacaggactgaa

SEQ ID NO: 87797 - DNA, 20 bp, Artificial Sequence
  Description of Artificial Sequence: Synthetic oligonucleotide
  Target: ATXN2; (+) strand; PAM type: YTN; PAM sequence: TTT
agccatgcacaggactgaaa

SEQ ID NO: 87798 - DNA, 20 bp, Artificial Sequence
  Description of Artificial Sequence: Synthetic oligonucleotide
  Target: ATXN2; (+) strand; PAM type: YTN; PAM sequence: TTA
gccatgcacaggactgaaaa

SEQ ID NO: 87799 - DNA, 20 bp, Artificial Sequence
  Description of Artificial Sequence: Synthetic oligonucleotide
  Target: ATXN2; (+) strand; PAM type: YTN; PAM sequence: CTG
aaaagtttttcccttagtat

SEQ ID NO: 87800 - DNA, 20 bp, Artificial Sequence
  Description of Artificial Sequence: Synthetic oligonucleotide
  Target: ATXN2; (+) strand; PAM type: YTN; PAM sequence: TTT
ttcccttagtatttcatcaa

SEQ ID NO: 87801 - DNA, 20 bp, Artificial Sequence
  Description of Artificial Sequence: Synthetic oligonucleotide
  Target: ATXN2; (+) strand; PAM type: YTN; PAM sequence: TTT
tcccttagtatttcatcaat

SEQ ID NO: 87802 - DNA, 20 bp, Artificial Sequence
  Description of Artificial Sequence: Synthetic oligonucleotide
  Target: ATXN2; (+) strand; PAM type: YTN; PAM sequence: TTT
cccttagtatttcatcaatc

SEQ ID NO: 87803 - DNA, 20 bp, Artificial Sequence
  Description of Artificial Sequence: Synthetic oligonucleotide
  Target: ATXN2; (+) strand; PAM type: YTN; PAM sequence: TTC
ccttagtatttcatcaatcc

SEQ ID NO: 87804 - DNA, 20 bp, Artificial Sequence
  Description of Artificial Sequence: Synthetic oligonucleotide
  Target: ATXN2; (+) strand; PAM type: YTN; PAM sequence: CTT
agtatttcatcaatcctatt

SEQ ID NO: 87805 - DNA, 20 bp, Artificial Sequence
  Description of Artificial Sequence: Synthetic oligonucleotide
  Target: ATXN2; (+) strand; PAM type: YTN; PAM sequence: TTA
gtatttcatcaatcctattc

SEQ ID NO: 87806 - DNA, 20 bp, Artificial Sequence
  Description of Artificial Sequence: Synthetic oligonucleotide
  Target: ATXN2; (+) strand; PAM type: YTN; PAM sequence: TTT
catcaatcctattcaattaa

SEQ ID NO: 87807 - DNA, 20 bp, Artificial Sequence
  Description of Artificial Sequence: Synthetic oligonucleotide
  Target: ATXN2; (+) strand; PAM type: YTN; PAM sequence: TTC
atcaatcctattcaattaaa

SEQ ID NO: 87808 - DNA, 20 bp, Artificial Sequence
  Description of Artificial Sequence: Synthetic oligonucleotide
  Target: ATXN2; (+) strand; PAM type: YTN; PAM sequence: CTA
ttcaattaaaaatcctggta

SEQ ID NO: 87809 - DNA, 20 bp, Artificial Sequence
  Description of Artificial Sequence: Synthetic oligonucleotide
  Target: ATXN2; (+) strand; PAM type: YTN; PAM sequence: TTC
aattaaaaatcctggtaggc

SEQ ID NO: 87810 - DNA, 20 bp, Artificial Sequence
  Description of Artificial Sequence: Synthetic oligonucleotide
  Target: ATXN2; (+) strand; PAM type: YTN; PAM sequence: TTA
aaaatcctggtaggcataaa

SEQ ID NO: 87811 - DNA, 20 bp, Artificial Sequence
  Description of Artificial Sequence: Synthetic oligonucleotide
  Target: ATXN2; (+) strand; PAM type: YTN; PAM sequence: CTG
gtaggcataaatttcatctt

SEQ ID NO: 87812 - DNA, 20 bp, Artificial Sequence
  Description of Artificial Sequence: Synthetic oligonucleotide
  Target: ATXN2; (+) strand; PAM type: YTN; PAM sequence: TTT
catcttatcagaatataaat

SEQ ID NO: 87813 - DNA, 20 bp, Artificial Sequence
  Description of Artificial Sequence: Synthetic oligonucleotide
  Target: ATXN2; (+) strand; PAM type: YTN; PAM sequence: TTC
atcttatcagaatataaata

SEQ ID NO: 87814 - DNA, 20 bp, Artificial Sequence
  Description of Artificial Sequence: Synthetic oligonucleotide
  Target: ATXN2; (+) strand; PAM type: YTN; PAM sequence: CTT
atcagaatataaataaacat

SEQ ID NO: 87815 - DNA, 20 bp, Artificial Sequence
  Description of Artificial Sequence: Synthetic oligonucleotide
  Target: ATXN2; (+) strand; PAM type: YTN; PAM sequence: TTA
tcagaatataaataaacatt

SEQ ID NO: 87816 - DNA, 20 bp, Artificial Sequence
  Description of Artificial Sequence: Synthetic oligonucleotide
  Target: ATXN2; (+) strand; PAM type: YTN; PAM sequence: TTT
taagtttataccaagcttgt

SEQ ID NO: 87817 - DNA, 20 bp, Artificial Sequence
  Description of Artificial Sequence: Synthetic oligonucleotide
  Target: ATXN2; (+) strand; PAM type: YTN; PAM sequence: TTT
aagtttataccaagcttgtg

SEQ ID NO: 87818 - DNA, 20 bp, Artificial Sequence
  Description of Artificial Sequence: Synthetic oligonucleotide
  Target: ATXN2; (+) strand; PAM type: YTN; PAM sequence: TTA
agtttataccaagcttgtgg

SEQ ID NO: 87819 - DNA, 20 bp, Artificial Sequence
  Description of Artificial Sequence: Synthetic oligonucleotide
  Target: ATXN2; (+) strand; PAM type: YTN; PAM sequence: TTT
ataccaagcttgtggcttgg

SEQ ID NO: 87820 - DNA, 20 bp, Artificial Sequence
  Description of Artificial Sequence: Synthetic oligonucleotide
  Target: ATXN2; (+) strand; PAM type: YTN; PAM sequence: TTA
taccaagcttgtggcttggg

SEQ ID NO: 87821 - DNA, 20 bp, Artificial Sequence
  Description of Artificial Sequence: Synthetic oligonucleotide
  Target: ATXN2; (+) strand; PAM type: YTN; PAM sequence: CTT
gtggcttggggtgtgtgtgt

SEQ ID NO: 87822 - DNA, 20 bp, Artificial Sequence
  Description of Artificial Sequence: Synthetic oligonucleotide
  Target: ATXN2; (+) strand; PAM type: YTN; PAM sequence: TTG
tggcttggggtgtgtgtgtg

SEQ ID NO: 87823 - DNA, 20 bp, Artificial Sequence
  Description of Artificial Sequence: Synthetic oligonucleotide
  Target: ATXN2; (+) strand; PAM type: YTN; PAM sequence: CTT
ggggtgtgtgtgtgtgtgtg

SEQ ID NO: 87824 - DNA, 20 bp, Artificial Sequence
  Description of Artificial Sequence: Synthetic oligonucleotide
  Target: ATXN2; (+) strand; PAM type: YTN; PAM sequence: TTG
gggtgtgtgtgtgtgtgtgt

SEQ ID NO: 87825 - DNA, 20 bp, Artificial Sequence
  Description of Artificial Sequence: Synthetic oligonucleotide
  Target: ATXN2; (+) strand; PAM type: YTN; PAM sequence: TTT
taaatttataccaagcttgt

SEQ ID NO: 87826 - DNA, 20 bp, Artificial Sequence
  Description of Artificial Sequence: Synthetic oligonucleotide
  Target: ATXN2; (+) strand; PAM type: YTN; PAM sequence: TTT
aaatttataccaagcttgtg

SEQ ID NO: 87827 - DNA, 20 bp, Artificial Sequence
  Description of Artificial Sequence: Synthetic oligonucleotide
  Target: ATXN2; (+) strand; PAM type: YTN; PAM sequence: TTA
aatttataccaagcttgtgg

SEQ ID NO: 87828 - DNA, 20 bp, Artificial Sequence
  Description of Artificial Sequence: Synthetic oligonucleotide
  Target: ATXN2; (+) strand; PAM type: YTN; PAM sequence: TTT
ataccaagcttgtggcttgg

SEQ ID NO: 87829 - DNA, 20 bp, Artificial Sequence
  Description of Artificial Sequence: Synthetic oligonucleotide
  Target: ATXN2; (+) strand; PAM type: YTN; PAM sequence: TTA
taccaagcttgtggcttggg

SEQ ID NO: 87830 - DNA, 20 bp, Artificial Sequence
  Description of Artificial Sequence: Synthetic oligonucleotide
  Target: ATXN2; (+) strand; PAM type: YTN; PAM sequence: CTT
gtggcttgggtgtgtgtgtt

SEQ ID NO: 87831 - DNA, 20 bp, Artificial Sequence
  Description of Artificial Sequence: Synthetic oligonucleotide
  Target: ATXN2; (+) strand; PAM type: YTN; PAM sequence: TTG
tggcttgggtgtgtgtgttt

SEQ ID NO: 87832 - DNA, 20 bp, Artificial Sequence
  Description of Artificial Sequence: Synthetic oligonucleotide
  Target: ATXN2; (+) strand; PAM type: YTN; PAM sequence: CTT
gggtgtgtgtgtttgtgtgt

SEQ ID NO: 87833 - DNA, 20 bp, Artificial Sequence
  Description of Artificial Sequence: Synthetic oligonucleotide
  Target: ATXN2; (+) strand; PAM type: YTN; PAM sequence: TTG
ggtgtgtgtgtttgtgtgtg

SEQ ID NO: 87834 - DNA, 20 bp, Artificial Sequence
  Description of Artificial Sequence: Synthetic oligonucleotide
  Target: ATXN2; (+) strand; PAM type: YTN; PAM sequence: TTT
gtgtgtgtgtgtgtgtgtgt

SEQ ID NO: 87835 - DNA, 20 bp, Artificial Sequence
  Description of Artificial Sequence: Synthetic oligonucleotide
  Target: ATXN2; (+) strand; PAM type: YTN; PAM sequence: TTG
tgtgtgtgtgtgtgtgtgtg

SEQ ID NO: 87836 - DNA, 20 bp, Artificial Sequence
  Description of Artificial Sequence: Synthetic oligonucleotide
  Target: ATXN2; (+) strand; PAM type: YTN; PAM sequence: CTG
tttaggaagtttctctaaca

SEQ ID NO: 87837 - DNA, 20 bp, Artificial Sequence
  Description of Artificial Sequence: Synthetic oligonucleotide
  Target: ATXN2; (+) strand; PAM type: YTN; PAM sequence: TTT
aggaagtttctctaacaagg

SEQ ID NO: 87838 - DNA, 20 bp, Artificial Sequence
  Description of Artificial Sequence: Synthetic oligonucleotide
  Target: ATXN2; (+) strand; PAM type: YTN; PAM sequence: TTA
ggaagtttctctaacaagga

SEQ ID NO: 87839 - DNA, 20 bp, Artificial Sequence
  Description of Artificial Sequence: Synthetic oligonucleotide
  Target: ATXN2; (+) strand; PAM type: YTN; PAM sequence: TTT
ctctaacaaggaaaatatta

SEQ ID NO: 87840 - DNA, 20 bp, Artificial Sequence
  Description of Artificial Sequence: Synthetic oligonucleotide
  Target: ATXN2; (+) strand; PAM type: YTN; PAM sequence: TTC
tctaacaaggaaaatattag

SEQ ID NO: 87841 - DNA, 20 bp, Artificial Sequence
  Description of Artificial Sequence: Synthetic oligonucleotide
  Target: ATXN2; (+) strand; PAM type: YTN; PAM sequence: CTC
taacaaggaaaatattaggc

SEQ ID NO: 87842 - DNA, 20 bp, Artificial Sequence
  Description of Artificial Sequence: Synthetic oligonucleotide
  Target: ATXN2; (+) strand; PAM type: YTN; PAM sequence: CTA
acaaggaaaatattaggcat

SEQ ID NO: 87843 - DNA, 20 bp, Artificial Sequence
  Description of Artificial Sequence: Synthetic oligonucleotide
  Target: ATXN2; (+) strand; PAM type: YTN; PAM sequence: TTA
ggcatttcccagtcacattt

SEQ ID NO: 87844 - DNA, 20 bp, Artificial Sequence
  Description of Artificial Sequence: Synthetic oligonucleotide
  Target: ATXN2; (+) strand; PAM type: YTN; PAM sequence: TTT
cccagtcacatttgcttggt

SEQ ID NO: 87845 - DNA, 20 bp, Artificial Sequence
  Description of Artificial Sequence: Synthetic oligonucleotide
  Target: ATXN2; (+) strand; PAM type: YTN; PAM sequence: TTC
ccagtcacatttgcttggta

SEQ ID NO: 87846 - DNA, 20 bp, Artificial Sequence
  Description of Artificial Sequence: Synthetic oligonucleotide
  Target: ATXN2; (+) strand; PAM type: YTN; PAM sequence: TTT
gcttggtatgcaaaaattga

SEQ ID NO: 87847 - DNA, 20 bp, Artificial Sequence
  Description of Artificial Sequence: Synthetic oligonucleotide
  Target: ATXN2; (+) strand; PAM type: YTN; PAM sequence: TTG
cttggtatgcaaaaattgat

SEQ ID NO: 87848 - DNA, 20 bp, Artificial Sequence
  Description of Artificial Sequence: Synthetic oligonucleotide
  Target: ATXN2; (+) strand; PAM type: YTN; PAM sequence: CTT
ggtatgcaaaaattgatttc

SEQ ID NO: 87849 - DNA, 20 bp, Artificial Sequence
  Description of Artificial Sequence: Synthetic oligonucleotide
  Target: ATXN2; (+) strand; PAM type: YTN; PAM sequence: TTG
gtatgcaaaaattgatttct

SEQ ID NO: 87850 - DNA, 20 bp, Artificial Sequence
  Description of Artificial Sequence: Synthetic oligonucleotide
  Target: ATXN2; (+) strand; PAM type: YTN; PAM sequence: TTG
atttctgaaacaactccatt

SEQ ID NO: 87851 - DNA, 20 bp, Artificial Sequence
  Description of Artificial Sequence: Synthetic oligonucleotide
  Target: ATXN2; (+) strand; PAM type: YTN; PAM sequence: TTT
ctgaaacaactccatttttc

SEQ ID NO: 87852 - DNA, 20 bp, Artificial Sequence
  Description of Artificial Sequence: Synthetic oligonucleotide
  Target: ATXN2; (+) strand; PAM type: YTN; PAM sequence: TTC
tgaaacaactccatttttca

SEQ ID NO: 87853 - DNA, 20 bp, Artificial Sequence
  Description of Artificial Sequence: Synthetic oligonucleotide
  Target: ATXN2; (+) strand; PAM type: YTN; PAM sequence: CTG
aaacaactccatttttcatt

SEQ ID NO: 87854 - DNA, 20 bp, Artificial Sequence
  Description of Artificial Sequence: Synthetic oligonucleotide
  Target: ATXN2; (+) strand; PAM type: YTN; PAM sequence: CTC
catttttcattaactccagc

SEQ ID NO: 87855 - DNA, 20 bp, Artificial Sequence
  Description of Artificial Sequence: Synthetic oligonucleotide
  Target: ATXN2; (+) strand; PAM type: YTN; PAM sequence: TTT
ttcattaactccagccttct

SEQ ID NO: 87856 - DNA, 20 bp, Artificial Sequence
  Description of Artificial Sequence: Synthetic oligonucleotide
  Target: ATXN2; (+) strand; PAM type: YTN; PAM sequence: TTT
tcattaactccagccttctt

SEQ ID NO: 87857 - DNA, 20 bp, Artificial Sequence
  Description of Artificial Sequence: Synthetic oligonucleotide
  Target: ATXN2; (+) strand; PAM type: YTN; PAM sequence: TTT
cattaactccagccttctta

SEQ ID NO: 87858 - DNA, 20 bp, Artificial Sequence
  Description of Artificial Sequence: Synthetic oligonucleotide
  Target: ATXN2; (+) strand; PAM type: YTN; PAM sequence: TTC
attaactccagccttcttaa

SEQ ID NO: 87859 - DNA, 20 bp, Artificial Sequence
  Description of Artificial Sequence: Synthetic oligonucleotide
  Target: ATXN2; (+) strand; PAM type: YTN; PAM sequence: TTA
actccagccttcttaaattg

SEQ ID NO: 87860 - DNA, 20 bp, Artificial Sequence
  Description of Artificial Sequence: Synthetic oligonucleotide
  Target: ATXN2; (+) strand; PAM type: YTN; PAM sequence: CTC
cagccttcttaaattgggta

SEQ ID NO: 87861 - DNA, 20 bp, Artificial Sequence
  Description of Artificial Sequence: Synthetic oligonucleotide
  Target: ATXN2; (+) strand; PAM type: YTN; PAM sequence: CTT
cttaaattgggtatttccat

SEQ ID NO: 87862 - DNA, 20 bp, Artificial Sequence
  Description of Artificial Sequence: Synthetic oligonucleotide
  Target: ATXN2; (+) strand; PAM type: YTN; PAM sequence: TTC
ttaaattgggtatttccatt

SEQ ID NO: 87863 - DNA, 20 bp, Artificial Sequence
  Description of Artificial Sequence: Synthetic oligonucleotide
  Target: ATXN2; (+) strand; PAM type: YTN; PAM sequence: CTT
aaattgggtatttccatttt

SEQ ID NO: 87864 - DNA, 20 bp, Artificial Sequence
  Description of Artificial Sequence: Synthetic oligonucleotide
  Target: ATXN2; (+) strand; PAM type: YTN; PAM sequence: TTA
aattgggtatttccatttta

SEQ ID NO: 87865 - DNA, 20 bp, Artificial Sequence
  Description of Artificial Sequence: Synthetic oligonucleotide
  Target: ATXN2; (+) strand; PAM type: YTN; PAM sequence: TTG
ggtatttccattttaaaaac

SEQ ID NO: 87866 - DNA, 20 bp, Artificial Sequence
  Description of Artificial Sequence: Synthetic oligonucleotide
  Target: ATXN2; (+) strand; PAM type: YTN; PAM sequence: TTT
ccattttaaaaactgaatta

SEQ ID NO: 87867 - DNA, 20 bp, Artificial Sequence
  Description of Artificial Sequence: Synthetic oligonucleotide
  Target: ATXN2; (+) strand; PAM type: YTN; PAM sequence: TTC
cattttaaaaactgaattat

SEQ ID NO: 87868 - DNA, 20 bp, Artificial Sequence
  Description of Artificial Sequence: Synthetic oligonucleotide
  Target: ATXN2; (+) strand; PAM type: YTN; PAM sequence: TTT
taaaaactgaattatttata

SEQ ID NO: 87869 - DNA, 20 bp, Artificial Sequence
  Description of Artificial Sequence: Synthetic oligonucleotide
  Target: ATXN2; (+) strand; PAM type: YTN; PAM sequence: TTT
aaaaactgaattatttatat

SEQ ID NO: 87870 - DNA, 20 bp, Artificial Sequence
  Description of Artificial Sequence: Synthetic oligonucleotide
  Target: ATXN2; (+) strand; PAM type: YTN; PAM sequence: TTA
aaaactgaattatttatata

SEQ ID NO: 87871 - DNA, 20 bp, Artificial Sequence
  Description of Artificial Sequence: Synthetic oligonucleotide
  Target: ATXN2; (+) strand; PAM type: YTN; PAM sequence: CTG
aattatttatatatataagt

SEQ ID NO: 87872 - DNA, 20 bp, Artificial Sequence
  Description of Artificial Sequence: Synthetic oligonucleotide
  Target: ATXN2; (+) strand; PAM type: YTN; PAM sequence: TTA
tttatatatataagtacttt

SEQ ID NO: 87873 - DNA, 20 bp, Artificial Sequence
  Description of Artificial Sequence: Synthetic oligonucleotide
  Target: ATXN2; (+) strand; PAM type: YTN; PAM sequence: TTT
atatatataagtactttcaa

SEQ ID NO: 87874 - DNA, 20 bp, Artificial Sequence
  Description of Artificial Sequence: Synthetic oligonucleotide
  Target: ATXN2; (+) strand; PAM type: YTN; PAM sequence: TTA
tatatataagtactttcaat

SEQ ID NO: 87875 - DNA, 20 bp, Artificial Sequence
  Description of Artificial Sequence: Synthetic oligonucleotide
  Target: ATXN2; (+) strand; PAM type: YTN; PAM sequence: CTT
tcaataatttgactggcaca

SEQ ID NO: 87876 - DNA, 20 bp, Artificial Sequence
  Description of Artificial Sequence: Synthetic oligonucleotide
  Target: ATXN2; (+) strand; PAM type: YTN; PAM sequence: TTT
caataatttgactggcacaa

SEQ ID NO: 87877 - DNA, 20 bp, Artificial Sequence
  Description of Artificial Sequence: Synthetic oligonucleotide
  Target: ATXN2; (+) strand; PAM type: YTN; PAM sequence: TTC
aataatttgactggcacaag

SEQ ID NO: 87878 - DNA, 20 bp, Artificial Sequence
  Description of Artificial Sequence: Synthetic oligonucleotide
  Target: ATXN2; (+) strand; PAM type: YTN; PAM sequence: TTT
gactggcacaaggaaaatat

SEQ ID NO: 87879 - DNA, 20 bp, Artificial Sequence
  Description of Artificial Sequence: Synthetic oligonucleotide
  Target: ATXN2; (+) strand; PAM type: YTN; PAM sequence: TTG
actggcacaaggaaaatatt

SEQ ID NO: 87880 - DNA, 20 bp, Artificial Sequence
  Description of Artificial Sequence: Synthetic oligonucleotide
  Target: ATXN2; (+) strand; PAM type: YTN; PAM sequence: CTG
gcacaaggaaaatattgttc

SEQ ID NO: 87881 - DNA, 20 bp, Artificial Sequence
  Description of Artificial Sequence: Synthetic oligonucleotide
  Target: ATXN2; (+) strand; PAM type: YTN; PAM sequence: TTG
ttcaacaagtctactccctt

SEQ ID NO: 87882 - DNA, 20 bp, Artificial Sequence
  Description of Artificial Sequence: Synthetic oligonucleotide
  Target: ATXN2; (+) strand; PAM type: YTN; PAM sequence: TTC
aacaagtctactcccttaac

SEQ ID NO: 87883 - DNA, 20 bp, Artificial Sequence
  Description of Artificial Sequence: Synthetic oligonucleotide
  Target: ATXN2; (+) strand; PAM type: YTN; PAM sequence: CTA
ctcccttaacatgtatcctt

SEQ ID NO: 87884 - DNA, 20 bp, Artificial Sequence
  Description of Artificial Sequence: Synthetic oligonucleotide
  Target: ATXN2; (+) strand; PAM type: YTN; PAM sequence: CTC
ccttaacatgtatcctttaa

SEQ ID NO: 87885 - DNA, 20 bp, Artificial Sequence
  Description of Artificial Sequence: Synthetic oligonucleotide
  Target: ATXN2; (+) strand; PAM type: YTN; PAM sequence: CTT
aacatgtatcctttaaaaag

SEQ ID NO: 87886 - DNA, 20 bp, Artificial Sequence
  Description of Artificial Sequence: Synthetic oligonucleotide
  Target: ATXN2; (+) strand; PAM type: YTN; PAM sequence: TTA
acatgtatcctttaaaaagt

SEQ ID NO: 87887 - DNA, 20 bp, Artificial Sequence
  Description of Artificial Sequence: Synthetic oligonucleotide
  Target: ATXN2; (+) strand; PAM type: YTN; PAM sequence: CTT
taaaaagtgttttactgtac

SEQ ID NO: 87888 - DNA, 20 bp, Artificial Sequence
  Description of Artificial Sequence: Synthetic oligonucleotide
  Target: ATXN2; (+) strand; PAM type: YTN; PAM sequence: TTT
aaaaagtgttttactgtaca

SEQ ID NO: 87889 - DNA, 20 bp, Artificial Sequence
  Description of Artificial Sequence: Synthetic oligonucleotide
  Target: ATXN2; (+) strand; PAM type: YTN; PAM sequence: TTA
aaaagtgttttactgtacaa

SEQ ID NO: 87890 - DNA, 20 bp, Artificial Sequence
  Description of Artificial Sequence: Synthetic oligonucleotide
  Target: ATXN2; (+) strand; PAM type: YTN; PAM sequence: TTT
tactgtacaattaaaaatta

SEQ ID NO: 87891 - DNA, 20 bp, Artificial Sequence
  Description of Artificial Sequence: Synthetic oligonucleotide
  Target: ATXN2; (+) strand; PAM type: YTN; PAM sequence: TTT
actgtacaattaaaaattag

SEQ ID NO: 87892 - DNA, 20 bp, Artificial Sequence
  Description of Artificial Sequence: Synthetic oligonucleotide
  Target: ATXN2; (+) strand; PAM type: YTN; PAM sequence: TTA
ctgtacaattaaaaattagt

SEQ ID NO: 87893 - DNA, 20 bp, Artificial Sequence
  Description of Artificial Sequence: Synthetic oligonucleotide
  Target: ATXN2; (+) strand; PAM type: YTN; PAM sequence: CTG
tacaattaaaaattagtata

SEQ ID NO: 87894 - DNA, 20 bp, Artificial Sequence
  Description of Artificial Sequence: Synthetic oligonucleotide
  Target: ATXN2; (+) strand; PAM type: YTN; PAM sequence: TTA
aaaattagtataaaaaaccc

SEQ ID NO: 87895 - DNA, 20 bp, Artificial Sequence
  Description of Artificial Sequence: Synthetic oligonucleotide
  Target: ATXN2; (+) strand; PAM type: YTN; PAM sequence: TTA
gtataaaaaacccaactcac

SEQ ID NO: 87896 - DNA, 20 bp, Artificial Sequence
  Description of Artificial Sequence: Synthetic oligonucleotide
  Target: ATXN2; (+) strand; PAM type: YTN; PAM sequence: CTC
actggcaaagtagaaagaag

SEQ ID NO: 87897 - DNA, 20 bp, Artificial Sequence
  Description of Artificial Sequence: Synthetic oligonucleotide
  Target: ATXN2; (+) strand; PAM type: YTN; PAM sequence: CTG
gcaaagtagaaagaagggct

SEQ ID NO: 87898 - DNA, 20 bp, Artificial Sequence
  Description of Artificial Sequence: Synthetic oligonucleotide
  Target: ATXN2; (+) strand; PAM type: YTN; PAM sequence: CTT
gtctccttgttgtatggtaa

SEQ ID NO: 87899 - DNA, 20 bp, Artificial Sequence
  Description of Artificial Sequence: Synthetic oligonucleotide
  Target: ATXN2; (+) strand; PAM type: YTN; PAM sequence: TTG
tctccttgttgtatggtaat

SEQ ID NO: 87900 - DNA, 20 bp, Artificial Sequence
  Description of Artificial Sequence: Synthetic oligonucleotide
  Target: ATXN2; (+) strand; PAM type: YTN; PAM sequence: CTC
cttgttgtatggtaatttgg

SEQ ID NO: 87901 - DNA, 20 bp, Artificial Sequence
  Description of Artificial Sequence: Synthetic oligonucleotide
  Target: ATXN2; (+) strand; PAM type: YTN; PAM sequence: CTT
gttgtatggtaatttgggac

SEQ ID NO: 87902 - DNA, 20 bp, Artificial Sequence
  Description of Artificial Sequence: Synthetic oligonucleotide
  Target: ATXN2; (+) strand; PAM type: YTN; PAM sequence: TTG
ttgtatggtaatttgggaca

SEQ ID NO: 87903 - DNA, 20 bp, Artificial Sequence
  Description of Artificial Sequence: Synthetic oligonucleotide
  Target: ATXN2; (+) strand; PAM type: YTN; PAM sequence: TTG
tatggtaatttgggacatgc

SEQ ID NO: 87904 - DNA, 20 bp, Artificial Sequence
  Description of Artificial Sequence: Synthetic oligonucleotide
  Target: ATXN2; (+) strand; PAM type: YTN; PAM sequence: TTT
gggacatgctgaatttggga

SEQ ID NO: 87905 - DNA, 20 bp, Artificial Sequence
  Description of Artificial Sequence: Synthetic oligonucleotide
  Target: ATXN2; (+) strand; PAM type: YTN; PAM sequence: TTG
ggacatgctgaatttgggaa

SEQ ID NO: 87906 - DNA, 20 bp, Artificial Sequence
  Description of Artificial Sequence: Synthetic oligonucleotide
  Target: ATXN2; (+) strand; PAM type: YTN; PAM sequence: CTG
aatttgggaaatagaaaggt

SEQ ID NO: 87907 - DNA, 20 bp, Artificial Sequence
  Description of Artificial Sequence: Synthetic oligonucleotide
  Target: ATXN2; (+) strand; PAM type: YTN; PAM sequence: TTT
gggaaatagaaaggtaaatt

SEQ ID NO: 87908 - DNA, 20 bp, Artificial Sequence
  Description of Artificial Sequence: Synthetic oligonucleotide
  Target: ATXN2; (+) strand; PAM type: YTN; PAM sequence: TTG
ggaaatagaaaggtaaatta

SEQ ID NO: 87909 - DNA, 20 bp, Artificial Sequence
  Description of Artificial Sequence: Synthetic oligonucleotide
  Target: ATXN2; (+) strand; PAM type: YTN; PAM sequence: TTA
gccttttgaggtgtgcattt

SEQ ID NO: 87910 - DNA, 20 bp, Artificial Sequence
  Description of Artificial Sequence: Synthetic oligonucleotide
  Target: ATXN2; (+) strand; PAM type: YTN; PAM sequence: CTT
ttgaggtgtgcattttccaa

SEQ ID NO: 87911 - DNA, 20 bp, Artificial Sequence
  Description of Artificial Sequence: Synthetic oligonucleotide
  Target: ATXN2; (+) strand; PAM type: YTN; PAM sequence: TTT
tgaggtgtgcattttccaaa

SEQ ID NO: 87912 - DNA, 20 bp, Artificial Sequence
  Description of Artificial Sequence: Synthetic oligonucleotide
  Target: ATXN2; (+) strand; PAM type: YTN; PAM sequence: TTT
gaggtgtgcattttccaaat

SEQ ID NO: 87913 - DNA, 20 bp, Artificial Sequence
  Description of Artificial Sequence: Synthetic oligonucleotide
  Target: ATXN2; (+) strand; PAM type: YTN; PAM sequence: TTG
aggtgtgcattttccaaatt

SEQ ID NO: 87914 - DNA, 20 bp, Artificial Sequence
  Description of Artificial Sequence: Synthetic oligonucleotide
  Target: ATXN2; (+) strand; PAM type: YTN; PAM sequence: TTT
tccaaattttctggaaaggt

SEQ ID NO: 87915 - DNA, 20 bp, Artificial Sequence
  Description of Artificial Sequence: Synthetic oligonucleotide
  Target: ATXN2; (+) strand; PAM type: YTN; PAM sequence: TTT
ccaaattttctggaaaggtt

SEQ ID NO: 87916 - DNA, 20 bp, Artificial Sequence
  Description of Artificial Sequence: Synthetic oligonucleotide
  Target: ATXN2; (+) strand; PAM type: YTN; PAM sequence: TTC
caaattttctggaaaggttg

SEQ ID NO: 87917 - DNA, 20 bp, Artificial Sequence
  Description of Artificial Sequence: Synthetic oligonucleotide
  Target: ATXN2; (+) strand; PAM type: YTN; PAM sequence: TTT
tctggaaaggttgacatatt

SEQ ID NO: 87918 - DNA, 20 bp, Artificial Sequence
  Description of Artificial Sequence: Synthetic oligonucleotide
  Target: ATXN2; (+) strand; PAM type: YTN; PAM sequence: TTT
ctggaaaggttgacatatta

SEQ ID NO: 87919 - DNA, 20 bp, Artificial Sequence
  Description of Artificial Sequence: Synthetic oligonucleotide
  Target: ATXN2; (+) strand; PAM type: YTN; PAM sequence: TTC
tggaaaggttgacatattag

SEQ ID NO: 87920 - DNA, 20 bp, Artificial Sequence
  Description of Artificial Sequence: Synthetic oligonucleotide
  Target: ATXN2; (+) strand; PAM type: YTN; PAM sequence: CTG
gaaaggttgacatattagta

SEQ ID NO: 87921 - DNA, 20 bp, Artificial Sequence
  Description of Artificial Sequence: Synthetic oligonucleotide
  Target: ATXN2; (+) strand; PAM type: YTN; PAM sequence: TTG
acatattagtaatttctttt

SEQ ID NO: 87922 - DNA, 20 bp, Artificial Sequence
  Description of Artificial Sequence: Synthetic oligonucleotide
  Target: ATXN2; (+) strand; PAM type: YTN; PAM sequence: TTA
gtaatttctttttgtattca

SEQ ID NO: 87923 - DNA, 20 bp, Artificial Sequence
  Description of Artificial Sequence: Synthetic oligonucleotide
  Target: ATXN2; (+) strand; PAM type: YTN; PAM sequence: TTT
ctttttgtattcatgcataa

SEQ ID NO: 87924 - DNA, 20 bp, Artificial Sequence
  Description of Artificial Sequence: Synthetic oligonucleotide
  Target: ATXN2; (+) strand; PAM type: YTN; PAM sequence: TTC
tttttgtattcatgcataat

SEQ ID NO: 87925 - DNA, 20 bp, Artificial Sequence
  Description of Artificial Sequence: Synthetic oligonucleotide
  Target: ATXN2; (+) strand; PAM type: YTN; PAM sequence: CTT
tttgtattcatgcataattc

SEQ ID NO: 87926 - DNA, 20 bp, Artificial Sequence
  Description of Artificial Sequence: Synthetic oligonucleotide
  Target: ATXN2; (+) strand; PAM type: YTN; PAM sequence: TTT
ttgtattcatgcataattca

SEQ ID NO: 87927 - DNA, 20 bp, Artificial Sequence
  Description of Artificial Sequence: Synthetic oligonucleotide
  Target: ATXN2; (+) strand; PAM type: YTN; PAM sequence: TTT
tgtattcatgcataattcat

SEQ ID NO: 87928 - DNA, 20 bp, Artificial Sequence
  Description of Artificial Sequence: Synthetic oligonucleotide
  Target: ATXN2; (+) strand; PAM type: YTN; PAM sequence: TTT
gtattcatgcataattcatt

SEQ ID NO: 87929 - DNA, 20 bp, Artificial Sequence
  Description of Artificial Sequence: Synthetic oligonucleotide
  Target: ATXN2; (+) strand; PAM type: YTN; PAM sequence: TTG
tattcatgcataattcattt

SEQ ID NO: 87930 - DNA, 20 bp, Artificial Sequence
  Description of Artificial Sequence: Synthetic oligonucleotide
  Target: ATXN2; (+) strand; PAM type: YTN; PAM sequence: TTC
atgcataattcattttcata

SEQ ID NO: 87931 - DNA, 20 bp, Artificial Sequence
  Description of Artificial Sequence: Synthetic oligonucleotide
  Target: ATXN2; (+) strand; PAM type: YTN; PAM sequence: TTC
attttcataagagatgacaa

SEQ ID NO: 87932 - DNA, 20 bp, Artificial Sequence
  Description of Artificial Sequence: Synthetic oligonucleotide
  Target: ATXN2; (+) strand; PAM type: YTN; PAM sequence: TTT
tcataagagatgacaagcac

SEQ ID NO: 87933 - DNA, 20 bp, Artificial Sequence
  Description of Artificial Sequence: Synthetic oligonucleotide
  Target: ATXN2; (+) strand; PAM type: YTN; PAM sequence: TTT
cataagagatgacaagcact

SEQ ID NO: 87934 - DNA, 20 bp, Artificial Sequence
  Description of Artificial Sequence: Synthetic oligonucleotide
  Target: ATXN2; (+) strand; PAM type: YTN; PAM sequence: TTC
ataagagatgacaagcactt

SEQ ID NO: 87935 - DNA, 20 bp, Artificial Sequence
  Description of Artificial Sequence: Synthetic oligonucleotide
  Target: ATXN2; (+) strand; PAM type: YTN; PAM sequence: CTT
taaacactgctacagaattt

SEQ ID NO: 87936 - DNA, 20 bp, Artificial Sequence
  Description of Artificial Sequence: Synthetic oligonucleotide
  Target: ATXN2; (+) strand; PAM type: YTN; PAM sequence: TTT
aaacactgctacagaatttt

SEQ ID NO: 87937 - DNA, 20 bp, Artificial Sequence
  Description of Artificial Sequence: Synthetic oligonucleotide
  Target: ATXN2; (+) strand; PAM type: YTN; PAM sequence: TTA
aacactgctacagaatttta

SEQ ID NO: 87938 - DNA, 20 bp, Artificial Sequence
  Description of Artificial Sequence: Synthetic oligonucleotide
  Target: ATXN2; (+) strand; PAM type: YTN; PAM sequence: CTG
ctacagaattttaaaagaaa

SEQ ID NO: 87939 - DNA, 20 bp, Artificial Sequence
  Description of Artificial Sequence: Synthetic oligonucleotide
  Target: ATXN2; (+) strand; PAM type: YTN; PAM sequence: CTA
cagaattttaaaagaaagga

SEQ ID NO: 87940 - DNA, 20 bp, Artificial Sequence
  Description of Artificial Sequence: Synthetic oligonucleotide
  Target: ATXN2; (+) strand; PAM type: YTN; PAM sequence: TTT
taaaagaaaggactaaaccg

SEQ ID NO: 87941 - DNA, 20 bp, Artificial Sequence
  Description of Artificial Sequence: Synthetic oligonucleotide
  Target: ATXN2; (+) strand; PAM type: YTN; PAM sequence: TTT
aaaagaaaggactaaaccgg

SEQ ID NO: 87942 - DNA, 20 bp, Artificial Sequence
  Description of Artificial Sequence: Synthetic oligonucleotide
  Target: ATXN2; (+) strand; PAM type: YTN; PAM sequence: TTA
aaagaaaggactaaaccgga

SEQ ID NO: 87943 - DNA, 20 bp, Artificial Sequence
  Description of Artificial Sequence: Synthetic oligonucleotide
  Target: ATXN2; (+) strand; PAM type: YTN; PAM sequence: CTA
aaccggaagacactgttctt

SEQ ID NO: 87944 - DNA, 20 bp, Artificial Sequence
  Description of Artificial Sequence: Synthetic oligonucleotide
  Target: ATXN2; (+) strand; PAM type: YTN; PAM sequence: CTG
ttcttctgtacttaggtgtc

SEQ ID NO: 87945 - DNA, 20 bp, Artificial Sequence
  Description of Artificial Sequence: Synthetic oligonucleotide
  Target: ATXN2; (+) strand; PAM type: YTN; PAM sequence: TTC
ttctgtacttaggtgtcaag

SEQ ID NO: 87946 - DNA, 20 bp, Artificial Sequence
  Description of Artificial Sequence: Synthetic oligonucleotide
  Target: ATXN2; (+) strand; PAM type: YTN; PAM sequence: CTT
ctgtacttaggtgtcaagtt

SEQ ID NO: 87947 - DNA, 20 bp, Artificial Sequence
  Description of Artificial Sequence: Synthetic oligonucleotide
  Target: ATXN2; (+) strand; PAM type: YTN; PAM sequence: TTC
tgtacttaggtgtcaagttg

SEQ ID NO: 87948 - DNA, 20 bp, Artificial Sequence
  Description of Artificial Sequence: Synthetic oligonucleotide
  Target: ATXN2; (+) strand; PAM type: YTN; PAM sequence: CTG
tacttaggtgtcaagttgtc

SEQ ID NO: 87949 - DNA, 20 bp, Artificial Sequence
  Description of Artificial Sequence: Synthetic oligonucleotide
  Target: ATXN2; (+) strand; PAM type: YTN; PAM sequence: CTT
aggtgtcaagttgtcatgct

SEQ ID NO: 87950 - DNA, 20 bp, Artificial Sequence
  Description of Artificial Sequence: Synthetic oligonucleotide
  Target: ATXN2; (+) strand; PAM type: YTN; PAM sequence: TTA
ggtgtcaagttgtcatgctg

SEQ ID NO: 87951 - DNA, 20 bp, Artificial Sequence
  Description of Artificial Sequence: Synthetic oligonucleotide
  Target: ATXN2; (+) strand; PAM type: YTN; PAM sequence: TTG
tcatgctgacttgcttaaaa

SEQ ID NO: 87952 - DNA, 20 bp, Artificial Sequence
  Description of Artificial Sequence: Synthetic oligonucleotide
  Target: ATXN2; (+) strand; PAM type: YTN; PAM sequence: CTG
acttgcttaaaagtaaaagg

SEQ ID NO: 87953 - DNA, 20 bp, Artificial Sequence
  Description of Artificial Sequence: Synthetic oligonucleotide
  Target: ATXN2; (+) strand; PAM type: YTN; PAM sequence: CTT
gcttaaaagtaaaaggaata

SEQ ID NO: 87954 - DNA, 20 bp, Artificial Sequence
  Description of Artificial Sequence: Synthetic oligonucleotide
  Target: ATXN2; (+) strand; PAM type: YTN; PAM sequence: TTG
cttaaaagtaaaaggaataa

SEQ ID NO: 87955 - DNA, 20 bp, Artificial Sequence
  Description of Artificial Sequence: Synthetic oligonucleotide
  Target: ATXN2; (+) strand; PAM type: YTN; PAM sequence: CTT
aaaagtaaaaggaataaaat

SEQ ID NO: 87956 - DNA, 20 bp, Artificial Sequence
  Description of Artificial Sequence: Synthetic oligonucleotide
  Target: ATXN2; (+) strand; PAM type: YTN; PAM sequence: TTA
aaagtaaaaggaataaaatc

SEQ ID NO: 87957 - DNA, 20 bp, Artificial Sequence
  Description of Artificial Sequence: Synthetic oligonucleotide
  Target: ATXN2; (+) strand; PAM type: YTN; PAM sequence: TTA
tctaataaaaacaccaacat

SEQ ID NO: 87958 - DNA, 20 bp, Artificial Sequence
  Description of Artificial Sequence: Synthetic oligonucleotide
  Target: ATXN2; (+) strand; PAM type: YTN; PAM sequence: CTA
ataaaaacaccaacatggca

SEQ ID NO: 87959 - DNA, 20 bp, Artificial Sequence
  Description of Artificial Sequence: Synthetic oligonucleotide
  Target: ATXN2; (+) strand; PAM type: YTN; PAM sequence: TTC
tactgaacaaccttgatata

SEQ ID NO: 87960 - DNA, 20 bp, Artificial Sequence
  Description of Artificial Sequence: Synthetic oligonucleotide
  Target: ATXN2; (+) strand; PAM type: YTN; PAM sequence: CTA
ctgaacaaccttgatataaa

SEQ ID NO: 87961 - DNA, 20 bp, Artificial Sequence
  Description of Artificial Sequence: Synthetic oligonucleotide
  Target: ATXN2; (+) strand; PAM type: YTN; PAM sequence: CTG
aacaaccttgatataaatca

SEQ ID NO: 87962 - DNA, 20 bp, Artificial Sequence
  Description of Artificial Sequence: Synthetic oligonucleotide
  Target: ATXN2; (+) strand; PAM type: YTN; PAM sequence: CTT
gatataaatcatgtaccaaa

SEQ ID NO: 87963 - DNA, 20 bp, Artificial Sequence
  Description of Artificial Sequence: Synthetic oligonucleotide
  Target: ATXN2; (+) strand; PAM type: YTN; PAM sequence: TTG
atataaatcatgtaccaaaa

SEQ ID NO: 87964 - DNA, 20 bp, Artificial Sequence
  Description of Artificial Sequence: Synthetic oligonucleotide
  Target: ATXN2; (+) strand; PAM type: YTN; PAM sequence: CTA
ttttacaagtttaattcaat

SEQ ID NO: 87965 - DNA, 20 bp, Artificial Sequence
  Description of Artificial Sequence: Synthetic oligonucleotide
  Target: ATXN2; (+) strand; PAM type: YTN; PAM sequence: TTT
tacaagtttaattcaataga

SEQ ID NO: 87966 - DNA, 20 bp, Artificial Sequence
  Description of Artificial Sequence: Synthetic oligonucleotide
  Target: ATXN2; (+) strand; PAM type: YTN; PAM sequence: TTT
acaagtttaattcaatagac

SEQ ID NO: 87967 - DNA, 20 bp, Artificial Sequence
  Description of Artificial Sequence: Synthetic oligonucleotide
  Target: ATXN2; (+) strand; PAM type: YTN; PAM sequence: TTA
caagtttaattcaatagaca

SEQ ID NO: 87968 - DNA, 20 bp, Artificial Sequence
  Description of Artificial Sequence: Synthetic oligonucleotide
  Target: ATXN2; (+) strand; PAM type: YTN; PAM sequence: TTT
aattcaatagacacacaatt

SEQ ID NO: 87969 - DNA, 20 bp, Artificial Sequence
  Description of Artificial Sequence: Synthetic oligonucleotide
  Target: ATXN2; (+) strand; PAM type: YTN; PAM sequence: TTA
attcaatagacacacaattt

SEQ ID NO: 87970 - DNA, 20 bp, Artificial Sequence
  Description of Artificial Sequence: Synthetic oligonucleotide
  Target: ATXN2; (+) strand; PAM type: YTN; PAM sequence: TTC
aatagacacacaattttgca

SEQ ID NO: 87971 - DNA, 20 bp, Artificial Sequence
  Description of Artificial Sequence: Synthetic oligonucleotide
  Target: ATXN2; (+) strand; PAM type: YTN; PAM sequence: TTT
tgcaaaaacattactaatgg

SEQ ID NO: 87972 - DNA, 20 bp, Artificial Sequence
  Description of Artificial Sequence: Synthetic oligonucleotide
  Target: ATXN2; (+) strand; PAM type: YTN; PAM sequence: TTT
gcaaaaacattactaatgga

SEQ ID NO: 87973 - DNA, 20 bp, Artificial Sequence
  Description of Artificial Sequence: Synthetic oligonucleotide
  Target: ATXN2; (+) strand; PAM type: YTN; PAM sequence: TTG
caaaaacattactaatggaa

SEQ ID NO: 87974 - DNA, 20 bp, Artificial Sequence
  Description of Artificial Sequence: Synthetic oligonucleotide
  Target: ATXN2; (+) strand; PAM type: YTN; PAM sequence: TTA
ctaatggaaatgtcattatc

SEQ ID NO: 87975 - DNA, 20 bp, Artificial Sequence
  Description of Artificial Sequence: Synthetic oligonucleotide
  Target: ATXN2; (+) strand; PAM type: YTN; PAM sequence: CTA
atggaaatgtcattatcctg

SEQ ID NO: 87976 - DNA, 20 bp, Artificial Sequence
  Description of Artificial Sequence: Synthetic oligonucleotide
  Target: ATXN2; (+) strand; PAM type: YTN; PAM sequence: TTA
tcctgaaagattatctagta

SEQ ID NO: 87977 - DNA, 20 bp, Artificial Sequence
  Description of Artificial Sequence: Synthetic oligonucleotide
  Target: ATXN2; (+) strand; PAM type: YTN; PAM sequence: CTG
aaagattatctagtaatgga

SEQ ID NO: 87978 - DNA, 20 bp, Artificial Sequence
  Description of Artificial Sequence: Synthetic oligonucleotide
  Target: ATXN2; (+) strand; PAM type: YTN; PAM sequence: TTA
tctagtaatggatccaaaaa

SEQ ID NO: 87979 - DNA, 20 bp, Artificial Sequence
  Description of Artificial Sequence: Synthetic oligonucleotide
  Target: ATXN2; (+) strand; PAM type: YTN; PAM sequence: CTA
gtaatggatccaaaaattta

SEQ ID NO: 87980 - DNA, 20 bp, Artificial Sequence
  Description of Artificial Sequence: Synthetic oligonucleotide
  Target: ATXN2; (+) strand; PAM type: YTN; PAM sequence: TTT
aggatcatagcaagaatata

SEQ ID NO: 87981 - DNA, 20 bp, Artificial Sequence
  Description of Artificial Sequence: Synthetic oligonucleotide
  Target: ATXN2; (+) strand; PAM type: YTN; PAM sequence: TTA
ggatcatagcaagaatataa

SEQ ID NO: 87982 - DNA, 20 bp, Artificial Sequence
  Description of Artificial Sequence: Synthetic oligonucleotide
  Target: ATXN2; (+) strand; PAM type: YTN; PAM sequence: TTA
tttcttattaaaacatgtct

SEQ ID NO: 87983 - DNA, 20 bp, Artificial Sequence
  Description of Artificial Sequence: Synthetic oligonucleotide
  Target: ATXN2; (+) strand; PAM type: YTN; PAM sequence: TTT
cttattaaaacatgtctaca

SEQ ID NO: 87984 - DNA, 20 bp, Artificial Sequence
  Description of Artificial Sequence: Synthetic oligonucleotide
  Target: ATXN2; (+) strand; PAM type: YTN; PAM sequence: TTC
ttattaaaacatgtctacat

SEQ ID NO: 87985 - DNA, 20 bp, Artificial Sequence
  Description of Artificial Sequence: Synthetic oligonucleotide
  Target: ATXN2; (+) strand; PAM type: YTN; PAM sequence: CTT
attaaaacatgtctacataa

SEQ ID NO: 87986 - DNA, 20 bp, Artificial Sequence
  Description of Artificial Sequence: Synthetic oligonucleotide
  Target: ATXN2; (+) strand; PAM type: YTN; PAM sequence: TTA
ttaaaacatgtctacataaa

SEQ ID NO: 87987 - DNA, 20 bp, Artificial Sequence
  Description of Artificial Sequence: Synthetic oligonucleotide
  Target: ATXN2; (+) strand; PAM type: YTN; PAM sequence: TTA
aaacatgtctacataaaggg

SEQ ID NO: 87988 - DNA, 20 bp, Artificial Sequence
  Description of Artificial Sequence: Synthetic oligonucleotide
  Target: ATXN2; (+) strand; PAM type: YTN; PAM sequence: CTA
cataaaggggtagggtattt

SEQ ID NO: 87989 - DNA, 20 bp, Artificial Sequence
  Description of Artificial Sequence: Synthetic oligonucleotide
  Target: ATXN2; (+) strand; PAM type: YTN; PAM sequence: TTT
gagtgtatttaaatacacct

SEQ ID NO: 87990 - DNA, 20 bp, Artificial Sequence
  Description of Artificial Sequence: Synthetic oligonucleotide
  Target: ATXN2; (+) strand; PAM type: YTN; PAM sequence: TTG
agtgtatttaaatacacctg

SEQ ID NO: 87991 - DNA, 20 bp, Artificial Sequence
  Description of Artificial Sequence: Synthetic oligonucleotide
  Target: ATXN2; (+) strand; PAM type: YTN; PAM sequence: TTT
aaatacacctggaaggatac

SEQ ID NO: 87992 - DNA, 20 bp, Artificial Sequence
  Description of Artificial Sequence: Synthetic oligonucleotide
  Target: ATXN2; (+) strand; PAM type: YTN; PAM sequence: TTA
aatacacctggaaggataca

SEQ ID NO: 87993 - DNA, 20 bp, Artificial Sequence
  Description of Artificial Sequence: Synthetic oligonucleotide
  Target: ATXN2; (+) strand; PAM type: YTN; PAM sequence: CTG
gaaggatacacatcaaaatg

SEQ ID NO: 87994 - DNA, 20 bp, Artificial Sequence
  Description of Artificial Sequence: Synthetic oligonucleotide
  Target: ATXN2; (+) strand; PAM type: YTN; PAM sequence: TTA
aaaggcagttgtcaggtgga

SEQ ID NO: 87995 - DNA, 20 bp, Artificial Sequence
  Description of Artificial Sequence: Synthetic oligonucleotide
  Target: ATXN2; (+) strand; PAM type: YTN; PAM sequence: TTG
tcaggtggagggattatgga

SEQ ID NO: 87996 - DNA, 20 bp, Artificial Sequence
  Description of Artificial Sequence: Synthetic oligonucleotide
  Target: ATXN2; (+) strand; PAM type: YTN; PAM sequence: TTA
tggatgcttttcattttttt

SEQ ID NO: 87997 - DNA, 20 bp, Artificial Sequence
  Description of Artificial Sequence: Synthetic oligonucleotide
  Target: ATXN2; (+) strand; PAM type: YTN; PAM sequence: CTT
ttcattttttttttttttaa

SEQ ID NO: 87998 - DNA, 20 bp, Artificial Sequence
  Description of Artificial Sequence: Synthetic oligonucleotide
  Target: ATXN2; (+) strand; PAM type: YTN; PAM sequence: TTT
tcattttttttttttttaac

SEQ ID NO: 87999 - DNA, 20 bp, Artificial Sequence
  Description of Artificial Sequence: Synthetic oligonucleotide
  Target: ATXN2; (+) strand; PAM type: YTN; PAM sequence: TTT
cattttttttttttttaact

SEQ ID NO: 88000 - DNA, 20 bp, Artificial Sequence
  Description of Artificial Sequence: Synthetic oligonucleotide
  Target: ATXN2; (+) strand; PAM type: YTN; PAM sequence: TTC
attttttttttttttaactt

SEQ ID NO: 88001 - DNA, 20 bp, Artificial Sequence
  Description of Artificial Sequence: Synthetic oligonucleotide
  Target: ATXN2; (+) strand; PAM type: YTN; PAM sequence: TTT
tttttttttttaacttaact

SEQ ID NO: 88002 - DNA, 20 bp, Artificial Sequence
  Description of Artificial Sequence: Synthetic oligonucleotide
  Target: ATXN2; (+) strand; PAM type: YTN; PAM sequence: TTT
ttttttttttaacttaacta

SEQ ID NO: 88003 - DNA, 20 bp, Artificial Sequence
  Description of Artificial Sequence: Synthetic oligonucleotide
  Target: ATXN2; (+) strand; PAM type: YTN; PAM sequence: TTT
tttttttttaacttaactat

SEQ ID NO: 88004 - DNA, 20 bp, Artificial Sequence
  Description of Artificial Sequence: Synthetic oligonucleotide
  Target: ATXN2; (+) strand; PAM type: YTN; PAM sequence: TTT
ttttttttaacttaactata

SEQ ID NO: 88005 - DNA, 20 bp, Artificial Sequence
  Description of Artificial Sequence: Synthetic oligonucleotide
  Target: ATXN2; (+) strand; PAM type: YTN; PAM sequence: TTT
tttttttaacttaactatat

SEQ ID NO: 88006 - DNA, 20 bp, Artificial Sequence
  Description of Artificial Sequence: Synthetic oligonucleotide
  Target: ATXN2; (+) strand; PAM type: YTN; PAM sequence: TTT
ttttttaacttaactatatt

SEQ ID NO: 88007 - DNA, 20 bp, Artificial Sequence
  Description of Artificial Sequence: Synthetic oligonucleotide
  Target: ATXN2; (+) strand; PAM type: YTN; PAM sequence: TTT
tttttaacttaactatattt

SEQ ID NO: 88008 - DNA, 20 bp, Artificial Sequence
  Description of Artificial Sequence: Synthetic oligonucleotide
  Target: ATXN2; (+) strand; PAM type: YTN; PAM sequence: TTT
ttttaacttaactatatttt

SEQ ID NO: 88009 - DNA, 20 bp, Artificial Sequence
  Description of Artificial Sequence: Synthetic oligonucleotide
  Target: ATXN2; (+) strand; PAM type: YTN; PAM sequence: TTT
tttaacttaactatattttc

SEQ ID NO: 88010 - DNA, 20 bp, Artificial Sequence
  Description of Artificial Sequence: Synthetic oligonucleotide
  Target: ATXN2; (+) strand; PAM type: YTN; PAM sequence: TTT
ttaacttaactatattttct

SEQ ID NO: 88011 - DNA, 20 bp, Artificial Sequence
  Description of Artificial Sequence: Synthetic oligonucleotide
  Target: ATXN2; (+) strand; PAM type: YTN; PAM sequence: TTT
taacttaactatattttctt

SEQ ID NO: 88012 - DNA, 20 bp, Artificial Sequence
  Description of Artificial Sequence: Synthetic oligonucleotide
  Target: ATXN2; (+) strand; PAM type: YTN; PAM sequence: TTT
aacttaactatattttctta

SEQ ID NO: 88013 - DNA, 20 bp, Artificial Sequence
  Description of Artificial Sequence: Synthetic oligonucleotide
  Target: ATXN2; (+) strand; PAM type: YTN; PAM sequence: TTA
acttaactatattttcttac

SEQ ID NO: 88014 - DNA, 20 bp, Artificial Sequence
  Description of Artificial Sequence: Synthetic oligonucleotide
  Target: ATXN2; (+) strand; PAM type: YTN; PAM sequence: CTT
aactatattttcttacttat

SEQ ID NO: 88015 - DNA, 20 bp, Artificial Sequence
  Description of Artificial Sequence: Synthetic oligonucleotide
  Target: ATXN2; (+) strand; PAM type: YTN; PAM sequence: TTA
actatattttcttacttatc

SEQ ID NO: 88016 - DNA, 20 bp, Artificial Sequence
  Description of Artificial Sequence: Synthetic oligonucleotide
  Target: ATXN2; (+) strand; PAM type: YTN; PAM sequence: CTA
tattttcttacttatctgca

SEQ ID NO: 88017 - DNA, 20 bp, Artificial Sequence
  Description of Artificial Sequence: Synthetic oligonucleotide
  Target: ATXN2; (+) strand; PAM type: YTN; PAM sequence: TTT
tcttacttatctgcattaaa

SEQ ID NO: 88018 - DNA, 20 bp, Artificial Sequence
  Description of Artificial Sequence: Synthetic oligonucleotide
  Target: ATXN2; (+) strand; PAM type: YTN; PAM sequence: TTT
cttacttatctgcattaaac

SEQ ID NO: 88019 - DNA, 20 bp, Artificial Sequence
  Description of Artificial Sequence: Synthetic oligonucleotide
  Target: ATXN2; (+) strand; PAM type: YTN; PAM sequence: TTC
ttacttatctgcattaaact

SEQ ID NO: 88020 - DNA, 20 bp, Artificial Sequence
  Description of Artificial Sequence: Synthetic oligonucleotide
  Target: ATXN2; (+) strand; PAM type: YTN; PAM sequence: CTT
acttatctgcattaaactac

SEQ ID NO: 88021 - DNA, 20 bp, Artificial Sequence
  Description of Artificial Sequence: Synthetic oligonucleotide
  Target: ATXN2; (+) strand; PAM type: YTN; PAM sequence: TTA
cttatctgcattaaactacc

SEQ ID NO: 88022 - DNA, 20 bp, Artificial Sequence
  Description of Artificial Sequence: Synthetic oligonucleotide
  Target: ATXN2; (+) strand; PAM type: YTN; PAM sequence: CTT
atctgcattaaactaccaaa

SEQ ID NO: 88023 - DNA, 20 bp, Artificial Sequence
  Description of Artificial Sequence: Synthetic oligonucleotide
  Target: ATXN2; (+) strand; PAM type: YTN; PAM sequence: TTA
tctgcattaaactaccaaaa

SEQ ID NO: 88024 - DNA, 20 bp, Artificial Sequence
  Description of Artificial Sequence: Synthetic oligonucleotide
  Target: ATXN2; (+) strand; PAM type: YTN; PAM sequence: CTG
cattaaactaccaaaaacaa

SEQ ID NO: 88025 - DNA, 20 bp, Artificial Sequence
  Description of Artificial Sequence: Synthetic oligonucleotide
  Target: ATXN2; (+) strand; PAM type: YTN; PAM sequence: TTA
aactaccaaaaacaaatcaa

SEQ ID NO: 88026 - DNA, 20 bp, Artificial Sequence
  Description of Artificial Sequence: Synthetic oligonucleotide
  Target: ATXN2; (+) strand; PAM type: YTN; PAM sequence: CTA
ccaaaaacaaatcaaaaaag

SEQ ID NO: 88027 - DNA, 20 bp, Artificial Sequence
  Description of Artificial Sequence: Synthetic oligonucleotide
  Target: ATXN2; (+) strand; PAM type: YTN; PAM sequence: TTC
tggatctaattcttcctaat

SEQ ID NO: 88028 - DNA, 20 bp, Artificial Sequence
  Description of Artificial Sequence: Synthetic oligonucleotide
  Target: ATXN2; (+) strand; PAM type: YTN; PAM sequence: CTG
gatctaattcttcctaatgg

SEQ ID NO: 88029 - DNA, 20 bp, Artificial Sequence
  Description of Artificial Sequence: Synthetic oligonucleotide
  Target: ATXN2; (+) strand; PAM type: YTN; PAM sequence: CTA
attcttcctaatggctctag

SEQ ID NO: 88030 - DNA, 20 bp, Artificial Sequence
  Description of Artificial Sequence: Synthetic oligonucleotide
  Target: ATXN2; (+) strand; PAM type: YTN; PAM sequence: TTC
ttcctaatggctctagttag

SEQ ID NO: 88031 - DNA, 20 bp, Artificial Sequence
  Description of Artificial Sequence: Synthetic oligonucleotide
  Target: ATXN2; (+) strand; PAM type: YTN; PAM sequence: CTT
cctaatggctctagttagtc

SEQ ID NO: 88032 - DNA, 20 bp, Artificial Sequence
  Description of Artificial Sequence: Synthetic oligonucleotide
  Target: ATXN2; (+) strand; PAM type: YTN; PAM sequence: TTC
ctaatggctctagttagtcg

SEQ ID NO: 88033 - DNA, 20 bp, Artificial Sequence
  Description of Artificial Sequence: Synthetic oligonucleotide
  Target: ATXN2; (+) strand; PAM type: YTN; PAM sequence: CTA
atggctctagttagtcggaa

SEQ ID NO: 88034 - DNA, 20 bp, Artificial Sequence
  Description of Artificial Sequence: Synthetic oligonucleotide
  Target: ATXN2; (+) strand; PAM type: YTN; PAM sequence: CTC
tagttagtcggaaaagttgt

SEQ ID NO: 88035 - DNA, 20 bp, Artificial Sequence
  Description of Artificial Sequence: Synthetic oligonucleotide
  Target: ATXN2; (+) strand; PAM type: YTN; PAM sequence: CTA
gttagtcggaaaagttgtat

SEQ ID NO: 88036 - DNA, 20 bp, Artificial Sequence
  Description of Artificial Sequence: Synthetic oligonucleotide
  Target: ATXN2; (+) strand; PAM type: YTN; PAM sequence: TTA
gtcggaaaagttgtattatt

SEQ ID NO: 88037 - DNA, 20 bp, Artificial Sequence
  Description of Artificial Sequence: Synthetic oligonucleotide
  Target: ATXN2; (+) strand; PAM type: YTN; PAM sequence: TTG
tattattactgtttctgaaa

SEQ ID NO: 88038 - DNA, 20 bp, Artificial Sequence
  Description of Artificial Sequence: Synthetic oligonucleotide
  Target: ATXN2; (+) strand; PAM type: YTN; PAM sequence: TTA
ttactgtttctgaaaggtaa

SEQ ID NO: 88039 - DNA, 20 bp, Artificial Sequence
  Description of Artificial Sequence: Synthetic oligonucleotide
  Target: ATXN2; (+) strand; PAM type: YTN; PAM sequence: TTA
ctgtttctgaaaggtaaaag

SEQ ID NO: 88040 - DNA, 20 bp, Artificial Sequence
  Description of Artificial Sequence: Synthetic oligonucleotide
  Target: ATXN2; (+) strand; PAM type: YTN; PAM sequence: CTG
tttctgaaaggtaaaagcat

SEQ ID NO: 88041 - DNA, 20 bp, Artificial Sequence
  Description of Artificial Sequence: Synthetic oligonucleotide
  Target: ATXN2; (+) strand; PAM type: YTN; PAM sequence: TTT
ctgaaaggtaaaagcatcac

SEQ ID NO: 88042 - DNA, 20 bp, Artificial Sequence
  Description of Artificial Sequence: Synthetic oligonucleotide
  Target: ATXN2; (+) strand; PAM type: YTN; PAM sequence: TTC
tgaaaggtaaaagcatcacc

SEQ ID NO: 88043 - DNA, 20 bp, Artificial Sequence
  Description of Artificial Sequence: Synthetic oligonucleotide
  Target: ATXN2; (+) strand; PAM type: YTN; PAM sequence: CTG
aaaggtaaaagcatcaccat

SEQ ID NO: 88044 - DNA, 20 bp, Artificial Sequence
  Description of Artificial Sequence: Synthetic oligonucleotide
  Target: ATXN2; (+) strand; PAM type: YTN; PAM sequence: TTA
gatggattagaagagtagat

SEQ ID NO: 88045 - DNA, 20 bp, Artificial Sequence
  Description of Artificial Sequence: Synthetic oligonucleotide
  Target: ATXN2; (+) strand; PAM type: YTN; PAM sequence: TTA
gaagagtagatgtgaggctg

SEQ ID NO: 88046 - DNA, 20 bp, Artificial Sequence
  Description of Artificial Sequence: Synthetic oligonucleotide
  Target: ATXN2; (+) strand; PAM type: YTN; PAM sequence: CTG
ggcgtggtggctcacatctg

SEQ ID NO: 88047 - DNA, 20 bp, Artificial Sequence
  Description of Artificial Sequence: Synthetic oligonucleotide
  Target: ATXN2; (+) strand; PAM type: YTN; PAM sequence: CTC
acatctgtaatcccagcact

SEQ ID NO: 88048 - DNA, 20 bp, Artificial Sequence
  Description of Artificial Sequence: Synthetic oligonucleotide
  Target: ATXN2; (+) strand; PAM type: YTN; PAM sequence: CTG
taatcccagcactttgggag

SEQ ID NO: 88049 - DNA, 20 bp, Artificial Sequence
  Description of Artificial Sequence: Synthetic oligonucleotide
  Target: ATXN2; (+) strand; PAM type: YTN; PAM sequence: CTT
tgggaggcctaggcagacaa

SEQ ID NO: 88050 - DNA, 20 bp, Artificial Sequence
  Description of Artificial Sequence: Synthetic oligonucleotide
  Target: ATXN2; (+) strand; PAM type: YTN; PAM sequence: TTT
gggaggcctaggcagacaaa

SEQ ID NO: 88051 - DNA, 20 bp, Artificial Sequence
  Description of Artificial Sequence: Synthetic oligonucleotide
  Target: ATXN2; (+) strand; PAM type: YTN; PAM sequence: TTG
ggaggcctaggcagacaaat

SEQ ID NO: 88052 - DNA, 20 bp, Artificial Sequence
  Description of Artificial Sequence: Synthetic oligonucleotide
  Target: ATXN2; (+) strand; PAM type: YTN; PAM sequence: CTA
ggcagacaaatcacaaggtc

SEQ ID NO: 88053 - DNA, 20 bp, Artificial Sequence
  Description of Artificial Sequence: Synthetic oligonucleotide
  Target: ATXN2; (+) strand; PAM type: YTN; PAM sequence: TTC
gagatcagcctggccaagac

SEQ ID NO: 88054 - DNA, 20 bp, Artificial Sequence
  Description of Artificial Sequence: Synthetic oligonucleotide
  Target: ATXN2; (+) strand; PAM type: YTN; PAM sequence: CTG
gccaagacggtgaaaccccg

SEQ ID NO: 88055 - DNA, 20 bp, Artificial Sequence
  Description of Artificial Sequence: Synthetic oligonucleotide
  Target: ATXN2; (+) strand; PAM type: YTN; PAM sequence: CTC
tactaaaaatacaaaaattg

SEQ ID NO: 88056 - DNA, 20 bp, Artificial Sequence
  Description of Artificial Sequence: Synthetic oligonucleotide
  Target: ATXN2; (+) strand; PAM type: YTN; PAM sequence: CTA
ctaaaaatacaaaaattggc

SEQ ID NO: 88057 - DNA, 20 bp, Artificial Sequence
  Description of Artificial Sequence: Synthetic oligonucleotide
  Target: ATXN2; (+) strand; PAM type: YTN; PAM sequence: CTA
aaaatacaaaaattggccgg

SEQ ID NO: 88058 - DNA, 20 bp, Artificial Sequence
  Description of Artificial Sequence: Synthetic oligonucleotide
  Target: ATXN2; (+) strand; PAM type: YTN; PAM sequence: TTG
gccggtcgtggtggcgcaca

SEQ ID NO: 88059 - DNA, 20 bp, Artificial Sequence
  Description of Artificial Sequence: Synthetic oligonucleotide
  Target: ATXN2; (+) strand; PAM type: YTN; PAM sequence: CTG
tagtcccacctactcgggag

SEQ ID NO: 88060 - DNA, 20 bp, Artificial Sequence
  Description of Artificial Sequence: Synthetic oligonucleotide
  Target: ATXN2; (+) strand; PAM type: YTN; PAM sequence: CTA
ctcgggaggctgaggcagaa

SEQ ID NO: 88061 - DNA, 20 bp, Artificial Sequence
  Description of Artificial Sequence: Synthetic oligonucleotide
  Target: ATXN2; (+) strand; PAM type: YTN; PAM sequence: CTC
gggaggctgaggcagaaaaa

SEQ ID NO: 88062 - DNA, 20 bp, Artificial Sequence
  Description of Artificial Sequence: Synthetic oligonucleotide
  Target: ATXN2; (+) strand; PAM type: YTN; PAM sequence: CTG
aggcagaaaaaccgcttgaa

SEQ ID NO: 88063 - DNA, 20 bp, Artificial Sequence
  Description of Artificial Sequence: Synthetic oligonucleotide
  Target: ATXN2; (+) strand; PAM type: YTN; PAM sequence: CTT
gaacctgggaggcagatgtt

SEQ ID NO: 88064 - DNA, 20 bp, Artificial Sequence
  Description of Artificial Sequence: Synthetic oligonucleotide
  Target: ATXN2; (+) strand; PAM type: YTN; PAM sequence: TTG
aacctgggaggcagatgttg

SEQ ID NO: 88065 - DNA, 20 bp, Artificial Sequence
  Description of Artificial Sequence: Synthetic oligonucleotide
  Target: ATXN2; (+) strand; PAM type: YTN; PAM sequence: CTG
ggaggcagatgttgcagtga

SEQ ID NO: 88066 - DNA, 20 bp, Artificial Sequence
  Description of Artificial Sequence: Synthetic oligonucleotide
  Target: ATXN2; (+) strand; PAM type: YTN; PAM sequence: TTG
cagtgagctgagatcgcacc

SEQ ID NO: 88067 - DNA, 20 bp, Artificial Sequence
  Description of Artificial Sequence: Synthetic oligonucleotide
  Target: ATXN2; (+) strand; PAM type: YTN; PAM sequence: CTG
agatcgcaccgctgcacttc

SEQ ID NO: 88068 - DNA, 20 bp, Artificial Sequence
  Description of Artificial Sequence: Synthetic oligonucleotide
  Target: ATXN2; (+) strand; PAM type: YTN; PAM sequence: CTG
cacttcagaatgggtgacag

SEQ ID NO: 88069 - DNA, 20 bp, Artificial Sequence
  Description of Artificial Sequence: Synthetic oligonucleotide
  Target: ATXN2; (+) strand; PAM type: YTN; PAM sequence: CTT
cagaatgggtgacagagtga

SEQ ID NO: 88070 - DNA, 20 bp, Artificial Sequence
  Description of Artificial Sequence: Synthetic oligonucleotide
  Target: ATXN2; (+) strand; PAM type: YTN; PAM sequence: TTC
agaatgggtgacagagtgag

SEQ ID NO: 88071 - DNA, 20 bp, Artificial Sequence
  Description of Artificial Sequence: Synthetic oligonucleotide
  Target: ATXN2; (+) strand; PAM type: YTN; PAM sequence: CTA
cctcaaaaaaaaaaaaaaaa

SEQ ID NO: 88072 - DNA, 20 bp, Artificial Sequence
  Description of Artificial Sequence: Synthetic oligonucleotide
  Target: ATXN2; (+) strand; PAM type: YTN; PAM sequence: CTC
aaaaaaaaaaaaaaaaaaaa

SEQ ID NO: 88073 - DNA, 20 bp, Artificial Sequence
  Description of Artificial Sequence: Synthetic oligonucleotide
  Target: ATXN2; (+) strand; PAM type: YTN; PAM sequence: TTA
aagtaacttcttagaaggga

SEQ ID NO: 88074 - DNA, 20 bp, Artificial Sequence
  Description of Artificial Sequence: Synthetic oligonucleotide
  Target: ATXN2; (+) strand; PAM type: YTN; PAM sequence: CTT
cttagaagggatggggtaga

SEQ ID NO: 88075 - DNA, 20 bp, Artificial Sequence
  Description of Artificial Sequence: Synthetic oligonucleotide
  Target: ATXN2; (+) strand; PAM type: YTN; PAM sequence: TTC
ttagaagggatggggtagag

SEQ ID NO: 88076 - DNA, 20 bp, Artificial Sequence
  Description of Artificial Sequence: Synthetic oligonucleotide
  Target: ATXN2; (+) strand; PAM type: YTN; PAM sequence: CTT
agaagggatggggtagaggc

SEQ ID NO: 88077 - DNA, 20 bp, Artificial Sequence
  Description of Artificial Sequence: Synthetic oligonucleotide
  Target: ATXN2; (+) strand; PAM type: YTN; PAM sequence: TTA
gaagggatggggtagaggca

SEQ ID NO: 88078 - DNA, 20 bp, Artificial Sequence
  Description of Artificial Sequence: Synthetic oligonucleotide
  Target: ATXN2; (+) strand; PAM type: YTN; PAM sequence: TTA
gattaagagacatcaaagag

SEQ ID NO: 88079 - DNA, 20 bp, Artificial Sequence
  Description of Artificial Sequence: Synthetic oligonucleotide
  Target: ATXN2; (+) strand; PAM type: YTN; PAM sequence: TTA
agagacatcaaagaggccgg

SEQ ID NO: 88080 - DNA, 20 bp, Artificial Sequence
  Description of Artificial Sequence: Synthetic oligonucleotide
  Target: ATXN2; (+) strand; PAM type: YTN; PAM sequence: CTC
acgcctgtaatcccagcact

SEQ ID NO: 88081 - DNA, 20 bp, Artificial Sequence
  Description of Artificial Sequence: Synthetic oligonucleotide
  Target: ATXN2; (+) strand; PAM type: YTN; PAM sequence: CTG
taatcccagcactttgggag

SEQ ID NO: 88082 - DNA, 20 bp, Artificial Sequence
  Description of Artificial Sequence: Synthetic oligonucleotide
  Target: ATXN2; (+) strand; PAM type: YTN; PAM sequence: CTT
tgggaggctgaggtgggtgg

SEQ ID NO: 88083 - DNA, 20 bp, Artificial Sequence
  Description of Artificial Sequence: Synthetic oligonucleotide
  Target: ATXN2; (+) strand; PAM type: YTN; PAM sequence: TTT
gggaggctgaggtgggtgga

SEQ ID NO: 88084 - DNA, 20 bp, Artificial Sequence
  Description of Artificial Sequence: Synthetic oligonucleotide
  Target: ATXN2; (+) strand; PAM type: YTN; PAM sequence: TTG
ggaggctgaggtgggtggat

SEQ ID NO: 88085 - DNA, 20 bp, Artificial Sequence
  Description of Artificial Sequence: Synthetic oligonucleotide
  Target: ATXN2; (+) strand; PAM type: YTN; PAM sequence: CTG
aggtgggtggatcacctgag

SEQ ID NO: 88086 - DNA, 20 bp, Artificial Sequence
  Description of Artificial Sequence: Synthetic oligonucleotide
  Target: ATXN2; (+) strand; PAM type: YTN; PAM sequence: CTG
aggtcgggaattcaagacca

SEQ ID NO: 88087 - DNA, 20 bp, Artificial Sequence
  Description of Artificial Sequence: Synthetic oligonucleotide
  Target: ATXN2; (+) strand; PAM type: YTN; PAM sequence: TTC
aagaccagcctgaccaacat

SEQ ID NO: 88088 - DNA, 20 bp, Artificial Sequence
  Description of Artificial Sequence: Synthetic oligonucleotide
  Target: ATXN2; (+) strand; PAM type: YTN; PAM sequence: CTG
accaacatggtgaaaccctg

SEQ ID NO: 88089 - DNA, 20 bp, Artificial Sequence
  Description of Artificial Sequence: Synthetic oligonucleotide
  Target: ATXN2; (+) strand; PAM type: YTN; PAM sequence: CTG
tctctactaaaaacacaaaa

SEQ ID NO: 88090 - DNA, 20 bp, Artificial Sequence
  Description of Artificial Sequence: Synthetic oligonucleotide
  Target: ATXN2; (+) strand; PAM type: YTN; PAM sequence: CTC
tactaaaaacacaaaaatta

SEQ ID NO: 88091 - DNA, 20 bp, Artificial Sequence
  Description of Artificial Sequence: Synthetic oligonucleotide
  Target: ATXN2; (+) strand; PAM type: YTN; PAM sequence: CTA
ctaaaaacacaaaaattagc

SEQ ID NO: 88092 - DNA, 20 bp, Artificial Sequence
  Description of Artificial Sequence: Synthetic oligonucleotide
  Target: ATXN2; (+) strand; PAM type: YTN; PAM sequence: CTA
aaaacacaaaaattagccag

SEQ ID NO: 88093 - DNA, 20 bp, Artificial Sequence
  Description of Artificial Sequence: Synthetic oligonucleotide
  Target: ATXN2; (+) strand; PAM type: YTN; PAM sequence: TTA
gccaggtgtggtggcgggca

SEQ ID NO: 88094 - DNA, 20 bp, Artificial Sequence
  Description of Artificial Sequence: Synthetic oligonucleotide
  Target: ATXN2; (+) strand; PAM type: YTN; PAM sequence: CTG
tagtcccagctactcaggag

SEQ ID NO: 88095 - DNA, 20 bp, Artificial Sequence
  Description of Artificial Sequence: Synthetic oligonucleotide
  Target: ATXN2; (+) strand; PAM type: YTN; PAM sequence: CTA
ctcaggaggctgaggcagga

SEQ ID NO: 88096 - DNA, 20 bp, Artificial Sequence
  Description of Artificial Sequence: Synthetic oligonucleotide
  Target: ATXN2; (+) strand; PAM type: YTN; PAM sequence: CTC
aggaggctgaggcaggagaa

SEQ ID NO: 88097 - DNA, 20 bp, Artificial Sequence
  Description of Artificial Sequence: Synthetic oligonucleotide
  Target: ATXN2; (+) strand; PAM type: YTN; PAM sequence: CTG
aggcaggagaactgcttgaa

SEQ ID NO: 88098 - DNA, 20 bp, Artificial Sequence
  Description of Artificial Sequence: Synthetic oligonucleotide
  Target: ATXN2; (+) strand; PAM type: YTN; PAM sequence: CTG
cttgaacccaggaggcggag

SEQ ID NO: 88099 - DNA, 20 bp, Artificial Sequence
  Description of Artificial Sequence: Synthetic oligonucleotide
  Target: ATXN2; (+) strand; PAM type: YTN; PAM sequence: CTT
gaacccaggaggcggagttt

SEQ ID NO: 88100 - DNA, 20 bp, Artificial Sequence
  Description of Artificial Sequence: Synthetic oligonucleotide
  Target: ATXN2; (+) strand; PAM type: YTN; PAM sequence: TTG
aacccaggaggcggagtttg

SEQ ID NO: 88101 - DNA, 20 bp, Artificial Sequence
  Description of Artificial Sequence: Synthetic oligonucleotide
  Target: ATXN2; (+) strand; PAM type: YTN; PAM sequence: TTT
gcagggagctgagatcgcgc

SEQ ID NO: 88102 - DNA, 20 bp, Artificial Sequence
  Description of Artificial Sequence: Synthetic oligonucleotide
  Target: ATXN2; (+) strand; PAM type: YTN; PAM sequence: TTG
cagggagctgagatcgcgcc

SEQ ID NO: 88103 - DNA, 20 bp, Artificial Sequence
  Description of Artificial Sequence: Synthetic oligonucleotide
  Target: ATXN2; (+) strand; PAM type: YTN; PAM sequence: CTG
agatcgcgccactgcactcc

SEQ ID NO: 88104 - DNA, 20 bp, Artificial Sequence
  Description of Artificial Sequence: Synthetic oligonucleotide
  Target: ATXN2; (+) strand; PAM type: YTN; PAM sequence: CTG
cactccagcctgggtggcag

SEQ ID NO: 88105 - DNA, 20 bp, Artificial Sequence
  Description of Artificial Sequence: Synthetic oligonucleotide
  Target: ATXN2; (+) strand; PAM type: YTN; PAM sequence: CTC
cagcctgggtggcagaggga

SEQ ID NO: 88106 - DNA, 20 bp, Artificial Sequence
  Description of Artificial Sequence: Synthetic oligonucleotide
  Target: ATXN2; (+) strand; PAM type: YTN; PAM sequence: CTG
ggtggcagagggagactcct

SEQ ID NO: 88107 - DNA, 20 bp, Artificial Sequence
  Description of Artificial Sequence: Synthetic oligonucleotide
  Target: ATXN2; (+) strand; PAM type: YTN; PAM sequence: CTC
cttctcaaaaattaaaaaaa

SEQ ID NO: 88108 - DNA, 20 bp, Artificial Sequence
  Description of Artificial Sequence: Synthetic oligonucleotide
  Target: ATXN2; (+) strand; PAM type: YTN; PAM sequence: CTT
ctcaaaaattaaaaaaaaaa

SEQ ID NO: 88109 - DNA, 20 bp, Artificial Sequence
  Description of Artificial Sequence: Synthetic oligonucleotide
  Target: ATXN2; (+) strand; PAM type: YTN; PAM sequence: TTC
tcaaaaattaaaaaaaaaat

SEQ ID NO: 88110 - DNA, 20 bp, Artificial Sequence
  Description of Artificial Sequence: Synthetic oligonucleotide
  Target: ATXN2; (+) strand; PAM type: YTN; PAM sequence: CTC
aaaaattaaaaaaaaaataa

SEQ ID NO: 88111 - DNA, 20 bp, Artificial Sequence
  Description of Artificial Sequence: Synthetic oligonucleotide
  Target: ATXN2; (+) strand; PAM type: YTN; PAM sequence: TTA
aaaaaaaaataaaaaataaa

SEQ ID NO: 88112 - DNA, 20 bp, Artificial Sequence
  Description of Artificial Sequence: Synthetic oligonucleotide
  Target: ATXN2; (+) strand; PAM type: YTN; PAM sequence: CTG
ggcacagtggctcacgcctg

SEQ ID NO: 88113 - DNA, 20 bp, Artificial Sequence
  Description of Artificial Sequence: Synthetic oligonucleotide
  Target: ATXN2; (+) strand; PAM type: YTN; PAM sequence: CTC
acgcctgtaatcccagcact

SEQ ID NO: 88114 - DNA, 20 bp, Artificial Sequence
  Description of Artificial Sequence: Synthetic oligonucleotide
  Target: ATXN2; (+) strand; PAM type: YTN; PAM sequence: CTG
taatcccagcactttgggag

SEQ ID NO: 88115 - DNA, 20 bp, Artificial Sequence
  Description of Artificial Sequence: Synthetic oligonucleotide
  Target: ATXN2; (+) strand; PAM type: YTN; PAM sequence: CTT
tgggaggctgaggcaggcgg

SEQ ID NO: 88116 - DNA, 20 bp, Artificial Sequence
  Description of Artificial Sequence: Synthetic oligonucleotide
  Target: ATXN2; (+) strand; PAM type: YTN; PAM sequence: TTT
gggaggctgaggcaggcgga

SEQ ID NO: 88117 - DNA, 20 bp, Artificial Sequence
  Description of Artificial Sequence: Synthetic oligonucleotide
  Target: ATXN2; (+) strand; PAM type: YTN; PAM sequence: TTG
ggaggctgaggcaggcggat

SEQ ID NO: 88118 - DNA, 20 bp, Artificial Sequence
  Description of Artificial Sequence: Synthetic oligonucleotide
  Target: ATXN2; (+) strand; PAM type: YTN; PAM sequence: CTG
aggcaggcggatcacgaggt

SEQ ID NO: 88119 - DNA, 20 bp, Artificial Sequence
  Description of Artificial Sequence: Synthetic oligonucleotide
  Target: ATXN2; (+) strand; PAM type: YTN; PAM sequence: CTG
gctaacacagtgaaacccca

SEQ ID NO: 88120 - DNA, 20 bp, Artificial Sequence
  Description of Artificial Sequence: Synthetic oligonucleotide
  Target: ATXN2; (+) strand; PAM type: YTN; PAM sequence: CTA
acacagtgaaaccccatctc

SEQ ID NO: 88121 - DNA, 20 bp, Artificial Sequence
  Description of Artificial Sequence: Synthetic oligonucleotide
  Target: ATXN2; (+) strand; PAM type: YTN; PAM sequence: CTC
tactaaacaaaatacaaaaa

SEQ ID NO: 88122 - DNA, 20 bp, Artificial Sequence
  Description of Artificial Sequence: Synthetic oligonucleotide
  Target: ATXN2; (+) strand; PAM type: YTN; PAM sequence: CTA
ctaaacaaaatacaaaaaat

SEQ ID NO: 88123 - DNA, 20 bp, Artificial Sequence
  Description of Artificial Sequence: Synthetic oligonucleotide
  Target: ATXN2; (+) strand; PAM type: YTN; PAM sequence: CTA
aacaaaatacaaaaaattag

SEQ ID NO: 88124 - DNA, 20 bp, Artificial Sequence
  Description of Artificial Sequence: Synthetic oligonucleotide
  Target: ATXN2; (+) strand; PAM type: YTN; PAM sequence: TTA
gccgggcatggtggcgggcg

SEQ ID NO: 88125 - DNA, 20 bp, Artificial Sequence
  Description of Artificial Sequence: Synthetic oligonucleotide
  Target: ATXN2; (+) strand; PAM type: YTN; PAM sequence: CTG
tagtcctagctactcgggag

SEQ ID NO: 88126 - DNA, 20 bp, Artificial Sequence
  Description of Artificial Sequence: Synthetic oligonucleotide
  Target: ATXN2; (+) strand; PAM type: YTN; PAM sequence: CTA
gctactcgggaggctgaggt

SEQ ID NO: 88127 - DNA, 20 bp, Artificial Sequence
  Description of Artificial Sequence: Synthetic oligonucleotide
  Target: ATXN2; (+) strand; PAM type: YTN; PAM sequence: CTA
ctcgggaggctgaggtagga

SEQ ID NO: 88128 - DNA, 20 bp, Artificial Sequence
  Description of Artificial Sequence: Synthetic oligonucleotide
  Target: ATXN2; (+) strand; PAM type: YTN; PAM sequence: CTC
gggaggctgaggtaggagaa

SEQ ID NO: 88129 - DNA, 20 bp, Artificial Sequence
  Description of Artificial Sequence: Synthetic oligonucleotide
  Target: ATXN2; (+) strand; PAM type: YTN; PAM sequence: CTG
aggtaggagaatggcgtgaa

SEQ ID NO: 88130 - DNA, 20 bp, Artificial Sequence
  Description of Artificial Sequence: Synthetic oligonucleotide
  Target: ATXN2; (+) strand; PAM type: YTN; PAM sequence: CTG
agatcacgccactgcactcc

SEQ ID NO: 88131 - DNA, 20 bp, Artificial Sequence
  Description of Artificial Sequence: Synthetic oligonucleotide
  Target: ATXN2; (+) strand; PAM type: YTN; PAM sequence: CTG
cactccagcctgggcgacag

SEQ ID NO: 88132 - DNA, 20 bp, Artificial Sequence
  Description of Artificial Sequence: Synthetic oligonucleotide
  Target: ATXN2; (+) strand; PAM type: YTN; PAM sequence: CTC
cagcctgggcgacagggaga

SEQ ID NO: 88133 - DNA, 20 bp, Artificial Sequence
  Description of Artificial Sequence: Synthetic oligonucleotide
  Target: ATXN2; (+) strand; PAM type: YTN; PAM sequence: CTG
ggcgacagggagagactcca

SEQ ID NO: 88134 - DNA, 20 bp, Artificial Sequence
  Description of Artificial Sequence: Synthetic oligonucleotide
  Target: ATXN2; (+) strand; PAM type: YTN; PAM sequence: CTC
catctcaaaaaaagagacat

SEQ ID NO: 88135 - DNA, 20 bp, Artificial Sequence
  Description of Artificial Sequence: Synthetic oligonucleotide
  Target: ATXN2; (+) strand; PAM type: YTN; PAM sequence: CTC
aaaaaaagagacatcaaaga

SEQ ID NO: 88136 - DNA, 20 bp, Artificial Sequence
  Description of Artificial Sequence: Synthetic oligonucleotide
  Target: ATXN2; (+) strand; PAM type: YTN; PAM sequence: TTT
ttgacaaaagccctttctaa

SEQ ID NO: 88137 - DNA, 20 bp, Artificial Sequence
  Description of Artificial Sequence: Synthetic oligonucleotide
  Target: ATXN2; (+) strand; PAM type: YTN; PAM sequence: TTT
tgacaaaagccctttctaag

SEQ ID NO: 88138 - DNA, 20 bp, Artificial Sequence
  Description of Artificial Sequence: Synthetic oligonucleotide
  Target: ATXN2; (+) strand; PAM type: YTN; PAM sequence: TTT
gacaaaagccctttctaaga

SEQ ID NO: 88139 - DNA, 20 bp, Artificial Sequence
  Description of Artificial Sequence: Synthetic oligonucleotide
  Target: ATXN2; (+) strand; PAM type: YTN; PAM sequence: TTG
acaaaagccctttctaagat

SEQ ID NO: 88140 - DNA, 20 bp, Artificial Sequence
  Description of Artificial Sequence: Synthetic oligonucleotide
  Target: ATXN2; (+) strand; PAM type: YTN; PAM sequence: CTT
tctaagatagctagaaagag

SEQ ID NO: 88141 - DNA, 20 bp, Artificial Sequence
  Description of Artificial Sequence: Synthetic oligonucleotide
  Target: ATXN2; (+) strand; PAM type: YTN; PAM sequence: TTT
ctaagatagctagaaagagg

SEQ ID NO: 88142 - DNA, 20 bp, Artificial Sequence
  Description of Artificial Sequence: Synthetic oligonucleotide
  Target: ATXN2; (+) strand; PAM type: YTN; PAM sequence: TTC
taagatagctagaaagaggt

SEQ ID NO: 88143 - DNA, 20 bp, Artificial Sequence
  Description of Artificial Sequence: Synthetic oligonucleotide
  Target: ATXN2; (+) strand; PAM type: YTN; PAM sequence: CTA
agatagctagaaagaggtca

SEQ ID NO: 88144 - DNA, 20 bp, Artificial Sequence
  Description of Artificial Sequence: Synthetic oligonucleotide
  Target: ATXN2; (+) strand; PAM type: YTN; PAM sequence: CTA
gaaagaggtcaaggtcaata

SEQ ID NO: 88145 - DNA, 20 bp, Artificial Sequence
  Description of Artificial Sequence: Synthetic oligonucleotide
  Target: ATXN2; (+) strand; PAM type: YTN; PAM sequence: CTT
ttttagaataaaataattat

SEQ ID NO: 88146 - DNA, 20 bp, Artificial Sequence
  Description of Artificial Sequence: Synthetic oligonucleotide
  Target: ATXN2; (+) strand; PAM type: YTN; PAM sequence: TTT
tttagaataaaataattatc

SEQ ID NO: 88147 - DNA, 20 bp, Artificial Sequence
  Description of Artificial Sequence: Synthetic oligonucleotide
  Target: ATXN2; (+) strand; PAM type: YTN; PAM sequence: TTT
ttagaataaaataattatcc

SEQ ID NO: 88148 - DNA, 20 bp, Artificial Sequence
  Description of Artificial Sequence: Synthetic oligonucleotide
  Target: ATXN2; (+) strand; PAM type: YTN; PAM sequence: TTT
tagaataaaataattatcct

SEQ ID NO: 88149 - DNA, 20 bp, Artificial Sequence
  Description of Artificial Sequence: Synthetic oligonucleotide
  Target: ATXN2; (+) strand; PAM type: YTN; PAM sequence: TTT
agaataaaataattatccta

SEQ ID NO: 88150 - DNA, 20 bp, Artificial Sequence
  Description of Artificial Sequence: Synthetic oligonucleotide
  Target: ATXN2; (+) strand; PAM type: YTN; PAM sequence: TTA
gaataaaataattatcctat

SEQ ID NO: 88151 - DNA, 20 bp, Artificial Sequence
  Description of Artificial Sequence: Synthetic oligonucleotide
  Target: ATXN2; (+) strand; PAM type: YTN; PAM sequence: TTA
tcctattttatcatttaact

SEQ ID NO: 88152 - DNA, 20 bp, Artificial Sequence
  Description of Artificial Sequence: Synthetic oligonucleotide
  Target: ATXN2; (+) strand; PAM type: YTN; PAM sequence: CTA
ttttatcatttaactgttca

SEQ ID NO: 88153 - DNA, 20 bp, Artificial Sequence
  Description of Artificial Sequence: Synthetic oligonucleotide
  Target: ATXN2; (+) strand; PAM type: YTN; PAM sequence: TTT
tatcatttaactgttcagta

SEQ ID NO: 88154 - DNA, 20 bp, Artificial Sequence
  Description of Artificial Sequence: Synthetic oligonucleotide
  Target: ATXN2; (+) strand; PAM type: YTN; PAM sequence: TTT
atcatttaactgttcagtaa

SEQ ID NO: 88155 - DNA, 20 bp, Artificial Sequence
  Description of Artificial Sequence: Synthetic oligonucleotide
  Target: ATXN2; (+) strand; PAM type: YTN; PAM sequence: TTA
tcatttaactgttcagtaat

SEQ ID NO: 88156 - DNA, 20 bp, Artificial Sequence
  Description of Artificial Sequence: Synthetic oligonucleotide
  Target: ATXN2; (+) strand; PAM type: YTN; PAM sequence: TTT
aactgttcagtaatgttagc

SEQ ID NO: 88157 - DNA, 20 bp, Artificial Sequence
  Description of Artificial Sequence: Synthetic oligonucleotide
  Target: ATXN2; (+) strand; PAM type: YTN; PAM sequence: TTA
actgttcagtaatgttagca

SEQ ID NO: 88158 - DNA, 20 bp, Artificial Sequence
  Description of Artificial Sequence: Synthetic oligonucleotide
  Target: ATXN2; (+) strand; PAM type: YTN; PAM sequence: CTG
ttcagtaatgttagcatatg

SEQ ID NO: 88159 - DNA, 20 bp, Artificial Sequence
  Description of Artificial Sequence: Synthetic oligonucleotide
  Target: ATXN2; (+) strand; PAM type: YTN; PAM sequence: TTC
agtaatgttagcatatgtgt

SEQ ID NO: 88160 - DNA, 20 bp, Artificial Sequence
  Description of Artificial Sequence: Synthetic oligonucleotide
  Target: ATXN2; (+) strand; PAM type: YTN; PAM sequence: TTA
gcatatgtgtattaaacata

SEQ ID NO: 88161 - DNA, 20 bp, Artificial Sequence
  Description of Artificial Sequence: Synthetic oligonucleotide
  Target: ATXN2; (+) strand; PAM type: YTN; PAM sequence: TTA
aacatactaaaaatttaaaa

SEQ ID NO: 88162 - DNA, 20 bp, Artificial Sequence
  Description of Artificial Sequence: Synthetic oligonucleotide
  Target: ATXN2; (+) strand; PAM type: YTN; PAM sequence: CTA
aaaatttaaaaacaataatc

SEQ ID NO: 88163 - DNA, 20 bp, Artificial Sequence
  Description of Artificial Sequence: Synthetic oligonucleotide
  Target: ATXN2; (+) strand; PAM type: YTN; PAM sequence: TTT
aaaaacaataatcaggattt

SEQ ID NO: 88164 - DNA, 20 bp, Artificial Sequence
  Description of Artificial Sequence: Synthetic oligonucleotide
  Target: ATXN2; (+) strand; PAM type: YTN; PAM sequence: TTA
aaaacaataatcaggatttc

SEQ ID NO: 88165 - DNA, 20 bp, Artificial Sequence
  Description of Artificial Sequence: Synthetic oligonucleotide
  Target: ATXN2; (+) strand; PAM type: YTN; PAM sequence: TTT
cattttgcagtcattagtgg

SEQ ID NO: 88166 - DNA, 20 bp, Artificial Sequence
  Description of Artificial Sequence: Synthetic oligonucleotide
  Target: ATXN2; (+) strand; PAM type: YTN; PAM sequence: TTC
attttgcagtcattagtggt

SEQ ID NO: 88167 - DNA, 20 bp, Artificial Sequence
  Description of Artificial Sequence: Synthetic oligonucleotide
  Target: ATXN2; (+) strand; PAM type: YTN; PAM sequence: TTT
tgcagtcattagtggtccta

SEQ ID NO: 88168 - DNA, 20 bp, Artificial Sequence
  Description of Artificial Sequence: Synthetic oligonucleotide
  Target: ATXN2; (+) strand; PAM type: YTN; PAM sequence: TTT
gcagtcattagtggtcctat

SEQ ID NO: 88169 - DNA, 20 bp, Artificial Sequence
  Description of Artificial Sequence: Synthetic oligonucleotide
  Target: ATXN2; (+) strand; PAM type: YTN; PAM sequence: TTG
cagtcattagtggtcctatg

SEQ ID NO: 88170 - DNA, 20 bp, Artificial Sequence
  Description of Artificial Sequence: Synthetic oligonucleotide
  Target: ATXN2; (+) strand; PAM type: YTN; PAM sequence: TTA
gtggtcctatgttttcaatg

SEQ ID NO: 88171 - DNA, 20 bp, Artificial Sequence
  Description of Artificial Sequence: Synthetic oligonucleotide
  Target: ATXN2; (+) strand; PAM type: YTN; PAM sequence: CTA
tgttttcaatgcctttggct

SEQ ID NO: 88172 - DNA, 20 bp, Artificial Sequence
  Description of Artificial Sequence: Synthetic oligonucleotide
  Target: ATXN2; (+) strand; PAM type: YTN; PAM sequence: TTT
tcaatgcctttggctatggc

SEQ ID NO: 88173 - DNA, 20 bp, Artificial Sequence
  Description of Artificial Sequence: Synthetic oligonucleotide
  Target: ATXN2; (+) strand; PAM type: YTN; PAM sequence: TTT
caatgcctttggctatggct

SEQ ID NO: 88174 - DNA, 20 bp, Artificial Sequence
  Description of Artificial Sequence: Synthetic oligonucleotide
  Target: ATXN2; (+) strand; PAM type: YTN; PAM sequence: TTC
aatgcctttggctatggcta

SEQ ID NO: 88175 - DNA, 20 bp, Artificial Sequence
  Description of Artificial Sequence: Synthetic oligonucleotide
  Target: ATXN2; (+) strand; PAM type: YTN; PAM sequence: CTT
tggctatggctataacaatt

SEQ ID NO: 88176 - DNA, 20 bp, Artificial Sequence
  Description of Artificial Sequence: Synthetic oligonucleotide
  Target: ATXN2; (+) strand; PAM type: YTN; PAM sequence: TTT
ggctatggctataacaatta

SEQ ID NO: 88177 - DNA, 20 bp, Artificial Sequence
  Description of Artificial Sequence: Synthetic oligonucleotide
  Target: ATXN2; (+) strand; PAM type: YTN; PAM sequence: TTG
gctatggctataacaattaa

SEQ ID NO: 88178 - DNA, 20 bp, Artificial Sequence
  Description of Artificial Sequence: Synthetic oligonucleotide
  Target: ATXN2; (+) strand; PAM type: YTN; PAM sequence: CTA
tggctataacaattaatgaa

SEQ ID NO: 88179 - DNA, 20 bp, Artificial Sequence
  Description of Artificial Sequence: Synthetic oligonucleotide
  Target: ATXN2; (+) strand; PAM type: YTN; PAM sequence: CTA
taacaattaatgaatgagaa

SEQ ID NO: 88180 - DNA, 20 bp, Artificial Sequence
  Description of Artificial Sequence: Synthetic oligonucleotide
  Target: ATXN2; (+) strand; PAM type: YTN; PAM sequence: TTA
atgaatgagaaaaggtgaca

SEQ ID NO: 88181 - DNA, 20 bp, Artificial Sequence
  Description of Artificial Sequence: Synthetic oligonucleotide
  Target: ATXN2; (+) strand; PAM type: YTN; PAM sequence: TTG
tcaccaacatctgggtgcat

SEQ ID NO: 88182 - DNA, 20 bp, Artificial Sequence
  Description of Artificial Sequence: Synthetic oligonucleotide
  Target: ATXN2; (+) strand; PAM type: YTN; PAM sequence: CTG
ggtgcatgttcttctgtttg

SEQ ID NO: 88183 - DNA, 20 bp, Artificial Sequence
  Description of Artificial Sequence: Synthetic oligonucleotide
  Target: ATXN2; (+) strand; PAM type: YTN; PAM sequence: TTC
ttctgtttgcattaaatgtt

SEQ ID NO: 88184 - DNA, 20 bp, Artificial Sequence
  Description of Artificial Sequence: Synthetic oligonucleotide
  Target: ATXN2; (+) strand; PAM type: YTN; PAM sequence: CTT
ctgtttgcattaaatgtttt

SEQ ID NO: 88185 - DNA, 20 bp, Artificial Sequence
  Description of Artificial Sequence: Synthetic oligonucleotide
  Target: ATXN2; (+) strand; PAM type: YTN; PAM sequence: TTC
tgtttgcattaaatgtttta

SEQ ID NO: 88186 - DNA, 20 bp, Artificial Sequence
  Description of Artificial Sequence: Synthetic oligonucleotide
  Target: ATXN2; (+) strand; PAM type: YTN; PAM sequence: CTG
tttgcattaaatgttttaaa

SEQ ID NO: 88187 - DNA, 20 bp, Artificial Sequence
  Description of Artificial Sequence: Synthetic oligonucleotide
  Target: ATXN2; (+) strand; PAM type: YTN; PAM sequence: TTT
gcattaaatgttttaaaaac

SEQ ID NO: 88188 - DNA, 20 bp, Artificial Sequence
  Description of Artificial Sequence: Synthetic oligonucleotide
  Target: ATXN2; (+) strand; PAM type: YTN; PAM sequence: TTG
cattaaatgttttaaaaacc

SEQ ID NO: 88189 - DNA, 20 bp, Artificial Sequence
  Description of Artificial Sequence: Synthetic oligonucleotide
  Target: ATXN2; (+) strand; PAM type: YTN; PAM sequence: TTA
aatgttttaaaaacctagat

SEQ ID NO: 88190 - DNA, 20 bp, Artificial Sequence
  Description of Artificial Sequence: Synthetic oligonucleotide
  Target: ATXN2; (+) strand; PAM type: YTN; PAM sequence: TTT
taaaaacctagatatgatgt

SEQ ID NO: 88191 - DNA, 20 bp, Artificial Sequence
  Description of Artificial Sequence: Synthetic oligonucleotide
  Target: ATXN2; (+) strand; PAM type: YTN; PAM sequence: TTT
aaaaacctagatatgatgta

SEQ ID NO: 88192 - DNA, 20 bp, Artificial Sequence
  Description of Artificial Sequence: Synthetic oligonucleotide
  Target: ATXN2; (+) strand; PAM type: YTN; PAM sequence: TTA
aaaacctagatatgatgtag

SEQ ID NO: 88193 - DNA, 20 bp, Artificial Sequence
  Description of Artificial Sequence: Synthetic oligonucleotide
  Target: ATXN2; (+) strand; PAM type: YTN; PAM sequence: CTA
gatatgatgtagcttaaaaa

SEQ ID NO: 88194 - DNA, 20 bp, Artificial Sequence
  Description of Artificial Sequence: Synthetic oligonucleotide
  Target: ATXN2; (+) strand; PAM type: YTN; PAM sequence: CTT
aaaaagaaaagcacaattca

SEQ ID NO: 88195 - DNA, 20 bp, Artificial Sequence
  Description of Artificial Sequence: Synthetic oligonucleotide
  Target: ATXN2; (+) strand; PAM type: YTN; PAM sequence: TTA
aaaagaaaagcacaattcat

SEQ ID NO: 88196 - DNA, 20 bp, Artificial Sequence
  Description of Artificial Sequence: Synthetic oligonucleotide
  Target: ATXN2; (+) strand; PAM type: YTN; PAM sequence: TTC
atactcaaagtatttggttc

SEQ ID NO: 88197 - DNA, 20 bp, Artificial Sequence
  Description of Artificial Sequence: Synthetic oligonucleotide
  Target: ATXN2; (+) strand; PAM type: YTN; PAM sequence: CTC
aaagtatttggttcctttga

SEQ ID NO: 88198 - DNA, 20 bp, Artificial Sequence
  Description of Artificial Sequence: Synthetic oligonucleotide
  Target: ATXN2; (+) strand; PAM type: YTN; PAM sequence: TTT
ggttcctttgagaaaattta

SEQ ID NO: 88199 - DNA, 20 bp, Artificial Sequence
  Description of Artificial Sequence: Synthetic oligonucleotide
  Target: ATXN2; (+) strand; PAM type: YTN; PAM sequence: TTG
gttcctttgagaaaatttat

SEQ ID NO: 88200 - DNA, 20 bp, Artificial Sequence
  Description of Artificial Sequence: Synthetic oligonucleotide
  Target: ATXN2; (+) strand; PAM type: YTN; PAM sequence: TTC
ctttgagaaaatttatgaca

SEQ ID NO: 88201 - DNA, 20 bp, Artificial Sequence
  Description of Artificial Sequence: Synthetic oligonucleotide
  Target: ATXN2; (+) strand; PAM type: YTN; PAM sequence: CTT
tgagaaaatttatgacaata

SEQ ID NO: 88202 - DNA, 20 bp, Artificial Sequence
  Description of Artificial Sequence: Synthetic oligonucleotide
  Target: ATXN2; (+) strand; PAM type: YTN; PAM sequence: TTT
gagaaaatttatgacaatat

SEQ ID NO: 88203 - DNA, 20 bp, Artificial Sequence
  Description of Artificial Sequence: Synthetic oligonucleotide
  Target: ATXN2; (+) strand; PAM type: YTN; PAM sequence: TTG
agaaaatttatgacaatata

SEQ ID NO: 88204 - DNA, 20 bp, Artificial Sequence
  Description of Artificial Sequence: Synthetic oligonucleotide
  Target: ATXN2; (+) strand; PAM type: YTN; PAM sequence: TTT
atgacaatatatttaatata

SEQ ID NO: 88205 - DNA, 20 bp, Artificial Sequence
  Description of Artificial Sequence: Synthetic oligonucleotide
  Target: ATXN2; (+) strand; PAM type: YTN; PAM sequence: TTA
tgacaatatatttaatatat

SEQ ID NO: 88206 - DNA, 20 bp, Artificial Sequence
  Description of Artificial Sequence: Synthetic oligonucleotide
  Target: ATXN2; (+) strand; PAM type: YTN; PAM sequence: TTT
aatatatttataaaatataa

SEQ ID NO: 88207 - DNA, 20 bp, Artificial Sequence
  Description of Artificial Sequence: Synthetic oligonucleotide
  Target: ATXN2; (+) strand; PAM type: YTN; PAM sequence: TTA
atatatttataaaatataaa

SEQ ID NO: 88208 - DNA, 20 bp, Artificial Sequence
  Description of Artificial Sequence: Synthetic oligonucleotide
  Target: ATXN2; (+) strand; PAM type: YTN; PAM sequence: TTT
ataaaatataaattgttcag

SEQ ID NO: 88209 - DNA, 20 bp, Artificial Sequence
  Description of Artificial Sequence: Synthetic oligonucleotide
  Target: ATXN2; (+) strand; PAM type: YTN; PAM sequence: TTA
taaaatataaattgttcagg

SEQ ID NO: 88210 - DNA, 20 bp, Artificial Sequence
  Description of Artificial Sequence: Synthetic oligonucleotide
  Target: ATXN2; (+) strand; PAM type: YTN; PAM sequence: TTG
ttcagggaagatgagtataa

SEQ ID NO: 88211 - DNA, 20 bp, Artificial Sequence
  Description of Artificial Sequence: Synthetic oligonucleotide
  Target: ATXN2; (+) strand; PAM type: YTN; PAM sequence: TTC
agggaagatgagtataaaat

SEQ ID NO: 88212 - DNA, 20 bp, Artificial Sequence
  Description of Artificial Sequence: Synthetic oligonucleotide
  Target: ATXN2; (+) strand; PAM type: YTN; PAM sequence: TTA
acacttctatgtaagtttgt

SEQ ID NO: 88213 - DNA, 20 bp, Artificial Sequence
  Description of Artificial Sequence: Synthetic oligonucleotide
  Target: ATXN2; (+) strand; PAM type: YTN; PAM sequence: CTT
ctatgtaagtttgttgtagt

SEQ ID NO: 88214 - DNA, 20 bp, Artificial Sequence
  Description of Artificial Sequence: Synthetic oligonucleotide
  Target: ATXN2; (+) strand; PAM type: YTN; PAM sequence: TTC
tatgtaagtttgttgtagtt

SEQ ID NO: 88215 - DNA, 20 bp, Artificial Sequence
  Description of Artificial Sequence: Synthetic oligonucleotide
  Target: ATXN2; (+) strand; PAM type: YTN; PAM sequence: CTA
tgtaagtttgttgtagttta

SEQ ID NO: 88216 - DNA, 20 bp, Artificial Sequence
  Description of Artificial Sequence: Synthetic oligonucleotide
  Target: ATXN2; (+) strand; PAM type: YTN; PAM sequence: TTT
gttgtagtttataagaatgt

SEQ ID NO: 88217 - DNA, 20 bp, Artificial Sequence
  Description of Artificial Sequence: Synthetic oligonucleotide
  Target: ATXN2; (+) strand; PAM type: YTN; PAM sequence: TTG
ttgtagtttataagaatgta

SEQ ID NO: 88218 - DNA, 20 bp, Artificial Sequence
  Description of Artificial Sequence: Synthetic oligonucleotide
  Target: ATXN2; (+) strand; PAM type: YTN; PAM sequence: TTG
tagtttataagaatgtactt

SEQ ID NO: 88219 - DNA, 20 bp, Artificial Sequence
  Description of Artificial Sequence: Synthetic oligonucleotide
  Target: ATXN2; (+) strand; PAM type: YTN; PAM sequence: TTT
ataagaatgtacttcaaatt

SEQ ID NO: 88220 - DNA, 20 bp, Artificial Sequence
  Description of Artificial Sequence: Synthetic oligonucleotide
  Target: ATXN2; (+) strand; PAM type: YTN; PAM sequence: TTA
taagaatgtacttcaaattt

SEQ ID NO: 88221 - DNA, 20 bp, Artificial Sequence
  Description of Artificial Sequence: Synthetic oligonucleotide
  Target: ATXN2; (+) strand; PAM type: YTN; PAM sequence: CTT
caaattttgtttatatttga

SEQ ID NO: 88222 - DNA, 20 bp, Artificial Sequence
  Description of Artificial Sequence: Synthetic oligonucleotide
  Target: ATXN2; (+) strand; PAM type: YTN; PAM sequence: TTC
aaattttgtttatatttgat

SEQ ID NO: 88223 - DNA, 20 bp, Artificial Sequence
  Description of Artificial Sequence: Synthetic oligonucleotide
  Target: ATXN2; (+) strand; PAM type: YTN; PAM sequence: TTT
tgtttatatttgatataata

SEQ ID NO: 88224 - DNA, 20 bp, Artificial Sequence
  Description of Artificial Sequence: Synthetic oligonucleotide
  Target: ATXN2; (+) strand; PAM type: YTN; PAM sequence: TTT
gtttatatttgatataataa

SEQ ID NO: 88225 - DNA, 20 bp, Artificial Sequence
  Description of Artificial Sequence: Synthetic oligonucleotide
  Target: ATXN2; (+) strand; PAM type: YTN; PAM sequence: TTG
tttatatttgatataataag

SEQ ID NO: 88226 - DNA, 20 bp, Artificial Sequence
  Description of Artificial Sequence: Synthetic oligonucleotide
  Target: ATXN2; (+) strand; PAM type: YTN; PAM sequence: TTT
atatttgatataataaggct

SEQ ID NO: 88227 - DNA, 20 bp, Artificial Sequence
  Description of Artificial Sequence: Synthetic oligonucleotide
  Target: ATXN2; (+) strand; PAM type: YTN; PAM sequence: TTA
tatttgatataataaggctt

SEQ ID NO: 88228 - DNA, 20 bp, Artificial Sequence
  Description of Artificial Sequence: Synthetic oligonucleotide
  Target: ATXN2; (+) strand; PAM type: YTN; PAM sequence: TTT
gatataataaggctttgaaa

SEQ ID NO: 88229 - DNA, 20 bp, Artificial Sequence
  Description of Artificial Sequence: Synthetic oligonucleotide
  Target: ATXN2; (+) strand; PAM type: YTN; PAM sequence: TTG
atataataaggctttgaaag

SEQ ID NO: 88230 - DNA, 20 bp, Artificial Sequence
  Description of Artificial Sequence: Synthetic oligonucleotide
  Target: ATXN2; (+) strand; PAM type: YTN; PAM sequence: CTT
tgaaagtctaataattcaaa

SEQ ID NO: 88231 - DNA, 20 bp, Artificial Sequence
  Description of Artificial Sequence: Synthetic oligonucleotide
  Target: ATXN2; (+) strand; PAM type: YTN; PAM sequence: TTT
gaaagtctaataattcaaat

SEQ ID NO: 88232 - DNA, 20 bp, Artificial Sequence
  Description of Artificial Sequence: Synthetic oligonucleotide
  Target: ATXN2; (+) strand; PAM type: YTN; PAM sequence: TTG
aaagtctaataattcaaata

SEQ ID NO: 88233 - DNA, 20 bp, Artificial Sequence
  Description of Artificial Sequence: Synthetic oligonucleotide
  Target: ATXN2; (+) strand; PAM type: YTN; PAM sequence: CTA
ataattcaaataaatcactg

SEQ ID NO: 88234 - DNA, 20 bp, Artificial Sequence
  Description of Artificial Sequence: Synthetic oligonucleotide
  Target: ATXN2; (+) strand; PAM type: YTN; PAM sequence: TTC
aaataaatcactgcagattt

SEQ ID NO: 88235 - DNA, 20 bp, Artificial Sequence
  Description of Artificial Sequence: Synthetic oligonucleotide
  Target: ATXN2; (+) strand; PAM type: YTN; PAM sequence: CTG
cagatttaatgaagaacatg

SEQ ID NO: 88236 - DNA, 20 bp, Artificial Sequence
  Description of Artificial Sequence: Synthetic oligonucleotide
  Target: ATXN2; (+) strand; PAM type: YTN; PAM sequence: TTT
aatgaagaacatgcttaagc

SEQ ID NO: 88237 - DNA, 20 bp, Artificial Sequence
  Description of Artificial Sequence: Synthetic oligonucleotide
  Target: ATXN2; (+) strand; PAM type: YTN; PAM sequence: TTA
atgaagaacatgcttaagca

SEQ ID NO: 88238 - DNA, 20 bp, Artificial Sequence
  Description of Artificial Sequence: Synthetic oligonucleotide
  Target: ATXN2; (+) strand; PAM type: YTN; PAM sequence: CTT
aagcagattaaattatggct

SEQ ID NO: 88239 - DNA, 20 bp, Artificial Sequence
  Description of Artificial Sequence: Synthetic oligonucleotide
  Target: ATXN2; (+) strand; PAM type: YTN; PAM sequence: TTA
agcagattaaattatggctt

SEQ ID NO: 88240 - DNA, 20 bp, Artificial Sequence
  Description of Artificial Sequence: Synthetic oligonucleotide
  Target: ATXN2; (+) strand; PAM type: YTN; PAM sequence: TTA
aattatggcttatgatggca

SEQ ID NO: 88241 - DNA, 20 bp, Artificial Sequence
  Description of Artificial Sequence: Synthetic oligonucleotide
  Target: ATXN2; (+) strand; PAM type: YTN; PAM sequence: TTA
tggcttatgatggcatagaa

SEQ ID NO: 88242 - DNA, 20 bp, Artificial Sequence
  Description of Artificial Sequence: Synthetic oligonucleotide
  Target: ATXN2; (+) strand; PAM type: YTN; PAM sequence: CTT
atgatggcatagaacaaaac

SEQ ID NO: 88243 - DNA, 20 bp, Artificial Sequence
  Description of Artificial Sequence: Synthetic oligonucleotide
  Target: ATXN2; (+) strand; PAM type: YTN; PAM sequence: TTA
tgatggcatagaacaaaaca

SEQ ID NO: 88244 - DNA, 20 bp, Artificial Sequence
  Description of Artificial Sequence: Synthetic oligonucleotide
  Target: ATXN2; (+) strand; PAM type: YTN; PAM sequence: TTC
tttcttatgttttctttttt

SEQ ID NO: 88245 - DNA, 20 bp, Artificial Sequence
  Description of Artificial Sequence: Synthetic oligonucleotide
  Target: ATXN2; (+) strand; PAM type: YTN; PAM sequence: CTT
tcttatgttttctttttttt

SEQ ID NO: 88246 - DNA, 20 bp, Artificial Sequence
  Description of Artificial Sequence: Synthetic oligonucleotide
  Target: ATXN2; (+) strand; PAM type: YTN; PAM sequence: TTT
cttatgttttctttttttta

SEQ ID NO: 88247 - DNA, 20 bp, Artificial Sequence
  Description of Artificial Sequence: Synthetic oligonucleotide
  Target: ATXN2; (+) strand; PAM type: YTN; PAM sequence: TTC
ttatgttttcttttttttaa

SEQ ID NO: 88248 - DNA, 20 bp, Artificial Sequence
  Description of Artificial Sequence: Synthetic oligonucleotide
  Target: ATXN2; (+) strand; PAM type: YTN; PAM sequence: CTT
atgttttcttttttttaaat

SEQ ID NO: 88249 - DNA, 20 bp, Artificial Sequence
  Description of Artificial Sequence: Synthetic oligonucleotide
  Target: ATXN2; (+) strand; PAM type: YTN; PAM sequence: TTA
tgttttcttttttttaaata

SEQ ID NO: 88250 - DNA, 20 bp, Artificial Sequence
  Description of Artificial Sequence: Synthetic oligonucleotide
  Target: ATXN2; (+) strand; PAM type: YTN; PAM sequence: TTT
tcttttttttaaatagagac

SEQ ID NO: 88251 - DNA, 20 bp, Artificial Sequence
  Description of Artificial Sequence: Synthetic oligonucleotide
  Target: ATXN2; (+) strand; PAM type: YTN; PAM sequence: TTT
cttttttttaaatagagaca

SEQ ID NO: 88252 - DNA, 20 bp, Artificial Sequence
  Description of Artificial Sequence: Synthetic oligonucleotide
  Target: ATXN2; (+) strand; PAM type: YTN; PAM sequence: TTC
ttttttttaaatagagacag

SEQ ID NO: 88253 - DNA, 20 bp, Artificial Sequence
  Description of Artificial Sequence: Synthetic oligonucleotide
  Target: ATXN2; (+) strand; PAM type: YTN; PAM sequence: CTT
ttttttaaatagagacaggg

SEQ ID NO: 88254 - DNA, 20 bp, Artificial Sequence
  Description of Artificial Sequence: Synthetic oligonucleotide
  Target: ATXN2; (+) strand; PAM type: YTN; PAM sequence: TTT
tttttaaatagagacagggt

SEQ ID NO: 88255 - DNA, 20 bp, Artificial Sequence
  Description of Artificial Sequence: Synthetic oligonucleotide
  Target: ATXN2; (+) strand; PAM type: YTN; PAM sequence: TTT
ttttaaatagagacagggtc

SEQ ID NO: 88256 - DNA, 20 bp, Artificial Sequence
  Description of Artificial Sequence: Synthetic oligonucleotide
  Target: ATXN2; (+) strand; PAM type: YTN; PAM sequence: TTT
tttaaatagagacagggtct

SEQ ID NO: 88257 - DNA, 20 bp, Artificial Sequence
  Description of Artificial Sequence: Synthetic oligonucleotide
  Target: ATXN2; (+) strand; PAM type: YTN; PAM sequence: TTT
ttaaatagagacagggtctt

SEQ ID NO: 88258 - DNA, 20 bp, Artificial Sequence
  Description of Artificial Sequence: Synthetic oligonucleotide
  Target: ATXN2; (+) strand; PAM type: YTN; PAM sequence: TTT
taaatagagacagggtcttg

SEQ ID NO: 88259 - DNA, 20 bp, Artificial Sequence
  Description of Artificial Sequence: Synthetic oligonucleotide
  Target: ATXN2; (+) strand; PAM type: YTN; PAM sequence: TTT
aaatagagacagggtcttgc

SEQ ID NO: 88260 - DNA, 20 bp, Artificial Sequence
  Description of Artificial Sequence: Synthetic oligonucleotide
  Target: ATXN2; (+) strand; PAM type: YTN; PAM sequence: TTA
aatagagacagggtcttgct

SEQ ID NO: 88261 - DNA, 20 bp, Artificial Sequence
  Description of Artificial Sequence: Synthetic oligonucleotide
  Target: ATXN2; (+) strand; PAM type: YTN; PAM sequence: CTT
gctctgtcacccaggctgga

SEQ ID NO: 88262 - DNA, 20 bp, Artificial Sequence
  Description of Artificial Sequence: Synthetic oligonucleotide
  Target: ATXN2; (+) strand; PAM type: YTN; PAM sequence: TTG
ctctgtcacccaggctggat

SEQ ID NO: 88263 - DNA, 20 bp, Artificial Sequence
  Description of Artificial Sequence: Synthetic oligonucleotide
  Target: ATXN2; (+) strand; PAM type: YTN; PAM sequence: CTC
tgtcacccaggctggattac

SEQ ID NO: 88264 - DNA, 20 bp, Artificial Sequence
  Description of Artificial Sequence: Synthetic oligonucleotide
  Target: ATXN2; (+) strand; PAM type: YTN; PAM sequence: CTG
tcacccaggctggattacag

SEQ ID NO: 88265 - DNA, 20 bp, Artificial Sequence
  Description of Artificial Sequence: Synthetic oligonucleotide
  Target: ATXN2; (+) strand; PAM type: YTN; PAM sequence: CTG
gattacagtggtgccatgat

SEQ ID NO: 88266 - DNA, 20 bp, Artificial Sequence
  Description of Artificial Sequence: Synthetic oligonucleotide
  Target: ATXN2; (+) strand; PAM type: YTN; PAM sequence: TTA
cagtggtgccatgatagctc

SEQ ID NO: 88267 - DNA, 20 bp, Artificial Sequence
  Description of Artificial Sequence: Synthetic oligonucleotide
  Target: ATXN2; (+) strand; PAM type: YTN; PAM sequence: CTC
actgtagcctcaaagtcctg

SEQ ID NO: 88268 - DNA, 20 bp, Artificial Sequence
  Description of Artificial Sequence: Synthetic oligonucleotide
  Target: ATXN2; (+) strand; PAM type: YTN; PAM sequence: CTG
tagcctcaaagtcctggact

SEQ ID NO: 88269 - DNA, 20 bp, Artificial Sequence
  Description of Artificial Sequence: Synthetic oligonucleotide
  Target: ATXN2; (+) strand; PAM type: YTN; PAM sequence: CTC
aaagtcctggactcaagtga

SEQ ID NO: 88270 - DNA, 20 bp, Artificial Sequence
  Description of Artificial Sequence: Synthetic oligonucleotide
  Target: ATXN2; (+) strand; PAM type: YTN; PAM sequence: CTG
gactcaagtgatcctcccat

SEQ ID NO: 88271 - DNA, 20 bp, Artificial Sequence
  Description of Artificial Sequence: Synthetic oligonucleotide
  Target: ATXN2; (+) strand; PAM type: YTN; PAM sequence: CTC
aagtgatcctcccatctcag

SEQ ID NO: 88272 - DNA, 20 bp, Artificial Sequence
  Description of Artificial Sequence: Synthetic oligonucleotide
  Target: ATXN2; (+) strand; PAM type: YTN; PAM sequence: CTC
ccatctcagcttcctgtgta

SEQ ID NO: 88273 - DNA, 20 bp, Artificial Sequence
  Description of Artificial Sequence: Synthetic oligonucleotide
  Target: ATXN2; (+) strand; PAM type: YTN; PAM sequence: CTC
agcttcctgtgtaggtggga

SEQ ID NO: 88274 - DNA, 20 bp, Artificial Sequence
  Description of Artificial Sequence: Synthetic oligonucleotide
  Target: ATXN2; (+) strand; PAM type: YTN; PAM sequence: CTT
cctgtgtaggtgggactaca

SEQ ID NO: 88275 - DNA, 20 bp, Artificial Sequence
  Description of Artificial Sequence: Synthetic oligonucleotide
  Target: ATXN2; (+) strand; PAM type: YTN; PAM sequence: TTC
ctgtgtaggtgggactacag

SEQ ID NO: 88276 - DNA, 20 bp, Artificial Sequence
  Description of Artificial Sequence: Synthetic oligonucleotide
  Target: ATXN2; (+) strand; PAM type: YTN; PAM sequence: CTG
tgtaggtgggactacaggca

SEQ ID NO: 88277 - DNA, 20 bp, Artificial Sequence
  Description of Artificial Sequence: Synthetic oligonucleotide
  Target: ATXN2; (+) strand; PAM type: YTN; PAM sequence: CTA
caggcatgtgccaccatgac

SEQ ID NO: 88278 - DNA, 20 bp, Artificial Sequence
  Description of Artificial Sequence: Synthetic oligonucleotide
  Target: ATXN2; (+) strand; PAM type: YTN; PAM sequence: CTG
ggcttttttttttttttttt

SEQ ID NO: 88279 - DNA, 20 bp, Artificial Sequence
  Description of Artificial Sequence: Synthetic oligonucleotide
  Target: ATXN2; (+) strand; PAM type: YTN; PAM sequence: CTT
tttttttttttttttttttt

SEQ ID NO: 88280 - DNA, 20 bp, Artificial Sequence
  Description of Artificial Sequence: Synthetic oligonucleotide
  Target: ATXN2; (+) strand; PAM type: YTN; PAM sequence: TTT
tttttttttttttttttttt

SEQ ID NO: 88281 - DNA, 20 bp, Artificial Sequence
  Description of Artificial Sequence: Synthetic oligonucleotide
  Target: ATXN2; (+) strand; PAM type: YTN; PAM sequence: TTT
tttttttttttttttttttt

SEQ ID NO: 88282 - DNA, 20 bp, Artificial Sequence
  Description of Artificial Sequence: Synthetic oligonucleotide
  Target: ATXN2; (+) strand; PAM type: YTN; PAM sequence: TTT
tttttttttttttttttttt

SEQ ID NO: 88283 - DNA, 20 bp, Artificial Sequence
  Description of Artificial Sequence: Synthetic oligonucleotide
  Target: ATXN2; (+) strand; PAM type: YTN; PAM sequence: TTT
tttttttttttttttttttt

SEQ ID NO: 88284 - DNA, 20 bp, Artificial Sequence
  Description of Artificial Sequence: Synthetic oligonucleotide
  Target: ATXN2; (+) strand; PAM type: YTN; PAM sequence: TTT
tttttttttttttttttttt

SEQ ID NO: 88285 - DNA, 20 bp, Artificial Sequence
  Description of Artificial Sequence: Synthetic oligonucleotide
  Target: ATXN2; (+) strand; PAM type: YTN; PAM sequence: TTT
tttttttttttttttttttt

SEQ ID NO: 88286 - DNA, 20 bp, Artificial Sequence
  Description of Artificial Sequence: Synthetic oligonucleotide
  Target: ATXN2; (+) strand; PAM type: YTN; PAM sequence: TTT
tttttttttttttttttttt

SEQ ID NO: 88287 - DNA, 20 bp, Artificial Sequence
  Description of Artificial Sequence: Synthetic oligonucleotide
  Target: ATXN2; (+) strand; PAM type: YTN; PAM sequence: TTT
tttttttttttttttttttg

SEQ ID NO: 88288 - DNA, 20 bp, Artificial Sequence
  Description of Artificial Sequence: Synthetic oligonucleotide
  Target: ATXN2; (+) strand; PAM type: YTN; PAM sequence: TTT
ttttttttttttttttttgg

SEQ ID NO: 88289 - DNA, 20 bp, Artificial Sequence
  Description of Artificial Sequence: Synthetic oligonucleotide
  Target: ATXN2; (+) strand; PAM type: YTN; PAM sequence: TTT
tttttttttttttttttggt

SEQ ID NO: 88290 - DNA, 20 bp, Artificial Sequence
  Description of Artificial Sequence: Synthetic oligonucleotide
  Target: ATXN2; (+) strand; PAM type: YTN; PAM sequence: TTT
ttttttttttttttttggta

SEQ ID NO: 88291 - DNA, 20 bp, Artificial Sequence
  Description of Artificial Sequence: Synthetic oligonucleotide
  Target: ATXN2; (+) strand; PAM type: YTN; PAM sequence: TTT
tttttttttttttttggtag

SEQ ID NO: 88292 - DNA, 20 bp, Artificial Sequence
  Description of Artificial Sequence: Synthetic oligonucleotide
  Target: ATXN2; (+) strand; PAM type: YTN; PAM sequence: TTT
ttttttttttttttggtaga

SEQ ID NO: 88293 - DNA, 20 bp, Artificial Sequence
  Description of Artificial Sequence: Synthetic oligonucleotide
  Target: ATXN2; (+) strand; PAM type: YTN; PAM sequence: TTT
tttttttttttttggtagag

SEQ ID NO: 88294 - DNA, 20 bp, Artificial Sequence
  Description of Artificial Sequence: Synthetic oligonucleotide
  Target: ATXN2; (+) strand; PAM type: YTN; PAM sequence: TTT
ttttttttttttggtagaga

SEQ ID NO: 88295 - DNA, 20 bp, Artificial Sequence
  Description of Artificial Sequence: Synthetic oligonucleotide
  Target: ATXN2; (+) strand; PAM type: YTN; PAM sequence: TTT
tttttttttttggtagagat

SEQ ID NO: 88296 - DNA, 20 bp, Artificial Sequence
  Description of Artificial Sequence: Synthetic oligonucleotide
  Target: ATXN2; (+) strand; PAM type: YTN; PAM sequence: TTT
ttttttttttggtagagatg

SEQ ID NO: 88297 - DNA, 20 bp, Artificial Sequence
  Description of Artificial Sequence: Synthetic oligonucleotide
  Target: ATXN2; (+) strand; PAM type: YTN; PAM sequence: TTT
tttttttttggtagagatgg

SEQ ID NO: 88298 - DNA, 20 bp, Artificial Sequence
  Description of Artificial Sequence: Synthetic oligonucleotide
  Target: ATXN2; (+) strand; PAM type: YTN; PAM sequence: TTT
ttttttttggtagagatggg

SEQ ID NO: 88299 - DNA, 20 bp, Artificial Sequence
  Description of Artificial Sequence: Synthetic oligonucleotide
  Target: ATXN2; (+) strand; PAM type: YTN; PAM sequence: TTT
tttttttggtagagatggga

SEQ ID NO: 88300 - DNA, 20 bp, Artificial Sequence
  Description of Artificial Sequence: Synthetic oligonucleotide
  Target: ATXN2; (+) strand; PAM type: YTN; PAM sequence: TTT
ttttttggtagagatgggat

SEQ ID NO: 88301 - DNA, 20 bp, Artificial Sequence
  Description of Artificial Sequence: Synthetic oligonucleotide
  Target: ATXN2; (+) strand; PAM type: YTN; PAM sequence: TTT
tttttggtagagatgggatc

SEQ ID NO: 88302 - DNA, 20 bp, Artificial Sequence
  Description of Artificial Sequence: Synthetic oligonucleotide
  Target: ATXN2; (+) strand; PAM type: YTN; PAM sequence: TTT
ttttggtagagatgggatct

SEQ ID NO: 88303 - DNA, 20 bp, Artificial Sequence
  Description of Artificial Sequence: Synthetic oligonucleotide
  Target: ATXN2; (+) strand; PAM type: YTN; PAM sequence: TTT
tttggtagagatgggatctc

SEQ ID NO: 88304 - DNA, 20 bp, Artificial Sequence
  Description of Artificial Sequence: Synthetic oligonucleotide
  Target: ATXN2; (+) strand; PAM type: YTN; PAM sequence: TTT
ttggtagagatgggatctcg

SEQ ID NO: 88305 - DNA, 20 bp, Artificial Sequence
  Description of Artificial Sequence: Synthetic oligonucleotide
  Target: ATXN2; (+) strand; PAM type: YTN; PAM sequence: TTT
tggtagagatgggatctcgc

SEQ ID NO: 88306 - DNA, 20 bp, Artificial Sequence
  Description of Artificial Sequence: Synthetic oligonucleotide
  Target: ATXN2; (+) strand; PAM type: YTN; PAM sequence: TTT
ggtagagatgggatctcgcc

SEQ ID NO: 88307 - DNA, 20 bp, Artificial Sequence
  Description of Artificial Sequence: Synthetic oligonucleotide
  Target: ATXN2; (+) strand; PAM type: YTN; PAM sequence: TTG
gtagagatgggatctcgcca

SEQ ID NO: 88308 - DNA, 20 bp, Artificial Sequence
  Description of Artificial Sequence: Synthetic oligonucleotide
  Target: ATXN2; (+) strand; PAM type: YTN; PAM sequence: CTC
gccatcttgcctagactggt

SEQ ID NO: 88309 - DNA, 20 bp, Artificial Sequence
  Description of Artificial Sequence: Synthetic oligonucleotide
  Target: ATXN2; (+) strand; PAM type: YTN; PAM sequence: CTT
gcctagactggtcttgaaca

SEQ ID NO: 88310 - DNA, 20 bp, Artificial Sequence
  Description of Artificial Sequence: Synthetic oligonucleotide
  Target: ATXN2; (+) strand; PAM type: YTN; PAM sequence: TTG
cctagactggtcttgaacac

SEQ ID NO: 88311 - DNA, 20 bp, Artificial Sequence
  Description of Artificial Sequence: Synthetic oligonucleotide
  Target: ATXN2; (+) strand; PAM type: YTN; PAM sequence: CTA
gactggtcttgaacacctgg

SEQ ID NO: 88312 - DNA, 20 bp, Artificial Sequence
  Description of Artificial Sequence: Synthetic oligonucleotide
  Target: ATXN2; (+) strand; PAM type: YTN; PAM sequence: CTG
gtcttgaacacctgggctaa

SEQ ID NO: 88313 - DNA, 20 bp, Artificial Sequence
  Description of Artificial Sequence: Synthetic oligonucleotide
  Target: ATXN2; (+) strand; PAM type: YTN; PAM sequence: CTT
gaacacctgggctaagcgat

SEQ ID NO: 88314 - DNA, 20 bp, Artificial Sequence
  Description of Artificial Sequence: Synthetic oligonucleotide
  Target: ATXN2; (+) strand; PAM type: YTN; PAM sequence: TTG
aacacctgggctaagcgatc

SEQ ID NO: 88315 - DNA, 20 bp, Artificial Sequence
  Description of Artificial Sequence: Synthetic oligonucleotide
  Target: ATXN2; (+) strand; PAM type: YTN; PAM sequence: CTG
ggctaagcgatcctccactt

SEQ ID NO: 88316 - DNA, 20 bp, Artificial Sequence
  Description of Artificial Sequence: Synthetic oligonucleotide
  Target: ATXN2; (+) strand; PAM type: YTN; PAM sequence: CTA
agcgatcctccacttcagcc

SEQ ID NO: 88317 - DNA, 20 bp, Artificial Sequence
  Description of Artificial Sequence: Synthetic oligonucleotide
  Target: ATXN2; (+) strand; PAM type: YTN; PAM sequence: CTC
cacttcagcctccccaagtt

SEQ ID NO: 88318 - DNA, 20 bp, Artificial Sequence
  Description of Artificial Sequence: Synthetic oligonucleotide
  Target: ATXN2; (+) strand; PAM type: YTN; PAM sequence: CTT
cagcctccccaagttcttgg

SEQ ID NO: 88319 - DNA, 20 bp, Artificial Sequence
  Description of Artificial Sequence: Synthetic oligonucleotide
  Target: ATXN2; (+) strand; PAM type: YTN; PAM sequence: TTC
agcctccccaagttcttgga

SEQ ID NO: 88320 - DNA, 20 bp, Artificial Sequence
  Description of Artificial Sequence: Synthetic oligonucleotide
  Target: ATXN2; (+) strand; PAM type: YTN; PAM sequence: CTC
cccaagttcttggattacag

SEQ ID NO: 88321 - DNA, 20 bp, Artificial Sequence
  Description of Artificial Sequence: Synthetic oligonucleotide
  Target: ATXN2; (+) strand; PAM type: YTN; PAM sequence: TTC
ttggattacaggtgtcagcc

SEQ ID NO: 88322 - DNA, 20 bp, Artificial Sequence
  Description of Artificial Sequence: Synthetic oligonucleotide
  Target: ATXN2; (+) strand; PAM type: YTN; PAM sequence: CTT
ggattacaggtgtcagccac

SEQ ID NO: 88323 - DNA, 20 bp, Artificial Sequence
  Description of Artificial Sequence: Synthetic oligonucleotide
  Target: ATXN2; (+) strand; PAM type: YTN; PAM sequence: TTG
gattacaggtgtcagccacc

SEQ ID NO: 88324 - DNA, 20 bp, Artificial Sequence
  Description of Artificial Sequence: Synthetic oligonucleotide
  Target: ATXN2; (+) strand; PAM type: YTN; PAM sequence: TTA
caggtgtcagccaccatgcc

SEQ ID NO: 88325 - DNA, 20 bp, Artificial Sequence
  Description of Artificial Sequence: Synthetic oligonucleotide
  Target: ATXN2; (+) strand; PAM type: YTN; PAM sequence: CTC
ctagtgtcctttttagggtc

SEQ ID NO: 88326 - DNA, 20 bp, Artificial Sequence
  Description of Artificial Sequence: Synthetic oligonucleotide
  Target: ATXN2; (+) strand; PAM type: YTN; PAM sequence: CTA
gtgtcctttttagggtctta

SEQ ID NO: 88327 - DNA, 20 bp, Artificial Sequence
  Description of Artificial Sequence: Synthetic oligonucleotide
  Target: ATXN2; (+) strand; PAM type: YTN; PAM sequence: CTT
tttagggtcttaagcaccac

SEQ ID NO: 88328 - DNA, 20 bp, Artificial Sequence
  Description of Artificial Sequence: Synthetic oligonucleotide
  Target: ATXN2; (+) strand; PAM type: YTN; PAM sequence: TTT
ttagggtcttaagcaccaca

SEQ ID NO: 88329 - DNA, 20 bp, Artificial Sequence
  Description of Artificial Sequence: Synthetic oligonucleotide
  Target: ATXN2; (+) strand; PAM type: YTN; PAM sequence: TTT
tagggtcttaagcaccacaa

SEQ ID NO: 88330 - DNA, 20 bp, Artificial Sequence
  Description of Artificial Sequence: Synthetic oligonucleotide
  Target: ATXN2; (+) strand; PAM type: YTN; PAM sequence: TTT
agggtcttaagcaccacaaa

SEQ ID NO: 88331 - DNA, 20 bp, Artificial Sequence
  Description of Artificial Sequence: Synthetic oligonucleotide
  Target: ATXN2; (+) strand; PAM type: YTN; PAM sequence: TTA
gggtcttaagcaccacaaag

SEQ ID NO: 88332 - DNA, 20 bp, Artificial Sequence
  Description of Artificial Sequence: Synthetic oligonucleotide
  Target: ATXN2; (+) strand; PAM type: YTN; PAM sequence: CTT
aagcaccacaaagggaatct

SEQ ID NO: 88333 - DNA, 20 bp, Artificial Sequence
  Description of Artificial Sequence: Synthetic oligonucleotide
  Target: ATXN2; (+) strand; PAM type: YTN; PAM sequence: TTA
agcaccacaaagggaatctt

SEQ ID NO: 88334 - DNA, 20 bp, Artificial Sequence
  Description of Artificial Sequence: Synthetic oligonucleotide
  Target: ATXN2; (+) strand; PAM type: YTN; PAM sequence: CTT
gattaactagtgacaatcac

SEQ ID NO: 88335 - DNA, 20 bp, Artificial Sequence
  Description of Artificial Sequence: Synthetic oligonucleotide
  Target: ATXN2; (+) strand; PAM type: YTN; PAM sequence: TTG
attaactagtgacaatcaca

SEQ ID NO: 88336 - DNA, 20 bp, Artificial Sequence
  Description of Artificial Sequence: Synthetic oligonucleotide
  Target: ATXN2; (+) strand; PAM type: YTN; PAM sequence: TTA
actagtgacaatcacaacaa

SEQ ID NO: 88337 - DNA, 20 bp, Artificial Sequence
  Description of Artificial Sequence: Synthetic oligonucleotide
  Target: ATXN2; (+) strand; PAM type: YTN; PAM sequence: CTA
gtgacaatcacaacaagtcc

SEQ ID NO: 88338 - DNA, 20 bp, Artificial Sequence
  Description of Artificial Sequence: Synthetic oligonucleotide
  Target: ATXN2; (+) strand; PAM type: YTN; PAM sequence: CTT
gctcctagcctgcctccata

SEQ ID NO: 88339 - DNA, 20 bp, Artificial Sequence
  Description of Artificial Sequence: Synthetic oligonucleotide
  Target: ATXN2; (+) strand; PAM type: YTN; PAM sequence: TTG
ctcctagcctgcctccatac

SEQ ID NO: 88340 - DNA, 20 bp, Artificial Sequence
  Description of Artificial Sequence: Synthetic oligonucleotide
  Target: ATXN2; (+) strand; PAM type: YTN; PAM sequence: CTC
ctagcctgcctccatacaga

SEQ ID NO: 88341 - DNA, 20 bp, Artificial Sequence
  Description of Artificial Sequence: Synthetic oligonucleotide
  Target: ATXN2; (+) strand; PAM type: YTN; PAM sequence: CTA
gcctgcctccatacagacag

SEQ ID NO: 88342 - DNA, 20 bp, Artificial Sequence
  Description of Artificial Sequence: Synthetic oligonucleotide
  Target: ATXN2; (+) strand; PAM type: YTN; PAM sequence: CTG
cctccatacagacagcaatt

SEQ ID NO: 88343 - DNA, 20 bp, Artificial Sequence
  Description of Artificial Sequence: Synthetic oligonucleotide
  Target: ATXN2; (+) strand; PAM type: YTN; PAM sequence: CTC
catacagacagcaattaaat

SEQ ID NO: 88344 - DNA, 20 bp, Artificial Sequence
  Description of Artificial Sequence: Synthetic oligonucleotide
  Target: ATXN2; (+) strand; PAM type: YTN; PAM sequence: TTA
aataccacctgtgtaaactg

SEQ ID NO: 88345 - DNA, 20 bp, Artificial Sequence
  Description of Artificial Sequence: Synthetic oligonucleotide
  Target: ATXN2; (+) strand; PAM type: YTN; PAM sequence: CTG
tgtaaactgcaggagagtag

SEQ ID NO: 88346 - DNA, 20 bp, Artificial Sequence
  Description of Artificial Sequence: Synthetic oligonucleotide
  Target: ATXN2; (+) strand; PAM type: YTN; PAM sequence: CTG
caggagagtagttcagattt

SEQ ID NO: 88347 - DNA, 20 bp, Artificial Sequence
  Description of Artificial Sequence: Synthetic oligonucleotide
  Target: ATXN2; (+) strand; PAM type: YTN; PAM sequence: TTC
agatttggctgagtaacttt

SEQ ID NO: 88348 - DNA, 20 bp, Artificial Sequence
  Description of Artificial Sequence: Synthetic oligonucleotide
  Target: ATXN2; (+) strand; PAM type: YTN; PAM sequence: TTT
ggctgagtaactttttcctg

SEQ ID NO: 88349 - DNA, 20 bp, Artificial Sequence
  Description of Artificial Sequence: Synthetic oligonucleotide
  Target: ATXN2; (+) strand; PAM type: YTN; PAM sequence: TTG
gctgagtaactttttcctgg

SEQ ID NO: 88350 - DNA, 20 bp, Artificial Sequence
  Description of Artificial Sequence: Synthetic oligonucleotide
  Target: ATXN2; (+) strand; PAM type: YTN; PAM sequence: CTG
agtaactttttcctggcatg

SEQ ID NO: 88351 - DNA, 20 bp, Artificial Sequence
  Description of Artificial Sequence: Synthetic oligonucleotide
  Target: ATXN2; (+) strand; PAM type: YTN; PAM sequence: CTT
tttcctggcatgaaagaacc

SEQ ID NO: 88352 - DNA, 20 bp, Artificial Sequence
  Description of Artificial Sequence: Synthetic oligonucleotide
  Target: ATXN2; (+) strand; PAM type: YTN; PAM sequence: TTT
ttcctggcatgaaagaaccg

SEQ ID NO: 88353 - DNA, 20 bp, Artificial Sequence
  Description of Artificial Sequence: Synthetic oligonucleotide
  Target: ATXN2; (+) strand; PAM type: YTN; PAM sequence: TTT
tcctggcatgaaagaaccgg

SEQ ID NO: 88354 - DNA, 20 bp, Artificial Sequence
  Description of Artificial Sequence: Synthetic oligonucleotide
  Target: ATXN2; (+) strand; PAM type: YTN; PAM sequence: TTT
cctggcatgaaagaaccggc

SEQ ID NO: 88355 - DNA, 20 bp, Artificial Sequence
  Description of Artificial Sequence: Synthetic oligonucleotide
  Target: ATXN2; (+) strand; PAM type: YTN; PAM sequence: TTC
ctggcatgaaagaaccggct

SEQ ID NO: 88356 - DNA, 20 bp, Artificial Sequence
  Description of Artificial Sequence: Synthetic oligonucleotide
  Target: ATXN2; (+) strand; PAM type: YTN; PAM sequence: CTG
gcatgaaagaaccggctcta

SEQ ID NO: 88357 - DNA, 20 bp, Artificial Sequence
  Description of Artificial Sequence: Synthetic oligonucleotide
  Target: ATXN2; (+) strand; PAM type: YTN; PAM sequence: CTC
taatgactagttcattccag

SEQ ID NO: 88358 - DNA, 20 bp, Artificial Sequence
  Description of Artificial Sequence: Synthetic oligonucleotide
  Target: ATXN2; (+) strand; PAM type: YTN; PAM sequence: CTA
atgactagttcattccagat

SEQ ID NO: 88359 - DNA, 20 bp, Artificial Sequence
  Description of Artificial Sequence: Synthetic oligonucleotide
  Target: ATXN2; (+) strand; PAM type: YTN; PAM sequence: CTA
gttcattccagatttcactg

SEQ ID NO: 88360 - DNA, 20 bp, Artificial Sequence
  Description of Artificial Sequence: Synthetic oligonucleotide
  Target: ATXN2; (+) strand; PAM type: YTN; PAM sequence: TTC
attccagatttcactggaca

SEQ ID NO: 88361 - DNA, 20 bp, Artificial Sequence
  Description of Artificial Sequence: Synthetic oligonucleotide
  Target: ATXN2; (+) strand; PAM type: YTN; PAM sequence: TTC
cagatttcactggacattag

SEQ ID NO: 88362 - DNA, 20 bp, Artificial Sequence
  Description of Artificial Sequence: Synthetic oligonucleotide
  Target: ATXN2; (+) strand; PAM type: YTN; PAM sequence: TTT
cactggacattagatctagt

SEQ ID NO: 88363 - DNA, 20 bp, Artificial Sequence
  Description of Artificial Sequence: Synthetic oligonucleotide
  Target: ATXN2; (+) strand; PAM type: YTN; PAM sequence: TTC
actggacattagatctagtg

SEQ ID NO: 88364 - DNA, 20 bp, Artificial Sequence
  Description of Artificial Sequence: Synthetic oligonucleotide
  Target: ATXN2; (+) strand; PAM type: YTN; PAM sequence: CTG
gacattagatctagtgcttt

SEQ ID NO: 88365 - DNA, 20 bp, Artificial Sequence
  Description of Artificial Sequence: Synthetic oligonucleotide
  Target: ATXN2; (+) strand; PAM type: YTN; PAM sequence: TTA
gatctagtgctttgttttgt

SEQ ID NO: 88366 - DNA, 20 bp, Artificial Sequence
  Description of Artificial Sequence: Synthetic oligonucleotide
  Target: ATXN2; (+) strand; PAM type: YTN; PAM sequence: CTA
gtgctttgttttgtttgcaa

SEQ ID NO: 88367 - DNA, 20 bp, Artificial Sequence
  Description of Artificial Sequence: Synthetic oligonucleotide
  Target: ATXN2; (+) strand; PAM type: YTN; PAM sequence: CTT
tgttttgtttgcaacatttc

SEQ ID NO: 88368 - DNA, 20 bp, Artificial Sequence
  Description of Artificial Sequence: Synthetic oligonucleotide
  Target: ATXN2; (+) strand; PAM type: YTN; PAM sequence: TTT
gttttgtttgcaacatttcc

SEQ ID NO: 88369 - DNA, 20 bp, Artificial Sequence
  Description of Artificial Sequence: Synthetic oligonucleotide
  Target: ATXN2; (+) strand; PAM type: YTN; PAM sequence: TTG
ttttgtttgcaacatttcct

SEQ ID NO: 88370 - DNA, 20 bp, Artificial Sequence
  Description of Artificial Sequence: Synthetic oligonucleotide
  Target: ATXN2; (+) strand; PAM type: YTN; PAM sequence: TTT
tgtttgcaacatttcctatt

SEQ ID NO: 88371 - DNA, 20 bp, Artificial Sequence
  Description of Artificial Sequence: Synthetic oligonucleotide
  Target: ATXN2; (+) strand; PAM type: YTN; PAM sequence: TTT
gtttgcaacatttcctattt

SEQ ID NO: 88372 - DNA, 20 bp, Artificial Sequence
  Description of Artificial Sequence: Synthetic oligonucleotide
  Target: ATXN2; (+) strand; PAM type: YTN; PAM sequence: TTG
tttgcaacatttcctatttg

SEQ ID NO: 88373 - DNA, 20 bp, Artificial Sequence
  Description of Artificial Sequence: Synthetic oligonucleotide
  Target: ATXN2; (+) strand; PAM type: YTN; PAM sequence: TTT
gcaacatttcctatttgccc

SEQ ID NO: 88374 - DNA, 20 bp, Artificial Sequence
  Description of Artificial Sequence: Synthetic oligonucleotide
  Target: ATXN2; (+) strand; PAM type: YTN; PAM sequence: TTG
caacatttcctatttgccca

SEQ ID NO: 88375 - DNA, 20 bp, Artificial Sequence
  Description of Artificial Sequence: Synthetic oligonucleotide
  Target: ATXN2; (+) strand; PAM type: YTN; PAM sequence: TTT
cctatttgcccacacataaa

SEQ ID NO: 88376 - DNA, 20 bp, Artificial Sequence
  Description of Artificial Sequence: Synthetic oligonucleotide
  Target: ATXN2; (+) strand; PAM type: YTN; PAM sequence: TTC
ctatttgcccacacataaat

SEQ ID NO: 88377 - DNA, 20 bp, Artificial Sequence
  Description of Artificial Sequence: Synthetic oligonucleotide
  Target: ATXN2; (+) strand; PAM type: YTN; PAM sequence: CTA
tttgcccacacataaatgga

SEQ ID NO: 88378 - DNA, 20 bp, Artificial Sequence
  Description of Artificial Sequence: Synthetic oligonucleotide
  Target: ATXN2; (+) strand; PAM type: YTN; PAM sequence: TTT
gcccacacataaatggactt

SEQ ID NO: 88379 - DNA, 20 bp, Artificial Sequence
  Description of Artificial Sequence: Synthetic oligonucleotide
  Target: ATXN2; (+) strand; PAM type: YTN; PAM sequence: TTG
cccacacataaatggacttt

SEQ ID NO: 88380 - DNA, 20 bp, Artificial Sequence
  Description of Artificial Sequence: Synthetic oligonucleotide
  Target: ATXN2; (+) strand; PAM type: YTN; PAM sequence: CTT
tggggtctaaggccccactg

SEQ ID NO: 88381 - DNA, 20 bp, Artificial Sequence
  Description of Artificial Sequence: Synthetic oligonucleotide
  Target: ATXN2; (+) strand; PAM type: YTN; PAM sequence: TTT
ggggtctaaggccccactgc

SEQ ID NO: 88382 - DNA, 20 bp, Artificial Sequence
  Description of Artificial Sequence: Synthetic oligonucleotide
  Target: ATXN2; (+) strand; PAM type: YTN; PAM sequence: TTG
gggtctaaggccccactgct

SEQ ID NO: 88383 - DNA, 20 bp, Artificial Sequence
  Description of Artificial Sequence: Synthetic oligonucleotide
  Target: ATXN2; (+) strand; PAM type: YTN; PAM sequence: CTA
aggccccactgctcttcaaa

SEQ ID NO: 88384 - DNA, 20 bp, Artificial Sequence
  Description of Artificial Sequence: Synthetic oligonucleotide
  Target: ATXN2; (+) strand; PAM type: YTN; PAM sequence: CTG
ctcttcaaatggacatgttc

SEQ ID NO: 88385 - DNA, 20 bp, Artificial Sequence
  Description of Artificial Sequence: Synthetic oligonucleotide
  Target: ATXN2; (+) strand; PAM type: YTN; PAM sequence: CTC
ttcaaatggacatgttctag

SEQ ID NO: 88386 - DNA, 20 bp, Artificial Sequence
  Description of Artificial Sequence: Synthetic oligonucleotide
  Target: ATXN2; (+) strand; PAM type: YTN; PAM sequence: CTT
caaatggacatgttctagga

SEQ ID NO: 88387 - DNA, 20 bp, Artificial Sequence
  Description of Artificial Sequence: Synthetic oligonucleotide
  Target: ATXN2; (+) strand; PAM type: YTN; PAM sequence: TTC
aaatggacatgttctaggaa

SEQ ID NO: 88388 - DNA, 20 bp, Artificial Sequence
  Description of Artificial Sequence: Synthetic oligonucleotide
  Target: ATXN2; (+) strand; PAM type: YTN; PAM sequence: TTC
taggaagtagttatgaaaat

SEQ ID NO: 88389 - DNA, 20 bp, Artificial Sequence
  Description of Artificial Sequence: Synthetic oligonucleotide
  Target: ATXN2; (+) strand; PAM type: YTN; PAM sequence: CTA
ggaagtagttatgaaaatca

SEQ ID NO: 88390 - DNA, 20 bp, Artificial Sequence
  Description of Artificial Sequence: Synthetic oligonucleotide
  Target: ATXN2; (+) strand; PAM type: YTN; PAM sequence: TTA
tgaaaatcatctgtacctca

SEQ ID NO: 88391 - DNA, 20 bp, Artificial Sequence
  Description of Artificial Sequence: Synthetic oligonucleotide
  Target: ATXN2; (+) strand; PAM type: YTN; PAM sequence: CTG
tacctcaaacacagtattta

SEQ ID NO: 88392 - DNA, 20 bp, Artificial Sequence
  Description of Artificial Sequence: Synthetic oligonucleotide
  Target: ATXN2; (+) strand; PAM type: YTN; PAM sequence: CTC
aaacacagtatttaccctat

SEQ ID NO: 88393 - DNA, 20 bp, Artificial Sequence
  Description of Artificial Sequence: Synthetic oligonucleotide
  Target: ATXN2; (+) strand; PAM type: YTN; PAM sequence: TTT
accctataggctgtttcaaa

SEQ ID NO: 88394 - DNA, 20 bp, Artificial Sequence
  Description of Artificial Sequence: Synthetic oligonucleotide
  Target: ATXN2; (+) strand; PAM type: YTN; PAM sequence: TTA
ccctataggctgtttcaaaa

SEQ ID NO: 88395 - DNA, 20 bp, Artificial Sequence
  Description of Artificial Sequence: Synthetic oligonucleotide
  Target: ATXN2; (+) strand; PAM type: YTN; PAM sequence: CTA
taggctgtttcaaaaccaat

SEQ ID NO: 88396 - DNA, 20 bp, Artificial Sequence
  Description of Artificial Sequence: Synthetic oligonucleotide
  Target: ATXN2; (+) strand; PAM type: YTN; PAM sequence: CTG
tttcaaaaccaatgaacatt

SEQ ID NO: 88397 - DNA, 20 bp, Artificial Sequence
  Description of Artificial Sequence: Synthetic oligonucleotide
  Target: ATXN2; (+) strand; PAM type: YTN; PAM sequence: TTT
caaaaccaatgaacattcat

SEQ ID NO: 88398 - DNA, 20 bp, Artificial Sequence
  Description of Artificial Sequence: Synthetic oligonucleotide
  Target: ATXN2; (+) strand; PAM type: YTN; PAM sequence: TTC
aaaaccaatgaacattcatc

SEQ ID NO: 88399 - DNA, 20 bp, Artificial Sequence
  Description of Artificial Sequence: Synthetic oligonucleotide
  Target: ATXN2; (+) strand; PAM type: YTN; PAM sequence: TTC
atccaaaagatgaagccaga

SEQ ID NO: 88400 - DNA, 20 bp, Artificial Sequence
  Description of Artificial Sequence: Synthetic oligonucleotide
  Target: ATXN2; (+) strand; PAM type: YTN; PAM sequence: TTG
gcagtgaatgaacacaatga

SEQ ID NO: 88401 - DNA, 20 bp, Artificial Sequence
  Description of Artificial Sequence: Synthetic oligonucleotide
  Target: ATXN2; (+) strand; PAM type: YTN; PAM sequence: TTC
ggctcaacattacagtatta

SEQ ID NO: 88402 - DNA, 20 bp, Artificial Sequence
  Description of Artificial Sequence: Synthetic oligonucleotide
  Target: ATXN2; (+) strand; PAM type: YTN; PAM sequence: CTC
aacattacagtattattgct

SEQ ID NO: 88403 - DNA, 20 bp, Artificial Sequence
  Description of Artificial Sequence: Synthetic oligonucleotide
  Target: ATXN2; (+) strand; PAM type: YTN; PAM sequence: TTA
cagtattattgctacaatgt

SEQ ID NO: 88404 - DNA, 20 bp, Artificial Sequence
  Description of Artificial Sequence: Synthetic oligonucleotide
  Target: ATXN2; (+) strand; PAM type: YTN; PAM sequence: TTA
ttgctacaatgtctcaaaag

SEQ ID NO: 88405 - DNA, 20 bp, Artificial Sequence
  Description of Artificial Sequence: Synthetic oligonucleotide
  Target: ATXN2; (+) strand; PAM type: YTN; PAM sequence: TTG
ctacaatgtctcaaaagcat

SEQ ID NO: 88406 - DNA, 20 bp, Artificial Sequence
  Description of Artificial Sequence: Synthetic oligonucleotide
  Target: ATXN2; (+) strand; PAM type: YTN; PAM sequence: CTA
caatgtctcaaaagcatgca

SEQ ID NO: 88407 - DNA, 20 bp, Artificial Sequence
  Description of Artificial Sequence: Synthetic oligonucleotide
  Target: ATXN2; (+) strand; PAM type: YTN; PAM sequence: CTC
aaaagcatgcatacacaaat

SEQ ID NO: 88408 - DNA, 20 bp, Artificial Sequence
  Description of Artificial Sequence: Synthetic oligonucleotide
  Target: ATXN2; (+) strand; PAM type: YTN; PAM sequence: CTA
ctctccaaatgcaatggaaa

SEQ ID NO: 88409 - DNA, 20 bp, Artificial Sequence
  Description of Artificial Sequence: Synthetic oligonucleotide
  Target: ATXN2; (+) strand; PAM type: YTN; PAM sequence: CTC
tccaaatgcaatggaaattt

SEQ ID NO: 88410 - DNA, 20 bp, Artificial Sequence
  Description of Artificial Sequence: Synthetic oligonucleotide
  Target: ATXN2; (+) strand; PAM type: YTN; PAM sequence: CTC
caaatgcaatggaaatttta

SEQ ID NO: 88411 - DNA, 20 bp, Artificial Sequence
  Description of Artificial Sequence: Synthetic oligonucleotide
  Target: ATXN2; (+) strand; PAM type: YTN; PAM sequence: TTT
tagcttaaaagtttcagatc

SEQ ID NO: 88412 - DNA, 20 bp, Artificial Sequence
  Description of Artificial Sequence: Synthetic oligonucleotide
  Target: ATXN2; (+) strand; PAM type: YTN; PAM sequence: TTT
agcttaaaagtttcagatct

SEQ ID NO: 88413 - DNA, 20 bp, Artificial Sequence
  Description of Artificial Sequence: Synthetic oligonucleotide
  Target: ATXN2; (+) strand; PAM type: YTN; PAM sequence: TTA
gcttaaaagtttcagatctg

SEQ ID NO: 88414 - DNA, 20 bp, Artificial Sequence
  Description of Artificial Sequence: Synthetic oligonucleotide
  Target: ATXN2; (+) strand; PAM type: YTN; PAM sequence: CTT
aaaagtttcagatctgattc

SEQ ID NO: 88415 - DNA, 20 bp, Artificial Sequence
  Description of Artificial Sequence: Synthetic oligonucleotide
  Target: ATXN2; (+) strand; PAM type: YTN; PAM sequence: TTA
aaagtttcagatctgattcc

SEQ ID NO: 88416 - DNA, 20 bp, Artificial Sequence
  Description of Artificial Sequence: Synthetic oligonucleotide
  Target: ATXN2; (+) strand; PAM type: YTN; PAM sequence: TTT
cagatctgattccaagggga

SEQ ID NO: 88417 - DNA, 20 bp, Artificial Sequence
  Description of Artificial Sequence: Synthetic oligonucleotide
  Target: ATXN2; (+) strand; PAM type: YTN; PAM sequence: TTC
agatctgattccaaggggag

SEQ ID NO: 88418 - DNA, 20 bp, Artificial Sequence
  Description of Artificial Sequence: Synthetic oligonucleotide
  Target: ATXN2; (+) strand; PAM type: YTN; PAM sequence: CTG
attccaaggggagtatgcca

SEQ ID NO: 88419 - DNA, 20 bp, Artificial Sequence
  Description of Artificial Sequence: Synthetic oligonucleotide
  Target: ATXN2; (+) strand; PAM type: YTN; PAM sequence: TTC
caaggggagtatgccagaaa

SEQ ID NO: 88420 - DNA, 20 bp, Artificial Sequence
  Description of Artificial Sequence: Synthetic oligonucleotide
  Target: ATXN2; (+) strand; PAM type: YTN; PAM sequence: TTC
tttccacttgttaaatcatg

SEQ ID NO: 88421 - DNA, 20 bp, Artificial Sequence
  Description of Artificial Sequence: Synthetic oligonucleotide
  Target: ATXN2; (+) strand; PAM type: YTN; PAM sequence: CTT
tccacttgttaaatcatgat

SEQ ID NO: 88422 - DNA, 20 bp, Artificial Sequence
  Description of Artificial Sequence: Synthetic oligonucleotide
  Target: ATXN2; (+) strand; PAM type: YTN; PAM sequence: TTT
ccacttgttaaatcatgatg

SEQ ID NO: 88423 - DNA, 20 bp, Artificial Sequence
  Description of Artificial Sequence: Synthetic oligonucleotide
  Target: ATXN2; (+) strand; PAM type: YTN; PAM sequence: TTC
cacttgttaaatcatgatgt

SEQ ID NO: 88424 - DNA, 20 bp, Artificial Sequence
  Description of Artificial Sequence: Synthetic oligonucleotide
  Target: ATXN2; (+) strand; PAM type: YTN; PAM sequence: CTT
gttaaatcatgatgtattca

SEQ ID NO: 88425 - DNA, 20 bp, Artificial Sequence
  Description of Artificial Sequence: Synthetic oligonucleotide
  Target: ATXN2; (+) strand; PAM type: YTN; PAM sequence: TTG
ttaaatcatgatgtattcac

SEQ ID NO: 88426 - DNA, 20 bp, Artificial Sequence
  Description of Artificial Sequence: Synthetic oligonucleotide
  Target: ATXN2; (+) strand; PAM type: YTN; PAM sequence: TTA
aatcatgatgtattcaccag

SEQ ID NO: 88427 - DNA, 20 bp, Artificial Sequence
  Description of Artificial Sequence: Synthetic oligonucleotide
  Target: ATXN2; (+) strand; PAM type: YTN; PAM sequence: TTC
accagaaatgtataaacaat

SEQ ID NO: 88428 - DNA, 20 bp, Artificial Sequence
  Description of Artificial Sequence: Synthetic oligonucleotide
  Target: ATXN2; (+) strand; PAM type: YTN; PAM sequence: CTT
ttaacctaagcctttagcaa

SEQ ID NO: 88429 - DNA, 20 bp, Artificial Sequence
  Description of Artificial Sequence: Synthetic oligonucleotide
  Target: ATXN2; (+) strand; PAM type: YTN; PAM sequence: TTT
taacctaagcctttagcaaa

SEQ ID NO: 88430 - DNA, 20 bp, Artificial Sequence
  Description of Artificial Sequence: Synthetic oligonucleotide
  Target: ATXN2; (+) strand; PAM type: YTN; PAM sequence: TTT
aacctaagcctttagcaaac

SEQ ID NO: 88431 - DNA, 20 bp, Artificial Sequence
  Description of Artificial Sequence: Synthetic oligonucleotide
  Target: ATXN2; (+) strand; PAM type: YTN; PAM sequence: TTA
acctaagcctttagcaaaca

SEQ ID NO: 88432 - DNA, 20 bp, Artificial Sequence
  Description of Artificial Sequence: Synthetic oligonucleotide
  Target: ATXN2; (+) strand; PAM type: YTN; PAM sequence: CTA
agcctttagcaaacaggaaa

SEQ ID NO: 88433 - DNA, 20 bp, Artificial Sequence
  Description of Artificial Sequence: Synthetic oligonucleotide
  Target: ATXN2; (+) strand; PAM type: YTN; PAM sequence: CTT
tagcaaacaggaaaattgtt

SEQ ID NO: 88434 - DNA, 20 bp, Artificial Sequence
  Description of Artificial Sequence: Synthetic oligonucleotide
  Target: ATXN2; (+) strand; PAM type: YTN; PAM sequence: TTT
agcaaacaggaaaattgtta

SEQ ID NO: 88435 - DNA, 20 bp, Artificial Sequence
  Description of Artificial Sequence: Synthetic oligonucleotide
  Target: ATXN2; (+) strand; PAM type: YTN; PAM sequence: TTA
gcaaacaggaaaattgttaa

SEQ ID NO: 88436 - DNA, 20 bp, Artificial Sequence
  Description of Artificial Sequence: Synthetic oligonucleotide
  Target: ATXN2; (+) strand; PAM type: YTN; PAM sequence: TTG
ttaaaatatatacaagttgc

SEQ ID NO: 88437 - DNA, 20 bp, Artificial Sequence
  Description of Artificial Sequence: Synthetic oligonucleotide
  Target: ATXN2; (+) strand; PAM type: YTN; PAM sequence: TTA
aaatatatacaagttgcata

SEQ ID NO: 88438 - DNA, 20 bp, Artificial Sequence
  Description of Artificial Sequence: Synthetic oligonucleotide
  Target: ATXN2; (+) strand; PAM type: YTN; PAM sequence: TTG
cataaaagccagcatgataa

SEQ ID NO: 88439 - DNA, 20 bp, Artificial Sequence
  Description of Artificial Sequence: Synthetic oligonucleotide
  Target: ATXN2; (+) strand; PAM type: YTN; PAM sequence: CTT
tgcacgcatattcagtcccc

SEQ ID NO: 88440 - DNA, 20 bp, Artificial Sequence
  Description of Artificial Sequence: Synthetic oligonucleotide
  Target: ATXN2; (+) strand; PAM type: YTN; PAM sequence: TTT
gcacgcatattcagtccccg

SEQ ID NO: 88441 - DNA, 20 bp, Artificial Sequence
  Description of Artificial Sequence: Synthetic oligonucleotide
  Target: ATXN2; (+) strand; PAM type: YTN; PAM sequence: TTG
cacgcatattcagtccccgt

SEQ ID NO: 88442 - DNA, 20 bp, Artificial Sequence
  Description of Artificial Sequence: Synthetic oligonucleotide
  Target: ATXN2; (+) strand; PAM type: YTN; PAM sequence: TTC
agtccccgttaagacaacta

SEQ ID NO: 88443 - DNA, 20 bp, Artificial Sequence
  Description of Artificial Sequence: Synthetic oligonucleotide
  Target: ATXN2; (+) strand; PAM type: YTN; PAM sequence: TTA
agacaactaaagacaagtca

SEQ ID NO: 88444 - DNA, 20 bp, Artificial Sequence
  Description of Artificial Sequence: Synthetic oligonucleotide
  Target: ATXN2; (+) strand; PAM type: YTN; PAM sequence: CTA
aagacaagtcaaatgacggg

SEQ ID NO: 88445 - DNA, 20 bp, Artificial Sequence
  Description of Artificial Sequence: Synthetic oligonucleotide
  Target: ATXN2; (+) strand; PAM type: YTN; PAM sequence: TTA
gtttgtcagtatcttttaca

SEQ ID NO: 88446 - DNA, 20 bp, Artificial Sequence
  Description of Artificial Sequence: Synthetic oligonucleotide
  Target: ATXN2; (+) strand; PAM type: YTN; PAM sequence: TTT
gtcagtatcttttacaatta

SEQ ID NO: 88447 - DNA, 20 bp, Artificial Sequence
  Description of Artificial Sequence: Synthetic oligonucleotide
  Target: ATXN2; (+) strand; PAM type: YTN; PAM sequence: TTG
tcagtatcttttacaattaa

SEQ ID NO: 88448 - DNA, 20 bp, Artificial Sequence
  Description of Artificial Sequence: Synthetic oligonucleotide
  Target: ATXN2; (+) strand; PAM type: YTN; PAM sequence: CTT
ttacaattaaattacggatg

SEQ ID NO: 88449 - DNA, 20 bp, Artificial Sequence
  Description of Artificial Sequence: Synthetic oligonucleotide
  Target: ATXN2; (+) strand; PAM type: YTN; PAM sequence: TTT
tacaattaaattacggatgg

SEQ ID NO: 88450 - DNA, 20 bp, Artificial Sequence
  Description of Artificial Sequence: Synthetic oligonucleotide
  Target: ATXN2; (+) strand; PAM type: YTN; PAM sequence: TTT
acaattaaattacggatggg

SEQ ID NO: 88451 - DNA, 20 bp, Artificial Sequence
  Description of Artificial Sequence: Synthetic oligonucleotide
  Target: ATXN2; (+) strand; PAM type: YTN; PAM sequence: TTA
caattaaattacggatgggc

SEQ ID NO: 88452 - DNA, 20 bp, Artificial Sequence
  Description of Artificial Sequence: Synthetic oligonucleotide
  Target: ATXN2; (+) strand; PAM type: YTN; PAM sequence: TTA
aattacggatgggcctcttg

SEQ ID NO: 88453 - DNA, 20 bp, Artificial Sequence
  Description of Artificial Sequence: Synthetic oligonucleotide
  Target: ATXN2; (+) strand; PAM type: YTN; PAM sequence: TTA
cggatgggcctcttgaaaaa

SEQ ID NO: 88454 - DNA, 20 bp, Artificial Sequence
  Description of Artificial Sequence: Synthetic oligonucleotide
  Target: ATXN2; (+) strand; PAM type: YTN; PAM sequence: CTC
ttgaaaaaaatgttttccaa

SEQ ID NO: 88455 - DNA, 20 bp, Artificial Sequence
  Description of Artificial Sequence: Synthetic oligonucleotide
  Target: ATXN2; (+) strand; PAM type: YTN; PAM sequence: CTT
gaaaaaaatgttttccaaaa

SEQ ID NO: 88456 - DNA, 20 bp, Artificial Sequence
  Description of Artificial Sequence: Synthetic oligonucleotide
  Target: ATXN2; (+) strand; PAM type: YTN; PAM sequence: TTG
aaaaaaatgttttccaaaat

SEQ ID NO: 88457 - DNA, 20 bp, Artificial Sequence
  Description of Artificial Sequence: Synthetic oligonucleotide
  Target: ATXN2; (+) strand; PAM type: YTN; PAM sequence: TTT
tccaaaatgtagcaatcaca

SEQ ID NO: 88458 - DNA, 20 bp, Artificial Sequence
  Description of Artificial Sequence: Synthetic oligonucleotide
  Target: ATXN2; (+) strand; PAM type: YTN; PAM sequence: TTT
ccaaaatgtagcaatcacac

SEQ ID NO: 88459 - DNA, 20 bp, Artificial Sequence
  Description of Artificial Sequence: Synthetic oligonucleotide
  Target: ATXN2; (+) strand; PAM type: YTN; PAM sequence: TTC
caaaatgtagcaatcacaca

SEQ ID NO: 88460 - DNA, 20 bp, Artificial Sequence
  Description of Artificial Sequence: Synthetic oligonucleotide
  Target: ATXN2; (+) strand; PAM type: YTN; PAM sequence: TTT
tttatttaaaatgcgtaatc

SEQ ID NO: 88461 - DNA, 20 bp, Artificial Sequence
  Description of Artificial Sequence: Synthetic oligonucleotide
  Target: ATXN2; (+) strand; PAM type: YTN; PAM sequence: TTT
ttatttaaaatgcgtaatcc

SEQ ID NO: 88462 - DNA, 20 bp, Artificial Sequence
  Description of Artificial Sequence: Synthetic oligonucleotide
  Target: ATXN2; (+) strand; PAM type: YTN; PAM sequence: TTT
tatttaaaatgcgtaatcca

SEQ ID NO: 88463 - DNA, 20 bp, Artificial Sequence
  Description of Artificial Sequence: Synthetic oligonucleotide
  Target: ATXN2; (+) strand; PAM type: YTN; PAM sequence: TTT
atttaaaatgcgtaatccac

SEQ ID NO: 88464 - DNA, 20 bp, Artificial Sequence
  Description of Artificial Sequence: Synthetic oligonucleotide
  Target: ATXN2; (+) strand; PAM type: YTN; PAM sequence: TTA
tttaaaatgcgtaatccaca

SEQ ID NO: 88465 - DNA, 20 bp, Artificial Sequence
  Description of Artificial Sequence: Synthetic oligonucleotide
  Target: ATXN2; (+) strand; PAM type: YTN; PAM sequence: TTT
aaaatgcgtaatccacaata

SEQ ID NO: 88466 - DNA, 20 bp, Artificial Sequence
  Description of Artificial Sequence: Synthetic oligonucleotide
  Target: ATXN2; (+) strand; PAM type: YTN; PAM sequence: TTA
aaatgcgtaatccacaatac

SEQ ID NO: 88467 - DNA, 20 bp, Artificial Sequence
  Description of Artificial Sequence: Synthetic oligonucleotide
  Target: ATXN2; (+) strand; PAM type: YTN; PAM sequence: TTG
aaagtgataatgtggaaaat

SEQ ID NO: 88468 - DNA, 20 bp, Artificial Sequence
  Description of Artificial Sequence: Synthetic oligonucleotide
  Target: ATXN2; (+) strand; PAM type: YTN; PAM sequence: TTA
agactggacttaactgtttt

SEQ ID NO: 88469 - DNA, 20 bp, Artificial Sequence
  Description of Artificial Sequence: Synthetic oligonucleotide
  Target: ATXN2; (+) strand; PAM type: YTN; PAM sequence: CTG
gacttaactgttttataaaa

SEQ ID NO: 88470 - DNA, 20 bp, Artificial Sequence
  Description of Artificial Sequence: Synthetic oligonucleotide
  Target: ATXN2; (+) strand; PAM type: YTN; PAM sequence: CTT
aactgttttataaaactaaa

SEQ ID NO: 88471 - DNA, 20 bp, Artificial Sequence
  Description of Artificial Sequence: Synthetic oligonucleotide
  Target: ATXN2; (+) strand; PAM type: YTN; PAM sequence: TTA
actgttttataaaactaaac

SEQ ID NO: 88472 - DNA, 20 bp, Artificial Sequence
  Description of Artificial Sequence: Synthetic oligonucleotide
  Target: ATXN2; (+) strand; PAM type: YTN; PAM sequence: CTG
ttttataaaactaaacacct

SEQ ID NO: 88473 - DNA, 20 bp, Artificial Sequence
  Description of Artificial Sequence: Synthetic oligonucleotide
  Target: ATXN2; (+) strand; PAM type: YTN; PAM sequence: TTT
tataaaactaaacacctttg

SEQ ID NO: 88474 - DNA, 20 bp, Artificial Sequence
  Description of Artificial Sequence: Synthetic oligonucleotide
  Target: ATXN2; (+) strand; PAM type: YTN; PAM sequence: TTT
ataaaactaaacacctttga

SEQ ID NO: 88475 - DNA, 20 bp, Artificial Sequence
  Description of Artificial Sequence: Synthetic oligonucleotide
  Target: ATXN2; (+) strand; PAM type: YTN; PAM sequence: TTA
taaaactaaacacctttgat

SEQ ID NO: 88476 - DNA, 20 bp, Artificial Sequence
  Description of Artificial Sequence: Synthetic oligonucleotide
  Target: ATXN2; (+) strand; PAM type: YTN; PAM sequence: CTA
aacacctttgatcatataca

SEQ ID NO: 88477 - DNA, 20 bp, Artificial Sequence
  Description of Artificial Sequence: Synthetic oligonucleotide
  Target: ATXN2; (+) strand; PAM type: YTN; PAM sequence: CTT
tgatcatatacaaattccta

SEQ ID NO: 88478 - DNA, 20 bp, Artificial Sequence
  Description of Artificial Sequence: Synthetic oligonucleotide
  Target: ATXN2; (+) strand; PAM type: YTN; PAM sequence: TTT
gatcatatacaaattcctat

SEQ ID NO: 88479 - DNA, 20 bp, Artificial Sequence
  Description of Artificial Sequence: Synthetic oligonucleotide
  Target: ATXN2; (+) strand; PAM type: YTN; PAM sequence: TTG
atcatatacaaattcctatc

SEQ ID NO: 88480 - DNA, 20 bp, Artificial Sequence
  Description of Artificial Sequence: Synthetic oligonucleotide
  Target: ATXN2; (+) strand; PAM type: YTN; PAM sequence: TTC
ctatcagcagtgagcctttg

SEQ ID NO: 88481 - DNA, 20 bp, Artificial Sequence
  Description of Artificial Sequence: Synthetic oligonucleotide
  Target: ATXN2; (+) strand; PAM type: YTN; PAM sequence: CTA
tcagcagtgagcctttgtgg

SEQ ID NO: 88482 - DNA, 20 bp, Artificial Sequence
  Description of Artificial Sequence: Synthetic oligonucleotide
  Target: ATXN2; (+) strand; PAM type: YTN; PAM sequence: CTT
tgtggcagacaagaacctcc

SEQ ID NO: 88483 - DNA, 20 bp, Artificial Sequence
  Description of Artificial Sequence: Synthetic oligonucleotide
  Target: ATXN2; (+) strand; PAM type: YTN; PAM sequence: TTT
gtggcagacaagaacctcca

SEQ ID NO: 88484 - DNA, 20 bp, Artificial Sequence
  Description of Artificial Sequence: Synthetic oligonucleotide
  Target: ATXN2; (+) strand; PAM type: YTN; PAM sequence: TTG
tggcagacaagaacctccag

SEQ ID NO: 88485 - DNA, 20 bp, Artificial Sequence
  Description of Artificial Sequence: Synthetic oligonucleotide
  Target: ATXN2; (+) strand; PAM type: YTN; PAM sequence: CTC
caggaagaaagcataagctg

SEQ ID NO: 88486 - DNA, 20 bp, Artificial Sequence
  Description of Artificial Sequence: Synthetic oligonucleotide
  Target: ATXN2; (+) strand; PAM type: YTN; PAM sequence: CTG
tgggttacaggtgacaggaa

SEQ ID NO: 88487 - DNA, 20 bp, Artificial Sequence
  Description of Artificial Sequence: Synthetic oligonucleotide
  Target: ATXN2; (+) strand; PAM type: YTN; PAM sequence: TTA
caggtgacaggaaggatgat

SEQ ID NO: 88488 - DNA, 20 bp, Artificial Sequence
  Description of Artificial Sequence: Synthetic oligonucleotide
  Target: ATXN2; (+) strand; PAM type: YTN; PAM sequence: TTG
ctgctgcccaagtcctattc

SEQ ID NO: 88489 - DNA, 20 bp, Artificial Sequence
  Description of Artificial Sequence: Synthetic oligonucleotide
  Target: ATXN2; (+) strand; PAM type: YTN; PAM sequence: CTG
ctgcccaagtcctattctca

SEQ ID NO: 88490 - DNA, 20 bp, Artificial Sequence
  Description of Artificial Sequence: Synthetic oligonucleotide
  Target: ATXN2; (+) strand; PAM type: YTN; PAM sequence: CTG
cccaagtcctattctcatta

SEQ ID NO: 88491 - DNA, 20 bp, Artificial Sequence
  Description of Artificial Sequence: Synthetic oligonucleotide
  Target: ATXN2; (+) strand; PAM type: YTN; PAM sequence: CTA
ttctcattaacctacggaat

SEQ ID NO: 88492 - DNA, 20 bp, Artificial Sequence
  Description of Artificial Sequence: Synthetic oligonucleotide
  Target: ATXN2; (+) strand; PAM type: YTN; PAM sequence: TTC
tcattaacctacggaatgtt

SEQ ID NO: 88493 - DNA, 20 bp, Artificial Sequence
  Description of Artificial Sequence: Synthetic oligonucleotide
  Target: ATXN2; (+) strand; PAM type: YTN; PAM sequence: CTC
attaacctacggaatgttaa

SEQ ID NO: 88494 - DNA, 20 bp, Artificial Sequence
  Description of Artificial Sequence: Synthetic oligonucleotide
  Target: ATXN2; (+) strand; PAM type: YTN; PAM sequence: TTA
acctacggaatgttaaaact

SEQ ID NO: 88495 - DNA, 20 bp, Artificial Sequence
  Description of Artificial Sequence: Synthetic oligonucleotide
  Target: ATXN2; (+) strand; PAM type: YTN; PAM sequence: CTA
cggaatgttaaaacttttat

SEQ ID NO: 88496 - DNA, 20 bp, Artificial Sequence
  Description of Artificial Sequence: Synthetic oligonucleotide
  Target: ATXN2; (+) strand; PAM type: YTN; PAM sequence: TTA
aaacttttattcttcaaaaa

SEQ ID NO: 88497 - DNA, 20 bp, Artificial Sequence
  Description of Artificial Sequence: Synthetic oligonucleotide
  Target: ATXN2; (+) strand; PAM type: YTN; PAM sequence: CTT
ttattcttcaaaaaggacag

SEQ ID NO: 88498 - DNA, 20 bp, Artificial Sequence
  Description of Artificial Sequence: Synthetic oligonucleotide
  Target: ATXN2; (+) strand; PAM type: YTN; PAM sequence: TTT
tattcttcaaaaaggacaga

SEQ ID NO: 88499 - DNA, 20 bp, Artificial Sequence
  Description of Artificial Sequence: Synthetic oligonucleotide
  Target: ATXN2; (+) strand; PAM type: YTN; PAM sequence: TTT
attcttcaaaaaggacagag

SEQ ID NO: 88500 - DNA, 20 bp, Artificial Sequence
  Description of Artificial Sequence: Synthetic oligonucleotide
  Target: ATXN2; (+) strand; PAM type: YTN; PAM sequence: TTA
ttcttcaaaaaggacagagg

SEQ ID NO: 88501 - DNA, 20 bp, Artificial Sequence
  Description of Artificial Sequence: Synthetic oligonucleotide
  Target: ATXN2; (+) strand; PAM type: YTN; PAM sequence: TTC
ttcaaaaaggacagaggtgg

SEQ ID NO: 88502 - DNA, 20 bp, Artificial Sequence
  Description of Artificial Sequence: Synthetic oligonucleotide
  Target: ATXN2; (+) strand; PAM type: YTN; PAM sequence: CTT
caaaaaggacagaggtggta

SEQ ID NO: 88503 - DNA, 20 bp, Artificial Sequence
  Description of Artificial Sequence: Synthetic oligonucleotide
  Target: ATXN2; (+) strand; PAM type: YTN; PAM sequence: TTC
aaaaaggacagaggtggtat

SEQ ID NO: 88504 - DNA, 20 bp, Artificial Sequence
  Description of Artificial Sequence: Synthetic oligonucleotide
  Target: ATXN2; (+) strand; PAM type: YTN; PAM sequence: CTC
aagaagaaggtttgccagaa

SEQ ID NO: 88505 - DNA, 20 bp, Artificial Sequence
  Description of Artificial Sequence: Synthetic oligonucleotide
  Target: ATXN2; (+) strand; PAM type: YTN; PAM sequence: TTT
gccagaaatctgtaaattct

SEQ ID NO: 88506 - DNA, 20 bp, Artificial Sequence
  Description of Artificial Sequence: Synthetic oligonucleotide
  Target: ATXN2; (+) strand; PAM type: YTN; PAM sequence: TTG
ccagaaatctgtaaattctt

SEQ ID NO: 88507 - DNA, 20 bp, Artificial Sequence
  Description of Artificial Sequence: Synthetic oligonucleotide
  Target: ATXN2; (+) strand; PAM type: YTN; PAM sequence: CTG
taaattcttttttttttttt

SEQ ID NO: 88508 - DNA, 20 bp, Artificial Sequence
  Description of Artificial Sequence: Synthetic oligonucleotide
  Target: ATXN2; (+) strand; PAM type: YTN; PAM sequence: TTC
tttttttttttttttttttt

SEQ ID NO: 88509 - DNA, 20 bp, Artificial Sequence
  Description of Artificial Sequence: Synthetic oligonucleotide
  Target: ATXN2; (+) strand; PAM type: YTN; PAM sequence: CTT
tttttttttttttttttttg

SEQ ID NO: 88510 - DNA, 20 bp, Artificial Sequence
  Description of Artificial Sequence: Synthetic oligonucleotide
  Target: ATXN2; (+) strand; PAM type: YTN; PAM sequence: TTT
ttttttttttttttttttgg

SEQ ID NO: 88511 - DNA, 20 bp, Artificial Sequence
  Description of Artificial Sequence: Synthetic oligonucleotide
  Target: ATXN2; (+) strand; PAM type: YTN; PAM sequence: TTT
tttttttttttttttttgga

SEQ ID NO: 88512 - DNA, 20 bp, Artificial Sequence
  Description of Artificial Sequence: Synthetic oligonucleotide
  Target: ATXN2; (+) strand; PAM type: YTN; PAM sequence: TTT
ttttttttttttttttggag

SEQ ID NO: 88513 - DNA, 20 bp, Artificial Sequence
  Description of Artificial Sequence: Synthetic oligonucleotide
  Target: ATXN2; (+) strand; PAM type: YTN; PAM sequence: TTT
tttttttttttttttggaga

SEQ ID NO: 88514 - DNA, 20 bp, Artificial Sequence
  Description of Artificial Sequence: Synthetic oligonucleotide
  Target: ATXN2; (+) strand; PAM type: YTN; PAM sequence: TTT
ttttttttttttttggagat

SEQ ID NO: 88515 - DNA, 20 bp, Artificial Sequence
  Description of Artificial Sequence: Synthetic oligonucleotide
  Target: ATXN2; (+) strand; PAM type: YTN; PAM sequence: TTT
tttttttttttttggagatg

SEQ ID NO: 88516 - DNA, 20 bp, Artificial Sequence
  Description of Artificial Sequence: Synthetic oligonucleotide
  Target: ATXN2; (+) strand; PAM type: YTN; PAM sequence: TTT
ttttttttttttggagatgg

SEQ ID NO: 88517 - DNA, 20 bp, Artificial Sequence
  Description of Artificial Sequence: Synthetic oligonucleotide
  Target: ATXN2; (+) strand; PAM type: YTN; PAM sequence: TTT
tttttttttttggagatgga

SEQ ID NO: 88518 - DNA, 20 bp, Artificial Sequence
  Description of Artificial Sequence: Synthetic oligonucleotide
  Target: ATXN2; (+) strand; PAM type: YTN; PAM sequence: TTT
ttttttttttggagatggag

SEQ ID NO: 88519 - DNA, 20 bp, Artificial Sequence
  Description of Artificial Sequence: Synthetic oligonucleotide
  Target: ATXN2; (+) strand; PAM type: YTN; PAM sequence: TTT
tttttttttggagatggagt

SEQ ID NO: 88520 - DNA, 20 bp, Artificial Sequence
  Description of Artificial Sequence: Synthetic oligonucleotide
  Target: ATXN2; (+) strand; PAM type: YTN; PAM sequence: TTT
ttttttttggagatggagtc

SEQ ID NO: 88521 - DNA, 20 bp, Artificial Sequence
  Description of Artificial Sequence: Synthetic oligonucleotide
  Target: ATXN2; (+) strand; PAM type: YTN; PAM sequence: TTT
tttttttggagatggagtct

SEQ ID NO: 88522 - DNA, 20 bp, Artificial Sequence
  Description of Artificial Sequence: Synthetic oligonucleotide
  Target: ATXN2; (+) strand; PAM type: YTN; PAM sequence: TTT
ttttttggagatggagtctc

SEQ ID NO: 88523 - DNA, 20 bp, Artificial Sequence
  Description of Artificial Sequence: Synthetic oligonucleotide
  Target: ATXN2; (+) strand; PAM type: YTN; PAM sequence: TTT
tttttggagatggagtctca

SEQ ID NO: 88524 - DNA, 20 bp, Artificial Sequence
  Description of Artificial Sequence: Synthetic oligonucleotide
  Target: ATXN2; (+) strand; PAM type: YTN; PAM sequence: TTT
ttttggagatggagtctcac

SEQ ID NO: 88525 - DNA, 20 bp, Artificial Sequence
  Description of Artificial Sequence: Synthetic oligonucleotide
  Target: ATXN2; (+) strand; PAM type: YTN; PAM sequence: TTT
tttggagatggagtctcact

SEQ ID NO: 88526 - DNA, 20 bp, Artificial Sequence
  Description of Artificial Sequence: Synthetic oligonucleotide
  Target: ATXN2; (+) strand; PAM type: YTN; PAM sequence: TTT
ttggagatggagtctcactc

SEQ ID NO: 88527 - DNA, 20 bp, Artificial Sequence
  Description of Artificial Sequence: Synthetic oligonucleotide
  Target: ATXN2; (+) strand; PAM type: YTN; PAM sequence: TTT
tggagatggagtctcactct

SEQ ID NO: 88528 - DNA, 20 bp, Artificial Sequence
  Description of Artificial Sequence: Synthetic oligonucleotide
  Target: ATXN2; (+) strand; PAM type: YTN; PAM sequence: TTT
ggagatggagtctcactctg

SEQ ID NO: 88529 - DNA, 20 bp, Artificial Sequence
  Description of Artificial Sequence: Synthetic oligonucleotide
  Target: ATXN2; (+) strand; PAM type: YTN; PAM sequence: TTG
gagatggagtctcactctgt

SEQ ID NO: 88530 - DNA, 20 bp, Artificial Sequence
  Description of Artificial Sequence: Synthetic oligonucleotide
  Target: ATXN2; (+) strand; PAM type: YTN; PAM sequence: CTC
actctgtcgctcaggctaga

SEQ ID NO: 88531 - DNA, 20 bp, Artificial Sequence
  Description of Artificial Sequence: Synthetic oligonucleotide
  Target: ATXN2; (+) strand; PAM type: YTN; PAM sequence: CTC
tgtcgctcaggctagagtgt

SEQ ID NO: 88532 - DNA, 20 bp, Artificial Sequence
  Description of Artificial Sequence: Synthetic oligonucleotide
  Target: ATXN2; (+) strand; PAM type: YTN; PAM sequence: CTG
tcgctcaggctagagtgtag

SEQ ID NO: 88533 - DNA, 20 bp, Artificial Sequence
  Description of Artificial Sequence: Synthetic oligonucleotide
  Target: ATXN2; (+) strand; PAM type: YTN; PAM sequence: CTC
aggctagagtgtagtggcgc

SEQ ID NO: 88534 - DNA, 20 bp, Artificial Sequence
  Description of Artificial Sequence: Synthetic oligonucleotide
  Target: ATXN2; (+) strand; PAM type: YTN; PAM sequence: CTA
gagtgtagtggcgcgatctc

SEQ ID NO: 88535 - DNA, 20 bp, Artificial Sequence
  Description of Artificial Sequence: Synthetic oligonucleotide
  Target: ATXN2; (+) strand; PAM type: YTN; PAM sequence: CTC
ggctcactgcaacctctgcc

SEQ ID NO: 88536 - DNA, 20 bp, Artificial Sequence
  Description of Artificial Sequence: Synthetic oligonucleotide
  Target: ATXN2; (+) strand; PAM type: YTN; PAM sequence: CTC
actgcaacctctgcctcccg

SEQ ID NO: 88537 - DNA, 20 bp, Artificial Sequence
  Description of Artificial Sequence: Synthetic oligonucleotide
  Target: ATXN2; (+) strand; PAM type: YTN; PAM sequence: CTG
caacctctgcctcccgggtt

SEQ ID NO: 88538 - DNA, 20 bp, Artificial Sequence
  Description of Artificial Sequence: Synthetic oligonucleotide
  Target: ATXN2; (+) strand; PAM type: YTN; PAM sequence: CTC
tgcctcccgggttcaagcaa

SEQ ID NO: 88539 - DNA, 20 bp, Artificial Sequence
  Description of Artificial Sequence: Synthetic oligonucleotide
  Target: ATXN2; (+) strand; PAM type: YTN; PAM sequence: CTG
cctcccgggttcaagcaatt

SEQ ID NO: 88540 - DNA, 20 bp, Artificial Sequence
  Description of Artificial Sequence: Synthetic oligonucleotide
  Target: ATXN2; (+) strand; PAM type: YTN; PAM sequence: CTC
ccgggttcaagcaattctgt

SEQ ID NO: 88541 - DNA, 20 bp, Artificial Sequence
  Description of Artificial Sequence: Synthetic oligonucleotide
  Target: ATXN2; (+) strand; PAM type: YTN; PAM sequence: TTC
aagcaattctgttgcctcag

SEQ ID NO: 88542 - DNA, 20 bp, Artificial Sequence
  Description of Artificial Sequence: Synthetic oligonucleotide
  Target: ATXN2; (+) strand; PAM type: YTN; PAM sequence: TTC
tgttgcctcagcctccgaag

SEQ ID NO: 88543 - DNA, 20 bp, Artificial Sequence
  Description of Artificial Sequence: Synthetic oligonucleotide
  Target: ATXN2; (+) strand; PAM type: YTN; PAM sequence: CTG
ttgcctcagcctccgaagta

SEQ ID NO: 88544 - DNA, 20 bp, Artificial Sequence
  Description of Artificial Sequence: Synthetic oligonucleotide
  Target: ATXN2; (+) strand; PAM type: YTN; PAM sequence: TTG
cctcagcctccgaagtagcc

SEQ ID NO: 88545 - DNA, 20 bp, Artificial Sequence
  Description of Artificial Sequence: Synthetic oligonucleotide
  Target: ATXN2; (+) strand; PAM type: YTN; PAM sequence: CTC
agcctccgaagtagccggga

SEQ ID NO: 88546 - DNA, 20 bp, Artificial Sequence
  Description of Artificial Sequence: Synthetic oligonucleotide
  Target: ATXN2; (+) strand; PAM type: YTN; PAM sequence: CTC
cgaagtagccgggactacag

SEQ ID NO: 88547 - DNA, 20 bp, Artificial Sequence
  Description of Artificial Sequence: Synthetic oligonucleotide
  Target: ATXN2; (+) strand; PAM type: YTN; PAM sequence: CTA
caggcacatgccaccacacc

SEQ ID NO: 88548 - DNA, 20 bp, Artificial Sequence
  Description of Artificial Sequence: Synthetic oligonucleotide
  Target: ATXN2; (+) strand; PAM type: YTN; PAM sequence: TTT
tttggatttttagtagagat

SEQ ID NO: 88549 - DNA, 20 bp, Artificial Sequence
  Description of Artificial Sequence: Synthetic oligonucleotide
  Target: ATXN2; (+) strand; PAM type: YTN; PAM sequence: TTT
ttggatttttagtagagatg

SEQ ID NO: 88550 - DNA, 20 bp, Artificial Sequence
  Description of Artificial Sequence: Synthetic oligonucleotide
  Target: ATXN2; (+) strand; PAM type: YTN; PAM sequence: TTT
tggatttttagtagagatgg

SEQ ID NO: 88551 - DNA, 20 bp, Artificial Sequence
  Description of Artificial Sequence: Synthetic oligonucleotide
  Target: ATXN2; (+) strand; PAM type: YTN; PAM sequence: TTT
ggatttttagtagagatggg

SEQ ID NO: 88552 - DNA, 20 bp, Artificial Sequence
  Description of Artificial Sequence: Synthetic oligonucleotide
  Target: ATXN2; (+) strand; PAM type: YTN; PAM sequence: TTG
gatttttagtagagatgggg

SEQ ID NO: 88553 - DNA, 20 bp, Artificial Sequence
  Description of Artificial Sequence: Synthetic oligonucleotide
  Target: ATXN2; (+) strand; PAM type: YTN; PAM sequence: TTT
ttagtagagatggggtttca

SEQ ID NO: 88554 - DNA, 20 bp, Artificial Sequence
  Description of Artificial Sequence: Synthetic oligonucleotide
  Target: ATXN2; (+) strand; PAM type: YTN; PAM sequence: TTT
tagtagagatggggtttcac

SEQ ID NO: 88555 - DNA, 20 bp, Artificial Sequence
  Description of Artificial Sequence: Synthetic oligonucleotide
  Target: ATXN2; (+) strand; PAM type: YTN; PAM sequence: TTT
agtagagatggggtttcacc

SEQ ID NO: 88556 - DNA, 20 bp, Artificial Sequence
  Description of Artificial Sequence: Synthetic oligonucleotide
  Target: ATXN2; (+) strand; PAM type: YTN; PAM sequence: TTA
gtagagatggggtttcacca

SEQ ID NO: 88557 - DNA, 20 bp, Artificial Sequence
  Description of Artificial Sequence: Synthetic oligonucleotide
  Target: ATXN2; (+) strand; PAM type: YTN; PAM sequence: TTT
caccatgttggccaggctgg

SEQ ID NO: 88558 - DNA, 20 bp, Artificial Sequence
  Description of Artificial Sequence: Synthetic oligonucleotide
  Target: ATXN2; (+) strand; PAM type: YTN; PAM sequence: TTC
accatgttggccaggctggt

SEQ ID NO: 88559 - DNA, 20 bp, Artificial Sequence
  Description of Artificial Sequence: Synthetic oligonucleotide
  Target: ATXN2; (+) strand; PAM type: YTN; PAM sequence: TTG
gccaggctggtctcgatctc

SEQ ID NO: 88560 - DNA, 20 bp, Artificial Sequence
  Description of Artificial Sequence: Synthetic oligonucleotide
  Target: ATXN2; (+) strand; PAM type: YTN; PAM sequence: CTG
gtctcgatctcctgacctca

SEQ ID NO: 88561 - DNA, 20 bp, Artificial Sequence
  Description of Artificial Sequence: Synthetic oligonucleotide
  Target: ATXN2; (+) strand; PAM type: YTN; PAM sequence: CTC
gatctcctgacctcatgatc

SEQ ID NO: 88562 - DNA, 20 bp, Artificial Sequence
  Description of Artificial Sequence: Synthetic oligonucleotide
  Target: ATXN2; (+) strand; PAM type: YTN; PAM sequence: CTC
ctgacctcatgatccgccag

SEQ ID NO: 88563 - DNA, 20 bp, Artificial Sequence
  Description of Artificial Sequence: Synthetic oligonucleotide
  Target: ATXN2; (+) strand; PAM type: YTN; PAM sequence: CTG
acctcatgatccgccagcct

SEQ ID NO: 88564 - DNA, 20 bp, Artificial Sequence
  Description of Artificial Sequence: Synthetic oligonucleotide
  Target: ATXN2; (+) strand; PAM type: YTN; PAM sequence: CTC
atgatccgccagccttggcc

SEQ ID NO: 88565 - DNA, 20 bp, Artificial Sequence
  Description of Artificial Sequence: Synthetic oligonucleotide
  Target: ATXN2; (+) strand; PAM type: YTN; PAM sequence: CTT
ggcctcccaaagtgctggga

SEQ ID NO: 88566 - DNA, 20 bp, Artificial Sequence
  Description of Artificial Sequence: Synthetic oligonucleotide
  Target: ATXN2; (+) strand; PAM type: YTN; PAM sequence: TTG
gcctcccaaagtgctgggat

SEQ ID NO: 88567 - DNA, 20 bp, Artificial Sequence
  Description of Artificial Sequence: Synthetic oligonucleotide
  Target: ATXN2; (+) strand; PAM type: YTN; PAM sequence: CTC
ccaaagtgctgggattacag

SEQ ID NO: 88568 - DNA, 20 bp, Artificial Sequence
  Description of Artificial Sequence: Synthetic oligonucleotide
  Target: ATXN2; (+) strand; PAM type: YTN; PAM sequence: CTG
ggattacaggcgtgagccac

SEQ ID NO: 88569 - DNA, 20 bp, Artificial Sequence
  Description of Artificial Sequence: Synthetic oligonucleotide
  Target: ATXN2; (+) strand; PAM type: YTN; PAM sequence: TTA
caggcgtgagccactgcgcc

SEQ ID NO: 88570 - DNA, 20 bp, Artificial Sequence
  Description of Artificial Sequence: Synthetic oligonucleotide
  Target: ATXN2; (+) strand; PAM type: YTN; PAM sequence: CTG
cgcccagcctataaattctt

SEQ ID NO: 88571 - DNA, 20 bp, Artificial Sequence
  Description of Artificial Sequence: Synthetic oligonucleotide
  Target: ATXN2; (+) strand; PAM type: YTN; PAM sequence: CTA
taaattcttaaataactcaa

SEQ ID NO: 88572 - DNA, 20 bp, Artificial Sequence
  Description of Artificial Sequence: Synthetic oligonucleotide
  Target: ATXN2; (+) strand; PAM type: YTN; PAM sequence: TTC
ttaaataactcaattttgcc

SEQ ID NO: 88573 - DNA, 20 bp, Artificial Sequence
  Description of Artificial Sequence: Synthetic oligonucleotide
  Target: ATXN2; (+) strand; PAM type: YTN; PAM sequence: CTT
aaataactcaattttgccta

SEQ ID NO: 88574 - DNA, 20 bp, Artificial Sequence
  Description of Artificial Sequence: Synthetic oligonucleotide
  Target: ATXN2; (+) strand; PAM type: YTN; PAM sequence: TTA
aataactcaattttgcctaa

SEQ ID NO: 88575 - DNA, 20 bp, Artificial Sequence
  Description of Artificial Sequence: Synthetic oligonucleotide
  Target: ATXN2; (+) strand; PAM type: YTN; PAM sequence: CTC
aattttgcctaaacatactc

SEQ ID NO: 88576 - DNA, 20 bp, Artificial Sequence
  Description of Artificial Sequence: Synthetic oligonucleotide
  Target: ATXN2; (+) strand; PAM type: YTN; PAM sequence: TTT
tgcctaaacatactcgttca

SEQ ID NO: 88577 - DNA, 20 bp, Artificial Sequence
  Description of Artificial Sequence: Synthetic oligonucleotide
  Target: ATXN2; (+) strand; PAM type: YTN; PAM sequence: TTT
gcctaaacatactcgttcag

SEQ ID NO: 88578 - DNA, 20 bp, Artificial Sequence
  Description of Artificial Sequence: Synthetic oligonucleotide
  Target: ATXN2; (+) strand; PAM type: YTN; PAM sequence: TTG
cctaaacatactcgttcagg

SEQ ID NO: 88579 - DNA, 20 bp, Artificial Sequence
  Description of Artificial Sequence: Synthetic oligonucleotide
  Target: ATXN2; (+) strand; PAM type: YTN; PAM sequence: CTA
aacatactcgttcaggacat

SEQ ID NO: 88580 - DNA, 20 bp, Artificial Sequence
  Description of Artificial Sequence: Synthetic oligonucleotide
  Target: ATXN2; (+) strand; PAM type: YTN; PAM sequence: CTC
gttcaggacatctaaactta

SEQ ID NO: 88581 - DNA, 20 bp, Artificial Sequence
  Description of Artificial Sequence: Synthetic oligonucleotide
  Target: ATXN2; (+) strand; PAM type: YTN; PAM sequence: TTC
aggacatctaaacttaaaaa

SEQ ID NO: 88582 - DNA, 20 bp, Artificial Sequence
  Description of Artificial Sequence: Synthetic oligonucleotide
  Target: ATXN2; (+) strand; PAM type: YTN; PAM sequence: CTA
aacttaaaaaataaaaattt

SEQ ID NO: 88583 - DNA, 20 bp, Artificial Sequence
  Description of Artificial Sequence: Synthetic oligonucleotide
  Target: ATXN2; (+) strand; PAM type: YTN; PAM sequence: CTT
aaaaaataaaaattttatat

SEQ ID NO: 88584 - DNA, 20 bp, Artificial Sequence
  Description of Artificial Sequence: Synthetic oligonucleotide
  Target: ATXN2; (+) strand; PAM type: YTN; PAM sequence: TTA
aaaaataaaaattttatatt

SEQ ID NO: 88585 - DNA, 20 bp, Artificial Sequence
  Description of Artificial Sequence: Synthetic oligonucleotide
  Target: ATXN2; (+) strand; PAM type: YTN; PAM sequence: TTT
tatattcttagtatttcaaa

SEQ ID NO: 88586 - DNA, 20 bp, Artificial Sequence
  Description of Artificial Sequence: Synthetic oligonucleotide
  Target: ATXN2; (+) strand; PAM type: YTN; PAM sequence: TTT
atattcttagtatttcaaaa

SEQ ID NO: 88587 - DNA, 20 bp, Artificial Sequence
  Description of Artificial Sequence: Synthetic oligonucleotide
  Target: ATXN2; (+) strand; PAM type: YTN; PAM sequence: TTA
tattcttagtatttcaaaaa

SEQ ID NO: 88588 - DNA, 20 bp, Artificial Sequence
  Description of Artificial Sequence: Synthetic oligonucleotide
  Target: ATXN2; (+) strand; PAM type: YTN; PAM sequence: TTC
ttagtatttcaaaaagttca

SEQ ID NO: 88589 - DNA, 20 bp, Artificial Sequence
  Description of Artificial Sequence: Synthetic oligonucleotide
  Target: ATXN2; (+) strand; PAM type: YTN; PAM sequence: CTT
agtatttcaaaaagttcaaa

SEQ ID NO: 88590 - DNA, 20 bp, Artificial Sequence
  Description of Artificial Sequence: Synthetic oligonucleotide
  Target: ATXN2; (+) strand; PAM type: YTN; PAM sequence: TTA
gtatttcaaaaagttcaaag

SEQ ID NO: 88591 - DNA, 20 bp, Artificial Sequence
  Description of Artificial Sequence: Synthetic oligonucleotide
  Target: ATXN2; (+) strand; PAM type: YTN; PAM sequence: TTT
caaaaagttcaaagaggctt

SEQ ID NO: 88592 - DNA, 20 bp, Artificial Sequence
  Description of Artificial Sequence: Synthetic oligonucleotide
  Target: ATXN2; (+) strand; PAM type: YTN; PAM sequence: TTC
aaaaagttcaaagaggcttt

SEQ ID NO: 88593 - DNA, 20 bp, Artificial Sequence
  Description of Artificial Sequence: Synthetic oligonucleotide
  Target: ATXN2; (+) strand; PAM type: YTN; PAM sequence: TTC
aaagaggctttaaaaatgaa

SEQ ID NO: 88594 - DNA, 20 bp, Artificial Sequence
  Description of Artificial Sequence: Synthetic oligonucleotide
  Target: ATXN2; (+) strand; PAM type: YTN; PAM sequence: CTT
taaaaatgaaatgcccatgt

SEQ ID NO: 88595 - DNA, 20 bp, Artificial Sequence
  Description of Artificial Sequence: Synthetic oligonucleotide
  Target: ATXN2; (+) strand; PAM type: YTN; PAM sequence: TTT
aaaaatgaaatgcccatgta

SEQ ID NO: 88596 - DNA, 20 bp, Artificial Sequence
  Description of Artificial Sequence: Synthetic oligonucleotide
  Target: ATXN2; (+) strand; PAM type: YTN; PAM sequence: TTA
aaaatgaaatgcccatgtag

SEQ ID NO: 88597 - DNA, 20 bp, Artificial Sequence
  Description of Artificial Sequence: Synthetic oligonucleotide
  Target: ATXN2; (+) strand; PAM type: YTN; PAM sequence: TTA
catgtaaccataatctcatt

SEQ ID NO: 88598 - DNA, 20 bp, Artificial Sequence
  Description of Artificial Sequence: Synthetic oligonucleotide
  Target: ATXN2; (+) strand; PAM type: YTN; PAM sequence: CTC
attctcatagcagtacactt

SEQ ID NO: 88599 - DNA, 20 bp, Artificial Sequence
  Description of Artificial Sequence: Synthetic oligonucleotide
  Target: ATXN2; (+) strand; PAM type: YTN; PAM sequence: TTC
tcatagcagtacacttttca

SEQ ID NO: 88600 - DNA, 20 bp, Artificial Sequence
  Description of Artificial Sequence: Synthetic oligonucleotide
  Target: ATXN2; (+) strand; PAM type: YTN; PAM sequence: CTC
atagcagtacacttttcaac

SEQ ID NO: 88601 - DNA, 20 bp, Artificial Sequence
  Description of Artificial Sequence: Synthetic oligonucleotide
  Target: ATXN2; (+) strand; PAM type: YTN; PAM sequence: CTT
ttcaactgtatgaataaacc

SEQ ID NO: 88602 - DNA, 20 bp, Artificial Sequence
  Description of Artificial Sequence: Synthetic oligonucleotide
  Target: ATXN2; (+) strand; PAM type: YTN; PAM sequence: TTT
tcaactgtatgaataaacca

SEQ ID NO: 88603 - DNA, 20 bp, Artificial Sequence
  Description of Artificial Sequence: Synthetic oligonucleotide
  Target: ATXN2; (+) strand; PAM type: YTN; PAM sequence: TTT
caactgtatgaataaaccaa

SEQ ID NO: 88604 - DNA, 20 bp, Artificial Sequence
  Description of Artificial Sequence: Synthetic oligonucleotide
  Target: ATXN2; (+) strand; PAM type: YTN; PAM sequence: TTC
aactgtatgaataaaccaaa

SEQ ID NO: 88605 - DNA, 20 bp, Artificial Sequence
  Description of Artificial Sequence: Synthetic oligonucleotide
  Target: ATXN2; (+) strand; PAM type: YTN; PAM sequence: CTG
tatgaataaaccaaaattat

SEQ ID NO: 88606 - DNA, 20 bp, Artificial Sequence
  Description of Artificial Sequence: Synthetic oligonucleotide
  Target: ATXN2; (+) strand; PAM type: YTN; PAM sequence: TTA
tcccctactccaaacaacca

SEQ ID NO: 88607 - DNA, 20 bp, Artificial Sequence
  Description of Artificial Sequence: Synthetic oligonucleotide
  Target: ATXN2; (+) strand; PAM type: YTN; PAM sequence: CTA
ctccaaacaaccaaaaacgc

SEQ ID NO: 88608 - DNA, 20 bp, Artificial Sequence
  Description of Artificial Sequence: Synthetic oligonucleotide
  Target: ATXN2; (+) strand; PAM type: YTN; PAM sequence: CTC
caaacaaccaaaaacgcaaa

SEQ ID NO: 88609 - DNA, 20 bp, Artificial Sequence
  Description of Artificial Sequence: Synthetic oligonucleotide
  Target: ATXN2; (+) strand; PAM type: YTN; PAM sequence: CTA
aacgacactacggtagttct

SEQ ID NO: 88610 - DNA, 20 bp, Artificial Sequence
  Description of Artificial Sequence: Synthetic oligonucleotide
  Target: ATXN2; (+) strand; PAM type: YTN; PAM sequence: CTA
cggtagttctcagaaatatt

SEQ ID NO: 88611 - DNA, 20 bp, Artificial Sequence
  Description of Artificial Sequence: Synthetic oligonucleotide
  Target: ATXN2; (+) strand; PAM type: YTN; PAM sequence: TTC
tcagaaatattcagaacaaa

SEQ ID NO: 88612 - DNA, 20 bp, Artificial Sequence
  Description of Artificial Sequence: Synthetic oligonucleotide
  Target: ATXN2; (+) strand; PAM type: YTN; PAM sequence: CTC
agaaatattcagaacaaaac

SEQ ID NO: 88613 - DNA, 20 bp, Artificial Sequence
  Description of Artificial Sequence: Synthetic oligonucleotide
  Target: ATXN2; (+) strand; PAM type: YTN; PAM sequence: TTC
agaacaaaacatcttaatga

SEQ ID NO: 88614 - DNA, 20 bp, Artificial Sequence
  Description of Artificial Sequence: Synthetic oligonucleotide
  Target: ATXN2; (+) strand; PAM type: YTN; PAM sequence: CTT
aatgaaatcagtactattta

SEQ ID NO: 88615 - DNA, 20 bp, Artificial Sequence
  Description of Artificial Sequence: Synthetic oligonucleotide
  Target: ATXN2; (+) strand; PAM type: YTN; PAM sequence: TTA
atgaaatcagtactatttaa

SEQ ID NO: 88616 - DNA, 20 bp, Artificial Sequence
  Description of Artificial Sequence: Synthetic oligonucleotide
  Target: ATXN2; (+) strand; PAM type: YTN; PAM sequence: CTA
tttaaaaacatattctgaaa

SEQ ID NO: 88617 - DNA, 20 bp, Artificial Sequence
  Description of Artificial Sequence: Synthetic oligonucleotide
  Target: ATXN2; (+) strand; PAM type: YTN; PAM sequence: TTT
aaaaacatattctgaaaaac

SEQ ID NO: 88618 - DNA, 20 bp, Artificial Sequence
  Description of Artificial Sequence: Synthetic oligonucleotide
  Target: ATXN2; (+) strand; PAM type: YTN; PAM sequence: TTA
aaaacatattctgaaaaaca

SEQ ID NO: 88619 - DNA, 20 bp, Artificial Sequence
  Description of Artificial Sequence: Synthetic oligonucleotide
  Target: ATXN2; (+) strand; PAM type: YTN; PAM sequence: TTC
tgaaaaacatttgaagcaat

SEQ ID NO: 88620 - DNA, 20 bp, Artificial Sequence
  Description of Artificial Sequence: Synthetic oligonucleotide
  Target: ATXN2; (+) strand; PAM type: YTN; PAM sequence: CTG
aaaaacatttgaagcaatcc

SEQ ID NO: 88621 - DNA, 20 bp, Artificial Sequence
  Description of Artificial Sequence: Synthetic oligonucleotide
  Target: ATXN2; (+) strand; PAM type: YTN; PAM sequence: TTT
gaagcaatccattaattctg

SEQ ID NO: 88622 - DNA, 20 bp, Artificial Sequence
  Description of Artificial Sequence: Synthetic oligonucleotide
  Target: ATXN2; (+) strand; PAM type: YTN; PAM sequence: TTG
aagcaatccattaattctgt

SEQ ID NO: 88623 - DNA, 20 bp, Artificial Sequence
  Description of Artificial Sequence: Synthetic oligonucleotide
  Target: ATXN2; (+) strand; PAM type: YTN; PAM sequence: TTA
attctgtatcataagatata

SEQ ID NO: 88624 - DNA, 20 bp, Artificial Sequence
  Description of Artificial Sequence: Synthetic oligonucleotide
  Target: ATXN2; (+) strand; PAM type: YTN; PAM sequence: TTC
tgtatcataagatatacaaa

SEQ ID NO: 88625 - DNA, 20 bp, Artificial Sequence
  Description of Artificial Sequence: Synthetic oligonucleotide
  Target: ATXN2; (+) strand; PAM type: YTN; PAM sequence: CTG
tatcataagatatacaaatg

SEQ ID NO: 88626 - DNA, 20 bp, Artificial Sequence
  Description of Artificial Sequence: Synthetic oligonucleotide
  Target: ATXN2; (+) strand; PAM type: YTN; PAM sequence: TTT
tattttaaattatcaacagt

SEQ ID NO: 88627 - DNA, 20 bp, Artificial Sequence
  Description of Artificial Sequence: Synthetic oligonucleotide
  Target: ATXN2; (+) strand; PAM type: YTN; PAM sequence: TTT
attttaaattatcaacagtg

SEQ ID NO: 88628 - DNA, 20 bp, Artificial Sequence
  Description of Artificial Sequence: Synthetic oligonucleotide
  Target: ATXN2; (+) strand; PAM type: YTN; PAM sequence: TTA
ttttaaattatcaacagtga

SEQ ID NO: 88629 - DNA, 20 bp, Artificial Sequence
  Description of Artificial Sequence: Synthetic oligonucleotide
  Target: ATXN2; (+) strand; PAM type: YTN; PAM sequence: TTT
taaattatcaacagtgaaaa

SEQ ID NO: 88630 - DNA, 20 bp, Artificial Sequence
  Description of Artificial Sequence: Synthetic oligonucleotide
  Target: ATXN2; (+) strand; PAM type: YTN; PAM sequence: TTT
aaattatcaacagtgaaaaa

SEQ ID NO: 88631 - DNA, 20 bp, Artificial Sequence
  Description of Artificial Sequence: Synthetic oligonucleotide
  Target: ATXN2; (+) strand; PAM type: YTN; PAM sequence: TTA
aattatcaacagtgaaaaat

SEQ ID NO: 88632 - DNA, 20 bp, Artificial Sequence
  Description of Artificial Sequence: Synthetic oligonucleotide
  Target: ATXN2; (+) strand; PAM type: YTN; PAM sequence: TTA
tcaacagtgaaaaatctatt

SEQ ID NO: 88633 - DNA, 20 bp, Artificial Sequence
  Description of Artificial Sequence: Synthetic oligonucleotide
  Target: ATXN2; (+) strand; PAM type: YTN; PAM sequence: CTA
ttattttggtactttagaca

SEQ ID NO: 88634 - DNA, 20 bp, Artificial Sequence
  Description of Artificial Sequence: Synthetic oligonucleotide
  Target: ATXN2; (+) strand; PAM type: YTN; PAM sequence: TTA
ttttggtactttagacagct

SEQ ID NO: 88635 - DNA, 20 bp, Artificial Sequence
  Description of Artificial Sequence: Synthetic oligonucleotide
  Target: ATXN2; (+) strand; PAM type: YTN; PAM sequence: TTT
tggtactttagacagctgct

SEQ ID NO: 88636 - DNA, 20 bp, Artificial Sequence
  Description of Artificial Sequence: Synthetic oligonucleotide
  Target: ATXN2; (+) strand; PAM type: YTN; PAM sequence: TTT
ggtactttagacagctgcta

SEQ ID NO: 88637 - DNA, 20 bp, Artificial Sequence
  Description of Artificial Sequence: Synthetic oligonucleotide
  Target: ATXN2; (+) strand; PAM type: YTN; PAM sequence: TTG
gtactttagacagctgctaa

SEQ ID NO: 88638 - DNA, 20 bp, Artificial Sequence
  Description of Artificial Sequence: Synthetic oligonucleotide
  Target: ATXN2; (+) strand; PAM type: YTN; PAM sequence: CTT
tagacagctgctaagttgat

SEQ ID NO: 88639 - DNA, 20 bp, Artificial Sequence
  Description of Artificial Sequence: Synthetic oligonucleotide
  Target: ATXN2; (+) strand; PAM type: YTN; PAM sequence: TTT
agacagctgctaagttgatc

SEQ ID NO: 88640 - DNA, 20 bp, Artificial Sequence
  Description of Artificial Sequence: Synthetic oligonucleotide
  Target: ATXN2; (+) strand; PAM type: YTN; PAM sequence: TTA
gacagctgctaagttgatct

SEQ ID NO: 88641 - DNA, 20 bp, Artificial Sequence
  Description of Artificial Sequence: Synthetic oligonucleotide
  Target: ATXN2; (+) strand; PAM type: YTN; PAM sequence: CTG
ctaagttgatctacacaaat

SEQ ID NO: 88642 - DNA, 20 bp, Artificial Sequence
  Description of Artificial Sequence: Synthetic oligonucleotide
  Target: ATXN2; (+) strand; PAM type: YTN; PAM sequence: CTA
agttgatctacacaaatttc

SEQ ID NO: 88643 - DNA, 20 bp, Artificial Sequence
  Description of Artificial Sequence: Synthetic oligonucleotide
  Target: ATXN2; (+) strand; PAM type: YTN; PAM sequence: TTG
atctacacaaatttctctgt

SEQ ID NO: 88644 - DNA, 20 bp, Artificial Sequence
  Description of Artificial Sequence: Synthetic oligonucleotide
  Target: ATXN2; (+) strand; PAM type: YTN; PAM sequence: CTA
cacaaatttctctgtttagt

SEQ ID NO: 88645 - DNA, 20 bp, Artificial Sequence
  Description of Artificial Sequence: Synthetic oligonucleotide
  Target: ATXN2; (+) strand; PAM type: YTN; PAM sequence: TTT
ctctgtttagtcacaaaacg

SEQ ID NO: 88646 - DNA, 20 bp, Artificial Sequence
  Description of Artificial Sequence: Synthetic oligonucleotide
  Target: ATXN2; (+) strand; PAM type: YTN; PAM sequence: TTC
tctgtttagtcacaaaacga

SEQ ID NO: 88647 - DNA, 20 bp, Artificial Sequence
  Description of Artificial Sequence: Synthetic oligonucleotide
  Target: ATXN2; (+) strand; PAM type: YTN; PAM sequence: CTC
tgtttagtcacaaaacgaag

SEQ ID NO: 88648 - DNA, 20 bp, Artificial Sequence
  Description of Artificial Sequence: Synthetic oligonucleotide
  Target: ATXN2; (+) strand; PAM type: YTN; PAM sequence: CTG
tttagtcacaaaacgaagat

SEQ ID NO: 88649 - DNA, 20 bp, Artificial Sequence
  Description of Artificial Sequence: Synthetic oligonucleotide
  Target: ATXN2; (+) strand; PAM type: YTN; PAM sequence: TTT
agtcacaaaacgaagatggg

SEQ ID NO: 88650 - DNA, 20 bp, Artificial Sequence
  Description of Artificial Sequence: Synthetic oligonucleotide
  Target: ATXN2; (+) strand; PAM type: YTN; PAM sequence: TTA
gtcacaaaacgaagatgggt

SEQ ID NO: 88651 - DNA, 20 bp, Artificial Sequence
  Description of Artificial Sequence: Synthetic oligonucleotide
  Target: ATXN2; (+) strand; PAM type: YTN; PAM sequence: TTT
ttttgcttattattctcaca

SEQ ID NO: 88652 - DNA, 20 bp, Artificial Sequence
  Description of Artificial Sequence: Synthetic oligonucleotide
  Target: ATXN2; (+) strand; PAM type: YTN; PAM sequence: TTT
tttgcttattattctcacat

SEQ ID NO: 88653 - DNA, 20 bp, Artificial Sequence
  Description of Artificial Sequence: Synthetic oligonucleotide
  Target: ATXN2; (+) strand; PAM type: YTN; PAM sequence: TTT
ttgcttattattctcacata

SEQ ID NO: 88654 - DNA, 20 bp, Artificial Sequence
  Description of Artificial Sequence: Synthetic oligonucleotide
  Target: ATXN2; (+) strand; PAM type: YTN; PAM sequence: TTT
tgcttattattctcacatat

SEQ ID NO: 88655 - DNA, 20 bp, Artificial Sequence
  Description of Artificial Sequence: Synthetic oligonucleotide
  Target: ATXN2; (+) strand; PAM type: YTN; PAM sequence: TTT
gcttattattctcacatata

SEQ ID NO: 88656 - DNA, 20 bp, Artificial Sequence
  Description of Artificial Sequence: Synthetic oligonucleotide
  Target: ATXN2; (+) strand; PAM type: YTN; PAM sequence: TTG
cttattattctcacatataa

SEQ ID NO: 88657 - DNA, 20 bp, Artificial Sequence
  Description of Artificial Sequence: Synthetic oligonucleotide
  Target: ATXN2; (+) strand; PAM type: YTN; PAM sequence: CTT
attattctcacatataaata

SEQ ID NO: 88658 - DNA, 20 bp, Artificial Sequence
  Description of Artificial Sequence: Synthetic oligonucleotide
  Target: ATXN2; (+) strand; PAM type: YTN; PAM sequence: TTA
ttattctcacatataaatac

SEQ ID NO: 88659 - DNA, 20 bp, Artificial Sequence
  Description of Artificial Sequence: Synthetic oligonucleotide
  Target: ATXN2; (+) strand; PAM type: YTN; PAM sequence: TTA
ttctcacatataaatactgc

SEQ ID NO: 88660 - DNA, 20 bp, Artificial Sequence
  Description of Artificial Sequence: Synthetic oligonucleotide
  Target: ATXN2; (+) strand; PAM type: YTN; PAM sequence: TTC
tcacatataaatactgctta

SEQ ID NO: 88661 - DNA, 20 bp, Artificial Sequence
  Description of Artificial Sequence: Synthetic oligonucleotide
  Target: ATXN2; (+) strand; PAM type: YTN; PAM sequence: CTC
acatataaatactgcttagt

SEQ ID NO: 88662 - DNA, 20 bp, Artificial Sequence
  Description of Artificial Sequence: Synthetic oligonucleotide
  Target: ATXN2; (+) strand; PAM type: YTN; PAM sequence: CTG
cttagttttacataaaatac

SEQ ID NO: 88663 - DNA, 20 bp, Artificial Sequence
  Description of Artificial Sequence: Synthetic oligonucleotide
  Target: ATXN2; (+) strand; PAM type: YTN; PAM sequence: CTT
agttttacataaaatacttc

SEQ ID NO: 88664 - DNA, 20 bp, Artificial Sequence
  Description of Artificial Sequence: Synthetic oligonucleotide
  Target: ATXN2; (+) strand; PAM type: YTN; PAM sequence: TTA
gttttacataaaatacttct

SEQ ID NO: 88665 - DNA, 20 bp, Artificial Sequence
  Description of Artificial Sequence: Synthetic oligonucleotide
  Target: ATXN2; (+) strand; PAM type: YTN; PAM sequence: TTT
tacataaaatacttctcatt

SEQ ID NO: 88666 - DNA, 20 bp, Artificial Sequence
  Description of Artificial Sequence: Synthetic oligonucleotide
  Target: ATXN2; (+) strand; PAM type: YTN; PAM sequence: TTT
acataaaatacttctcattt

SEQ ID NO: 88667 - DNA, 20 bp, Artificial Sequence
  Description of Artificial Sequence: Synthetic oligonucleotide
  Target: ATXN2; (+) strand; PAM type: YTN; PAM sequence: TTA
cataaaatacttctcatttt

SEQ ID NO: 88668 - DNA, 20 bp, Artificial Sequence
  Description of Artificial Sequence: Synthetic oligonucleotide
  Target: ATXN2; (+) strand; PAM type: YTN; PAM sequence: CTT
ctcattttcatttcagcatt

SEQ ID NO: 88669 - DNA, 20 bp, Artificial Sequence
  Description of Artificial Sequence: Synthetic oligonucleotide
  Target: ATXN2; (+) strand; PAM type: YTN; PAM sequence: TTC
tcattttcatttcagcattc

SEQ ID NO: 88670 - DNA, 20 bp, Artificial Sequence
  Description of Artificial Sequence: Synthetic oligonucleotide
  Target: ATXN2; (+) strand; PAM type: YTN; PAM sequence: CTC
attttcatttcagcattctg

SEQ ID NO: 88671 - DNA, 20 bp, Artificial Sequence
  Description of Artificial Sequence: Synthetic oligonucleotide
  Target: ATXN2; (+) strand; PAM type: YTN; PAM sequence: TTT
tcatttcagcattctgttca

SEQ ID NO: 88672 - DNA, 20 bp, Artificial Sequence
  Description of Artificial Sequence: Synthetic oligonucleotide
  Target: ATXN2; (+) strand; PAM type: YTN; PAM sequence: TTT
catttcagcattctgttcac

SEQ ID NO: 88673 - DNA, 20 bp, Artificial Sequence
  Description of Artificial Sequence: Synthetic oligonucleotide
  Target: ATXN2; (+) strand; PAM type: YTN; PAM sequence: TTC
atttcagcattctgttcaca

SEQ ID NO: 88674 - DNA, 20 bp, Artificial Sequence
  Description of Artificial Sequence: Synthetic oligonucleotide
  Target: ATXN2; (+) strand; PAM type: YTN; PAM sequence: TTT
cagcattctgttcacattgg

SEQ ID NO: 88675 - DNA, 20 bp, Artificial Sequence
  Description of Artificial Sequence: Synthetic oligonucleotide
  Target: ATXN2; (+) strand; PAM type: YTN; PAM sequence: TTC
agcattctgttcacattggt

SEQ ID NO: 88676 - DNA, 20 bp, Artificial Sequence
  Description of Artificial Sequence: Synthetic oligonucleotide
  Target: ATXN2; (+) strand; PAM type: YTN; PAM sequence: TTC
tgttcacattggttatattt

SEQ ID NO: 88677 - DNA, 20 bp, Artificial Sequence
  Description of Artificial Sequence: Synthetic oligonucleotide
  Target: ATXN2; (+) strand; PAM type: YTN; PAM sequence: CTG
ttcacattggttatatttaa

SEQ ID NO: 88678 - DNA, 20 bp, Artificial Sequence
  Description of Artificial Sequence: Synthetic oligonucleotide
  Target: ATXN2; (+) strand; PAM type: YTN; PAM sequence: TTC
acattggttatatttaaagt

SEQ ID NO: 88679 - DNA, 20 bp, Artificial Sequence
  Description of Artificial Sequence: Synthetic oligonucleotide
  Target: ATXN2; (+) strand; PAM type: YTN; PAM sequence: TTG
gttatatttaaagtgtgact

SEQ ID NO: 88680 - DNA, 20 bp, Artificial Sequence
  Description of Artificial Sequence: Synthetic oligonucleotide
  Target: ATXN2; (+) strand; PAM type: YTN; PAM sequence: TTA
tatttaaagtgtgactcatg

SEQ ID NO: 88681 - DNA, 20 bp, Artificial Sequence
  Description of Artificial Sequence: Synthetic oligonucleotide
  Target: ATXN2; (+) strand; PAM type: YTN; PAM sequence: TTT
aaagtgtgactcatgtctaa

SEQ ID NO: 88682 - DNA, 20 bp, Artificial Sequence
  Description of Artificial Sequence: Synthetic oligonucleotide
  Target: ATXN2; (+) strand; PAM type: YTN; PAM sequence: TTA
aagtgtgactcatgtctaaa

SEQ ID NO: 88683 - DNA, 20 bp, Artificial Sequence
  Description of Artificial Sequence: Synthetic oligonucleotide
  Target: ATXN2; (+) strand; PAM type: YTN; PAM sequence: CTC
atgtctaaaatatatctaat

SEQ ID NO: 88684 - DNA, 20 bp, Artificial Sequence
  Description of Artificial Sequence: Synthetic oligonucleotide
  Target: ATXN2; (+) strand; PAM type: YTN; PAM sequence: CTA
aaatatatctaatatgacat

SEQ ID NO: 88685 - DNA, 20 bp, Artificial Sequence
  Description of Artificial Sequence: Synthetic oligonucleotide
  Target: ATXN2; (+) strand; PAM type: YTN; PAM sequence: CTA
atatgacataatattcaacc

SEQ ID NO: 88686 - DNA, 20 bp, Artificial Sequence
  Description of Artificial Sequence: Synthetic oligonucleotide
  Target: ATXN2; (+) strand; PAM type: YTN; PAM sequence: TTC
aaccattaaaatacagcatg

SEQ ID NO: 88687 - DNA, 20 bp, Artificial Sequence
  Description of Artificial Sequence: Synthetic oligonucleotide
  Target: ATXN2; (+) strand; PAM type: YTN; PAM sequence: TTA
aaatacagcatgatgtagaa

SEQ ID NO: 88688 - DNA, 20 bp, Artificial Sequence
  Description of Artificial Sequence: Synthetic oligonucleotide
  Target: ATXN2; (+) strand; PAM type: YTN; PAM sequence: TTA
tcattataacaaacagcaaa

SEQ ID NO: 88689 - DNA, 20 bp, Artificial Sequence
  Description of Artificial Sequence: Synthetic oligonucleotide
  Target: ATXN2; (+) strand; PAM type: YTN; PAM sequence: TTA
taacaaacagcaaaaaaaat

SEQ ID NO: 88690 - DNA, 20 bp, Artificial Sequence
  Description of Artificial Sequence: Synthetic oligonucleotide
  Target: ATXN2; (+) strand; PAM type: YTN; PAM sequence: CTC
agatcaagtagtgaagcaaa

SEQ ID NO: 88691 - DNA, 20 bp, Artificial Sequence
  Description of Artificial Sequence: Synthetic oligonucleotide
  Target: ATXN2; (+) strand; PAM type: YTN; PAM sequence: TTT
tcatgctggagaacaccttt

SEQ ID NO: 88692 - DNA, 20 bp, Artificial Sequence
  Description of Artificial Sequence: Synthetic oligonucleotide
  Target: ATXN2; (+) strand; PAM type: YTN; PAM sequence: TTT
catgctggagaacaccttta

SEQ ID NO: 88693 - DNA, 20 bp, Artificial Sequence
  Description of Artificial Sequence: Synthetic oligonucleotide
  Target: ATXN2; (+) strand; PAM type: YTN; PAM sequence: TTC
atgctggagaacacctttat

SEQ ID NO: 88694 - DNA, 20 bp, Artificial Sequence
  Description of Artificial Sequence: Synthetic oligonucleotide
  Target: ATXN2; (+) strand; PAM type: YTN; PAM sequence: CTG
gagaacacctttatgctttt

SEQ ID NO: 88695 - DNA, 20 bp, Artificial Sequence
  Description of Artificial Sequence: Synthetic oligonucleotide
  Target: ATXN2; (+) strand; PAM type: YTN; PAM sequence: CTT
tatgcttttattattataaa

SEQ ID NO: 88696 - DNA, 20 bp, Artificial Sequence
  Description of Artificial Sequence: Synthetic oligonucleotide
  Target: ATXN2; (+) strand; PAM type: YTN; PAM sequence: TTT
atgcttttattattataaaa

SEQ ID NO: 88697 - DNA, 20 bp, Artificial Sequence
  Description of Artificial Sequence: Synthetic oligonucleotide
  Target: ATXN2; (+) strand; PAM type: YTN; PAM sequence: TTA
tgcttttattattataaaat

SEQ ID NO: 88698 - DNA, 20 bp, Artificial Sequence
  Description of Artificial Sequence: Synthetic oligonucleotide
  Target: ATXN2; (+) strand; PAM type: YTN; PAM sequence: CTT
ttattattataaaattctct

SEQ ID NO: 88699 - DNA, 20 bp, Artificial Sequence
  Description of Artificial Sequence: Synthetic oligonucleotide
  Target: ATXN2; (+) strand; PAM type: YTN; PAM sequence: TTT
tattattataaaattctctt

SEQ ID NO: 88700 - DNA, 20 bp, Artificial Sequence
  Description of Artificial Sequence: Synthetic oligonucleotide
  Target: ATXN2; (+) strand; PAM type: YTN; PAM sequence: TTT
attattataaaattctcttg

SEQ ID NO: 88701 - DNA, 20 bp, Artificial Sequence
  Description of Artificial Sequence: Synthetic oligonucleotide
  Target: ATXN2; (+) strand; PAM type: YTN; PAM sequence: TTA
ttattataaaattctcttgc

SEQ ID NO: 88702 - DNA, 20 bp, Artificial Sequence
  Description of Artificial Sequence: Synthetic oligonucleotide
  Target: ATXN2; (+) strand; PAM type: YTN; PAM sequence: TTA
ttataaaattctcttgcatg

SEQ ID NO: 88703 - DNA, 20 bp, Artificial Sequence
  Description of Artificial Sequence: Synthetic oligonucleotide
  Target: ATXN2; (+) strand; PAM type: YTN; PAM sequence: TTA
taaaattctcttgcatgtcg

SEQ ID NO: 88704 - DNA, 20 bp, Artificial Sequence
  Description of Artificial Sequence: Synthetic oligonucleotide
  Target: ATXN2; (+) strand; PAM type: YTN; PAM sequence: TTC
tcttgcatgtcgtaggcagg

SEQ ID NO: 88705 - DNA, 20 bp, Artificial Sequence
  Description of Artificial Sequence: Synthetic oligonucleotide
  Target: ATXN2; (+) strand; PAM type: YTN; PAM sequence: CTC
ttgcatgtcgtaggcaggat

SEQ ID NO: 88706 - DNA, 20 bp, Artificial Sequence
  Description of Artificial Sequence: Synthetic oligonucleotide
  Target: ATXN2; (+) strand; PAM type: YTN; PAM sequence: CTT
gcatgtcgtaggcaggatat

SEQ ID NO: 88707 - DNA, 20 bp, Artificial Sequence
  Description of Artificial Sequence: Synthetic oligonucleotide
  Target: ATXN2; (+) strand; PAM type: YTN; PAM sequence: TTG
catgtcgtaggcaggatata

SEQ ID NO: 88708 - DNA, 20 bp, Artificial Sequence
  Description of Artificial Sequence: Synthetic oligonucleotide
  Target: ATXN2; (+) strand; PAM type: YTN; PAM sequence: TTG
atgaggaagaggagaaaggt

SEQ ID NO: 88709 - DNA, 20 bp, Artificial Sequence
  Description of Artificial Sequence: Synthetic oligonucleotide
  Target: ATXN2; (+) strand; PAM type: YTN; PAM sequence: CTT
tctccacaaagatgctttgc

SEQ ID NO: 88710 - DNA, 20 bp, Artificial Sequence
  Description of Artificial Sequence: Synthetic oligonucleotide
  Target: ATXN2; (+) strand; PAM type: YTN; PAM sequence: TTT
ctccacaaagatgctttgcc

SEQ ID NO: 88711 - DNA, 20 bp, Artificial Sequence
  Description of Artificial Sequence: Synthetic oligonucleotide
  Target: ATXN2; (+) strand; PAM type: YTN; PAM sequence: TTC
tccacaaagatgctttgcca

SEQ ID NO: 88712 - DNA, 20 bp, Artificial Sequence
  Description of Artificial Sequence: Synthetic oligonucleotide
  Target: ATXN2; (+) strand; PAM type: YTN; PAM sequence: CTC
cacaaagatgctttgccatt

SEQ ID NO: 88713 - DNA, 20 bp, Artificial Sequence
  Description of Artificial Sequence: Synthetic oligonucleotide
  Target: ATXN2; (+) strand; PAM type: YTN; PAM sequence: CTT
tgccattatatacatcatta

SEQ ID NO: 88714 - DNA, 20 bp, Artificial Sequence
  Description of Artificial Sequence: Synthetic oligonucleotide
  Target: ATXN2; (+) strand; PAM type: YTN; PAM sequence: TTT
gccattatatacatcattac

SEQ ID NO: 88715 - DNA, 20 bp, Artificial Sequence
  Description of Artificial Sequence: Synthetic oligonucleotide
  Target: ATXN2; (+) strand; PAM type: YTN; PAM sequence: TTG
ccattatatacatcattaca

SEQ ID NO: 88716 - DNA, 20 bp, Artificial Sequence
  Description of Artificial Sequence: Synthetic oligonucleotide
  Target: ATXN2; (+) strand; PAM type: YTN; PAM sequence: TTA
tatacatcattacattttag

SEQ ID NO: 88717 - DNA, 20 bp, Artificial Sequence
  Description of Artificial Sequence: Synthetic oligonucleotide
  Target: ATXN2; (+) strand; PAM type: YTN; PAM sequence: TTA
cattttagttaaagcaggaa

SEQ ID NO: 88718 - DNA, 20 bp, Artificial Sequence
  Description of Artificial Sequence: Synthetic oligonucleotide
  Target: ATXN2; (+) strand; PAM type: YTN; PAM sequence: TTT
tagttaaagcaggaaagaga

SEQ ID NO: 88719 - DNA, 20 bp, Artificial Sequence
  Description of Artificial Sequence: Synthetic oligonucleotide
  Target: ATXN2; (+) strand; PAM type: YTN; PAM sequence: TTT
agttaaagcaggaaagagat

SEQ ID NO: 88720 - DNA, 20 bp, Artificial Sequence
  Description of Artificial Sequence: Synthetic oligonucleotide
  Target: ATXN2; (+) strand; PAM type: YTN; PAM sequence: TTA
gttaaagcaggaaagagatc

SEQ ID NO: 88721 - DNA, 20 bp, Artificial Sequence
  Description of Artificial Sequence: Synthetic oligonucleotide
  Target: ATXN2; (+) strand; PAM type: YTN; PAM sequence: TTA
aagcaggaaagagatctgaa

SEQ ID NO: 88722 - DNA, 20 bp, Artificial Sequence
  Description of Artificial Sequence: Synthetic oligonucleotide
  Target: ATXN2; (+) strand; PAM type: YTN; PAM sequence: CTG
aagaccaggtacagaagtag

SEQ ID NO: 88723 - DNA, 20 bp, Artificial Sequence
  Description of Artificial Sequence: Synthetic oligonucleotide
  Target: ATXN2; (+) strand; PAM type: YTN; PAM sequence: CTA
tttgccaaaagttataaagc

SEQ ID NO: 88724 - DNA, 20 bp, Artificial Sequence
  Description of Artificial Sequence: Synthetic oligonucleotide
  Target: ATXN2; (+) strand; PAM type: YTN; PAM sequence: TTT
gccaaaagttataaagcaag

SEQ ID NO: 88725 - DNA, 20 bp, Artificial Sequence
  Description of Artificial Sequence: Synthetic oligonucleotide
  Target: ATXN2; (+) strand; PAM type: YTN; PAM sequence: TTG
ccaaaagttataaagcaagt

SEQ ID NO: 88726 - DNA, 20 bp, Artificial Sequence
  Description of Artificial Sequence: Synthetic oligonucleotide
  Target: ATXN2; (+) strand; PAM type: YTN; PAM sequence: TTA
taaagcaagtcaggcaaaga

SEQ ID NO: 88727 - DNA, 20 bp, Artificial Sequence
  Description of Artificial Sequence: Synthetic oligonucleotide
  Target: ATXN2; (+) strand; PAM type: YTN; PAM sequence: TTC
atcttttccttcagattctt

SEQ ID NO: 88728 - DNA, 20 bp, Artificial Sequence
  Description of Artificial Sequence: Synthetic oligonucleotide
  Target: ATXN2; (+) strand; PAM type: YTN; PAM sequence: CTT
ttccttcagattcttgaccc

SEQ ID NO: 88729 - DNA, 20 bp, Artificial Sequence
  Description of Artificial Sequence: Synthetic oligonucleotide
  Target: ATXN2; (+) strand; PAM type: YTN; PAM sequence: TTT
tccttcagattcttgaccct

SEQ ID NO: 88730 - DNA, 20 bp, Artificial Sequence
  Description of Artificial Sequence: Synthetic oligonucleotide
  Target: ATXN2; (+) strand; PAM type: YTN; PAM sequence: TTT
ccttcagattcttgaccctc

SEQ ID NO: 88731 - DNA, 20 bp, Artificial Sequence
  Description of Artificial Sequence: Synthetic oligonucleotide
  Target: ATXN2; (+) strand; PAM type: YTN; PAM sequence: TTC
cttcagattcttgaccctca

SEQ ID NO: 88732 - DNA, 20 bp, Artificial Sequence
  Description of Artificial Sequence: Synthetic oligonucleotide
  Target: ATXN2; (+) strand; PAM type: YTN; PAM sequence: CTT
cagattcttgaccctcaatg

SEQ ID NO: 88733 - DNA, 20 bp, Artificial Sequence
  Description of Artificial Sequence: Synthetic oligonucleotide
  Target: ATXN2; (+) strand; PAM type: YTN; PAM sequence: TTC
agattcttgaccctcaatgt

SEQ ID NO: 88734 - DNA, 20 bp, Artificial Sequence
  Description of Artificial Sequence: Synthetic oligonucleotide
  Target: ATXN2; (+) strand; PAM type: YTN; PAM sequence: TTC
ttgaccctcaatgtcataaa

SEQ ID NO: 88735 - DNA, 20 bp, Artificial Sequence
  Description of Artificial Sequence: Synthetic oligonucleotide
  Target: ATXN2; (+) strand; PAM type: YTN; PAM sequence: CTT
gaccctcaatgtcataaaag

SEQ ID NO: 88736 - DNA, 20 bp, Artificial Sequence
  Description of Artificial Sequence: Synthetic oligonucleotide
  Target: ATXN2; (+) strand; PAM type: YTN; PAM sequence: TTG
accctcaatgtcataaaagg

SEQ ID NO: 88737 - DNA, 20 bp, Artificial Sequence
  Description of Artificial Sequence: Synthetic oligonucleotide
  Target: ATXN2; (+) strand; PAM type: YTN; PAM sequence: CTC
aatgtcataaaaggtcaggt

SEQ ID NO: 88738 - DNA, 20 bp, Artificial Sequence
  Description of Artificial Sequence: Synthetic oligonucleotide
  Target: ATXN2; (+) strand; PAM type: YTN; PAM sequence: TTA
ttcttagatagagtatgttt

SEQ ID NO: 88739 - DNA, 20 bp, Artificial Sequence
  Description of Artificial Sequence: Synthetic oligonucleotide
  Target: ATXN2; (+) strand; PAM type: YTN; PAM sequence: TTC
ttagatagagtatgttttca

SEQ ID NO: 88740 - DNA, 20 bp, Artificial Sequence
  Description of Artificial Sequence: Synthetic oligonucleotide
  Target: ATXN2; (+) strand; PAM type: YTN; PAM sequence: CTT
agatagagtatgttttcaga

SEQ ID NO: 88741 - DNA, 20 bp, Artificial Sequence
  Description of Artificial Sequence: Synthetic oligonucleotide
  Target: ATXN2; (+) strand; PAM type: YTN; PAM sequence: TTA
gatagagtatgttttcagaa

SEQ ID NO: 88742 - DNA, 20 bp, Artificial Sequence
  Description of Artificial Sequence: Synthetic oligonucleotide
  Target: ATXN2; (+) strand; PAM type: YTN; PAM sequence: TTT
tcagaaacttaaattaagaa

SEQ ID NO: 88743 - DNA, 20 bp, Artificial Sequence
  Description of Artificial Sequence: Synthetic oligonucleotide
  Target: ATXN2; (+) strand; PAM type: YTN; PAM sequence: TTT
cagaaacttaaattaagaag

SEQ ID NO: 88744 - DNA, 20 bp, Artificial Sequence
  Description of Artificial Sequence: Synthetic oligonucleotide
  Target: ATXN2; (+) strand; PAM type: YTN; PAM sequence: TTC
agaaacttaaattaagaaga

SEQ ID NO: 88745 - DNA, 20 bp, Artificial Sequence
  Description of Artificial Sequence: Synthetic oligonucleotide
  Target: ATXN2; (+) strand; PAM type: YTN; PAM sequence: CTT
aaattaagaagagtcacaca

SEQ ID NO: 88746 - DNA, 20 bp, Artificial Sequence
  Description of Artificial Sequence: Synthetic oligonucleotide
  Target: ATXN2; (+) strand; PAM type: YTN; PAM sequence: TTA
aattaagaagagtcacacac

SEQ ID NO: 88747 - DNA, 20 bp, Artificial Sequence
  Description of Artificial Sequence: Synthetic oligonucleotide
  Target: ATXN2; (+) strand; PAM type: YTN; PAM sequence: TTA
agaagagtcacacacactgg

SEQ ID NO: 88748 - DNA, 20 bp, Artificial Sequence
  Description of Artificial Sequence: Synthetic oligonucleotide
  Target: ATXN2; (+) strand; PAM type: YTN; PAM sequence: CTG
gaagagacaaacaaagtgct

SEQ ID NO: 88749 - DNA, 20 bp, Artificial Sequence
  Description of Artificial Sequence: Synthetic oligonucleotide
  Target: ATXN2; (+) strand; PAM type: YTN; PAM sequence: CTT
cctaccatacatcgcatgcg

SEQ ID NO: 88750 - DNA, 20 bp, Artificial Sequence
  Description of Artificial Sequence: Synthetic oligonucleotide
  Target: ATXN2; (+) strand; PAM type: YTN; PAM sequence: TTC
ctaccatacatcgcatgcgt

SEQ ID NO: 88751 - DNA, 20 bp, Artificial Sequence
  Description of Artificial Sequence: Synthetic oligonucleotide
  Target: ATXN2; (+) strand; PAM type: YTN; PAM sequence: CTA
ccatacatcgcatgcgtctg

SEQ ID NO: 88752 - DNA, 20 bp, Artificial Sequence
  Description of Artificial Sequence: Synthetic oligonucleotide
  Target: ATXN2; (+) strand; PAM type: YTN; PAM sequence: CTG
ctcatgagccccgtactgag

SEQ ID NO: 88753 - DNA, 20 bp, Artificial Sequence
  Description of Artificial Sequence: Synthetic oligonucleotide
  Target: ATXN2; (+) strand; PAM type: YTN; PAM sequence: CTC
atgagccccgtactgagttg

SEQ ID NO: 88754 - DNA, 20 bp, Artificial Sequence
  Description of Artificial Sequence: Synthetic oligonucleotide
  Target: ATXN2; (+) strand; PAM type: YTN; PAM sequence: CTG
agttgctgaagaagatacta

SEQ ID NO: 88755 - DNA, 20 bp, Artificial Sequence
  Description of Artificial Sequence: Synthetic oligonucleotide
  Target: ATXN2; (+) strand; PAM type: YTN; PAM sequence: TTG
ctgaagaagatactaaacca

SEQ ID NO: 88756 - DNA, 20 bp, Artificial Sequence
  Description of Artificial Sequence: Synthetic oligonucleotide
  Target: ATXN2; (+) strand; PAM type: YTN; PAM sequence: CTG
aagaagatactaaaccaggc

SEQ ID NO: 88757 - DNA, 20 bp, Artificial Sequence
  Description of Artificial Sequence: Synthetic oligonucleotide
  Target: ATXN2; (+) strand; PAM type: YTN; PAM sequence: CTA
aaccaggctgggcgtgtgtt

SEQ ID NO: 88758 - DNA, 20 bp, Artificial Sequence
  Description of Artificial Sequence: Synthetic oligonucleotide
  Target: ATXN2; (+) strand; PAM type: YTN; PAM sequence: CTG
ggcgtgtgttggtggtgcca

SEQ ID NO: 88759 - DNA, 20 bp, Artificial Sequence
  Description of Artificial Sequence: Synthetic oligonucleotide
  Target: ATXN2; (+) strand; PAM type: YTN; PAM sequence: TTG
gtggtgccatcattctagca

SEQ ID NO: 88760 - DNA, 20 bp, Artificial Sequence
  Description of Artificial Sequence: Synthetic oligonucleotide
  Target: ATXN2; (+) strand; PAM type: YTN; PAM sequence: TTC
tagcattaccctgtattaca

SEQ ID NO: 88761 - DNA, 20 bp, Artificial Sequence
  Description of Artificial Sequence: Synthetic oligonucleotide
  Target: ATXN2; (+) strand; PAM type: YTN; PAM sequence: CTA
gcattaccctgtattacagg

SEQ ID NO: 88762 - DNA, 20 bp, Artificial Sequence
  Description of Artificial Sequence: Synthetic oligonucleotide
  Target: ATXN2; (+) strand; PAM type: YTN; PAM sequence: TTA
ccctgtattacaggactata

SEQ ID NO: 88763 - DNA, 20 bp, Artificial Sequence
  Description of Artificial Sequence: Synthetic oligonucleotide
  Target: ATXN2; (+) strand; PAM type: YTN; PAM sequence: CTG
tattacaggactatagacat

SEQ ID NO: 88764 - DNA, 20 bp, Artificial Sequence
  Description of Artificial Sequence: Synthetic oligonucleotide
  Target: ATXN2; (+) strand; PAM type: YTN; PAM sequence: TTA
caggactatagacatgagga

SEQ ID NO: 88765 - DNA, 20 bp, Artificial Sequence
  Description of Artificial Sequence: Synthetic oligonucleotide
  Target: ATXN2; (+) strand; PAM type: YTN; PAM sequence: CTA
tagacatgaggatgctgtgt

SEQ ID NO: 88766 - DNA, 20 bp, Artificial Sequence
  Description of Artificial Sequence: Synthetic oligonucleotide
  Target: ATXN2; (+) strand; PAM type: YTN; PAM sequence: CTG
tgttcaaacaaaaaataaag

SEQ ID NO: 88767 - DNA, 20 bp, Artificial Sequence
  Description of Artificial Sequence: Synthetic oligonucleotide
  Target: ATXN2; (+) strand; PAM type: YTN; PAM sequence: TTC
aaacaaaaaataaagaaagc

SEQ ID NO: 88768 - DNA, 20 bp, Artificial Sequence
  Description of Artificial Sequence: Synthetic oligonucleotide
  Target: ATXN2; (+) strand; PAM type: YTN; PAM sequence: TTA
acactgcaaatagagccaag

SEQ ID NO: 88769 - DNA, 20 bp, Artificial Sequence
  Description of Artificial Sequence: Synthetic oligonucleotide
  Target: ATXN2; (+) strand; PAM type: YTN; PAM sequence: CTG
caaatagagccaagcagact

SEQ ID NO: 88770 - DNA, 20 bp, Artificial Sequence
  Description of Artificial Sequence: Synthetic oligonucleotide
  Target: ATXN2; (+) strand; PAM type: YTN; PAM sequence: CTT
tagttaagatttttaactcc

SEQ ID NO: 88771 - DNA, 20 bp, Artificial Sequence
  Description of Artificial Sequence: Synthetic oligonucleotide
  Target: ATXN2; (+) strand; PAM type: YTN; PAM sequence: TTT
agttaagatttttaactcca

SEQ ID NO: 88772 - DNA, 20 bp, Artificial Sequence
  Description of Artificial Sequence: Synthetic oligonucleotide
  Target: ATXN2; (+) strand; PAM type: YTN; PAM sequence: TTA
gttaagatttttaactccat

SEQ ID NO: 88773 - DNA, 20 bp, Artificial Sequence
  Description of Artificial Sequence: Synthetic oligonucleotide
  Target: ATXN2; (+) strand; PAM type: YTN; PAM sequence: TTA
agatttttaactccatggtt

SEQ ID NO: 88774 - DNA, 20 bp, Artificial Sequence
  Description of Artificial Sequence: Synthetic oligonucleotide
  Target: ATXN2; (+) strand; PAM type: YTN; PAM sequence: TTT
ttaactccatggtttccaga

SEQ ID NO: 88775 - DNA, 20 bp, Artificial Sequence
  Description of Artificial Sequence: Synthetic oligonucleotide
  Target: ATXN2; (+) strand; PAM type: YTN; PAM sequence: TTT
taactccatggtttccagat

SEQ ID NO: 88776 - DNA, 20 bp, Artificial Sequence
  Description of Artificial Sequence: Synthetic oligonucleotide
  Target: ATXN2; (+) strand; PAM type: YTN; PAM sequence: TTT
aactccatggtttccagatt

SEQ ID NO: 88777 - DNA, 20 bp, Artificial Sequence
  Description of Artificial Sequence: Synthetic oligonucleotide
  Target: ATXN2; (+) strand; PAM type: YTN; PAM sequence: TTA
actccatggtttccagattt

SEQ ID NO: 88778 - DNA, 20 bp, Artificial Sequence
  Description of Artificial Sequence: Synthetic oligonucleotide
  Target: ATXN2; (+) strand; PAM type: YTN; PAM sequence: CTC
catggtttccagatttccag

SEQ ID NO: 88779 - DNA, 20 bp, Artificial Sequence
  Description of Artificial Sequence: Synthetic oligonucleotide
  Target: ATXN2; (+) strand; PAM type: YTN; PAM sequence: TTT
ccagatttccagaaacagct

SEQ ID NO: 88780 - DNA, 20 bp, Artificial Sequence
  Description of Artificial Sequence: Synthetic oligonucleotide
  Target: ATXN2; (+) strand; PAM type: YTN; PAM sequence: TTC
cagatttccagaaacagctg

SEQ ID NO: 88781 - DNA, 20 bp, Artificial Sequence
  Description of Artificial Sequence: Synthetic oligonucleotide
  Target: ATXN2; (+) strand; PAM type: YTN; PAM sequence: TTT
ccagaaacagctgtaaactc

SEQ ID NO: 88782 - DNA, 20 bp, Artificial Sequence
  Description of Artificial Sequence: Synthetic oligonucleotide
  Target: ATXN2; (+) strand; PAM type: YTN; PAM sequence: TTC
cagaaacagctgtaaactct

SEQ ID NO: 88783 - DNA, 20 bp, Artificial Sequence
  Description of Artificial Sequence: Synthetic oligonucleotide
  Target: ATXN2; (+) strand; PAM type: YTN; PAM sequence: CTG
taaactctcaaatctttctt

SEQ ID NO: 88784 - DNA, 20 bp, Artificial Sequence
  Description of Artificial Sequence: Synthetic oligonucleotide
  Target: ATXN2; (+) strand; PAM type: YTN; PAM sequence: CTC
tcaaatctttcttggctgtt

SEQ ID NO: 88785 - DNA, 20 bp, Artificial Sequence
  Description of Artificial Sequence: Synthetic oligonucleotide
  Target: ATXN2; (+) strand; PAM type: YTN; PAM sequence: CTC
aaatctttcttggctgtttc

SEQ ID NO: 88786 - DNA, 20 bp, Artificial Sequence
  Description of Artificial Sequence: Synthetic oligonucleotide
  Target: ATXN2; (+) strand; PAM type: YTN; PAM sequence: CTT
tcttggctgtttcctctgaa

SEQ ID NO: 88787 - DNA, 20 bp, Artificial Sequence
  Description of Artificial Sequence: Synthetic oligonucleotide
  Target: ATXN2; (+) strand; PAM type: YTN; PAM sequence: TTT
cttggctgtttcctctgaac

SEQ ID NO: 88788 - DNA, 20 bp, Artificial Sequence
  Description of Artificial Sequence: Synthetic oligonucleotide
  Target: ATXN2; (+) strand; PAM type: YTN; PAM sequence: TTC
ttggctgtttcctctgaacc

SEQ ID NO: 88789 - DNA, 20 bp, Artificial Sequence
  Description of Artificial Sequence: Synthetic oligonucleotide
  Target: ATXN2; (+) strand; PAM type: YTN; PAM sequence: CTT
ggctgtttcctctgaacctc

SEQ ID NO: 88790 - DNA, 20 bp, Artificial Sequence
  Description of Artificial Sequence: Synthetic oligonucleotide
  Target: ATXN2; (+) strand; PAM type: YTN; PAM sequence: TTG
gctgtttcctctgaacctct

SEQ ID NO: 88791 - DNA, 20 bp, Artificial Sequence
  Description of Artificial Sequence: Synthetic oligonucleotide
  Target: ATXN2; (+) strand; PAM type: YTN; PAM sequence: CTG
tttcctctgaacctcttaca

SEQ ID NO: 88792 - DNA, 20 bp, Artificial Sequence
  Description of Artificial Sequence: Synthetic oligonucleotide
  Target: ATXN2; (+) strand; PAM type: YTN; PAM sequence: TTT
cctctgaacctcttacaatc

SEQ ID NO: 88793 - DNA, 20 bp, Artificial Sequence
  Description of Artificial Sequence: Synthetic oligonucleotide
  Target: ATXN2; (+) strand; PAM type: YTN; PAM sequence: TTC
ctctgaacctcttacaatca

SEQ ID NO: 88794 - DNA, 20 bp, Artificial Sequence
  Description of Artificial Sequence: Synthetic oligonucleotide
  Target: ATXN2; (+) strand; PAM type: YTN; PAM sequence: CTC
tgaacctcttacaatcatca

SEQ ID NO: 88795 - DNA, 20 bp, Artificial Sequence
  Description of Artificial Sequence: Synthetic oligonucleotide
  Target: ATXN2; (+) strand; PAM type: YTN; PAM sequence: CTG
aacctcttacaatcatcagt

SEQ ID NO: 88796 - DNA, 20 bp, Artificial Sequence
  Description of Artificial Sequence: Synthetic oligonucleotide
  Target: ATXN2; (+) strand; PAM type: YTN; PAM sequence: CTC
ttacaatcatcagtaacctt

SEQ ID NO: 88797 - DNA, 20 bp, Artificial Sequence
  Description of Artificial Sequence: Synthetic oligonucleotide
  Target: ATXN2; (+) strand; PAM type: YTN; PAM sequence: CTT
acaatcatcagtaaccttcg

SEQ ID NO: 88798 - DNA, 20 bp, Artificial Sequence
  Description of Artificial Sequence: Synthetic oligonucleotide
  Target: ATXN2; (+) strand; PAM type: YTN; PAM sequence: TTA
caatcatcagtaaccttcga

SEQ ID NO: 88799 - DNA, 20 bp, Artificial Sequence
  Description of Artificial Sequence: Synthetic oligonucleotide
  Target: ATXN2; (+) strand; PAM type: YTN; PAM sequence: CTT
cgaatatatattgaaaaggg

SEQ ID NO: 88800 - DNA, 20 bp, Artificial Sequence
  Description of Artificial Sequence: Synthetic oligonucleotide
  Target: ATXN2; (+) strand; PAM type: YTN; PAM sequence: TTC
gaatatatattgaaaagggt

SEQ ID NO: 88801 - DNA, 20 bp, Artificial Sequence
  Description of Artificial Sequence: Synthetic oligonucleotide
  Target: ATXN2; (+) strand; PAM type: YTN; PAM sequence: TTG
aaaagggtccccaagtcctt

SEQ ID NO: 88802 - DNA, 20 bp, Artificial Sequence
  Description of Artificial Sequence: Synthetic oligonucleotide
  Target: ATXN2; (+) strand; PAM type: YTN; PAM sequence: CTT
agctatctaccctaccatca

SEQ ID NO: 88803 - DNA, 20 bp, Artificial Sequence
  Description of Artificial Sequence: Synthetic oligonucleotide
  Target: ATXN2; (+) strand; PAM type: YTN; PAM sequence: TTA
gctatctaccctaccatcac

SEQ ID NO: 88804 - DNA, 20 bp, Artificial Sequence
  Description of Artificial Sequence: Synthetic oligonucleotide
  Target: ATXN2; (+) strand; PAM type: YTN; PAM sequence: CTA
tctaccctaccatcacacaa

SEQ ID NO: 88805 - DNA, 20 bp, Artificial Sequence
  Description of Artificial Sequence: Synthetic oligonucleotide
  Target: ATXN2; (+) strand; PAM type: YTN; PAM sequence: CTA
ccctaccatcacacaaaagc

SEQ ID NO: 88806 - DNA, 20 bp, Artificial Sequence
  Description of Artificial Sequence: Synthetic oligonucleotide
  Target: ATXN2; (+) strand; PAM type: YTN; PAM sequence: CTA
ccatcacacaaaagcaaaaa

SEQ ID NO: 88807 - DNA, 20 bp, Artificial Sequence
  Description of Artificial Sequence: Synthetic oligonucleotide
  Target: ATXN2; (+) strand; PAM type: YTN; PAM sequence: TTA
taaaggaaaatccctttacc

SEQ ID NO: 88808 - DNA, 20 bp, Artificial Sequence
  Description of Artificial Sequence: Synthetic oligonucleotide
  Target: ATXN2; (+) strand; PAM type: YTN; PAM sequence: CTT
taccatattaaaagtttttt

SEQ ID NO: 88809 - DNA, 20 bp, Artificial Sequence
  Description of Artificial Sequence: Synthetic oligonucleotide
  Target: ATXN2; (+) strand; PAM type: YTN; PAM sequence: TTT
accatattaaaagttttttt

SEQ ID NO: 88810 - DNA, 20 bp, Artificial Sequence
  Description of Artificial Sequence: Synthetic oligonucleotide
  Target: ATXN2; (+) strand; PAM type: YTN; PAM sequence: TTA
ccatattaaaagttttttta

SEQ ID NO: 88811 - DNA, 20 bp, Artificial Sequence
  Description of Artificial Sequence: Synthetic oligonucleotide
  Target: ATXN2; (+) strand; PAM type: YTN; PAM sequence: TTA
aaagtttttttatatggtac

SEQ ID NO: 88812 - DNA, 20 bp, Artificial Sequence
  Description of Artificial Sequence: Synthetic oligonucleotide
  Target: ATXN2; (+) strand; PAM type: YTN; PAM sequence: TTT
ttttatatggtacaaaaatt

SEQ ID NO: 88813 - DNA, 20 bp, Artificial Sequence
  Description of Artificial Sequence: Synthetic oligonucleotide
  Target: ATXN2; (+) strand; PAM type: YTN; PAM sequence: TTT
tttatatggtacaaaaatta

SEQ ID NO: 88814 - DNA, 20 bp, Artificial Sequence
  Description of Artificial Sequence: Synthetic oligonucleotide
  Target: ATXN2; (+) strand; PAM type: YTN; PAM sequence: TTT
ttatatggtacaaaaattaa

SEQ ID NO: 88815 - DNA, 20 bp, Artificial Sequence
  Description of Artificial Sequence: Synthetic oligonucleotide
  Target: ATXN2; (+) strand; PAM type: YTN; PAM sequence: TTT
tatatggtacaaaaattaag

SEQ ID NO: 88816 - DNA, 20 bp, Artificial Sequence
  Description of Artificial Sequence: Synthetic oligonucleotide
  Target: ATXN2; (+) strand; PAM type: YTN; PAM sequence: TTT
atatggtacaaaaattaaga

SEQ ID NO: 88817 - DNA, 20 bp, Artificial Sequence
  Description of Artificial Sequence: Synthetic oligonucleotide
  Target: ATXN2; (+) strand; PAM type: YTN; PAM sequence: TTA
tatggtacaaaaattaagag

SEQ ID NO: 88818 - DNA, 20 bp, Artificial Sequence
  Description of Artificial Sequence: Synthetic oligonucleotide
  Target: ATXN2; (+) strand; PAM type: YTN; PAM sequence: TTA
agagttaggccttaccagcc

SEQ ID NO: 88819 - DNA, 20 bp, Artificial Sequence
  Description of Artificial Sequence: Synthetic oligonucleotide
  Target: ATXN2; (+) strand; PAM type: YTN; PAM sequence: TTA
ggccttaccagccttacctg

SEQ ID NO: 88820 - DNA, 20 bp, Artificial Sequence
  Description of Artificial Sequence: Synthetic oligonucleotide
  Target: ATXN2; (+) strand; PAM type: YTN; PAM sequence: CTT
accagccttacctgagactg

SEQ ID NO: 88821 - DNA, 20 bp, Artificial Sequence
  Description of Artificial Sequence: Synthetic oligonucleotide
  Target: ATXN2; (+) strand; PAM type: YTN; PAM sequence: TTA
ccagccttacctgagactga

SEQ ID NO: 88822 - DNA, 20 bp, Artificial Sequence
  Description of Artificial Sequence: Synthetic oligonucleotide
  Target: ATXN2; (+) strand; PAM type: YTN; PAM sequence: CTT
acctgagactgataatgtgg

SEQ ID NO: 88823 - DNA, 20 bp, Artificial Sequence
  Description of Artificial Sequence: Synthetic oligonucleotide
  Target: ATXN2; (+) strand; PAM type: YTN; PAM sequence: TTA
cctgagactgataatgtggc

SEQ ID NO: 88824 - DNA, 20 bp, Artificial Sequence
  Description of Artificial Sequence: Synthetic oligonucleotide
  Target: ATXN2; (+) strand; PAM type: YTN; PAM sequence: CTG
agactgataatgtggcacat

SEQ ID NO: 88825 - DNA, 20 bp, Artificial Sequence
  Description of Artificial Sequence: Synthetic oligonucleotide
  Target: ATXN2; (+) strand; PAM type: YTN; PAM sequence: CTG
ataatgtggcacatgctgaa

SEQ ID NO: 88826 - DNA, 20 bp, Artificial Sequence
  Description of Artificial Sequence: Synthetic oligonucleotide
  Target: ATXN2; (+) strand; PAM type: YTN; PAM sequence: CTG
aacaaggggctgatttggga

SEQ ID NO: 88827 - DNA, 20 bp, Artificial Sequence
  Description of Artificial Sequence: Synthetic oligonucleotide
  Target: ATXN2; (+) strand; PAM type: YTN; PAM sequence: CTG
atttgggaactgctgaggac

SEQ ID NO: 88828 - DNA, 20 bp, Artificial Sequence
  Description of Artificial Sequence: Synthetic oligonucleotide
  Target: ATXN2; (+) strand; PAM type: YTN; PAM sequence: TTT
gggaactgctgaggactgta

SEQ ID NO: 88829 - DNA, 20 bp, Artificial Sequence
  Description of Artificial Sequence: Synthetic oligonucleotide
  Target: ATXN2; (+) strand; PAM type: YTN; PAM sequence: TTG
ggaactgctgaggactgtag

SEQ ID NO: 88830 - DNA, 20 bp, Artificial Sequence
  Description of Artificial Sequence: Synthetic oligonucleotide
  Target: ATXN2; (+) strand; PAM type: YTN; PAM sequence: CTG
ctgaggactgtaggcaacat

SEQ ID NO: 88831 - DNA, 20 bp, Artificial Sequence
  Description of Artificial Sequence: Synthetic oligonucleotide
  Target: ATXN2; (+) strand; PAM type: YTN; PAM sequence: CTG
aggactgtaggcaacatatt

SEQ ID NO: 88832 - DNA, 20 bp, Artificial Sequence
  Description of Artificial Sequence: Synthetic oligonucleotide
  Target: ATXN2; (+) strand; PAM type: YTN; PAM sequence: CTG
taggcaacatattgcgtgga

SEQ ID NO: 88833 - DNA, 20 bp, Artificial Sequence
  Description of Artificial Sequence: Synthetic oligonucleotide
  Target: ATXN2; (+) strand; PAM type: YTN; PAM sequence: TTG
cgtggagtaagctggtgggg

SEQ ID NO: 88834 - DNA, 20 bp, Artificial Sequence
  Description of Artificial Sequence: Synthetic oligonucleotide
  Target: ATXN2; (+) strand; PAM type: YTN; PAM sequence: CTG
gtggggtggctgcaatcggt

SEQ ID NO: 88835 - DNA, 20 bp, Artificial Sequence
  Description of Artificial Sequence: Synthetic oligonucleotide
  Target: ATXN2; (+) strand; PAM type: YTN; PAM sequence: CTG
caatcggtgggcccgctgct

SEQ ID NO: 88836 - DNA, 20 bp, Artificial Sequence
  Description of Artificial Sequence: Synthetic oligonucleotide
  Target: ATXN2; (+) strand; PAM type: YTN; PAM sequence: CTG
ctgacgctgggtgcatcatg

SEQ ID NO: 88837 - DNA, 20 bp, Artificial Sequence
  Description of Artificial Sequence: Synthetic oligonucleotide
  Target: ATXN2; (+) strand; PAM type: YTN; PAM sequence: CTG
acgctgggtgcatcatggca

SEQ ID NO: 88838 - DNA, 20 bp, Artificial Sequence
  Description of Artificial Sequence: Synthetic oligonucleotide
  Target: ATXN2; (+) strand; PAM type: YTN; PAM sequence: CTG
ggtgcatcatggcactctga

SEQ ID NO: 88839 - DNA, 20 bp, Artificial Sequence
  Description of Artificial Sequence: Synthetic oligonucleotide
  Target: ATXN2; (+) strand; PAM type: YTN; PAM sequence: CTC
tgatgatgctggtcttgccg

SEQ ID NO: 88840 - DNA, 20 bp, Artificial Sequence
  Description of Artificial Sequence: Synthetic oligonucleotide
  Target: ATXN2; (+) strand; PAM type: YTN; PAM sequence: CTG
atgatgctggtcttgccgct

SEQ ID NO: 88841 - DNA, 20 bp, Artificial Sequence
  Description of Artificial Sequence: Synthetic oligonucleotide
  Target: ATXN2; (+) strand; PAM type: YTN; PAM sequence: CTG
gtcttgccgctgttggggca

SEQ ID NO: 88842 - DNA, 20 bp, Artificial Sequence
  Description of Artificial Sequence: Synthetic oligonucleotide
  Target: ATXN2; (+) strand; PAM type: YTN; PAM sequence: CTT
gccgctgttggggcatattt

SEQ ID NO: 88843 - DNA, 20 bp, Artificial Sequence
  Description of Artificial Sequence: Synthetic oligonucleotide
  Target: ATXN2; (+) strand; PAM type: YTN; PAM sequence: TTG
ccgctgttggggcatatttg

SEQ ID NO: 88844 - DNA, 20 bp, Artificial Sequence
  Description of Artificial Sequence: Synthetic oligonucleotide
  Target: ATXN2; (+) strand; PAM type: YTN; PAM sequence: CTG
ttggggcatatttggtactg

SEQ ID NO: 88845 - DNA, 20 bp, Artificial Sequence
  Description of Artificial Sequence: Synthetic oligonucleotide
  Target: ATXN2; (+) strand; PAM type: YTN; PAM sequence: TTG
gggcatatttggtactgcag

SEQ ID NO: 88846 - DNA, 20 bp, Artificial Sequence
  Description of Artificial Sequence: Synthetic oligonucleotide
  Target: ATXN2; (+) strand; PAM type: YTN; PAM sequence: TTT
ggtactgcagaaaaaaaagc

SEQ ID NO: 88847 - DNA, 20 bp, Artificial Sequence
  Description of Artificial Sequence: Synthetic oligonucleotide
  Target: ATXN2; (+) strand; PAM type: YTN; PAM sequence: TTG
gtactgcagaaaaaaaagca

SEQ ID NO: 88848 - DNA, 20 bp, Artificial Sequence
  Description of Artificial Sequence: Synthetic oligonucleotide
  Target: ATXN2; (+) strand; PAM type: YTN; PAM sequence: CTG
cagaaaaaaaagcagactgc

SEQ ID NO: 88849 - DNA, 20 bp, Artificial Sequence
  Description of Artificial Sequence: Synthetic oligonucleotide
  Target: ATXN2; (+) strand; PAM type: YTN; PAM sequence: CTG
cctattaaacagtatctcca

SEQ ID NO: 88850 - DNA, 20 bp, Artificial Sequence
  Description of Artificial Sequence: Synthetic oligonucleotide
  Target: ATXN2; (+) strand; PAM type: YTN; PAM sequence: CTA
ttaaacagtatctccacagc

SEQ ID NO: 88851 - DNA, 20 bp, Artificial Sequence
  Description of Artificial Sequence: Synthetic oligonucleotide
  Target: ATXN2; (+) strand; PAM type: YTN; PAM sequence: TTA
aacagtatctccacagcata

SEQ ID NO: 88852 - DNA, 20 bp, Artificial Sequence
  Description of Artificial Sequence: Synthetic oligonucleotide
  Target: ATXN2; (+) strand; PAM type: YTN; PAM sequence: CTC
cacagcataatacatgtgtt

SEQ ID NO: 88853 - DNA, 20 bp, Artificial Sequence
  Description of Artificial Sequence: Synthetic oligonucleotide
  Target: ATXN2; (+) strand; PAM type: YTN; PAM sequence: TTC
acatggtctaggaggctctg

SEQ ID NO: 88854 - DNA, 20 bp, Artificial Sequence
  Description of Artificial Sequence: Synthetic oligonucleotide
  Target: ATXN2; (+) strand; PAM type: YTN; PAM sequence: CTA
ggaggctctgaatgatttga

SEQ ID NO: 88855 - DNA, 20 bp, Artificial Sequence
  Description of Artificial Sequence: Synthetic oligonucleotide
  Target: ATXN2; (+) strand; PAM type: YTN; PAM sequence: CTC
tgaatgatttgaccctgaat

SEQ ID NO: 88856 - DNA, 20 bp, Artificial Sequence
  Description of Artificial Sequence: Synthetic oligonucleotide
  Target: ATXN2; (+) strand; PAM type: YTN; PAM sequence: CTG
aatgatttgaccctgaatct

SEQ ID NO: 88857 - DNA, 20 bp, Artificial Sequence
  Description of Artificial Sequence: Synthetic oligonucleotide
  Target: ATXN2; (+) strand; PAM type: YTN; PAM sequence: TTT
gaccctgaatctgcgtctct

SEQ ID NO: 88858 - DNA, 20 bp, Artificial Sequence
  Description of Artificial Sequence: Synthetic oligonucleotide
  Target: ATXN2; (+) strand; PAM type: YTN; PAM sequence: TTG
accctgaatctgcgtctctg

SEQ ID NO: 88859 - DNA, 20 bp, Artificial Sequence
  Description of Artificial Sequence: Synthetic oligonucleotide
  Target: ATXN2; (+) strand; PAM type: YTN; PAM sequence: CTG
aatctgcgtctctgatgcca

SEQ ID NO: 88860 - DNA, 20 bp, Artificial Sequence
  Description of Artificial Sequence: Synthetic oligonucleotide
  Target: ATXN2; (+) strand; PAM type: YTN; PAM sequence: CTG
cgtctctgatgccatctcat

SEQ ID NO: 88861 - DNA, 20 bp, Artificial Sequence
  Description of Artificial Sequence: Synthetic oligonucleotide
  Target: ATXN2; (+) strand; PAM type: YTN; PAM sequence: CTC
tgatgccatctcataccact

SEQ ID NO: 88862 - DNA, 20 bp, Artificial Sequence
  Description of Artificial Sequence: Synthetic oligonucleotide
  Target: ATXN2; (+) strand; PAM type: YTN; PAM sequence: CTG
atgccatctcataccactcc

SEQ ID NO: 88863 - DNA, 20 bp, Artificial Sequence
  Description of Artificial Sequence: Synthetic oligonucleotide
  Target: ATXN2; (+) strand; PAM type: YTN; PAM sequence: CTC
ataccactcccacttctgcc

SEQ ID NO: 88864 - DNA, 20 bp, Artificial Sequence
  Description of Artificial Sequence: Synthetic oligonucleotide
  Target: ATXN2; (+) strand; PAM type: YTN; PAM sequence: CTC
ccacttctgccactctgggt

SEQ ID NO: 88865 - DNA, 20 bp, Artificial Sequence
  Description of Artificial Sequence: Synthetic oligonucleotide
  Target: ATXN2; (+) strand; PAM type: YTN; PAM sequence: CTT
ctgccactctgggttatttt

SEQ ID NO: 88866 - DNA, 20 bp, Artificial Sequence
  Description of Artificial Sequence: Synthetic oligonucleotide
  Target: ATXN2; (+) strand; PAM type: YTN; PAM sequence: TTC
tgccactctgggttattttc

SEQ ID NO: 88867 - DNA, 20 bp, Artificial Sequence
  Description of Artificial Sequence: Synthetic oligonucleotide
  Target: ATXN2; (+) strand; PAM type: YTN; PAM sequence: CTG
ccactctgggttattttcct

SEQ ID NO: 88868 - DNA, 20 bp, Artificial Sequence
  Description of Artificial Sequence: Synthetic oligonucleotide
  Target: ATXN2; (+) strand; PAM type: YTN; PAM sequence: CTC
tgggttattttcctatcatg

SEQ ID NO: 88869 - DNA, 20 bp, Artificial Sequence
  Description of Artificial Sequence: Synthetic oligonucleotide
  Target: ATXN2; (+) strand; PAM type: YTN; PAM sequence: CTG
ggttattttcctatcatgca

SEQ ID NO: 88870 - DNA, 20 bp, Artificial Sequence
  Description of Artificial Sequence: Synthetic oligonucleotide
  Target: ATXN2; (+) strand; PAM type: YTN; PAM sequence: TTA
ttttcctatcatgcatgcta

SEQ ID NO: 88871 - DNA, 20 bp, Artificial Sequence
  Description of Artificial Sequence: Synthetic oligonucleotide
  Target: ATXN2; (+) strand; PAM type: YTN; PAM sequence: TTT
tcctatcatgcatgctagtc

SEQ ID NO: 88872 - DNA, 20 bp, Artificial Sequence
  Description of Artificial Sequence: Synthetic oligonucleotide
  Target: ATXN2; (+) strand; PAM type: YTN; PAM sequence: TTT
cctatcatgcatgctagtcc

SEQ ID NO: 88873 - DNA, 20 bp, Artificial Sequence
  Description of Artificial Sequence: Synthetic oligonucleotide
  Target: ATXN2; (+) strand; PAM type: YTN; PAM sequence: TTC
ctatcatgcatgctagtcct

SEQ ID NO: 88874 - DNA, 20 bp, Artificial Sequence
  Description of Artificial Sequence: Synthetic oligonucleotide
  Target: ATXN2; (+) strand; PAM type: YTN; PAM sequence: CTA
tcatgcatgctagtcctcag

SEQ ID NO: 88875 - DNA, 20 bp, Artificial Sequence
  Description of Artificial Sequence: Synthetic oligonucleotide
  Target: ATXN2; (+) strand; PAM type: YTN; PAM sequence: CTA
gtcctcagcctcaaacacca

SEQ ID NO: 88876 - DNA, 20 bp, Artificial Sequence
  Description of Artificial Sequence: Synthetic oligonucleotide
  Target: ATXN2; (+) strand; PAM type: YTN; PAM sequence: CTC
agcctcaaacaccagttccc

SEQ ID NO: 88877 - DNA, 20 bp, Artificial Sequence
  Description of Artificial Sequence: Synthetic oligonucleotide
  Target: ATXN2; (+) strand; PAM type: YTN; PAM sequence: CTC
aaacaccagttcccaaatcc

SEQ ID NO: 88878 - DNA, 20 bp, Artificial Sequence
  Description of Artificial Sequence: Synthetic oligonucleotide
  Target: ATXN2; (+) strand; PAM type: YTN; PAM sequence: TTC
ccaaatcccagctgggataa

SEQ ID NO: 88879 - DNA, 20 bp, Artificial Sequence
  Description of Artificial Sequence: Synthetic oligonucleotide
  Target: ATXN2; (+) strand; PAM type: YTN; PAM sequence: CTG
ggataattctgcttcatcct

SEQ ID NO: 88880 - DNA, 20 bp, Artificial Sequence
  Description of Artificial Sequence: Synthetic oligonucleotide
  Target: ATXN2; (+) strand; PAM type: YTN; PAM sequence: TTC
tgcttcatccttcaggtgtc

SEQ ID NO: 88881 - DNA, 20 bp, Artificial Sequence
  Description of Artificial Sequence: Synthetic oligonucleotide
  Target: ATXN2; (+) strand; PAM type: YTN; PAM sequence: CTG
cttcatccttcaggtgtcag

SEQ ID NO: 88882 - DNA, 20 bp, Artificial Sequence
  Description of Artificial Sequence: Synthetic oligonucleotide
  Target: ATXN2; (+) strand; PAM type: YTN; PAM sequence: CTT
catccttcaggtgtcagctt

SEQ ID NO: 88883 - DNA, 20 bp, Artificial Sequence
  Description of Artificial Sequence: Synthetic oligonucleotide
  Target: ATXN2; (+) strand; PAM type: YTN; PAM sequence: TTC
atccttcaggtgtcagcttg

SEQ ID NO: 88884 - DNA, 20 bp, Artificial Sequence
  Description of Artificial Sequence: Synthetic oligonucleotide
  Target: ATXN2; (+) strand; PAM type: YTN; PAM sequence: CTT
caggtgtcagcttgaaagca

SEQ ID NO: 88885 - DNA, 20 bp, Artificial Sequence
  Description of Artificial Sequence: Synthetic oligonucleotide
  Target: ATXN2; (+) strand; PAM type: YTN; PAM sequence: TTC
aggtgtcagcttgaaagcaa

SEQ ID NO: 88886 - DNA, 20 bp, Artificial Sequence
  Description of Artificial Sequence: Synthetic oligonucleotide
  Target: ATXN2; (+) strand; PAM type: YTN; PAM sequence: CTT
gaaagcaacttcctcagagg

SEQ ID NO: 88887 - DNA, 20 bp, Artificial Sequence
  Description of Artificial Sequence: Synthetic oligonucleotide
  Target: ATXN2; (+) strand; PAM type: YTN; PAM sequence: TTG
aaagcaacttcctcagaggg

SEQ ID NO: 88888 - DNA, 20 bp, Artificial Sequence
  Description of Artificial Sequence: Synthetic oligonucleotide
  Target: ATXN2; (+) strand; PAM type: YTN; PAM sequence: CTT
cctcagagggactttctctc

SEQ ID NO: 88889 - DNA, 20 bp, Artificial Sequence
  Description of Artificial Sequence: Synthetic oligonucleotide
  Target: ATXN2; (+) strand; PAM type: YTN; PAM sequence: TTC
ctcagagggactttctctca

SEQ ID NO: 88890 - DNA, 20 bp, Artificial Sequence
  Description of Artificial Sequence: Synthetic oligonucleotide
  Target: ATXN2; (+) strand; PAM type: YTN; PAM sequence: CTC
agagggactttctctcatgg

SEQ ID NO: 88891 - DNA, 20 bp, Artificial Sequence
  Description of Artificial Sequence: Synthetic oligonucleotide
  Target: ATXN2; (+) strand; PAM type: YTN; PAM sequence: CTT
tctctcatggccctcagact

SEQ ID NO: 88892 - DNA, 20 bp, Artificial Sequence
  Description of Artificial Sequence: Synthetic oligonucleotide
  Target: ATXN2; (+) strand; PAM type: YTN; PAM sequence: TTT
ctctcatggccctcagactt

SEQ ID NO: 88893 - DNA, 20 bp, Artificial Sequence
  Description of Artificial Sequence: Synthetic oligonucleotide
  Target: ATXN2; (+) strand; PAM type: YTN; PAM sequence: TTC
tctcatggccctcagacttg

SEQ ID NO: 88894 - DNA, 20 bp, Artificial Sequence
  Description of Artificial Sequence: Synthetic oligonucleotide
  Target: ATXN2; (+) strand; PAM type: YTN; PAM sequence: CTC
tcatggccctcagacttgat

SEQ ID NO: 88895 - DNA, 20 bp, Artificial Sequence
  Description of Artificial Sequence: Synthetic oligonucleotide
  Target: ATXN2; (+) strand; PAM type: YTN; PAM sequence: CTC
atggccctcagacttgatca

SEQ ID NO: 88896 - DNA, 20 bp, Artificial Sequence
  Description of Artificial Sequence: Synthetic oligonucleotide
  Target: ATXN2; (+) strand; PAM type: YTN; PAM sequence: CTC
agacttgatcaagtccctgt

SEQ ID NO: 88897 - DNA, 20 bp, Artificial Sequence
  Description of Artificial Sequence: Synthetic oligonucleotide
  Target: ATXN2; (+) strand; PAM type: YTN; PAM sequence: CTT
gatcaagtccctgtaacaga

SEQ ID NO: 88898 - DNA, 20 bp, Artificial Sequence
  Description of Artificial Sequence: Synthetic oligonucleotide
  Target: ATXN2; (+) strand; PAM type: YTN; PAM sequence: TTG
atcaagtccctgtaacagac

SEQ ID NO: 88899 - DNA, 20 bp, Artificial Sequence
  Description of Artificial Sequence: Synthetic oligonucleotide
  Target: ATXN2; (+) strand; PAM type: YTN; PAM sequence: CTG
taacagactctcacagcatt

SEQ ID NO: 88900 - DNA, 20 bp, Artificial Sequence
  Description of Artificial Sequence: Synthetic oligonucleotide
  Target: ATXN2; (+) strand; PAM type: YTN; PAM sequence: CTC
tcacagcattatgaaatcgc

SEQ ID NO: 88901 - DNA, 20 bp, Artificial Sequence
  Description of Artificial Sequence: Synthetic oligonucleotide
  Target: ATXN2; (+) strand; PAM type: YTN; PAM sequence: CTC
acagcattatgaaatcgctt

SEQ ID NO: 88902 - DNA, 20 bp, Artificial Sequence
  Description of Artificial Sequence: Synthetic oligonucleotide
  Target: ATXN2; (+) strand; PAM type: YTN; PAM sequence: TTA
tgaaatcgcttctcatatgg

SEQ ID NO: 88903 - DNA, 20 bp, Artificial Sequence
  Description of Artificial Sequence: Synthetic oligonucleotide
  Target: ATXN2; (+) strand; PAM type: YTN; PAM sequence: CTT
ctcatatggtattttctggg

SEQ ID NO: 88904 - DNA, 20 bp, Artificial Sequence
  Description of Artificial Sequence: Synthetic oligonucleotide
  Target: ATXN2; (+) strand; PAM type: YTN; PAM sequence: TTC
tcatatggtattttctggga

SEQ ID NO: 88905 - DNA, 20 bp, Artificial Sequence
  Description of Artificial Sequence: Synthetic oligonucleotide
  Target: ATXN2; (+) strand; PAM type: YTN; PAM sequence: CTC
atatggtattttctgggacg

SEQ ID NO: 88906 - DNA, 20 bp, Artificial Sequence
  Description of Artificial Sequence: Synthetic oligonucleotide
  Target: ATXN2; (+) strand; PAM type: YTN; PAM sequence: TTT
tctgggacgggcactgcatt

SEQ ID NO: 88907 - DNA, 20 bp, Artificial Sequence
  Description of Artificial Sequence: Synthetic oligonucleotide
  Target: ATXN2; (+) strand; PAM type: YTN; PAM sequence: TTT
ctgggacgggcactgcattc

SEQ ID NO: 88908 - DNA, 20 bp, Artificial Sequence
  Description of Artificial Sequence: Synthetic oligonucleotide
  Target: ATXN2; (+) strand; PAM type: YTN; PAM sequence: TTC
tgggacgggcactgcattca

SEQ ID NO: 88909 - DNA, 20 bp, Artificial Sequence
  Description of Artificial Sequence: Synthetic oligonucleotide
  Target: ATXN2; (+) strand; PAM type: YTN; PAM sequence: CTG
ggacgggcactgcattcatt

SEQ ID NO: 88910 - DNA, 20 bp, Artificial Sequence
  Description of Artificial Sequence: Synthetic oligonucleotide
  Target: ATXN2; (+) strand; PAM type: YTN; PAM sequence: CTG
cattcattttgagaaaaaca

SEQ ID NO: 88911 - DNA, 20 bp, Artificial Sequence
  Description of Artificial Sequence: Synthetic oligonucleotide
  Target: ATXN2; (+) strand; PAM type: YTN; PAM sequence: TTC
attttgagaaaaacaaaggc

SEQ ID NO: 88912 - DNA, 20 bp, Artificial Sequence
  Description of Artificial Sequence: Synthetic oligonucleotide
  Target: ATXN2; (+) strand; PAM type: YTN; PAM sequence: TTT
tgagaaaaacaaaggcatga

SEQ ID NO: 88913 - DNA, 20 bp, Artificial Sequence
  Description of Artificial Sequence: Synthetic oligonucleotide
  Target: ATXN2; (+) strand; PAM type: YTN; PAM sequence: TTT
gagaaaaacaaaggcatgac

SEQ ID NO: 88914 - DNA, 20 bp, Artificial Sequence
  Description of Artificial Sequence: Synthetic oligonucleotide
  Target: ATXN2; (+) strand; PAM type: YTN; PAM sequence: TTG
agaaaaacaaaggcatgacc

SEQ ID NO: 88915 - DNA, 20 bp, Artificial Sequence
  Description of Artificial Sequence: Synthetic oligonucleotide
  Target: ATXN2; (+) strand; PAM type: YTN; PAM sequence: CTA
actttctatcttccttaatt

SEQ ID NO: 88916 - DNA, 20 bp, Artificial Sequence
  Description of Artificial Sequence: Synthetic oligonucleotide
  Target: ATXN2; (+) strand; PAM type: YTN; PAM sequence: CTT
tctatcttccttaatttcca

SEQ ID NO: 88917 - DNA, 20 bp, Artificial Sequence
  Description of Artificial Sequence: Synthetic oligonucleotide
  Target: ATXN2; (+) strand; PAM type: YTN; PAM sequence: TTT
ctatcttccttaatttccaa

SEQ ID NO: 88918 - DNA, 20 bp, Artificial Sequence
  Description of Artificial Sequence: Synthetic oligonucleotide
  Target: ATXN2; (+) strand; PAM type: YTN; PAM sequence: TTC
tatcttccttaatttccaac

SEQ ID NO: 88919 - DNA, 20 bp, Artificial Sequence
  Description of Artificial Sequence: Synthetic oligonucleotide
  Target: ATXN2; (+) strand; PAM type: YTN; PAM sequence: CTA
tcttccttaatttccaacca

SEQ ID NO: 88920 - DNA, 20 bp, Artificial Sequence
  Description of Artificial Sequence: Synthetic oligonucleotide
  Target: ATXN2; (+) strand; PAM type: YTN; PAM sequence: CTT
ccttaatttccaaccactga

SEQ ID NO: 88921 - DNA, 20 bp, Artificial Sequence
  Description of Artificial Sequence: Synthetic oligonucleotide
  Target: ATXN2; (+) strand; PAM type: YTN; PAM sequence: TTC
cttaatttccaaccactgaa

SEQ ID NO: 88922 - DNA, 20 bp, Artificial Sequence
  Description of Artificial Sequence: Synthetic oligonucleotide
  Target: ATXN2; (+) strand; PAM type: YTN; PAM sequence: CTT
aatttccaaccactgaatcc

SEQ ID NO: 88923 - DNA, 20 bp, Artificial Sequence
  Description of Artificial Sequence: Synthetic oligonucleotide
  Target: ATXN2; (+) strand; PAM type: YTN; PAM sequence: TTA
atttccaaccactgaatcct

SEQ ID NO: 88924 - DNA, 20 bp, Artificial Sequence
  Description of Artificial Sequence: Synthetic oligonucleotide
  Target: ATXN2; (+) strand; PAM type: YTN; PAM sequence: TTT
ccaaccactgaatccttgta

SEQ ID NO: 88925 - DNA, 20 bp, Artificial Sequence
  Description of Artificial Sequence: Synthetic oligonucleotide
  Target: ATXN2; (+) strand; PAM type: YTN; PAM sequence: TTC
caaccactgaatccttgtaa

SEQ ID NO: 88926 - DNA, 20 bp, Artificial Sequence
  Description of Artificial Sequence: Synthetic oligonucleotide
  Target: ATXN2; (+) strand; PAM type: YTN; PAM sequence: CTG
aatccttgtaacacttccca

SEQ ID NO: 88927 - DNA, 20 bp, Artificial Sequence
  Description of Artificial Sequence: Synthetic oligonucleotide
  Target: ATXN2; (+) strand; PAM type: YTN; PAM sequence: CTT
gtaacacttcccattctttc

SEQ ID NO: 88928 - DNA, 20 bp, Artificial Sequence
  Description of Artificial Sequence: Synthetic oligonucleotide
  Target: ATXN2; (+) strand; PAM type: YTN; PAM sequence: TTG
taacacttcccattctttct

SEQ ID NO: 88929 - DNA, 20 bp, Artificial Sequence
  Description of Artificial Sequence: Synthetic oligonucleotide
  Target: ATXN2; (+) strand; PAM type: YTN; PAM sequence: CTT
cccattctttctcaaaccca

SEQ ID NO: 88930 - DNA, 20 bp, Artificial Sequence
  Description of Artificial Sequence: Synthetic oligonucleotide
  Target: ATXN2; (+) strand; PAM type: YTN; PAM sequence: TTC
ccattctttctcaaacccag

SEQ ID NO: 88931 - DNA, 20 bp, Artificial Sequence
  Description of Artificial Sequence: Synthetic oligonucleotide
  Target: ATXN2; (+) strand; PAM type: YTN; PAM sequence: TTC
tttctcaaacccagtataac

SEQ ID NO: 88932 - DNA, 20 bp, Artificial Sequence
  Description of Artificial Sequence: Synthetic oligonucleotide
  Target: ATXN2; (+) strand; PAM type: YTN; PAM sequence: CTT
tctcaaacccagtataacac

SEQ ID NO: 88933 - DNA, 20 bp, Artificial Sequence
  Description of Artificial Sequence: Synthetic oligonucleotide
  Target: ATXN2; (+) strand; PAM type: YTN; PAM sequence: TTT
ctcaaacccagtataacaca

SEQ ID NO: 88934 - DNA, 20 bp, Artificial Sequence
  Description of Artificial Sequence: Synthetic oligonucleotide
  Target: ATXN2; (+) strand; PAM type: YTN; PAM sequence: TTC
tcaaacccagtataacacag

SEQ ID NO: 88935 - DNA, 20 bp, Artificial Sequence
  Description of Artificial Sequence: Synthetic oligonucleotide
  Target: ATXN2; (+) strand; PAM type: YTN; PAM sequence: CTC
aaacccagtataacacagca

SEQ ID NO: 88936 - DNA, 20 bp, Artificial Sequence
  Description of Artificial Sequence: Synthetic oligonucleotide
  Target: ATXN2; (+) strand; PAM type: YTN; PAM sequence: TTT
ctaaataatagttcttttaa

SEQ ID NO: 88937 - DNA, 20 bp, Artificial Sequence
  Description of Artificial Sequence: Synthetic oligonucleotide
  Target: ATXN2; (+) strand; PAM type: YTN; PAM sequence: TTC
taaataatagttcttttaaa

SEQ ID NO: 88938 - DNA, 20 bp, Artificial Sequence
  Description of Artificial Sequence: Synthetic oligonucleotide
  Target: ATXN2; (+) strand; PAM type: YTN; PAM sequence: CTA
aataatagttcttttaaaag

SEQ ID NO: 88939 - DNA, 20 bp, Artificial Sequence
  Description of Artificial Sequence: Synthetic oligonucleotide
  Target: ATXN2; (+) strand; PAM type: YTN; PAM sequence: TTC
ttttaaaagattactttatg

SEQ ID NO: 88940 - DNA, 20 bp, Artificial Sequence
  Description of Artificial Sequence: Synthetic oligonucleotide
  Target: ATXN2; (+) strand; PAM type: YTN; PAM sequence: CTT
ttaaaagattactttatgtc

SEQ ID NO: 88941 - DNA, 20 bp, Artificial Sequence
  Description of Artificial Sequence: Synthetic oligonucleotide
  Target: ATXN2; (+) strand; PAM type: YTN; PAM sequence: TTT
taaaagattactttatgtct

SEQ ID NO: 88942 - DNA, 20 bp, Artificial Sequence
  Description of Artificial Sequence: Synthetic oligonucleotide
  Target: ATXN2; (+) strand; PAM type: YTN; PAM sequence: TTT
aaaagattactttatgtctt

SEQ ID NO: 88943 - DNA, 20 bp, Artificial Sequence
  Description of Artificial Sequence: Synthetic oligonucleotide
  Target: ATXN2; (+) strand; PAM type: YTN; PAM sequence: TTA
aaagattactttatgtctta

SEQ ID NO: 88944 - DNA, 20 bp, Artificial Sequence
  Description of Artificial Sequence: Synthetic oligonucleotide
  Target: ATXN2; (+) strand; PAM type: YTN; PAM sequence: TTA
ctttatgtcttatcttaatc

SEQ ID NO: 88945 - DNA, 20 bp, Artificial Sequence
  Description of Artificial Sequence: Synthetic oligonucleotide
  Target: ATXN2; (+) strand; PAM type: YTN; PAM sequence: CTT
tatgtcttatcttaatccac

SEQ ID NO: 88946 - DNA, 20 bp, Artificial Sequence
  Description of Artificial Sequence: Synthetic oligonucleotide
  Target: ATXN2; (+) strand; PAM type: YTN; PAM sequence: TTT
atgtcttatcttaatccaca

SEQ ID NO: 88947 - DNA, 20 bp, Artificial Sequence
  Description of Artificial Sequence: Synthetic oligonucleotide
  Target: ATXN2; (+) strand; PAM type: YTN; PAM sequence: TTA
tgtcttatcttaatccacac

SEQ ID NO: 88948 - DNA, 20 bp, Artificial Sequence
  Description of Artificial Sequence: Synthetic oligonucleotide
  Target: ATXN2; (+) strand; PAM type: YTN; PAM sequence: CTT
atcttaatccacacaggtgg

SEQ ID NO: 88949 - DNA, 20 bp, Artificial Sequence
  Description of Artificial Sequence: Synthetic oligonucleotide
  Target: ATXN2; (+) strand; PAM type: YTN; PAM sequence: TTA
tcttaatccacacaggtggt

SEQ ID NO: 88950 - DNA, 20 bp, Artificial Sequence
  Description of Artificial Sequence: Synthetic oligonucleotide
  Target: ATXN2; (+) strand; PAM type: YTN; PAM sequence: CTT
aatccacacaggtggtctgc

SEQ ID NO: 88951 - DNA, 20 bp, Artificial Sequence
  Description of Artificial Sequence: Synthetic oligonucleotide
  Target: ATXN2; (+) strand; PAM type: YTN; PAM sequence: TTA
atccacacaggtggtctgca

SEQ ID NO: 88952 - DNA, 20 bp, Artificial Sequence
  Description of Artificial Sequence: Synthetic oligonucleotide
  Target: ATXN2; (+) strand; PAM type: YTN; PAM sequence: CTG
catgtaagggcctcgccctg

SEQ ID NO: 88953 - DNA, 20 bp, Artificial Sequence
  Description of Artificial Sequence: Synthetic oligonucleotide
  Target: ATXN2; (+) strand; PAM type: YTN; PAM sequence: CTC
gccctgttacaactctagtt

SEQ ID NO: 88954 - DNA, 20 bp, Artificial Sequence
  Description of Artificial Sequence: Synthetic oligonucleotide
  Target: ATXN2; (+) strand; PAM type: YTN; PAM sequence: CTG
ttacaactctagttaagaat

SEQ ID NO: 88955 - DNA, 20 bp, Artificial Sequence
  Description of Artificial Sequence: Synthetic oligonucleotide
  Target: ATXN2; (+) strand; PAM type: YTN; PAM sequence: TTA
caactctagttaagaattca

SEQ ID NO: 88956 - DNA, 20 bp, Artificial Sequence
  Description of Artificial Sequence: Synthetic oligonucleotide
  Target: ATXN2; (+) strand; PAM type: YTN; PAM sequence: CTC
tagttaagaattcagctcaa

SEQ ID NO: 88957 - DNA, 20 bp, Artificial Sequence
  Description of Artificial Sequence: Synthetic oligonucleotide
  Target: ATXN2; (+) strand; PAM type: YTN; PAM sequence: CTA
gttaagaattcagctcaact

SEQ ID NO: 88958 - DNA, 20 bp, Artificial Sequence
  Description of Artificial Sequence: Synthetic oligonucleotide
  Target: ATXN2; (+) strand; PAM type: YTN; PAM sequence: TTA
agaattcagctcaactgtca

SEQ ID NO: 88959 - DNA, 20 bp, Artificial Sequence
  Description of Artificial Sequence: Synthetic oligonucleotide
  Target: ATXN2; (+) strand; PAM type: YTN; PAM sequence: TTC
agctcaactgtcatctccca

SEQ ID NO: 88960 - DNA, 20 bp, Artificial Sequence
  Description of Artificial Sequence: Synthetic oligonucleotide
  Target: ATXN2; (+) strand; PAM type: YTN; PAM sequence: CTC
aactgtcatctcccatgtga

SEQ ID NO: 88961 - DNA, 20 bp, Artificial Sequence
  Description of Artificial Sequence: Synthetic oligonucleotide
  Target: ATXN2; (+) strand; PAM type: YTN; PAM sequence: CTG
tcatctcccatgtgaggttt

SEQ ID NO: 88962 - DNA, 20 bp, Artificial Sequence
  Description of Artificial Sequence: Synthetic oligonucleotide
  Target: ATXN2; (+) strand; PAM type: YTN; PAM sequence: CTC
ccatgtgaggtttttttcca

SEQ ID NO: 88963 - DNA, 20 bp, Artificial Sequence
  Description of Artificial Sequence: Synthetic oligonucleotide
  Target: ATXN2; (+) strand; PAM type: YTN; PAM sequence: TTT
ttttccagttcctccagcac

SEQ ID NO: 88964 - DNA, 20 bp, Artificial Sequence
  Description of Artificial Sequence: Synthetic oligonucleotide
  Target: ATXN2; (+) strand; PAM type: YTN; PAM sequence: TTT
tttccagttcctccagcacg

SEQ ID NO: 88965 - DNA, 20 bp, Artificial Sequence
  Description of Artificial Sequence: Synthetic oligonucleotide
  Target: ATXN2; (+) strand; PAM type: YTN; PAM sequence: TTT
ttccagttcctccagcacga

SEQ ID NO: 88966 - DNA, 20 bp, Artificial Sequence
  Description of Artificial Sequence: Synthetic oligonucleotide
  Target: ATXN2; (+) strand; PAM type: YTN; PAM sequence: TTT
tccagttcctccagcacgag

SEQ ID NO: 88967 - DNA, 20 bp, Artificial Sequence
  Description of Artificial Sequence: Synthetic oligonucleotide
  Target: ATXN2; (+) strand; PAM type: YTN; PAM sequence: TTT
ccagttcctccagcacgagc

SEQ ID NO: 88968 - DNA, 20 bp, Artificial Sequence
  Description of Artificial Sequence: Synthetic oligonucleotide
  Target: ATXN2; (+) strand; PAM type: YTN; PAM sequence: TTC
cagttcctccagcacgagct

SEQ ID NO: 88969 - DNA, 20 bp, Artificial Sequence
  Description of Artificial Sequence: Synthetic oligonucleotide
  Target: ATXN2; (+) strand; PAM type: YTN; PAM sequence: TTC
ctccagcacgagctagctac

SEQ ID NO: 88970 - DNA, 20 bp, Artificial Sequence
  Description of Artificial Sequence: Synthetic oligonucleotide
  Target: ATXN2; (+) strand; PAM type: YTN; PAM sequence: CTC
cagcacgagctagctacttc

SEQ ID NO: 88971 - DNA, 20 bp, Artificial Sequence
  Description of Artificial Sequence: Synthetic oligonucleotide
  Target: ATXN2; (+) strand; PAM type: YTN; PAM sequence: CTA
gctacttcccatgtgcctct

SEQ ID NO: 88972 - DNA, 20 bp, Artificial Sequence
  Description of Artificial Sequence: Synthetic oligonucleotide
  Target: ATXN2; (+) strand; PAM type: YTN; PAM sequence: CTA
cttcccatgtgcctctttcc

SEQ ID NO: 88973 - DNA, 20 bp, Artificial Sequence
  Description of Artificial Sequence: Synthetic oligonucleotide
  Target: ATXN2; (+) strand; PAM type: YTN; PAM sequence: CTT
cccatgtgcctctttcctca

SEQ ID NO: 88974 - DNA, 20 bp, Artificial Sequence
  Description of Artificial Sequence: Synthetic oligonucleotide
  Target: ATXN2; (+) strand; PAM type: YTN; PAM sequence: TTC
ccatgtgcctctttcctcac

SEQ ID NO: 88975 - DNA, 20 bp, Artificial Sequence
  Description of Artificial Sequence: Synthetic oligonucleotide
  Target: ATXN2; (+) strand; PAM type: YTN; PAM sequence: CTC
tttcctcacacatttcttac

SEQ ID NO: 88976 - DNA, 20 bp, Artificial Sequence
  Description of Artificial Sequence: Synthetic oligonucleotide
  Target: ATXN2; (+) strand; PAM type: YTN; PAM sequence: CTT
tcctcacacatttcttacag

SEQ ID NO: 88977 - DNA, 20 bp, Artificial Sequence
  Description of Artificial Sequence: Synthetic oligonucleotide
  Target: ATXN2; (+) strand; PAM type: YTN; PAM sequence: TTT
cctcacacatttcttacagc

SEQ ID NO: 88978 - DNA, 20 bp, Artificial Sequence
  Description of Artificial Sequence: Synthetic oligonucleotide
  Target: ATXN2; (+) strand; PAM type: YTN; PAM sequence: TTC
ctcacacatttcttacagca

SEQ ID NO: 88979 - DNA, 20 bp, Artificial Sequence
  Description of Artificial Sequence: Synthetic oligonucleotide
  Target: ATXN2; (+) strand; PAM type: YTN; PAM sequence: CTC
acacatttcttacagcacta

SEQ ID NO: 88980 - DNA, 20 bp, Artificial Sequence
  Description of Artificial Sequence: Synthetic oligonucleotide
  Target: ATXN2; (+) strand; PAM type: YTN; PAM sequence: TTT
cttacagcactattgtctgt

SEQ ID NO: 88981 - DNA, 20 bp, Artificial Sequence
  Description of Artificial Sequence: Synthetic oligonucleotide
  Target: ATXN2; (+) strand; PAM type: YTN; PAM sequence: TTC
ttacagcactattgtctgtg

SEQ ID NO: 88982 - DNA, 20 bp, Artificial Sequence
  Description of Artificial Sequence: Synthetic oligonucleotide
  Target: ATXN2; (+) strand; PAM type: YTN; PAM sequence: CTT
acagcactattgtctgtgac

SEQ ID NO: 88983 - DNA, 20 bp, Artificial Sequence
  Description of Artificial Sequence: Synthetic oligonucleotide
  Target: ATXN2; (+) strand; PAM type: YTN; PAM sequence: TTA
cagcactattgtctgtgacc

SEQ ID NO: 88984 - DNA, 20 bp, Artificial Sequence
  Description of Artificial Sequence: Synthetic oligonucleotide
  Target: ATXN2; (+) strand; PAM type: YTN; PAM sequence: CTA
ttgtctgtgacctgtttctg

SEQ ID NO: 88985 - DNA, 20 bp, Artificial Sequence
  Description of Artificial Sequence: Synthetic oligonucleotide
  Target: ATXN2; (+) strand; PAM type: YTN; PAM sequence: TTG
tctgtgacctgtttctggtg

SEQ ID NO: 88986 - DNA, 20 bp, Artificial Sequence
  Description of Artificial Sequence: Synthetic oligonucleotide
  Target: ATXN2; (+) strand; PAM type: YTN; PAM sequence: CTG
tgacctgtttctggtgtggc

SEQ ID NO: 88987 - DNA, 20 bp, Artificial Sequence
  Description of Artificial Sequence: Synthetic oligonucleotide
  Target: ATXN2; (+) strand; PAM type: YTN; PAM sequence: CTG
tttctggtgtggcattaacc

SEQ ID NO: 88988 - DNA, 20 bp, Artificial Sequence
  Description of Artificial Sequence: Synthetic oligonucleotide
  Target: ATXN2; (+) strand; PAM type: YTN; PAM sequence: TTT
ctggtgtggcattaaccaag

SEQ ID NO: 88989 - DNA, 20 bp, Artificial Sequence
  Description of Artificial Sequence: Synthetic oligonucleotide
  Target: ATXN2; (+) strand; PAM type: YTN; PAM sequence: TTC
tggtgtggcattaaccaagc

SEQ ID NO: 88990 - DNA, 20 bp, Artificial Sequence
  Description of Artificial Sequence: Synthetic oligonucleotide
  Target: ATXN2; (+) strand; PAM type: YTN; PAM sequence: CTG
gtgtggcattaaccaagcca

SEQ ID NO: 88991 - DNA, 20 bp, Artificial Sequence
  Description of Artificial Sequence: Synthetic oligonucleotide
  Target: ATXN2; (+) strand; PAM type: YTN; PAM sequence: TTA
accaagccacttcaggaaaa

SEQ ID NO: 88992 - DNA, 20 bp, Artificial Sequence
  Description of Artificial Sequence: Synthetic oligonucleotide
  Target: ATXN2; (+) strand; PAM type: YTN; PAM sequence: CTT
caggaaaataattgtggaat

SEQ ID NO: 88993 - DNA, 20 bp, Artificial Sequence
  Description of Artificial Sequence: Synthetic oligonucleotide
  Target: ATXN2; (+) strand; PAM type: YTN; PAM sequence: TTC
aggaaaataattgtggaatg

SEQ ID NO: 88994 - DNA, 20 bp, Artificial Sequence
  Description of Artificial Sequence: Synthetic oligonucleotide
  Target: ATXN2; (+) strand; PAM type: YTN; PAM sequence: TTG
tggaatgactgcttacaact

SEQ ID NO: 88995 - DNA, 20 bp, Artificial Sequence
  Description of Artificial Sequence: Synthetic oligonucleotide
  Target: ATXN2; (+) strand; PAM type: YTN; PAM sequence: CTG
cttacaactaggtataaggc

SEQ ID NO: 88996 - DNA, 20 bp, Artificial Sequence
  Description of Artificial Sequence: Synthetic oligonucleotide
  Target: ATXN2; (+) strand; PAM type: YTN; PAM sequence: CTT
acaactaggtataaggcaca

SEQ ID NO: 88997 - DNA, 20 bp, Artificial Sequence
  Description of Artificial Sequence: Synthetic oligonucleotide
  Target: ATXN2; (+) strand; PAM type: YTN; PAM sequence: TTA
caactaggtataaggcacaa

SEQ ID NO: 88998 - DNA, 20 bp, Artificial Sequence
  Description of Artificial Sequence: Synthetic oligonucleotide
  Target: ATXN2; (+) strand; PAM type: YTN; PAM sequence: CTA
ggtataaggcacaaagaata

SEQ ID NO: 88999 - DNA, 20 bp, Artificial Sequence
  Description of Artificial Sequence: Synthetic oligonucleotide
  Target: ATXN2; (+) strand; PAM type: YTN; PAM sequence: CTT
gttcataaaatcctaagaac

SEQ ID NO: 89000 - DNA, 20 bp, Artificial Sequence
  Description of Artificial Sequence: Synthetic oligonucleotide
  Target: ATXN2; (+) strand; PAM type: YTN; PAM sequence: TTG
ttcataaaatcctaagaact

SEQ ID NO: 89001 - DNA, 20 bp, Artificial Sequence
  Description of Artificial Sequence: Synthetic oligonucleotide
  Target: ATXN2; (+) strand; PAM type: YTN; PAM sequence: TTC
ataaaatcctaagaactgat

SEQ ID NO: 89002 - DNA, 20 bp, Artificial Sequence
  Description of Artificial Sequence: Synthetic oligonucleotide
  Target: ATXN2; (+) strand; PAM type: YTN; PAM sequence: CTA
agaactgattatataattaa

SEQ ID NO: 89003 - DNA, 20 bp, Artificial Sequence
  Description of Artificial Sequence: Synthetic oligonucleotide
  Target: ATXN2; (+) strand; PAM type: YTN; PAM sequence: CTG
attatataattaactgcaaa

SEQ ID NO: 89004 - DNA, 20 bp, Artificial Sequence
  Description of Artificial Sequence: Synthetic oligonucleotide
  Target: ATXN2; (+) strand; PAM type: YTN; PAM sequence: TTA
tataattaactgcaaatttg

SEQ ID NO: 89005 - DNA, 20 bp, Artificial Sequence
  Description of Artificial Sequence: Synthetic oligonucleotide
  Target: ATXN2; (+) strand; PAM type: YTN; PAM sequence: TTA
actgcaaatttgtggctaaa

SEQ ID NO: 89006 - DNA, 20 bp, Artificial Sequence
  Description of Artificial Sequence: Synthetic oligonucleotide
  Target: ATXN2; (+) strand; PAM type: YTN; PAM sequence: CTG
caaatttgtggctaaacatt

SEQ ID NO: 89007 - DNA, 20 bp, Artificial Sequence
  Description of Artificial Sequence: Synthetic oligonucleotide
  Target: ATXN2; (+) strand; PAM type: YTN; PAM sequence: TTT
gtggctaaacattcactaac

SEQ ID NO: 89008 - DNA, 20 bp, Artificial Sequence
  Description of Artificial Sequence: Synthetic oligonucleotide
  Target: ATXN2; (+) strand; PAM type: YTN; PAM sequence: TTG
tggctaaacattcactaact

SEQ ID NO: 89009 - DNA, 20 bp, Artificial Sequence
  Description of Artificial Sequence: Synthetic oligonucleotide
  Target: ATXN2; (+) strand; PAM type: YTN; PAM sequence: CTA
aacattcactaactgttgct

SEQ ID NO: 89010 - DNA, 20 bp, Artificial Sequence
  Description of Artificial Sequence: Synthetic oligonucleotide
  Target: ATXN2; (+) strand; PAM type: YTN; PAM sequence: TTC
actaactgttgctgaaattt

SEQ ID NO: 89011 - DNA, 20 bp, Artificial Sequence
  Description of Artificial Sequence: Synthetic oligonucleotide
  Target: ATXN2; (+) strand; PAM type: YTN; PAM sequence: CTA
actgttgctgaaatttggga

SEQ ID NO: 89012 - DNA, 20 bp, Artificial Sequence
  Description of Artificial Sequence: Synthetic oligonucleotide
  Target: ATXN2; (+) strand; PAM type: YTN; PAM sequence: CTG
ttgctgaaatttgggagagc

SEQ ID NO: 89013 - DNA, 20 bp, Artificial Sequence
  Description of Artificial Sequence: Synthetic oligonucleotide
  Target: ATXN2; (+) strand; PAM type: YTN; PAM sequence: TTG
ctgaaatttgggagagctag

SEQ ID NO: 89014 - DNA, 20 bp, Artificial Sequence
  Description of Artificial Sequence: Synthetic oligonucleotide
  Target: ATXN2; (+) strand; PAM type: YTN; PAM sequence: CTG
aaatttgggagagctagtta

SEQ ID NO: 89015 - DNA, 20 bp, Artificial Sequence
  Description of Artificial Sequence: Synthetic oligonucleotide
  Target: ATXN2; (+) strand; PAM type: YTN; PAM sequence: TTT
gggagagctagttacatatt

SEQ ID NO: 89016 - DNA, 20 bp, Artificial Sequence
  Description of Artificial Sequence: Synthetic oligonucleotide
  Target: ATXN2; (+) strand; PAM type: YTN; PAM sequence: TTG
ggagagctagttacatatta

SEQ ID NO: 89017 - DNA, 20 bp, Artificial Sequence
  Description of Artificial Sequence: Synthetic oligonucleotide
  Target: ATXN2; (+) strand; PAM type: YTN; PAM sequence: CTA
gttacatattattttatcta

SEQ ID NO: 89018 - DNA, 20 bp, Artificial Sequence
  Description of Artificial Sequence: Synthetic oligonucleotide
  Target: ATXN2; (+) strand; PAM type: YTN; PAM sequence: TTA
catattattttatctatgta

SEQ ID NO: 89019 - DNA, 20 bp, Artificial Sequence
  Description of Artificial Sequence: Synthetic oligonucleotide
  Target: ATXN2; (+) strand; PAM type: YTN; PAM sequence: TTA
ttttatctatgtaggaaagc

SEQ ID NO: 89020 - DNA, 20 bp, Artificial Sequence
  Description of Artificial Sequence: Synthetic oligonucleotide
  Target: ATXN2; (+) strand; PAM type: YTN; PAM sequence: TTT
tatctatgtaggaaagcaaa

SEQ ID NO: 89021 - DNA, 20 bp, Artificial Sequence
  Description of Artificial Sequence: Synthetic oligonucleotide
  Target: ATXN2; (+) strand; PAM type: YTN; PAM sequence: TTT
atctatgtaggaaagcaaac

SEQ ID NO: 89022 - DNA, 20 bp, Artificial Sequence
  Description of Artificial Sequence: Synthetic oligonucleotide
  Target: ATXN2; (+) strand; PAM type: YTN; PAM sequence: TTA
tctatgtaggaaagcaaacc

SEQ ID NO: 89023 - DNA, 20 bp, Artificial Sequence
  Description of Artificial Sequence: Synthetic oligonucleotide
  Target: ATXN2; (+) strand; PAM type: YTN; PAM sequence: CTA
tgtaggaaagcaaacctgaa

SEQ ID NO: 89024 - DNA, 20 bp, Artificial Sequence
  Description of Artificial Sequence: Synthetic oligonucleotide
  Target: ATXN2; (+) strand; PAM type: YTN; PAM sequence: CTG
aacatttttttatattttat

SEQ ID NO: 89025 - DNA, 20 bp, Artificial Sequence
  Description of Artificial Sequence: Synthetic oligonucleotide
  Target: ATXN2; (+) strand; PAM type: YTN; PAM sequence: TTT
ttttatattttatcttggat

SEQ ID NO: 89026 - DNA, 20 bp, Artificial Sequence
  Description of Artificial Sequence: Synthetic oligonucleotide
  Target: ATXN2; (+) strand; PAM type: YTN; PAM sequence: TTT
tttatattttatcttggatg

SEQ ID NO: 89027 - DNA, 20 bp, Artificial Sequence
  Description of Artificial Sequence: Synthetic oligonucleotide
  Target: ATXN2; (+) strand; PAM type: YTN; PAM sequence: TTT
ttatattttatcttggatgc

SEQ ID NO: 89028 - DNA, 20 bp, Artificial Sequence
  Description of Artificial Sequence: Synthetic oligonucleotide
  Target: ATXN2; (+) strand; PAM type: YTN; PAM sequence: TTT
tatattttatcttggatgca

SEQ ID NO: 89029 - DNA, 20 bp, Artificial Sequence
  Description of Artificial Sequence: Synthetic oligonucleotide
  Target: ATXN2; (+) strand; PAM type: YTN; PAM sequence: TTT
atattttatcttggatgcac

SEQ ID NO: 89030 - DNA, 20 bp, Artificial Sequence
  Description of Artificial Sequence: Synthetic oligonucleotide
  Target: ATXN2; (+) strand; PAM type: YTN; PAM sequence: TTA
tattttatcttggatgcacg

SEQ ID NO: 89031 - DNA, 20 bp, Artificial Sequence
  Description of Artificial Sequence: Synthetic oligonucleotide
  Target: ATXN2; (+) strand; PAM type: YTN; PAM sequence: TTT
tatcttggatgcacgtattt

SEQ ID NO: 89032 - DNA, 20 bp, Artificial Sequence
  Description of Artificial Sequence: Synthetic oligonucleotide
  Target: ATXN2; (+) strand; PAM type: YTN; PAM sequence: TTT
atcttggatgcacgtattta

SEQ ID NO: 89033 - DNA, 20 bp, Artificial Sequence
  Description of Artificial Sequence: Synthetic oligonucleotide
  Target: ATXN2; (+) strand; PAM type: YTN; PAM sequence: TTA
tcttggatgcacgtatttaa

SEQ ID NO: 89034 - DNA, 20 bp, Artificial Sequence
  Description of Artificial Sequence: Synthetic oligonucleotide
  Target: ATXN2; (+) strand; PAM type: YTN; PAM sequence: CTT
ggatgcacgtatttaaaaac

SEQ ID NO: 89035 - DNA, 20 bp, Artificial Sequence
  Description of Artificial Sequence: Synthetic oligonucleotide
  Target: ATXN2; (+) strand; PAM type: YTN; PAM sequence: TTG
gatgcacgtatttaaaaacc

SEQ ID NO: 89036 - DNA, 20 bp, Artificial Sequence
  Description of Artificial Sequence: Synthetic oligonucleotide
  Target: ATXN2; (+) strand; PAM type: YTN; PAM sequence: TTT
aaaaaccacctccttctggt

SEQ ID NO: 89037 - DNA, 20 bp, Artificial Sequence
  Description of Artificial Sequence: Synthetic oligonucleotide
  Target: ATXN2; (+) strand; PAM type: YTN; PAM sequence: TTA
aaaaccacctccttctggta

SEQ ID NO: 89038 - DNA, 20 bp, Artificial Sequence
  Description of Artificial Sequence: Synthetic oligonucleotide
  Target: ATXN2; (+) strand; PAM type: YTN; PAM sequence: CTC
cttctggtaaacaaaaaagc

SEQ ID NO: 89039 - DNA, 20 bp, Artificial Sequence
  Description of Artificial Sequence: Synthetic oligonucleotide
  Target: ATXN2; (+) strand; PAM type: YTN; PAM sequence: CTT
ctggtaaacaaaaaagccac

SEQ ID NO: 89040 - DNA, 20 bp, Artificial Sequence
  Description of Artificial Sequence: Synthetic oligonucleotide
  Target: ATXN2; (+) strand; PAM type: YTN; PAM sequence: TTC
tggtaaacaaaaaagccact

SEQ ID NO: 89041 - DNA, 20 bp, Artificial Sequence
  Description of Artificial Sequence: Synthetic oligonucleotide
  Target: ATXN2; (+) strand; PAM type: YTN; PAM sequence: CTG
gtaaacaaaaaagccactga

SEQ ID NO: 89042 - DNA, 20 bp, Artificial Sequence
  Description of Artificial Sequence: Synthetic oligonucleotide
  Target: ATXN2; (+) strand; PAM type: YTN; PAM sequence: CTG
aaaactacttatcactttta

SEQ ID NO: 89043 - DNA, 20 bp, Artificial Sequence
  Description of Artificial Sequence: Synthetic oligonucleotide
  Target: ATXN2; (+) strand; PAM type: YTN; PAM sequence: CTA
cttatcacttttatcaaatg

SEQ ID NO: 89044 - DNA, 20 bp, Artificial Sequence
  Description of Artificial Sequence: Synthetic oligonucleotide
  Target: ATXN2; (+) strand; PAM type: YTN; PAM sequence: CTT
atcacttttatcaaatgaaa

SEQ ID NO: 89045 - DNA, 20 bp, Artificial Sequence
  Description of Artificial Sequence: Synthetic oligonucleotide
  Target: ATXN2; (+) strand; PAM type: YTN; PAM sequence: TTA
tcacttttatcaaatgaaag

SEQ ID NO: 89046 - DNA, 20 bp, Artificial Sequence
  Description of Artificial Sequence: Synthetic oligonucleotide
  Target: ATXN2; (+) strand; PAM type: YTN; PAM sequence: CTT
ttatcaaatgaaagtttgcc

SEQ ID NO: 89047 - DNA, 20 bp, Artificial Sequence
  Description of Artificial Sequence: Synthetic oligonucleotide
  Target: ATXN2; (+) strand; PAM type: YTN; PAM sequence: TTT
tatcaaatgaaagtttgccc

SEQ ID NO: 89048 - DNA, 20 bp, Artificial Sequence
  Description of Artificial Sequence: Synthetic oligonucleotide
  Target: ATXN2; (+) strand; PAM type: YTN; PAM sequence: TTT
atcaaatgaaagtttgcccg

SEQ ID NO: 89049 - DNA, 20 bp, Artificial Sequence
  Description of Artificial Sequence: Synthetic oligonucleotide
  Target: ATXN2; (+) strand; PAM type: YTN; PAM sequence: TTA
tcaaatgaaagtttgcccga

SEQ ID NO: 89050 - DNA, 20 bp, Artificial Sequence
  Description of Artificial Sequence: Synthetic oligonucleotide
  Target: ATXN2; (+) strand; PAM type: YTN; PAM sequence: TTT
gcccgattatgctaactgag

SEQ ID NO: 89051 - DNA, 20 bp, Artificial Sequence
  Description of Artificial Sequence: Synthetic oligonucleotide
  Target: ATXN2; (+) strand; PAM type: YTN; PAM sequence: TTG
cccgattatgctaactgagc

SEQ ID NO: 89052 - DNA, 20 bp, Artificial Sequence
  Description of Artificial Sequence: Synthetic oligonucleotide
  Target: ATXN2; (+) strand; PAM type: YTN; PAM sequence: TTA
tgctaactgagcttaaacta

SEQ ID NO: 89053 - DNA, 20 bp, Artificial Sequence
  Description of Artificial Sequence: Synthetic oligonucleotide
  Target: ATXN2; (+) strand; PAM type: YTN; PAM sequence: CTA
actgagcttaaactattcac

SEQ ID NO: 89054 - DNA, 20 bp, Artificial Sequence
  Description of Artificial Sequence: Synthetic oligonucleotide
  Target: ATXN2; (+) strand; PAM type: YTN; PAM sequence: CTG
agcttaaactattcactatt

SEQ ID NO: 89055 - DNA, 20 bp, Artificial Sequence
  Description of Artificial Sequence: Synthetic oligonucleotide
  Target: ATXN2; (+) strand; PAM type: YTN; PAM sequence: CTT
aaactattcactattattac

SEQ ID NO: 89056 - DNA, 20 bp, Artificial Sequence
  Description of Artificial Sequence: Synthetic oligonucleotide
  Target: ATXN2; (+) strand; PAM type: YTN; PAM sequence: TTA
aactattcactattattact

SEQ ID NO: 89057 - DNA, 20 bp, Artificial Sequence
  Description of Artificial Sequence: Synthetic oligonucleotide
  Target: ATXN2; (+) strand; PAM type: YTN; PAM sequence: CTA
ttcactattattactttgtt

SEQ ID NO: 89058 - DNA, 20 bp, Artificial Sequence
  Description of Artificial Sequence: Synthetic oligonucleotide
  Target: ATXN2; (+) strand; PAM type: YTN; PAM sequence: TTC
actattattactttgttact

SEQ ID NO: 89059 - DNA, 20 bp, Artificial Sequence
  Description of Artificial Sequence: Synthetic oligonucleotide
  Target: ATXN2; (+) strand; PAM type: YTN; PAM sequence: CTA
ttattactttgttacttatt

SEQ ID NO: 89060 - DNA, 20 bp, Artificial Sequence
  Description of Artificial Sequence: Synthetic oligonucleotide
  Target: ATXN2; (+) strand; PAM type: YTN; PAM sequence: TTA
ttactttgttacttattacc

SEQ ID NO: 89061 - DNA, 20 bp, Artificial Sequence
  Description of Artificial Sequence: Synthetic oligonucleotide
  Target: ATXN2; (+) strand; PAM type: YTN; PAM sequence: TTA
ctttgttacttattaccttc

SEQ ID NO: 89062 - DNA, 20 bp, Artificial Sequence
  Description of Artificial Sequence: Synthetic oligonucleotide
  Target: ATXN2; (+) strand; PAM type: YTN; PAM sequence: CTT
tgttacttattaccttcctg

SEQ ID NO: 89063 - DNA, 20 bp, Artificial Sequence
  Description of Artificial Sequence: Synthetic oligonucleotide
  Target: ATXN2; (+) strand; PAM type: YTN; PAM sequence: TTT
gttacttattaccttcctgt

SEQ ID NO: 89064 - DNA, 20 bp, Artificial Sequence
  Description of Artificial Sequence: Synthetic oligonucleotide
  Target: ATXN2; (+) strand; PAM type: YTN; PAM sequence: TTG
ttacttattaccttcctgta

SEQ ID NO: 89065 - DNA, 20 bp, Artificial Sequence
  Description of Artificial Sequence: Synthetic oligonucleotide
  Target: ATXN2; (+) strand; PAM type: YTN; PAM sequence: TTA
cttattaccttcctgtatat

SEQ ID NO: 89066 - DNA, 20 bp, Artificial Sequence
  Description of Artificial Sequence: Synthetic oligonucleotide
  Target: ATXN2; (+) strand; PAM type: YTN; PAM sequence: CTT
attaccttcctgtatattta

SEQ ID NO: 89067 - DNA, 20 bp, Artificial Sequence
  Description of Artificial Sequence: Synthetic oligonucleotide
  Target: ATXN2; (+) strand; PAM type: YTN; PAM sequence: TTA
ttaccttcctgtatatttaa

SEQ ID NO: 89068 - DNA, 20 bp, Artificial Sequence
  Description of Artificial Sequence: Synthetic oligonucleotide
  Target: ATXN2; (+) strand; PAM type: YTN; PAM sequence: TTA
ccttcctgtatatttaaaaa

SEQ ID NO: 89069 - DNA, 20 bp, Artificial Sequence
  Description of Artificial Sequence: Synthetic oligonucleotide
  Target: ATXN2; (+) strand; PAM type: YTN; PAM sequence: CTT
cctgtatatttaaaaaataa

SEQ ID NO: 89070 - DNA, 20 bp, Artificial Sequence
  Description of Artificial Sequence: Synthetic oligonucleotide
  Target: ATXN2; (+) strand; PAM type: YTN; PAM sequence: TTC
ctgtatatttaaaaaataat

SEQ ID NO: 89071 - DNA, 20 bp, Artificial Sequence
  Description of Artificial Sequence: Synthetic oligonucleotide
  Target: ATXN2; (+) strand; PAM type: YTN; PAM sequence: CTG
tatatttaaaaaataattaa

SEQ ID NO: 89072 - DNA, 20 bp, Artificial Sequence
  Description of Artificial Sequence: Synthetic oligonucleotide
  Target: ATXN2; (+) strand; PAM type: YTN; PAM sequence: TTT
aaaaaataattaaaaagcta

SEQ ID NO: 89073 - DNA, 20 bp, Artificial Sequence
  Description of Artificial Sequence: Synthetic oligonucleotide
  Target: ATXN2; (+) strand; PAM type: YTN; PAM sequence: TTA
aaaaataattaaaaagctag

SEQ ID NO: 89074 - DNA, 20 bp, Artificial Sequence
  Description of Artificial Sequence: Synthetic oligonucleotide
  Target: ATXN2; (+) strand; PAM type: YTN; PAM sequence: TTA
aaaagctagtcaagtatact

SEQ ID NO: 89075 - DNA, 20 bp, Artificial Sequence
  Description of Artificial Sequence: Synthetic oligonucleotide
  Target: ATXN2; (+) strand; PAM type: YTN; PAM sequence: CTA
gtcaagtatactatggtgct

SEQ ID NO: 89076 - DNA, 20 bp, Artificial Sequence
  Description of Artificial Sequence: Synthetic oligonucleotide
  Target: ATXN2; (+) strand; PAM type: YTN; PAM sequence: CTA
tggtgctattatttagatat

SEQ ID NO: 89077 - DNA, 20 bp, Artificial Sequence
  Description of Artificial Sequence: Synthetic oligonucleotide
  Target: ATXN2; (+) strand; PAM type: YTN; PAM sequence: CTA
ttatttagatatcatgtgtt

SEQ ID NO: 89078 - DNA, 20 bp, Artificial Sequence
  Description of Artificial Sequence: Synthetic oligonucleotide
  Target: ATXN2; (+) strand; PAM type: YTN; PAM sequence: TTA
tttagatatcatgtgtttgt

SEQ ID NO: 89079 - DNA, 20 bp, Artificial Sequence
  Description of Artificial Sequence: Synthetic oligonucleotide
  Target: ATXN2; (+) strand; PAM type: YTN; PAM sequence: TTT
agatatcatgtgtttgtctc

SEQ ID NO: 89080 - DNA, 20 bp, Artificial Sequence
  Description of Artificial Sequence: Synthetic oligonucleotide
  Target: ATXN2; (+) strand; PAM type: YTN; PAM sequence: TTA
gatatcatgtgtttgtctcc

SEQ ID NO: 89081 - DNA, 20 bp, Artificial Sequence
  Description of Artificial Sequence: Synthetic oligonucleotide
  Target: ATXN2; (+) strand; PAM type: YTN; PAM sequence: TTT
gtctccactaattctcatgt

SEQ ID NO: 89082 - DNA, 20 bp, Artificial Sequence
  Description of Artificial Sequence: Synthetic oligonucleotide
  Target: ATXN2; (+) strand; PAM type: YTN; PAM sequence: TTG
tctccactaattctcatgtt

SEQ ID NO: 89083 - DNA, 20 bp, Artificial Sequence
  Description of Artificial Sequence: Synthetic oligonucleotide
  Target: ATXN2; (+) strand; PAM type: YTN; PAM sequence: CTC
cactaattctcatgttaaaa

SEQ ID NO: 89084 - DNA, 20 bp, Artificial Sequence
  Description of Artificial Sequence: Synthetic oligonucleotide
  Target: ATXN2; (+) strand; PAM type: YTN; PAM sequence: CTA
attctcatgttaaaacatga

SEQ ID NO: 89085 - DNA, 20 bp, Artificial Sequence
  Description of Artificial Sequence: Synthetic oligonucleotide
  Target: ATXN2; (+) strand; PAM type: YTN; PAM sequence: TTC
tcatgttaaaacatgatccc

SEQ ID NO: 89086 - DNA, 20 bp, Artificial Sequence
  Description of Artificial Sequence: Synthetic oligonucleotide
  Target: ATXN2; (+) strand; PAM type: YTN; PAM sequence: CTC
atgttaaaacatgatcccca

SEQ ID NO: 89087 - DNA, 20 bp, Artificial Sequence
  Description of Artificial Sequence: Synthetic oligonucleotide
  Target: ATXN2; (+) strand; PAM type: YTN; PAM sequence: TTA
aaacatgatccccaggccag

SEQ ID NO: 89088 - DNA, 20 bp, Artificial Sequence
  Description of Artificial Sequence: Synthetic oligonucleotide
  Target: ATXN2; (+) strand; PAM type: YTN; PAM sequence: CTC
acgcttataatccctacact

SEQ ID NO: 89089 - DNA, 20 bp, Artificial Sequence
  Description of Artificial Sequence: Synthetic oligonucleotide
  Target: ATXN2; (+) strand; PAM type: YTN; PAM sequence: CTT
ataatccctacactttagga

SEQ ID NO: 89090 - DNA, 20 bp, Artificial Sequence
  Description of Artificial Sequence: Synthetic oligonucleotide
  Target: ATXN2; (+) strand; PAM type: YTN; PAM sequence: TTA
taatccctacactttaggag

SEQ ID NO: 89091 - DNA, 20 bp, Artificial Sequence
  Description of Artificial Sequence: Synthetic oligonucleotide
  Target: ATXN2; (+) strand; PAM type: YTN; PAM sequence: CTA
cactttaggaggccagggcg

SEQ ID NO: 89092 - DNA, 20 bp, Artificial Sequence
  Description of Artificial Sequence: Synthetic oligonucleotide
  Target: ATXN2; (+) strand; PAM type: YTN; PAM sequence: CTT
taggaggccagggcgagcgg

SEQ ID NO: 89093 - DNA, 20 bp, Artificial Sequence
  Description of Artificial Sequence: Synthetic oligonucleotide
  Target: ATXN2; (+) strand; PAM type: YTN; PAM sequence: TTT
aggaggccagggcgagcgga

SEQ ID NO: 89094 - DNA, 20 bp, Artificial Sequence
  Description of Artificial Sequence: Synthetic oligonucleotide
  Target: ATXN2; (+) strand; PAM type: YTN; PAM sequence: TTA
ggaggccagggcgagcggac

SEQ ID NO: 89095 - DNA, 20 bp, Artificial Sequence
  Description of Artificial Sequence: Synthetic oligonucleotide
  Target: ATXN2; (+) strand; PAM type: YTN; PAM sequence: CTG
cttgagctcatgagtttggg

SEQ ID NO: 89096 - DNA, 20 bp, Artificial Sequence
  Description of Artificial Sequence: Synthetic oligonucleotide
  Target: ATXN2; (+) strand; PAM type: YTN; PAM sequence: CTT
gagctcatgagtttgggacc

SEQ ID NO: 89097 - DNA, 20 bp, Artificial Sequence
  Description of Artificial Sequence: Synthetic oligonucleotide
  Target: ATXN2; (+) strand; PAM type: YTN; PAM sequence: TTG
agctcatgagtttgggacca

SEQ ID NO: 89098 - DNA, 20 bp, Artificial Sequence
  Description of Artificial Sequence: Synthetic oligonucleotide
  Target: ATXN2; (+) strand; PAM type: YTN; PAM sequence: CTC
atgagtttgggaccaccctg

SEQ ID NO: 89099 - DNA, 20 bp, Artificial Sequence
  Description of Artificial Sequence: Synthetic oligonucleotide
  Target: ATXN2; (+) strand; PAM type: YTN; PAM sequence: TTT
gggaccaccctgggcaacat

SEQ ID NO: 89100 - DNA, 20 bp, Artificial Sequence
  Description of Artificial Sequence: Synthetic oligonucleotide
  Target: ATXN2; (+) strand; PAM type: YTN; PAM sequence: TTG
ggaccaccctgggcaacatg

SEQ ID NO: 89101 - DNA, 20 bp, Artificial Sequence
  Description of Artificial Sequence: Synthetic oligonucleotide
  Target: ATXN2; (+) strand; PAM type: YTN; PAM sequence: CTG
ggcaacatggggagacactg

SEQ ID NO: 89102 - DNA, 20 bp, Artificial Sequence
  Description of Artificial Sequence: Synthetic oligonucleotide
  Target: ATXN2; (+) strand; PAM type: YTN; PAM sequence: CTG
cctccacaaaaaatacaaaa

SEQ ID NO: 89103 - DNA, 20 bp, Artificial Sequence
  Description of Artificial Sequence: Synthetic oligonucleotide
  Target: ATXN2; (+) strand; PAM type: YTN; PAM sequence: CTC
cacaaaaaatacaaaaatat

SEQ ID NO: 89104 - DNA, 20 bp, Artificial Sequence
  Description of Artificial Sequence: Synthetic oligonucleotide
  Target: ATXN2; (+) strand; PAM type: YTN; PAM sequence: TTA
gccagctgcggtgctgtgca

SEQ ID NO: 89105 - DNA, 20 bp, Artificial Sequence
  Description of Artificial Sequence: Synthetic oligonucleotide
  Target: ATXN2; (+) strand; PAM type: YTN; PAM sequence: CTG
cggtgctgtgcatctatggt

SEQ ID NO: 89106 - DNA, 20 bp, Artificial Sequence
  Description of Artificial Sequence: Synthetic oligonucleotide
  Target: ATXN2; (+) strand; PAM type: YTN; PAM sequence: CTG
tgcatctatggtcccagcta

SEQ ID NO: 89107 - DNA, 20 bp, Artificial Sequence
  Description of Artificial Sequence: Synthetic oligonucleotide
  Target: ATXN2; (+) strand; PAM type: YTN; PAM sequence: CTA
tggtcccagctactcaggag

SEQ ID NO: 89108 - DNA, 20 bp, Artificial Sequence
  Description of Artificial Sequence: Synthetic oligonucleotide
  Target: ATXN2; (+) strand; PAM type: YTN; PAM sequence: CTA
ctcaggaggctgaggtggga

SEQ ID NO: 89109 - DNA, 20 bp, Artificial Sequence
  Description of Artificial Sequence: Synthetic oligonucleotide
  Target: ATXN2; (+) strand; PAM type: YTN; PAM sequence: CTC
aggaggctgaggtgggagga

SEQ ID NO: 89110 - DNA, 20 bp, Artificial Sequence
  Description of Artificial Sequence: Synthetic oligonucleotide
  Target: ATXN2; (+) strand; PAM type: YTN; PAM sequence: CTG
aggtgggaggaacttttcag

SEQ ID NO: 89111 - DNA, 20 bp, Artificial Sequence
  Description of Artificial Sequence: Synthetic oligonucleotide
  Target: ATXN2; (+) strand; PAM type: YTN; PAM sequence: CTT
ttcagccagggaggcagatg

SEQ ID NO: 89112 - DNA, 20 bp, Artificial Sequence
  Description of Artificial Sequence: Synthetic oligonucleotide
  Target: ATXN2; (+) strand; PAM type: YTN; PAM sequence: TTT
tcagccagggaggcagatgc

SEQ ID NO: 89113 - DNA, 20 bp, Artificial Sequence
  Description of Artificial Sequence: Synthetic oligonucleotide
  Target: ATXN2; (+) strand; PAM type: YTN; PAM sequence: TTT
cagccagggaggcagatgcc

SEQ ID NO: 89114 - DNA, 20 bp, Artificial Sequence
  Description of Artificial Sequence: Synthetic oligonucleotide
  Target: ATXN2; (+) strand; PAM type: YTN; PAM sequence: TTC
agccagggaggcagatgccg

SEQ ID NO: 89115 - DNA, 20 bp, Artificial Sequence
  Description of Artificial Sequence: Synthetic oligonucleotide
  Target: ATXN2; (+) strand; PAM type: YTN; PAM sequence: CTG
caccactgcactccagcctc

SEQ ID NO: 89116 - DNA, 20 bp, Artificial Sequence
  Description of Artificial Sequence: Synthetic oligonucleotide
  Target: ATXN2; (+) strand; PAM type: YTN; PAM sequence: CTG
cactccagcctcggcgaaga

SEQ ID NO: 89117 - DNA, 20 bp, Artificial Sequence
  Description of Artificial Sequence: Synthetic oligonucleotide
  Target: ATXN2; (+) strand; PAM type: YTN; PAM sequence: CTC
cagcctcggcgaagaagtga

SEQ ID NO: 89118 - DNA, 20 bp, Artificial Sequence
  Description of Artificial Sequence: Synthetic oligonucleotide
  Target: ATXN2; (+) strand; PAM type: YTN; PAM sequence: CTC
ggcgaagaagtgagaccctg

SEQ ID NO: 89119 - DNA, 20 bp, Artificial Sequence
  Description of Artificial Sequence: Synthetic oligonucleotide
  Target: ATXN2; (+) strand; PAM type: YTN; PAM sequence: CTG
tctcaaaaaaggggagggta

SEQ ID NO: 89120 - DNA, 20 bp, Artificial Sequence
  Description of Artificial Sequence: Synthetic oligonucleotide
  Target: ATXN2; (+) strand; PAM type: YTN; PAM sequence: CTC
aaaaaaggggagggtagggg

SEQ ID NO: 89121 - DNA, 20 bp, Artificial Sequence
  Description of Artificial Sequence: Synthetic oligonucleotide
  Target: ATXN2; (+) strand; PAM type: YTN; PAM sequence: CTT
gactctgcctgttatttgaa

SEQ ID NO: 89122 - DNA, 20 bp, Artificial Sequence
  Description of Artificial Sequence: Synthetic oligonucleotide
  Target: ATXN2; (+) strand; PAM type: YTN; PAM sequence: TTG
actctgcctgttatttgaaa

SEQ ID NO: 89123 - DNA, 20 bp, Artificial Sequence
  Description of Artificial Sequence: Synthetic oligonucleotide
  Target: ATXN2; (+) strand; PAM type: YTN; PAM sequence: CTC
tgcctgttatttgaaaaatg

SEQ ID NO: 89124 - DNA, 20 bp, Artificial Sequence
  Description of Artificial Sequence: Synthetic oligonucleotide
  Target: ATXN2; (+) strand; PAM type: YTN; PAM sequence: CTG
cctgttatttgaaaaatgct

SEQ ID NO: 89125 - DNA, 20 bp, Artificial Sequence
  Description of Artificial Sequence: Synthetic oligonucleotide
  Target: ATXN2; (+) strand; PAM type: YTN; PAM sequence: CTG
ttatttgaaaaatgctaaaa

SEQ ID NO: 89126 - DNA, 20 bp, Artificial Sequence
  Description of Artificial Sequence: Synthetic oligonucleotide
  Target: ATXN2; (+) strand; PAM type: YTN; PAM sequence: TTA
tttgaaaaatgctaaaaata

SEQ ID NO: 89127 - DNA, 20 bp, Artificial Sequence
  Description of Artificial Sequence: Synthetic oligonucleotide
  Target: ATXN2; (+) strand; PAM type: YTN; PAM sequence: TTT
gaaaaatgctaaaaatattt

SEQ ID NO: 89128 - DNA, 20 bp, Artificial Sequence
  Description of Artificial Sequence: Synthetic oligonucleotide
  Target: ATXN2; (+) strand; PAM type: YTN; PAM sequence: TTG
aaaaatgctaaaaatatttt

SEQ ID NO: 89129 - DNA, 20 bp, Artificial Sequence
  Description of Artificial Sequence: Synthetic oligonucleotide
  Target: ATXN2; (+) strand; PAM type: YTN; PAM sequence: CTA
aaaatatttttatccaatac

SEQ ID NO: 89130 - DNA, 20 bp, Artificial Sequence
  Description of Artificial Sequence: Synthetic oligonucleotide
  Target: ATXN2; (+) strand; PAM type: YTN; PAM sequence: TTT
ttatccaatacctcaaagga

SEQ ID NO: 89131 - DNA, 20 bp, Artificial Sequence
  Description of Artificial Sequence: Synthetic oligonucleotide
  Target: ATXN2; (+) strand; PAM type: YTN; PAM sequence: TTT
tatccaatacctcaaaggat

SEQ ID NO: 89132 - DNA, 20 bp, Artificial Sequence
  Description of Artificial Sequence: Synthetic oligonucleotide
  Target: ATXN2; (+) strand; PAM type: YTN; PAM sequence: TTT
atccaatacctcaaaggatt

SEQ ID NO: 89133 - DNA, 20 bp, Artificial Sequence
  Description of Artificial Sequence: Synthetic oligonucleotide
  Target: ATXN2; (+) strand; PAM type: YTN; PAM sequence: TTA
tccaatacctcaaaggattg

SEQ ID NO: 89134 - DNA, 20 bp, Artificial Sequence
  Description of Artificial Sequence: Synthetic oligonucleotide
  Target: ATXN2; (+) strand; PAM type: YTN; PAM sequence: CTC
aaaggattggaatttagtaa

SEQ ID NO: 89135 - DNA, 20 bp, Artificial Sequence
  Description of Artificial Sequence: Synthetic oligonucleotide
  Target: ATXN2; (+) strand; PAM type: YTN; PAM sequence: TTG
gaatttagtaaaggagcagg

SEQ ID NO: 89136 - DNA, 20 bp, Artificial Sequence
  Description of Artificial Sequence: Synthetic oligonucleotide
  Target: ATXN2; (+) strand; PAM type: YTN; PAM sequence: TTT
agtaaaggagcagggtaaaa

SEQ ID NO: 89137 - DNA, 20 bp, Artificial Sequence
  Description of Artificial Sequence: Synthetic oligonucleotide
  Target: ATXN2; (+) strand; PAM type: YTN; PAM sequence: TTA
gtaaaggagcagggtaaaaa

SEQ ID NO: 89138 - DNA, 20 bp, Artificial Sequence
  Description of Artificial Sequence: Synthetic oligonucleotide
  Target: ATXN2; (+) strand; PAM type: YTN; PAM sequence: CTA
acatataaacagcaatagcc

SEQ ID NO: 89139 - DNA, 20 bp, Artificial Sequence
  Description of Artificial Sequence: Synthetic oligonucleotide
  Target: ATXN2; (+) strand; PAM type: YTN; PAM sequence: CTT
catatatggtacttcataag

SEQ ID NO: 89140 - DNA, 20 bp, Artificial Sequence
  Description of Artificial Sequence: Synthetic oligonucleotide
  Target: ATXN2; (+) strand; PAM type: YTN; PAM sequence: TTC
atatatggtacttcataagt

SEQ ID NO: 89141 - DNA, 20 bp, Artificial Sequence
  Description of Artificial Sequence: Synthetic oligonucleotide
  Target: ATXN2; (+) strand; PAM type: YTN; PAM sequence: CTT
cataagtaattacttagaag

SEQ ID NO: 89142 - DNA, 20 bp, Artificial Sequence
  Description of Artificial Sequence: Synthetic oligonucleotide
  Target: ATXN2; (+) strand; PAM type: YTN; PAM sequence: TTC
ataagtaattacttagaaga

SEQ ID NO: 89143 - DNA, 20 bp, Artificial Sequence
  Description of Artificial Sequence: Synthetic oligonucleotide
  Target: ATXN2; (+) strand; PAM type: YTN; PAM sequence: TTA
cttagaagatgcaatggaag

SEQ ID NO: 89144 - DNA, 20 bp, Artificial Sequence
  Description of Artificial Sequence: Synthetic oligonucleotide
  Target: ATXN2; (+) strand; PAM type: YTN; PAM sequence: CTT
agaagatgcaatggaagaga

SEQ ID NO: 89145 - DNA, 20 bp, Artificial Sequence
  Description of Artificial Sequence: Synthetic oligonucleotide
  Target: ATXN2; (+) strand; PAM type: YTN; PAM sequence: TTA
gaagatgcaatggaagagaa

SEQ ID NO: 89146 - DNA, 20 bp, Artificial Sequence
  Description of Artificial Sequence: Synthetic oligonucleotide
  Target: ATXN2; (+) strand; PAM type: YTN; PAM sequence: CTG
ggttacactaacattaaaaa

SEQ ID NO: 89147 - DNA, 20 bp, Artificial Sequence
  Description of Artificial Sequence: Synthetic oligonucleotide
  Target: ATXN2; (+) strand; PAM type: YTN; PAM sequence: TTA
cactaacattaaaaaagaac

SEQ ID NO: 89148 - DNA, 20 bp, Artificial Sequence
  Description of Artificial Sequence: Synthetic oligonucleotide
  Target: ATXN2; (+) strand; PAM type: YTN; PAM sequence: CTA
acattaaaaaagaacctacc

SEQ ID NO: 89149 - DNA, 20 bp, Artificial Sequence
  Description of Artificial Sequence: Synthetic oligonucleotide
  Target: ATXN2; (+) strand; PAM type: YTN; PAM sequence: TTA
aaaaagaacctacctaaggc

SEQ ID NO: 89150 - DNA, 20 bp, Artificial Sequence
  Description of Artificial Sequence: Synthetic oligonucleotide
  Target: ATXN2; (+) strand; PAM type: YTN; PAM sequence: CTA
cctaaggcatacactgaaaa

SEQ ID NO: 89151 - DNA, 20 bp, Artificial Sequence
  Description of Artificial Sequence: Synthetic oligonucleotide
  Target: ATXN2; (+) strand; PAM type: YTN; PAM sequence: CTA
aggcatacactgaaaaaaat

SEQ ID NO: 89152 - DNA, 20 bp, Artificial Sequence
  Description of Artificial Sequence: Synthetic oligonucleotide
  Target: ATXN2; (+) strand; PAM type: YTN; PAM sequence: CTG
aaaaaaatgtacaaaacctt

SEQ ID NO: 89153 - DNA, 20 bp, Artificial Sequence
  Description of Artificial Sequence: Synthetic oligonucleotide
  Target: ATXN2; (+) strand; PAM type: YTN; PAM sequence: CTT
aaagataaactttattttta

SEQ ID NO: 89154 - DNA, 20 bp, Artificial Sequence
  Description of Artificial Sequence: Synthetic oligonucleotide
  Target: ATXN2; (+) strand; PAM type: YTN; PAM sequence: TTA
aagataaactttatttttat

SEQ ID NO: 89155 - DNA, 20 bp, Artificial Sequence
  Description of Artificial Sequence: Synthetic oligonucleotide
  Target: ATXN2; (+) strand; PAM type: YTN; PAM sequence: CTT
tatttttatttatttatttt

SEQ ID NO: 89156 - DNA, 20 bp, Artificial Sequence
  Description of Artificial Sequence: Synthetic oligonucleotide
  Target: ATXN2; (+) strand; PAM type: YTN; PAM sequence: TTT
atttttatttatttattttc

SEQ ID NO: 89157 - DNA, 20 bp, Artificial Sequence
  Description of Artificial Sequence: Synthetic oligonucleotide
  Target: ATXN2; (+) strand; PAM type: YTN; PAM sequence: TTA
tttttatttatttattttct

SEQ ID NO: 89158 - DNA, 20 bp, Artificial Sequence
  Description of Artificial Sequence: Synthetic oligonucleotide
  Target: ATXN2; (+) strand; PAM type: YTN; PAM sequence: TTT
ttatttatttattttctttg

SEQ ID NO: 89159 - DNA, 20 bp, Artificial Sequence
  Description of Artificial Sequence: Synthetic oligonucleotide
  Target: ATXN2; (+) strand; PAM type: YTN; PAM sequence: TTT
tatttatttattttctttga

SEQ ID NO: 89160 - DNA, 20 bp, Artificial Sequence
  Description of Artificial Sequence: Synthetic oligonucleotide
  Target: ATXN2; (+) strand; PAM type: YTN; PAM sequence: TTT
atttatttattttctttgag

SEQ ID NO: 89161 - DNA, 20 bp, Artificial Sequence
  Description of Artificial Sequence: Synthetic oligonucleotide
  Target: ATXN2; (+) strand; PAM type: YTN; PAM sequence: TTA
tttatttattttctttgaga

SEQ ID NO: 89162 - DNA, 20 bp, Artificial Sequence
  Description of Artificial Sequence: Synthetic oligonucleotide
  Target: ATXN2; (+) strand; PAM type: YTN; PAM sequence: TTT
atttattttctttgagacag

SEQ ID NO: 89163 - DNA, 20 bp, Artificial Sequence
  Description of Artificial Sequence: Synthetic oligonucleotide
  Target: ATXN2; (+) strand; PAM type: YTN; PAM sequence: TTA
tttattttctttgagacaga

SEQ ID NO: 89164 - DNA, 20 bp, Artificial Sequence
  Description of Artificial Sequence: Synthetic oligonucleotide
  Target: ATXN2; (+) strand; PAM type: YTN; PAM sequence: TTT
attttctttgagacagagtg

SEQ ID NO: 89165 - DNA, 20 bp, Artificial Sequence
  Description of Artificial Sequence: Synthetic oligonucleotide
  Target: ATXN2; (+) strand; PAM type: YTN; PAM sequence: TTA
ttttctttgagacagagtgt

SEQ ID NO: 89166 - DNA, 20 bp, Artificial Sequence
  Description of Artificial Sequence: Synthetic oligonucleotide
  Target: ATXN2; (+) strand; PAM type: YTN; PAM sequence: TTT
tctttgagacagagtgtcgc

SEQ ID NO: 89167 - DNA, 20 bp, Artificial Sequence
  Description of Artificial Sequence: Synthetic oligonucleotide
  Target: ATXN2; (+) strand; PAM type: YTN; PAM sequence: TTT
ctttgagacagagtgtcgct

SEQ ID NO: 89168 - DNA, 20 bp, Artificial Sequence
  Description of Artificial Sequence: Synthetic oligonucleotide
  Target: ATXN2; (+) strand; PAM type: YTN; PAM sequence: TTC
tttgagacagagtgtcgctc

SEQ ID NO: 89169 - DNA, 20 bp, Artificial Sequence
  Description of Artificial Sequence: Synthetic oligonucleotide
  Target: ATXN2; (+) strand; PAM type: YTN; PAM sequence: CTT
tgagacagagtgtcgctcgg

SEQ ID NO: 89170 - DNA, 20 bp, Artificial Sequence
  Description of Artificial Sequence: Synthetic oligonucleotide
  Target: ATXN2; (+) strand; PAM type: YTN; PAM sequence: TTT
gagacagagtgtcgctcggt

SEQ ID NO: 89171 - DNA, 20 bp, Artificial Sequence
  Description of Artificial Sequence: Synthetic oligonucleotide
  Target: ATXN2; (+) strand; PAM type: YTN; PAM sequence: TTG
agacagagtgtcgctcggtt

SEQ ID NO: 89172 - DNA, 20 bp, Artificial Sequence
  Description of Artificial Sequence: Synthetic oligonucleotide
  Target: ATXN2; (+) strand; PAM type: YTN; PAM sequence: CTC
ggttgcccaagctggagtgc

SEQ ID NO: 89173 - DNA, 20 bp, Artificial Sequence
  Description of Artificial Sequence: Synthetic oligonucleotide
  Target: ATXN2; (+) strand; PAM type: YTN; PAM sequence: TTG
cccaagctggagtgcagtgg

SEQ ID NO: 89174 - DNA, 20 bp, Artificial Sequence
  Description of Artificial Sequence: Synthetic oligonucleotide
  Target: ATXN2; (+) strand; PAM type: YTN; PAM sequence: CTG
gagtgcagtggtgcaatctt

SEQ ID NO: 89175 - DNA, 20 bp, Artificial Sequence
  Description of Artificial Sequence: Synthetic oligonucleotide
  Target: ATXN2; (+) strand; PAM type: YTN; PAM sequence: CTT
gactcactgcactctctgcc

SEQ ID NO: 89176 - DNA, 20 bp, Artificial Sequence
  Description of Artificial Sequence: Synthetic oligonucleotide
  Target: ATXN2; (+) strand; PAM type: YTN; PAM sequence: TTG
actcactgcactctctgcct

SEQ ID NO: 89177 - DNA, 20 bp, Artificial Sequence
  Description of Artificial Sequence: Synthetic oligonucleotide
  Target: ATXN2; (+) strand; PAM type: YTN; PAM sequence: CTC
actgcactctctgcctcctg

SEQ ID NO: 89178 - DNA, 20 bp, Artificial Sequence
  Description of Artificial Sequence: Synthetic oligonucleotide
  Target: ATXN2; (+) strand; PAM type: YTN; PAM sequence: CTG
cactctctgcctcctgggtt

SEQ ID NO: 89179 - DNA, 20 bp, Artificial Sequence
  Description of Artificial Sequence: Synthetic oligonucleotide
  Target: ATXN2; (+) strand; PAM type: YTN; PAM sequence: CTC
tctgcctcctgggttcaagc

SEQ ID NO: 89180 - DNA, 20 bp, Artificial Sequence
  Description of Artificial Sequence: Synthetic oligonucleotide
  Target: ATXN2; (+) strand; PAM type: YTN; PAM sequence: CTC
tgcctcctgggttcaagcga

SEQ ID NO: 89181 - DNA, 20 bp, Artificial Sequence
  Description of Artificial Sequence: Synthetic oligonucleotide
  Target: ATXN2; (+) strand; PAM type: YTN; PAM sequence: CTG
cctcctgggttcaagcgatt

SEQ ID NO: 89182 - DNA, 20 bp, Artificial Sequence
  Description of Artificial Sequence: Synthetic oligonucleotide
  Target: ATXN2; (+) strand; PAM type: YTN; PAM sequence: CTC
ctgggttcaagcgattctcc

SEQ ID NO: 89183 - DNA, 20 bp, Artificial Sequence
  Description of Artificial Sequence: Synthetic oligonucleotide
  Target: ATXN2; (+) strand; PAM type: YTN; PAM sequence: CTG
ggttcaagcgattctcctac

SEQ ID NO: 89184 - DNA, 20 bp, Artificial Sequence
  Description of Artificial Sequence: Synthetic oligonucleotide
  Target: ATXN2; (+) strand; PAM type: YTN; PAM sequence: TTC
aagcgattctcctacctcag

SEQ ID NO: 89185 - DNA, 20 bp, Artificial Sequence
  Description of Artificial Sequence: Synthetic oligonucleotide
  Target: ATXN2; (+) strand; PAM type: YTN; PAM sequence: TTC
tcctacctcagcctccagag

SEQ ID NO: 89186 - DNA, 20 bp, Artificial Sequence
  Description of Artificial Sequence: Synthetic oligonucleotide
  Target: ATXN2; (+) strand; PAM type: YTN; PAM sequence: CTC
ctacctcagcctccagagta

SEQ ID NO: 89187 - DNA, 20 bp, Artificial Sequence
  Description of Artificial Sequence: Synthetic oligonucleotide
  Target: ATXN2; (+) strand; PAM type: YTN; PAM sequence: CTA
cctcagcctccagagtagct

SEQ ID NO: 89188 - DNA, 20 bp, Artificial Sequence
  Description of Artificial Sequence: Synthetic oligonucleotide
  Target: ATXN2; (+) strand; PAM type: YTN; PAM sequence: CTC
agcctccagagtagctggga

SEQ ID NO: 89189 - DNA, 20 bp, Artificial Sequence
  Description of Artificial Sequence: Synthetic oligonucleotide
  Target: ATXN2; (+) strand; PAM type: YTN; PAM sequence: CTC
cagagtagctgggactacag

SEQ ID NO: 89190 - DNA, 20 bp, Artificial Sequence
  Description of Artificial Sequence: Synthetic oligonucleotide
  Target: ATXN2; (+) strand; PAM type: YTN; PAM sequence: CTG
ggactacaggtgcacaccac

SEQ ID NO: 89191 - DNA, 20 bp, Artificial Sequence
  Description of Artificial Sequence: Synthetic oligonucleotide
  Target: ATXN2; (+) strand; PAM type: YTN; PAM sequence: CTA
caggtgcacaccacacccag

SEQ ID NO: 89192 - DNA, 20 bp, Artificial Sequence
  Description of Artificial Sequence: Synthetic oligonucleotide
  Target: ATXN2; (+) strand; PAM type: YTN; PAM sequence: CTA
atactttttttaaaatattt

SEQ ID NO: 89193 - DNA, 20 bp, Artificial Sequence
  Description of Artificial Sequence: Synthetic oligonucleotide
  Target: ATXN2; (+) strand; PAM type: YTN; PAM sequence: CTT
tttttaaaatatttttagta

SEQ ID NO: 89194 - DNA, 20 bp, Artificial Sequence
  Description of Artificial Sequence: Synthetic oligonucleotide
  Target: ATXN2; (+) strand; PAM type: YTN; PAM sequence: TTT
ttttaaaatatttttagtag

SEQ ID NO: 89195 - DNA, 20 bp, Artificial Sequence
  Description of Artificial Sequence: Synthetic oligonucleotide
  Target: ATXN2; (+) strand; PAM type: YTN; PAM sequence: TTT
tttaaaatatttttagtaga

SEQ ID NO: 89196 - DNA, 20 bp, Artificial Sequence
  Description of Artificial Sequence: Synthetic oligonucleotide
  Target: ATXN2; (+) strand; PAM type: YTN; PAM sequence: TTT
ttaaaatatttttagtagag

SEQ ID NO: 89197 - DNA, 20 bp, Artificial Sequence
  Description of Artificial Sequence: Synthetic oligonucleotide
  Target: ATXN2; (+) strand; PAM type: YTN; PAM sequence: TTT
taaaatatttttagtagaga

SEQ ID NO: 89198 - DNA, 20 bp, Artificial Sequence
  Description of Artificial Sequence: Synthetic oligonucleotide
  Target: ATXN2; (+) strand; PAM type: YTN; PAM sequence: TTT
aaaatatttttagtagagac

SEQ ID NO: 89199 - DNA, 20 bp, Artificial Sequence
  Description of Artificial Sequence: Synthetic oligonucleotide
  Target: ATXN2; (+) strand; PAM type: YTN; PAM sequence: TTA
aaatatttttagtagagacg

SEQ ID NO: 89200 - DNA, 20 bp, Artificial Sequence
  Description of Artificial Sequence: Synthetic oligonucleotide
  Target: ATXN2; (+) strand; PAM type: YTN; PAM sequence: TTT
ttagtagagacggggtttca

SEQ ID NO: 89201 - DNA, 20 bp, Artificial Sequence
  Description of Artificial Sequence: Synthetic oligonucleotide
  Target: ATXN2; (+) strand; PAM type: YTN; PAM sequence: TTT
tagtagagacggggtttcac

SEQ ID NO: 89202 - DNA, 20 bp, Artificial Sequence
  Description of Artificial Sequence: Synthetic oligonucleotide
  Target: ATXN2; (+) strand; PAM type: YTN; PAM sequence: TTT
agtagagacggggtttcacc

SEQ ID NO: 89203 - DNA, 20 bp, Artificial Sequence
  Description of Artificial Sequence: Synthetic oligonucleotide
  Target: ATXN2; (+) strand; PAM type: YTN; PAM sequence: TTA
gtagagacggggtttcacca

SEQ ID NO: 89204 - DNA, 20 bp, Artificial Sequence
  Description of Artificial Sequence: Synthetic oligonucleotide
  Target: ATXN2; (+) strand; PAM type: YTN; PAM sequence: TTT
caccatgttggccaggctgg

SEQ ID NO: 89205 - DNA, 20 bp, Artificial Sequence
  Description of Artificial Sequence: Synthetic oligonucleotide
  Target: ATXN2; (+) strand; PAM type: YTN; PAM sequence: TTC
accatgttggccaggctggt

SEQ ID NO: 89206 - DNA, 20 bp, Artificial Sequence
  Description of Artificial Sequence: Synthetic oligonucleotide
  Target: ATXN2; (+) strand; PAM type: YTN; PAM sequence: TTG
gccaggctggtctcgaactc

SEQ ID NO: 89207 - DNA, 20 bp, Artificial Sequence
  Description of Artificial Sequence: Synthetic oligonucleotide
  Target: ATXN2; (+) strand; PAM type: YTN; PAM sequence: CTG
gtctcgaactccagacctca

SEQ ID NO: 89208 - DNA, 20 bp, Artificial Sequence
  Description of Artificial Sequence: Synthetic oligonucleotide
  Target: ATXN2; (+) strand; PAM type: YTN; PAM sequence: CTC
gaactccagacctcaggtga

SEQ ID NO: 89209 - DNA, 20 bp, Artificial Sequence
  Description of Artificial Sequence: Synthetic oligonucleotide
  Target: ATXN2; (+) strand; PAM type: YTN; PAM sequence: CTC
cagacctcaggtgatctgcc

SEQ ID NO: 89210 - DNA, 20 bp, Artificial Sequence
  Description of Artificial Sequence: Synthetic oligonucleotide
  Target: ATXN2; (+) strand; PAM type: YTN; PAM sequence: CTC
aggtgatctgcccacctctg

SEQ ID NO: 89211 - DNA, 20 bp, Artificial Sequence
  Description of Artificial Sequence: Synthetic oligonucleotide
  Target: ATXN2; (+) strand; PAM type: YTN; PAM sequence: CTG
cccacctctgcctcccaaag

SEQ ID NO: 89212 - DNA, 20 bp, Artificial Sequence
  Description of Artificial Sequence: Synthetic oligonucleotide
  Target: ATXN2; (+) strand; PAM type: YTN; PAM sequence: CTC
tgcctcccaaagaggtggga

SEQ ID NO: 89213 - DNA, 20 bp, Artificial Sequence
  Description of Artificial Sequence: Synthetic oligonucleotide
  Target: ATXN2; (+) strand; PAM type: YTN; PAM sequence: CTG
cctcccaaagaggtgggatt

SEQ ID NO: 89214 - DNA, 20 bp, Artificial Sequence
  Description of Artificial Sequence: Synthetic oligonucleotide
  Target: ATXN2; (+) strand; PAM type: YTN; PAM sequence: CTC
ccaaagaggtgggattacag

SEQ ID NO: 89215 - DNA, 20 bp, Artificial Sequence
  Description of Artificial Sequence: Synthetic oligonucleotide
  Target: ATXN2; (+) strand; PAM type: YTN; PAM sequence: TTA
caggcgtcagccactgcatc

SEQ ID NO: 89216 - DNA, 20 bp, Artificial Sequence
  Description of Artificial Sequence: Synthetic oligonucleotide
  Target: ATXN2; (+) strand; PAM type: YTN; PAM sequence: CTG
catccagccaaggataaact

SEQ ID NO: 89217 - DNA, 20 bp, Artificial Sequence
  Description of Artificial Sequence: Synthetic oligonucleotide
  Target: ATXN2; (+) strand; PAM type: YTN; PAM sequence: CTT
taatatgctattgaaggtat

SEQ ID NO: 89218 - DNA, 20 bp, Artificial Sequence
  Description of Artificial Sequence: Synthetic oligonucleotide
  Target: ATXN2; (+) strand; PAM type: YTN; PAM sequence: TTT
aatatgctattgaaggtata

SEQ ID NO: 89219 - DNA, 20 bp, Artificial Sequence
  Description of Artificial Sequence: Synthetic oligonucleotide
  Target: ATXN2; (+) strand; PAM type: YTN; PAM sequence: TTA
atatgctattgaaggtatac

SEQ ID NO: 89220 - DNA, 20 bp, Artificial Sequence
  Description of Artificial Sequence: Synthetic oligonucleotide
  Target: ATXN2; (+) strand; PAM type: YTN; PAM sequence: CTA
ttgaaggtatactttgttct

SEQ ID NO: 89221 - DNA, 20 bp, Artificial Sequence
  Description of Artificial Sequence: Synthetic oligonucleotide
  Target: ATXN2; (+) strand; PAM type: YTN; PAM sequence: TTG
aaggtatactttgttcttga

SEQ ID NO: 89222 - DNA, 20 bp, Artificial Sequence
  Description of Artificial Sequence: Synthetic oligonucleotide
  Target: ATXN2; (+) strand; PAM type: YTN; PAM sequence: CTT
tgttcttgaacaggaagact

SEQ ID NO: 89223 - DNA, 20 bp, Artificial Sequence
  Description of Artificial Sequence: Synthetic oligonucleotide
  Target: ATXN2; (+) strand; PAM type: YTN; PAM sequence: TTT
gttcttgaacaggaagactc

SEQ ID NO: 89224 - DNA, 20 bp, Artificial Sequence
  Description of Artificial Sequence: Synthetic oligonucleotide
  Target: ATXN2; (+) strand; PAM type: YTN; PAM sequence: TTG
ttcttgaacaggaagactca

SEQ ID NO: 89225 - DNA, 20 bp, Artificial Sequence
  Description of Artificial Sequence: Synthetic oligonucleotide
  Target: ATXN2; (+) strand; PAM type: YTN; PAM sequence: TTC
ttgaacaggaagactcaaca

SEQ ID NO: 89226 - DNA, 20 bp, Artificial Sequence
  Description of Artificial Sequence: Synthetic oligonucleotide
  Target: ATXN2; (+) strand; PAM type: YTN; PAM sequence: CTT
gaacaggaagactcaacatc

SEQ ID NO: 89227 - DNA, 20 bp, Artificial Sequence
  Description of Artificial Sequence: Synthetic oligonucleotide
  Target: ATXN2; (+) strand; PAM type: YTN; PAM sequence: TTG
aacaggaagactcaacatca

SEQ ID NO: 89228 - DNA, 20 bp, Artificial Sequence
  Description of Artificial Sequence: Synthetic oligonucleotide
  Target: ATXN2; (+) strand; PAM type: YTN; PAM sequence: CTC
aacatcatgaagacatcaat

SEQ ID NO: 89229 - DNA, 20 bp, Artificial Sequence
  Description of Artificial Sequence: Synthetic oligonucleotide
  Target: ATXN2; (+) strand; PAM type: YTN; PAM sequence: TTT
cttctcaagttaatttataa

SEQ ID NO: 89230 - DNA, 20 bp, Artificial Sequence
  Description of Artificial Sequence: Synthetic oligonucleotide
  Target: ATXN2; (+) strand; PAM type: YTN; PAM sequence: TTC
ttctcaagttaatttataag

SEQ ID NO: 89231 - DNA, 20 bp, Artificial Sequence
  Description of Artificial Sequence: Synthetic oligonucleotide
  Target: ATXN2; (+) strand; PAM type: YTN; PAM sequence: CTT
ctcaagttaatttataagtt

SEQ ID NO: 89232 - DNA, 20 bp, Artificial Sequence
  Description of Artificial Sequence: Synthetic oligonucleotide
  Target: ATXN2; (+) strand; PAM type: YTN; PAM sequence: TTC
tcaagttaatttataagttt

SEQ ID NO: 89233 - DNA, 20 bp, Artificial Sequence
  Description of Artificial Sequence: Synthetic oligonucleotide
  Target: ATXN2; (+) strand; PAM type: YTN; PAM sequence: CTC
aagttaatttataagtttat

SEQ ID NO: 89234 - DNA, 20 bp, Artificial Sequence
  Description of Artificial Sequence: Synthetic oligonucleotide
  Target: ATXN2; (+) strand; PAM type: YTN; PAM sequence: TTA
atttataagtttattgtgat

SEQ ID NO: 89235 - DNA, 20 bp, Artificial Sequence
  Description of Artificial Sequence: Synthetic oligonucleotide
  Target: ATXN2; (+) strand; PAM type: YTN; PAM sequence: TTT
ataagtttattgtgattctg

SEQ ID NO: 89236 - DNA, 20 bp, Artificial Sequence
  Description of Artificial Sequence: Synthetic oligonucleotide
  Target: ATXN2; (+) strand; PAM type: YTN; PAM sequence: TTA
taagtttattgtgattctgg

SEQ ID NO: 89237 - DNA, 20 bp, Artificial Sequence
  Description of Artificial Sequence: Synthetic oligonucleotide
  Target: ATXN2; (+) strand; PAM type: YTN; PAM sequence: TTT
attgtgattctggcctgcca

SEQ ID NO: 89238 - DNA, 20 bp, Artificial Sequence
  Description of Artificial Sequence: Synthetic oligonucleotide
  Target: ATXN2; (+) strand; PAM type: YTN; PAM sequence: TTA
ttgtgattctggcctgccat

SEQ ID NO: 89239 - DNA, 20 bp, Artificial Sequence
  Description of Artificial Sequence: Synthetic oligonucleotide
  Target: ATXN2; (+) strand; PAM type: YTN; PAM sequence: TTG
tgattctggcctgccatggt

SEQ ID NO: 89240 - DNA, 20 bp, Artificial Sequence
  Description of Artificial Sequence: Synthetic oligonucleotide
  Target: ATXN2; (+) strand; PAM type: YTN; PAM sequence: TTC
tggcctgccatggtggctca

SEQ ID NO: 89241 - DNA, 20 bp, Artificial Sequence
  Description of Artificial Sequence: Synthetic oligonucleotide
  Target: ATXN2; (+) strand; PAM type: YTN; PAM sequence: CTG
gcctgccatggtggctcatg

SEQ ID NO: 89242 - DNA, 20 bp, Artificial Sequence
  Description of Artificial Sequence: Synthetic oligonucleotide
  Target: ATXN2; (+) strand; PAM type: YTN; PAM sequence: CTG
ccatggtggctcatgcctgt

SEQ ID NO: 89243 - DNA, 20 bp, Artificial Sequence
  Description of Artificial Sequence: Synthetic oligonucleotide
  Target: ATXN2; (+) strand; PAM type: YTN; PAM sequence: CTC
atgcctgtagtcccaccact

SEQ ID NO: 89244 - DNA, 20 bp, Artificial Sequence
  Description of Artificial Sequence: Synthetic oligonucleotide
  Target: ATXN2; (+) strand; PAM type: YTN; PAM sequence: CTG
tagtcccaccactttgtgag

SEQ ID NO: 89245 - DNA, 20 bp, Artificial Sequence
  Description of Artificial Sequence: Synthetic oligonucleotide
  Target: ATXN2; (+) strand; PAM type: YTN; PAM sequence: CTT
tgtgaggctgacacaggcag

SEQ ID NO: 89246 - DNA, 20 bp, Artificial Sequence
  Description of Artificial Sequence: Synthetic oligonucleotide
  Target: ATXN2; (+) strand; PAM type: YTN; PAM sequence: TTT
gtgaggctgacacaggcaga

SEQ ID NO: 89247 - DNA, 20 bp, Artificial Sequence
  Description of Artificial Sequence: Synthetic oligonucleotide
  Target: ATXN2; (+) strand; PAM type: YTN; PAM sequence: TTG
tgaggctgacacaggcagac

SEQ ID NO: 89248 - DNA, 20 bp, Artificial Sequence
  Description of Artificial Sequence: Synthetic oligonucleotide
  Target: ATXN2; (+) strand; PAM type: YTN; PAM sequence: CTG
acacaggcagactgcttgag

SEQ ID NO: 89249 - DNA, 20 bp, Artificial Sequence
  Description of Artificial Sequence: Synthetic oligonucleotide
  Target: ATXN2; (+) strand; PAM type: YTN; PAM sequence: CTG
cttgagctcaggagttcgac

SEQ ID NO: 89250 - DNA, 20 bp, Artificial Sequence
  Description of Artificial Sequence: Synthetic oligonucleotide
  Target: ATXN2; (+) strand; PAM type: YTN; PAM sequence: CTT
gagctcaggagttcgacacc

SEQ ID NO: 89251 - DNA, 20 bp, Artificial Sequence
  Description of Artificial Sequence: Synthetic oligonucleotide
  Target: ATXN2; (+) strand; PAM type: YTN; PAM sequence: TTG
agctcaggagttcgacacca

SEQ ID NO: 89252 - DNA, 20 bp, Artificial Sequence
  Description of Artificial Sequence: Synthetic oligonucleotide
  Target: ATXN2; (+) strand; PAM type: YTN; PAM sequence: CTC
aggagttcgacaccagcctg

SEQ ID NO: 89253 - DNA, 20 bp, Artificial Sequence
  Description of Artificial Sequence: Synthetic oligonucleotide
  Target: ATXN2; (+) strand; PAM type: YTN; PAM sequence: TTC
gacaccagcctgggcaacat

SEQ ID NO: 89254 - DNA, 20 bp, Artificial Sequence
  Description of Artificial Sequence: Synthetic oligonucleotide
  Target: ATXN2; (+) strand; PAM type: YTN; PAM sequence: CTG
ggcaacatggtgaaaccctg

SEQ ID NO: 89255 - DNA, 20 bp, Artificial Sequence
  Description of Artificial Sequence: Synthetic oligonucleotide
  Target: ATXN2; (+) strand; PAM type: YTN; PAM sequence: CTG
tctctgcaaaatatacaaaa

SEQ ID NO: 89256 - DNA, 20 bp, Artificial Sequence
  Description of Artificial Sequence: Synthetic oligonucleotide
  Target: ATXN2; (+) strand; PAM type: YTN; PAM sequence: CTC
tgcaaaatatacaaaaatta

SEQ ID NO: 89257 - DNA, 20 bp, Artificial Sequence
  Description of Artificial Sequence: Synthetic oligonucleotide
  Target: ATXN2; (+) strand; PAM type: YTN; PAM sequence: CTG
caaaatatacaaaaattaag

SEQ ID NO: 89258 - DNA, 20 bp, Artificial Sequence
  Description of Artificial Sequence: Synthetic oligonucleotide
  Target: ATXN2; (+) strand; PAM type: YTN; PAM sequence: TTA
agccaggcacggtggtgctt

SEQ ID NO: 89259 - DNA, 20 bp, Artificial Sequence
  Description of Artificial Sequence: Synthetic oligonucleotide
  Target: ATXN2; (+) strand; PAM type: YTN; PAM sequence: CTT
gcctgtagtcccagctactt

SEQ ID NO: 89260 - DNA, 20 bp, Artificial Sequence
  Description of Artificial Sequence: Synthetic oligonucleotide
  Target: ATXN2; (+) strand; PAM type: YTN; PAM sequence: TTG
cctgtagtcccagctacttg

SEQ ID NO: 89261 - DNA, 20 bp, Artificial Sequence
  Description of Artificial Sequence: Synthetic oligonucleotide
  Target: ATXN2; (+) strand; PAM type: YTN; PAM sequence: CTG
tagtcccagctacttgggag

SEQ ID NO: 89262 - DNA, 20 bp, Artificial Sequence
  Description of Artificial Sequence: Synthetic oligonucleotide
  Target: ATXN2; (+) strand; PAM type: YTN; PAM sequence: CTA
cttgggaggctgaggtgggg

SEQ ID NO: 89263 - DNA, 20 bp, Artificial Sequence
  Description of Artificial Sequence: Synthetic oligonucleotide
  Target: ATXN2; (+) strand; PAM type: YTN; PAM sequence: CTT
gggaggctgaggtgggggga

SEQ ID NO: 89264 - DNA, 20 bp, Artificial Sequence
  Description of Artificial Sequence: Synthetic oligonucleotide
  Target: ATXN2; (+) strand; PAM type: YTN; PAM sequence: TTG
ggaggctgaggtggggggat

SEQ ID NO: 89265 - DNA, 20 bp, Artificial Sequence
  Description of Artificial Sequence: Synthetic oligonucleotide
  Target: ATXN2; (+) strand; PAM type: YTN; PAM sequence: CTG
aggtggggggattgccttag

SEQ ID NO: 89266 - DNA, 20 bp, Artificial Sequence
  Description of Artificial Sequence: Synthetic oligonucleotide
  Target: ATXN2; (+) strand; PAM type: YTN; PAM sequence: TTG
ccttagctcgggaagttgag

SEQ ID NO: 89267 - DNA, 20 bp, Artificial Sequence
  Description of Artificial Sequence: Synthetic oligonucleotide
  Target: ATXN2; (+) strand; PAM type: YTN; PAM sequence: CTT
agctcgggaagttgaggctg

SEQ ID NO: 89268 - DNA, 20 bp, Artificial Sequence
  Description of Artificial Sequence: Synthetic oligonucleotide
  Target: ATXN2; (+) strand; PAM type: YTN; PAM sequence: TTA
gctcgggaagttgaggctgc

SEQ ID NO: 89269 - DNA, 20 bp, Artificial Sequence
  Description of Artificial Sequence: Synthetic oligonucleotide
  Target: ATXN2; (+) strand; PAM type: YTN; PAM sequence: CTC
gggaagttgaggctgcagta

SEQ ID NO: 89270 - DNA, 20 bp, Artificial Sequence
  Description of Artificial Sequence: Synthetic oligonucleotide
  Target: ATXN2; (+) strand; PAM type: YTN; PAM sequence: TTG
aggctgcagtatgcccagat

SEQ ID NO: 89271 - DNA, 20 bp, Artificial Sequence
  Description of Artificial Sequence: Synthetic oligonucleotide
  Target: ATXN2; (+) strand; PAM type: YTN; PAM sequence: CTG
cagtatgcccagatcatccc

SEQ ID NO: 89272 - DNA, 20 bp, Artificial Sequence
  Description of Artificial Sequence: Synthetic oligonucleotide
  Target: ATXN2; (+) strand; PAM type: YTN; PAM sequence: CTG
cactccagcctaggtaacag

SEQ ID NO: 89273 - DNA, 20 bp, Artificial Sequence
  Description of Artificial Sequence: Synthetic oligonucleotide
  Target: ATXN2; (+) strand; PAM type: YTN; PAM sequence: CTC
cagcctaggtaacagagcca

SEQ ID NO: 89274 - DNA, 20 bp, Artificial Sequence
  Description of Artificial Sequence: Synthetic oligonucleotide
  Target: ATXN2; (+) strand; PAM type: YTN; PAM sequence: CTA
ggtaacagagccagaccttg

SEQ ID NO: 89275 - DNA, 20 bp, Artificial Sequence
  Description of Artificial Sequence: Synthetic oligonucleotide
  Target: ATXN2; (+) strand; PAM type: YTN; PAM sequence: CTT
gtctccaaaaaattaaaaaa

SEQ ID NO: 89276 - DNA, 20 bp, Artificial Sequence
  Description of Artificial Sequence: Synthetic oligonucleotide
  Target: ATXN2; (+) strand; PAM type: YTN; PAM sequence: TTG
tctccaaaaaattaaaaaaa

SEQ ID NO: 89277 - DNA, 20 bp, Artificial Sequence
  Description of Artificial Sequence: Synthetic oligonucleotide
  Target: ATXN2; (+) strand; PAM type: YTN; PAM sequence: CTC
caaaaaattaaaaaaaaaaa

SEQ ID NO: 89278 - DNA, 20 bp, Artificial Sequence
  Description of Artificial Sequence: Synthetic oligonucleotide
  Target: ATXN2; (+) strand; PAM type: YTN; PAM sequence: TTA
aaaaaaaaaaaaaaattcca

SEQ ID NO: 89279 - DNA, 20 bp, Artificial Sequence
  Description of Artificial Sequence: Synthetic oligonucleotide
  Target: ATXN2; (+) strand; PAM type: YTN; PAM sequence: TTC
cagaagtttatactgatagt

SEQ ID NO: 89280 - DNA, 20 bp, Artificial Sequence
  Description of Artificial Sequence: Synthetic oligonucleotide
  Target: ATXN2; (+) strand; PAM type: YTN; PAM sequence: TTT
atactgatagtaagaaccaa

SEQ ID NO: 89281 - DNA, 20 bp, Artificial Sequence
  Description of Artificial Sequence: Synthetic oligonucleotide
  Target: ATXN2; (+) strand; PAM type: YTN; PAM sequence: TTA
tactgatagtaagaaccaac

SEQ ID NO: 89282 - DNA, 20 bp, Artificial Sequence
  Description of Artificial Sequence: Synthetic oligonucleotide
  Target: ATXN2; (+) strand; PAM type: YTN; PAM sequence: CTG
atagtaagaaccaacgacaa

SEQ ID NO: 89283 - DNA, 20 bp, Artificial Sequence
  Description of Artificial Sequence: Synthetic oligonucleotide
  Target: ATXN2; (+) strand; PAM type: YTN; PAM sequence: CTC
actggttacctttggaggat

SEQ ID NO: 89284 - DNA, 20 bp, Artificial Sequence
  Description of Artificial Sequence: Synthetic oligonucleotide
  Target: ATXN2; (+) strand; PAM type: YTN; PAM sequence: CTG
gttacctttggaggataaca

SEQ ID NO: 89285 - DNA, 20 bp, Artificial Sequence
  Description of Artificial Sequence: Synthetic oligonucleotide
  Target: ATXN2; (+) strand; PAM type: YTN; PAM sequence: TTA
cctttggaggataacagaaa

SEQ ID NO: 89286 - DNA, 20 bp, Artificial Sequence
  Description of Artificial Sequence: Synthetic oligonucleotide
  Target: ATXN2; (+) strand; PAM type: YTN; PAM sequence: CTT
tggaggataacagaaaacca

SEQ ID NO: 89287 - DNA, 20 bp, Artificial Sequence
  Description of Artificial Sequence: Synthetic oligonucleotide
  Target: ATXN2; (+) strand; PAM type: YTN; PAM sequence: TTT
ggaggataacagaaaaccaa

SEQ ID NO: 89288 - DNA, 20 bp, Artificial Sequence
  Description of Artificial Sequence: Synthetic oligonucleotide
  Target: ATXN2; (+) strand; PAM type: YTN; PAM sequence: TTG
gaggataacagaaaaccaac

SEQ ID NO: 89289 - DNA, 20 bp, Artificial Sequence
  Description of Artificial Sequence: Synthetic oligonucleotide
  Target: ATXN2; (+) strand; PAM type: YTN; PAM sequence: CTC
attattttgaagactgcctt

SEQ ID NO: 89290 - DNA, 20 bp, Artificial Sequence
  Description of Artificial Sequence: Synthetic oligonucleotide
  Target: ATXN2; (+) strand; PAM type: YTN; PAM sequence: TTA
ttttgaagactgccttaaaa

SEQ ID NO: 89291 - DNA, 20 bp, Artificial Sequence
  Description of Artificial Sequence: Synthetic oligonucleotide
  Target: ATXN2; (+) strand; PAM type: YTN; PAM sequence: TTT
tgaagactgccttaaaaagg

SEQ ID NO: 89292 - DNA, 20 bp, Artificial Sequence
  Description of Artificial Sequence: Synthetic oligonucleotide
  Target: ATXN2; (+) strand; PAM type: YTN; PAM sequence: TTT
gaagactgccttaaaaaggg

SEQ ID NO: 89293 - DNA, 20 bp, Artificial Sequence
  Description of Artificial Sequence: Synthetic oligonucleotide
  Target: ATXN2; (+) strand; PAM type: YTN; PAM sequence: TTG
aagactgccttaaaaaggga

SEQ ID NO: 89294 - DNA, 20 bp, Artificial Sequence
  Description of Artificial Sequence: Synthetic oligonucleotide
  Target: ATXN2; (+) strand; PAM type: YTN; PAM sequence: CTG
ccttaaaaagggaaatgatt

SEQ ID NO: 89295 - DNA, 20 bp, Artificial Sequence
  Description of Artificial Sequence: Synthetic oligonucleotide
  Target: ATXN2; (+) strand; PAM type: YTN; PAM sequence: CTT
aaaaagggaaatgattaaca

SEQ ID NO: 89296 - DNA, 20 bp, Artificial Sequence
  Description of Artificial Sequence: Synthetic oligonucleotide
  Target: ATXN2; (+) strand; PAM type: YTN; PAM sequence: TTA
aaaagggaaatgattaacat

SEQ ID NO: 89297 - DNA, 20 bp, Artificial Sequence
  Description of Artificial Sequence: Synthetic oligonucleotide
  Target: ATXN2; (+) strand; PAM type: YTN; PAM sequence: TTA
acattttaaattacttttcc

SEQ ID NO: 89298 - DNA, 20 bp, Artificial Sequence
  Description of Artificial Sequence: Synthetic oligonucleotide
  Target: ATXN2; (+) strand; PAM type: YTN; PAM sequence: TTT
taaattacttttcctaagaa

SEQ ID NO: 89299 - DNA, 20 bp, Artificial Sequence
  Description of Artificial Sequence: Synthetic oligonucleotide
  Target: ATXN2; (+) strand; PAM type: YTN; PAM sequence: TTT
aaattacttttcctaagaaa

SEQ ID NO: 89300 - DNA, 20 bp, Artificial Sequence
  Description of Artificial Sequence: Synthetic oligonucleotide
  Target: ATXN2; (+) strand; PAM type: YTN; PAM sequence: TTA
aattacttttcctaagaaag

SEQ ID NO: 89301 - DNA, 20 bp, Artificial Sequence
  Description of Artificial Sequence: Synthetic oligonucleotide
  Target: ATXN2; (+) strand; PAM type: YTN; PAM sequence: TTA
cttttcctaagaaagctata

SEQ ID NO: 89302 - DNA, 20 bp, Artificial Sequence
  Description of Artificial Sequence: Synthetic oligonucleotide
  Target: ATXN2; (+) strand; PAM type: YTN; PAM sequence: CTT
ttcctaagaaagctatacct

SEQ ID NO: 89303 - DNA, 20 bp, Artificial Sequence
  Description of Artificial Sequence: Synthetic oligonucleotide
  Target: ATXN2; (+) strand; PAM type: YTN; PAM sequence: TTT
tcctaagaaagctatacctc

SEQ ID NO: 89304 - DNA, 20 bp, Artificial Sequence
  Description of Artificial Sequence: Synthetic oligonucleotide
  Target: ATXN2; (+) strand; PAM type: YTN; PAM sequence: TTT
cctaagaaagctatacctca

SEQ ID NO: 89305 - DNA, 20 bp, Artificial Sequence
  Description of Artificial Sequence: Synthetic oligonucleotide
  Target: ATXN2; (+) strand; PAM type: YTN; PAM sequence: TTC
ctaagaaagctatacctcag

SEQ ID NO: 89306 - DNA, 20 bp, Artificial Sequence
  Description of Artificial Sequence: Synthetic oligonucleotide
  Target: ATXN2; (+) strand; PAM type: YTN; PAM sequence: CTA
agaaagctatacctcagggt

SEQ ID NO: 89307 - DNA, 20 bp, Artificial Sequence
  Description of Artificial Sequence: Synthetic oligonucleotide
  Target: ATXN2; (+) strand; PAM type: YTN; PAM sequence: CTA
tacctcagggtaaccaaaca

SEQ ID NO: 89308 - DNA, 20 bp, Artificial Sequence
  Description of Artificial Sequence: Synthetic oligonucleotide
  Target: ATXN2; (+) strand; PAM type: YTN; PAM sequence: CTC
agggtaaccaaacagctgga

SEQ ID NO: 89309 - DNA, 20 bp, Artificial Sequence
  Description of Artificial Sequence: Synthetic oligonucleotide
  Target: ATXN2; (+) strand; PAM type: YTN; PAM sequence: CTG
gatatgggaaagtttttctt

SEQ ID NO: 89310 - DNA, 20 bp, Artificial Sequence
  Description of Artificial Sequence: Synthetic oligonucleotide
  Target: ATXN2; (+) strand; PAM type: YTN; PAM sequence: TTT
ttctttatagaaatattcca

SEQ ID NO: 89311 - DNA, 20 bp, Artificial Sequence
  Description of Artificial Sequence: Synthetic oligonucleotide
  Target: ATXN2; (+) strand; PAM type: YTN; PAM sequence: TTT
tctttatagaaatattccag

SEQ ID NO: 89312 - DNA, 20 bp, Artificial Sequence
  Description of Artificial Sequence: Synthetic oligonucleotide
  Target: ATXN2; (+) strand; PAM type: YTN; PAM sequence: TTT
ctttatagaaatattccagg

SEQ ID NO: 89313 - DNA, 20 bp, Artificial Sequence
  Description of Artificial Sequence: Synthetic oligonucleotide
  Target: ATXN2; (+) strand; PAM type: YTN; PAM sequence: TTC
tttatagaaatattccaggc

SEQ ID NO: 89314 - DNA, 20 bp, Artificial Sequence
  Description of Artificial Sequence: Synthetic oligonucleotide
  Target: ATXN2; (+) strand; PAM type: YTN; PAM sequence: CTT
tatagaaatattccaggcaa

SEQ ID NO: 89315 - DNA, 20 bp, Artificial Sequence
  Description of Artificial Sequence: Synthetic oligonucleotide
  Target: ATXN2; (+) strand; PAM type: YTN; PAM sequence: TTT
atagaaatattccaggcaat

SEQ ID NO: 89316 - DNA, 20 bp, Artificial Sequence
  Description of Artificial Sequence: Synthetic oligonucleotide
  Target: ATXN2; (+) strand; PAM type: YTN; PAM sequence: TTA
tagaaatattccaggcaata

SEQ ID NO: 89317 - DNA, 20 bp, Artificial Sequence
  Description of Artificial Sequence: Synthetic oligonucleotide
  Target: ATXN2; (+) strand; PAM type: YTN; PAM sequence: TTC
caggcaataattgaagaagg

SEQ ID NO: 89318 - DNA, 20 bp, Artificial Sequence
  Description of Artificial Sequence: Synthetic oligonucleotide
  Target: ATXN2; (+) strand; PAM type: YTN; PAM sequence: TTG
aagaagggatgaaaggaaaa

SEQ ID NO: 89319 - DNA, 20 bp, Artificial Sequence
  Description of Artificial Sequence: Synthetic oligonucleotide
  Target: ATXN2; (+) strand; PAM type: YTN; PAM sequence: TTT
tacaacccctaaggaaataa

SEQ ID NO: 89320 - DNA, 20 bp, Artificial Sequence
  Description of Artificial Sequence: Synthetic oligonucleotide
  Target: ATXN2; (+) strand; PAM type: YTN; PAM sequence: TTT
acaacccctaaggaaataac

SEQ ID NO: 89321 - DNA, 20 bp, Artificial Sequence
  Description of Artificial Sequence: Synthetic oligonucleotide
  Target: ATXN2; (+) strand; PAM type: YTN; PAM sequence: TTA
caacccctaaggaaataact

SEQ ID NO: 89322 - DNA, 20 bp, Artificial Sequence
  Description of Artificial Sequence: Synthetic oligonucleotide
  Target: ATXN2; (+) strand; PAM type: YTN; PAM sequence: CTA
aggaaataactgatcttggg

SEQ ID NO: 89323 - DNA, 20 bp, Artificial Sequence
  Description of Artificial Sequence: Synthetic oligonucleotide
  Target: ATXN2; (+) strand; PAM type: YTN; PAM sequence: CTG
atcttgggctagacaattat

SEQ ID NO: 89324 - DNA, 20 bp, Artificial Sequence
  Description of Artificial Sequence: Synthetic oligonucleotide
  Target: ATXN2; (+) strand; PAM type: YTN; PAM sequence: CTT
gggctagacaattatcatca

SEQ ID NO: 89325 - DNA, 20 bp, Artificial Sequence
  Description of Artificial Sequence: Synthetic oligonucleotide
  Target: ATXN2; (+) strand; PAM type: YTN; PAM sequence: TTG
ggctagacaattatcatcaa

SEQ ID NO: 89326 - DNA, 20 bp, Artificial Sequence
  Description of Artificial Sequence: Synthetic oligonucleotide
  Target: ATXN2; (+) strand; PAM type: YTN; PAM sequence: CTA
gacaattatcatcaatggct

SEQ ID NO: 89327 - DNA, 20 bp, Artificial Sequence
  Description of Artificial Sequence: Synthetic oligonucleotide
  Target: ATXN2; (+) strand; PAM type: YTN; PAM sequence: TTA
tcatcaatggctgctaaaaa

SEQ ID NO: 89328 - DNA, 20 bp, Artificial Sequence
  Description of Artificial Sequence: Synthetic oligonucleotide
  Target: ATXN2; (+) strand; PAM type: YTN; PAM sequence: CTG
ctaaaaaacacaccaaaaaa

SEQ ID NO: 89329 - DNA, 20 bp, Artificial Sequence
  Description of Artificial Sequence: Synthetic oligonucleotide
  Target: ATXN2; (+) strand; PAM type: YTN; PAM sequence: CTA
aaaaacacaccaaaaaaatt

SEQ ID NO: 89330 - DNA, 20 bp, Artificial Sequence
  Description of Artificial Sequence: Synthetic oligonucleotide
  Target: ATXN2; (+) strand; PAM type: YTN; PAM sequence: TTA
aggcgctaaagggacatatt

SEQ ID NO: 89331 - DNA, 20 bp, Artificial Sequence
  Description of Artificial Sequence: Synthetic oligonucleotide
  Target: ATXN2; (+) strand; PAM type: YTN; PAM sequence: CTA
aagggacatattatctcctg

SEQ ID NO: 89332 - DNA, 20 bp, Artificial Sequence
  Description of Artificial Sequence: Synthetic oligonucleotide
  Target: ATXN2; (+) strand; PAM type: YTN; PAM sequence: TTA
tctcctggatagataaaaca

SEQ ID NO: 89333 - DNA, 20 bp, Artificial Sequence
  Description of Artificial Sequence: Synthetic oligonucleotide
  Target: ATXN2; (+) strand; PAM type: YTN; PAM sequence: CTC
ctggatagataaaacatcta

SEQ ID NO: 89334 - DNA, 20 bp, Artificial Sequence
  Description of Artificial Sequence: Synthetic oligonucleotide
  Target: ATXN2; (+) strand; PAM type: YTN; PAM sequence: CTG
gatagataaaacatctagga

SEQ ID NO: 89335 - DNA, 20 bp, Artificial Sequence
  Description of Artificial Sequence: Synthetic oligonucleotide
  Target: ATXN2; (+) strand; PAM type: YTN; PAM sequence: CTA
ggaactcactgactactcct

SEQ ID NO: 89336 - DNA, 20 bp, Artificial Sequence
  Description of Artificial Sequence: Synthetic oligonucleotide
  Target: ATXN2; (+) strand; PAM type: YTN; PAM sequence: CTC
actgactactcctatcagga

SEQ ID NO: 89337 - DNA, 20 bp, Artificial Sequence
  Description of Artificial Sequence: Synthetic oligonucleotide
  Target: ATXN2; (+) strand; PAM type: YTN; PAM sequence: CTG
actactcctatcaggaaaaa

SEQ ID NO: 89338 - DNA, 20 bp, Artificial Sequence
  Description of Artificial Sequence: Synthetic oligonucleotide
  Target: ATXN2; (+) strand; PAM type: YTN; PAM sequence: CTA
ctcctatcaggaaaaagact

SEQ ID NO: 89339 - DNA, 20 bp, Artificial Sequence
  Description of Artificial Sequence: Synthetic oligonucleotide
  Target: ATXN2; (+) strand; PAM type: YTN; PAM sequence: CTC
ctatcaggaaaaagactgat

SEQ ID NO: 89340 - DNA, 20 bp, Artificial Sequence
  Description of Artificial Sequence: Synthetic oligonucleotide
  Target: ATXN2; (+) strand; PAM type: YTN; PAM sequence: CTA
tcaggaaaaagactgattac

SEQ ID NO: 89341 - DNA, 20 bp, Artificial Sequence
  Description of Artificial Sequence: Synthetic oligonucleotide
  Target: ATXN2; (+) strand; PAM type: YTN; PAM sequence: CTG
attacatgactcctcactga

SEQ ID NO: 89342 - DNA, 20 bp, Artificial Sequence
  Description of Artificial Sequence: Synthetic oligonucleotide
  Target: ATXN2; (+) strand; PAM type: YTN; PAM sequence: TTA
catgactcctcactgaaagt

SEQ ID NO: 89343 - DNA, 20 bp, Artificial Sequence
  Description of Artificial Sequence: Synthetic oligonucleotide
  Target: ATXN2; (+) strand; PAM type: YTN; PAM sequence: CTC
ctcactgaaagtacacacat

SEQ ID NO: 89344 - DNA, 20 bp, Artificial Sequence
  Description of Artificial Sequence: Synthetic oligonucleotide
  Target: ATXN2; (+) strand; PAM type: YTN; PAM sequence: CTC
actgaaagtacacacatctg

SEQ ID NO: 89345 - DNA, 20 bp, Artificial Sequence
  Description of Artificial Sequence: Synthetic oligonucleotide
  Target: ATXN2; (+) strand; PAM type: YTN; PAM sequence: CTG
aaagtacacacatctgtgaa

SEQ ID NO: 89346 - DNA, 20 bp, Artificial Sequence
  Description of Artificial Sequence: Synthetic oligonucleotide
  Target: ATXN2; (+) strand; PAM type: YTN; PAM sequence: CTG
tgaaacattggggaaaaaaa

SEQ ID NO: 89347 - DNA, 20 bp, Artificial Sequence
  Description of Artificial Sequence: Synthetic oligonucleotide
  Target: ATXN2; (+) strand; PAM type: YTN; PAM sequence: TTG
gggaaaaaaaaaaaaaaccc

SEQ ID NO: 89348 - DNA, 20 bp, Artificial Sequence
  Description of Artificial Sequence: Synthetic oligonucleotide
  Target: ATXN2; (+) strand; PAM type: YTN; PAM sequence: CTG
atcaagccttcattatttac

SEQ ID NO: 89349 - DNA, 20 bp, Artificial Sequence
  Description of Artificial Sequence: Synthetic oligonucleotide
  Target: ATXN2; (+) strand; PAM type: YTN; PAM sequence: CTT
cattatttactatcagttta

SEQ ID NO: 89350 - DNA, 20 bp, Artificial Sequence
  Description of Artificial Sequence: Synthetic oligonucleotide
  Target: ATXN2; (+) strand; PAM type: YTN; PAM sequence: TTC
attatttactatcagtttac

SEQ ID NO: 89351 - DNA, 20 bp, Artificial Sequence
  Description of Artificial Sequence: Synthetic oligonucleotide
  Target: ATXN2; (+) strand; PAM type: YTN; PAM sequence: TTA
tttactatcagtttacaaag

SEQ ID NO: 89352 - DNA, 20 bp, Artificial Sequence
  Description of Artificial Sequence: Synthetic oligonucleotide
  Target: ATXN2; (+) strand; PAM type: YTN; PAM sequence: TTT
actatcagtttacaaagatt

SEQ ID NO: 89353 - DNA, 20 bp, Artificial Sequence
  Description of Artificial Sequence: Synthetic oligonucleotide
  Target: ATXN2; (+) strand; PAM type: YTN; PAM sequence: TTA
ctatcagtttacaaagatta

SEQ ID NO: 89354 - DNA, 20 bp, Artificial Sequence
  Description of Artificial Sequence: Synthetic oligonucleotide
  Target: ATXN2; (+) strand; PAM type: YTN; PAM sequence: CTA
tcagtttacaaagattacag

SEQ ID NO: 89355 - DNA, 20 bp, Artificial Sequence
  Description of Artificial Sequence: Synthetic oligonucleotide
  Target: ATXN2; (+) strand; PAM type: YTN; PAM sequence: TTT
acaaagattacaggggacag

SEQ ID NO: 89356 - DNA, 20 bp, Artificial Sequence
  Description of Artificial Sequence: Synthetic oligonucleotide
  Target: ATXN2; (+) strand; PAM type: YTN; PAM sequence: TTA
caaagattacaggggacaga

SEQ ID NO: 89357 - DNA, 20 bp, Artificial Sequence
  Description of Artificial Sequence: Synthetic oligonucleotide
  Target: ATXN2; (+) strand; PAM type: YTN; PAM sequence: TTA
caggggacagaagtctactt

SEQ ID NO: 89358 - DNA, 20 bp, Artificial Sequence
  Description of Artificial Sequence: Synthetic oligonucleotide
  Target: ATXN2; (+) strand; PAM type: YTN; PAM sequence: CTA
ctttaaatatcaacacaggg

SEQ ID NO: 89359 - DNA, 20 bp, Artificial Sequence
  Description of Artificial Sequence: Synthetic oligonucleotide
  Target: ATXN2; (+) strand; PAM type: YTN; PAM sequence: CTT
taaatatcaacacagggata

SEQ ID NO: 89360 - DNA, 20 bp, Artificial Sequence
  Description of Artificial Sequence: Synthetic oligonucleotide
  Target: ATXN2; (+) strand; PAM type: YTN; PAM sequence: TTT
aaatatcaacacagggatac

SEQ ID NO: 89361 - DNA, 20 bp, Artificial Sequence
  Description of Artificial Sequence: Synthetic oligonucleotide
  Target: ATXN2; (+) strand; PAM type: YTN; PAM sequence: TTA
aatatcaacacagggataca

SEQ ID NO: 89362 - DNA, 20 bp, Artificial Sequence
  Description of Artificial Sequence: Synthetic oligonucleotide
  Target: ATXN2; (+) strand; PAM type: YTN; PAM sequence: TTC
agatcgtgggaaaaaaatac

SEQ ID NO: 89363 - DNA, 20 bp, Artificial Sequence
  Description of Artificial Sequence: Synthetic oligonucleotide
  Target: ATXN2; (+) strand; PAM type: YTN; PAM sequence: CTG
gatatgaacaagacaaaaac

SEQ ID NO: 89364 - DNA, 20 bp, Artificial Sequence
  Description of Artificial Sequence: Synthetic oligonucleotide
  Target: ATXN2; (+) strand; PAM type: YTN; PAM sequence: CTA
agggaaaaactgtaattaaa

SEQ ID NO: 89365 - DNA, 20 bp, Artificial Sequence
  Description of Artificial Sequence: Synthetic oligonucleotide
  Target: ATXN2; (+) strand; PAM type: YTN; PAM sequence: CTG
taattaaaactgtgagggct

SEQ ID NO: 89366 - DNA, 20 bp, Artificial Sequence
  Description of Artificial Sequence: Synthetic oligonucleotide
  Target: ATXN2; (+) strand; PAM type: YTN; PAM sequence: TTA
aaactgtgagggctgagtgc

SEQ ID NO: 89367 - DNA, 20 bp, Artificial Sequence
  Description of Artificial Sequence: Synthetic oligonucleotide
  Target: ATXN2; (+) strand; PAM type: YTN; PAM sequence: CTG
tgagggctgagtgcagtggc

SEQ ID NO: 89368 - DNA, 20 bp, Artificial Sequence
  Description of Artificial Sequence: Synthetic oligonucleotide
  Target: ATXN2; (+) strand; PAM type: YTN; PAM sequence: CTG
agtgcagtggctcatgcctg

SEQ ID NO: 89369 - DNA, 20 bp, Artificial Sequence
  Description of Artificial Sequence: Synthetic oligonucleotide
  Target: ATXN2; (+) strand; PAM type: YTN; PAM sequence: CTC
atgcctgtaatcctggcacc

SEQ ID NO: 89370 - DNA, 20 bp, Artificial Sequence
  Description of Artificial Sequence: Synthetic oligonucleotide
  Target: ATXN2; (+) strand; PAM type: YTN; PAM sequence: CTG
taatcctggcaccttgggag

SEQ ID NO: 89371 - DNA, 20 bp, Artificial Sequence
  Description of Artificial Sequence: Synthetic oligonucleotide
  Target: ATXN2; (+) strand; PAM type: YTN; PAM sequence: CTG
gcaccttgggagtcaaggca

SEQ ID NO: 89372 - DNA, 20 bp, Artificial Sequence
  Description of Artificial Sequence: Synthetic oligonucleotide
  Target: ATXN2; (+) strand; PAM type: YTN; PAM sequence: CTT
gggagtcaaggcaggcagac

SEQ ID NO: 89373 - DNA, 20 bp, Artificial Sequence
  Description of Artificial Sequence: Synthetic oligonucleotide
  Target: ATXN2; (+) strand; PAM type: YTN; PAM sequence: TTG
ggagtcaaggcaggcagact

SEQ ID NO: 89374 - DNA, 20 bp, Artificial Sequence
  Description of Artificial Sequence: Synthetic oligonucleotide
  Target: ATXN2; (+) strand; PAM type: YTN; PAM sequence: CTG
cttgagctcaggaattcgaa

SEQ ID NO: 89375 - DNA, 20 bp, Artificial Sequence
  Description of Artificial Sequence: Synthetic oligonucleotide
  Target: ATXN2; (+) strand; PAM type: YTN; PAM sequence: CTT
gagctcaggaattcgaaacc

SEQ ID NO: 89376 - DNA, 20 bp, Artificial Sequence
  Description of Artificial Sequence: Synthetic oligonucleotide
  Target: ATXN2; (+) strand; PAM type: YTN; PAM sequence: TTG
agctcaggaattcgaaaccc

SEQ ID NO: 89377 - DNA, 20 bp, Artificial Sequence
  Description of Artificial Sequence: Synthetic oligonucleotide
  Target: ATXN2; (+) strand; PAM type: YTN; PAM sequence: CTC
aggaattcgaaaccctgtct

SEQ ID NO: 89378 - DNA, 20 bp, Artificial Sequence
  Description of Artificial Sequence: Synthetic oligonucleotide
  Target: ATXN2; (+) strand; PAM type: YTN; PAM sequence: TTC
gaaaccctgtctctacaaaa

SEQ ID NO: 89379 - DNA, 20 bp, Artificial Sequence
  Description of Artificial Sequence: Synthetic oligonucleotide
  Target: ATXN2; (+) strand; PAM type: YTN; PAM sequence: CTG
tctctacaaaaaatacaaaa

SEQ ID NO: 89380 - DNA, 20 bp, Artificial Sequence
  Description of Artificial Sequence: Synthetic oligonucleotide
  Target: ATXN2; (+) strand; PAM type: YTN; PAM sequence: CTC
tacaaaaaatacaaaaatta

SEQ ID NO: 89381 - DNA, 20 bp, Artificial Sequence
  Description of Artificial Sequence: Synthetic oligonucleotide
  Target: ATXN2; (+) strand; PAM type: YTN; PAM sequence: CTA
caaaaaatacaaaaattagc

SEQ ID NO: 89382 - DNA, 20 bp, Artificial Sequence
  Description of Artificial Sequence: Synthetic oligonucleotide
  Target: ATXN2; (+) strand; PAM type: YTN; PAM sequence: TTA
gccaggtatggtggcgcgca

SEQ ID NO: 89383 - DNA, 20 bp, Artificial Sequence
  Description of Artificial Sequence: Synthetic oligonucleotide
  Target: ATXN2; (+) strand; PAM type: YTN; PAM sequence: CTT
tagtcccagctacttgggag

SEQ ID NO: 89384 - DNA, 20 bp, Artificial Sequence
  Description of Artificial Sequence: Synthetic oligonucleotide
  Target: ATXN2; (+) strand; PAM type: YTN; PAM sequence: TTT
agtcccagctacttgggagg

SEQ ID NO: 89385 - DNA, 20 bp, Artificial Sequence
  Description of Artificial Sequence: Synthetic oligonucleotide
  Target: ATXN2; (+) strand; PAM type: YTN; PAM sequence: TTA
gtcccagctacttgggaggt

SEQ ID NO: 89386 - DNA, 20 bp, Artificial Sequence
  Description of Artificial Sequence: Synthetic oligonucleotide
  Target: ATXN2; (+) strand; PAM type: YTN; PAM sequence: CTA
cttgggaggttgaggtggga

SEQ ID NO: 89387 - DNA, 20 bp, Artificial Sequence
  Description of Artificial Sequence: Synthetic oligonucleotide
  Target: ATXN2; (+) strand; PAM type: YTN; PAM sequence: CTT
gggaggttgaggtgggagga

SEQ ID NO: 89388 - DNA, 20 bp, Artificial Sequence
  Description of Artificial Sequence: Synthetic oligonucleotide
  Target: ATXN2; (+) strand; PAM type: YTN; PAM sequence: TTG
ggaggttgaggtgggaggac

SEQ ID NO: 89389 - DNA, 20 bp, Artificial Sequence
  Description of Artificial Sequence: Synthetic oligonucleotide
  Target: ATXN2; (+) strand; PAM type: YTN; PAM sequence: TTG
aggtgggaggaccacctaag

SEQ ID NO: 89390 - DNA, 20 bp, Artificial Sequence
  Description of Artificial Sequence: Synthetic oligonucleotide
  Target: ATXN2; (+) strand; PAM type: YTN; PAM sequence: CTA
agcccaattggtagagactg

SEQ ID NO: 89391 - DNA, 20 bp, Artificial Sequence
  Description of Artificial Sequence: Synthetic oligonucleotide
  Target: ATXN2; (+) strand; PAM type: YTN; PAM sequence: TTG
gtagagactgcactgagctg

SEQ ID NO: 89392 - DNA, 20 bp, Artificial Sequence
  Description of Artificial Sequence: Synthetic oligonucleotide
  Target: ATXN2; (+) strand; PAM type: YTN; PAM sequence: CTG
cactgagctgaaatcatgcc

SEQ ID NO: 89393 - DNA, 20 bp, Artificial Sequence
  Description of Artificial Sequence: Synthetic oligonucleotide
  Target: ATXN2; (+) strand; PAM type: YTN; PAM sequence: CTG
agctgaaatcatgccactgc

SEQ ID NO: 89394 - DNA, 20 bp, Artificial Sequence
  Description of Artificial Sequence: Synthetic oligonucleotide
  Target: ATXN2; (+) strand; PAM type: YTN; PAM sequence: CTG
aaatcatgccactgcactcc

SEQ ID NO: 89395 - DNA, 20 bp, Artificial Sequence
  Description of Artificial Sequence: Synthetic oligonucleotide
  Target: ATXN2; (+) strand; PAM type: YTN; PAM sequence: CTG
cactccagcttgggtgacag

SEQ ID NO: 89396 - DNA, 20 bp, Artificial Sequence
  Description of Artificial Sequence: Synthetic oligonucleotide
  Target: ATXN2; (+) strand; PAM type: YTN; PAM sequence: CTC
cagcttgggtgacagagtta

SEQ ID NO: 89397 - DNA, 20 bp, Artificial Sequence
  Description of Artificial Sequence: Synthetic oligonucleotide
  Target: ATXN2; (+) strand; PAM type: YTN; PAM sequence: CTT
gggtgacagagttagacact

SEQ ID NO: 89398 - DNA, 20 bp, Artificial Sequence
  Description of Artificial Sequence: Synthetic oligonucleotide
  Target: ATXN2; (+) strand; PAM type: YTN; PAM sequence: TTG
ggtgacagagttagacactg

SEQ ID NO: 89399 - DNA, 20 bp, Artificial Sequence
  Description of Artificial Sequence: Synthetic oligonucleotide
  Target: ATXN2; (+) strand; PAM type: YTN; PAM sequence: TTA
gacactgtctcaaaaaacaa

SEQ ID NO: 89400 - DNA, 20 bp, Artificial Sequence
  Description of Artificial Sequence: Synthetic oligonucleotide
  Target: ATXN2; (+) strand; PAM type: YTN; PAM sequence: CTG
tctcaaaaaacaaacaaaca

SEQ ID NO: 89401 - DNA, 20 bp, Artificial Sequence
  Description of Artificial Sequence: Synthetic oligonucleotide
  Target: ATXN2; (+) strand; PAM type: YTN; PAM sequence: CTC
aaaaaacaaacaaacaaaaa

SEQ ID NO: 89402 - DNA, 20 bp, Artificial Sequence
  Description of Artificial Sequence: Synthetic oligonucleotide
  Target: ATXN2; (+) strand; PAM type: YTN; PAM sequence: CTA
tgacttggctgggtgtgatg

SEQ ID NO: 89403 - DNA, 20 bp, Artificial Sequence
  Description of Artificial Sequence: Synthetic oligonucleotide
  Target: ATXN2; (+) strand; PAM type: YTN; PAM sequence: CTT
ggctgggtgtgatggctcat

SEQ ID NO: 89404 - DNA, 20 bp, Artificial Sequence
  Description of Artificial Sequence: Synthetic oligonucleotide
  Target: ATXN2; (+) strand; PAM type: YTN; PAM sequence: TTG
gctgggtgtgatggctcatc

SEQ ID NO: 89405 - DNA, 20 bp, Artificial Sequence
  Description of Artificial Sequence: Synthetic oligonucleotide
  Target: ATXN2; (+) strand; PAM type: YTN; PAM sequence: CTG
ggtgtgatggctcatccagc

SEQ ID NO: 89406 - DNA, 20 bp, Artificial Sequence
  Description of Artificial Sequence: Synthetic oligonucleotide
  Target: ATXN2; (+) strand; PAM type: YTN; PAM sequence: CTC
atccagcacctcctaaagtg

SEQ ID NO: 89407 - DNA, 20 bp, Artificial Sequence
  Description of Artificial Sequence: Synthetic oligonucleotide
  Target: ATXN2; (+) strand; PAM type: YTN; PAM sequence: CTC
ctaaagtgctggcctgtaat

SEQ ID NO: 89408 - DNA, 20 bp, Artificial Sequence
  Description of Artificial Sequence: Synthetic oligonucleotide
  Target: ATXN2; (+) strand; PAM type: YTN; PAM sequence: CTA
aagtgctggcctgtaatcct

SEQ ID NO: 89409 - DNA, 20 bp, Artificial Sequence
  Description of Artificial Sequence: Synthetic oligonucleotide
  Target: ATXN2; (+) strand; PAM type: YTN; PAM sequence: CTG
gcctgtaatcctagcacttt

SEQ ID NO: 89410 - DNA, 20 bp, Artificial Sequence
  Description of Artificial Sequence: Synthetic oligonucleotide
  Target: ATXN2; (+) strand; PAM type: YTN; PAM sequence: CTG
taatcctagcactttaggag

SEQ ID NO: 89411 - DNA, 20 bp, Artificial Sequence
  Description of Artificial Sequence: Synthetic oligonucleotide
  Target: ATXN2; (+) strand; PAM type: YTN; PAM sequence: CTA
gcactttaggaggctgaggt

SEQ ID NO: 89412 - DNA, 20 bp, Artificial Sequence
  Description of Artificial Sequence: Synthetic oligonucleotide
  Target: ATXN2; (+) strand; PAM type: YTN; PAM sequence: CTT
taggaggctgaggtagaaag

SEQ ID NO: 89413 - DNA, 20 bp, Artificial Sequence
  Description of Artificial Sequence: Synthetic oligonucleotide
  Target: ATXN2; (+) strand; PAM type: YTN; PAM sequence: TTT
aggaggctgaggtagaaaga

SEQ ID NO: 89414 - DNA, 20 bp, Artificial Sequence
  Description of Artificial Sequence: Synthetic oligonucleotide
  Target: ATXN2; (+) strand; PAM type: YTN; PAM sequence: TTA
ggaggctgaggtagaaagat

SEQ ID NO: 89415 - DNA, 20 bp, Artificial Sequence
  Description of Artificial Sequence: Synthetic oligonucleotide
  Target: ATXN2; (+) strand; PAM type: YTN; PAM sequence: CTG
aggtagaaagataacttaag

SEQ ID NO: 89416 - DNA, 20 bp, Artificial Sequence
  Description of Artificial Sequence: Synthetic oligonucleotide
  Target: ATXN2; (+) strand; PAM type: YTN; PAM sequence: CTT
aagccctggaatttaggact

SEQ ID NO: 89417 - DNA, 20 bp, Artificial Sequence
  Description of Artificial Sequence: Synthetic oligonucleotide
  Target: ATXN2; (+) strand; PAM type: YTN; PAM sequence: TTA
agccctggaatttaggacta

SEQ ID NO: 89418 - DNA, 20 bp, Artificial Sequence
  Description of Artificial Sequence: Synthetic oligonucleotide
  Target: ATXN2; (+) strand; PAM type: YTN; PAM sequence: CTG
gaatttaggactagcctggg

SEQ ID NO: 89419 - DNA, 20 bp, Artificial Sequence
  Description of Artificial Sequence: Synthetic oligonucleotide
  Target: ATXN2; (+) strand; PAM type: YTN; PAM sequence: TTT
aggactagcctgggcaagat

SEQ ID NO: 89420 - DNA, 20 bp, Artificial Sequence
  Description of Artificial Sequence: Synthetic oligonucleotide
  Target: ATXN2; (+) strand; PAM type: YTN; PAM sequence: TTA
ggactagcctgggcaagata

SEQ ID NO: 89421 - DNA, 20 bp, Artificial Sequence
  Description of Artificial Sequence: Synthetic oligonucleotide
  Target: ATXN2; (+) strand; PAM type: YTN; PAM sequence: CTA
gcctgggcaagatagaaaga

SEQ ID NO: 89422 - DNA, 20 bp, Artificial Sequence
  Description of Artificial Sequence: Synthetic oligonucleotide
  Target: ATXN2; (+) strand; PAM type: YTN; PAM sequence: CTG
ggcaagatagaaagatggtg

SEQ ID NO: 89423 - DNA, 20 bp, Artificial Sequence
  Description of Artificial Sequence: Synthetic oligonucleotide
  Target: ATXN2; (+) strand; PAM type: YTN; PAM sequence: CTC
tgtctcaaaaaaaaacaaaa

SEQ ID NO: 89424 - DNA, 20 bp, Artificial Sequence
  Description of Artificial Sequence: Synthetic oligonucleotide
  Target: ATXN2; (+) strand; PAM type: YTN; PAM sequence: CTG
tctcaaaaaaaaacaaaaaa

SEQ ID NO: 89425 - DNA, 20 bp, Artificial Sequence
  Description of Artificial Sequence: Synthetic oligonucleotide
  Target: ATXN2; (+) strand; PAM type: YTN; PAM sequence: CTC
aaaaaaaaacaaaaaacaaa

SEQ ID NO: 89426 - DNA, 20 bp, Artificial Sequence
  Description of Artificial Sequence: Synthetic oligonucleotide
  Target: ATXN2; (+) strand; PAM type: YTN; PAM sequence: CTG
gcaaggtggcatgtgcctgt

SEQ ID NO: 89427 - DNA, 20 bp, Artificial Sequence
  Description of Artificial Sequence: Synthetic oligonucleotide
  Target: ATXN2; (+) strand; PAM type: YTN; PAM sequence: CTG
tagtcacagttacttgagag

SEQ ID NO: 89428 - DNA, 20 bp, Artificial Sequence
  Description of Artificial Sequence: Synthetic oligonucleotide
  Target: ATXN2; (+) strand; PAM type: YTN; PAM sequence: TTA
cttgagaggctgaggaggga

SEQ ID NO: 89429 - DNA, 20 bp, Artificial Sequence
  Description of Artificial Sequence: Synthetic oligonucleotide
  Target: ATXN2; (+) strand; PAM type: YTN; PAM sequence: CTT
gagaggctgaggagggagga

SEQ ID NO: 89430 - DNA, 20 bp, Artificial Sequence
  Description of Artificial Sequence: Synthetic oligonucleotide
  Target: ATXN2; (+) strand; PAM type: YTN; PAM sequence: TTG
agaggctgaggagggaggat

SEQ ID NO: 89431 - DNA, 20 bp, Artificial Sequence
  Description of Artificial Sequence: Synthetic oligonucleotide
  Target: ATXN2; (+) strand; PAM type: YTN; PAM sequence: CTG
aggagggaggatcctttgag

SEQ ID NO: 89432 - DNA, 20 bp, Artificial Sequence
  Description of Artificial Sequence: Synthetic oligonucleotide
  Target: ATXN2; (+) strand; PAM type: YTN; PAM sequence: CTT
tgagaccaggaattcgcagc

SEQ ID NO: 89433 - DNA, 20 bp, Artificial Sequence
  Description of Artificial Sequence: Synthetic oligonucleotide
  Target: ATXN2; (+) strand; PAM type: YTN; PAM sequence: TTT
gagaccaggaattcgcagca

SEQ ID NO: 89434 - DNA, 20 bp, Artificial Sequence
  Description of Artificial Sequence: Synthetic oligonucleotide
  Target: ATXN2; (+) strand; PAM type: YTN; PAM sequence: TTG
agaccaggaattcgcagcag

SEQ ID NO: 89435 - DNA, 20 bp, Artificial Sequence
  Description of Artificial Sequence: Synthetic oligonucleotide
  Target: ATXN2; (+) strand; PAM type: YTN; PAM sequence: TTC
gcagcagcagtgagctatga

SEQ ID NO: 89436 - DNA, 20 bp, Artificial Sequence
  Description of Artificial Sequence: Synthetic oligonucleotide
  Target: ATXN2; (+) strand; PAM type: YTN; PAM sequence: CTA
tgattgcactactgcactcc

SEQ ID NO: 89437 - DNA, 20 bp, Artificial Sequence
  Description of Artificial Sequence: Synthetic oligonucleotide
  Target: ATXN2; (+) strand; PAM type: YTN; PAM sequence: TTG
cactactgcactccaagcct

SEQ ID NO: 89438 - DNA, 20 bp, Artificial Sequence
  Description of Artificial Sequence: Synthetic oligonucleotide
  Target: ATXN2; (+) strand; PAM type: YTN; PAM sequence: CTA
ctgcactccaagcctgggca

SEQ ID NO: 89439 - DNA, 20 bp, Artificial Sequence
  Description of Artificial Sequence: Synthetic oligonucleotide
  Target: ATXN2; (+) strand; PAM type: YTN; PAM sequence: CTG
cactccaagcctgggcaaca

SEQ ID NO: 89440 - DNA, 20 bp, Artificial Sequence
  Description of Artificial Sequence: Synthetic oligonucleotide
  Target: ATXN2; (+) strand; PAM type: YTN; PAM sequence: CTC
caagcctgggcaacaaagcc

SEQ ID NO: 89441 - DNA, 20 bp, Artificial Sequence
  Description of Artificial Sequence: Synthetic oligonucleotide
  Target: ATXN2; (+) strand; PAM type: YTN; PAM sequence: CTG
ggcaacaaagccagacccca

SEQ ID NO: 89442 - DNA, 20 bp, Artificial Sequence
  Description of Artificial Sequence: Synthetic oligonucleotide
  Target: ATXN2; (+) strand; PAM type: YTN; PAM sequence: CTC
aaaaacaaaaaacaaaacca

SEQ ID NO: 89443 - DNA, 20 bp, Artificial Sequence
  Description of Artificial Sequence: Synthetic oligonucleotide
  Target: ATXN2; (+) strand; PAM type: YTN; PAM sequence: CTT
aaagatacacactaaaatgt

SEQ ID NO: 89444 - DNA, 20 bp, Artificial Sequence
  Description of Artificial Sequence: Synthetic oligonucleotide
  Target: ATXN2; (+) strand; PAM type: YTN; PAM sequence: TTA
aagatacacactaaaatgtt

SEQ ID NO: 89445 - DNA, 20 bp, Artificial Sequence
  Description of Artificial Sequence: Synthetic oligonucleotide
  Target: ATXN2; (+) strand; PAM type: YTN; PAM sequence: CTA
aaatgttggtggataaactg

SEQ ID NO: 89446 - DNA, 20 bp, Artificial Sequence
  Description of Artificial Sequence: Synthetic oligonucleotide
  Target: ATXN2; (+) strand; PAM type: YTN; PAM sequence: TTG
gtggataaactgatgcaatg

SEQ ID NO: 89447 - DNA, 20 bp, Artificial Sequence
  Description of Artificial Sequence: Synthetic oligonucleotide
  Target: ATXN2; (+) strand; PAM type: YTN; PAM sequence: CTG
atgcaatgtctagaatttgc

SEQ ID NO: 89448 - DNA, 20 bp, Artificial Sequence
  Description of Artificial Sequence: Synthetic oligonucleotide
  Target: ATXN2; (+) strand; PAM type: YTN; PAM sequence: CTA
gaatttgcttcagaataatc

SEQ ID NO: 89449 - DNA, 20 bp, Artificial Sequence
  Description of Artificial Sequence: Synthetic oligonucleotide
  Target: ATXN2; (+) strand; PAM type: YTN; PAM sequence: TTT
gcttcagaataatccagtgg

SEQ ID NO: 89450 - DNA, 20 bp, Artificial Sequence
  Description of Artificial Sequence: Synthetic oligonucleotide
  Target: ATXN2; (+) strand; PAM type: YTN; PAM sequence: TTG
cttcagaataatccagtgga

SEQ ID NO: 89451 - DNA, 20 bp, Artificial Sequence
  Description of Artificial Sequence: Synthetic oligonucleotide
  Target: ATXN2; (+) strand; PAM type: YTN; PAM sequence: CTT
cagaataatccagtggactc

SEQ ID NO: 89452 - DNA, 20 bp, Artificial Sequence
  Description of Artificial Sequence: Synthetic oligonucleotide
  Target: ATXN2; (+) strand; PAM type: YTN; PAM sequence: TTC
agaataatccagtggactca

SEQ ID NO: 89453 - DNA, 20 bp, Artificial Sequence
  Description of Artificial Sequence: Synthetic oligonucleotide
  Target: ATXN2; (+) strand; PAM type: YTN; PAM sequence: CTC
aaagcttttaagagacaatg

SEQ ID NO: 89454 - DNA, 20 bp, Artificial Sequence
  Description of Artificial Sequence: Synthetic oligonucleotide
  Target: ATXN2; (+) strand; PAM type: YTN; PAM sequence: CTT
ttaagagacaatgggtaggg

SEQ ID NO: 89455 - DNA, 20 bp, Artificial Sequence
  Description of Artificial Sequence: Synthetic oligonucleotide
  Target: ATXN2; (+) strand; PAM type: YTN; PAM sequence: TTT
taagagacaatgggtaggga

SEQ ID NO: 89456 - DNA, 20 bp, Artificial Sequence
  Description of Artificial Sequence: Synthetic oligonucleotide
  Target: ATXN2; (+) strand; PAM type: YTN; PAM sequence: TTT
aagagacaatgggtagggat

SEQ ID NO: 89457 - DNA, 20 bp, Artificial Sequence
  Description of Artificial Sequence: Synthetic oligonucleotide
  Target: ATXN2; (+) strand; PAM type: YTN; PAM sequence: TTA
agagacaatgggtagggatg

SEQ ID NO: 89458 - DNA, 20 bp, Artificial Sequence
  Description of Artificial Sequence: Synthetic oligonucleotide
  Target: ATXN2; (+) strand; PAM type: YTN; PAM sequence: CTG
gcctaggttattaatgtctc

SEQ ID NO: 89459 - DNA, 20 bp, Artificial Sequence
  Description of Artificial Sequence: Synthetic oligonucleotide
  Target: ATXN2; (+) strand; PAM type: YTN; PAM sequence: CTA
ggttattaatgtctcaatac

SEQ ID NO: 89460 - DNA, 20 bp, Artificial Sequence
  Description of Artificial Sequence: Synthetic oligonucleotide
  Target: ATXN2; (+) strand; PAM type: YTN; PAM sequence: TTA
ttaatgtctcaatacattcg

SEQ ID NO: 89461 - DNA, 20 bp, Artificial Sequence
  Description of Artificial Sequence: Synthetic oligonucleotide
  Target: ATXN2; (+) strand; PAM type: YTN; PAM sequence: TTA
atgtctcaatacattcgtaa

SEQ ID NO: 89462 - DNA, 20 bp, Artificial Sequence
  Description of Artificial Sequence: Synthetic oligonucleotide
  Target: ATXN2; (+) strand; PAM type: YTN; PAM sequence: CTC
aatacattcgtaataaaaag

SEQ ID NO: 89463 - DNA, 20 bp, Artificial Sequence
  Description of Artificial Sequence: Synthetic oligonucleotide
  Target: ATXN2; (+) strand; PAM type: YTN; PAM sequence: TTC
gtaataaaaagttaccgcaa

SEQ ID NO: 89464 - DNA, 20 bp, Artificial Sequence
  Description of Artificial Sequence: Synthetic oligonucleotide
  Target: ATXN2; (+) strand; PAM type: YTN; PAM sequence: TTA
ccgcaaggctgagagcgatg

SEQ ID NO: 89465 - DNA, 20 bp, Artificial Sequence
  Description of Artificial Sequence: Synthetic oligonucleotide
  Target: ATXN2; (+) strand; PAM type: YTN; PAM sequence: CTG
agagcgatggctcacacctg

SEQ ID NO: 89466 - DNA, 20 bp, Artificial Sequence
  Description of Artificial Sequence: Synthetic oligonucleotide
  Target: ATXN2; (+) strand; PAM type: YTN; PAM sequence: CTC
acacctgtaatcccagcact

SEQ ID NO: 89467 - DNA, 20 bp, Artificial Sequence
  Description of Artificial Sequence: Synthetic oligonucleotide
  Target: ATXN2; (+) strand; PAM type: YTN; PAM sequence: CTG
taatcccagcactttgggag

SEQ ID NO: 89468 - DNA, 20 bp, Artificial Sequence
  Description of Artificial Sequence: Synthetic oligonucleotide
  Target: ATXN2; (+) strand; PAM type: YTN; PAM sequence: CTT
tgggaggccgaggcgggtgg

SEQ ID NO: 89469 - DNA, 20 bp, Artificial Sequence
  Description of Artificial Sequence: Synthetic oligonucleotide
  Target: ATXN2; (+) strand; PAM type: YTN; PAM sequence: TTT
gggaggccgaggcgggtgga

SEQ ID NO: 89470 - DNA, 20 bp, Artificial Sequence
  Description of Artificial Sequence: Synthetic oligonucleotide
  Target: ATXN2; (+) strand; PAM type: YTN; PAM sequence: TTG
ggaggccgaggcgggtggat

SEQ ID NO: 89471 - DNA, 20 bp, Artificial Sequence
  Description of Artificial Sequence: Synthetic oligonucleotide
  Target: ATXN2; (+) strand; PAM type: YTN; PAM sequence: TTT
gaggtcaggagttcaagacc

SEQ ID NO: 89472 - DNA, 20 bp, Artificial Sequence
  Description of Artificial Sequence: Synthetic oligonucleotide
  Target: ATXN2; (+) strand; PAM type: YTN; PAM sequence: TTG
aggtcaggagttcaagaccg

SEQ ID NO: 89473 - DNA, 20 bp, Artificial Sequence
  Description of Artificial Sequence: Synthetic oligonucleotide
  Target: ATXN2; (+) strand; PAM type: YTN; PAM sequence: TTC
aagaccgggctggccaacat

SEQ ID NO: 89474 - DNA, 20 bp, Artificial Sequence
  Description of Artificial Sequence: Synthetic oligonucleotide
  Target: ATXN2; (+) strand; PAM type: YTN; PAM sequence: CTG
gccaacatggtgaaacccca

SEQ ID NO: 89475 - DNA, 20 bp, Artificial Sequence
  Description of Artificial Sequence: Synthetic oligonucleotide
  Target: ATXN2; (+) strand; PAM type: YTN; PAM sequence: CTC
tattaaaaatacaaggccgg

SEQ ID NO: 89476 - DNA, 20 bp, Artificial Sequence
  Description of Artificial Sequence: Synthetic oligonucleotide
  Target: ATXN2; (+) strand; PAM type: YTN; PAM sequence: CTA
ttaaaaatacaaggccgggc

SEQ ID NO: 89477 - DNA, 20 bp, Artificial Sequence
  Description of Artificial Sequence: Synthetic oligonucleotide
  Target: ATXN2; (+) strand; PAM type: YTN; PAM sequence: TTA
aaaatacaaggccgggcgca

SEQ ID NO: 89478 - DNA, 20 bp, Artificial Sequence
  Description of Artificial Sequence: Synthetic oligonucleotide
  Target: ATXN2; (+) strand; PAM type: YTN; PAM sequence: CTC
acacctgtaatcccagcact

SEQ ID NO: 89479 - DNA, 20 bp, Artificial Sequence
  Description of Artificial Sequence: Synthetic oligonucleotide
  Target: ATXN2; (+) strand; PAM type: YTN; PAM sequence: CTG
taatcccagcactttgggag

SEQ ID NO: 89480 - DNA, 20 bp, Artificial Sequence
  Description of Artificial Sequence: Synthetic oligonucleotide
  Target: ATXN2; (+) strand; PAM type: YTN; PAM sequence: CTT
tgggaggccgaggcgggcgg

SEQ ID NO: 89481 - DNA, 20 bp, Artificial Sequence
  Description of Artificial Sequence: Synthetic oligonucleotide
  Target: ATXN2; (+) strand; PAM type: YTN; PAM sequence: TTT
gggaggccgaggcgggcgga

SEQ ID NO: 89482 - DNA, 20 bp, Artificial Sequence
  Description of Artificial Sequence: Synthetic oligonucleotide
  Target: ATXN2; (+) strand; PAM type: YTN; PAM sequence: TTG
ggaggccgaggcgggcggat

SEQ ID NO: 89483 - DNA, 20 bp, Artificial Sequence
  Description of Artificial Sequence: Synthetic oligonucleotide
  Target: ATXN2; (+) strand; PAM type: YTN; PAM sequence: CTG
gctaacacggtgaaaccctg

SEQ ID NO: 89484 - DNA, 20 bp, Artificial Sequence
  Description of Artificial Sequence: Synthetic oligonucleotide
  Target: ATXN2; (+) strand; PAM type: YTN; PAM sequence: CTA
acacggtgaaaccctgtctc

SEQ ID NO: 89485 - DNA, 20 bp, Artificial Sequence
  Description of Artificial Sequence: Synthetic oligonucleotide
  Target: ATXN2; (+) strand; PAM type: YTN; PAM sequence: CTG
tctctactaaaaatacaaaa

SEQ ID NO: 89486 - DNA, 20 bp, Artificial Sequence
  Description of Artificial Sequence: Synthetic oligonucleotide
  Target: ATXN2; (+) strand; PAM type: YTN; PAM sequence: CTC
tactaaaaatacaaaaaaat

SEQ ID NO: 89487 - DNA, 20 bp, Artificial Sequence
  Description of Artificial Sequence: Synthetic oligonucleotide
  Target: ATXN2; (+) strand; PAM type: YTN; PAM sequence: CTA
ctaaaaatacaaaaaaatta

SEQ ID NO: 89488 - DNA, 20 bp, Artificial Sequence
  Description of Artificial Sequence: Synthetic oligonucleotide
  Target: ATXN2; (+) strand; PAM type: YTN; PAM sequence: CTA
aaaatacaaaaaaattagcc

SEQ ID NO: 89489 - DNA, 20 bp, Artificial Sequence
  Description of Artificial Sequence: Synthetic oligonucleotide
  Target: ATXN2; (+) strand; PAM type: YTN; PAM sequence: TTA
gccgggtgtggtggcgggcg

SEQ ID NO: 89490 - DNA, 20 bp, Artificial Sequence
  Description of Artificial Sequence: Synthetic oligonucleotide
  Target: ATXN2; (+) strand; PAM type: YTN; PAM sequence: CTA
ctcaggaggctgaggcagga

SEQ ID NO: 89491 - DNA, 20 bp, Artificial Sequence
  Description of Artificial Sequence: Synthetic oligonucleotide
  Target: ATXN2; (+) strand; PAM type: YTN; PAM sequence: CTC
aggaggctgaggcaggagaa

SEQ ID NO: 89492 - DNA, 20 bp, Artificial Sequence
  Description of Artificial Sequence: Synthetic oligonucleotide
  Target: ATXN2; (+) strand; PAM type: YTN; PAM sequence: CTG
aggcaggagaatggcatgaa

SEQ ID NO: 89493 - DNA, 20 bp, Artificial Sequence
  Description of Artificial Sequence: Synthetic oligonucleotide
  Target: ATXN2; (+) strand; PAM type: YTN; PAM sequence: CTT
gcagtgagccgagatcgcat

SEQ ID NO: 89494 - DNA, 20 bp, Artificial Sequence
  Description of Artificial Sequence: Synthetic oligonucleotide
  Target: ATXN2; (+) strand; PAM type: YTN; PAM sequence: TTG
cagtgagccgagatcgcatc

SEQ ID NO: 89495 - DNA, 20 bp, Artificial Sequence
  Description of Artificial Sequence: Synthetic oligonucleotide
  Target: ATXN2; (+) strand; PAM type: YTN; PAM sequence: CTG
cactccagcctgggcaacag

SEQ ID NO: 89496 - DNA, 20 bp, Artificial Sequence
  Description of Artificial Sequence: Synthetic oligonucleotide
  Target: ATXN2; (+) strand; PAM type: YTN; PAM sequence: CTC
cagcctgggcaacagagcga

SEQ ID NO: 89497 - DNA, 20 bp, Artificial Sequence
  Description of Artificial Sequence: Synthetic oligonucleotide
  Target: ATXN2; (+) strand; PAM type: YTN; PAM sequence: CTG
ggcaacagagcgagactctg

SEQ ID NO: 89498 - DNA, 20 bp, Artificial Sequence
  Description of Artificial Sequence: Synthetic oligonucleotide
  Target: ATXN2; (+) strand; PAM type: YTN; PAM sequence: CTC
tgtctcaaaaaaaaaaggct

SEQ ID NO: 89499 - DNA, 20 bp, Artificial Sequence
  Description of Artificial Sequence: Synthetic oligonucleotide
  Target: ATXN2; (+) strand; PAM type: YTN; PAM sequence: CTG
tctcaaaaaaaaaaggctgg

SEQ ID NO: 89500 - DNA, 20 bp, Artificial Sequence
  Description of Artificial Sequence: Synthetic oligonucleotide
  Target: ATXN2; (+) strand; PAM type: YTN; PAM sequence: CTC
aaaaaaaaaaggctgggcta

SEQ ID NO: 89501 - DNA, 20 bp, Artificial Sequence
  Description of Artificial Sequence: Synthetic oligonucleotide
  Target: ATXN2; (+) strand; PAM type: YTN; PAM sequence: CTG
ggctacttgggaggctgagg

SEQ ID NO: 89502 - DNA, 20 bp, Artificial Sequence
  Description of Artificial Sequence: Synthetic oligonucleotide
  Target: ATXN2; (+) strand; PAM type: YTN; PAM sequence: CTA
cttgggaggctgaggcagga

SEQ ID NO: 89503 - DNA, 20 bp, Artificial Sequence
  Description of Artificial Sequence: Synthetic oligonucleotide
  Target: ATXN2; (+) strand; PAM type: YTN; PAM sequence: CTT
gggaggctgaggcaggagaa

SEQ ID NO: 89504 - DNA, 20 bp, Artificial Sequence
  Description of Artificial Sequence: Synthetic oligonucleotide
  Target: ATXN2; (+) strand; PAM type: YTN; PAM sequence: TTG
ggaggctgaggcaggagaat

SEQ ID NO: 89505 - DNA, 20 bp, Artificial Sequence
  Description of Artificial Sequence: Synthetic oligonucleotide
  Target: ATXN2; (+) strand; PAM type: YTN; PAM sequence: CTG
aggcaggagaattgcttgaa

SEQ ID NO: 89506 - DNA, 20 bp, Artificial Sequence
  Description of Artificial Sequence: Synthetic oligonucleotide
  Target: ATXN2; (+) strand; PAM type: YTN; PAM sequence: TTG
cttgaaccccagagggggag

SEQ ID NO: 89507 - DNA, 20 bp, Artificial Sequence
  Description of Artificial Sequence: Synthetic oligonucleotide
  Target: ATXN2; (+) strand; PAM type: YTN; PAM sequence: CTT
gaaccccagagggggaggtt

SEQ ID NO: 89508 - DNA, 20 bp, Artificial Sequence
  Description of Artificial Sequence: Synthetic oligonucleotide
  Target: ATXN2; (+) strand; PAM type: YTN; PAM sequence: TTG
aaccccagagggggaggttg

SEQ ID NO: 89509 - DNA, 20 bp, Artificial Sequence
  Description of Artificial Sequence: Synthetic oligonucleotide
  Target: ATXN2; (+) strand; PAM type: YTN; PAM sequence: TTG
cagtgagttgagattgtgcc

SEQ ID NO: 89510 - DNA, 20 bp, Artificial Sequence
  Description of Artificial Sequence: Synthetic oligonucleotide
  Target: ATXN2; (+) strand; PAM type: YTN; PAM sequence: TTG
agattgtgccactgtactcc

SEQ ID NO: 89511 - DNA, 20 bp, Artificial Sequence
  Description of Artificial Sequence: Synthetic oligonucleotide
  Target: ATXN2; (+) strand; PAM type: YTN; PAM sequence: TTG
tgccactgtactccagccta

SEQ ID NO: 89512 - DNA, 20 bp, Artificial Sequence
  Description of Artificial Sequence: Synthetic oligonucleotide
  Target: ATXN2; (+) strand; PAM type: YTN; PAM sequence: CTG
tactccagcctaggtgacag

SEQ ID NO: 89513 - DNA, 20 bp, Artificial Sequence
  Description of Artificial Sequence: Synthetic oligonucleotide
  Target: ATXN2; (+) strand; PAM type: YTN; PAM sequence: CTC
cagcctaggtgacagagcca

SEQ ID NO: 89514 - DNA, 20 bp, Artificial Sequence
  Description of Artificial Sequence: Synthetic oligonucleotide
  Target: ATXN2; (+) strand; PAM type: YTN; PAM sequence: CTA
ggtgacagagccaagattcc

SEQ ID NO: 89515 - DNA, 20 bp, Artificial Sequence
  Description of Artificial Sequence: Synthetic oligonucleotide
  Target: ATXN2; (+) strand; PAM type: YTN; PAM sequence: TTC
catctcaaaaaaaaaaaaaa

SEQ ID NO: 89516 - DNA, 20 bp, Artificial Sequence
  Description of Artificial Sequence: Synthetic oligonucleotide
  Target: ATXN2; (+) strand; PAM type: YTN; PAM sequence: CTC
aaaaaaaaaaaaaaaaagtt

SEQ ID NO: 89517 - DNA, 20 bp, Artificial Sequence
  Description of Artificial Sequence: Synthetic oligonucleotide
  Target: ATXN2; (+) strand; PAM type: YTN; PAM sequence: TTA
ccacaatatgaaacaattaa

SEQ ID NO: 89518 - DNA, 20 bp, Artificial Sequence
  Description of Artificial Sequence: Synthetic oligonucleotide
  Target: ATXN2; (+) strand; PAM type: YTN; PAM sequence: TTA
aaaaaaaaaaaagacttcaa

SEQ ID NO: 89519 - DNA, 20 bp, Artificial Sequence
  Description of Artificial Sequence: Synthetic oligonucleotide
  Target: ATXN2; (+) strand; PAM type: YTN; PAM sequence: CTT
caacatataaacaaatccaa

SEQ ID NO: 89520 - DNA, 20 bp, Artificial Sequence
  Description of Artificial Sequence: Synthetic oligonucleotide
  Target: ATXN2; (+) strand; PAM type: YTN; PAM sequence: TTC
aacatataaacaaatccaaa

SEQ ID NO: 89521 - DNA, 20 bp, Artificial Sequence
  Description of Artificial Sequence: Synthetic oligonucleotide
  Target: ATXN2; (+) strand; PAM type: YTN; PAM sequence: TTG
caagcctgacttggacccta

SEQ ID NO: 89522 - DNA, 20 bp, Artificial Sequence
  Description of Artificial Sequence: Synthetic oligonucleotide
  Target: ATXN2; (+) strand; PAM type: YTN; PAM sequence: CTG
acttggaccctaattggaac

SEQ ID NO: 89523 - DNA, 20 bp, Artificial Sequence
  Description of Artificial Sequence: Synthetic oligonucleotide
  Target: ATXN2; (+) strand; PAM type: YTN; PAM sequence: CTT
ggaccctaattggaacaaat

SEQ ID NO: 89524 - DNA, 20 bp, Artificial Sequence
  Description of Artificial Sequence: Synthetic oligonucleotide
  Target: ATXN2; (+) strand; PAM type: YTN; PAM sequence: TTG
gaccctaattggaacaaatt

SEQ ID NO: 89525 - DNA, 20 bp, Artificial Sequence
  Description of Artificial Sequence: Synthetic oligonucleotide
  Target: ATXN2; (+) strand; PAM type: YTN; PAM sequence: CTA
attggaacaaattattgtaa

SEQ ID NO: 89526 - DNA, 20 bp, Artificial Sequence
  Description of Artificial Sequence: Synthetic oligonucleotide
  Target: ATXN2; (+) strand; PAM type: YTN; PAM sequence: TTG
gaacaaattattgtaaaaag

SEQ ID NO: 89527 - DNA, 20 bp, Artificial Sequence
  Description of Artificial Sequence: Synthetic oligonucleotide
  Target: ATXN2; (+) strand; PAM type: YTN; PAM sequence: TTA
ttgtaaaaagatttatcttt

SEQ ID NO: 89528 - DNA, 20 bp, Artificial Sequence
  Description of Artificial Sequence: Synthetic oligonucleotide
  Target: ATXN2; (+) strand; PAM type: YTN; PAM sequence: TTG
taaaaagatttatcttttct

SEQ ID NO: 89529 - DNA, 20 bp, Artificial Sequence
  Description of Artificial Sequence: Synthetic oligonucleotide
  Target: ATXN2; (+) strand; PAM type: YTN; PAM sequence: TTT
atcttttctgtttctttttt

SEQ ID NO: 89530 - DNA, 20 bp, Artificial Sequence
  Description of Artificial Sequence: Synthetic oligonucleotide
  Target: ATXN2; (+) strand; PAM type: YTN; PAM sequence: TTA
tcttttctgtttcttttttt

SEQ ID NO: 89531 - DNA, 20 bp, Artificial Sequence
  Description of Artificial Sequence: Synthetic oligonucleotide
  Target: ATXN2; (+) strand; PAM type: YTN; PAM sequence: CTT
ttctgtttcttttttttttt

SEQ ID NO: 89532 - DNA, 20 bp, Artificial Sequence
  Description of Artificial Sequence: Synthetic oligonucleotide
  Target: ATXN2; (+) strand; PAM type: YTN; PAM sequence: TTT
tctgtttctttttttttttt

SEQ ID NO: 89533 - DNA, 20 bp, Artificial Sequence
  Description of Artificial Sequence: Synthetic oligonucleotide
  Target: ATXN2; (+) strand; PAM type: YTN; PAM sequence: TTT
ctgtttcttttttttttttt

SEQ ID NO: 89534 - DNA, 20 bp, Artificial Sequence
  Description of Artificial Sequence: Synthetic oligonucleotide
  Target: ATXN2; (+) strand; PAM type: YTN; PAM sequence: TTC
tgtttctttttttttttttt

SEQ ID NO: 89535 - DNA, 20 bp, Artificial Sequence
  Description of Artificial Sequence: Synthetic oligonucleotide
  Target: ATXN2; (+) strand; PAM type: YTN; PAM sequence: CTG
tttctttttttttttttttt

SEQ ID NO: 89536 - DNA, 20 bp, Artificial Sequence
  Description of Artificial Sequence: Synthetic oligonucleotide
  Target: ATXN2; (+) strand; PAM type: YTN; PAM sequence: TTT
cttttttttttttttttttt

SEQ ID NO: 89537 - DNA, 20 bp, Artificial Sequence
  Description of Artificial Sequence: Synthetic oligonucleotide
  Target: ATXN2; (+) strand; PAM type: YTN; PAM sequence: TTC
tttttttttttttttttttt

SEQ ID NO: 89538 - DNA, 20 bp, Artificial Sequence
  Description of Artificial Sequence: Synthetic oligonucleotide
  Target: ATXN2; (+) strand; PAM type: YTN; PAM sequence: CTT
ttttttttttttttttttaa

SEQ ID NO: 89539 - DNA, 20 bp, Artificial Sequence
  Description of Artificial Sequence: Synthetic oligonucleotide
  Target: ATXN2; (+) strand; PAM type: YTN; PAM sequence: TTT
tttttttttttttttttaag

SEQ ID NO: 89540 - DNA, 20 bp, Artificial Sequence
  Description of Artificial Sequence: Synthetic oligonucleotide
  Target: ATXN2; (+) strand; PAM type: YTN; PAM sequence: TTT
ttttttttttttttttaaga

SEQ ID NO: 89541 - DNA, 20 bp, Artificial Sequence
  Description of Artificial Sequence: Synthetic oligonucleotide
  Target: ATXN2; (+) strand; PAM type: YTN; PAM sequence: TTT
tttttttttttttttaagag

SEQ ID NO: 89542 - DNA, 20 bp, Artificial Sequence
  Description of Artificial Sequence: Synthetic oligonucleotide
  Target: ATXN2; (+) strand; PAM type: YTN; PAM sequence: TTT
ttttttttttttttaagagg

SEQ ID NO: 89543 - DNA, 20 bp, Artificial Sequence
  Description of Artificial Sequence: Synthetic oligonucleotide
  Target: ATXN2; (+) strand; PAM type: YTN; PAM sequence: TTT
tttttttttttttaagaggg

SEQ ID NO: 89544 - DNA, 20 bp, Artificial Sequence
  Description of Artificial Sequence: Synthetic oligonucleotide
  Target: ATXN2; (+) strand; PAM type: YTN; PAM sequence: TTT
ttttttttttttaagaggga

SEQ ID NO: 89545 - DNA, 20 bp, Artificial Sequence
  Description of Artificial Sequence: Synthetic oligonucleotide
  Target: ATXN2; (+) strand; PAM type: YTN; PAM sequence: TTT
tttttttttttaagagggaa

SEQ ID NO: 89546 - DNA, 20 bp, Artificial Sequence
  Description of Artificial Sequence: Synthetic oligonucleotide
  Target: ATXN2; (+) strand; PAM type: YTN; PAM sequence: TTT
ttttttttttaagagggaat

SEQ ID NO: 89547 - DNA, 20 bp, Artificial Sequence
  Description of Artificial Sequence: Synthetic oligonucleotide
  Target: ATXN2; (+) strand; PAM type: YTN; PAM sequence: TTT
tttttttttaagagggaatc

SEQ ID NO: 89548 - DNA, 20 bp, Artificial Sequence
  Description of Artificial Sequence: Synthetic oligonucleotide
  Target: ATXN2; (+) strand; PAM type: YTN; PAM sequence: TTT
ttttttttaagagggaatct

SEQ ID NO: 89549 - DNA, 20 bp, Artificial Sequence
  Description of Artificial Sequence: Synthetic oligonucleotide
  Target: ATXN2; (+) strand; PAM type: YTN; PAM sequence: TTT
tttttttaagagggaatctt

SEQ ID NO: 89550 - DNA, 20 bp, Artificial Sequence
  Description of Artificial Sequence: Synthetic oligonucleotide
  Target: ATXN2; (+) strand; PAM type: YTN; PAM sequence: TTT
ttttttaagagggaatcttg

SEQ ID NO: 89551 - DNA, 20 bp, Artificial Sequence
  Description of Artificial Sequence: Synthetic oligonucleotide
  Target: ATXN2; (+) strand; PAM type: YTN; PAM sequence: TTT
tttttaagagggaatcttgc

SEQ ID NO: 89552 - DNA, 20 bp, Artificial Sequence
  Description of Artificial Sequence: Synthetic oligonucleotide
  Target: ATXN2; (+) strand; PAM type: YTN; PAM sequence: TTT
ttttaagagggaatcttgct

SEQ ID NO: 89553 - DNA, 20 bp, Artificial Sequence
  Description of Artificial Sequence: Synthetic oligonucleotide
  Target: ATXN2; (+) strand; PAM type: YTN; PAM sequence: TTT
tttaagagggaatcttgctc

SEQ ID NO: 89554 - DNA, 20 bp, Artificial Sequence
  Description of Artificial Sequence: Synthetic oligonucleotide
  Target: ATXN2; (+) strand; PAM type: YTN; PAM sequence: TTT
ttaagagggaatcttgctct

SEQ ID NO: 89555 - DNA, 20 bp, Artificial Sequence
  Description of Artificial Sequence: Synthetic oligonucleotide
  Target: ATXN2; (+) strand; PAM type: YTN; PAM sequence: TTT
taagagggaatcttgctctg

SEQ ID NO: 89556 - DNA, 20 bp, Artificial Sequence
  Description of Artificial Sequence: Synthetic oligonucleotide
  Target: ATXN2; (+) strand; PAM type: YTN; PAM sequence: TTT
aagagggaatcttgctctgt

SEQ ID NO: 89557 - DNA, 20 bp, Artificial Sequence
  Description of Artificial Sequence: Synthetic oligonucleotide
  Target: ATXN2; (+) strand; PAM type: YTN; PAM sequence: TTA
agagggaatcttgctctgtc

SEQ ID NO: 89558 - DNA, 20 bp, Artificial Sequence
  Description of Artificial Sequence: Synthetic oligonucleotide
  Target: ATXN2; (+) strand; PAM type: YTN; PAM sequence: CTT
gctctgtcacccaggctgga

SEQ ID NO: 89559 - DNA, 20 bp, Artificial Sequence
  Description of Artificial Sequence: Synthetic oligonucleotide
  Target: ATXN2; (+) strand; PAM type: YTN; PAM sequence: TTG
ctctgtcacccaggctggag

SEQ ID NO: 89560 - DNA, 20 bp, Artificial Sequence
  Description of Artificial Sequence: Synthetic oligonucleotide
  Target: ATXN2; (+) strand; PAM type: YTN; PAM sequence: CTC
tgtcacccaggctggagtac

SEQ ID NO: 89561 - DNA, 20 bp, Artificial Sequence
  Description of Artificial Sequence: Synthetic oligonucleotide
  Target: ATXN2; (+) strand; PAM type: YTN; PAM sequence: CTG
tcacccaggctggagtacag

SEQ ID NO: 89562 - DNA, 20 bp, Artificial Sequence
  Description of Artificial Sequence: Synthetic oligonucleotide
  Target: ATXN2; (+) strand; PAM type: YTN; PAM sequence: CTG
gagtacaggtgcgcaatctc

SEQ ID NO: 89563 - DNA, 20 bp, Artificial Sequence
  Description of Artificial Sequence: Synthetic oligonucleotide
  Target: ATXN2; (+) strand; PAM type: YTN; PAM sequence: CTC
aactcaactacaacttccgc

SEQ ID NO: 89564 - DNA, 20 bp, Artificial Sequence
  Description of Artificial Sequence: Synthetic oligonucleotide
  Target: ATXN2; (+) strand; PAM type: YTN; PAM sequence: CTC
aactacaacttccgcctcct

SEQ ID NO: 89565 - DNA, 20 bp, Artificial Sequence
  Description of Artificial Sequence: Synthetic oligonucleotide
  Target: ATXN2; (+) strand; PAM type: YTN; PAM sequence: CTA
caacttccgcctcctgggtt

SEQ ID NO: 89566 - DNA, 20 bp, Artificial Sequence
  Description of Artificial Sequence: Synthetic oligonucleotide
  Target: ATXN2; (+) strand; PAM type: YTN; PAM sequence: CTT
ccgcctcctgggttcaagca

SEQ ID NO: 89567 - DNA, 20 bp, Artificial Sequence
  Description of Artificial Sequence: Synthetic oligonucleotide
  Target: ATXN2; (+) strand; PAM type: YTN; PAM sequence: TTC
cgcctcctgggttcaagcaa

SEQ ID NO: 89568 - DNA, 20 bp, Artificial Sequence
  Description of Artificial Sequence: Synthetic oligonucleotide
  Target: ATXN2; (+) strand; PAM type: YTN; PAM sequence: CTC
ctgggttcaagcaattcttc

SEQ ID NO: 89569 - DNA, 20 bp, Artificial Sequence
  Description of Artificial Sequence: Synthetic oligonucleotide
  Target: ATXN2; (+) strand; PAM type: YTN; PAM sequence: CTG
ggttcaagcaattcttctgc

SEQ ID NO: 89570 - DNA, 20 bp, Artificial Sequence
  Description of Artificial Sequence: Synthetic oligonucleotide
  Target: ATXN2; (+) strand; PAM type: YTN; PAM sequence: TTC
aagcaattcttctgcctcag

SEQ ID NO: 89571 - DNA, 20 bp, Artificial Sequence
  Description of Artificial Sequence: Synthetic oligonucleotide
  Target: ATXN2; (+) strand; PAM type: YTN; PAM sequence: TTC
ttctgcctcagtctcccaag

SEQ ID NO: 89572 - DNA, 20 bp, Artificial Sequence
  Description of Artificial Sequence: Synthetic oligonucleotide
  Target: ATXN2; (+) strand; PAM type: YTN; PAM sequence: CTT
ctgcctcagtctcccaagta

SEQ ID NO: 89573 - DNA, 20 bp, Artificial Sequence
  Description of Artificial Sequence: Synthetic oligonucleotide
  Target: ATXN2; (+) strand; PAM type: YTN; PAM sequence: TTC
tgcctcagtctcccaagtag

SEQ ID NO: 89574 - DNA, 20 bp, Artificial Sequence
  Description of Artificial Sequence: Synthetic oligonucleotide
  Target: ATXN2; (+) strand; PAM type: YTN; PAM sequence: CTG
cctcagtctcccaagtagct

SEQ ID NO: 89575 - DNA, 20 bp, Artificial Sequence
  Description of Artificial Sequence: Synthetic oligonucleotide
  Target: ATXN2; (+) strand; PAM type: YTN; PAM sequence: CTC
agtctcccaagtagctagaa

SEQ ID NO: 89576 - DNA, 20 bp, Artificial Sequence
  Description of Artificial Sequence: Synthetic oligonucleotide
  Target: ATXN2; (+) strand; PAM type: YTN; PAM sequence: CTC
ccaagtagctagaattacag

SEQ ID NO: 89577 - DNA, 20 bp, Artificial Sequence
  Description of Artificial Sequence: Synthetic oligonucleotide
  Target: ATXN2; (+) strand; PAM type: YTN; PAM sequence: CTA
gaattacaggtgcctgccac

SEQ ID NO: 89578 - DNA, 20 bp, Artificial Sequence
  Description of Artificial Sequence: Synthetic oligonucleotide
  Target: ATXN2; (+) strand; PAM type: YTN; PAM sequence: TTA
caggtgcctgccaccgggcc

SEQ ID NO: 89579 - DNA, 20 bp, Artificial Sequence
  Description of Artificial Sequence: Synthetic oligonucleotide
  Target: ATXN2; (+) strand; PAM type: YTN; PAM sequence: CTG
ccaccgggcccagccaagat

SEQ ID NO: 89580 - DNA, 20 bp, Artificial Sequence
  Description of Artificial Sequence: Synthetic oligonucleotide
  Target: ATXN2; (+) strand; PAM type: YTN; PAM sequence: TTT
taaagatcagttggttttaa

SEQ ID NO: 89581 - DNA, 20 bp, Artificial Sequence
  Description of Artificial Sequence: Synthetic oligonucleotide
  Target: ATXN2; (+) strand; PAM type: YTN; PAM sequence: TTT
aaagatcagttggttttaaa

SEQ ID NO: 89582 - DNA, 20 bp, Artificial Sequence
  Description of Artificial Sequence: Synthetic oligonucleotide
  Target: ATXN2; (+) strand; PAM type: YTN; PAM sequence: TTA
aagatcagttggttttaaaa

SEQ ID NO: 89583 - DNA, 20 bp, Artificial Sequence
  Description of Artificial Sequence: Synthetic oligonucleotide
  Target: ATXN2; (+) strand; PAM type: YTN; PAM sequence: TTG
gttttaaaaaggcaactgat

SEQ ID NO: 89584 - DNA, 20 bp, Artificial Sequence
  Description of Artificial Sequence: Synthetic oligonucleotide
  Target: ATXN2; (+) strand; PAM type: YTN; PAM sequence: TTT
taaaaaggcaactgattttt

SEQ ID NO: 89585 - DNA, 20 bp, Artificial Sequence
  Description of Artificial Sequence: Synthetic oligonucleotide
  Target: ATXN2; (+) strand; PAM type: YTN; PAM sequence: TTT
aaaaaggcaactgatttttt

SEQ ID NO: 89586 - DNA, 20 bp, Artificial Sequence
  Description of Artificial Sequence: Synthetic oligonucleotide
  Target: ATXN2; (+) strand; PAM type: YTN; PAM sequence: TTA
aaaaggcaactgattttttt

SEQ ID NO: 89587 - DNA, 20 bp, Artificial Sequence
  Description of Artificial Sequence: Synthetic oligonucleotide
  Target: ATXN2; (+) strand; PAM type: YTN; PAM sequence: CTG
atttttttagtagtaagtta

SEQ ID NO: 89588 - DNA, 20 bp, Artificial Sequence
  Description of Artificial Sequence: Synthetic oligonucleotide
  Target: ATXN2; (+) strand; PAM type: YTN; PAM sequence: TTT
ttttagtagtaagttaatta

SEQ ID NO: 89589 - DNA, 20 bp, Artificial Sequence
  Description of Artificial Sequence: Synthetic oligonucleotide
  Target: ATXN2; (+) strand; PAM type: YTN; PAM sequence: TTT
tttagtagtaagttaattat

SEQ ID NO: 89590 - DNA, 20 bp, Artificial Sequence
  Description of Artificial Sequence: Synthetic oligonucleotide
  Target: ATXN2; (+) strand; PAM type: YTN; PAM sequence: TTT
ttagtagtaagttaattata

SEQ ID NO: 89591 - DNA, 20 bp, Artificial Sequence
  Description of Artificial Sequence: Synthetic oligonucleotide
  Target: ATXN2; (+) strand; PAM type: YTN; PAM sequence: TTT
tagtagtaagttaattatag

SEQ ID NO: 89592 - DNA, 20 bp, Artificial Sequence
  Description of Artificial Sequence: Synthetic oligonucleotide
  Target: ATXN2; (+) strand; PAM type: YTN; PAM sequence: TTT
agtagtaagttaattataga

SEQ ID NO: 89593 - DNA, 20 bp, Artificial Sequence
  Description of Artificial Sequence: Synthetic oligonucleotide
  Target: ATXN2; (+) strand; PAM type: YTN; PAM sequence: TTA
gtagtaagttaattatagag

SEQ ID NO: 89594 - DNA, 20 bp, Artificial Sequence
  Description of Artificial Sequence: Synthetic oligonucleotide
  Target: ATXN2; (+) strand; PAM type: YTN; PAM sequence: TTA
attatagagttcatatggaa

SEQ ID NO: 89595 - DNA, 20 bp, Artificial Sequence
  Description of Artificial Sequence: Synthetic oligonucleotide
  Target: ATXN2; (+) strand; PAM type: YTN; PAM sequence: TTA
tagagttcatatggaaaaat

SEQ ID NO: 89596 - DNA, 20 bp, Artificial Sequence
  Description of Artificial Sequence: Synthetic oligonucleotide
  Target: ATXN2; (+) strand; PAM type: YTN; PAM sequence: TTC
atatggaaaaataaacagaa

SEQ ID NO: 89597 - DNA, 20 bp, Artificial Sequence
  Description of Artificial Sequence: Synthetic oligonucleotide
  Target: ATXN2; (+) strand; PAM type: YTN; PAM sequence: TTC
aaggtaatctgaaaaaaaaa

SEQ ID NO: 89598 - DNA, 20 bp, Artificial Sequence
  Description of Artificial Sequence: Synthetic oligonucleotide
  Target: ATXN2; (+) strand; PAM type: YTN; PAM sequence: CTG
aaaaaaaaaatcaatgttgg

SEQ ID NO: 89599 - DNA, 20 bp, Artificial Sequence
  Description of Artificial Sequence: Synthetic oligonucleotide
  Target: ATXN2; (+) strand; PAM type: YTN; PAM sequence: TTG
gcagtgagtggatgagaagg

SEQ ID NO: 89600 - DNA, 20 bp, Artificial Sequence
  Description of Artificial Sequence: Synthetic oligonucleotide
  Target: ATXN2; (+) strand; PAM type: YTN; PAM sequence: CTA
ttagattagtgaagcagagt

SEQ ID NO: 89601 - DNA, 20 bp, Artificial Sequence
  Description of Artificial Sequence: Synthetic oligonucleotide
  Target: ATXN2; (+) strand; PAM type: YTN; PAM sequence: TTA
gattagtgaagcagagtgaa

SEQ ID NO: 89602 - DNA, 20 bp, Artificial Sequence
  Description of Artificial Sequence: Synthetic oligonucleotide
  Target: ATXN2; (+) strand; PAM type: YTN; PAM sequence: TTA
gtgaagcagagtgaaaaatc

SEQ ID NO: 89603 - DNA, 20 bp, Artificial Sequence
  Description of Artificial Sequence: Synthetic oligonucleotide
  Target: ATXN2; (+) strand; PAM type: YTN; PAM sequence: TTC
aaccacaaaaagacacttgt

SEQ ID NO: 89604 - DNA, 20 bp, Artificial Sequence
  Description of Artificial Sequence: Synthetic oligonucleotide
  Target: ATXN2; (+) strand; PAM type: YTN; PAM sequence: CTT
gttatatgataaaatggcat

SEQ ID NO: 89605 - DNA, 20 bp, Artificial Sequence
  Description of Artificial Sequence: Synthetic oligonucleotide
  Target: ATXN2; (+) strand; PAM type: YTN; PAM sequence: TTG
ttatatgataaaatggcatt

SEQ ID NO: 89606 - DNA, 20 bp, Artificial Sequence
  Description of Artificial Sequence: Synthetic oligonucleotide
  Target: ATXN2; (+) strand; PAM type: YTN; PAM sequence: TTA
tatgataaaatggcatttca

SEQ ID NO: 89607 - DNA, 20 bp, Artificial Sequence
  Description of Artificial Sequence: Synthetic oligonucleotide
  Target: ATXN2; (+) strand; PAM type: YTN; PAM sequence: TTT
catatcagtttgtatgacca

SEQ ID NO: 89608 - DNA, 20 bp, Artificial Sequence
  Description of Artificial Sequence: Synthetic oligonucleotide
  Target: ATXN2; (+) strand; PAM type: YTN; PAM sequence: TTC
atatcagtttgtatgaccat

SEQ ID NO: 89609 - DNA, 20 bp, Artificial Sequence
  Description of Artificial Sequence: Synthetic oligonucleotide
  Target: ATXN2; (+) strand; PAM type: YTN; PAM sequence: TTT
gtatgaccataatggaatta

SEQ ID NO: 89610 - DNA, 20 bp, Artificial Sequence
  Description of Artificial Sequence: Synthetic oligonucleotide
  Target: ATXN2; (+) strand; PAM type: YTN; PAM sequence: TTG
tatgaccataatggaattac

SEQ ID NO: 89611 - DNA, 20 bp, Artificial Sequence
  Description of Artificial Sequence: Synthetic oligonucleotide
  Target: ATXN2; (+) strand; PAM type: YTN; PAM sequence: TTA
cattattatctatccatcta

SEQ ID NO: 89612 - DNA, 20 bp, Artificial Sequence
  Description of Artificial Sequence: Synthetic oligonucleotide
  Target: ATXN2; (+) strand; PAM type: YTN; PAM sequence: TTA
ttatctatccatctatgcgc

SEQ ID NO: 89613 - DNA, 20 bp, Artificial Sequence
  Description of Artificial Sequence: Synthetic oligonucleotide
  Target: ATXN2; (+) strand; PAM type: YTN; PAM sequence: TTA
tctatccatctatgcgcacg

SEQ ID NO: 89614 - DNA, 20 bp, Artificial Sequence
  Description of Artificial Sequence: Synthetic oligonucleotide
  Target: ATXN2; (+) strand; PAM type: YTN; PAM sequence: CTA
tccatctatgcgcacgcata

SEQ ID NO: 89615 - DNA, 20 bp, Artificial Sequence
  Description of Artificial Sequence: Synthetic oligonucleotide
  Target: ATXN2; (+) strand; PAM type: YTN; PAM sequence: CTA
tgcgcacgcatacacacaca

SEQ ID NO: 89616 - DNA, 20 bp, Artificial Sequence
  Description of Artificial Sequence: Synthetic oligonucleotide
  Target: ATXN2; (+) strand; PAM type: YTN; PAM sequence: CTT
taaatacagggtctccttct

SEQ ID NO: 89617 - DNA, 20 bp, Artificial Sequence
  Description of Artificial Sequence: Synthetic oligonucleotide
  Target: ATXN2; (+) strand; PAM type: YTN; PAM sequence: TTT
aaatacagggtctccttctg

SEQ ID NO: 89618 - DNA, 20 bp, Artificial Sequence
  Description of Artificial Sequence: Synthetic oligonucleotide
  Target: ATXN2; (+) strand; PAM type: YTN; PAM sequence: TTA
aatacagggtctccttctgt

SEQ ID NO: 89619 - DNA, 20 bp, Artificial Sequence
  Description of Artificial Sequence: Synthetic oligonucleotide
  Target: ATXN2; (+) strand; PAM type: YTN; PAM sequence: CTC
cttctgtcacccaggctgga

SEQ ID NO: 89620 - DNA, 20 bp, Artificial Sequence
  Description of Artificial Sequence: Synthetic oligonucleotide
  Target: ATXN2; (+) strand; PAM type: YTN; PAM sequence: CTT
ctgtcacccaggctggagta

SEQ ID NO: 89621 - DNA, 20 bp, Artificial Sequence
  Description of Artificial Sequence: Synthetic oligonucleotide
  Target: ATXN2; (+) strand; PAM type: YTN; PAM sequence: TTC
tgtcacccaggctggagtac

SEQ ID NO: 89622 - DNA, 20 bp, Artificial Sequence
  Description of Artificial Sequence: Synthetic oligonucleotide
  Target: ATXN2; (+) strand; PAM type: YTN; PAM sequence: CTG
tcacccaggctggagtacag

SEQ ID NO: 89623 - DNA, 20 bp, Artificial Sequence
  Description of Artificial Sequence: Synthetic oligonucleotide
  Target: ATXN2; (+) strand; PAM type: YTN; PAM sequence: CTG
gagtacagtggtacaatcac

SEQ ID NO: 89624 - DNA, 20 bp, Artificial Sequence
  Description of Artificial Sequence: Synthetic oligonucleotide
  Target: ATXN2; (+) strand; PAM type: YTN; PAM sequence: CTC
actgctgctttaaactactg

SEQ ID NO: 89625 - DNA, 20 bp, Artificial Sequence
  Description of Artificial Sequence: Synthetic oligonucleotide
  Target: ATXN2; (+) strand; PAM type: YTN; PAM sequence: CTG
ctgctttaaactactgggct

SEQ ID NO: 89626 - DNA, 20 bp, Artificial Sequence
  Description of Artificial Sequence: Synthetic oligonucleotide
  Target: ATXN2; (+) strand; PAM type: YTN; PAM sequence: CTG
ctttaaactactgggctcaa

SEQ ID NO: 89627 - DNA, 20 bp, Artificial Sequence
  Description of Artificial Sequence: Synthetic oligonucleotide
  Target: ATXN2; (+) strand; PAM type: YTN; PAM sequence: CTT
taaactactgggctcaagca

SEQ ID NO: 89628 - DNA, 20 bp, Artificial Sequence
  Description of Artificial Sequence: Synthetic oligonucleotide
  Target: ATXN2; (+) strand; PAM type: YTN; PAM sequence: TTT
aaactactgggctcaagcaa

SEQ ID NO: 89629 - DNA, 20 bp, Artificial Sequence
  Description of Artificial Sequence: Synthetic oligonucleotide
  Target: ATXN2; (+) strand; PAM type: YTN; PAM sequence: TTA
aactactgggctcaagcaat

SEQ ID NO: 89630 - DNA, 20 bp, Artificial Sequence
  Description of Artificial Sequence: Synthetic oligonucleotide
  Target: ATXN2; (+) strand; PAM type: YTN; PAM sequence: CTA
ctgggctcaagcaattctcc

SEQ ID NO: 89631 - DNA, 20 bp, Artificial Sequence
  Description of Artificial Sequence: Synthetic oligonucleotide
  Target: ATXN2; (+) strand; PAM type: YTN; PAM sequence: CTG
ggctcaagcaattctccttc

SEQ ID NO: 89632 - DNA, 20 bp, Artificial Sequence
  Description of Artificial Sequence: Synthetic oligonucleotide
  Target: ATXN2; (+) strand; PAM type: YTN; PAM sequence: CTC
aagcaattctccttcctcag

SEQ ID NO: 89633 - DNA, 20 bp, Artificial Sequence
  Description of Artificial Sequence: Synthetic oligonucleotide
  Target: ATXN2; (+) strand; PAM type: YTN; PAM sequence: TTC
tccttcctcagcctctcaag

SEQ ID NO: 89634 - DNA, 20 bp, Artificial Sequence
  Description of Artificial Sequence: Synthetic oligonucleotide
  Target: ATXN2; (+) strand; PAM type: YTN; PAM sequence: CTC
cttcctcagcctctcaagta

SEQ ID NO: 89635 - DNA, 20 bp, Artificial Sequence
  Description of Artificial Sequence: Synthetic oligonucleotide
  Target: ATXN2; (+) strand; PAM type: YTN; PAM sequence: CTT
cctcagcctctcaagtagtt

SEQ ID NO: 89636 - DNA, 20 bp, Artificial Sequence
  Description of Artificial Sequence: Synthetic oligonucleotide
  Target: ATXN2; (+) strand; PAM type: YTN; PAM sequence: TTC
ctcagcctctcaagtagtta

SEQ ID NO: 89637 - DNA, 20 bp, Artificial Sequence
  Description of Artificial Sequence: Synthetic oligonucleotide
  Target: ATXN2; (+) strand; PAM type: YTN; PAM sequence: CTC
agcctctcaagtagttagga

SEQ ID NO: 89638 - DNA, 20 bp, Artificial Sequence
  Description of Artificial Sequence: Synthetic oligonucleotide
  Target: ATXN2; (+) strand; PAM type: YTN; PAM sequence: CTC
tcaagtagttaggactacag

SEQ ID NO: 89639 - DNA, 20 bp, Artificial Sequence
  Description of Artificial Sequence: Synthetic oligonucleotide
  Target: ATXN2; (+) strand; PAM type: YTN; PAM sequence: CTC
aagtagttaggactacaggt

SEQ ID NO: 89640 - DNA, 20 bp, Artificial Sequence
  Description of Artificial Sequence: Synthetic oligonucleotide
  Target: ATXN2; (+) strand; PAM type: YTN; PAM sequence: TTA
ggactacaggtgtgtgccac

SEQ ID NO: 89641 - DNA, 20 bp, Artificial Sequence
  Description of Artificial Sequence: Synthetic oligonucleotide
  Target: ATXN2; (+) strand; PAM type: YTN; PAM sequence: CTA
caggtgtgtgccaccacacc

SEQ ID NO: 89642 - DNA, 20 bp, Artificial Sequence
  Description of Artificial Sequence: Synthetic oligonucleotide
  Target: ATXN2; (+) strand; PAM type: YTN; PAM sequence: TTT
ttaaattgttttgtagatat

SEQ ID NO: 89643 - DNA, 20 bp, Artificial Sequence
  Description of Artificial Sequence: Synthetic oligonucleotide
  Target: ATXN2; (+) strand; PAM type: YTN; PAM sequence: TTT
taaattgttttgtagatatg

SEQ ID NO: 89644 - DNA, 20 bp, Artificial Sequence
  Description of Artificial Sequence: Synthetic oligonucleotide
  Target: ATXN2; (+) strand; PAM type: YTN; PAM sequence: TTT
aaattgttttgtagatatgg

SEQ ID NO: 89645 - DNA, 20 bp, Artificial Sequence
  Description of Artificial Sequence: Synthetic oligonucleotide
  Target: ATXN2; (+) strand; PAM type: YTN; PAM sequence: TTA
aattgttttgtagatatggg

SEQ ID NO: 89646 - DNA, 20 bp, Artificial Sequence
  Description of Artificial Sequence: Synthetic oligonucleotide
  Target: ATXN2; (+) strand; PAM type: YTN; PAM sequence: TTG
ttttgtagatatggggtttt

SEQ ID NO: 89647 - DNA, 20 bp, Artificial Sequence
  Description of Artificial Sequence: Synthetic oligonucleotide
  Target: ATXN2; (+) strand; PAM type: YTN; PAM sequence: TTT
tgtagatatggggttttcct

SEQ ID NO: 89648 - DNA, 20 bp, Artificial Sequence
  Description of Artificial Sequence: Synthetic oligonucleotide
  Target: ATXN2; (+) strand; PAM type: YTN; PAM sequence: TTT
gtagatatggggttttccta

SEQ ID NO: 89649 - DNA, 20 bp, Artificial Sequence
  Description of Artificial Sequence: Synthetic oligonucleotide
  Target: ATXN2; (+) strand; PAM type: YTN; PAM sequence: TTG
tagatatggggttttcctac

SEQ ID NO: 89650 - DNA, 20 bp, Artificial Sequence
  Description of Artificial Sequence: Synthetic oligonucleotide
  Target: ATXN2; (+) strand; PAM type: YTN; PAM sequence: TTT
tcctacatcacccaggttgg

SEQ ID NO: 89651 - DNA, 20 bp, Artificial Sequence
  Description of Artificial Sequence: Synthetic oligonucleotide
  Target: ATXN2; (+) strand; PAM type: YTN; PAM sequence: TTT
cctacatcacccaggttggt

SEQ ID NO: 89652 - DNA, 20 bp, Artificial Sequence
  Description of Artificial Sequence: Synthetic oligonucleotide
  Target: ATXN2; (+) strand; PAM type: YTN; PAM sequence: TTC
ctacatcacccaggttggtc

SEQ ID NO: 89653 - DNA, 20 bp, Artificial Sequence
  Description of Artificial Sequence: Synthetic oligonucleotide
  Target: ATXN2; (+) strand; PAM type: YTN; PAM sequence: CTA
catcacccaggttggtcttg

SEQ ID NO: 89654 - DNA, 20 bp, Artificial Sequence
  Description of Artificial Sequence: Synthetic oligonucleotide
  Target: ATXN2; (+) strand; PAM type: YTN; PAM sequence: TTG
gtcttgaactcctggcctca

SEQ ID NO: 89655 - DNA, 20 bp, Artificial Sequence
  Description of Artificial Sequence: Synthetic oligonucleotide
  Target: ATXN2; (+) strand; PAM type: YTN; PAM sequence: CTT
gaactcctggcctcaagcga

SEQ ID NO: 89656 - DNA, 20 bp, Artificial Sequence
  Description of Artificial Sequence: Synthetic oligonucleotide
  Target: ATXN2; (+) strand; PAM type: YTN; PAM sequence: TTG
aactcctggcctcaagcgat

SEQ ID NO: 89657 - DNA, 20 bp, Artificial Sequence
  Description of Artificial Sequence: Synthetic oligonucleotide
  Target: ATXN2; (+) strand; PAM type: YTN; PAM sequence: CTC
ctggcctcaagcgatcctcc

SEQ ID NO: 89658 - DNA, 20 bp, Artificial Sequence
  Description of Artificial Sequence: Synthetic oligonucleotide
  Target: ATXN2; (+) strand; PAM type: YTN; PAM sequence: CTG
gcctcaagcgatcctcctgc

SEQ ID NO: 89659 - DNA, 20 bp, Artificial Sequence
  Description of Artificial Sequence: Synthetic oligonucleotide
  Target: ATXN2; (+) strand; PAM type: YTN; PAM sequence: CTC
aagcgatcctcctgccttgg

SEQ ID NO: 89660 - DNA, 20 bp, Artificial Sequence
  Description of Artificial Sequence: Synthetic oligonucleotide
  Target: ATXN2; (+) strand; PAM type: YTN; PAM sequence: CTC
ctgccttggcctcccaaagc

SEQ ID NO: 89661 - DNA, 20 bp, Artificial Sequence
  Description of Artificial Sequence: Synthetic oligonucleotide
  Target: ATXN2; (+) strand; PAM type: YTN; PAM sequence: CTG
ccttggcctcccaaagctct

SEQ ID NO: 89662 - DNA, 20 bp, Artificial Sequence
  Description of Artificial Sequence: Synthetic oligonucleotide
  Target: ATXN2; (+) strand; PAM type: YTN; PAM sequence: CTT
ggcctcccaaagctctgagg

SEQ ID NO: 89663 - DNA, 20 bp, Artificial Sequence
  Description of Artificial Sequence: Synthetic oligonucleotide
  Target: ATXN2; (+) strand; PAM type: YTN; PAM sequence: TTG
gcctcccaaagctctgaggt

SEQ ID NO: 89664 - DNA, 20 bp, Artificial Sequence
  Description of Artificial Sequence: Synthetic oligonucleotide
  Target: ATXN2; (+) strand; PAM type: YTN; PAM sequence: CTC
ccaaagctctgaggttacag

SEQ ID NO: 89665 - DNA, 20 bp, Artificial Sequence
  Description of Artificial Sequence: Synthetic oligonucleotide
  Target: ATXN2; (+) strand; PAM type: YTN; PAM sequence: CTC
tgaggttacaggtatgagcc

SEQ ID NO: 89666 - DNA, 20 bp, Artificial Sequence
  Description of Artificial Sequence: Synthetic oligonucleotide
  Target: ATXN2; (+) strand; PAM type: YTN; PAM sequence: CTG
aggttacaggtatgagccac

SEQ ID NO: 89667 - DNA, 20 bp, Artificial Sequence
  Description of Artificial Sequence: Synthetic oligonucleotide
  Target: ATXN2; (+) strand; PAM type: YTN; PAM sequence: TTA
caggtatgagccactgttcc

SEQ ID NO: 89668 - DNA, 20 bp, Artificial Sequence
  Description of Artificial Sequence: Synthetic oligonucleotide
  Target: ATXN2; (+) strand; PAM type: YTN; PAM sequence: CTG
ttcctggtcaatatgatata

SEQ ID NO: 89669 - DNA, 20 bp, Artificial Sequence
  Description of Artificial Sequence: Synthetic oligonucleotide
  Target: ATXN2; (+) strand; PAM type: YTN; PAM sequence: TTC
ctggtcaatatgatatactt

SEQ ID NO: 89670 - DNA, 20 bp, Artificial Sequence
  Description of Artificial Sequence: Synthetic oligonucleotide
  Target: ATXN2; (+) strand; PAM type: YTN; PAM sequence: CTG
gtcaatatgatatacttagt

SEQ ID NO: 89671 - DNA, 20 bp, Artificial Sequence
  Description of Artificial Sequence: Synthetic oligonucleotide
  Target: ATXN2; (+) strand; PAM type: YTN; PAM sequence: CTT
agtagatgataagtatttga

SEQ ID NO: 89672 - DNA, 20 bp, Artificial Sequence
  Description of Artificial Sequence: Synthetic oligonucleotide
  Target: ATXN2; (+) strand; PAM type: YTN; PAM sequence: TTA
gtagatgataagtatttgaa

SEQ ID NO: 89673 - DNA, 20 bp, Artificial Sequence
  Description of Artificial Sequence: Synthetic oligonucleotide
  Target: ATXN2; (+) strand; PAM type: YTN; PAM sequence: TTT
gaacataatccaacaaccat

SEQ ID NO: 89674 - DNA, 20 bp, Artificial Sequence
  Description of Artificial Sequence: Synthetic oligonucleotide
  Target: ATXN2; (+) strand; PAM type: YTN; PAM sequence: TTG
aacataatccaacaaccatt

SEQ ID NO: 89675 - DNA, 20 bp, Artificial Sequence
  Description of Artificial Sequence: Synthetic oligonucleotide
  Target: ATXN2; (+) strand; PAM type: YTN; PAM sequence: TTC
atgattaaaaagaaaacaaa

SEQ ID NO: 89676 - DNA, 20 bp, Artificial Sequence
  Description of Artificial Sequence: Synthetic oligonucleotide
  Target: ATXN2; (+) strand; PAM type: YTN; PAM sequence: TTA
aaaagaaaacaaacccacct

SEQ ID NO: 89677 - DNA, 20 bp, Artificial Sequence
  Description of Artificial Sequence: Synthetic oligonucleotide
  Target: ATXN2; (+) strand; PAM type: YTN; PAM sequence: CTC
tgcaaattaggaactgaagt

SEQ ID NO: 89678 - DNA, 20 bp, Artificial Sequence
  Description of Artificial Sequence: Synthetic oligonucleotide
  Target: ATXN2; (+) strand; PAM type: YTN; PAM sequence: CTG
caaattaggaactgaagtaa

SEQ ID NO: 89679 - DNA, 20 bp, Artificial Sequence
  Description of Artificial Sequence: Synthetic oligonucleotide
  Target: ATXN2; (+) strand; PAM type: YTN; PAM sequence: TTA
ggaactgaagtaacacctaa

SEQ ID NO: 89680 - DNA, 20 bp, Artificial Sequence
  Description of Artificial Sequence: Synthetic oligonucleotide
  Target: ATXN2; (+) strand; PAM type: YTN; PAM sequence: CTG
aagtaacacctaactgtatg

SEQ ID NO: 89681 - DNA, 20 bp, Artificial Sequence
  Description of Artificial Sequence: Synthetic oligonucleotide
  Target: ATXN2; (+) strand; PAM type: YTN; PAM sequence: CTA
actgtatgcttaatagtgaa

SEQ ID NO: 89682 - DNA, 20 bp, Artificial Sequence
  Description of Artificial Sequence: Synthetic oligonucleotide
  Target: ATXN2; (+) strand; PAM type: YTN; PAM sequence: CTG
tatgcttaatagtgaaagac

SEQ ID NO: 89683 - DNA, 20 bp, Artificial Sequence
  Description of Artificial Sequence: Synthetic oligonucleotide
  Target: ATXN2; (+) strand; PAM type: YTN; PAM sequence: CTT
aatagtgaaagacaatgtct

SEQ ID NO: 89684 - DNA, 20 bp, Artificial Sequence
  Description of Artificial Sequence: Synthetic oligonucleotide
  Target: ATXN2; (+) strand; PAM type: YTN; PAM sequence: TTA
atagtgaaagacaatgtctc

SEQ ID NO: 89685 - DNA, 20 bp, Artificial Sequence
  Description of Artificial Sequence: Synthetic oligonucleotide
  Target: ATXN2; (+) strand; PAM type: YTN; PAM sequence: CTC
acccctaaaaatgggagcat

SEQ ID NO: 89686 - DNA, 20 bp, Artificial Sequence
  Description of Artificial Sequence: Synthetic oligonucleotide
  Target: ATXN2; (+) strand; PAM type: YTN; PAM sequence: CTA
aaaatgggagcatggcaaaa

SEQ ID NO: 89687 - DNA, 20 bp, Artificial Sequence
  Description of Artificial Sequence: Synthetic oligonucleotide
  Target: ATXN2; (+) strand; PAM type: YTN; PAM sequence: CTC
atgcctttttcagtaatgca

SEQ ID NO: 89688 - DNA, 20 bp, Artificial Sequence
  Description of Artificial Sequence: Synthetic oligonucleotide
  Target: ATXN2; (+) strand; PAM type: YTN; PAM sequence: CTT
tttcagtaatgcaccagtac

SEQ ID NO: 89689 - DNA, 20 bp, Artificial Sequence
  Description of Artificial Sequence: Synthetic oligonucleotide
  Target: ATXN2; (+) strand; PAM type: YTN; PAM sequence: TTT
ttcagtaatgcaccagtaca

SEQ ID NO: 89690 - DNA, 20 bp, Artificial Sequence
  Description of Artificial Sequence: Synthetic oligonucleotide
  Target: ATXN2; (+) strand; PAM type: YTN; PAM sequence: TTT
tcagtaatgcaccagtacaa

SEQ ID NO: 89691 - DNA, 20 bp, Artificial Sequence
  Description of Artificial Sequence: Synthetic oligonucleotide
  Target: ATXN2; (+) strand; PAM type: YTN; PAM sequence: TTT
cagtaatgcaccagtacaat

SEQ ID NO: 89692 - DNA, 20 bp, Artificial Sequence
  Description of Artificial Sequence: Synthetic oligonucleotide
  Target: ATXN2; (+) strand; PAM type: YTN; PAM sequence: TTC
agtaatgcaccagtacaata

SEQ ID NO: 89693 - DNA, 20 bp, Artificial Sequence
  Description of Artificial Sequence: Synthetic oligonucleotide
  Target: ATXN2; (+) strand; PAM type: YTN; PAM sequence: TTA
gatcatgattgtatgtttaa

SEQ ID NO: 89694 - DNA, 20 bp, Artificial Sequence
  Description of Artificial Sequence: Synthetic oligonucleotide
  Target: ATXN2; (+) strand; PAM type: YTN; PAM sequence: TTG
tatgtttaagtcttaaaggg

SEQ ID NO: 89695 - DNA, 20 bp, Artificial Sequence
  Description of Artificial Sequence: Synthetic oligonucleotide
  Target: ATXN2; (+) strand; PAM type: YTN; PAM sequence: TTT
aagtcttaaagggctgccag

SEQ ID NO: 89696 - DNA, 20 bp, Artificial Sequence
  Description of Artificial Sequence: Synthetic oligonucleotide
  Target: ATXN2; (+) strand; PAM type: YTN; PAM sequence: TTA
agtcttaaagggctgccaga

SEQ ID NO: 89697 - DNA, 20 bp, Artificial Sequence
  Description of Artificial Sequence: Synthetic oligonucleotide
  Target: ATXN2; (+) strand; PAM type: YTN; PAM sequence: CTT
aaagggctgccagaaacagt

SEQ ID NO: 89698 - DNA, 20 bp, Artificial Sequence
  Description of Artificial Sequence: Synthetic oligonucleotide
  Target: ATXN2; (+) strand; PAM type: YTN; PAM sequence: TTA
aagggctgccagaaacagtg

SEQ ID NO: 89699 - DNA, 20 bp, Artificial Sequence
  Description of Artificial Sequence: Synthetic oligonucleotide
  Target: ATXN2; (+) strand; PAM type: YTN; PAM sequence: CTG
ccagaaacagtgggtttacc

SEQ ID NO: 89700 - DNA, 20 bp, Artificial Sequence
  Description of Artificial Sequence: Synthetic oligonucleotide
  Target: ATXN2; (+) strand; PAM type: YTN; PAM sequence: TTT
accaacacatcaagacacaa

SEQ ID NO: 89701 - DNA, 20 bp, Artificial Sequence
  Description of Artificial Sequence: Synthetic oligonucleotide
  Target: ATXN2; (+) strand; PAM type: YTN; PAM sequence: TTA
ccaacacatcaagacacaag

SEQ ID NO: 89702 - DNA, 20 bp, Artificial Sequence
  Description of Artificial Sequence: Synthetic oligonucleotide
  Target: ATXN2; (+) strand; PAM type: YTN; PAM sequence: TTC
aaaaatcaagtgcatctcta

SEQ ID NO: 89703 - DNA, 20 bp, Artificial Sequence
  Description of Artificial Sequence: Synthetic oligonucleotide
  Target: ATXN2; (+) strand; PAM type: YTN; PAM sequence: CTC
tatttacgaataaacaaacg

SEQ ID NO: 89704 - DNA, 20 bp, Artificial Sequence
  Description of Artificial Sequence: Synthetic oligonucleotide
  Target: ATXN2; (+) strand; PAM type: YTN; PAM sequence: CTA
tttacgaataaacaaacgtt

SEQ ID NO: 89705 - DNA, 20 bp, Artificial Sequence
  Description of Artificial Sequence: Synthetic oligonucleotide
  Target: ATXN2; (+) strand; PAM type: YTN; PAM sequence: TTT
acgaataaacaaacgttgaa

SEQ ID NO: 89706 - DNA, 20 bp, Artificial Sequence
  Description of Artificial Sequence: Synthetic oligonucleotide
  Target: ATXN2; (+) strand; PAM type: YTN; PAM sequence: TTA
cgaataaacaaacgttgaaa

SEQ ID NO: 89707 - DNA, 20 bp, Artificial Sequence
  Description of Artificial Sequence: Synthetic oligonucleotide
  Target: ATXN2; (+) strand; PAM type: YTN; PAM sequence: TTG
aaagtttttaaaatataact

SEQ ID NO: 89708 - DNA, 20 bp, Artificial Sequence
  Description of Artificial Sequence: Synthetic oligonucleotide
  Target: ATXN2; (+) strand; PAM type: YTN; PAM sequence: TTT
ttaaaatataactcacaaca

SEQ ID NO: 89709 - DNA, 20 bp, Artificial Sequence
  Description of Artificial Sequence: Synthetic oligonucleotide
  Target: ATXN2; (+) strand; PAM type: YTN; PAM sequence: TTT
taaaatataactcacaacag

SEQ ID NO: 89710 - DNA, 20 bp, Artificial Sequence
  Description of Artificial Sequence: Synthetic oligonucleotide
  Target: ATXN2; (+) strand; PAM type: YTN; PAM sequence: TTT
aaaatataactcacaacagc

SEQ ID NO: 89711 - DNA, 20 bp, Artificial Sequence
  Description of Artificial Sequence: Synthetic oligonucleotide
  Target: ATXN2; (+) strand; PAM type: YTN; PAM sequence: TTA
aaatataactcacaacagca

SEQ ID NO: 89712 - DNA, 20 bp, Artificial Sequence
  Description of Artificial Sequence: Synthetic oligonucleotide
  Target: ATXN2; (+) strand; PAM type: YTN; PAM sequence: CTC
acaacagcacaaaacagatg

SEQ ID NO: 89713 - DNA, 20 bp, Artificial Sequence
  Description of Artificial Sequence: Synthetic oligonucleotide
  Target: ATXN2; (+) strand; PAM type: YTN; PAM sequence: TTA
agggataaatttaagaaagc

SEQ ID NO: 89714 - DNA, 20 bp, Artificial Sequence
  Description of Artificial Sequence: Synthetic oligonucleotide
  Target: ATXN2; (+) strand; PAM type: YTN; PAM sequence: TTT
aagaaagcaggcacaaaact

SEQ ID NO: 89715 - DNA, 20 bp, Artificial Sequence
  Description of Artificial Sequence: Synthetic oligonucleotide
  Target: ATXN2; (+) strand; PAM type: YTN; PAM sequence: TTA
agaaagcaggcacaaaactg

SEQ ID NO: 89716 - DNA, 20 bp, Artificial Sequence
  Description of Artificial Sequence: Synthetic oligonucleotide
  Target: ATXN2; (+) strand; PAM type: YTN; PAM sequence: CTG
atacaaagaaaactagaaaa

SEQ ID NO: 89717 - DNA, 20 bp, Artificial Sequence
  Description of Artificial Sequence: Synthetic oligonucleotide
  Target: ATXN2; (+) strand; PAM type: YTN; PAM sequence: CTA
gaaaacactggtgaaactta

SEQ ID NO: 89718 - DNA, 20 bp, Artificial Sequence
  Description of Artificial Sequence: Synthetic oligonucleotide
  Target: ATXN2; (+) strand; PAM type: YTN; PAM sequence: CTG
gtgaaacttaagacttaaat

SEQ ID NO: 89719 - DNA, 20 bp, Artificial Sequence
  Description of Artificial Sequence: Synthetic oligonucleotide
  Target: ATXN2; (+) strand; PAM type: YTN; PAM sequence: CTT
aagacttaaataaatggagc

SEQ ID NO: 89720 - DNA, 20 bp, Artificial Sequence
  Description of Artificial Sequence: Synthetic oligonucleotide
  Target: ATXN2; (+) strand; PAM type: YTN; PAM sequence: TTA
agacttaaataaatggagca

SEQ ID NO: 89721 - DNA, 20 bp, Artificial Sequence
  Description of Artificial Sequence: Synthetic oligonucleotide
  Target: ATXN2; (+) strand; PAM type: YTN; PAM sequence: CTT
aaataaatggagcagtatat

SEQ ID NO: 89722 - DNA, 20 bp, Artificial Sequence
  Description of Artificial Sequence: Synthetic oligonucleotide
  Target: ATXN2; (+) strand; PAM type: YTN; PAM sequence: TTA
aataaatggagcagtatatg

SEQ ID NO: 89723 - DNA, 20 bp, Artificial Sequence
  Description of Artificial Sequence: Synthetic oligonucleotide
  Target: ATXN2; (+) strand; PAM type: YTN; PAM sequence: CTC
aatgaagattccatattgtt

SEQ ID NO: 89724 - DNA, 20 bp, Artificial Sequence
  Description of Artificial Sequence: Synthetic oligonucleotide
  Target: ATXN2; (+) strand; PAM type: YTN; PAM sequence: TTC
catattgttaagatatttct

SEQ ID NO: 89725 - DNA, 20 bp, Artificial Sequence
  Description of Artificial Sequence: Synthetic oligonucleotide
  Target: ATXN2; (+) strand; PAM type: YTN; PAM sequence: TTG
ttaagatatttctcccagaa

SEQ ID NO: 89726 - DNA, 20 bp, Artificial Sequence
  Description of Artificial Sequence: Synthetic oligonucleotide
  Target: ATXN2; (+) strand; PAM type: YTN; PAM sequence: TTA
agatatttctcccagaactg

SEQ ID NO: 89727 - DNA, 20 bp, Artificial Sequence
  Description of Artificial Sequence: Synthetic oligonucleotide
  Target: ATXN2; (+) strand; PAM type: YTN; PAM sequence: TTT
ctcccagaactgatataaag

SEQ ID NO: 89728 - DNA, 20 bp, Artificial Sequence
  Description of Artificial Sequence: Synthetic oligonucleotide
  Target: ATXN2; (+) strand; PAM type: YTN; PAM sequence: TTC
tcccagaactgatataaaga

SEQ ID NO: 89729 - DNA, 20 bp, Artificial Sequence
  Description of Artificial Sequence: Synthetic oligonucleotide
  Target: ATXN2; (+) strand; PAM type: YTN; PAM sequence: CTC
ccagaactgatataaagatt

SEQ ID NO: 89730 - DNA, 20 bp, Artificial Sequence
  Description of Artificial Sequence: Synthetic oligonucleotide
  Target: ATXN2; (+) strand; PAM type: YTN; PAM sequence: CTG
atataaagattcagtgcaca

SEQ ID NO: 89731 - DNA, 20 bp, Artificial Sequence
  Description of Artificial Sequence: Synthetic oligonucleotide
  Target: ATXN2; (+) strand; PAM type: YTN; PAM sequence: TTC
agtgcacaatcccaagctga

SEQ ID NO: 89732 - DNA, 20 bp, Artificial Sequence
  Description of Artificial Sequence: Synthetic oligonucleotide
  Target: ATXN2; (+) strand; PAM type: YTN; PAM sequence: CTG
attctaaaatttatttgcaa

SEQ ID NO: 89733 - DNA, 20 bp, Artificial Sequence
  Description of Artificial Sequence: Synthetic oligonucleotide
  Target: ATXN2; (+) strand; PAM type: YTN; PAM sequence: TTC
taaaatttatttgcaaattc

SEQ ID NO: 89734 - DNA, 20 bp, Artificial Sequence
  Description of Artificial Sequence: Synthetic oligonucleotide
  Target: ATXN2; (+) strand; PAM type: YTN; PAM sequence: CTA
aaatttatttgcaaattcaa

SEQ ID NO: 89735 - DNA, 20 bp, Artificial Sequence
  Description of Artificial Sequence: Synthetic oligonucleotide
  Target: ATXN2; (+) strand; PAM type: YTN; PAM sequence: TTT
atttgcaaattcaaagaacg

SEQ ID NO: 89736 - DNA, 20 bp, Artificial Sequence
  Description of Artificial Sequence: Synthetic oligonucleotide
  Target: ATXN2; (+) strand; PAM type: YTN; PAM sequence: TTA
tttgcaaattcaaagaacgc

SEQ ID NO: 89737 - DNA, 20 bp, Artificial Sequence
  Description of Artificial Sequence: Synthetic oligonucleotide
  Target: ATXN2; (+) strand; PAM type: YTN; PAM sequence: TTT
gcaaattcaaagaacgcaga

SEQ ID NO: 89738 - DNA, 20 bp, Artificial Sequence
  Description of Artificial Sequence: Synthetic oligonucleotide
  Target: ATXN2; (+) strand; PAM type: YTN; PAM sequence: TTG
caaattcaaagaacgcagaa

SEQ ID NO: 89739 - DNA, 20 bp, Artificial Sequence
  Description of Artificial Sequence: Synthetic oligonucleotide
  Target: ATXN2; (+) strand; PAM type: YTN; PAM sequence: TTC
aaagaacgcagaataagagt

SEQ ID NO: 89740 - DNA, 20 bp, Artificial Sequence
  Description of Artificial Sequence: Synthetic oligonucleotide
  Target: ATXN2; (+) strand; PAM type: YTN; PAM sequence: TTT
tgacgagaataaaactggga

SEQ ID NO: 89741 - DNA, 20 bp, Artificial Sequence
  Description of Artificial Sequence: Synthetic oligonucleotide
  Target: ATXN2; (+) strand; PAM type: YTN; PAM sequence: TTT
gacgagaataaaactgggag

SEQ ID NO: 89742 - DNA, 20 bp, Artificial Sequence
  Description of Artificial Sequence: Synthetic oligonucleotide
  Target: ATXN2; (+) strand; PAM type: YTN; PAM sequence: TTG
acgagaataaaactgggaga

SEQ ID NO: 89743 - DNA, 20 bp, Artificial Sequence
  Description of Artificial Sequence: Synthetic oligonucleotide
  Target: ATXN2; (+) strand; PAM type: YTN; PAM sequence: CTG
ggagactcatatgaacttaa

SEQ ID NO: 89744 - DNA, 20 bp, Artificial Sequence
  Description of Artificial Sequence: Synthetic oligonucleotide
  Target: ATXN2; (+) strand; PAM type: YTN; PAM sequence: CTC
atatgaacttaaaggttggt

SEQ ID NO: 89745 - DNA, 20 bp, Artificial Sequence
  Description of Artificial Sequence: Synthetic oligonucleotide
  Target: ATXN2; (+) strand; PAM type: YTN; PAM sequence: CTT
aaaggttggttacaaagtaa

SEQ ID NO: 89746 - DNA, 20 bp, Artificial Sequence
  Description of Artificial Sequence: Synthetic oligonucleotide
  Target: ATXN2; (+) strand; PAM type: YTN; PAM sequence: TTA
aaggttggttacaaagtaac

SEQ ID NO: 89747 - DNA, 20 bp, Artificial Sequence
  Description of Artificial Sequence: Synthetic oligonucleotide
  Target: ATXN2; (+) strand; PAM type: YTN; PAM sequence: TTG
gttacaaagtaacagcaata

SEQ ID NO: 89748 - DNA, 20 bp, Artificial Sequence
  Description of Artificial Sequence: Synthetic oligonucleotide
  Target: ATXN2; (+) strand; PAM type: YTN; PAM sequence: TTA
caaagtaacagcaataaaga

SEQ ID NO: 89749 - DNA, 20 bp, Artificial Sequence
  Description of Artificial Sequence: Synthetic oligonucleotide
  Target: ATXN2; (+) strand; PAM type: YTN; PAM sequence: TTG
gcataaggatatatacaaag

SEQ ID NO: 89750 - DNA, 20 bp, Artificial Sequence
  Description of Artificial Sequence: Synthetic oligonucleotide
  Target: ATXN2; (+) strand; PAM type: YTN; PAM sequence: TTC
acaaatagacacacatacaa

SEQ ID NO: 89751 - DNA, 20 bp, Artificial Sequence
  Description of Artificial Sequence: Synthetic oligonucleotide
  Target: ATXN2; (+) strand; PAM type: YTN; PAM sequence: CTG
aattcaataaagctactatg

SEQ ID NO: 89752 - DNA, 20 bp, Artificial Sequence
  Description of Artificial Sequence: Synthetic oligonucleotide
  Target: ATXN2; (+) strand; PAM type: YTN; PAM sequence: TTC
aataaagctactatggctgg

SEQ ID NO: 89753 - DNA, 20 bp, Artificial Sequence
  Description of Artificial Sequence: Synthetic oligonucleotide
  Target: ATXN2; (+) strand; PAM type: YTN; PAM sequence: CTA
ctatggctgggcgcagtggc

SEQ ID NO: 89754 - DNA, 20 bp, Artificial Sequence
  Description of Artificial Sequence: Synthetic oligonucleotide
  Target: ATXN2; (+) strand; PAM type: YTN; PAM sequence: CTA
tggctgggcgcagtggctca

SEQ ID NO: 89755 - DNA, 20 bp, Artificial Sequence
  Description of Artificial Sequence: Synthetic oligonucleotide
  Target: ATXN2; (+) strand; PAM type: YTN; PAM sequence: CTG
ggcgcagtggctcatgcctg

SEQ ID NO: 89756 - DNA, 20 bp, Artificial Sequence
  Description of Artificial Sequence: Synthetic oligonucleotide
  Target: ATXN2; (+) strand; PAM type: YTN; PAM sequence: CTC
atgcctgtaatcccagaact

SEQ ID NO: 89757 - DNA, 20 bp, Artificial Sequence
  Description of Artificial Sequence: Synthetic oligonucleotide
  Target: ATXN2; (+) strand; PAM type: YTN; PAM sequence: CTG
taatcccagaactttgggag

SEQ ID NO: 89758 - DNA, 20 bp, Artificial Sequence
  Description of Artificial Sequence: Synthetic oligonucleotide
  Target: ATXN2; (+) strand; PAM type: YTN; PAM sequence: CTT
tgggaggctgagatgagcag

SEQ ID NO: 89759 - DNA, 20 bp, Artificial Sequence
  Description of Artificial Sequence: Synthetic oligonucleotide
  Target: ATXN2; (+) strand; PAM type: YTN; PAM sequence: TTT
gggaggctgagatgagcaga

SEQ ID NO: 89760 - DNA, 20 bp, Artificial Sequence
  Description of Artificial Sequence: Synthetic oligonucleotide
  Target: ATXN2; (+) strand; PAM type: YTN; PAM sequence: TTG
ggaggctgagatgagcagat

SEQ ID NO: 89761 - DNA, 20 bp, Artificial Sequence
  Description of Artificial Sequence: Synthetic oligonucleotide
  Target: ATXN2; (+) strand; PAM type: YTN; PAM sequence: CTG
agatgagcagatcacctgag

SEQ ID NO: 89762 - DNA, 20 bp, Artificial Sequence
  Description of Artificial Sequence: Synthetic oligonucleotide
  Target: ATXN2; (+) strand; PAM type: YTN; PAM sequence: CTG
aggtcaggagttcgagacta

SEQ ID NO: 89763 - DNA, 20 bp, Artificial Sequence
  Description of Artificial Sequence: Synthetic oligonucleotide
  Target: ATXN2; (+) strand; PAM type: YTN; PAM sequence: TTC
gagactagcctggccaacat

SEQ ID NO: 89764 - DNA, 20 bp, Artificial Sequence
  Description of Artificial Sequence: Synthetic oligonucleotide
  Target: ATXN2; (+) strand; PAM type: YTN; PAM sequence: CTA
gcctggccaacatggtgaga

SEQ ID NO: 89765 - DNA, 20 bp, Artificial Sequence
  Description of Artificial Sequence: Synthetic oligonucleotide
  Target: ATXN2; (+) strand; PAM type: YTN; PAM sequence: CTG
gccaacatggtgagaccctg

SEQ ID NO: 89766 - DNA, 20 bp, Artificial Sequence
  Description of Artificial Sequence: Synthetic oligonucleotide
  Target: ATXN2; (+) strand; PAM type: YTN; PAM sequence: CTG
tctctactaaaaaaaaaaaa

SEQ ID NO: 89767 - DNA, 20 bp, Artificial Sequence
  Description of Artificial Sequence: Synthetic oligonucleotide
  Target: ATXN2; (+) strand; PAM type: YTN; PAM sequence: CTC
tactaaaaaaaaaaaaaaaa

SEQ ID NO: 89768 - DNA, 20 bp, Artificial Sequence
  Description of Artificial Sequence: Synthetic oligonucleotide
  Target: ATXN2; (+) strand; PAM type: YTN; PAM sequence: CTA
ctaaaaaaaaaaaaaaaaaa

SEQ ID NO: 89769 - DNA, 20 bp, Artificial Sequence
  Description of Artificial Sequence: Synthetic oligonucleotide
  Target: ATXN2; (+) strand; PAM type: YTN; PAM sequence: CTA
aaaaaaaaaaaaaaaaaaat

SEQ ID NO: 89770 - DNA, 20 bp, Artificial Sequence
  Description of Artificial Sequence: Synthetic oligonucleotide
  Target: ATXN2; (+) strand; PAM type: YTN; PAM sequence: TTA
gctgggtgtagtggcgggca

SEQ ID NO: 89771 - DNA, 20 bp, Artificial Sequence
  Description of Artificial Sequence: Synthetic oligonucleotide
  Target: ATXN2; (+) strand; PAM type: YTN; PAM sequence: CTG
ggtgtagtggcgggcacctg

SEQ ID NO: 89772 - DNA, 20 bp, Artificial Sequence
  Description of Artificial Sequence: Synthetic oligonucleotide
  Target: ATXN2; (+) strand; PAM type: YTN; PAM sequence: CTG
taatcctagctactcgagag

SEQ ID NO: 89773 - DNA, 20 bp, Artificial Sequence
  Description of Artificial Sequence: Synthetic oligonucleotide
  Target: ATXN2; (+) strand; PAM type: YTN; PAM sequence: CTA
gctactcgagaggctgaggc

SEQ ID NO: 89774 - DNA, 20 bp, Artificial Sequence
  Description of Artificial Sequence: Synthetic oligonucleotide
  Target: ATXN2; (+) strand; PAM type: YTN; PAM sequence: CTA
ctcgagaggctgaggcagaa

SEQ ID NO: 89775 - DNA, 20 bp, Artificial Sequence
  Description of Artificial Sequence: Synthetic oligonucleotide
  Target: ATXN2; (+) strand; PAM type: YTN; PAM sequence: CTC
gagaggctgaggcagaatcg

SEQ ID NO: 89776 - DNA, 20 bp, Artificial Sequence
  Description of Artificial Sequence: Synthetic oligonucleotide
  Target: ATXN2; (+) strand; PAM type: YTN; PAM sequence: CTG
aggcagaatcgcttgaccct

SEQ ID NO: 89777 - DNA, 20 bp, Artificial Sequence
  Description of Artificial Sequence: Synthetic oligonucleotide
  Target: ATXN2; (+) strand; PAM type: YTN; PAM sequence: CTT
gaccctgggaagtggaggtt

SEQ ID NO: 89778 - DNA, 20 bp, Artificial Sequence
  Description of Artificial Sequence: Synthetic oligonucleotide
  Target: ATXN2; (+) strand; PAM type: YTN; PAM sequence: TTG
accctgggaagtggaggttg

SEQ ID NO: 89779 - DNA, 20 bp, Artificial Sequence
  Description of Artificial Sequence: Synthetic oligonucleotide
  Target: ATXN2; (+) strand; PAM type: YTN; PAM sequence: CTG
ggaagtggaggttgcagtga

SEQ ID NO: 89780 - DNA, 20 bp, Artificial Sequence
  Description of Artificial Sequence: Synthetic oligonucleotide
  Target: ATXN2; (+) strand; PAM type: YTN; PAM sequence: TTG
cagtgagccaaggtcacact

SEQ ID NO: 89781 - DNA, 20 bp, Artificial Sequence
  Description of Artificial Sequence: Synthetic oligonucleotide
  Target: ATXN2; (+) strand; PAM type: YTN; PAM sequence: CTA
ctgcactccagcctgggtaa

SEQ ID NO: 89782 - DNA, 20 bp, Artificial Sequence
  Description of Artificial Sequence: Synthetic oligonucleotide
  Target: ATXN2; (+) strand; PAM type: YTN; PAM sequence: CTG
cactccagcctgggtaacaa

SEQ ID NO: 89783 - DNA, 20 bp, Artificial Sequence
  Description of Artificial Sequence: Synthetic oligonucleotide
  Target: ATXN2; (+) strand; PAM type: YTN; PAM sequence: CTC
cagcctgggtaacaagatcg

SEQ ID NO: 89784 - DNA, 20 bp, Artificial Sequence
  Description of Artificial Sequence: Synthetic oligonucleotide
  Target: ATXN2; (+) strand; PAM type: YTN; PAM sequence: CTG
ggtaacaagatcgagactct

SEQ ID NO: 89785 - DNA, 20 bp, Artificial Sequence
  Description of Artificial Sequence: Synthetic oligonucleotide
  Target: ATXN2; (+) strand; PAM type: YTN; PAM sequence: CTC
ttgtttcaagaacagaaaaa

SEQ ID NO: 89786 - DNA, 20 bp, Artificial Sequence
  Description of Artificial Sequence: Synthetic oligonucleotide
  Target: ATXN2; (+) strand; PAM type: YTN; PAM sequence: CTT
gtttcaagaacagaaaaaaa

SEQ ID NO: 89787 - DNA, 20 bp, Artificial Sequence
  Description of Artificial Sequence: Synthetic oligonucleotide
  Target: ATXN2; (+) strand; PAM type: YTN; PAM sequence: TTG
tttcaagaacagaaaaaaaa

SEQ ID NO: 89788 - DNA, 20 bp, Artificial Sequence
  Description of Artificial Sequence: Synthetic oligonucleotide
  Target: ATXN2; (+) strand; PAM type: YTN; PAM sequence: TTT
caagaacagaaaaaaaataa

SEQ ID NO: 89789 - DNA, 20 bp, Artificial Sequence
  Description of Artificial Sequence: Synthetic oligonucleotide
  Target: ATXN2; (+) strand; PAM type: YTN; PAM sequence: TTC
aagaacagaaaaaaaataaa

SEQ ID NO: 89790 - DNA, 20 bp, Artificial Sequence
  Description of Artificial Sequence: Synthetic oligonucleotide
  Target: ATXN2; (+) strand; PAM type: YTN; PAM sequence: CTG
gtgccagagaaaccgagtaa

SEQ ID NO: 89791 - DNA, 20 bp, Artificial Sequence
  Description of Artificial Sequence: Synthetic oligonucleotide
  Target: ATXN2; (+) strand; PAM type: YTN; PAM sequence: TTT
atggtggagaaaatgaagct

SEQ ID NO: 89792 - DNA, 20 bp, Artificial Sequence
  Description of Artificial Sequence: Synthetic oligonucleotide
  Target: ATXN2; (+) strand; PAM type: YTN; PAM sequence: TTA
tggtggagaaaatgaagcta

SEQ ID NO: 89793 - DNA, 20 bp, Artificial Sequence
  Description of Artificial Sequence: Synthetic oligonucleotide
  Target: ATXN2; (+) strand; PAM type: YTN; PAM sequence: CTA
gacctttacatcacacccta

SEQ ID NO: 89794 - DNA, 20 bp, Artificial Sequence
  Description of Artificial Sequence: Synthetic oligonucleotide
  Target: ATXN2; (+) strand; PAM type: YTN; PAM sequence: CTT
tacatcacaccctacacaaa

SEQ ID NO: 89795 - DNA, 20 bp, Artificial Sequence
  Description of Artificial Sequence: Synthetic oligonucleotide
  Target: ATXN2; (+) strand; PAM type: YTN; PAM sequence: TTT
acatcacaccctacacaaaa

SEQ ID NO: 89796 - DNA, 20 bp, Artificial Sequence
  Description of Artificial Sequence: Synthetic oligonucleotide
  Target: ATXN2; (+) strand; PAM type: YTN; PAM sequence: TTA
catcacaccctacacaaaac

SEQ ID NO: 89797 - DNA, 20 bp, Artificial Sequence
  Description of Artificial Sequence: Synthetic oligonucleotide
  Target: ATXN2; (+) strand; PAM type: YTN; PAM sequence: CTA
cacaaaacctaacctgaaat

SEQ ID NO: 89798 - DNA, 20 bp, Artificial Sequence
  Description of Artificial Sequence: Synthetic oligonucleotide
  Target: ATXN2; (+) strand; PAM type: YTN; PAM sequence: CTA
acctgaaatcaaccatatac

SEQ ID NO: 89799 - DNA, 20 bp, Artificial Sequence
  Description of Artificial Sequence: Synthetic oligonucleotide
  Target: ATXN2; (+) strand; PAM type: YTN; PAM sequence: CTG
aaatcaaccatatacctaac

SEQ ID NO: 89800 - DNA, 20 bp, Artificial Sequence
  Description of Artificial Sequence: Synthetic oligonucleotide
  Target: ATXN2; (+) strand; PAM type: YTN; PAM sequence: CTA
accataaaaacattcataac

SEQ ID NO: 89801 - DNA, 20 bp, Artificial Sequence
  Description of Artificial Sequence: Synthetic oligonucleotide
  Target: ATXN2; (+) strand; PAM type: YTN; PAM sequence: TTC
ataacctagggtacgtaaaa

SEQ ID NO: 89802 - DNA, 20 bp, Artificial Sequence
  Description of Artificial Sequence: Synthetic oligonucleotide
  Target: ATXN2; (+) strand; PAM type: YTN; PAM sequence: CTA
gggtacgtaaaagatttctt

SEQ ID NO: 89803 - DNA, 20 bp, Artificial Sequence
  Description of Artificial Sequence: Synthetic oligonucleotide
  Target: ATXN2; (+) strand; PAM type: YTN; PAM sequence: TTT
cttattatgatacaaaaaag

SEQ ID NO: 89804 - DNA, 20 bp, Artificial Sequence
  Description of Artificial Sequence: Synthetic oligonucleotide
  Target: ATXN2; (+) strand; PAM type: YTN; PAM sequence: TTC
ttattatgatacaaaaaagc

SEQ ID NO: 89805 - DNA, 20 bp, Artificial Sequence
  Description of Artificial Sequence: Synthetic oligonucleotide
  Target: ATXN2; (+) strand; PAM type: YTN; PAM sequence: CTT
attatgatacaaaaaagcat

SEQ ID NO: 89806 - DNA, 20 bp, Artificial Sequence
  Description of Artificial Sequence: Synthetic oligonucleotide
  Target: ATXN2; (+) strand; PAM type: YTN; PAM sequence: TTA
ttatgatacaaaaaagcatg

SEQ ID NO: 89807 - DNA, 20 bp, Artificial Sequence
  Description of Artificial Sequence: Synthetic oligonucleotide
  Target: ATXN2; (+) strand; PAM type: YTN; PAM sequence: TTA
tgatacaaaaaagcatgaac

SEQ ID NO: 89808 - DNA, 20 bp, Artificial Sequence
  Description of Artificial Sequence: Synthetic oligonucleotide
  Target: ATXN2; (+) strand; PAM type: YTN; PAM sequence: CTT
aagagaaaagcttgataaat

SEQ ID NO: 89809 - DNA, 20 bp, Artificial Sequence
  Description of Artificial Sequence: Synthetic oligonucleotide
  Target: ATXN2; (+) strand; PAM type: YTN; PAM sequence: TTA
agagaaaagcttgataaata

SEQ ID NO: 89810 - DNA, 20 bp, Artificial Sequence
  Description of Artificial Sequence: Synthetic oligonucleotide
  Target: ATXN2; (+) strand; PAM type: YTN; PAM sequence: CTT
gataaataaggcttcattaa

SEQ ID NO: 89811 - DNA, 20 bp, Artificial Sequence
  Description of Artificial Sequence: Synthetic oligonucleotide
  Target: ATXN2; (+) strand; PAM type: YTN; PAM sequence: TTG
ataaataaggcttcattaaa

SEQ ID NO: 89812 - DNA, 20 bp, Artificial Sequence
  Description of Artificial Sequence: Synthetic oligonucleotide
  Target: ATXN2; (+) strand; PAM type: YTN; PAM sequence: CTT
cattaaaattaacaatactg

SEQ ID NO: 89813 - DNA, 20 bp, Artificial Sequence
  Description of Artificial Sequence: Synthetic oligonucleotide
  Target: ATXN2; (+) strand; PAM type: YTN; PAM sequence: TTC
attaaaattaacaatactgg

SEQ ID NO: 89814 - DNA, 20 bp, Artificial Sequence
  Description of Artificial Sequence: Synthetic oligonucleotide
  Target: ATXN2; (+) strand; PAM type: YTN; PAM sequence: TTA
aaattaacaatactggctct

SEQ ID NO: 89815 - DNA, 20 bp, Artificial Sequence
  Description of Artificial Sequence: Synthetic oligonucleotide
  Target: ATXN2; (+) strand; PAM type: YTN; PAM sequence: TTA
acaatactggctcttcaaaa

SEQ ID NO: 89816 - DNA, 20 bp, Artificial Sequence
  Description of Artificial Sequence: Synthetic oligonucleotide
  Target: ATXN2; (+) strand; PAM type: YTN; PAM sequence: CTG
gctcttcaaaaaaaaccgca

SEQ ID NO: 89817 - DNA, 20 bp, Artificial Sequence
  Description of Artificial Sequence: Synthetic oligonucleotide
  Target: ATXN2; (+) strand; PAM type: YTN; PAM sequence: CTC
ttcaaaaaaaaccgcagact

SEQ ID NO: 89818 - DNA, 20 bp, Artificial Sequence
  Description of Artificial Sequence: Synthetic oligonucleotide
  Target: ATXN2; (+) strand; PAM type: YTN; PAM sequence: CTT
caaaaaaaaccgcagactgg

SEQ ID NO: 89819 - DNA, 20 bp, Artificial Sequence
  Description of Artificial Sequence: Synthetic oligonucleotide
  Target: ATXN2; (+) strand; PAM type: YTN; PAM sequence: TTC
aaaaaaaaccgcagactggg

SEQ ID NO: 89820 - DNA, 20 bp, Artificial Sequence
  Description of Artificial Sequence: Synthetic oligonucleotide
  Target: ATXN2; (+) strand; PAM type: YTN; PAM sequence: CTG
ggagaaaatattcacaatat

SEQ ID NO: 89821 - DNA, 20 bp, Artificial Sequence
  Description of Artificial Sequence: Synthetic oligonucleotide
  Target: ATXN2; (+) strand; PAM type: YTN; PAM sequence: TTC
acaatattctgagaaaggac

SEQ ID NO: 89822 - DNA, 20 bp, Artificial Sequence
  Description of Artificial Sequence: Synthetic oligonucleotide
  Target: ATXN2; (+) strand; PAM type: YTN; PAM sequence: TTC
tgagaaaggacttgtaacca

SEQ ID NO: 89823 - DNA, 20 bp, Artificial Sequence
  Description of Artificial Sequence: Synthetic oligonucleotide
  Target: ATXN2; (+) strand; PAM type: YTN; PAM sequence: CTG
agaaaggacttgtaaccaga

SEQ ID NO: 89824 - DNA, 20 bp, Artificial Sequence
  Description of Artificial Sequence: Synthetic oligonucleotide
  Target: ATXN2; (+) strand; PAM type: YTN; PAM sequence: CTT
gtaaccagaatatataaata

SEQ ID NO: 89825 - DNA, 20 bp, Artificial Sequence
  Description of Artificial Sequence: Synthetic oligonucleotide
  Target: ATXN2; (+) strand; PAM type: YTN; PAM sequence: TTG
taaccagaatatataaataa

SEQ ID NO: 89826 - DNA, 20 bp, Artificial Sequence
  Description of Artificial Sequence: Synthetic oligonucleotide
  Target: ATXN2; (+) strand; PAM type: YTN; PAM sequence: CTT
aaaataatttactaaaagta

SEQ ID NO: 89827 - DNA, 20 bp, Artificial Sequence
  Description of Artificial Sequence: Synthetic oligonucleotide
  Target: ATXN2; (+) strand; PAM type: YTN; PAM sequence: TTA
aaataatttactaaaagtag

SEQ ID NO: 89828 - DNA, 20 bp, Artificial Sequence
  Description of Artificial Sequence: Synthetic oligonucleotide
  Target: ATXN2; (+) strand; PAM type: YTN; PAM sequence: TTT
actaaaagtagtaactttat

SEQ ID NO: 89829 - DNA, 20 bp, Artificial Sequence
  Description of Artificial Sequence: Synthetic oligonucleotide
  Target: ATXN2; (+) strand; PAM type: YTN; PAM sequence: TTA
ctaaaagtagtaactttatt

SEQ ID NO: 89830 - DNA, 20 bp, Artificial Sequence
  Description of Artificial Sequence: Synthetic oligonucleotide
  Target: ATXN2; (+) strand; PAM type: YTN; PAM sequence: CTA
aaagtagtaactttattttc

SEQ ID NO: 89831 - DNA, 20 bp, Artificial Sequence
  Description of Artificial Sequence: Synthetic oligonucleotide
  Target: ATXN2; (+) strand; PAM type: YTN; PAM sequence: CTT
tattttcacagtaagaaaag

SEQ ID NO: 89832 - DNA, 20 bp, Artificial Sequence
  Description of Artificial Sequence: Synthetic oligonucleotide
  Target: ATXN2; (+) strand; PAM type: YTN; PAM sequence: TTT
attttcacagtaagaaaaga

SEQ ID NO: 89833 - DNA, 20 bp, Artificial Sequence
  Description of Artificial Sequence: Synthetic oligonucleotide
  Target: ATXN2; (+) strand; PAM type: YTN; PAM sequence: TTA
ttttcacagtaagaaaagaa

SEQ ID NO: 89834 - DNA, 20 bp, Artificial Sequence
  Description of Artificial Sequence: Synthetic oligonucleotide
  Target: ATXN2; (+) strand; PAM type: YTN; PAM sequence: TTT
tcacagtaagaaaagaaaca

SEQ ID NO: 89835 - DNA, 20 bp, Artificial Sequence
  Description of Artificial Sequence: Synthetic oligonucleotide
  Target: ATXN2; (+) strand; PAM type: YTN; PAM sequence: TTT
cacagtaagaaaagaaacat

SEQ ID NO: 89836 - DNA, 20 bp, Artificial Sequence
  Description of Artificial Sequence: Synthetic oligonucleotide
  Target: ATXN2; (+) strand; PAM type: YTN; PAM sequence: TTC
acagtaagaaaagaaacatg

SEQ ID NO: 89837 - DNA, 20 bp, Artificial Sequence
  Description of Artificial Sequence: Synthetic oligonucleotide
  Target: ATXN2; (+) strand; PAM type: YTN; PAM sequence: CTT
ttttttcttttttttgtgag

SEQ ID NO: 89838 - DNA, 20 bp, Artificial Sequence
  Description of Artificial Sequence: Synthetic oligonucleotide
  Target: ATXN2; (+) strand; PAM type: YTN; PAM sequence: TTT
tttttcttttttttgtgaga

SEQ ID NO: 89839 - DNA, 20 bp, Artificial Sequence
  Description of Artificial Sequence: Synthetic oligonucleotide
  Target: ATXN2; (+) strand; PAM type: YTN; PAM sequence: TTT
ttttcttttttttgtgagac

SEQ ID NO: 89840 - DNA, 20 bp, Artificial Sequence
  Description of Artificial Sequence: Synthetic oligonucleotide
  Target: ATXN2; (+) strand; PAM type: YTN; PAM sequence: TTT
tttcttttttttgtgagaca

SEQ ID NO: 89841 - DNA, 20 bp, Artificial Sequence
  Description of Artificial Sequence: Synthetic oligonucleotide
  Target: ATXN2; (+) strand; PAM type: YTN; PAM sequence: TTT
ttcttttttttgtgagacag

SEQ ID NO: 89842 - DNA, 20 bp, Artificial Sequence
  Description of Artificial Sequence: Synthetic oligonucleotide
  Target: ATXN2; (+) strand; PAM type: YTN; PAM sequence: TTT
tcttttttttgtgagacagg

SEQ ID NO: 89843 - DNA, 20 bp, Artificial Sequence
  Description of Artificial Sequence: Synthetic oligonucleotide
  Target: ATXN2; (+) strand; PAM type: YTN; PAM sequence: TTT
cttttttttgtgagacaggg

SEQ ID NO: 89844 - DNA, 20 bp, Artificial Sequence
  Description of Artificial Sequence: Synthetic oligonucleotide
  Target: ATXN2; (+) strand; PAM type: YTN; PAM sequence: TTC
ttttttttgtgagacagggt

SEQ ID NO: 89845 - DNA, 20 bp, Artificial Sequence
  Description of Artificial Sequence: Synthetic oligonucleotide
  Target: ATXN2; (+) strand; PAM type: YTN; PAM sequence: CTT
ttttttgtgagacagggtct

SEQ ID NO: 89846 - DNA, 20 bp, Artificial Sequence
  Description of Artificial Sequence: Synthetic oligonucleotide
  Target: ATXN2; (+) strand; PAM type: YTN; PAM sequence: TTT
tttttgtgagacagggtctg

SEQ ID NO: 89847 - DNA, 20 bp, Artificial Sequence
  Description of Artificial Sequence: Synthetic oligonucleotide
  Target: ATXN2; (+) strand; PAM type: YTN; PAM sequence: TTT
ttttgtgagacagggtctgg

SEQ ID NO: 89848 - DNA, 20 bp, Artificial Sequence
  Description of Artificial Sequence: Synthetic oligonucleotide
  Target: ATXN2; (+) strand; PAM type: YTN; PAM sequence: TTT
tttgtgagacagggtctggc

SEQ ID NO: 89849 - DNA, 20 bp, Artificial Sequence
  Description of Artificial Sequence: Synthetic oligonucleotide
  Target: ATXN2; (+) strand; PAM type: YTN; PAM sequence: TTT
ttgtgagacagggtctggct

SEQ ID NO: 89850 - DNA, 20 bp, Artificial Sequence
  Description of Artificial Sequence: Synthetic oligonucleotide
  Target: ATXN2; (+) strand; PAM type: YTN; PAM sequence: TTT
tgtgagacagggtctggctc

SEQ ID NO: 89851 - DNA, 20 bp, Artificial Sequence
  Description of Artificial Sequence: Synthetic oligonucleotide
  Target: ATXN2; (+) strand; PAM type: YTN; PAM sequence: TTT
gtgagacagggtctggctct

SEQ ID NO: 89852 - DNA, 20 bp, Artificial Sequence
  Description of Artificial Sequence: Synthetic oligonucleotide
  Target: ATXN2; (+) strand; PAM type: YTN; PAM sequence: TTG
tgagacagggtctggctcta

SEQ ID NO: 89853 - DNA, 20 bp, Artificial Sequence
  Description of Artificial Sequence: Synthetic oligonucleotide
  Target: ATXN2; (+) strand; PAM type: YTN; PAM sequence: CTG
gctctattgcccaggctgga

SEQ ID NO: 89854 - DNA, 20 bp, Artificial Sequence
  Description of Artificial Sequence: Synthetic oligonucleotide
  Target: ATXN2; (+) strand; PAM type: YTN; PAM sequence: CTC
tattgcccaggctggagtgc

SEQ ID NO: 89855 - DNA, 20 bp, Artificial Sequence
  Description of Artificial Sequence: Synthetic oligonucleotide
  Target: ATXN2; (+) strand; PAM type: YTN; PAM sequence: CTA
ttgcccaggctggagtgcag

SEQ ID NO: 89856 - DNA, 20 bp, Artificial Sequence
  Description of Artificial Sequence: Synthetic oligonucleotide
  Target: ATXN2; (+) strand; PAM type: YTN; PAM sequence: TTG
cccaggctggagtgcagtag

SEQ ID NO: 89857 - DNA, 20 bp, Artificial Sequence
  Description of Artificial Sequence: Synthetic oligonucleotide
  Target: ATXN2; (+) strand; PAM type: YTN; PAM sequence: CTG
gagtgcagtagtgcaatctc

SEQ ID NO: 89858 - DNA, 20 bp, Artificial Sequence
  Description of Artificial Sequence: Synthetic oligonucleotide
  Target: ATXN2; (+) strand; PAM type: YTN; PAM sequence: CTC
agctcactgcaacctcgatc

SEQ ID NO: 89859 - DNA, 20 bp, Artificial Sequence
  Description of Artificial Sequence: Synthetic oligonucleotide
  Target: ATXN2; (+) strand; PAM type: YTN; PAM sequence: CTC
actgcaacctcgatcacccc

SEQ ID NO: 89860 - DNA, 20 bp, Artificial Sequence
  Description of Artificial Sequence: Synthetic oligonucleotide
  Target: ATXN2; (+) strand; PAM type: YTN; PAM sequence: CTG
caacctcgatcacccctcca

SEQ ID NO: 89861 - DNA, 20 bp, Artificial Sequence
  Description of Artificial Sequence: Synthetic oligonucleotide
  Target: ATXN2; (+) strand; PAM type: YTN; PAM sequence: CTC
gatcacccctccatcgccct

SEQ ID NO: 89862 - DNA, 20 bp, Artificial Sequence
  Description of Artificial Sequence: Synthetic oligonucleotide
  Target: ATXN2; (+) strand; PAM type: YTN; PAM sequence: CTC
catcgccctccaaacccccg

SEQ ID NO: 89863 - DNA, 20 bp, Artificial Sequence
  Description of Artificial Sequence: Synthetic oligonucleotide
  Target: ATXN2; (+) strand; PAM type: YTN; PAM sequence: CTC
caaacccccgcaacctcgct

SEQ ID NO: 89864 - DNA, 20 bp, Artificial Sequence
  Description of Artificial Sequence: Synthetic oligonucleotide
  Target: ATXN2; (+) strand; PAM type: YTN; PAM sequence: CTC
gctcaagcgattgtcccacc

SEQ ID NO: 89865 - DNA, 20 bp, Artificial Sequence
  Description of Artificial Sequence: Synthetic oligonucleotide
  Target: ATXN2; (+) strand; PAM type: YTN; PAM sequence: CTC
aagcgattgtcccacctcag

SEQ ID NO: 89866 - DNA, 20 bp, Artificial Sequence
  Description of Artificial Sequence: Synthetic oligonucleotide
  Target: ATXN2; (+) strand; PAM type: YTN; PAM sequence: TTG
tcccacctcagccccccaag

SEQ ID NO: 89867 - DNA, 20 bp, Artificial Sequence
  Description of Artificial Sequence: Synthetic oligonucleotide
  Target: ATXN2; (+) strand; PAM type: YTN; PAM sequence: CTC
agccccccaagtagctggga

SEQ ID NO: 89868 - DNA, 20 bp, Artificial Sequence
  Description of Artificial Sequence: Synthetic oligonucleotide
  Target: ATXN2; (+) strand; PAM type: YTN; PAM sequence: CTG
ggaccataggaatgcgcttc

SEQ ID NO: 89869 - DNA, 20 bp, Artificial Sequence
  Description of Artificial Sequence: Synthetic oligonucleotide
  Target: ATXN2; (+) strand; PAM type: YTN; PAM sequence: CTT
ctgtgcctggctaatttttc

SEQ ID NO: 89870 - DNA, 20 bp, Artificial Sequence
  Description of Artificial Sequence: Synthetic oligonucleotide
  Target: ATXN2; (+) strand; PAM type: YTN; PAM sequence: TTC
tgtgcctggctaatttttct

SEQ ID NO: 89871 - DNA, 20 bp, Artificial Sequence
  Description of Artificial Sequence: Synthetic oligonucleotide
  Target: ATXN2; (+) strand; PAM type: YTN; PAM sequence: CTG
tgcctggctaatttttcttt

SEQ ID NO: 89872 - DNA, 20 bp, Artificial Sequence
  Description of Artificial Sequence: Synthetic oligonucleotide
  Target: ATXN2; (+) strand; PAM type: YTN; PAM sequence: CTG
gctaatttttcttttttctt

SEQ ID NO: 89873 - DNA, 20 bp, Artificial Sequence
  Description of Artificial Sequence: Synthetic oligonucleotide
  Target: ATXN2; (+) strand; PAM type: YTN; PAM sequence: CTA
atttttcttttttctttttt

SEQ ID NO: 89874 - DNA, 20 bp, Artificial Sequence
  Description of Artificial Sequence: Synthetic oligonucleotide
  Target: ATXN2; (+) strand; PAM type: YTN; PAM sequence: TTT
ttcttttttctttttttttt

SEQ ID NO: 89875 - DNA, 20 bp, Artificial Sequence
  Description of Artificial Sequence: Synthetic oligonucleotide
  Target: ATXN2; (+) strand; PAM type: YTN; PAM sequence: TTT
tcttttttcttttttttttt

SEQ ID NO: 89876 - DNA, 20 bp, Artificial Sequence
  Description of Artificial Sequence: Synthetic oligonucleotide
  Target: ATXN2; (+) strand; PAM type: YTN; PAM sequence: TTT
cttttttctttttttttttt

SEQ ID NO: 89877 - DNA, 20 bp, Artificial Sequence
  Description of Artificial Sequence: Synthetic oligonucleotide
  Target: ATXN2; (+) strand; PAM type: YTN; PAM sequence: TTC
ttttttcttttttttttttg

SEQ ID NO: 89878 - DNA, 20 bp, Artificial Sequence
  Description of Artificial Sequence: Synthetic oligonucleotide
  Target: ATXN2; (+) strand; PAM type: YTN; PAM sequence: CTT
ttttcttttttttttttgca

SEQ ID NO: 89879 - DNA, 20 bp, Artificial Sequence
  Description of Artificial Sequence: Synthetic oligonucleotide
  Target: ATXN2; (+) strand; PAM type: YTN; PAM sequence: TTT
tttcttttttttttttgcaa

SEQ ID NO: 89880 - DNA, 20 bp, Artificial Sequence
  Description of Artificial Sequence: Synthetic oligonucleotide
  Target: ATXN2; (+) strand; PAM type: YTN; PAM sequence: TTT
ttcttttttttttttgcaaa

SEQ ID NO: 89881 - DNA, 20 bp, Artificial Sequence
  Description of Artificial Sequence: Synthetic oligonucleotide
  Target: ATXN2; (+) strand; PAM type: YTN; PAM sequence: TTT
tcttttttttttttgcaaag

SEQ ID NO: 89882 - DNA, 20 bp, Artificial Sequence
  Description of Artificial Sequence: Synthetic oligonucleotide
  Target: ATXN2; (+) strand; PAM type: YTN; PAM sequence: TTT
cttttttttttttgcaaaga

SEQ ID NO: 89883 - DNA, 20 bp, Artificial Sequence
  Description of Artificial Sequence: Synthetic oligonucleotide
  Target: ATXN2; (+) strand; PAM type: YTN; PAM sequence: TTC
ttttttttttttgcaaagac

SEQ ID NO: 89884 - DNA, 20 bp, Artificial Sequence
  Description of Artificial Sequence: Synthetic oligonucleotide
  Target: ATXN2; (+) strand; PAM type: YTN; PAM sequence: CTT
ttttttttttgcaaagacag

SEQ ID NO: 89885 - DNA, 20 bp, Artificial Sequence
  Description of Artificial Sequence: Synthetic oligonucleotide
  Target: ATXN2; (+) strand; PAM type: YTN; PAM sequence: TTT
tttttttttgcaaagacagg

SEQ ID NO: 89886 - DNA, 20 bp, Artificial Sequence
  Description of Artificial Sequence: Synthetic oligonucleotide
  Target: ATXN2; (+) strand; PAM type: YTN; PAM sequence: TTT
ttttttttgcaaagacaggg

SEQ ID NO: 89887 - DNA, 20 bp, Artificial Sequence
  Description of Artificial Sequence: Synthetic oligonucleotide
  Target: ATXN2; (+) strand; PAM type: YTN; PAM sequence: TTT
tttttttgcaaagacagggt

SEQ ID NO: 89888 - DNA, 20 bp, Artificial Sequence
  Description of Artificial Sequence: Synthetic oligonucleotide
  Target: ATXN2; (+) strand; PAM type: YTN; PAM sequence: TTT
ttttttgcaaagacagggtt

SEQ ID NO: 89889 - DNA, 20 bp, Artificial Sequence
  Description of Artificial Sequence: Synthetic oligonucleotide
  Target: ATXN2; (+) strand; PAM type: YTN; PAM sequence: TTT
tttttgcaaagacagggttt

SEQ ID NO: 89890 - DNA, 20 bp, Artificial Sequence
  Description of Artificial Sequence: Synthetic oligonucleotide
  Target: ATXN2; (+) strand; PAM type: YTN; PAM sequence: TTT
ttttgcaaagacagggtttt

SEQ ID NO: 89891 - DNA, 20 bp, Artificial Sequence
  Description of Artificial Sequence: Synthetic oligonucleotide
  Target: ATXN2; (+) strand; PAM type: YTN; PAM sequence: TTT
tttgcaaagacagggttttg

SEQ ID NO: 89892 - DNA, 20 bp, Artificial Sequence
  Description of Artificial Sequence: Synthetic oligonucleotide
  Target: ATXN2; (+) strand; PAM type: YTN; PAM sequence: TTT
ttgcaaagacagggttttgt

SEQ ID NO: 89893 - DNA, 20 bp, Artificial Sequence
  Description of Artificial Sequence: Synthetic oligonucleotide
  Target: ATXN2; (+) strand; PAM type: YTN; PAM sequence: TTT
tgcaaagacagggttttgtc

SEQ ID NO: 89894 - DNA, 20 bp, Artificial Sequence
  Description of Artificial Sequence: Synthetic oligonucleotide
  Target: ATXN2; (+) strand; PAM type: YTN; PAM sequence: TTT
gcaaagacagggttttgtca

SEQ ID NO: 89895 - DNA, 20 bp, Artificial Sequence
  Description of Artificial Sequence: Synthetic oligonucleotide
  Target: ATXN2; (+) strand; PAM type: YTN; PAM sequence: TTG
caaagacagggttttgtcat

SEQ ID NO: 89896 - DNA, 20 bp, Artificial Sequence
  Description of Artificial Sequence: Synthetic oligonucleotide
  Target: ATXN2; (+) strand; PAM type: YTN; PAM sequence: TTT
tgtcatgttcctcaggctgg

SEQ ID NO: 89897 - DNA, 20 bp, Artificial Sequence
  Description of Artificial Sequence: Synthetic oligonucleotide
  Target: ATXN2; (+) strand; PAM type: YTN; PAM sequence: TTT
gtcatgttcctcaggctggt

SEQ ID NO: 89898 - DNA, 20 bp, Artificial Sequence
  Description of Artificial Sequence: Synthetic oligonucleotide
  Target: ATXN2; (+) strand; PAM type: YTN; PAM sequence: TTG
tcatgttcctcaggctggtc

SEQ ID NO: 89899 - DNA, 20 bp, Artificial Sequence
  Description of Artificial Sequence: Synthetic oligonucleotide
  Target: ATXN2; (+) strand; PAM type: YTN; PAM sequence: TTC
ctcaggctggtctcaaactg

SEQ ID NO: 89900 - DNA, 20 bp, Artificial Sequence
  Description of Artificial Sequence: Synthetic oligonucleotide
  Target: ATXN2; (+) strand; PAM type: YTN; PAM sequence: CTC
aggctggtctcaaactgttg

SEQ ID NO: 89901 - DNA, 20 bp, Artificial Sequence
  Description of Artificial Sequence: Synthetic oligonucleotide
  Target: ATXN2; (+) strand; PAM type: YTN; PAM sequence: CTG
gtctcaaactgttggctcaa

SEQ ID NO: 89902 - DNA, 20 bp, Artificial Sequence
  Description of Artificial Sequence: Synthetic oligonucleotide
  Target: ATXN2; (+) strand; PAM type: YTN; PAM sequence: CTC
aaactgttggctcaaatgat

SEQ ID NO: 89903 - DNA, 20 bp, Artificial Sequence
  Description of Artificial Sequence: Synthetic oligonucleotide
  Target: ATXN2; (+) strand; PAM type: YTN; PAM sequence: CTG
ttggctcaaatgatccatcc

SEQ ID NO: 89904 - DNA, 20 bp, Artificial Sequence
  Description of Artificial Sequence: Synthetic oligonucleotide
  Target: ATXN2; (+) strand; PAM type: YTN; PAM sequence: TTG
gctcaaatgatccatccagg

SEQ ID NO: 89905 - DNA, 20 bp, Artificial Sequence
  Description of Artificial Sequence: Synthetic oligonucleotide
  Target: ATXN2; (+) strand; PAM type: YTN; PAM sequence: CTC
aaatgatccatccaggttgg

SEQ ID NO: 89906 - DNA, 20 bp, Artificial Sequence
  Description of Artificial Sequence: Synthetic oligonucleotide
  Target: ATXN2; (+) strand; PAM type: YTN; PAM sequence: TTG
gcctcccaaagtgctggaat

SEQ ID NO: 89907 - DNA, 20 bp, Artificial Sequence
  Description of Artificial Sequence: Synthetic oligonucleotide
  Target: ATXN2; (+) strand; PAM type: YTN; PAM sequence: CTC
ccaaagtgctggaattacag

SEQ ID NO: 89908 - DNA, 20 bp, Artificial Sequence
  Description of Artificial Sequence: Synthetic oligonucleotide
  Target: ATXN2; (+) strand; PAM type: YTN; PAM sequence: CTG
gaattacaggcgtgagccag

SEQ ID NO: 89909 - DNA, 20 bp, Artificial Sequence
  Description of Artificial Sequence: Synthetic oligonucleotide
  Target: ATXN2; (+) strand; PAM type: YTN; PAM sequence: TTA
caggcgtgagccagtgcacc

SEQ ID NO: 89910 - DNA, 20 bp, Artificial Sequence
  Description of Artificial Sequence: Synthetic oligonucleotide
  Target: ATXN2; (+) strand; PAM type: YTN; PAM sequence: TTG
agacaaaaagaaattattag

SEQ ID NO: 89911 - DNA, 20 bp, Artificial Sequence
  Description of Artificial Sequence: Synthetic oligonucleotide
  Target: ATXN2; (+) strand; PAM type: YTN; PAM sequence: TTA
ttaggacaggcgcagtggct

SEQ ID NO: 89912 - DNA, 20 bp, Artificial Sequence
  Description of Artificial Sequence: Synthetic oligonucleotide
  Target: ATXN2; (+) strand; PAM type: YTN; PAM sequence: TTA
ggacaggcgcagtggctcac

SEQ ID NO: 89913 - DNA, 20 bp, Artificial Sequence
  Description of Artificial Sequence: Synthetic oligonucleotide
  Target: ATXN2; (+) strand; PAM type: YTN; PAM sequence: CTC
acacctgtaatctcagcact

SEQ ID NO: 89914 - DNA, 20 bp, Artificial Sequence
  Description of Artificial Sequence: Synthetic oligonucleotide
  Target: ATXN2; (+) strand; PAM type: YTN; PAM sequence: CTG
taatctcagcactttgggag

SEQ ID NO: 89915 - DNA, 20 bp, Artificial Sequence
  Description of Artificial Sequence: Synthetic oligonucleotide
  Target: ATXN2; (+) strand; PAM type: YTN; PAM sequence: CTC
agcactttgggaggccgagg

SEQ ID NO: 89916 - DNA, 20 bp, Artificial Sequence
  Description of Artificial Sequence: Synthetic oligonucleotide
  Target: ATXN2; (+) strand; PAM type: YTN; PAM sequence: CTT
tgggaggccgaggcaggtag

SEQ ID NO: 89917 - DNA, 20 bp, Artificial Sequence
  Description of Artificial Sequence: Synthetic oligonucleotide
  Target: ATXN2; (+) strand; PAM type: YTN; PAM sequence: TTT
gggaggccgaggcaggtaga

SEQ ID NO: 89918 - DNA, 20 bp, Artificial Sequence
  Description of Artificial Sequence: Synthetic oligonucleotide
  Target: ATXN2; (+) strand; PAM type: YTN; PAM sequence: TTG
ggaggccgaggcaggtagat

SEQ ID NO: 89919 - DNA, 20 bp, Artificial Sequence
  Description of Artificial Sequence: Synthetic oligonucleotide
  Target: ATXN2; (+) strand; PAM type: YTN; PAM sequence: CTG
aggtcaggagttagagacca

SEQ ID NO: 89920 - DNA, 20 bp, Artificial Sequence
  Description of Artificial Sequence: Synthetic oligonucleotide
  Target: ATXN2; (+) strand; PAM type: YTN; PAM sequence: TTA
gagaccagcatgaccaacat

SEQ ID NO: 89921 - DNA, 20 bp, Artificial Sequence
  Description of Artificial Sequence: Synthetic oligonucleotide
  Target: ATXN2; (+) strand; PAM type: YTN; PAM sequence: CTA
cactaaaaatacaaaattag

SEQ ID NO: 89922 - DNA, 20 bp, Artificial Sequence
  Description of Artificial Sequence: Synthetic oligonucleotide
  Target: ATXN2; (+) strand; PAM type: YTN; PAM sequence: CTA
aaaatacaaaattagccagg

SEQ ID NO: 89923 - DNA, 20 bp, Artificial Sequence
  Description of Artificial Sequence: Synthetic oligonucleotide
  Target: ATXN2; (+) strand; PAM type: YTN; PAM sequence: TTA
gccaggcatggtggcgcatg

SEQ ID NO: 89924 - DNA, 20 bp, Artificial Sequence
  Description of Artificial Sequence: Synthetic oligonucleotide
  Target: ATXN2; (+) strand; PAM type: YTN; PAM sequence: CTG
taatcccagctacttgggag

SEQ ID NO: 89925 - DNA, 20 bp, Artificial Sequence
  Description of Artificial Sequence: Synthetic oligonucleotide
  Target: ATXN2; (+) strand; PAM type: YTN; PAM sequence: CTA
cttgggaggctaaggcgtaa

SEQ ID NO: 89926 - DNA, 20 bp, Artificial Sequence
  Description of Artificial Sequence: Synthetic oligonucleotide
  Target: ATXN2; (+) strand; PAM type: YTN; PAM sequence: CTT
gggaggctaaggcgtaagaa

SEQ ID NO: 89927 - DNA, 20 bp, Artificial Sequence
  Description of Artificial Sequence: Synthetic oligonucleotide
  Target: ATXN2; (+) strand; PAM type: YTN; PAM sequence: TTG
ggaggctaaggcgtaagaat

SEQ ID NO: 89928 - DNA, 20 bp, Artificial Sequence
  Description of Artificial Sequence: Synthetic oligonucleotide
  Target: ATXN2; (+) strand; PAM type: YTN; PAM sequence: CTA
aggcgtaagaattgcttgaa

SEQ ID NO: 89929 - DNA, 20 bp, Artificial Sequence
  Description of Artificial Sequence: Synthetic oligonucleotide
  Target: ATXN2; (+) strand; PAM type: YTN; PAM sequence: TTG
cttgaacctgggaggcggag

SEQ ID NO: 89930 - DNA, 20 bp, Artificial Sequence
  Description of Artificial Sequence: Synthetic oligonucleotide
  Target: ATXN2; (+) strand; PAM type: YTN; PAM sequence: CTT
gaacctgggaggcggaggtt

SEQ ID NO: 89931 - DNA, 20 bp, Artificial Sequence
  Description of Artificial Sequence: Synthetic oligonucleotide
  Target: ATXN2; (+) strand; PAM type: YTN; PAM sequence: TTG
aacctgggaggcggaggttg

SEQ ID NO: 89932 - DNA, 20 bp, Artificial Sequence
  Description of Artificial Sequence: Synthetic oligonucleotide
  Target: ATXN2; (+) strand; PAM type: YTN; PAM sequence: CTG
ggaggcggaggttgcagtga

SEQ ID NO: 89933 - DNA, 20 bp, Artificial Sequence
  Description of Artificial Sequence: Synthetic oligonucleotide
  Target: ATXN2; (+) strand; PAM type: YTN; PAM sequence: TTG
cagtgagccaagatggcacc

SEQ ID NO: 89934 - DNA, 20 bp, Artificial Sequence
  Description of Artificial Sequence: Synthetic oligonucleotide
  Target: ATXN2; (+) strand; PAM type: YTN; PAM sequence: CTG
cgttccagcctgggcaatag

SEQ ID NO: 89935 - DNA, 20 bp, Artificial Sequence
  Description of Artificial Sequence: Synthetic oligonucleotide
  Target: ATXN2; (+) strand; PAM type: YTN; PAM sequence: TTC
cagcctgggcaatagagtga

SEQ ID NO: 89936 - DNA, 20 bp, Artificial Sequence
  Description of Artificial Sequence: Synthetic oligonucleotide
  Target: ATXN2; (+) strand; PAM type: YTN; PAM sequence: CTG
ggcaatagagtgagattcca

SEQ ID NO: 89937 - DNA, 20 bp, Artificial Sequence
  Description of Artificial Sequence: Synthetic oligonucleotide
  Target: ATXN2; (+) strand; PAM type: YTN; PAM sequence: TTC
catcaaataaataaataaat

SEQ ID NO: 89938 - DNA, 20 bp, Artificial Sequence
  Description of Artificial Sequence: Synthetic oligonucleotide
  Target: ATXN2; (+) strand; PAM type: YTN; PAM sequence: TTT
gaaccatttactaaaaaaag

SEQ ID NO: 89939 - DNA, 20 bp, Artificial Sequence
  Description of Artificial Sequence: Synthetic oligonucleotide
  Target: ATXN2; (+) strand; PAM type: YTN; PAM sequence: TTG
aaccatttactaaaaaaagg

SEQ ID NO: 89940 - DNA, 20 bp, Artificial Sequence
  Description of Artificial Sequence: Synthetic oligonucleotide
  Target: ATXN2; (+) strand; PAM type: YTN; PAM sequence: TTT
actaaaaaaaggttgacagc

SEQ ID NO: 89941 - DNA, 20 bp, Artificial Sequence
  Description of Artificial Sequence: Synthetic oligonucleotide
  Target: ATXN2; (+) strand; PAM type: YTN; PAM sequence: TTA
ctaaaaaaaggttgacagct

SEQ ID NO: 89942 - DNA, 20 bp, Artificial Sequence
  Description of Artificial Sequence: Synthetic oligonucleotide
  Target: ATXN2; (+) strand; PAM type: YTN; PAM sequence: CTA
aaaaaaggttgacagctgaa

SEQ ID NO: 89943 - DNA, 20 bp, Artificial Sequence
  Description of Artificial Sequence: Synthetic oligonucleotide
  Target: ATXN2; (+) strand; PAM type: YTN; PAM sequence: TTG
acagctgaaaacaaacacac

SEQ ID NO: 89944 - DNA, 20 bp, Artificial Sequence
  Description of Artificial Sequence: Synthetic oligonucleotide
  Target: ATXN2; (+) strand; PAM type: YTN; PAM sequence: CTG
aaaacaaacacacacatgat

SEQ ID NO: 89945 - DNA, 20 bp, Artificial Sequence
  Description of Artificial Sequence: Synthetic oligonucleotide
  Target: ATXN2; (+) strand; PAM type: YTN; PAM sequence: CTC
ctggatcagtcatcatcaga

SEQ ID NO: 89946 - DNA, 20 bp, Artificial Sequence
  Description of Artificial Sequence: Synthetic oligonucleotide
  Target: ATXN2; (+) strand; PAM type: YTN; PAM sequence: CTG
gatcagtcatcatcagagaa

SEQ ID NO: 89947 - DNA, 20 bp, Artificial Sequence
  Description of Artificial Sequence: Synthetic oligonucleotide
  Target: ATXN2; (+) strand; PAM type: YTN; PAM sequence: TTT
aagatcacaatgagatacca

SEQ ID NO: 89948 - DNA, 20 bp, Artificial Sequence
  Description of Artificial Sequence: Synthetic oligonucleotide
  Target: ATXN2; (+) strand; PAM type: YTN; PAM sequence: TTA
agatcacaatgagataccat

SEQ ID NO: 89949 - DNA, 20 bp, Artificial Sequence
  Description of Artificial Sequence: Synthetic oligonucleotide
  Target: ATXN2; (+) strand; PAM type: YTN; PAM sequence: TTA
gacctgttgaaattaaaaag

SEQ ID NO: 89950 - DNA, 20 bp, Artificial Sequence
  Description of Artificial Sequence: Synthetic oligonucleotide
  Target: ATXN2; (+) strand; PAM type: YTN; PAM sequence: CTG
ttgaaattaaaaagataaca

SEQ ID NO: 89951 - DNA, 20 bp, Artificial Sequence
  Description of Artificial Sequence: Synthetic oligonucleotide
  Target: ATXN2; (+) strand; PAM type: YTN; PAM sequence: TTG
aaattaaaaagataacacaa

SEQ ID NO: 89952 - DNA, 20 bp, Artificial Sequence
  Description of Artificial Sequence: Synthetic oligonucleotide
  Target: ATXN2; (+) strand; PAM type: YTN; PAM sequence: TTA
aaaagataacacaataccaa

SEQ ID NO: 89953 - DNA, 20 bp, Artificial Sequence
  Description of Artificial Sequence: Synthetic oligonucleotide
  Target: ATXN2; (+) strand; PAM type: YTN; PAM sequence: TTG
gcaaggatgcagaacacatg

SEQ ID NO: 89954 - DNA, 20 bp, Artificial Sequence
  Description of Artificial Sequence: Synthetic oligonucleotide
  Target: ATXN2; (+) strand; PAM type: YTN; PAM sequence: CTA
cacatgtacctgatcagttg

SEQ ID NO: 89955 - DNA, 20 bp, Artificial Sequence
  Description of Artificial Sequence: Synthetic oligonucleotide
  Target: ATXN2; (+) strand; PAM type: YTN; PAM sequence: CTG
atcagttggaatgtaaaatg

SEQ ID NO: 89956 - DNA, 20 bp, Artificial Sequence
  Description of Artificial Sequence: Synthetic oligonucleotide
  Target: ATXN2; (+) strand; PAM type: YTN; PAM sequence: TTG
gaatgtaaaatgacacaatc

SEQ ID NO: 89957 - DNA, 20 bp, Artificial Sequence
  Description of Artificial Sequence: Synthetic oligonucleotide
  Target: ATXN2; (+) strand; PAM type: YTN; PAM sequence: CTT
tagaagattgctagtttctt

SEQ ID NO: 89958 - DNA, 20 bp, Artificial Sequence
  Description of Artificial Sequence: Synthetic oligonucleotide
  Target: ATXN2; (+) strand; PAM type: YTN; PAM sequence: TTT
agaagattgctagtttctta

SEQ ID NO: 89959 - DNA, 20 bp, Artificial Sequence
  Description of Artificial Sequence: Synthetic oligonucleotide
  Target: ATXN2; (+) strand; PAM type: YTN; PAM sequence: TTA
gaagattgctagtttcttat

SEQ ID NO: 89960 - DNA, 20 bp, Artificial Sequence
  Description of Artificial Sequence: Synthetic oligonucleotide
  Target: ATXN2; (+) strand; PAM type: YTN; PAM sequence: TTG
ctagtttcttattaattgaa

SEQ ID NO: 89961 - DNA, 20 bp, Artificial Sequence
  Description of Artificial Sequence: Synthetic oligonucleotide
  Target: ATXN2; (+) strand; PAM type: YTN; PAM sequence: CTA
gtttcttattaattgaaata

SEQ ID NO: 89962 - DNA, 20 bp, Artificial Sequence
  Description of Artificial Sequence: Synthetic oligonucleotide
  Target: ATXN2; (+) strand; PAM type: YTN; PAM sequence: TTT
cttattaattgaaatatgta

SEQ ID NO: 89963 - DNA, 20 bp, Artificial Sequence
  Description of Artificial Sequence: Synthetic oligonucleotide
  Target: ATXN2; (+) strand; PAM type: YTN; PAM sequence: TTC
ttattaattgaaatatgtat

SEQ ID NO: 89964 - DNA, 20 bp, Artificial Sequence
  Description of Artificial Sequence: Synthetic oligonucleotide
  Target: ATXN2; (+) strand; PAM type: YTN; PAM sequence: CTT
attaattgaaatatgtattt

SEQ ID NO: 89965 - DNA, 20 bp, Artificial Sequence
  Description of Artificial Sequence: Synthetic oligonucleotide
  Target: ATXN2; (+) strand; PAM type: YTN; PAM sequence: TTA
ttaattgaaatatgtattta

SEQ ID NO: 89966 - DNA, 20 bp, Artificial Sequence
  Description of Artificial Sequence: Synthetic oligonucleotide
  Target: ATXN2; (+) strand; PAM type: YTN; PAM sequence: TTA
attgaaatatgtatttacca

SEQ ID NO: 89967 - DNA, 20 bp, Artificial Sequence
  Description of Artificial Sequence: Synthetic oligonucleotide
  Target: ATXN2; (+) strand; PAM type: YTN; PAM sequence: TTG
aaatatgtatttaccaggca

SEQ ID NO: 89968 - DNA, 20 bp, Artificial Sequence
  Description of Artificial Sequence: Synthetic oligonucleotide
  Target: ATXN2; (+) strand; PAM type: YTN; PAM sequence: TTT
accaggcagtgtgtggtggc

SEQ ID NO: 89969 - DNA, 20 bp, Artificial Sequence
  Description of Artificial Sequence: Synthetic oligonucleotide
  Target: ATXN2; (+) strand; PAM type: YTN; PAM sequence: TTA
ccaggcagtgtgtggtggct

SEQ ID NO: 89970 - DNA, 20 bp, Artificial Sequence
  Description of Artificial Sequence: Synthetic oligonucleotide
  Target: ATXN2; (+) strand; PAM type: YTN; PAM sequence: CTC
acatctgtaatcccaacact

SEQ ID NO: 89971 - DNA, 20 bp, Artificial Sequence
  Description of Artificial Sequence: Synthetic oligonucleotide
  Target: ATXN2; (+) strand; PAM type: YTN; PAM sequence: CTG
taatcccaacactttgggag

SEQ ID NO: 89972 - DNA, 20 bp, Artificial Sequence
  Description of Artificial Sequence: Synthetic oligonucleotide
  Target: ATXN2; (+) strand; PAM type: YTN; PAM sequence: CTT
tgggaggctggggcgggtgg

SEQ ID NO: 89973 - DNA, 20 bp, Artificial Sequence
  Description of Artificial Sequence: Synthetic oligonucleotide
  Target: ATXN2; (+) strand; PAM type: YTN; PAM sequence: TTT
gggaggctggggcgggtgga

SEQ ID NO: 89974 - DNA, 20 bp, Artificial Sequence
  Description of Artificial Sequence: Synthetic oligonucleotide
  Target: ATXN2; (+) strand; PAM type: YTN; PAM sequence: TTG
ggaggctggggcgggtggat

SEQ ID NO: 89975 - DNA, 20 bp, Artificial Sequence
  Description of Artificial Sequence: Synthetic oligonucleotide
  Target: ATXN2; (+) strand; PAM type: YTN; PAM sequence: CTG
gggcgggtggatcacttgtg

SEQ ID NO: 89976 - DNA, 20 bp, Artificial Sequence
  Description of Artificial Sequence: Synthetic oligonucleotide
  Target: ATXN2; (+) strand; PAM type: YTN; PAM sequence: CTT
gtggtcaggagttcgagacc

SEQ ID NO: 89977 - DNA, 20 bp, Artificial Sequence
  Description of Artificial Sequence: Synthetic oligonucleotide
  Target: ATXN2; (+) strand; PAM type: YTN; PAM sequence: TTG
tggtcaggagttcgagacca

SEQ ID NO: 89978 - DNA, 20 bp, Artificial Sequence
  Description of Artificial Sequence: Synthetic oligonucleotide
  Target: ATXN2; (+) strand; PAM type: YTN; PAM sequence: TTC
gagaccagcctggccaacgt

SEQ ID NO: 89979 - DNA, 20 bp, Artificial Sequence
  Description of Artificial Sequence: Synthetic oligonucleotide
  Target: ATXN2; (+) strand; PAM type: YTN; PAM sequence: CTG
gccaacgtggtgaaaccccg

SEQ ID NO: 89980 - DNA, 20 bp, Artificial Sequence
  Description of Artificial Sequence: Synthetic oligonucleotide
  Target: ATXN2; (+) strand; PAM type: YTN; PAM sequence: CTC
tactaaaaatacaaaaaaat

SEQ ID NO: 89981 - DNA, 20 bp, Artificial Sequence
  Description of Artificial Sequence: Synthetic oligonucleotide
  Target: ATXN2; (+) strand; PAM type: YTN; PAM sequence: CTA
ctaaaaatacaaaaaaatta

SEQ ID NO: 89982 - DNA, 20 bp, Artificial Sequence
  Description of Artificial Sequence: Synthetic oligonucleotide
  Target: ATXN2; (+) strand; PAM type: YTN; PAM sequence: CTA
aaaatacaaaaaaattagcc

SEQ ID NO: 89983 - DNA, 20 bp, Artificial Sequence
  Description of Artificial Sequence: Synthetic oligonucleotide
  Target: ATXN2; (+) strand; PAM type: YTN; PAM sequence: TTA
gccaggcatggtggtgcgcg

SEQ ID NO: 89984 - DNA, 20 bp, Artificial Sequence
  Description of Artificial Sequence: Synthetic oligonucleotide
  Target: ATXN2; (+) strand; PAM type: YTN; PAM sequence: CTG
taatcccagctacttgggag

SEQ ID NO: 89985 - DNA, 20 bp, Artificial Sequence
  Description of Artificial Sequence: Synthetic oligonucleotide
  Target: ATXN2; (+) strand; PAM type: YTN; PAM sequence: CTA
cttgggaggctgaggcggga

SEQ ID NO: 89986 - DNA, 20 bp, Artificial Sequence
  Description of Artificial Sequence: Synthetic oligonucleotide
  Target: ATXN2; (+) strand; PAM type: YTN; PAM sequence: CTT
gggaggctgaggcgggagaa

SEQ ID NO: 89987 - DNA, 20 bp, Artificial Sequence
  Description of Artificial Sequence: Synthetic oligonucleotide
  Target: ATXN2; (+) strand; PAM type: YTN; PAM sequence: TTG
ggaggctgaggcgggagaat

SEQ ID NO: 89988 - DNA, 20 bp, Artificial Sequence
  Description of Artificial Sequence: Synthetic oligonucleotide
  Target: ATXN2; (+) strand; PAM type: YTN; PAM sequence: CTG
aggcgggagaattgcttgaa

SEQ ID NO: 89989 - DNA, 20 bp, Artificial Sequence
  Description of Artificial Sequence: Synthetic oligonucleotide
  Target: ATXN2; (+) strand; PAM type: YTN; PAM sequence: TTG
cttgaacccgggacagggag

SEQ ID NO: 89990 - DNA, 20 bp, Artificial Sequence
  Description of Artificial Sequence: Synthetic oligonucleotide
  Target: ATXN2; (+) strand; PAM type: YTN; PAM sequence: CTT
gaacccgggacagggaggtt

SEQ ID NO: 89991 - DNA, 20 bp, Artificial Sequence
  Description of Artificial Sequence: Synthetic oligonucleotide
  Target: ATXN2; (+) strand; PAM type: YTN; PAM sequence: TTG
aacccgggacagggaggttg

SEQ ID NO: 89992 - DNA, 20 bp, Artificial Sequence
  Description of Artificial Sequence: Synthetic oligonucleotide
  Target: ATXN2; (+) strand; PAM type: YTN; PAM sequence: TTG
ccatgagctgaaatcacgcc

SEQ ID NO: 89993 - DNA, 20 bp, Artificial Sequence
  Description of Artificial Sequence: Synthetic oligonucleotide
  Target: ATXN2; (+) strand; PAM type: YTN; PAM sequence: CTG
aaatcacgccactgaactcc

SEQ ID NO: 89994 - DNA, 20 bp, Artificial Sequence
  Description of Artificial Sequence: Synthetic oligonucleotide
  Target: ATXN2; (+) strand; PAM type: YTN; PAM sequence: CTG
aactccagcctgggcaacag

SEQ ID NO: 89995 - DNA, 20 bp, Artificial Sequence
  Description of Artificial Sequence: Synthetic oligonucleotide
  Target: ATXN2; (+) strand; PAM type: YTN; PAM sequence: CTC
cagcctgggcaacagagtga

SEQ ID NO: 89996 - DNA, 20 bp, Artificial Sequence
  Description of Artificial Sequence: Synthetic oligonucleotide
  Target: ATXN2; (+) strand; PAM type: YTN; PAM sequence: CTG
ggcaacagagtgagacttca

SEQ ID NO: 89997 - DNA, 20 bp, Artificial Sequence
  Description of Artificial Sequence: Synthetic oligonucleotide
  Target: ATXN2; (+) strand; PAM type: YTN; PAM sequence: CTT
catctcaaaaaaaataaata

SEQ ID NO: 89998 - DNA, 20 bp, Artificial Sequence
  Description of Artificial Sequence: Synthetic oligonucleotide
  Target: ATXN2; (+) strand; PAM type: YTN; PAM sequence: TTC
atctcaaaaaaaataaataa

SEQ ID NO: 89999 - DNA, 20 bp, Artificial Sequence
  Description of Artificial Sequence: Synthetic oligonucleotide
  Target: ATXN2; (+) strand; PAM type: YTN; PAM sequence: CTC
aaaaaaaataaataaataaa

SEQ ID NO: 90000 - DNA, 20 bp, Artificial Sequence
  Description of Artificial Sequence: Synthetic oligonucleotide
  Target: ATXN2; (+) strand; PAM type: YTN; PAM sequence: TTT
tttaaaaaaatgaaatatgc

SEQ ID NO: 90001 - DNA, 20 bp, Artificial Sequence
  Description of Artificial Sequence: Synthetic oligonucleotide
  Target: ATXN2; (+) strand; PAM type: YTN; PAM sequence: TTT
ttaaaaaaatgaaatatgca

SEQ ID NO: 90002 - DNA, 20 bp, Artificial Sequence
  Description of Artificial Sequence: Synthetic oligonucleotide
  Target: ATXN2; (+) strand; PAM type: YTN; PAM sequence: TTT
taaaaaaatgaaatatgcac

SEQ ID NO: 90003 - DNA, 20 bp, Artificial Sequence
  Description of Artificial Sequence: Synthetic oligonucleotide
  Target: ATXN2; (+) strand; PAM type: YTN; PAM sequence: TTT
aaaaaaatgaaatatgcact

SEQ ID NO: 90004 - DNA, 20 bp, Artificial Sequence
  Description of Artificial Sequence: Synthetic oligonucleotide
  Target: ATXN2; (+) strand; PAM type: YTN; PAM sequence: TTA
aaaaaatgaaatatgcactt

SEQ ID NO: 90005 - DNA, 20 bp, Artificial Sequence
  Description of Artificial Sequence: Synthetic oligonucleotide
  Target: ATXN2; (+) strand; PAM type: YTN; PAM sequence: CTT
accatacctcagcaattcca

SEQ ID NO: 90006 - DNA, 20 bp, Artificial Sequence
  Description of Artificial Sequence: Synthetic oligonucleotide
  Target: ATXN2; (+) strand; PAM type: YTN; PAM sequence: TTA
ccatacctcagcaattccaa

SEQ ID NO: 90007 - DNA, 20 bp, Artificial Sequence
  Description of Artificial Sequence: Synthetic oligonucleotide
  Target: ATXN2; (+) strand; PAM type: YTN; PAM sequence: CTC
agcaattccaattctaggta

SEQ ID NO: 90008 - DNA, 20 bp, Artificial Sequence
  Description of Artificial Sequence: Synthetic oligonucleotide
  Target: ATXN2; (+) strand; PAM type: YTN; PAM sequence: TTC
caattctaggtatttaacta

SEQ ID NO: 90009 - DNA, 20 bp, Artificial Sequence
  Description of Artificial Sequence: Synthetic oligonucleotide
  Target: ATXN2; (+) strand; PAM type: YTN; PAM sequence: TTC
taggtatttaactaaaagaa

SEQ ID NO: 90010 - DNA, 20 bp, Artificial Sequence
  Description of Artificial Sequence: Synthetic oligonucleotide
  Target: ATXN2; (+) strand; PAM type: YTN; PAM sequence: CTA
ggtatttaactaaaagaaat

SEQ ID NO: 90011 - DNA, 20 bp, Artificial Sequence
  Description of Artificial Sequence: Synthetic oligonucleotide
  Target: ATXN2; (+) strand; PAM type: YTN; PAM sequence: TTT
aactaaaagaaataaaaaca

SEQ ID NO: 90012 - DNA, 20 bp, Artificial Sequence
  Description of Artificial Sequence: Synthetic oligonucleotide
  Target: ATXN2; (+) strand; PAM type: YTN; PAM sequence: TTA
actaaaagaaataaaaacac

SEQ ID NO: 90013 - DNA, 20 bp, Artificial Sequence
  Description of Artificial Sequence: Synthetic oligonucleotide
  Target: ATXN2; (+) strand; PAM type: YTN; PAM sequence: CTA
aaagaaataaaaacacaaac

SEQ ID NO: 90014 - DNA, 20 bp, Artificial Sequence
  Description of Artificial Sequence: Synthetic oligonucleotide
  Target: ATXN2; (+) strand; PAM type: YTN; PAM sequence: CTT
gtacacaaatgctcacagca

SEQ ID NO: 90015 - DNA, 20 bp, Artificial Sequence
  Description of Artificial Sequence: Synthetic oligonucleotide
  Target: ATXN2; (+) strand; PAM type: YTN; PAM sequence: TTG
tacacaaatgctcacagcag

SEQ ID NO: 90016 - DNA, 20 bp, Artificial Sequence
  Description of Artificial Sequence: Synthetic oligonucleotide
  Target: ATXN2; (+) strand; PAM type: YTN; PAM sequence: CTC
acagcagcttcattcataat

SEQ ID NO: 90017 - DNA, 20 bp, Artificial Sequence
  Description of Artificial Sequence: Synthetic oligonucleotide
  Target: ATXN2; (+) strand; PAM type: YTN; PAM sequence: CTT
cattcataatagccaaaagc

SEQ ID NO: 90018 - DNA, 20 bp, Artificial Sequence
  Description of Artificial Sequence: Synthetic oligonucleotide
  Target: ATXN2; (+) strand; PAM type: YTN; PAM sequence: TTC
attcataatagccaaaagct

SEQ ID NO: 90019 - DNA, 20 bp, Artificial Sequence
  Description of Artificial Sequence: Synthetic oligonucleotide
  Target: ATXN2; (+) strand; PAM type: YTN; PAM sequence: TTC
ataatagccaaaagctggca

SEQ ID NO: 90020 - DNA, 20 bp, Artificial Sequence
  Description of Artificial Sequence: Synthetic oligonucleotide
  Target: ATXN2; (+) strand; PAM type: YTN; PAM sequence: CTG
gcaataactcaaatgcccat

SEQ ID NO: 90021 - DNA, 20 bp, Artificial Sequence
  Description of Artificial Sequence: Synthetic oligonucleotide
  Target: ATXN2; (+) strand; PAM type: YTN; PAM sequence: CTC
aaatgcccatcgactagtaa

SEQ ID NO: 90022 - DNA, 20 bp, Artificial Sequence
  Description of Artificial Sequence: Synthetic oligonucleotide
  Target: ATXN2; (+) strand; PAM type: YTN; PAM sequence: CTA
gtaatgggtaaattaactgt

SEQ ID NO: 90023 - DNA, 20 bp, Artificial Sequence
  Description of Artificial Sequence: Synthetic oligonucleotide
  Target: ATXN2; (+) strand; PAM type: YTN; PAM sequence: TTA
actgtggtataatcataaaa

SEQ ID NO: 90024 - DNA, 20 bp, Artificial Sequence
  Description of Artificial Sequence: Synthetic oligonucleotide
  Target: ATXN2; (+) strand; PAM type: YTN; PAM sequence: CTG
tggtataatcataaaatgaa

SEQ ID NO: 90025 - DNA, 20 bp, Artificial Sequence
  Description of Artificial Sequence: Synthetic oligonucleotide
  Target: ATXN2; (+) strand; PAM type: YTN; PAM sequence: CTA
cccagcaataaaaaggaata

SEQ ID NO: 90026 - DNA, 20 bp, Artificial Sequence
  Description of Artificial Sequence: Synthetic oligonucleotide
  Target: ATXN2; (+) strand; PAM type: YTN; PAM sequence: CTG
gctgggcacggtgactcaca

SEQ ID NO: 90027 - DNA, 20 bp, Artificial Sequence
  Description of Artificial Sequence: Synthetic oligonucleotide
  Target: ATXN2; (+) strand; PAM type: YTN; PAM sequence: CTG
ggcacggtgactcacacctg

SEQ ID NO: 90028 - DNA, 20 bp, Artificial Sequence
  Description of Artificial Sequence: Synthetic oligonucleotide
  Target: ATXN2; (+) strand; PAM type: YTN; PAM sequence: CTC
acacctgtaatcccagcact

SEQ ID NO: 90029 - DNA, 20 bp, Artificial Sequence
  Description of Artificial Sequence: Synthetic oligonucleotide
  Target: ATXN2; (+) strand; PAM type: YTN; PAM sequence: CTG
taatcccagcactttgggag

SEQ ID NO: 90030 - DNA, 20 bp, Artificial Sequence
  Description of Artificial Sequence: Synthetic oligonucleotide
  Target: ATXN2; (+) strand; PAM type: YTN; PAM sequence: CTT
tgggaggccaaggcaggtgg

SEQ ID NO: 90031 - DNA, 20 bp, Artificial Sequence
  Description of Artificial Sequence: Synthetic oligonucleotide
  Target: ATXN2; (+) strand; PAM type: YTN; PAM sequence: TTT
gggaggccaaggcaggtgga

SEQ ID NO: 90032 - DNA, 20 bp, Artificial Sequence
  Description of Artificial Sequence: Synthetic oligonucleotide
  Target: ATXN2; (+) strand; PAM type: YTN; PAM sequence: TTG
ggaggccaaggcaggtggat

SEQ ID NO: 90033 - DNA, 20 bp, Artificial Sequence
  Description of Artificial Sequence: Synthetic oligonucleotide
  Target: ATXN2; (+) strand; PAM type: YTN; PAM sequence: TTT
ggggtcaggagtttgagacc

SEQ ID NO: 90034 - DNA, 20 bp, Artificial Sequence
  Description of Artificial Sequence: Synthetic oligonucleotide
  Target: ATXN2; (+) strand; PAM type: YTN; PAM sequence: TTG
gggtcaggagtttgagacca

SEQ ID NO: 90035 - DNA, 20 bp, Artificial Sequence
  Description of Artificial Sequence: Synthetic oligonucleotide
  Target: ATXN2; (+) strand; PAM type: YTN; PAM sequence: TTT
gagaccagcctggccaacat

SEQ ID NO: 90036 - DNA, 20 bp, Artificial Sequence
  Description of Artificial Sequence: Synthetic oligonucleotide
  Target: ATXN2; (+) strand; PAM type: YTN; PAM sequence: TTG
agaccagcctggccaacatg

SEQ ID NO: 90037 - DNA, 20 bp, Artificial Sequence
  Description of Artificial Sequence: Synthetic oligonucleotide
  Target: ATXN2; (+) strand; PAM type: YTN; PAM sequence: CTG
gccaacatggtgaaatcccg

SEQ ID NO: 90038 - DNA, 20 bp, Artificial Sequence
  Description of Artificial Sequence: Synthetic oligonucleotide
  Target: ATXN2; (+) strand; PAM type: YTN; PAM sequence: CTC
tgctaaaaaaaaaaaaaaaa

SEQ ID NO: 90039 - DNA, 20 bp, Artificial Sequence
  Description of Artificial Sequence: Synthetic oligonucleotide
  Target: ATXN2; (+) strand; PAM type: YTN; PAM sequence: CTG
ctaaaaaaaaaaaaaaaaaa

SEQ ID NO: 90040 - DNA, 20 bp, Artificial Sequence
  Description of Artificial Sequence: Synthetic oligonucleotide
  Target: ATXN2; (+) strand; PAM type: YTN; PAM sequence: CTA
aaaaaaaaaaaaaaaaaaaa

SEQ ID NO: 90041 - DNA, 20 bp, Artificial Sequence
  Description of Artificial Sequence: Synthetic oligonucleotide
  Target: ATXN2; (+) strand; PAM type: YTN; PAM sequence: TTA
gccaggtgtggtggcacgtg

SEQ ID NO: 90042 - DNA, 20 bp, Artificial Sequence
  Description of Artificial Sequence: Synthetic oligonucleotide
  Target: ATXN2; (+) strand; PAM type: YTN; PAM sequence: CTG
taatcccagctacttgggag

SEQ ID NO: 90043 - DNA, 20 bp, Artificial Sequence
  Description of Artificial Sequence: Synthetic oligonucleotide
  Target: ATXN2; (+) strand; PAM type: YTN; PAM sequence: CTA
cttgggaggctgaggcagtg

SEQ ID NO: 90044 - DNA, 20 bp, Artificial Sequence
  Description of Artificial Sequence: Synthetic oligonucleotide
  Target: ATXN2; (+) strand; PAM type: YTN; PAM sequence: CTT
gggaggctgaggcagtggaa

SEQ ID NO: 90045 - DNA, 20 bp, Artificial Sequence
  Description of Artificial Sequence: Synthetic oligonucleotide
  Target: ATXN2; (+) strand; PAM type: YTN; PAM sequence: TTG
ggaggctgaggcagtggaat

SEQ ID NO: 90046 - DNA, 20 bp, Artificial Sequence
  Description of Artificial Sequence: Synthetic oligonucleotide
  Target: ATXN2; (+) strand; PAM type: YTN; PAM sequence: CTG
aggcagtggaattgcagacc

SEQ ID NO: 90047 - DNA, 20 bp, Artificial Sequence
  Description of Artificial Sequence: Synthetic oligonucleotide
  Target: ATXN2; (+) strand; PAM type: YTN; PAM sequence: TTG
cagaccaattctgggacaca

SEQ ID NO: 90048 - DNA, 20 bp, Artificial Sequence
  Description of Artificial Sequence: Synthetic oligonucleotide
  Target: ATXN2; (+) strand; PAM type: YTN; PAM sequence: TTC
tgggacacagaacaagactc

SEQ ID NO: 90049 - DNA, 20 bp, Artificial Sequence
  Description of Artificial Sequence: Synthetic oligonucleotide
  Target: ATXN2; (+) strand; PAM type: YTN; PAM sequence: CTG
ggacacagaacaagactcca

SEQ ID NO: 90050 - DNA, 20 bp, Artificial Sequence
  Description of Artificial Sequence: Synthetic oligonucleotide
  Target: ATXN2; (+) strand; PAM type: YTN; PAM sequence: CTC
catctcaaaaacaaacaaac

SEQ ID NO: 90051 - DNA, 20 bp, Artificial Sequence
  Description of Artificial Sequence: Synthetic oligonucleotide
  Target: ATXN2; (+) strand; PAM type: YTN; PAM sequence: CTC
aaaaacaaacaaacaaacaa

SEQ ID NO: 90052 - DNA, 20 bp, Artificial Sequence
  Description of Artificial Sequence: Synthetic oligonucleotide
  Target: ATXN2; (+) strand; PAM type: YTN; PAM sequence: CTG
atactaacatgaaattcaaa

SEQ ID NO: 90053 - DNA, 20 bp, Artificial Sequence
  Description of Artificial Sequence: Synthetic oligonucleotide
  Target: ATXN2; (+) strand; PAM type: YTN; PAM sequence: CTA
acatgaaattcaaattacta

SEQ ID NO: 90054 - DNA, 20 bp, Artificial Sequence
  Description of Artificial Sequence: Synthetic oligonucleotide
  Target: ATXN2; (+) strand; PAM type: YTN; PAM sequence: TTC
aaattactacactgtttagg

SEQ ID NO: 90055 - DNA, 20 bp, Artificial Sequence
  Description of Artificial Sequence: Synthetic oligonucleotide
  Target: ATXN2; (+) strand; PAM type: YTN; PAM sequence: TTA
ctacactgtttaggacacac

SEQ ID NO: 90056 - DNA, 20 bp, Artificial Sequence
  Description of Artificial Sequence: Synthetic oligonucleotide
  Target: ATXN2; (+) strand; PAM type: YTN; PAM sequence: CTA
cactgtttaggacacacata

SEQ ID NO: 90057 - DNA, 20 bp, Artificial Sequence
  Description of Artificial Sequence: Synthetic oligonucleotide
  Target: ATXN2; (+) strand; PAM type: YTN; PAM sequence: CTG
tttaggacacacatatgaaa

SEQ ID NO: 90058 - DNA, 20 bp, Artificial Sequence
  Description of Artificial Sequence: Synthetic oligonucleotide
  Target: ATXN2; (+) strand; PAM type: YTN; PAM sequence: TTT
aggacacacatatgaaatta

SEQ ID NO: 90059 - DNA, 20 bp, Artificial Sequence
  Description of Artificial Sequence: Synthetic oligonucleotide
  Target: ATXN2; (+) strand; PAM type: YTN; PAM sequence: TTA
ggacacacatatgaaattat

SEQ ID NO: 90060 - DNA, 20 bp, Artificial Sequence
  Description of Artificial Sequence: Synthetic oligonucleotide
  Target: ATXN2; (+) strand; PAM type: YTN; PAM sequence: TTA
tataccaagcttgtccaact

SEQ ID NO: 90061 - DNA, 20 bp, Artificial Sequence
  Description of Artificial Sequence: Synthetic oligonucleotide
  Target: ATXN2; (+) strand; PAM type: YTN; PAM sequence: CTT
gtccaacttgcgtcctggga

SEQ ID NO: 90062 - DNA, 20 bp, Artificial Sequence
  Description of Artificial Sequence: Synthetic oligonucleotide
  Target: ATXN2; (+) strand; PAM type: YTN; PAM sequence: TTG
tccaacttgcgtcctgggac

SEQ ID NO: 90063 - DNA, 20 bp, Artificial Sequence
  Description of Artificial Sequence: Synthetic oligonucleotide
  Target: ATXN2; (+) strand; PAM type: YTN; PAM sequence: CTT
gcgtcctgggacggctttga

SEQ ID NO: 90064 - DNA, 20 bp, Artificial Sequence
  Description of Artificial Sequence: Synthetic oligonucleotide
  Target: ATXN2; (+) strand; PAM type: YTN; PAM sequence: TTG
cgtcctgggacggctttgaa

SEQ ID NO: 90065 - DNA, 20 bp, Artificial Sequence
  Description of Artificial Sequence: Synthetic oligonucleotide
  Target: ATXN2; (+) strand; PAM type: YTN; PAM sequence: CTG
ggacggctttgaatgtggcc

SEQ ID NO: 90066 - DNA, 20 bp, Artificial Sequence
  Description of Artificial Sequence: Synthetic oligonucleotide
  Target: ATXN2; (+) strand; PAM type: YTN; PAM sequence: CTT
tgaatgtggcccaacacaaa

SEQ ID NO: 90067 - DNA, 20 bp, Artificial Sequence
  Description of Artificial Sequence: Synthetic oligonucleotide
  Target: ATXN2; (+) strand; PAM type: YTN; PAM sequence: TTT
gaatgtggcccaacacaaat

SEQ ID NO: 90068 - DNA, 20 bp, Artificial Sequence
  Description of Artificial Sequence: Synthetic oligonucleotide
  Target: ATXN2; (+) strand; PAM type: YTN; PAM sequence: TTG
aatgtggcccaacacaaatt

SEQ ID NO: 90069 - DNA, 20 bp, Artificial Sequence
  Description of Artificial Sequence: Synthetic oligonucleotide
  Target: ATXN2; (+) strand; PAM type: YTN; PAM sequence: TTC
ataaactttcttaaaacatt

SEQ ID NO: 90070 - DNA, 20 bp, Artificial Sequence
  Description of Artificial Sequence: Synthetic oligonucleotide
  Target: ATXN2; (+) strand; PAM type: YTN; PAM sequence: CTT
tcttaaaacattataagttt

SEQ ID NO: 90071 - DNA, 20 bp, Artificial Sequence
  Description of Artificial Sequence: Synthetic oligonucleotide
  Target: ATXN2; (+) strand; PAM type: YTN; PAM sequence: TTT
cttaaaacattataagtttt

SEQ ID NO: 90072 - DNA, 20 bp, Artificial Sequence
  Description of Artificial Sequence: Synthetic oligonucleotide
  Target: ATXN2; (+) strand; PAM type: YTN; PAM sequence: TTC
ttaaaacattataagttttg

SEQ ID NO: 90073 - DNA, 20 bp, Artificial Sequence
  Description of Artificial Sequence: Synthetic oligonucleotide
  Target: ATXN2; (+) strand; PAM type: YTN; PAM sequence: CTT
aaaacattataagttttgct

SEQ ID NO: 90074 - DNA, 20 bp, Artificial Sequence
  Description of Artificial Sequence: Synthetic oligonucleotide
  Target: ATXN2; (+) strand; PAM type: YTN; PAM sequence: TTA
aaacattataagttttgcta

SEQ ID NO: 90075 - DNA, 20 bp, Artificial Sequence
  Description of Artificial Sequence: Synthetic oligonucleotide
  Target: ATXN2; (+) strand; PAM type: YTN; PAM sequence: TTA
taagttttgctatttttttt

SEQ ID NO: 90076 - DNA, 20 bp, Artificial Sequence
  Description of Artificial Sequence: Synthetic oligonucleotide
  Target: ATXN2; (+) strand; PAM type: YTN; PAM sequence: TTT
tgctatttttttttgttttg

SEQ ID NO: 90077 - DNA, 20 bp, Artificial Sequence
  Description of Artificial Sequence: Synthetic oligonucleotide
  Target: ATXN2; (+) strand; PAM type: YTN; PAM sequence: TTT
gctatttttttttgttttgt

SEQ ID NO: 90078 - DNA, 20 bp, Artificial Sequence
  Description of Artificial Sequence: Synthetic oligonucleotide
  Target: ATXN2; (+) strand; PAM type: YTN; PAM sequence: TTG
ctatttttttttgttttgtt

SEQ ID NO: 90079 - DNA, 20 bp, Artificial Sequence
  Description of Artificial Sequence: Synthetic oligonucleotide
  Target: ATXN2; (+) strand; PAM type: YTN; PAM sequence: CTA
tttttttttgttttgttcat

SEQ ID NO: 90080 - DNA, 20 bp, Artificial Sequence
  Description of Artificial Sequence: Synthetic oligonucleotide
  Target: ATXN2; (+) strand; PAM type: YTN; PAM sequence: TTT
ttttttgttttgttcatcag

SEQ ID NO: 90081 - DNA, 20 bp, Artificial Sequence
  Description of Artificial Sequence: Synthetic oligonucleotide
  Target: ATXN2; (+) strand; PAM type: YTN; PAM sequence: TTT
tttttgttttgttcatcagc

SEQ ID NO: 90082 - DNA, 20 bp, Artificial Sequence
  Description of Artificial Sequence: Synthetic oligonucleotide
  Target: ATXN2; (+) strand; PAM type: YTN; PAM sequence: TTT
ttttgttttgttcatcagct

SEQ ID NO: 90083 - DNA, 20 bp, Artificial Sequence
  Description of Artificial Sequence: Synthetic oligonucleotide
  Target: ATXN2; (+) strand; PAM type: YTN; PAM sequence: TTT
tttgttttgttcatcagcta

SEQ ID NO: 90084 - DNA, 20 bp, Artificial Sequence
  Description of Artificial Sequence: Synthetic oligonucleotide
  Target: ATXN2; (+) strand; PAM type: YTN; PAM sequence: TTT
ttgttttgttcatcagctat

SEQ ID NO: 90085 - DNA, 20 bp, Artificial Sequence
  Description of Artificial Sequence: Synthetic oligonucleotide
  Target: ATXN2; (+) strand; PAM type: YTN; PAM sequence: TTT
tgttttgttcatcagctatc

SEQ ID NO: 90086 - DNA, 20 bp, Artificial Sequence
  Description of Artificial Sequence: Synthetic oligonucleotide
  Target: ATXN2; (+) strand; PAM type: YTN; PAM sequence: TTT
gttttgttcatcagctatca

SEQ ID NO: 90087 - DNA, 20 bp, Artificial Sequence
  Description of Artificial Sequence: Synthetic oligonucleotide
  Target: ATXN2; (+) strand; PAM type: YTN; PAM sequence: TTG
ttttgttcatcagctatcat

SEQ ID NO: 90088 - DNA, 20 bp, Artificial Sequence
  Description of Artificial Sequence: Synthetic oligonucleotide
  Target: ATXN2; (+) strand; PAM type: YTN; PAM sequence: TTT
tgttcatcagctatcattag

SEQ ID NO: 90089 - DNA, 20 bp, Artificial Sequence
  Description of Artificial Sequence: Synthetic oligonucleotide
  Target: ATXN2; (+) strand; PAM type: YTN; PAM sequence: TTT
gttcatcagctatcattagt

SEQ ID NO: 90090 - DNA, 20 bp, Artificial Sequence
  Description of Artificial Sequence: Synthetic oligonucleotide
  Target: ATXN2; (+) strand; PAM type: YTN; PAM sequence: TTG
ttcatcagctatcattagtg

SEQ ID NO: 90091 - DNA, 20 bp, Artificial Sequence
  Description of Artificial Sequence: Synthetic oligonucleotide
  Target: ATXN2; (+) strand; PAM type: YTN; PAM sequence: TTC
atcagctatcattagtgtta

SEQ ID NO: 90092 - DNA, 20 bp, Artificial Sequence
  Description of Artificial Sequence: Synthetic oligonucleotide
  Target: ATXN2; (+) strand; PAM type: YTN; PAM sequence: CTA
tcattagtgttactgtattt

SEQ ID NO: 90093 - DNA, 20 bp, Artificial Sequence
  Description of Artificial Sequence: Synthetic oligonucleotide
  Target: ATXN2; (+) strand; PAM type: YTN; PAM sequence: TTA
gtgttactgtattttatgtg

SEQ ID NO: 90094 - DNA, 20 bp, Artificial Sequence
  Description of Artificial Sequence: Synthetic oligonucleotide
  Target: ATXN2; (+) strand; PAM type: YTN; PAM sequence: TTA
ctgtattttatgtgtggccc

SEQ ID NO: 90095 - DNA, 20 bp, Artificial Sequence
  Description of Artificial Sequence: Synthetic oligonucleotide
  Target: ATXN2; (+) strand; PAM type: YTN; PAM sequence: CTG
tattttatgtgtggcccaac

SEQ ID NO: 90096 - DNA, 20 bp, Artificial Sequence
  Description of Artificial Sequence: Synthetic oligonucleotide
  Target: ATXN2; (+) strand; PAM type: YTN; PAM sequence: TTT
tatgtgtggcccaacacaat

SEQ ID NO: 90097 - DNA, 20 bp, Artificial Sequence
  Description of Artificial Sequence: Synthetic oligonucleotide
  Target: ATXN2; (+) strand; PAM type: YTN; PAM sequence: TTT
atgtgtggcccaacacaatt

SEQ ID NO: 90098 - DNA, 20 bp, Artificial Sequence
  Description of Artificial Sequence: Synthetic oligonucleotide
  Target: ATXN2; (+) strand; PAM type: YTN; PAM sequence: TTA
tgtgtggcccaacacaattc

SEQ ID NO: 90099 - DNA, 20 bp, Artificial Sequence
  Description of Artificial Sequence: Synthetic oligonucleotide
  Target: ATXN2; (+) strand; PAM type: YTN; PAM sequence: TTC
ttcttccaatatgacccagg

SEQ ID NO: 90100 - DNA, 20 bp, Artificial Sequence
  Description of Artificial Sequence: Synthetic oligonucleotide
  Target: ATXN2; (+) strand; PAM type: YTN; PAM sequence: CTT
cttccaatatgacccaggga

SEQ ID NO: 90101 - DNA, 20 bp, Artificial Sequence
  Description of Artificial Sequence: Synthetic oligonucleotide
  Target: ATXN2; (+) strand; PAM type: YTN; PAM sequence: TTC
ttccaatatgacccagggaa

SEQ ID NO: 90102 - DNA, 20 bp, Artificial Sequence
  Description of Artificial Sequence: Synthetic oligonucleotide
  Target: ATXN2; (+) strand; PAM type: YTN; PAM sequence: CTT
ccaatatgacccagggaagc

SEQ ID NO: 90103 - DNA, 20 bp, Artificial Sequence
  Description of Artificial Sequence: Synthetic oligonucleotide
  Target: ATXN2; (+) strand; PAM type: YTN; PAM sequence: TTC
caatatgacccagggaagcc

SEQ ID NO: 90104 - DNA, 20 bp, Artificial Sequence
  Description of Artificial Sequence: Synthetic oligonucleotide
  Target: ATXN2; (+) strand; PAM type: YTN; PAM sequence: TTG
aacacctctgttacacgctg

SEQ ID NO: 90105 - DNA, 20 bp, Artificial Sequence
  Description of Artificial Sequence: Synthetic oligonucleotide
  Target: ATXN2; (+) strand; PAM type: YTN; PAM sequence: CTC
tgttacacgctgtttgattc

SEQ ID NO: 90106 - DNA, 20 bp, Artificial Sequence
  Description of Artificial Sequence: Synthetic oligonucleotide
  Target: ATXN2; (+) strand; PAM type: YTN; PAM sequence: CTG
ttacacgctgtttgattcca

SEQ ID NO: 90107 - DNA, 20 bp, Artificial Sequence
  Description of Artificial Sequence: Synthetic oligonucleotide
  Target: ATXN2; (+) strand; PAM type: YTN; PAM sequence: TTA
cacgctgtttgattccattt

SEQ ID NO: 90108 - DNA, 20 bp, Artificial Sequence
  Description of Artificial Sequence: Synthetic oligonucleotide
  Target: ATXN2; (+) strand; PAM type: YTN; PAM sequence: CTG
tttgattccatttattaaaa

SEQ ID NO: 90109 - DNA, 20 bp, Artificial Sequence
  Description of Artificial Sequence: Synthetic oligonucleotide
  Target: ATXN2; (+) strand; PAM type: YTN; PAM sequence: TTT
gattccatttattaaaaaaa

SEQ ID NO: 90110 - DNA, 20 bp, Artificial Sequence
  Description of Artificial Sequence: Synthetic oligonucleotide
  Target: ATXN2; (+) strand; PAM type: YTN; PAM sequence: TTG
attccatttattaaaaaaaa

SEQ ID NO: 90111 - DNA, 20 bp, Artificial Sequence
  Description of Artificial Sequence: Synthetic oligonucleotide
  Target: ATXN2; (+) strand; PAM type: YTN; PAM sequence: TTC
catttattaaaaaaaaaaaa

SEQ ID NO: 90112 - DNA, 20 bp, Artificial Sequence
  Description of Artificial Sequence: Synthetic oligonucleotide
  Target: ATXN2; (+) strand; PAM type: YTN; PAM sequence: TTT
attaaaaaaaaaaaaaaaat

SEQ ID NO: 90113 - DNA, 20 bp, Artificial Sequence
  Description of Artificial Sequence: Synthetic oligonucleotide
  Target: ATXN2; (+) strand; PAM type: YTN; PAM sequence: TTA
ttaaaaaaaaaaaaaaaatc

SEQ ID NO: 90114 - DNA, 20 bp, Artificial Sequence
  Description of Artificial Sequence: Synthetic oligonucleotide
  Target: ATXN2; (+) strand; PAM type: YTN; PAM sequence: TTA
aaaaaaaaaaaaaaatctag

SEQ ID NO: 90115 - DNA, 20 bp, Artificial Sequence
  Description of Artificial Sequence: Synthetic oligonucleotide
  Target: ATXN2; (+) strand; PAM type: YTN; PAM sequence: CTA
ggggctggctgaggtggctc

SEQ ID NO: 90116 - DNA, 20 bp, Artificial Sequence
  Description of Artificial Sequence: Synthetic oligonucleotide
  Target: ATXN2; (+) strand; PAM type: YTN; PAM sequence: CTG
gctgaggtggctcacatctg

SEQ ID NO: 90117 - DNA, 20 bp, Artificial Sequence
  Description of Artificial Sequence: Synthetic oligonucleotide
  Target: ATXN2; (+) strand; PAM type: YTN; PAM sequence: CTG
aggtggctcacatctgtaat

SEQ ID NO: 90118 - DNA, 20 bp, Artificial Sequence
  Description of Artificial Sequence: Synthetic oligonucleotide
  Target: ATXN2; (+) strand; PAM type: YTN; PAM sequence: CTC
acatctgtaatcctagcact

SEQ ID NO: 90119 - DNA, 20 bp, Artificial Sequence
  Description of Artificial Sequence: Synthetic oligonucleotide
  Target: ATXN2; (+) strand; PAM type: YTN; PAM sequence: CTG
taatcctagcactctgggag

SEQ ID NO: 90120 - DNA, 20 bp, Artificial Sequence
  Description of Artificial Sequence: Synthetic oligonucleotide
  Target: ATXN2; (+) strand; PAM type: YTN; PAM sequence: CTA
gcactctgggaggctgaggt

SEQ ID NO: 90121 - DNA, 20 bp, Artificial Sequence
  Description of Artificial Sequence: Synthetic oligonucleotide
  Target: ATXN2; (+) strand; PAM type: YTN; PAM sequence: CTC
tgggaggctgaggtgagctc

SEQ ID NO: 90122 - DNA, 20 bp, Artificial Sequence
  Description of Artificial Sequence: Synthetic oligonucleotide
  Target: ATXN2; (+) strand; PAM type: YTN; PAM sequence: CTG
ggaggctgaggtgagctcaa

SEQ ID NO: 90123 - DNA, 20 bp, Artificial Sequence
  Description of Artificial Sequence: Synthetic oligonucleotide
  Target: ATXN2; (+) strand; PAM type: YTN; PAM sequence: CTG
aggtgagctcaagagttcga

SEQ ID NO: 90124 - DNA, 20 bp, Artificial Sequence
  Description of Artificial Sequence: Synthetic oligonucleotide
  Target: ATXN2; (+) strand; PAM type: YTN; PAM sequence: CTC
aagagttcgagaccaacctg

SEQ ID NO: 90125 - DNA, 20 bp, Artificial Sequence
  Description of Artificial Sequence: Synthetic oligonucleotide
  Target: ATXN2; (+) strand; PAM type: YTN; PAM sequence: TTC
gagaccaacctgggcaatat

SEQ ID NO: 90126 - DNA, 20 bp, Artificial Sequence
  Description of Artificial Sequence: Synthetic oligonucleotide
  Target: ATXN2; (+) strand; PAM type: YTN; PAM sequence: CTG
ggcaatataatgagacgtct

SEQ ID NO: 90127 - DNA, 20 bp, Artificial Sequence
  Description of Artificial Sequence: Synthetic oligonucleotide
  Target: ATXN2; (+) strand; PAM type: YTN; PAM sequence: CTC
caaaaaaagatttttttacg

SEQ ID NO: 90128 - DNA, 20 bp, Artificial Sequence
  Description of Artificial Sequence: Synthetic oligonucleotide
  Target: ATXN2; (+) strand; PAM type: YTN; PAM sequence: TTT
ttttacgtaaaaaaagaaaa

SEQ ID NO: 90129 - DNA, 20 bp, Artificial Sequence
  Description of Artificial Sequence: Synthetic oligonucleotide
  Target: ATXN2; (+) strand; PAM type: YTN; PAM sequence: TTT
tttacgtaaaaaaagaaaaa

SEQ ID NO: 90130 - DNA, 20 bp, Artificial Sequence
  Description of Artificial Sequence: Synthetic oligonucleotide
  Target: ATXN2; (+) strand; PAM type: YTN; PAM sequence: TTT
ttacgtaaaaaaagaaaaaa

SEQ ID NO: 90131 - DNA, 20 bp, Artificial Sequence
  Description of Artificial Sequence: Synthetic oligonucleotide
  Target: ATXN2; (+) strand; PAM type: YTN; PAM sequence: TTT
tacgtaaaaaaagaaaaaaa

SEQ ID NO: 90132 - DNA, 20 bp, Artificial Sequence
  Description of Artificial Sequence: Synthetic oligonucleotide
  Target: ATXN2; (+) strand; PAM type: YTN; PAM sequence: TTT
acgtaaaaaaagaaaaaaaa

SEQ ID NO: 90133 - DNA, 20 bp, Artificial Sequence
  Description of Artificial Sequence: Synthetic oligonucleotide
  Target: ATXN2; (+) strand; PAM type: YTN; PAM sequence: TTA
cgtaaaaaaagaaaaaaaaa

SEQ ID NO: 90134 - DNA, 20 bp, Artificial Sequence
  Description of Artificial Sequence: Synthetic oligonucleotide
  Target: ATXN2; (+) strand; PAM type: YTN; PAM sequence: CTA
atcaaaaaaaaaaaaagaaa

SEQ ID NO: 90135 - DNA, 20 bp, Artificial Sequence
  Description of Artificial Sequence: Synthetic oligonucleotide
  Target: ATXN2; (+) strand; PAM type: YTN; PAM sequence: CTA
aagaggataaatctaatcta

SEQ ID NO: 90136 - DNA, 20 bp, Artificial Sequence
  Description of Artificial Sequence: Synthetic oligonucleotide
  Target: ATXN2; (+) strand; PAM type: YTN; PAM sequence: CTA
atctatagtaaaagaaggca

SEQ ID NO: 90137 - DNA, 20 bp, Artificial Sequence
  Description of Artificial Sequence: Synthetic oligonucleotide
  Target: ATXN2; (+) strand; PAM type: YTN; PAM sequence: CTA
tagtaaaagaaggcagatta

SEQ ID NO: 90138 - DNA, 20 bp, Artificial Sequence
  Description of Artificial Sequence: Synthetic oligonucleotide
  Target: ATXN2; (+) strand; PAM type: YTN; PAM sequence: TTA
ctggttaactggagctagtg

SEQ ID NO: 90139 - DNA, 20 bp, Artificial Sequence
  Description of Artificial Sequence: Synthetic oligonucleotide
  Target: ATXN2; (+) strand; PAM type: YTN; PAM sequence: CTG
gttaactggagctagtggta

SEQ ID NO: 90140 - DNA, 20 bp, Artificial Sequence
  Description of Artificial Sequence: Synthetic oligonucleotide
  Target: ATXN2; (+) strand; PAM type: YTN; PAM sequence: TTA
actggagctagtggtaataa

SEQ ID NO: 90141 - DNA, 20 bp, Artificial Sequence
  Description of Artificial Sequence: Synthetic oligonucleotide
  Target: ATXN2; (+) strand; PAM type: YTN; PAM sequence: CTG
gagctagtggtaataaagta

SEQ ID NO: 90142 - DNA, 20 bp, Artificial Sequence
  Description of Artificial Sequence: Synthetic oligonucleotide
  Target: ATXN2; (+) strand; PAM type: YTN; PAM sequence: CTA
gtggtaataaagtacagttg

SEQ ID NO: 90143 - DNA, 20 bp, Artificial Sequence
  Description of Artificial Sequence: Synthetic oligonucleotide
  Target: ATXN2; (+) strand; PAM type: YTN; PAM sequence: TTG
gacagagaagaggaacaggc

SEQ ID NO: 90144 - DNA, 20 bp, Artificial Sequence
  Description of Artificial Sequence: Synthetic oligonucleotide
  Target: ATXN2; (+) strand; PAM type: YTN; PAM sequence: TTT
tccatcttcactgatgaagc

SEQ ID NO: 90145 - DNA, 20 bp, Artificial Sequence
  Description of Artificial Sequence: Synthetic oligonucleotide
  Target: ATXN2; (+) strand; PAM type: YTN; PAM sequence: TTT
ccatcttcactgatgaagca

SEQ ID NO: 90146 - DNA, 20 bp, Artificial Sequence
  Description of Artificial Sequence: Synthetic oligonucleotide
  Target: ATXN2; (+) strand; PAM type: YTN; PAM sequence: TTC
catcttcactgatgaagcaa

SEQ ID NO: 90147 - DNA, 20 bp, Artificial Sequence
  Description of Artificial Sequence: Synthetic oligonucleotide
  Target: ATXN2; (+) strand; PAM type: YTN; PAM sequence: CTT
cactgatgaagcaagtagtt

SEQ ID NO: 90148 - DNA, 20 bp, Artificial Sequence
  Description of Artificial Sequence: Synthetic oligonucleotide
  Target: ATXN2; (+) strand; PAM type: YTN; PAM sequence: TTC
actgatgaagcaagtagtta

SEQ ID NO: 90149 - DNA, 20 bp, Artificial Sequence
  Description of Artificial Sequence: Synthetic oligonucleotide
  Target: ATXN2; (+) strand; PAM type: YTN; PAM sequence: CTG
atgaagcaagtagttacatg

SEQ ID NO: 90150 - DNA, 20 bp, Artificial Sequence
  Description of Artificial Sequence: Synthetic oligonucleotide
  Target: ATXN2; (+) strand; PAM type: YTN; PAM sequence: TTA
catgagcaaatatatttgtc

SEQ ID NO: 90151 - DNA, 20 bp, Artificial Sequence
  Description of Artificial Sequence: Synthetic oligonucleotide
  Target: ATXN2; (+) strand; PAM type: YTN; PAM sequence: TTT
gtcaaaactcattaaaatgt

SEQ ID NO: 90152 - DNA, 20 bp, Artificial Sequence
  Description of Artificial Sequence: Synthetic oligonucleotide
  Target: ATXN2; (+) strand; PAM type: YTN; PAM sequence: TTG
tcaaaactcattaaaatgta

SEQ ID NO: 90153 - DNA, 20 bp, Artificial Sequence
  Description of Artificial Sequence: Synthetic oligonucleotide
  Target: ATXN2; (+) strand; PAM type: YTN; PAM sequence: CTC
attaaaatgtaaacataaaa

SEQ ID NO: 90154 - DNA, 20 bp, Artificial Sequence
  Description of Artificial Sequence: Synthetic oligonucleotide
  Target: ATXN2; (+) strand; PAM type: YTN; PAM sequence: TTA
aaatgtaaacataaaaagat

SEQ ID NO: 90155 - DNA, 20 bp, Artificial Sequence
  Description of Artificial Sequence: Synthetic oligonucleotide
  Target: ATXN2; (+) strand; PAM type: YTN; PAM sequence: TTT
tcttgtatgtaaattacaga

SEQ ID NO: 90156 - DNA, 20 bp, Artificial Sequence
  Description of Artificial Sequence: Synthetic oligonucleotide
  Target: ATXN2; (+) strand; PAM type: YTN; PAM sequence: TTT
cttgtatgtaaattacagac

SEQ ID NO: 90157 - DNA, 20 bp, Artificial Sequence
  Description of Artificial Sequence: Synthetic oligonucleotide
  Target: ATXN2; (+) strand; PAM type: YTN; PAM sequence: TTC
ttgtatgtaaattacagact

SEQ ID NO: 90158 - DNA, 20 bp, Artificial Sequence
  Description of Artificial Sequence: Synthetic oligonucleotide
  Target: ATXN2; (+) strand; PAM type: YTN; PAM sequence: CTT
gtatgtaaattacagactaa

SEQ ID NO: 90159 - DNA, 20 bp, Artificial Sequence
  Description of Artificial Sequence: Synthetic oligonucleotide
  Target: ATXN2; (+) strand; PAM type: YTN; PAM sequence: TTG
tatgtaaattacagactaat

SEQ ID NO: 90160 - DNA, 20 bp, Artificial Sequence
  Description of Artificial Sequence: Synthetic oligonucleotide
  Target: ATXN2; (+) strand; PAM type: YTN; PAM sequence: TTA
cagactaataaaactggtta

SEQ ID NO: 90161 - DNA, 20 bp, Artificial Sequence
  Description of Artificial Sequence: Synthetic oligonucleotide
  Target: ATXN2; (+) strand; PAM type: YTN; PAM sequence: CTA
ataaaactggttaaaacatt

SEQ ID NO: 90162 - DNA, 20 bp, Artificial Sequence
  Description of Artificial Sequence: Synthetic oligonucleotide
  Target: ATXN2; (+) strand; PAM type: YTN; PAM sequence: CTG
gttaaaacattttggatagt

SEQ ID NO: 90163 - DNA, 20 bp, Artificial Sequence
  Description of Artificial Sequence: Synthetic oligonucleotide
  Target: ATXN2; (+) strand; PAM type: YTN; PAM sequence: TTA
aaacattttggatagtcatt

SEQ ID NO: 90164 - DNA, 20 bp, Artificial Sequence
  Description of Artificial Sequence: Synthetic oligonucleotide
  Target: ATXN2; (+) strand; PAM type: YTN; PAM sequence: TTT
tggatagtcatttagaacaa

SEQ ID NO: 90165 - DNA, 20 bp, Artificial Sequence
  Description of Artificial Sequence: Synthetic oligonucleotide
  Target: ATXN2; (+) strand; PAM type: YTN; PAM sequence: TTT
ggatagtcatttagaacaag

SEQ ID NO: 90166 - DNA, 20 bp, Artificial Sequence
  Description of Artificial Sequence: Synthetic oligonucleotide
  Target: ATXN2; (+) strand; PAM type: YTN; PAM sequence: TTG
gatagtcatttagaacaaga

SEQ ID NO: 90167 - DNA, 20 bp, Artificial Sequence
  Description of Artificial Sequence: Synthetic oligonucleotide
  Target: ATXN2; (+) strand; PAM type: YTN; PAM sequence: TTT
agaacaagataaattggatt

SEQ ID NO: 90168 - DNA, 20 bp, Artificial Sequence
  Description of Artificial Sequence: Synthetic oligonucleotide
  Target: ATXN2; (+) strand; PAM type: YTN; PAM sequence: TTA
gaacaagataaattggattc

SEQ ID NO: 90169 - DNA, 20 bp, Artificial Sequence
  Description of Artificial Sequence: Synthetic oligonucleotide
  Target: ATXN2; (+) strand; PAM type: YTN; PAM sequence: TTG
gattcacattttatacttta

SEQ ID NO: 90170 - DNA, 20 bp, Artificial Sequence
  Description of Artificial Sequence: Synthetic oligonucleotide
  Target: ATXN2; (+) strand; PAM type: YTN; PAM sequence: TTC
acattttatactttaagata

SEQ ID NO: 90171 - DNA, 20 bp, Artificial Sequence
  Description of Artificial Sequence: Synthetic oligonucleotide
  Target: ATXN2; (+) strand; PAM type: YTN; PAM sequence: TTT
tatactttaagataaattct

SEQ ID NO: 90172 - DNA, 20 bp, Artificial Sequence
  Description of Artificial Sequence: Synthetic oligonucleotide
  Target: ATXN2; (+) strand; PAM type: YTN; PAM sequence: TTT
atactttaagataaattcta

SEQ ID NO: 90173 - DNA, 20 bp, Artificial Sequence
  Description of Artificial Sequence: Synthetic oligonucleotide
  Target: ATXN2; (+) strand; PAM type: YTN; PAM sequence: TTA
tactttaagataaattctaa

SEQ ID NO: 90174 - DNA, 20 bp, Artificial Sequence
  Description of Artificial Sequence: Synthetic oligonucleotide
  Target: ATXN2; (+) strand; PAM type: YTN; PAM sequence: CTT
taagataaattctaaaatta

SEQ ID NO: 90175 - DNA, 20 bp, Artificial Sequence
  Description of Artificial Sequence: Synthetic oligonucleotide
  Target: ATXN2; (+) strand; PAM type: YTN; PAM sequence: TTT
aagataaattctaaaattag

SEQ ID NO: 90176 - DNA, 20 bp, Artificial Sequence
  Description of Artificial Sequence: Synthetic oligonucleotide
  Target: ATXN2; (+) strand; PAM type: YTN; PAM sequence: TTA
agataaattctaaaattagc

SEQ ID NO: 90177 - DNA, 20 bp, Artificial Sequence
  Description of Artificial Sequence: Synthetic oligonucleotide
  Target: ATXN2; (+) strand; PAM type: YTN; PAM sequence: TTC
taaaattagccaggcataat

SEQ ID NO: 90178 - DNA, 20 bp, Artificial Sequence
  Description of Artificial Sequence: Synthetic oligonucleotide
  Target: ATXN2; (+) strand; PAM type: YTN; PAM sequence: CTA
aaattagccaggcataatgg

SEQ ID NO: 90179 - DNA, 20 bp, Artificial Sequence
  Description of Artificial Sequence: Synthetic oligonucleotide
  Target: ATXN2; (+) strand; PAM type: YTN; PAM sequence: TTA
gccaggcataatggtacagg

SEQ ID NO: 90180 - DNA, 20 bp, Artificial Sequence
  Description of Artificial Sequence: Synthetic oligonucleotide
  Target: ATXN2; (+) strand; PAM type: YTN; PAM sequence: CTG
gtctcaaactcctgagctca

SEQ ID NO: 90181 - DNA, 20 bp, Artificial Sequence
  Description of Artificial Sequence: Synthetic oligonucleotide
  Target: ATXN2; (+) strand; PAM type: YTN; PAM sequence: CTC
aaactcctgagctcaagtga

SEQ ID NO: 90182 - DNA, 20 bp, Artificial Sequence
  Description of Artificial Sequence: Synthetic oligonucleotide
  Target: ATXN2; (+) strand; PAM type: YTN; PAM sequence: CTC
ctgagctcaagtgatcctcc

SEQ ID NO: 90183 - DNA, 20 bp, Artificial Sequence
  Description of Artificial Sequence: Synthetic oligonucleotide
  Target: ATXN2; (+) strand; PAM type: YTN; PAM sequence: CTG
agctcaagtgatcctcccac

SEQ ID NO: 90184 - DNA, 20 bp, Artificial Sequence
  Description of Artificial Sequence: Synthetic oligonucleotide
  Target: ATXN2; (+) strand; PAM type: YTN; PAM sequence: CTC
aagtgatcctcccacctcag

SEQ ID NO: 90185 - DNA, 20 bp, Artificial Sequence
  Description of Artificial Sequence: Synthetic oligonucleotide
  Target: ATXN2; (+) strand; PAM type: YTN; PAM sequence: CTC
ccacctcagcctctcagcct

SEQ ID NO: 90186 - DNA, 20 bp, Artificial Sequence
  Description of Artificial Sequence: Synthetic oligonucleotide
  Target: ATXN2; (+) strand; PAM type: YTN; PAM sequence: CTC
agcctctcagcctcccaggg

SEQ ID NO: 90187 - DNA, 20 bp, Artificial Sequence
  Description of Artificial Sequence: Synthetic oligonucleotide
  Target: ATXN2; (+) strand; PAM type: YTN; PAM sequence: CTC
tcagcctcccagggtgccag

SEQ ID NO: 90188 - DNA, 20 bp, Artificial Sequence
  Description of Artificial Sequence: Synthetic oligonucleotide
  Target: ATXN2; (+) strand; PAM type: YTN; PAM sequence: CTC
agcctcccagggtgccagga

SEQ ID NO: 90189 - DNA, 20 bp, Artificial Sequence
  Description of Artificial Sequence: Synthetic oligonucleotide
  Target: ATXN2; (+) strand; PAM type: YTN; PAM sequence: CTC
ccagggtgccaggagacagg

SEQ ID NO: 90190 - DNA, 20 bp, Artificial Sequence
  Description of Artificial Sequence: Synthetic oligonucleotide
  Target: ATXN2; (+) strand; PAM type: YTN; PAM sequence: TTC
gagaccagcctgaccaacac

SEQ ID NO: 90191 - DNA, 20 bp, Artificial Sequence
  Description of Artificial Sequence: Synthetic oligonucleotide
  Target: ATXN2; (+) strand; PAM type: YTN; PAM sequence: CTG
accaacacggtaaaaccccg

SEQ ID NO: 90192 - DNA, 20 bp, Artificial Sequence
  Description of Artificial Sequence: Synthetic oligonucleotide
  Target: ATXN2; (+) strand; PAM type: YTN; PAM sequence: CTC
tactaaaaatacaaaaatta

SEQ ID NO: 90193 - DNA, 20 bp, Artificial Sequence
  Description of Artificial Sequence: Synthetic oligonucleotide
  Target: ATXN2; (+) strand; PAM type: YTN; PAM sequence: CTA
ctaaaaatacaaaaattagc

SEQ ID NO: 90194 - DNA, 20 bp, Artificial Sequence
  Description of Artificial Sequence: Synthetic oligonucleotide
  Target: ATXN2; (+) strand; PAM type: YTN; PAM sequence: CTA
aaaatacaaaaattagctgg

SEQ ID NO: 90195 - DNA, 20 bp, Artificial Sequence
  Description of Artificial Sequence: Synthetic oligonucleotide
  Target: ATXN2; (+) strand; PAM type: YTN; PAM sequence: TTA
gctgggtgtggtggcgcacc

SEQ ID NO: 90196 - DNA, 20 bp, Artificial Sequence
  Description of Artificial Sequence: Synthetic oligonucleotide
  Target: ATXN2; (+) strand; PAM type: YTN; PAM sequence: CTG
ggtgtggtggcgcacccctg

SEQ ID NO: 90197 - DNA, 20 bp, Artificial Sequence
  Description of Artificial Sequence: Synthetic oligonucleotide
  Target: ATXN2; (+) strand; PAM type: YTN; PAM sequence: CTG
taattccagctactcaggag

SEQ ID NO: 90198 - DNA, 20 bp, Artificial Sequence
  Description of Artificial Sequence: Synthetic oligonucleotide
  Target: ATXN2; (+) strand; PAM type: YTN; PAM sequence: TTC
cagctactcaggaggctgag

SEQ ID NO: 90199 - DNA, 20 bp, Artificial Sequence
  Description of Artificial Sequence: Synthetic oligonucleotide
  Target: ATXN2; (+) strand; PAM type: YTN; PAM sequence: CTA
ctcaggaggctgaggcaggg

SEQ ID NO: 90200 - DNA, 20 bp, Artificial Sequence
  Description of Artificial Sequence: Synthetic oligonucleotide
  Target: ATXN2; (+) strand; PAM type: YTN; PAM sequence: CTC
aggaggctgaggcaggggaa

SEQ ID NO: 90201 - DNA, 20 bp, Artificial Sequence
  Description of Artificial Sequence: Synthetic oligonucleotide
  Target: ATXN2; (+) strand; PAM type: YTN; PAM sequence: CTG
aggcaggggaatcgcttgaa

SEQ ID NO: 90202 - DNA, 20 bp, Artificial Sequence
  Description of Artificial Sequence: Synthetic oligonucleotide
  Target: ATXN2; (+) strand; PAM type: YTN; PAM sequence: CTT
gaatctgagaggcggaggtt

SEQ ID NO: 90203 - DNA, 20 bp, Artificial Sequence
  Description of Artificial Sequence: Synthetic oligonucleotide
  Target: ATXN2; (+) strand; PAM type: YTN; PAM sequence: TTG
aatctgagaggcggaggttg

SEQ ID NO: 90204 - DNA, 20 bp, Artificial Sequence
  Description of Artificial Sequence: Synthetic oligonucleotide
  Target: ATXN2; (+) strand; PAM type: YTN; PAM sequence: CTG
agaggcggaggttgcagtga

SEQ ID NO: 90205 - DNA, 20 bp, Artificial Sequence
  Description of Artificial Sequence: Synthetic oligonucleotide
  Target: ATXN2; (+) strand; PAM type: YTN; PAM sequence: TTG
cagtgaagctaagttagcgc

SEQ ID NO: 90206 - DNA, 20 bp, Artificial Sequence
  Description of Artificial Sequence: Synthetic oligonucleotide
  Target: ATXN2; (+) strand; PAM type: YTN; PAM sequence: CTA
agttagcgccactccatcag

SEQ ID NO: 90207 - DNA, 20 bp, Artificial Sequence
  Description of Artificial Sequence: Synthetic oligonucleotide
  Target: ATXN2; (+) strand; PAM type: YTN; PAM sequence: TTA
gcgccactccatcagagcga

SEQ ID NO: 90208 - DNA, 20 bp, Artificial Sequence
  Description of Artificial Sequence: Synthetic oligonucleotide
  Target: ATXN2; (+) strand; PAM type: YTN; PAM sequence: CTC
catcagagcgacactccatc

SEQ ID NO: 90209 - DNA, 20 bp, Artificial Sequence
  Description of Artificial Sequence: Synthetic oligonucleotide
  Target: ATXN2; (+) strand; PAM type: YTN; PAM sequence: CTC
catctcaaaaataaataaac

SEQ ID NO: 90210 - DNA, 20 bp, Artificial Sequence
  Description of Artificial Sequence: Synthetic oligonucleotide
  Target: ATXN2; (+) strand; PAM type: YTN; PAM sequence: CTC
aaaaataaataaacaaacaa

SEQ ID NO: 90211 - DNA, 20 bp, Artificial Sequence
  Description of Artificial Sequence: Synthetic oligonucleotide
  Target: ATXN2; (+) strand; PAM type: YTN; PAM sequence: TTT
aagaggaaagaatagtcttt

SEQ ID NO: 90212 - DNA, 20 bp, Artificial Sequence
  Description of Artificial Sequence: Synthetic oligonucleotide
  Target: ATXN2; (+) strand; PAM type: YTN; PAM sequence: TTA
agaggaaagaatagtctttt

SEQ ID NO: 90213 - DNA, 20 bp, Artificial Sequence
  Description of Artificial Sequence: Synthetic oligonucleotide
  Target: ATXN2; (+) strand; PAM type: YTN; PAM sequence: CTT
ttcaacaaatgaggtgggga

SEQ ID NO: 90214 - DNA, 20 bp, Artificial Sequence
  Description of Artificial Sequence: Synthetic oligonucleotide
  Target: ATXN2; (+) strand; PAM type: YTN; PAM sequence: TTT
tcaacaaatgaggtggggac

SEQ ID NO: 90215 - DNA, 20 bp, Artificial Sequence
  Description of Artificial Sequence: Synthetic oligonucleotide
  Target: ATXN2; (+) strand; PAM type: YTN; PAM sequence: TTT
caacaaatgaggtggggaca

SEQ ID NO: 90216 - DNA, 20 bp, Artificial Sequence
  Description of Artificial Sequence: Synthetic oligonucleotide
  Target: ATXN2; (+) strand; PAM type: YTN; PAM sequence: TTC
aacaaatgaggtggggacaa

SEQ ID NO: 90217 - DNA, 20 bp, Artificial Sequence
  Description of Artificial Sequence: Synthetic oligonucleotide
  Target: ATXN2; (+) strand; PAM type: YTN; PAM sequence: CTG
gaccactactctcatctcat

SEQ ID NO: 90218 - DNA, 20 bp, Artificial Sequence
  Description of Artificial Sequence: Synthetic oligonucleotide
  Target: ATXN2; (+) strand; PAM type: YTN; PAM sequence: CTA
ctctcatctcatacacaaaa

SEQ ID NO: 90219 - DNA, 20 bp, Artificial Sequence
  Description of Artificial Sequence: Synthetic oligonucleotide
  Target: ATXN2; (+) strand; PAM type: YTN; PAM sequence: CTC
tcatctcatacacaaaaatt

SEQ ID NO: 90220 - DNA, 20 bp, Artificial Sequence
  Description of Artificial Sequence: Synthetic oligonucleotide
  Target: ATXN2; (+) strand; PAM type: YTN; PAM sequence: CTC
atctcatacacaaaaattaa

SEQ ID NO: 90221 - DNA, 20 bp, Artificial Sequence
  Description of Artificial Sequence: Synthetic oligonucleotide
  Target: ATXN2; (+) strand; PAM type: YTN; PAM sequence: CTC
atacacaaaaattaactcaa

SEQ ID NO: 90222 - DNA, 20 bp, Artificial Sequence
  Description of Artificial Sequence: Synthetic oligonucleotide
  Target: ATXN2; (+) strand; PAM type: YTN; PAM sequence: TTA
actcaaaagagattgtagac

SEQ ID NO: 90223 - DNA, 20 bp, Artificial Sequence
  Description of Artificial Sequence: Synthetic oligonucleotide
  Target: ATXN2; (+) strand; PAM type: YTN; PAM sequence: CTC
aaaagagattgtagacttaa

SEQ ID NO: 90224 - DNA, 20 bp, Artificial Sequence
  Description of Artificial Sequence: Synthetic oligonucleotide
  Target: ATXN2; (+) strand; PAM type: YTN; PAM sequence: TTG
tagacttaaatgttaagagc

SEQ ID NO: 90225 - DNA, 20 bp, Artificial Sequence
  Description of Artificial Sequence: Synthetic oligonucleotide
  Target: ATXN2; (+) strand; PAM type: YTN; PAM sequence: CTT
aaatgttaagagctaaacta

SEQ ID NO: 90226 - DNA, 20 bp, Artificial Sequence
  Description of Artificial Sequence: Synthetic oligonucleotide
  Target: ATXN2; (+) strand; PAM type: YTN; PAM sequence: TTA
aatgttaagagctaaactat

SEQ ID NO: 90227 - DNA, 20 bp, Artificial Sequence
  Description of Artificial Sequence: Synthetic oligonucleotide
  Target: ATXN2; (+) strand; PAM type: YTN; PAM sequence: TTA
agagctaaactataaaaatc

SEQ ID NO: 90228 - DNA, 20 bp, Artificial Sequence
  Description of Artificial Sequence: Synthetic oligonucleotide
  Target: ATXN2; (+) strand; PAM type: YTN; PAM sequence: CTA
aactataaaaatcataggag

SEQ ID NO: 90229 - DNA, 20 bp, Artificial Sequence
  Description of Artificial Sequence: Synthetic oligonucleotide
  Target: ATXN2; (+) strand; PAM type: YTN; PAM sequence: CTA
taaaaatcataggagtttta

SEQ ID NO: 90230 - DNA, 20 bp, Artificial Sequence
  Description of Artificial Sequence: Synthetic oligonucleotide
  Target: ATXN2; (+) strand; PAM type: YTN; PAM sequence: TTT
tataggcgtttcataggagt

SEQ ID NO: 90231 - DNA, 20 bp, Artificial Sequence
  Description of Artificial Sequence: Synthetic oligonucleotide
  Target: ATXN2; (+) strand; PAM type: YTN; PAM sequence: TTT
ataggcgtttcataggagta

SEQ ID NO: 90232 - DNA, 20 bp, Artificial Sequence
  Description of Artificial Sequence: Synthetic oligonucleotide
  Target: ATXN2; (+) strand; PAM type: YTN; PAM sequence: TTA
taggcgtttcataggagtaa

SEQ ID NO: 90233 - DNA, 20 bp, Artificial Sequence
  Description of Artificial Sequence: Synthetic oligonucleotide
  Target: ATXN2; (+) strand; PAM type: YTN; PAM sequence: TTT
cataggagtaaatctctgtg

SEQ ID NO: 90234 - DNA, 20 bp, Artificial Sequence
  Description of Artificial Sequence: Synthetic oligonucleotide
  Target: ATXN2; (+) strand; PAM type: YTN; PAM sequence: TTC
ataggagtaaatctctgtgg

SEQ ID NO: 90235 - DNA, 20 bp, Artificial Sequence
  Description of Artificial Sequence: Synthetic oligonucleotide
  Target: ATXN2; (+) strand; PAM type: YTN; PAM sequence: CTC
tgtggccttgagttaggcaa

SEQ ID NO: 90236 - DNA, 20 bp, Artificial Sequence
  Description of Artificial Sequence: Synthetic oligonucleotide
  Target: ATXN2; (+) strand; PAM type: YTN; PAM sequence: CTG
tggccttgagttaggcaatg

SEQ ID NO: 90237 - DNA, 20 bp, Artificial Sequence
  Description of Artificial Sequence: Synthetic oligonucleotide
  Target: ATXN2; (+) strand; PAM type: YTN; PAM sequence: CTT
gagttaggcaatgctttgtc

SEQ ID NO: 90238 - DNA, 20 bp, Artificial Sequence
  Description of Artificial Sequence: Synthetic oligonucleotide
  Target: ATXN2; (+) strand; PAM type: YTN; PAM sequence: TTG
agttaggcaatgctttgtct

SEQ ID NO: 90239 - DNA, 20 bp, Artificial Sequence
  Description of Artificial Sequence: Synthetic oligonucleotide
  Target: ATXN2; (+) strand; PAM type: YTN; PAM sequence: TTA
ggcaatgctttgtctgatat

SEQ ID NO: 90240 - DNA, 20 bp, Artificial Sequence
  Description of Artificial Sequence: Synthetic oligonucleotide
  Target: ATXN2; (+) strand; PAM type: YTN; PAM sequence: CTT
tgtctgatatgacatcagga

SEQ ID NO: 90241 - DNA, 20 bp, Artificial Sequence
  Description of Artificial Sequence: Synthetic oligonucleotide
  Target: ATXN2; (+) strand; PAM type: YTN; PAM sequence: TTT
gtctgatatgacatcaggag

SEQ ID NO: 90242 - DNA, 20 bp, Artificial Sequence
  Description of Artificial Sequence: Synthetic oligonucleotide
  Target: ATXN2; (+) strand; PAM type: YTN; PAM sequence: TTG
tctgatatgacatcaggagc

SEQ ID NO: 90243 - DNA, 20 bp, Artificial Sequence
  Description of Artificial Sequence: Synthetic oligonucleotide
  Target: ATXN2; (+) strand; PAM type: YTN; PAM sequence: CTG
atatgacatcaggagcaaca

SEQ ID NO: 90244 - DNA, 20 bp, Artificial Sequence
  Description of Artificial Sequence: Synthetic oligonucleotide
  Target: ATXN2; (+) strand; PAM type: YTN; PAM sequence: TTG
aacttcatcaaaattaaaaa

SEQ ID NO: 90245 - DNA, 20 bp, Artificial Sequence
  Description of Artificial Sequence: Synthetic oligonucleotide
  Target: ATXN2; (+) strand; PAM type: YTN; PAM sequence: CTT
catcaaaattaaaaactgtg

SEQ ID NO: 90246 - DNA, 20 bp, Artificial Sequence
  Description of Artificial Sequence: Synthetic oligonucleotide
  Target: ATXN2; (+) strand; PAM type: YTN; PAM sequence: TTC
atcaaaattaaaaactgtgt

SEQ ID NO: 90247 - DNA, 20 bp, Artificial Sequence
  Description of Artificial Sequence: Synthetic oligonucleotide
  Target: ATXN2; (+) strand; PAM type: YTN; PAM sequence: TTA
aaaactgtgttacaaagaac

SEQ ID NO: 90248 - DNA, 20 bp, Artificial Sequence
  Description of Artificial Sequence: Synthetic oligonucleotide
  Target: ATXN2; (+) strand; PAM type: YTN; PAM sequence: CTG
tgttacaaagaacaccatca

SEQ ID NO: 90249 - DNA, 20 bp, Artificial Sequence
  Description of Artificial Sequence: Synthetic oligonucleotide
  Target: ATXN2; (+) strand; PAM type: YTN; PAM sequence: TTA
caaagaacaccatcaagcaa

SEQ ID NO: 90250 - DNA, 20 bp, Artificial Sequence
  Description of Artificial Sequence: Synthetic oligonucleotide
  Target: ATXN2; (+) strand; PAM type: YTN; PAM sequence: CTA
tagtcagggcatggtggttc

SEQ ID NO: 90251 - DNA, 20 bp, Artificial Sequence
  Description of Artificial Sequence: Synthetic oligonucleotide
  Target: ATXN2; (+) strand; PAM type: YTN; PAM sequence: TTC
gcgtctaaaatctcagcact

SEQ ID NO: 90252 - DNA, 20 bp, Artificial Sequence
  Description of Artificial Sequence: Synthetic oligonucleotide
  Target: ATXN2; (+) strand; PAM type: YTN; PAM sequence: CTA
aaatctcagcactttgggaa

SEQ ID NO: 90253 - DNA, 20 bp, Artificial Sequence
  Description of Artificial Sequence: Synthetic oligonucleotide
  Target: ATXN2; (+) strand; PAM type: YTN; PAM sequence: CTC
agcactttgggaaggtgagg

SEQ ID NO: 90254 - DNA, 20 bp, Artificial Sequence
  Description of Artificial Sequence: Synthetic oligonucleotide
  Target: ATXN2; (+) strand; PAM type: YTN; PAM sequence: CTT
tgggaaggtgaggcaggcgg

SEQ ID NO: 90255 - DNA, 20 bp, Artificial Sequence
  Description of Artificial Sequence: Synthetic oligonucleotide
  Target: ATXN2; (+) strand; PAM type: YTN; PAM sequence: TTT
gggaaggtgaggcaggcgga

SEQ ID NO: 90256 - DNA, 20 bp, Artificial Sequence
  Description of Artificial Sequence: Synthetic oligonucleotide
  Target: ATXN2; (+) strand; PAM type: YTN; PAM sequence: TTG
ggaaggtgaggcaggcggat

SEQ ID NO: 90257 - DNA, 20 bp, Artificial Sequence
  Description of Artificial Sequence: Synthetic oligonucleotide
  Target: ATXN2; (+) strand; PAM type: YTN; PAM sequence: TTT
gaggtcaggagttcaagacc

SEQ ID NO: 90258 - DNA, 20 bp, Artificial Sequence
  Description of Artificial Sequence: Synthetic oligonucleotide
  Target: ATXN2; (+) strand; PAM type: YTN; PAM sequence: TTG
aggtcaggagttcaagacca

SEQ ID NO: 90259 - DNA, 20 bp, Artificial Sequence
  Description of Artificial Sequence: Synthetic oligonucleotide
  Target: ATXN2; (+) strand; PAM type: YTN; PAM sequence: TTC
aagaccagcctggccaacat

SEQ ID NO: 90260 - DNA, 20 bp, Artificial Sequence
  Description of Artificial Sequence: Synthetic oligonucleotide
  Target: ATXN2; (+) strand; PAM type: YTN; PAM sequence: CTG
gccaacatggtgaaattcca

SEQ ID NO: 90261 - DNA, 20 bp, Artificial Sequence
  Description of Artificial Sequence: Synthetic oligonucleotide
  Target: ATXN2; (+) strand; PAM type: YTN; PAM sequence: TTC
catctctactaaaaatacaa

SEQ ID NO: 90262 - DNA, 20 bp, Artificial Sequence
  Description of Artificial Sequence: Synthetic oligonucleotide
  Target: ATXN2; (+) strand; PAM type: YTN; PAM sequence: CTC
tactaaaaatacaaaaatgg

SEQ ID NO: 90263 - DNA, 20 bp, Artificial Sequence
  Description of Artificial Sequence: Synthetic oligonucleotide
  Target: ATXN2; (+) strand; PAM type: YTN; PAM sequence: CTA
ctaaaaatacaaaaatgggc

SEQ ID NO: 90264 - DNA, 20 bp, Artificial Sequence
  Description of Artificial Sequence: Synthetic oligonucleotide
  Target: ATXN2; (+) strand; PAM type: YTN; PAM sequence: CTA
aaaatacaaaaatgggccga

SEQ ID NO: 90265 - DNA, 20 bp, Artificial Sequence
  Description of Artificial Sequence: Synthetic oligonucleotide
  Target: ATXN2; (+) strand; PAM type: YTN; PAM sequence: CTA
taaccccagctactctggag

SEQ ID NO: 90266 - DNA, 20 bp, Artificial Sequence
  Description of Artificial Sequence: Synthetic oligonucleotide
  Target: ATXN2; (+) strand; PAM type: YTN; PAM sequence: CTA
ctctggaggctgacgcaggg

SEQ ID NO: 90267 - DNA, 20 bp, Artificial Sequence
  Description of Artificial Sequence: Synthetic oligonucleotide
  Target: ATXN2; (+) strand; PAM type: YTN; PAM sequence: CTC
tggaggctgacgcaggggga

SEQ ID NO: 90268 - DNA, 20 bp, Artificial Sequence
  Description of Artificial Sequence: Synthetic oligonucleotide
  Target: ATXN2; (+) strand; PAM type: YTN; PAM sequence: CTG
gaggctgacgcagggggatc

SEQ ID NO: 90269 - DNA, 20 bp, Artificial Sequence
  Description of Artificial Sequence: Synthetic oligonucleotide
  Target: ATXN2; (+) strand; PAM type: YTN; PAM sequence: CTG
acgcagggggatcgcttgag

SEQ ID NO: 90270 - DNA, 20 bp, Artificial Sequence
  Description of Artificial Sequence: Synthetic oligonucleotide
  Target: ATXN2; (+) strand; PAM type: YTN; PAM sequence: CTT
gagctcaggaattcgagacc

SEQ ID NO: 90271 - DNA, 20 bp, Artificial Sequence
  Description of Artificial Sequence: Synthetic oligonucleotide
  Target: ATXN2; (+) strand; PAM type: YTN; PAM sequence: TTG
agctcaggaattcgagacca

SEQ ID NO: 90272 - DNA, 20 bp, Artificial Sequence
  Description of Artificial Sequence: Synthetic oligonucleotide
  Target: ATXN2; (+) strand; PAM type: YTN; PAM sequence: CTC
aggaattcgagaccagcctg

SEQ ID NO: 90273 - DNA, 20 bp, Artificial Sequence
  Description of Artificial Sequence: Synthetic oligonucleotide
  Target: ATXN2; (+) strand; PAM type: YTN; PAM sequence: TTC
gagaccagcctgggaagcac

SEQ ID NO: 90274 - DNA, 20 bp, Artificial Sequence
  Description of Artificial Sequence: Synthetic oligonucleotide
  Target: ATXN2; (+) strand; PAM type: YTN; PAM sequence: CTG
ggaagcacggagaagctcca

SEQ ID NO: 90275 - DNA, 20 bp, Artificial Sequence
  Description of Artificial Sequence: Synthetic oligonucleotide
  Target: ATXN2; (+) strand; PAM type: YTN; PAM sequence: CTC
catctctacaaaaaatataa

SEQ ID NO: 90276 - DNA, 20 bp, Artificial Sequence
  Description of Artificial Sequence: Synthetic oligonucleotide
  Target: ATXN2; (+) strand; PAM type: YTN; PAM sequence: CTC
tacaaaaaatataaaaatta

SEQ ID NO: 90277 - DNA, 20 bp, Artificial Sequence
  Description of Artificial Sequence: Synthetic oligonucleotide
  Target: ATXN2; (+) strand; PAM type: YTN; PAM sequence: CTA
caaaaaatataaaaattagc

SEQ ID NO: 90278 - DNA, 20 bp, Artificial Sequence
  Description of Artificial Sequence: Synthetic oligonucleotide
  Target: ATXN2; (+) strand; PAM type: YTN; PAM sequence: TTA
gcctggtgtggtggcgtatg

SEQ ID NO: 90279 - DNA, 20 bp, Artificial Sequence
  Description of Artificial Sequence: Synthetic oligonucleotide
  Target: ATXN2; (+) strand; PAM type: YTN; PAM sequence: CTG
gtgtggtggcgtatgcctgc

SEQ ID NO: 90280 - DNA, 20 bp, Artificial Sequence
  Description of Artificial Sequence: Synthetic oligonucleotide
  Target: ATXN2; (+) strand; PAM type: YTN; PAM sequence: CTG
cagccccagctatctgggag

SEQ ID NO: 90281 - DNA, 20 bp, Artificial Sequence
  Description of Artificial Sequence: Synthetic oligonucleotide
  Target: ATXN2; (+) strand; PAM type: YTN; PAM sequence: CTA
tctgggagggtgaggcagga

SEQ ID NO: 90282 - DNA, 20 bp, Artificial Sequence
  Description of Artificial Sequence: Synthetic oligonucleotide
  Target: ATXN2; (+) strand; PAM type: YTN; PAM sequence: CTG
ggagggtgaggcaggagaat

SEQ ID NO: 90283 - DNA, 20 bp, Artificial Sequence
  Description of Artificial Sequence: Synthetic oligonucleotide
  Target: ATXN2; (+) strand; PAM type: YTN; PAM sequence: TTG
cttgaacccaggaagcgaag

SEQ ID NO: 90284 - DNA, 20 bp, Artificial Sequence
  Description of Artificial Sequence: Synthetic oligonucleotide
  Target: ATXN2; (+) strand; PAM type: YTN; PAM sequence: CTT
gaacccaggaagcgaaggct

SEQ ID NO: 90285 - DNA, 20 bp, Artificial Sequence
  Description of Artificial Sequence: Synthetic oligonucleotide
  Target: ATXN2; (+) strand; PAM type: YTN; PAM sequence: TTG
aacccaggaagcgaaggctg

SEQ ID NO: 90286 - DNA, 20 bp, Artificial Sequence
  Description of Artificial Sequence: Synthetic oligonucleotide
  Target: ATXN2; (+) strand; PAM type: YTN; PAM sequence: CTG
cagtgagccgagattgtgcc

SEQ ID NO: 90287 - DNA, 20 bp, Artificial Sequence
  Description of Artificial Sequence: Synthetic oligonucleotide
  Target: ATXN2; (+) strand; PAM type: YTN; PAM sequence: TTG
tgccactgtgctccagcctg

SEQ ID NO: 90288 - DNA, 20 bp, Artificial Sequence
  Description of Artificial Sequence: Synthetic oligonucleotide
  Target: ATXN2; (+) strand; PAM type: YTN; PAM sequence: CTG
tgctccagcctgggcacgat

SEQ ID NO: 90289 - DNA, 20 bp, Artificial Sequence
  Description of Artificial Sequence: Synthetic oligonucleotide
  Target: ATXN2; (+) strand; PAM type: YTN; PAM sequence: CTC
cagcctgggcacgatctcaa

SEQ ID NO: 90290 - DNA, 20 bp, Artificial Sequence
  Description of Artificial Sequence: Synthetic oligonucleotide
  Target: ATXN2; (+) strand; PAM type: YTN; PAM sequence: CTG
ggcacgatctcaaaacaata

SEQ ID NO: 90291 - DNA, 20 bp, Artificial Sequence
  Description of Artificial Sequence: Synthetic oligonucleotide
  Target: ATXN2; (+) strand; PAM type: YTN; PAM sequence: CTC
aaaacaatacaaaaaaacaa

SEQ ID NO: 90292 - DNA, 20 bp, Artificial Sequence
  Description of Artificial Sequence: Synthetic oligonucleotide
  Target: ATXN2; (+) strand; PAM type: YTN; PAM sequence: CTT
cataaccactagaatggaca

SEQ ID NO: 90293 - DNA, 20 bp, Artificial Sequence
  Description of Artificial Sequence: Synthetic oligonucleotide
  Target: ATXN2; (+) strand; PAM type: YTN; PAM sequence: TTC
ataaccactagaatggacat

SEQ ID NO: 90294 - DNA, 20 bp, Artificial Sequence
  Description of Artificial Sequence: Synthetic oligonucleotide
  Target: ATXN2; (+) strand; PAM type: YTN; PAM sequence: CTA
gaatggacataacccaaacc

SEQ ID NO: 90295 - DNA, 20 bp, Artificial Sequence
  Description of Artificial Sequence: Synthetic oligonucleotide
  Target: ATXN2; (+) strand; PAM type: YTN; PAM sequence: TTA
tttatgaggatgtggagaaa

SEQ ID NO: 90296 - DNA, 20 bp, Artificial Sequence
  Description of Artificial Sequence: Synthetic oligonucleotide
  Target: ATXN2; (+) strand; PAM type: YTN; PAM sequence: TTT
atgaggatgtggagaaactg

SEQ ID NO: 90297 - DNA, 20 bp, Artificial Sequence
  Description of Artificial Sequence: Synthetic oligonucleotide
  Target: ATXN2; (+) strand; PAM type: YTN; PAM sequence: TTA
tgaggatgtggagaaactgg

SEQ ID NO: 90298 - DNA, 20 bp, Artificial Sequence
  Description of Artificial Sequence: Synthetic oligonucleotide
  Target: ATXN2; (+) strand; PAM type: YTN; PAM sequence: CTG
gaacacttgtacattactgg

SEQ ID NO: 90299 - DNA, 20 bp, Artificial Sequence
  Description of Artificial Sequence: Synthetic oligonucleotide
  Target: ATXN2; (+) strand; PAM type: YTN; PAM sequence: CTT
gtacattactggtagaaata

SEQ ID NO: 90300 - DNA, 20 bp, Artificial Sequence
  Description of Artificial Sequence: Synthetic oligonucleotide
  Target: ATXN2; (+) strand; PAM type: YTN; PAM sequence: TTG
tacattactggtagaaatac

SEQ ID NO: 90301 - DNA, 20 bp, Artificial Sequence
  Description of Artificial Sequence: Synthetic oligonucleotide
  Target: ATXN2; (+) strand; PAM type: YTN; PAM sequence: TTA
ctggtagaaatacaaaatga

SEQ ID NO: 90302 - DNA, 20 bp, Artificial Sequence
  Description of Artificial Sequence: Synthetic oligonucleotide
  Target: ATXN2; (+) strand; PAM type: YTN; PAM sequence: CTG
gtagaaatacaaaatgatgc

SEQ ID NO: 90303 - DNA, 20 bp, Artificial Sequence
  Description of Artificial Sequence: Synthetic oligonucleotide
  Target: ATXN2; (+) strand; PAM type: YTN; PAM sequence: CTG
ctttggaaaagtttggcagt

SEQ ID NO: 90304 - DNA, 20 bp, Artificial Sequence
  Description of Artificial Sequence: Synthetic oligonucleotide
  Target: ATXN2; (+) strand; PAM type: YTN; PAM sequence: CTT
tggaaaagtttggcagttcc

SEQ ID NO: 90305 - DNA, 20 bp, Artificial Sequence
  Description of Artificial Sequence: Synthetic oligonucleotide
  Target: ATXN2; (+) strand; PAM type: YTN; PAM sequence: TTT
ggaaaagtttggcagttcca

SEQ ID NO: 90306 - DNA, 20 bp, Artificial Sequence
  Description of Artificial Sequence: Synthetic oligonucleotide
  Target: ATXN2; (+) strand; PAM type: YTN; PAM sequence: TTG
gaaaagtttggcagttccat

SEQ ID NO: 90307 - DNA, 20 bp, Artificial Sequence
  Description of Artificial Sequence: Synthetic oligonucleotide
  Target: ATXN2; (+) strand; PAM type: YTN; PAM sequence: TTT
ggcagttccatcacagcatt

SEQ ID NO: 90308 - DNA, 20 bp, Artificial Sequence
  Description of Artificial Sequence: Synthetic oligonucleotide
  Target: ATXN2; (+) strand; PAM type: YTN; PAM sequence: TTG
gcagttccatcacagcattt

SEQ ID NO: 90309 - DNA, 20 bp, Artificial Sequence
  Description of Artificial Sequence: Synthetic oligonucleotide
  Target: ATXN2; (+) strand; PAM type: YTN; PAM sequence: TTC
catcacagcatttctacttt

SEQ ID NO: 90310 - DNA, 20 bp, Artificial Sequence
  Description of Artificial Sequence: Synthetic oligonucleotide
  Target: ATXN2; (+) strand; PAM type: YTN; PAM sequence: TTT
ctactttaggagaaatgaaa

SEQ ID NO: 90311 - DNA, 20 bp, Artificial Sequence
  Description of Artificial Sequence: Synthetic oligonucleotide
  Target: ATXN2; (+) strand; PAM type: YTN; PAM sequence: TTC
tactttaggagaaatgaaaa

SEQ ID NO: 90312 - DNA, 20 bp, Artificial Sequence
  Description of Artificial Sequence: Synthetic oligonucleotide
  Target: ATXN2; (+) strand; PAM type: YTN; PAM sequence: CTA
ctttaggagaaatgaaaatc

SEQ ID NO: 90313 - DNA, 20 bp, Artificial Sequence
  Description of Artificial Sequence: Synthetic oligonucleotide
  Target: ATXN2; (+) strand; PAM type: YTN; PAM sequence: CTT
taggagaaatgaaaatctaa

SEQ ID NO: 90314 - DNA, 20 bp, Artificial Sequence
  Description of Artificial Sequence: Synthetic oligonucleotide
  Target: ATXN2; (+) strand; PAM type: YTN; PAM sequence: TTT
aggagaaatgaaaatctaag

SEQ ID NO: 90315 - DNA, 20 bp, Artificial Sequence
  Description of Artificial Sequence: Synthetic oligonucleotide
  Target: ATXN2; (+) strand; PAM type: YTN; PAM sequence: TTA
ggagaaatgaaaatctaagg

SEQ ID NO: 90316 - DNA, 20 bp, Artificial Sequence
  Description of Artificial Sequence: Synthetic oligonucleotide
  Target: ATXN2; (+) strand; PAM type: YTN; PAM sequence: CTA
aggccacatgaaaaaaaatt

SEQ ID NO: 90317 - DNA, 20 bp, Artificial Sequence
  Description of Artificial Sequence: Synthetic oligonucleotide
  Target: ATXN2; (+) strand; PAM type: YTN; PAM sequence: TTT
tattttttattttttgagac

SEQ ID NO: 90318 - DNA, 20 bp, Artificial Sequence
  Description of Artificial Sequence: Synthetic oligonucleotide
  Target: ATXN2; (+) strand; PAM type: YTN; PAM sequence: TTT
attttttattttttgagact

SEQ ID NO: 90319 - DNA, 20 bp, Artificial Sequence
  Description of Artificial Sequence: Synthetic oligonucleotide
  Target: ATXN2; (+) strand; PAM type: YTN; PAM sequence: TTA
ttttttattttttgagactc

SEQ ID NO: 90320 - DNA, 20 bp, Artificial Sequence
  Description of Artificial Sequence: Synthetic oligonucleotide
  Target: ATXN2; (+) strand; PAM type: YTN; PAM sequence: TTT
tttattttttgagactcact

SEQ ID NO: 90321 - DNA, 20 bp, Artificial Sequence
  Description of Artificial Sequence: Synthetic oligonucleotide
  Target: ATXN2; (+) strand; PAM type: YTN; PAM sequence: TTT
ttattttttgagactcactc

SEQ ID NO: 90322 - DNA, 20 bp, Artificial Sequence
  Description of Artificial Sequence: Synthetic oligonucleotide
  Target: ATXN2; (+) strand; PAM type: YTN; PAM sequence: TTT
tattttttgagactcactct

SEQ ID NO: 90323 - DNA, 20 bp, Artificial Sequence
  Description of Artificial Sequence: Synthetic oligonucleotide
  Target: ATXN2; (+) strand; PAM type: YTN; PAM sequence: TTT
attttttgagactcactctt

SEQ ID NO: 90324 - DNA, 20 bp, Artificial Sequence
  Description of Artificial Sequence: Synthetic oligonucleotide
  Target: ATXN2; (+) strand; PAM type: YTN; PAM sequence: TTA
ttttttgagactcactcttt

SEQ ID NO: 90325 - DNA, 20 bp, Artificial Sequence
  Description of Artificial Sequence: Synthetic oligonucleotide
  Target: ATXN2; (+) strand; PAM type: YTN; PAM sequence: TTT
tttgagactcactctttcac

SEQ ID NO: 90326 - DNA, 20 bp, Artificial Sequence
  Description of Artificial Sequence: Synthetic oligonucleotide
  Target: ATXN2; (+) strand; PAM type: YTN; PAM sequence: TTT
ttgagactcactctttcact

SEQ ID NO: 90327 - DNA, 20 bp, Artificial Sequence
  Description of Artificial Sequence: Synthetic oligonucleotide
  Target: ATXN2; (+) strand; PAM type: YTN; PAM sequence: TTT
tgagactcactctttcactc

SEQ ID NO: 90328 - DNA, 20 bp, Artificial Sequence
  Description of Artificial Sequence: Synthetic oligonucleotide
  Target: ATXN2; (+) strand; PAM type: YTN; PAM sequence: TTT
gagactcactctttcactca

SEQ ID NO: 90329 - DNA, 20 bp, Artificial Sequence
  Description of Artificial Sequence: Synthetic oligonucleotide
  Target: ATXN2; (+) strand; PAM type: YTN; PAM sequence: TTG
agactcactctttcactcag

SEQ ID NO: 90330 - DNA, 20 bp, Artificial Sequence
  Description of Artificial Sequence: Synthetic oligonucleotide
  Target: ATXN2; (+) strand; PAM type: YTN; PAM sequence: CTC
actctttcactcaggctggg

SEQ ID NO: 90331 - DNA, 20 bp, Artificial Sequence
  Description of Artificial Sequence: Synthetic oligonucleotide
  Target: ATXN2; (+) strand; PAM type: YTN; PAM sequence: CTC
tttcactcaggctggggtgc

SEQ ID NO: 90332 - DNA, 20 bp, Artificial Sequence
  Description of Artificial Sequence: Synthetic oligonucleotide
  Target: ATXN2; (+) strand; PAM type: YTN; PAM sequence: CTT
tcactcaggctggggtgcag

SEQ ID NO: 90333 - DNA, 20 bp, Artificial Sequence
  Description of Artificial Sequence: Synthetic oligonucleotide
  Target: ATXN2; (+) strand; PAM type: YTN; PAM sequence: TTT
cactcaggctggggtgcagt

SEQ ID NO: 90334 - DNA, 20 bp, Artificial Sequence
  Description of Artificial Sequence: Synthetic oligonucleotide
  Target: ATXN2; (+) strand; PAM type: YTN; PAM sequence: TTC
actcaggctggggtgcagtg

SEQ ID NO: 90335 - DNA, 20 bp, Artificial Sequence
  Description of Artificial Sequence: Synthetic oligonucleotide
  Target: ATXN2; (+) strand; PAM type: YTN; PAM sequence: CTC
aggctggggtgcagtggtgt

SEQ ID NO: 90336 - DNA, 20 bp, Artificial Sequence
  Description of Artificial Sequence: Synthetic oligonucleotide
  Target: ATXN2; (+) strand; PAM type: YTN; PAM sequence: CTG
gggtgcagtggtgtgatctc

SEQ ID NO: 90337 - DNA, 20 bp, Artificial Sequence
  Description of Artificial Sequence: Synthetic oligonucleotide
  Target: ATXN2; (+) strand; PAM type: YTN; PAM sequence: CTC
agctcactgcagcctccgcc

SEQ ID NO: 90338 - DNA, 20 bp, Artificial Sequence
  Description of Artificial Sequence: Synthetic oligonucleotide
  Target: ATXN2; (+) strand; PAM type: YTN; PAM sequence: CTC
actgcagcctccgcctccca

SEQ ID NO: 90339 - DNA, 20 bp, Artificial Sequence
  Description of Artificial Sequence: Synthetic oligonucleotide
  Target: ATXN2; (+) strand; PAM type: YTN; PAM sequence: CTG
cagcctccgcctcccaggtt

SEQ ID NO: 90340 - DNA, 20 bp, Artificial Sequence
  Description of Artificial Sequence: Synthetic oligonucleotide
  Target: ATXN2; (+) strand; PAM type: YTN; PAM sequence: CTC
cgcctcccaggttcaagcga

SEQ ID NO: 90341 - DNA, 20 bp, Artificial Sequence
  Description of Artificial Sequence: Synthetic oligonucleotide
  Target: ATXN2; (+) strand; PAM type: YTN; PAM sequence: CTC
ccaggttcaagcgattctga

SEQ ID NO: 90342 - DNA, 20 bp, Artificial Sequence
  Description of Artificial Sequence: Synthetic oligonucleotide
  Target: ATXN2; (+) strand; PAM type: YTN; PAM sequence: TTC
aagcgattctgatgctcctg

SEQ ID NO: 90343 - DNA, 20 bp, Artificial Sequence
  Description of Artificial Sequence: Synthetic oligonucleotide
  Target: ATXN2; (+) strand; PAM type: YTN; PAM sequence: TTC
tgatgctcctgcctcagcct

SEQ ID NO: 90344 - DNA, 20 bp, Artificial Sequence
  Description of Artificial Sequence: Synthetic oligonucleotide
  Target: ATXN2; (+) strand; PAM type: YTN; PAM sequence: CTG
atgctcctgcctcagcctcc

SEQ ID NO: 90345 - DNA, 20 bp, Artificial Sequence
  Description of Artificial Sequence: Synthetic oligonucleotide
  Target: ATXN2; (+) strand; PAM type: YTN; PAM sequence: CTC
ctgcctcagcctcctgaata

SEQ ID NO: 90346 - DNA, 20 bp, Artificial Sequence
  Description of Artificial Sequence: Synthetic oligonucleotide
  Target: ATXN2; (+) strand; PAM type: YTN; PAM sequence: CTG
cctcagcctcctgaatagct

SEQ ID NO: 90347 - DNA, 20 bp, Artificial Sequence
  Description of Artificial Sequence: Synthetic oligonucleotide
  Target: ATXN2; (+) strand; PAM type: YTN; PAM sequence: CTC
agcctcctgaatagctggga

SEQ ID NO: 90348 - DNA, 20 bp, Artificial Sequence
  Description of Artificial Sequence: Synthetic oligonucleotide
  Target: ATXN2; (+) strand; PAM type: YTN; PAM sequence: CTC
ctgaatagctgggattatag

SEQ ID NO: 90349 - DNA, 20 bp, Artificial Sequence
  Description of Artificial Sequence: Synthetic oligonucleotide
  Target: ATXN2; (+) strand; PAM type: YTN; PAM sequence: CTG
aatagctgggattataggtg

SEQ ID NO: 90350 - DNA, 20 bp, Artificial Sequence
  Description of Artificial Sequence: Synthetic oligonucleotide
  Target: ATXN2; (+) strand; PAM type: YTN; PAM sequence: CTG
ggattataggtgcacgctac

SEQ ID NO: 90351 - DNA, 20 bp, Artificial Sequence
  Description of Artificial Sequence: Synthetic oligonucleotide
  Target: ATXN2; (+) strand; PAM type: YTN; PAM sequence: TTA
taggtgcacgctaccatgcc

SEQ ID NO: 90352 - DNA, 20 bp, Artificial Sequence
  Description of Artificial Sequence: Synthetic oligonucleotide
  Target: ATXN2; (+) strand; PAM type: YTN; PAM sequence: CTA
ccatgccagtgtaatttttg

SEQ ID NO: 90353 - DNA, 20 bp, Artificial Sequence
  Description of Artificial Sequence: Synthetic oligonucleotide
  Target: ATXN2; (+) strand; PAM type: YTN; PAM sequence: TTT
ttgtatttttagtagagatg

SEQ ID NO: 90354 - DNA, 20 bp, Artificial Sequence
  Description of Artificial Sequence: Synthetic oligonucleotide
  Target: ATXN2; (+) strand; PAM type: YTN; PAM sequence: TTT
tgtatttttagtagagatgg

SEQ ID NO: 90355 - DNA, 20 bp, Artificial Sequence
  Description of Artificial Sequence: Synthetic oligonucleotide
  Target: ATXN2; (+) strand; PAM type: YTN; PAM sequence: TTT
gtatttttagtagagatggg

SEQ ID NO: 90356 - DNA, 20 bp, Artificial Sequence
  Description of Artificial Sequence: Synthetic oligonucleotide
  Target: ATXN2; (+) strand; PAM type: YTN; PAM sequence: TTG
tatttttagtagagatggga

SEQ ID NO: 90357 - DNA, 20 bp, Artificial Sequence
  Description of Artificial Sequence: Synthetic oligonucleotide
  Target: ATXN2; (+) strand; PAM type: YTN; PAM sequence: TTT
ttagtagagatgggatttca

SEQ ID NO: 90358 - DNA, 20 bp, Artificial Sequence
  Description of Artificial Sequence: Synthetic oligonucleotide
  Target: ATXN2; (+) strand; PAM type: YTN; PAM sequence: TTT
tagtagagatgggatttcac

SEQ ID NO: 90359 - DNA, 20 bp, Artificial Sequence
  Description of Artificial Sequence: Synthetic oligonucleotide
  Target: ATXN2; (+) strand; PAM type: YTN; PAM sequence: TTT
agtagagatgggatttcacc

SEQ ID NO: 90360 - DNA, 20 bp, Artificial Sequence
  Description of Artificial Sequence: Synthetic oligonucleotide
  Target: ATXN2; (+) strand; PAM type: YTN; PAM sequence: TTA
gtagagatgggatttcacca

SEQ ID NO: 90361 - DNA, 20 bp, Artificial Sequence
  Description of Artificial Sequence: Synthetic oligonucleotide
  Target: ATXN2; (+) strand; PAM type: YTN; PAM sequence: TTT
caccatgttggccaggctgg

SEQ ID NO: 90362 - DNA, 20 bp, Artificial Sequence
  Description of Artificial Sequence: Synthetic oligonucleotide
  Target: ATXN2; (+) strand; PAM type: YTN; PAM sequence: TTC
accatgttggccaggctggt

SEQ ID NO: 90363 - DNA, 20 bp, Artificial Sequence
  Description of Artificial Sequence: Synthetic oligonucleotide
  Target: ATXN2; (+) strand; PAM type: YTN; PAM sequence: TTG
gccaggctggtctcaaactc

SEQ ID NO: 90364 - DNA, 20 bp, Artificial Sequence
  Description of Artificial Sequence: Synthetic oligonucleotide
  Target: ATXN2; (+) strand; PAM type: YTN; PAM sequence: CTG
gtctcaaactcctgacctca

SEQ ID NO: 90365 - DNA, 20 bp, Artificial Sequence
  Description of Artificial Sequence: Synthetic oligonucleotide
  Target: ATXN2; (+) strand; PAM type: YTN; PAM sequence: CTC
aaactcctgacctcaagtca

SEQ ID NO: 90366 - DNA, 20 bp, Artificial Sequence
  Description of Artificial Sequence: Synthetic oligonucleotide
  Target: ATXN2; (+) strand; PAM type: YTN; PAM sequence: CTC
ctgacctcaagtcatctgcc

SEQ ID NO: 90367 - DNA, 20 bp, Artificial Sequence
  Description of Artificial Sequence: Synthetic oligonucleotide
  Target: ATXN2; (+) strand; PAM type: YTN; PAM sequence: CTG
acctcaagtcatctgcccac

SEQ ID NO: 90368 - DNA, 20 bp, Artificial Sequence
  Description of Artificial Sequence: Synthetic oligonucleotide
  Target: ATXN2; (+) strand; PAM type: YTN; PAM sequence: CTC
aagtcatctgcccacctcag

SEQ ID NO: 90369 - DNA, 20 bp, Artificial Sequence
  Description of Artificial Sequence: Synthetic oligonucleotide
  Target: ATXN2; (+) strand; PAM type: YTN; PAM sequence: CTG
cccacctcagcctcccagac

SEQ ID NO: 90370 - DNA, 20 bp, Artificial Sequence
  Description of Artificial Sequence: Synthetic oligonucleotide
  Target: ATXN2; (+) strand; PAM type: YTN; PAM sequence: CTC
agcctcccagactgctggga

SEQ ID NO: 90371 - DNA, 20 bp, Artificial Sequence
  Description of Artificial Sequence: Synthetic oligonucleotide
  Target: ATXN2; (+) strand; PAM type: YTN; PAM sequence: CTC
ccagactgctgggattatag

SEQ ID NO: 90372 - DNA, 20 bp, Artificial Sequence
  Description of Artificial Sequence: Synthetic oligonucleotide
  Target: ATXN2; (+) strand; PAM type: YTN; PAM sequence: CTG
ctgggattataggcatgagc

SEQ ID NO: 90373 - DNA, 20 bp, Artificial Sequence
  Description of Artificial Sequence: Synthetic oligonucleotide
  Target: ATXN2; (+) strand; PAM type: YTN; PAM sequence: CTG
ggattataggcatgagccac

SEQ ID NO: 90374 - DNA, 20 bp, Artificial Sequence
  Description of Artificial Sequence: Synthetic oligonucleotide
  Target: ATXN2; (+) strand; PAM type: YTN; PAM sequence: TTA
taggcatgagccactgctcc

SEQ ID NO: 90375 - DNA, 20 bp, Artificial Sequence
  Description of Artificial Sequence: Synthetic oligonucleotide
  Target: ATXN2; (+) strand; PAM type: YTN; PAM sequence: CTG
ctcccagcctcatatgaaaa

SEQ ID NO: 90376 - DNA, 20 bp, Artificial Sequence
  Description of Artificial Sequence: Synthetic oligonucleotide
  Target: ATXN2; (+) strand; PAM type: YTN; PAM sequence: CTC
ccagcctcatatgaaaattt

SEQ ID NO: 90377 - DNA, 20 bp, Artificial Sequence
  Description of Artificial Sequence: Synthetic oligonucleotide
  Target: ATXN2; (+) strand; PAM type: YTN; PAM sequence: CTC
atatgaaaatttgtacatga

SEQ ID NO: 90378 - DNA, 20 bp, Artificial Sequence
  Description of Artificial Sequence: Synthetic oligonucleotide
  Target: ATXN2; (+) strand; PAM type: YTN; PAM sequence: TTT
gtacatgaaaatccacaaaa

SEQ ID NO: 90379 - DNA, 20 bp, Artificial Sequence
  Description of Artificial Sequence: Synthetic oligonucleotide
  Target: ATXN2; (+) strand; PAM type: YTN; PAM sequence: TTG
tacatgaaaatccacaaaag

SEQ ID NO: 90380 - DNA, 20 bp, Artificial Sequence
  Description of Artificial Sequence: Synthetic oligonucleotide
  Target: ATXN2; (+) strand; PAM type: YTN; PAM sequence: TTA
ctcattgccagaaaaaggaa

SEQ ID NO: 90381 - DNA, 20 bp, Artificial Sequence
  Description of Artificial Sequence: Synthetic oligonucleotide
  Target: ATXN2; (+) strand; PAM type: YTN; PAM sequence: CTC
attgccagaaaaaggaaata

SEQ ID NO: 90382 - DNA, 20 bp, Artificial Sequence
  Description of Artificial Sequence: Synthetic oligonucleotide
  Target: ATXN2; (+) strand; PAM type: YTN; PAM sequence: TTG
ccagaaaaaggaaataatcc

SEQ ID NO: 90383 - DNA, 20 bp, Artificial Sequence
  Description of Artificial Sequence: Synthetic oligonucleotide
  Target: ATXN2; (+) strand; PAM type: YTN; PAM sequence: TTC
atcaactgatgataggtaaa

SEQ ID NO: 90384 - DNA, 20 bp, Artificial Sequence
  Description of Artificial Sequence: Synthetic oligonucleotide
  Target: ATXN2; (+) strand; PAM type: YTN; PAM sequence: CTG
atgataggtaaaagtggtat

SEQ ID NO: 90385 - DNA, 20 bp, Artificial Sequence
  Description of Artificial Sequence: Synthetic oligonucleotide
  Target: ATXN2; (+) strand; PAM type: YTN; PAM sequence: TTC
aggccaggagcagtggctca

SEQ ID NO: 90386 - DNA, 20 bp, Artificial Sequence
  Description of Artificial Sequence: Synthetic oligonucleotide
  Target: ATXN2; (+) strand; PAM type: YTN; PAM sequence: CTC
acacctgtaatcccagcact

SEQ ID NO: 90387 - DNA, 20 bp, Artificial Sequence
  Description of Artificial Sequence: Synthetic oligonucleotide
  Target: ATXN2; (+) strand; PAM type: YTN; PAM sequence: CTG
taatcccagcactttgggag

SEQ ID NO: 90388 - DNA, 20 bp, Artificial Sequence
  Description of Artificial Sequence: Synthetic oligonucleotide
  Target: ATXN2; (+) strand; PAM type: YTN; PAM sequence: CTT
tgggaggccgagggaggtgg

SEQ ID NO: 90389 - DNA, 20 bp, Artificial Sequence
  Description of Artificial Sequence: Synthetic oligonucleotide
  Target: ATXN2; (+) strand; PAM type: YTN; PAM sequence: TTT
gggaggccgagggaggtgga

SEQ ID NO: 90390 - DNA, 20 bp, Artificial Sequence
  Description of Artificial Sequence: Synthetic oligonucleotide
  Target: ATXN2; (+) strand; PAM type: YTN; PAM sequence: TTG
ggaggccgagggaggtggat

SEQ ID NO: 90391 - DNA, 20 bp, Artificial Sequence
  Description of Artificial Sequence: Synthetic oligonucleotide
  Target: ATXN2; (+) strand; PAM type: YTN; PAM sequence: CTT
gaggccaggagttcaagacc

SEQ ID NO: 90392 - DNA, 20 bp, Artificial Sequence
  Description of Artificial Sequence: Synthetic oligonucleotide
  Target: ATXN2; (+) strand; PAM type: YTN; PAM sequence: TTG
aggccaggagttcaagacca

SEQ ID NO: 90393 - DNA, 20 bp, Artificial Sequence
  Description of Artificial Sequence: Synthetic oligonucleotide
  Target: ATXN2; (+) strand; PAM type: YTN; PAM sequence: TTC
aagaccagcccggccaacat

SEQ ID NO: 90394 - DNA, 20 bp, Artificial Sequence
  Description of Artificial Sequence: Synthetic oligonucleotide
  Target: ATXN2; (+) strand; PAM type: YTN; PAM sequence: CTT
tctctactattttttttttt

SEQ ID NO: 90395 - DNA, 20 bp, Artificial Sequence
  Description of Artificial Sequence: Synthetic oligonucleotide
  Target: ATXN2; (+) strand; PAM type: YTN; PAM sequence: TTT
ctctactatttttttttttt

SEQ ID NO: 90396 - DNA, 20 bp, Artificial Sequence
  Description of Artificial Sequence: Synthetic oligonucleotide
  Target: ATXN2; (+) strand; PAM type: YTN; PAM sequence: TTC
tctactattttttttttttt

SEQ ID NO: 90397 - DNA, 20 bp, Artificial Sequence
  Description of Artificial Sequence: Synthetic oligonucleotide
  Target: ATXN2; (+) strand; PAM type: YTN; PAM sequence: CTC
tactattttttttttttttt

SEQ ID NO: 90398 - DNA, 20 bp, Artificial Sequence
  Description of Artificial Sequence: Synthetic oligonucleotide
  Target: ATXN2; (+) strand; PAM type: YTN; PAM sequence: CTA
ctattttttttttttttttt

SEQ ID NO: 90399 - DNA, 20 bp, Artificial Sequence
  Description of Artificial Sequence: Synthetic oligonucleotide
  Target: ATXN2; (+) strand; PAM type: YTN; PAM sequence: CTA
tttttttttttttttttttt

SEQ ID NO: 90400 - DNA, 20 bp, Artificial Sequence
  Description of Artificial Sequence: Synthetic oligonucleotide
  Target: ATXN2; (+) strand; PAM type: YTN; PAM sequence: TTT
tttttttttttttttttttg

SEQ ID NO: 90401 - DNA, 20 bp, Artificial Sequence
  Description of Artificial Sequence: Synthetic oligonucleotide
  Target: ATXN2; (+) strand; PAM type: YTN; PAM sequence: TTT
ttttttttttttttttttga

SEQ ID NO: 90402 - DNA, 20 bp, Artificial Sequence
  Description of Artificial Sequence: Synthetic oligonucleotide
  Target: ATXN2; (+) strand; PAM type: YTN; PAM sequence: TTT
tttttttttttttttttgag

SEQ ID NO: 90403 - DNA, 20 bp, Artificial Sequence
  Description of Artificial Sequence: Synthetic oligonucleotide
  Target: ATXN2; (+) strand; PAM type: YTN; PAM sequence: TTT
ttttttttttttttttgaga

SEQ ID NO: 90404 - DNA, 20 bp, Artificial Sequence
  Description of Artificial Sequence: Synthetic oligonucleotide
  Target: ATXN2; (+) strand; PAM type: YTN; PAM sequence: TTT
tttttttttttttttgagac

SEQ ID NO: 90405 - DNA, 20 bp, Artificial Sequence
  Description of Artificial Sequence: Synthetic oligonucleotide
  Target: ATXN2; (+) strand; PAM type: YTN; PAM sequence: TTT
ttttttttttttttgagacg

SEQ ID NO: 90406 - DNA, 20 bp, Artificial Sequence
  Description of Artificial Sequence: Synthetic oligonucleotide
  Target: ATXN2; (+) strand; PAM type: YTN; PAM sequence: TTT
tttttttttttttgagacgg

SEQ ID NO: 90407 - DNA, 20 bp, Artificial Sequence
  Description of Artificial Sequence: Synthetic oligonucleotide
  Target: ATXN2; (+) strand; PAM type: YTN; PAM sequence: TTT
ttttttttttttgagacgga

SEQ ID NO: 90408 - DNA, 20 bp, Artificial Sequence
  Description of Artificial Sequence: Synthetic oligonucleotide
  Target: ATXN2; (+) strand; PAM type: YTN; PAM sequence: TTT
tttttttttttgagacggag

SEQ ID NO: 90409 - DNA, 20 bp, Artificial Sequence
  Description of Artificial Sequence: Synthetic oligonucleotide
  Target: ATXN2; (+) strand; PAM type: YTN; PAM sequence: TTT
ttttttttttgagacggagt

SEQ ID NO: 90410 - DNA, 20 bp, Artificial Sequence
  Description of Artificial Sequence: Synthetic oligonucleotide
  Target: ATXN2; (+) strand; PAM type: YTN; PAM sequence: TTT
tttttttttgagacggagtc

SEQ ID NO: 90411 - DNA, 20 bp, Artificial Sequence
  Description of Artificial Sequence: Synthetic oligonucleotide
  Target: ATXN2; (+) strand; PAM type: YTN; PAM sequence: TTT
ttttttttgagacggagtct

SEQ ID NO: 90412 - DNA, 20 bp, Artificial Sequence
  Description of Artificial Sequence: Synthetic oligonucleotide
  Target: ATXN2; (+) strand; PAM type: YTN; PAM sequence: TTT
tttttttgagacggagtctc

SEQ ID NO: 90413 - DNA, 20 bp, Artificial Sequence
  Description of Artificial Sequence: Synthetic oligonucleotide
  Target: ATXN2; (+) strand; PAM type: YTN; PAM sequence: TTT
ttttttgagacggagtctcg

SEQ ID NO: 90414 - DNA, 20 bp, Artificial Sequence
  Description of Artificial Sequence: Synthetic oligonucleotide
  Target: ATXN2; (+) strand; PAM type: YTN; PAM sequence: TTT
tttttgagacggagtctcgc

SEQ ID NO: 90415 - DNA, 20 bp, Artificial Sequence
  Description of Artificial Sequence: Synthetic oligonucleotide
  Target: ATXN2; (+) strand; PAM type: YTN; PAM sequence: TTT
ttttgagacggagtctcgct

SEQ ID NO: 90416 - DNA, 20 bp, Artificial Sequence
  Description of Artificial Sequence: Synthetic oligonucleotide
  Target: ATXN2; (+) strand; PAM type: YTN; PAM sequence: TTT
tttgagacggagtctcgctc

SEQ ID NO: 90417 - DNA, 20 bp, Artificial Sequence
  Description of Artificial Sequence: Synthetic oligonucleotide
  Target: ATXN2; (+) strand; PAM type: YTN; PAM sequence: TTT
ttgagacggagtctcgctct

SEQ ID NO: 90418 - DNA, 20 bp, Artificial Sequence
  Description of Artificial Sequence: Synthetic oligonucleotide
  Target: ATXN2; (+) strand; PAM type: YTN; PAM sequence: TTT
tgagacggagtctcgctctg

SEQ ID NO: 90419 - DNA, 20 bp, Artificial Sequence
  Description of Artificial Sequence: Synthetic oligonucleotide
  Target: ATXN2; (+) strand; PAM type: YTN; PAM sequence: TTT
gagacggagtctcgctctgt

SEQ ID NO: 90420 - DNA, 20 bp, Artificial Sequence
  Description of Artificial Sequence: Synthetic oligonucleotide
  Target: ATXN2; (+) strand; PAM type: YTN; PAM sequence: TTG
agacggagtctcgctctgtc

SEQ ID NO: 90421 - DNA, 20 bp, Artificial Sequence
  Description of Artificial Sequence: Synthetic oligonucleotide
  Target: ATXN2; (+) strand; PAM type: YTN; PAM sequence: CTC
gctctgtcacccaggctgga

SEQ ID NO: 90422 - DNA, 20 bp, Artificial Sequence
  Description of Artificial Sequence: Synthetic oligonucleotide
  Target: ATXN2; (+) strand; PAM type: YTN; PAM sequence: CTC
tgtcacccaggctggagtgc

SEQ ID NO: 90423 - DNA, 20 bp, Artificial Sequence
  Description of Artificial Sequence: Synthetic oligonucleotide
  Target: ATXN2; (+) strand; PAM type: YTN; PAM sequence: CTG
tcacccaggctggagtgcag

SEQ ID NO: 90424 - DNA, 20 bp, Artificial Sequence
  Description of Artificial Sequence: Synthetic oligonucleotide
  Target: ATXN2; (+) strand; PAM type: YTN; PAM sequence: CTG
gagtgcagtggcaccatctc

SEQ ID NO: 90425 - DNA, 20 bp, Artificial Sequence
  Description of Artificial Sequence: Synthetic oligonucleotide
  Target: ATXN2; (+) strand; PAM type: YTN; PAM sequence: CTC
agctcactgccagctctgcc

SEQ ID NO: 90426 - DNA, 20 bp, Artificial Sequence
  Description of Artificial Sequence: Synthetic oligonucleotide
  Target: ATXN2; (+) strand; PAM type: YTN; PAM sequence: CTC
actgccagctctgcctccca

SEQ ID NO: 90427 - DNA, 20 bp, Artificial Sequence
  Description of Artificial Sequence: Synthetic oligonucleotide
  Target: ATXN2; (+) strand; PAM type: YTN; PAM sequence: CTG
ccagctctgcctcccaggtt

SEQ ID NO: 90428 - DNA, 20 bp, Artificial Sequence
  Description of Artificial Sequence: Synthetic oligonucleotide
  Target: ATXN2; (+) strand; PAM type: YTN; PAM sequence: CTC
tgcctcccaggttcatgcca

SEQ ID NO: 90429 - DNA, 20 bp, Artificial Sequence
  Description of Artificial Sequence: Synthetic oligonucleotide
  Target: ATXN2; (+) strand; PAM type: YTN; PAM sequence: CTG
cctcccaggttcatgccatt

SEQ ID NO: 90430 - DNA, 20 bp, Artificial Sequence
  Description of Artificial Sequence: Synthetic oligonucleotide
  Target: ATXN2; (+) strand; PAM type: YTN; PAM sequence: CTC
ccaggttcatgccattctcc

SEQ ID NO: 90431 - DNA, 20 bp, Artificial Sequence
  Description of Artificial Sequence: Synthetic oligonucleotide
  Target: ATXN2; (+) strand; PAM type: YTN; PAM sequence: TTC
atgccattctcctgcctcag

SEQ ID NO: 90432 - DNA, 20 bp, Artificial Sequence
  Description of Artificial Sequence: Synthetic oligonucleotide
  Target: ATXN2; (+) strand; PAM type: YTN; PAM sequence: TTC
tcctgcctcagcctcccgag

SEQ ID NO: 90433 - DNA, 20 bp, Artificial Sequence
  Description of Artificial Sequence: Synthetic oligonucleotide
  Target: ATXN2; (+) strand; PAM type: YTN; PAM sequence: CTC
ctgcctcagcctcccgagta

SEQ ID NO: 90434 - DNA, 20 bp, Artificial Sequence
  Description of Artificial Sequence: Synthetic oligonucleotide
  Target: ATXN2; (+) strand; PAM type: YTN; PAM sequence: CTG
cctcagcctcccgagtagct

SEQ ID NO: 90435 - DNA, 20 bp, Artificial Sequence
  Description of Artificial Sequence: Synthetic oligonucleotide
  Target: ATXN2; (+) strand; PAM type: YTN; PAM sequence: CTC
agcctcccgagtagctggga

SEQ ID NO: 90436 - DNA, 20 bp, Artificial Sequence
  Description of Artificial Sequence: Synthetic oligonucleotide
  Target: ATXN2; (+) strand; PAM type: YTN; PAM sequence: CTC
ccgagtagctgggactatag

SEQ ID NO: 90437 - DNA, 20 bp, Artificial Sequence
  Description of Artificial Sequence: Synthetic oligonucleotide
  Target: ATXN2; (+) strand; PAM type: YTN; PAM sequence: CTG
ggactataggcacctgccac

SEQ ID NO: 90438 - DNA, 20 bp, Artificial Sequence
  Description of Artificial Sequence: Synthetic oligonucleotide
  Target: ATXN2; (+) strand; PAM type: YTN; PAM sequence: CTA
taggcacctgccaccacgct

SEQ ID NO: 90439 - DNA, 20 bp, Artificial Sequence
  Description of Artificial Sequence: Synthetic oligonucleotide
  Target: ATXN2; (+) strand; PAM type: YTN; PAM sequence: CTG
ccaccacgctcagctaattg

SEQ ID NO: 90440 - DNA, 20 bp, Artificial Sequence
  Description of Artificial Sequence: Synthetic oligonucleotide
  Target: ATXN2; (+) strand; PAM type: YTN; PAM sequence: CTC
agctaattgtttgtattttt

SEQ ID NO: 90441 - DNA, 20 bp, Artificial Sequence
  Description of Artificial Sequence: Synthetic oligonucleotide
  Target: ATXN2; (+) strand; PAM type: YTN; PAM sequence: CTA
attgtttgtatttttagtag

SEQ ID NO: 90442 - DNA, 20 bp, Artificial Sequence
  Description of Artificial Sequence: Synthetic oligonucleotide
  Target: ATXN2; (+) strand; PAM type: YTN; PAM sequence: TTG
tttgtatttttagtagagac

SEQ ID NO: 90443 - DNA, 20 bp, Artificial Sequence
  Description of Artificial Sequence: Synthetic oligonucleotide
  Target: ATXN2; (+) strand; PAM type: YTN; PAM sequence: TTT
gtatttttagtagagacacg

SEQ ID NO: 90444 - DNA, 20 bp, Artificial Sequence
  Description of Artificial Sequence: Synthetic oligonucleotide
  Target: ATXN2; (+) strand; PAM type: YTN; PAM sequence: TTG
tatttttagtagagacacgg

SEQ ID NO: 90445 - DNA, 20 bp, Artificial Sequence
  Description of Artificial Sequence: Synthetic oligonucleotide
  Target: ATXN2; (+) strand; PAM type: YTN; PAM sequence: TTT
ttagtagagacacggtttca

SEQ ID NO: 90446 - DNA, 20 bp, Artificial Sequence
  Description of Artificial Sequence: Synthetic oligonucleotide
  Target: ATXN2; (+) strand; PAM type: YTN; PAM sequence: TTT
tagtagagacacggtttcac

SEQ ID NO: 90447 - DNA, 20 bp, Artificial Sequence
  Description of Artificial Sequence: Synthetic oligonucleotide
  Target: ATXN2; (+) strand; PAM type: YTN; PAM sequence: TTT
agtagagacacggtttcact

SEQ ID NO: 90448 - DNA, 20 bp, Artificial Sequence
  Description of Artificial Sequence: Synthetic oligonucleotide
  Target: ATXN2; (+) strand; PAM type: YTN; PAM sequence: TTA
gtagagacacggtttcactg

SEQ ID NO: 90449 - DNA, 20 bp, Artificial Sequence
  Description of Artificial Sequence: Synthetic oligonucleotide
  Target: ATXN2; (+) strand; PAM type: YTN; PAM sequence: TTT
cactgtattagccaggatgg

SEQ ID NO: 90450 - DNA, 20 bp, Artificial Sequence
  Description of Artificial Sequence: Synthetic oligonucleotide
  Target: ATXN2; (+) strand; PAM type: YTN; PAM sequence: TTC
actgtattagccaggatggt

SEQ ID NO: 90451 - DNA, 20 bp, Artificial Sequence
  Description of Artificial Sequence: Synthetic oligonucleotide
  Target: ATXN2; (+) strand; PAM type: YTN; PAM sequence: CTG
tattagccaggatggtcttg

SEQ ID NO: 90452 - DNA, 20 bp, Artificial Sequence
  Description of Artificial Sequence: Synthetic oligonucleotide
  Target: ATXN2; (+) strand; PAM type: YTN; PAM sequence: TTA
gccaggatggtcttgatctc

SEQ ID NO: 90453 - DNA, 20 bp, Artificial Sequence
  Description of Artificial Sequence: Synthetic oligonucleotide
  Target: ATXN2; (+) strand; PAM type: YTN; PAM sequence: CTT
gatctcctgacctcgtgatc

SEQ ID NO: 90454 - DNA, 20 bp, Artificial Sequence
  Description of Artificial Sequence: Synthetic oligonucleotide
  Target: ATXN2; (+) strand; PAM type: YTN; PAM sequence: TTG
atctcctgacctcgtgatct

SEQ ID NO: 90455 - DNA, 20 bp, Artificial Sequence
  Description of Artificial Sequence: Synthetic oligonucleotide
  Target: ATXN2; (+) strand; PAM type: YTN; PAM sequence: CTC
ctgacctcgtgatctgccca

SEQ ID NO: 90456 - DNA, 20 bp, Artificial Sequence
  Description of Artificial Sequence: Synthetic oligonucleotide
  Target: ATXN2; (+) strand; PAM type: YTN; PAM sequence: CTG
acctcgtgatctgcccacct

SEQ ID NO: 90457 - DNA, 20 bp, Artificial Sequence
  Description of Artificial Sequence: Synthetic oligonucleotide
  Target: ATXN2; (+) strand; PAM type: YTN; PAM sequence: CTC
gtgatctgcccacctcggcc

SEQ ID NO: 90458 - DNA, 20 bp, Artificial Sequence
  Description of Artificial Sequence: Synthetic oligonucleotide
  Target: ATXN2; (+) strand; PAM type: YTN; PAM sequence: CTG
cccacctcggcctcccaaag

SEQ ID NO: 90459 - DNA, 20 bp, Artificial Sequence
  Description of Artificial Sequence: Synthetic oligonucleotide
  Target: ATXN2; (+) strand; PAM type: YTN; PAM sequence: CTC
ggcctcccaaagtgctggat

SEQ ID NO: 90460 - DNA, 20 bp, Artificial Sequence
  Description of Artificial Sequence: Synthetic oligonucleotide
  Target: ATXN2; (+) strand; PAM type: YTN; PAM sequence: CTC
ccaaagtgctggattacagg

SEQ ID NO: 90461 - DNA, 20 bp, Artificial Sequence
  Description of Artificial Sequence: Synthetic oligonucleotide
  Target: ATXN2; (+) strand; PAM type: YTN; PAM sequence: CTG
gattacaggcgtgagccacc

SEQ ID NO: 90462 - DNA, 20 bp, Artificial Sequence
  Description of Artificial Sequence: Synthetic oligonucleotide
  Target: ATXN2; (+) strand; PAM type: YTN; PAM sequence: TTA
caggcgtgagccaccgtgcc

SEQ ID NO: 90463 - DNA, 20 bp, Artificial Sequence
  Description of Artificial Sequence: Synthetic oligonucleotide
  Target: ATXN2; (+) strand; PAM type: YTN; PAM sequence: CTC
tgagtatatcatttctatta

SEQ ID NO: 90464 - DNA, 20 bp, Artificial Sequence
  Description of Artificial Sequence: Synthetic oligonucleotide
  Target: ATXN2; (+) strand; PAM type: YTN; PAM sequence: CTG
agtatatcatttctattaaa

SEQ ID NO: 90465 - DNA, 20 bp, Artificial Sequence
  Description of Artificial Sequence: Synthetic oligonucleotide
  Target: ATXN2; (+) strand; PAM type: YTN; PAM sequence: TTT
ctattaaaaagacagtacct

SEQ ID NO: 90466 - DNA, 20 bp, Artificial Sequence
  Description of Artificial Sequence: Synthetic oligonucleotide
  Target: ATXN2; (+) strand; PAM type: YTN; PAM sequence: TTC
tattaaaaagacagtacctc

SEQ ID NO: 90467 - DNA, 20 bp, Artificial Sequence
  Description of Artificial Sequence: Synthetic oligonucleotide
  Target: ATXN2; (+) strand; PAM type: YTN; PAM sequence: CTA
ttaaaaagacagtacctcct

SEQ ID NO: 90468 - DNA, 20 bp, Artificial Sequence
  Description of Artificial Sequence: Synthetic oligonucleotide
  Target: ATXN2; (+) strand; PAM type: YTN; PAM sequence: TTA
aaaagacagtacctcctgaa

SEQ ID NO: 90469 - DNA, 20 bp, Artificial Sequence
  Description of Artificial Sequence: Synthetic oligonucleotide
  Target: ATXN2; (+) strand; PAM type: YTN; PAM sequence: CTC
ctgaagttagaatgtgactc

SEQ ID NO: 90470 - DNA, 20 bp, Artificial Sequence
  Description of Artificial Sequence: Synthetic oligonucleotide
  Target: ATXN2; (+) strand; PAM type: YTN; PAM sequence: CTG
aagttagaatgtgactctcc

SEQ ID NO: 90471 - DNA, 20 bp, Artificial Sequence
  Description of Artificial Sequence: Synthetic oligonucleotide
  Target: ATXN2; (+) strand; PAM type: YTN; PAM sequence: TTA
gaatgtgactctcccatcag

SEQ ID NO: 90472 - DNA, 20 bp, Artificial Sequence
  Description of Artificial Sequence: Synthetic oligonucleotide
  Target: ATXN2; (+) strand; PAM type: YTN; PAM sequence: CTC
tcccatcagatagccaaact

SEQ ID NO: 90473 - DNA, 20 bp, Artificial Sequence
  Description of Artificial Sequence: Synthetic oligonucleotide
  Target: ATXN2; (+) strand; PAM type: YTN; PAM sequence: CTC
ccatcagatagccaaactgt

SEQ ID NO: 90474 - DNA, 20 bp, Artificial Sequence
  Description of Artificial Sequence: Synthetic oligonucleotide
  Target: ATXN2; (+) strand; PAM type: YTN; PAM sequence: CTG
tcatgcttgctcttactaca

SEQ ID NO: 90475 - DNA, 20 bp, Artificial Sequence
  Description of Artificial Sequence: Synthetic oligonucleotide
  Target: ATXN2; (+) strand; PAM type: YTN; PAM sequence: CTT
gctcttactacagtaacctt

SEQ ID NO: 90476 - DNA, 20 bp, Artificial Sequence
  Description of Artificial Sequence: Synthetic oligonucleotide
  Target: ATXN2; (+) strand; PAM type: YTN; PAM sequence: TTG
ctcttactacagtaaccttt

SEQ ID NO: 90477 - DNA, 20 bp, Artificial Sequence
  Description of Artificial Sequence: Synthetic oligonucleotide
  Target: ATXN2; (+) strand; PAM type: YTN; PAM sequence: CTC
ttactacagtaaccttttat

SEQ ID NO: 90478 - DNA, 20 bp, Artificial Sequence
  Description of Artificial Sequence: Synthetic oligonucleotide
  Target: ATXN2; (+) strand; PAM type: YTN; PAM sequence: CTT
actacagtaaccttttatat

SEQ ID NO: 90479 - DNA, 20 bp, Artificial Sequence
  Description of Artificial Sequence: Synthetic oligonucleotide
  Target: ATXN2; (+) strand; PAM type: YTN; PAM sequence: TTA
ctacagtaaccttttatatt

SEQ ID NO: 90480 - DNA, 20 bp, Artificial Sequence
  Description of Artificial Sequence: Synthetic oligonucleotide
  Target: ATXN2; (+) strand; PAM type: YTN; PAM sequence: CTA
cagtaaccttttatatttta

SEQ ID NO: 90481 - DNA, 20 bp, Artificial Sequence
  Description of Artificial Sequence: Synthetic oligonucleotide
  Target: ATXN2; (+) strand; PAM type: YTN; PAM sequence: CTT
ttatattttaatgacaacaa

SEQ ID NO: 90482 - DNA, 20 bp, Artificial Sequence
  Description of Artificial Sequence: Synthetic oligonucleotide
  Target: ATXN2; (+) strand; PAM type: YTN; PAM sequence: TTT
tatattttaatgacaacaaa

SEQ ID NO: 90483 - DNA, 20 bp, Artificial Sequence
  Description of Artificial Sequence: Synthetic oligonucleotide
  Target: ATXN2; (+) strand; PAM type: YTN; PAM sequence: TTT
atattttaatgacaacaaaa

SEQ ID NO: 90484 - DNA, 20 bp, Artificial Sequence
  Description of Artificial Sequence: Synthetic oligonucleotide
  Target: ATXN2; (+) strand; PAM type: YTN; PAM sequence: TTA
tattttaatgacaacaaaaa

SEQ ID NO: 90485 - DNA, 20 bp, Artificial Sequence
  Description of Artificial Sequence: Synthetic oligonucleotide
  Target: ATXN2; (+) strand; PAM type: YTN; PAM sequence: TTT
taatgacaacaaaaagttcc

SEQ ID NO: 90486 - DNA, 20 bp, Artificial Sequence
  Description of Artificial Sequence: Synthetic oligonucleotide
  Target: ATXN2; (+) strand; PAM type: YTN; PAM sequence: TTT
aatgacaacaaaaagttccc

SEQ ID NO: 90487 - DNA, 20 bp, Artificial Sequence
  Description of Artificial Sequence: Synthetic oligonucleotide
  Target: ATXN2; (+) strand; PAM type: YTN; PAM sequence: TTA
atgacaacaaaaagttccca

SEQ ID NO: 90488 - DNA, 20 bp, Artificial Sequence
  Description of Artificial Sequence: Synthetic oligonucleotide
  Target: ATXN2; (+) strand; PAM type: YTN; PAM sequence: TTC
ccattgcattgttttaagta

SEQ ID NO: 90489 - DNA, 20 bp, Artificial Sequence
  Description of Artificial Sequence: Synthetic oligonucleotide
  Target: ATXN2; (+) strand; PAM type: YTN; PAM sequence: TTG
cattgttttaagtaatcatt

SEQ ID NO: 90490 - DNA, 20 bp, Artificial Sequence
  Description of Artificial Sequence: Synthetic oligonucleotide
  Target: ATXN2; (+) strand; PAM type: YTN; PAM sequence: TTG
ttttaagtaatcattgaaaa

SEQ ID NO: 90491 - DNA, 20 bp, Artificial Sequence
  Description of Artificial Sequence: Synthetic oligonucleotide
  Target: ATXN2; (+) strand; PAM type: YTN; PAM sequence: TTT
taagtaatcattgaaaacag

SEQ ID NO: 90492 - DNA, 20 bp, Artificial Sequence
  Description of Artificial Sequence: Synthetic oligonucleotide
  Target: ATXN2; (+) strand; PAM type: YTN; PAM sequence: TTT
aagtaatcattgaaaacagc

SEQ ID NO: 90493 - DNA, 20 bp, Artificial Sequence
  Description of Artificial Sequence: Synthetic oligonucleotide
  Target: ATXN2; (+) strand; PAM type: YTN; PAM sequence: TTA
agtaatcattgaaaacagct

SEQ ID NO: 90494 - DNA, 20 bp, Artificial Sequence
  Description of Artificial Sequence: Synthetic oligonucleotide
  Target: ATXN2; (+) strand; PAM type: YTN; PAM sequence: TTG
aaaacagctacacctgctgg

SEQ ID NO: 90495 - DNA, 20 bp, Artificial Sequence
  Description of Artificial Sequence: Synthetic oligonucleotide
  Target: ATXN2; (+) strand; PAM type: YTN; PAM sequence: CTA
cacctgctggtgatacatga

SEQ ID NO: 90496 - DNA, 20 bp, Artificial Sequence
  Description of Artificial Sequence: Synthetic oligonucleotide
  Target: ATXN2; (+) strand; PAM type: YTN; PAM sequence: CTG
ctggtgatacatgaacacct

SEQ ID NO: 90497 - DNA, 20 bp, Artificial Sequence
  Description of Artificial Sequence: Synthetic oligonucleotide
  Target: ATXN2; (+) strand; PAM type: YTN; PAM sequence: CTG
gtgatacatgaacaccttaa

SEQ ID NO: 90498 - DNA, 20 bp, Artificial Sequence
  Description of Artificial Sequence: Synthetic oligonucleotide
  Target: ATXN2; (+) strand; PAM type: YTN; PAM sequence: CTT
aacactacattaaaatggca

SEQ ID NO: 90499 - DNA, 20 bp, Artificial Sequence
  Description of Artificial Sequence: Synthetic oligonucleotide
  Target: ATXN2; (+) strand; PAM type: YTN; PAM sequence: TTA
acactacattaaaatggcag

SEQ ID NO: 90500 - DNA, 20 bp, Artificial Sequence
  Description of Artificial Sequence: Synthetic oligonucleotide
  Target: ATXN2; (+) strand; PAM type: YTN; PAM sequence: CTA
cattaaaatggcagtaaaaa

SEQ ID NO: 90501 - DNA, 20 bp, Artificial Sequence
  Description of Artificial Sequence: Synthetic oligonucleotide
  Target: ATXN2; (+) strand; PAM type: YTN; PAM sequence: TTA
aaatggcagtaaaaaaaaaa

SEQ ID NO: 90502 - DNA, 20 bp, Artificial Sequence
  Description of Artificial Sequence: Synthetic oligonucleotide
  Target: ATXN2; (+) strand; PAM type: YTN; PAM sequence: CTT
tcttctcagaatttctaaag

SEQ ID NO: 90503 - DNA, 20 bp, Artificial Sequence
  Description of Artificial Sequence: Synthetic oligonucleotide
  Target: ATXN2; (+) strand; PAM type: YTN; PAM sequence: TTT
cttctcagaatttctaaagg

SEQ ID NO: 90504 - DNA, 20 bp, Artificial Sequence
  Description of Artificial Sequence: Synthetic oligonucleotide
  Target: ATXN2; (+) strand; PAM type: YTN; PAM sequence: TTC
ttctcagaatttctaaaggc

SEQ ID NO: 90505 - DNA, 20 bp, Artificial Sequence
  Description of Artificial Sequence: Synthetic oligonucleotide
  Target: ATXN2; (+) strand; PAM type: YTN; PAM sequence: CTT
ctcagaatttctaaaggccc

SEQ ID NO: 90506 - DNA, 20 bp, Artificial Sequence
  Description of Artificial Sequence: Synthetic oligonucleotide
  Target: ATXN2; (+) strand; PAM type: YTN; PAM sequence: TTC
tcagaatttctaaaggccct

SEQ ID NO: 90507 - DNA, 20 bp, Artificial Sequence
  Description of Artificial Sequence: Synthetic oligonucleotide
  Target: ATXN2; (+) strand; PAM type: YTN; PAM sequence: CTC
agaatttctaaaggccctca

SEQ ID NO: 90508 - DNA, 20 bp, Artificial Sequence
  Description of Artificial Sequence: Synthetic oligonucleotide
  Target: ATXN2; (+) strand; PAM type: YTN; PAM sequence: TTT
ctaaaggccctcaaaataag

SEQ ID NO: 90509 - DNA, 20 bp, Artificial Sequence
  Description of Artificial Sequence: Synthetic oligonucleotide
  Target: ATXN2; (+) strand; PAM type: YTN; PAM sequence: TTC
taaaggccctcaaaataaga

SEQ ID NO: 90510 - DNA, 20 bp, Artificial Sequence
  Description of Artificial Sequence: Synthetic oligonucleotide
  Target: ATXN2; (+) strand; PAM type: YTN; PAM sequence: CTA
aaggccctcaaaataagatt

SEQ ID NO: 90511 - DNA, 20 bp, Artificial Sequence
  Description of Artificial Sequence: Synthetic oligonucleotide
  Target: ATXN2; (+) strand; PAM type: YTN; PAM sequence: CTC
aaaataagattaaactctat

SEQ ID NO: 90512 - DNA, 20 bp, Artificial Sequence
  Description of Artificial Sequence: Synthetic oligonucleotide
  Target: ATXN2; (+) strand; PAM type: YTN; PAM sequence: TTA
aactctataatttgattaca

SEQ ID NO: 90513 - DNA, 20 bp, Artificial Sequence
  Description of Artificial Sequence: Synthetic oligonucleotide
  Target: ATXN2; (+) strand; PAM type: YTN; PAM sequence: CTC
tataatttgattacattatt

SEQ ID NO: 90514 - DNA, 20 bp, Artificial Sequence
  Description of Artificial Sequence: Synthetic oligonucleotide
  Target: ATXN2; (+) strand; PAM type: YTN; PAM sequence: CTA
taatttgattacattatttc

SEQ ID NO: 90515 - DNA, 20 bp, Artificial Sequence
  Description of Artificial Sequence: Synthetic oligonucleotide
  Target: ATXN2; (+) strand; PAM type: YTN; PAM sequence: TTT
gattacattatttcaggcag

SEQ ID NO: 90516 - DNA, 20 bp, Artificial Sequence
  Description of Artificial Sequence: Synthetic oligonucleotide
  Target: ATXN2; (+) strand; PAM type: YTN; PAM sequence: TTG
attacattatttcaggcaga

SEQ ID NO: 90517 - DNA, 20 bp, Artificial Sequence
  Description of Artificial Sequence: Synthetic oligonucleotide
  Target: ATXN2; (+) strand; PAM type: YTN; PAM sequence: TTA
cattatttcaggcagagttc

SEQ ID NO: 90518 - DNA, 20 bp, Artificial Sequence
  Description of Artificial Sequence: Synthetic oligonucleotide
  Target: ATXN2; (+) strand; PAM type: YTN; PAM sequence: TTA
tttcaggcagagttctttca

SEQ ID NO: 90519 - DNA, 20 bp, Artificial Sequence
  Description of Artificial Sequence: Synthetic oligonucleotide
  Target: ATXN2; (+) strand; PAM type: YTN; PAM sequence: TTT
caggcagagttctttcaaca

SEQ ID NO: 90520 - DNA, 20 bp, Artificial Sequence
  Description of Artificial Sequence: Synthetic oligonucleotide
  Target: ATXN2; (+) strand; PAM type: YTN; PAM sequence: TTC
aggcagagttctttcaacag

SEQ ID NO: 90521 - DNA, 20 bp, Artificial Sequence
  Description of Artificial Sequence: Synthetic oligonucleotide
  Target: ATXN2; (+) strand; PAM type: YTN; PAM sequence: TTC
tttcaacaggttcatatgtt

SEQ ID NO: 90522 - DNA, 20 bp, Artificial Sequence
  Description of Artificial Sequence: Synthetic oligonucleotide
  Target: ATXN2; (+) strand; PAM type: YTN; PAM sequence: CTT
tcaacaggttcatatgttcc

SEQ ID NO: 90523 - DNA, 20 bp, Artificial Sequence
  Description of Artificial Sequence: Synthetic oligonucleotide
  Target: ATXN2; (+) strand; PAM type: YTN; PAM sequence: TTT
caacaggttcatatgttcca

SEQ ID NO: 90524 - DNA, 20 bp, Artificial Sequence
  Description of Artificial Sequence: Synthetic oligonucleotide
  Target: ATXN2; (+) strand; PAM type: YTN; PAM sequence: TTC
aacaggttcatatgttccaa

SEQ ID NO: 90525 - DNA, 20 bp, Artificial Sequence
  Description of Artificial Sequence: Synthetic oligonucleotide
  Target: ATXN2; (+) strand; PAM type: YTN; PAM sequence: TTC
atatgttccaaggctaaaaa

SEQ ID NO: 90526 - DNA, 20 bp, Artificial Sequence
  Description of Artificial Sequence: Synthetic oligonucleotide
  Target: ATXN2; (+) strand; PAM type: YTN; PAM sequence: TTC
caaggctaaaaaaaaaaaaa

SEQ ID NO: 90527 - DNA, 20 bp, Artificial Sequence
  Description of Artificial Sequence: Synthetic oligonucleotide
  Target: ATXN2; (+) strand; PAM type: YTN; PAM sequence: CTA
aaaaaaaaaaaaatagcata

SEQ ID NO: 90528 - DNA, 20 bp, Artificial Sequence
  Description of Artificial Sequence: Synthetic oligonucleotide
  Target: ATXN2; (+) strand; PAM type: YTN; PAM sequence: CTG
agaaaacgaaaattaagagt

SEQ ID NO: 90529 - DNA, 20 bp, Artificial Sequence
  Description of Artificial Sequence: Synthetic oligonucleotide
  Target: ATXN2; (+) strand; PAM type: YTN; PAM sequence: TTA
agagttttagttaacatcta

SEQ ID NO: 90530 - DNA, 20 bp, Artificial Sequence
  Description of Artificial Sequence: Synthetic oligonucleotide
  Target: ATXN2; (+) strand; PAM type: YTN; PAM sequence: TTT
tagttaacatctatgaaatc

SEQ ID NO: 90531 - DNA, 20 bp, Artificial Sequence
  Description of Artificial Sequence: Synthetic oligonucleotide
  Target: ATXN2; (+) strand; PAM type: YTN; PAM sequence: TTT
agttaacatctatgaaatca

SEQ ID NO: 90532 - DNA, 20 bp, Artificial Sequence
  Description of Artificial Sequence: Synthetic oligonucleotide
  Target: ATXN2; (+) strand; PAM type: YTN; PAM sequence: TTA
gttaacatctatgaaatcac

SEQ ID NO: 90533 - DNA, 20 bp, Artificial Sequence
  Description of Artificial Sequence: Synthetic oligonucleotide
  Target: ATXN2; (+) strand; PAM type: YTN; PAM sequence: TTA
acatctatgaaatcacaatt

SEQ ID NO: 90534 - DNA, 20 bp, Artificial Sequence
  Description of Artificial Sequence: Synthetic oligonucleotide
  Target: ATXN2; (+) strand; PAM type: YTN; PAM sequence: CTA
tgaaatcacaattaggtcaa

SEQ ID NO: 90535 - DNA, 20 bp, Artificial Sequence
  Description of Artificial Sequence: Synthetic oligonucleotide
  Target: ATXN2; (+) strand; PAM type: YTN; PAM sequence: TTA
ggtcaaacatggagaaaatt

SEQ ID NO: 90536 - DNA, 20 bp, Artificial Sequence
  Description of Artificial Sequence: Synthetic oligonucleotide
  Target: ATXN2; (+) strand; PAM type: YTN; PAM sequence: TTG
gctgggcgcaggcactttgg

SEQ ID NO: 90537 - DNA, 20 bp, Artificial Sequence
  Description of Artificial Sequence: Synthetic oligonucleotide
  Target: ATXN2; (+) strand; PAM type: YTN; PAM sequence: CTG
ggcgcaggcactttgggaag

SEQ ID NO: 90538 - DNA, 20 bp, Artificial Sequence
  Description of Artificial Sequence: Synthetic oligonucleotide
  Target: ATXN2; (+) strand; PAM type: YTN; PAM sequence: CTT
tgggaagcagagccaggcag

SEQ ID NO: 90539 - DNA, 20 bp, Artificial Sequence
  Description of Artificial Sequence: Synthetic oligonucleotide
  Target: ATXN2; (+) strand; PAM type: YTN; PAM sequence: TTT
gggaagcagagccaggcaga

SEQ ID NO: 90540 - DNA, 20 bp, Artificial Sequence
  Description of Artificial Sequence: Synthetic oligonucleotide
  Target: ATXN2; (+) strand; PAM type: YTN; PAM sequence: TTG
ggaagcagagccaggcagat

SEQ ID NO: 90541 - DNA, 20 bp, Artificial Sequence
  Description of Artificial Sequence: Synthetic oligonucleotide
  Target: ATXN2; (+) strand; PAM type: YTN; PAM sequence: CTT
gagcccaggagtttgagacc

SEQ ID NO: 90542 - DNA, 20 bp, Artificial Sequence
  Description of Artificial Sequence: Synthetic oligonucleotide
  Target: ATXN2; (+) strand; PAM type: YTN; PAM sequence: TTG
agcccaggagtttgagacca

SEQ ID NO: 90543 - DNA, 20 bp, Artificial Sequence
  Description of Artificial Sequence: Synthetic oligonucleotide
  Target: ATXN2; (+) strand; PAM type: YTN; PAM sequence: TTT
gagaccagcctaggcaacat

SEQ ID NO: 90544 - DNA, 20 bp, Artificial Sequence
  Description of Artificial Sequence: Synthetic oligonucleotide
  Target: ATXN2; (+) strand; PAM type: YTN; PAM sequence: TTG
agaccagcctaggcaacatg

SEQ ID NO: 90545 - DNA, 20 bp, Artificial Sequence
  Description of Artificial Sequence: Synthetic oligonucleotide
  Target: ATXN2; (+) strand; PAM type: YTN; PAM sequence: CTA
ggcaacatggcaaaacccat

SEQ ID NO: 90546 - DNA, 20 bp, Artificial Sequence
  Description of Artificial Sequence: Synthetic oligonucleotide
  Target: ATXN2; (+) strand; PAM type: YTN; PAM sequence: CTC
tacaaaaaatacaaaaatta

SEQ ID NO: 90547 - DNA, 20 bp, Artificial Sequence
  Description of Artificial Sequence: Synthetic oligonucleotide
  Target: ATXN2; (+) strand; PAM type: YTN; PAM sequence: CTA
caaaaaatacaaaaattagc

SEQ ID NO: 90548 - DNA, 20 bp, Artificial Sequence
  Description of Artificial Sequence: Synthetic oligonucleotide
  Target: ATXN2; (+) strand; PAM type: YTN; PAM sequence: TTA
gctaggtgtggtggtgtgca

SEQ ID NO: 90549 - DNA, 20 bp, Artificial Sequence
  Description of Artificial Sequence: Synthetic oligonucleotide
  Target: ATXN2; (+) strand; PAM type: YTN; PAM sequence: CTA
ggtgtggtggtgtgcacctg

SEQ ID NO: 90550 - DNA, 20 bp, Artificial Sequence
  Description of Artificial Sequence: Synthetic oligonucleotide
  Target: ATXN2; (+) strand; PAM type: YTN; PAM sequence: CTG
tagcccccgctatccagggg

SEQ ID NO: 90551 - DNA, 20 bp, Artificial Sequence
  Description of Artificial Sequence: Synthetic oligonucleotide
  Target: ATXN2; (+) strand; PAM type: YTN; PAM sequence: CTA
tccaggggactgagaaggga

SEQ ID NO: 90552 - DNA, 20 bp, Artificial Sequence
  Description of Artificial Sequence: Synthetic oligonucleotide
  Target: ATXN2; (+) strand; PAM type: YTN; PAM sequence: CTG
agaagggaggatcgcttgag

SEQ ID NO: 90553 - DNA, 20 bp, Artificial Sequence
  Description of Artificial Sequence: Synthetic oligonucleotide
  Target: ATXN2; (+) strand; PAM type: YTN; PAM sequence: CTT
gagcccaggaggtcaaggct

SEQ ID NO: 90554 - DNA, 20 bp, Artificial Sequence
  Description of Artificial Sequence: Synthetic oligonucleotide
  Target: ATXN2; (+) strand; PAM type: YTN; PAM sequence: TTG
agcccaggaggtcaaggctg

SEQ ID NO: 90555 - DNA, 20 bp, Artificial Sequence
  Description of Artificial Sequence: Synthetic oligonucleotide
  Target: ATXN2; (+) strand; PAM type: YTN; PAM sequence: CTG
cattgagccatgatagcgcc

SEQ ID NO: 90556 - DNA, 20 bp, Artificial Sequence
  Description of Artificial Sequence: Synthetic oligonucleotide
  Target: ATXN2; (+) strand; PAM type: YTN; PAM sequence: TTG
agccatgatagcgccactgc

SEQ ID NO: 90557 - DNA, 20 bp, Artificial Sequence
  Description of Artificial Sequence: Synthetic oligonucleotide
  Target: ATXN2; (+) strand; PAM type: YTN; PAM sequence: CTG
cgttccagcctcagcagcaa

SEQ ID NO: 90558 - DNA, 20 bp, Artificial Sequence
  Description of Artificial Sequence: Synthetic oligonucleotide
  Target: ATXN2; (+) strand; PAM type: YTN; PAM sequence: TTC
cagcctcagcagcaaagcaa

SEQ ID NO: 90559 - DNA, 20 bp, Artificial Sequence
  Description of Artificial Sequence: Synthetic oligonucleotide
  Target: ATXN2; (+) strand; PAM type: YTN; PAM sequence: CTC
agcagcaaagcaagaccctg

SEQ ID NO: 90560 - DNA, 20 bp, Artificial Sequence
  Description of Artificial Sequence: Synthetic oligonucleotide
  Target: ATXN2; (+) strand; PAM type: YTN; PAM sequence: CTG
tatcaaacacatacacacac

SEQ ID NO: 90561 - DNA, 20 bp, Artificial Sequence
  Description of Artificial Sequence: Synthetic oligonucleotide
  Target: ATXN2; (+) strand; PAM type: YTN; PAM sequence: TTG
aggaaatcttattaattcag

SEQ ID NO: 90562 - DNA, 20 bp, Artificial Sequence
  Description of Artificial Sequence: Synthetic oligonucleotide
  Target: ATXN2; (+) strand; PAM type: YTN; PAM sequence: CTT
attaattcaggaaaaatgaa

SEQ ID NO: 90563 - DNA, 20 bp, Artificial Sequence
  Description of Artificial Sequence: Synthetic oligonucleotide
  Target: ATXN2; (+) strand; PAM type: YTN; PAM sequence: TTA
ttaattcaggaaaaatgaaa

SEQ ID NO: 90564 - DNA, 20 bp, Artificial Sequence
  Description of Artificial Sequence: Synthetic oligonucleotide
  Target: ATXN2; (+) strand; PAM type: YTN; PAM sequence: TTA
attcaggaaaaatgaaaact

SEQ ID NO: 90565 - DNA, 20 bp, Artificial Sequence
  Description of Artificial Sequence: Synthetic oligonucleotide
  Target: ATXN2; (+) strand; PAM type: YTN; PAM sequence: TTC
aggaaaaatgaaaactttat

SEQ ID NO: 90566 - DNA, 20 bp, Artificial Sequence
  Description of Artificial Sequence: Synthetic oligonucleotide
  Target: ATXN2; (+) strand; PAM type: YTN; PAM sequence: CTT
tatgtcagaaaggcaattat

SEQ ID NO: 90567 - DNA, 20 bp, Artificial Sequence
  Description of Artificial Sequence: Synthetic oligonucleotide
  Target: ATXN2; (+) strand; PAM type: YTN; PAM sequence: TTT
atgtcagaaaggcaattatt

SEQ ID NO: 90568 - DNA, 20 bp, Artificial Sequence
  Description of Artificial Sequence: Synthetic oligonucleotide
  Target: ATXN2; (+) strand; PAM type: YTN; PAM sequence: TTA
tgtcagaaaggcaattattg

SEQ ID NO: 90569 - DNA, 20 bp, Artificial Sequence
  Description of Artificial Sequence: Synthetic oligonucleotide
  Target: ATXN2; (+) strand; PAM type: YTN; PAM sequence: TTA
ttgggcactgagaaatgtct

SEQ ID NO: 90570 - DNA, 20 bp, Artificial Sequence
  Description of Artificial Sequence: Synthetic oligonucleotide
  Target: ATXN2; (+) strand; PAM type: YTN; PAM sequence: TTG
ggcactgagaaatgtctttt

SEQ ID NO: 90571 - DNA, 20 bp, Artificial Sequence
  Description of Artificial Sequence: Synthetic oligonucleotide
  Target: ATXN2; (+) strand; PAM type: YTN; PAM sequence: CTG
agaaatgtcttttctgtata

SEQ ID NO: 90572 - DNA, 20 bp, Artificial Sequence
  Description of Artificial Sequence: Synthetic oligonucleotide
  Target: ATXN2; (+) strand; PAM type: YTN; PAM sequence: CTT
ttctgtataaattattctac

SEQ ID NO: 90573 - DNA, 20 bp, Artificial Sequence
  Description of Artificial Sequence: Synthetic oligonucleotide
  Target: ATXN2; (+) strand; PAM type: YTN; PAM sequence: TTT
tctgtataaattattctact

SEQ ID NO: 90574 - DNA, 20 bp, Artificial Sequence
  Description of Artificial Sequence: Synthetic oligonucleotide
  Target: ATXN2; (+) strand; PAM type: YTN; PAM sequence: TTT
ctgtataaattattctactt

SEQ ID NO: 90575 - DNA, 20 bp, Artificial Sequence
  Description of Artificial Sequence: Synthetic oligonucleotide
  Target: ATXN2; (+) strand; PAM type: YTN; PAM sequence: TTC
tgtataaattattctacttt

SEQ ID NO: 90576 - DNA, 20 bp, Artificial Sequence
  Description of Artificial Sequence: Synthetic oligonucleotide
  Target: ATXN2; (+) strand; PAM type: YTN; PAM sequence: CTG
tataaattattctactttct

SEQ ID NO: 90577 - DNA, 20 bp, Artificial Sequence
  Description of Artificial Sequence: Synthetic oligonucleotide
  Target: ATXN2; (+) strand; PAM type: YTN; PAM sequence: TTA
ttctactttctatagtttct

SEQ ID NO: 90578 - DNA, 20 bp, Artificial Sequence
  Description of Artificial Sequence: Synthetic oligonucleotide
  Target: ATXN2; (+) strand; PAM type: YTN; PAM sequence: TTC
tactttctatagtttctcaa

SEQ ID NO: 90579 - DNA, 20 bp, Artificial Sequence
  Description of Artificial Sequence: Synthetic oligonucleotide
  Target: ATXN2; (+) strand; PAM type: YTN; PAM sequence: CTA
ctttctatagtttctcaact

SEQ ID NO: 90580 - DNA, 20 bp, Artificial Sequence
  Description of Artificial Sequence: Synthetic oligonucleotide
  Target: ATXN2; (+) strand; PAM type: YTN; PAM sequence: CTT
tctatagtttctcaactgat

SEQ ID NO: 90581 - DNA, 20 bp, Artificial Sequence
  Description of Artificial Sequence: Synthetic oligonucleotide
  Target: ATXN2; (+) strand; PAM type: YTN; PAM sequence: TTT
ctatagtttctcaactgata

SEQ ID NO: 90582 - DNA, 20 bp, Artificial Sequence
  Description of Artificial Sequence: Synthetic oligonucleotide
  Target: ATXN2; (+) strand; PAM type: YTN; PAM sequence: TTC
tatagtttctcaactgatag

SEQ ID NO: 90583 - DNA, 20 bp, Artificial Sequence
  Description of Artificial Sequence: Synthetic oligonucleotide
  Target: ATXN2; (+) strand; PAM type: YTN; PAM sequence: CTA
tagtttctcaactgatagca

SEQ ID NO: 90584 - DNA, 20 bp, Artificial Sequence
  Description of Artificial Sequence: Synthetic oligonucleotide
  Target: ATXN2; (+) strand; PAM type: YTN; PAM sequence: TTT
ctcaactgatagcagttaat

SEQ ID NO: 90585 - DNA, 20 bp, Artificial Sequence
  Description of Artificial Sequence: Synthetic oligonucleotide
  Target: ATXN2; (+) strand; PAM type: YTN; PAM sequence: TTC
tcaactgatagcagttaatc

SEQ ID NO: 90586 - DNA, 20 bp, Artificial Sequence
  Description of Artificial Sequence: Synthetic oligonucleotide
  Target: ATXN2; (+) strand; PAM type: YTN; PAM sequence: CTC
aactgatagcagttaatcac

SEQ ID NO: 90587 - DNA, 20 bp, Artificial Sequence
  Description of Artificial Sequence: Synthetic oligonucleotide
  Target: ATXN2; (+) strand; PAM type: YTN; PAM sequence: CTG
atagcagttaatcactctaa

SEQ ID NO: 90588 - DNA, 20 bp, Artificial Sequence
  Description of Artificial Sequence: Synthetic oligonucleotide
  Target: ATXN2; (+) strand; PAM type: YTN; PAM sequence: TTA
atcactctaaattaactggt

SEQ ID NO: 90589 - DNA, 20 bp, Artificial Sequence
  Description of Artificial Sequence: Synthetic oligonucleotide
  Target: ATXN2; (+) strand; PAM type: YTN; PAM sequence: CTC
taaattaactggttggcaaa

SEQ ID NO: 90590 - DNA, 20 bp, Artificial Sequence
  Description of Artificial Sequence: Synthetic oligonucleotide
  Target: ATXN2; (+) strand; PAM type: YTN; PAM sequence: CTA
aattaactggttggcaaaaa

SEQ ID NO: 90591 - DNA, 20 bp, Artificial Sequence
  Description of Artificial Sequence: Synthetic oligonucleotide
  Target: ATXN2; (+) strand; PAM type: YTN; PAM sequence: TTA
actggttggcaaaaaaaaaa

SEQ ID NO: 90592 - DNA, 20 bp, Artificial Sequence
  Description of Artificial Sequence: Synthetic oligonucleotide
  Target: ATXN2; (+) strand; PAM type: YTN; PAM sequence: CTG
gttggcaaaaaaaaaaccct

SEQ ID NO: 90593 - DNA, 20 bp, Artificial Sequence
  Description of Artificial Sequence: Synthetic oligonucleotide
  Target: ATXN2; (+) strand; PAM type: YTN; PAM sequence: TTG
gcaaaaaaaaaaccctttag

SEQ ID NO: 90594 - DNA, 20 bp, Artificial Sequence
  Description of Artificial Sequence: Synthetic oligonucleotide
  Target: ATXN2; (+) strand; PAM type: YTN; PAM sequence: CTT
tagcattttccaacattaaa

SEQ ID NO: 90595 - DNA, 20 bp, Artificial Sequence
  Description of Artificial Sequence: Synthetic oligonucleotide
  Target: ATXN2; (+) strand; PAM type: YTN; PAM sequence: TTT
agcattttccaacattaaaa

SEQ ID NO: 90596 - DNA, 20 bp, Artificial Sequence
  Description of Artificial Sequence: Synthetic oligonucleotide
  Target: ATXN2; (+) strand; PAM type: YTN; PAM sequence: TTA
gcattttccaacattaaaag

SEQ ID NO: 90597 - DNA, 20 bp, Artificial Sequence
  Description of Artificial Sequence: Synthetic oligonucleotide
  Target: ATXN2; (+) strand; PAM type: YTN; PAM sequence: TTT
tccaacattaaaagaactct

SEQ ID NO: 90598 - DNA, 20 bp, Artificial Sequence
  Description of Artificial Sequence: Synthetic oligonucleotide
  Target: ATXN2; (+) strand; PAM type: YTN; PAM sequence: TTT
ccaacattaaaagaactctt

SEQ ID NO: 90599 - DNA, 20 bp, Artificial Sequence
  Description of Artificial Sequence: Synthetic oligonucleotide
  Target: ATXN2; (+) strand; PAM type: YTN; PAM sequence: TTC
caacattaaaagaactcttt

SEQ ID NO: 90600 - DNA, 20 bp, Artificial Sequence
  Description of Artificial Sequence: Synthetic oligonucleotide
  Target: ATXN2; (+) strand; PAM type: YTN; PAM sequence: TTA
aaagaactcttttttttttt

SEQ ID NO: 90601 - DNA, 20 bp, Artificial Sequence
  Description of Artificial Sequence: Synthetic oligonucleotide
  Target: ATXN2; (+) strand; PAM type: YTN; PAM sequence: CTC
tttttttttttttttttttt

SEQ ID NO: 90602 - DNA, 20 bp, Artificial Sequence
  Description of Artificial Sequence: Synthetic oligonucleotide
  Target: ATXN2; (+) strand; PAM type: YTN; PAM sequence: CTT
tttttttttttttttttttg

SEQ ID NO: 90603 - DNA, 20 bp, Artificial Sequence
  Description of Artificial Sequence: Synthetic oligonucleotide
  Target: ATXN2; (+) strand; PAM type: YTN; PAM sequence: TTT
ttttttttttttttttttgg

SEQ ID NO: 90604 - DNA, 20 bp, Artificial Sequence
  Description of Artificial Sequence: Synthetic oligonucleotide
  Target: ATXN2; (+) strand; PAM type: YTN; PAM sequence: TTT
tttttttttttttttttgga

SEQ ID NO: 90605 - DNA, 20 bp, Artificial Sequence
  Description of Artificial Sequence: Synthetic oligonucleotide
  Target: ATXN2; (+) strand; PAM type: YTN; PAM sequence: TTT
ttttttttttttttttggac

SEQ ID NO: 90606 - DNA, 20 bp, Artificial Sequence
  Description of Artificial Sequence: Synthetic oligonucleotide
  Target: ATXN2; (+) strand; PAM type: YTN; PAM sequence: TTT
tttttttttttttttggacg

SEQ ID NO: 90607 - DNA, 20 bp, Artificial Sequence
  Description of Artificial Sequence: Synthetic oligonucleotide
  Target: ATXN2; (+) strand; PAM type: YTN; PAM sequence: TTT
ttttttttttttttggacgg

SEQ ID NO: 90608 - DNA, 20 bp, Artificial Sequence
  Description of Artificial Sequence: Synthetic oligonucleotide
  Target: ATXN2; (+) strand; PAM type: YTN; PAM sequence: TTT
tttttttttttttggacgga

SEQ ID NO: 90609 - DNA, 20 bp, Artificial Sequence
  Description of Artificial Sequence: Synthetic oligonucleotide
  Target: ATXN2; (+) strand; PAM type: YTN; PAM sequence: TTT
ttttttttttttggacggag

SEQ ID NO: 90610 - DNA, 20 bp, Artificial Sequence
  Description of Artificial Sequence: Synthetic oligonucleotide
  Target: ATXN2; (+) strand; PAM type: YTN; PAM sequence: TTT
tttttttttttggacggagt

SEQ ID NO: 90611 - DNA, 20 bp, Artificial Sequence
  Description of Artificial Sequence: Synthetic oligonucleotide
  Target: ATXN2; (+) strand; PAM type: YTN; PAM sequence: TTT
ttttttttttggacggagtc

SEQ ID NO: 90612 - DNA, 20 bp, Artificial Sequence
  Description of Artificial Sequence: Synthetic oligonucleotide
  Target: ATXN2; (+) strand; PAM type: YTN; PAM sequence: TTT
tttttttttggacggagtct

SEQ ID NO: 90613 - DNA, 20 bp, Artificial Sequence
  Description of Artificial Sequence: Synthetic oligonucleotide
  Target: ATXN2; (+) strand; PAM type: YTN; PAM sequence: TTT
ttttttttggacggagtctc

SEQ ID NO: 90614 - DNA, 20 bp, Artificial Sequence
  Description of Artificial Sequence: Synthetic oligonucleotide
  Target: ATXN2; (+) strand; PAM type: YTN; PAM sequence: TTT
tttttttggacggagtctcg

SEQ ID NO: 90615 - DNA, 20 bp, Artificial Sequence
  Description of Artificial Sequence: Synthetic oligonucleotide
  Target: ATXN2; (+) strand; PAM type: YTN; PAM sequence: TTT
ttttttggacggagtctcgc

SEQ ID NO: 90616 - DNA, 20 bp, Artificial Sequence
  Description of Artificial Sequence: Synthetic oligonucleotide
  Target: ATXN2; (+) strand; PAM type: YTN; PAM sequence: TTT
tttttggacggagtctcgct

SEQ ID NO: 90617 - DNA, 20 bp, Artificial Sequence
  Description of Artificial Sequence: Synthetic oligonucleotide
  Target: ATXN2; (+) strand; PAM type: YTN; PAM sequence: TTT
ttttggacggagtctcgctc

SEQ ID NO: 90618 - DNA, 20 bp, Artificial Sequence
  Description of Artificial Sequence: Synthetic oligonucleotide
  Target: ATXN2; (+) strand; PAM type: YTN; PAM sequence: TTT
tttggacggagtctcgctct

SEQ ID NO: 90619 - DNA, 20 bp, Artificial Sequence
  Description of Artificial Sequence: Synthetic oligonucleotide
  Target: ATXN2; (+) strand; PAM type: YTN; PAM sequence: TTT
ttggacggagtctcgctctg

SEQ ID NO: 90620 - DNA, 20 bp, Artificial Sequence
  Description of Artificial Sequence: Synthetic oligonucleotide
  Target: ATXN2; (+) strand; PAM type: YTN; PAM sequence: TTT
tggacggagtctcgctctgt

SEQ ID NO: 90621 - DNA, 20 bp, Artificial Sequence
  Description of Artificial Sequence: Synthetic oligonucleotide
  Target: ATXN2; (+) strand; PAM type: YTN; PAM sequence: TTT
ggacggagtctcgctctgtc

SEQ ID NO: 90622 - DNA, 20 bp, Artificial Sequence
  Description of Artificial Sequence: Synthetic oligonucleotide
  Target: ATXN2; (+) strand; PAM type: YTN; PAM sequence: TTG
gacggagtctcgctctgtca

SEQ ID NO: 90623 - DNA, 20 bp, Artificial Sequence
  Description of Artificial Sequence: Synthetic oligonucleotide
  Target: ATXN2; (+) strand; PAM type: YTN; PAM sequence: CTC
gctctgtcacccaggcacgc

SEQ ID NO: 90624 - DNA, 20 bp, Artificial Sequence
  Description of Artificial Sequence: Synthetic oligonucleotide
  Target: ATXN2; (+) strand; PAM type: YTN; PAM sequence: CTC
tgtcacccaggcacgcacca

SEQ ID NO: 90625 - DNA, 20 bp, Artificial Sequence
  Description of Artificial Sequence: Synthetic oligonucleotide
  Target: ATXN2; (+) strand; PAM type: YTN; PAM sequence: CTG
tcacccaggcacgcaccacc

SEQ ID NO: 90626 - DNA, 20 bp, Artificial Sequence
  Description of Artificial Sequence: Synthetic oligonucleotide
  Target: ATXN2; (+) strand; PAM type: YTN; PAM sequence: CTG
atctttgtatttttagtaga

SEQ ID NO: 90627 - DNA, 20 bp, Artificial Sequence
  Description of Artificial Sequence: Synthetic oligonucleotide
  Target: ATXN2; (+) strand; PAM type: YTN; PAM sequence: CTT
tgtatttttagtagagacgg

SEQ ID NO: 90628 - DNA, 20 bp, Artificial Sequence
  Description of Artificial Sequence: Synthetic oligonucleotide
  Target: ATXN2; (+) strand; PAM type: YTN; PAM sequence: TTT
gtatttttagtagagacggg

SEQ ID NO: 90629 - DNA, 20 bp, Artificial Sequence
  Description of Artificial Sequence: Synthetic oligonucleotide
  Target: ATXN2; (+) strand; PAM type: YTN; PAM sequence: TTG
tatttttagtagagacgggt

SEQ ID NO: 90630 - DNA, 20 bp, Artificial Sequence
  Description of Artificial Sequence: Synthetic oligonucleotide
  Target: ATXN2; (+) strand; PAM type: YTN; PAM sequence: TTT
ttagtagagacgggttttca

SEQ ID NO: 90631 - DNA, 20 bp, Artificial Sequence
  Description of Artificial Sequence: Synthetic oligonucleotide
  Target: ATXN2; (+) strand; PAM type: YTN; PAM sequence: TTT
tagtagagacgggttttcac

SEQ ID NO: 90632 - DNA, 20 bp, Artificial Sequence
  Description of Artificial Sequence: Synthetic oligonucleotide
  Target: ATXN2; (+) strand; PAM type: YTN; PAM sequence: TTT
agtagagacgggttttcacc

SEQ ID NO: 90633 - DNA, 20 bp, Artificial Sequence
  Description of Artificial Sequence: Synthetic oligonucleotide
  Target: ATXN2; (+) strand; PAM type: YTN; PAM sequence: TTA
gtagagacgggttttcacca

SEQ ID NO: 90634 - DNA, 20 bp, Artificial Sequence
  Description of Artificial Sequence: Synthetic oligonucleotide
  Target: ATXN2; (+) strand; PAM type: YTN; PAM sequence: TTT
tcaccatgttggccaggatg

SEQ ID NO: 90635 - DNA, 20 bp, Artificial Sequence
  Description of Artificial Sequence: Synthetic oligonucleotide
  Target: ATXN2; (+) strand; PAM type: YTN; PAM sequence: TTT
caccatgttggccaggatgg

SEQ ID NO: 90636 - DNA, 20 bp, Artificial Sequence
  Description of Artificial Sequence: Synthetic oligonucleotide
  Target: ATXN2; (+) strand; PAM type: YTN; PAM sequence: TTC
accatgttggccaggatggt

SEQ ID NO: 90637 - DNA, 20 bp, Artificial Sequence
  Description of Artificial Sequence: Synthetic oligonucleotide
  Target: ATXN2; (+) strand; PAM type: YTN; PAM sequence: TTG
gccaggatggttttgtactc

SEQ ID NO: 90638 - DNA, 20 bp, Artificial Sequence
  Description of Artificial Sequence: Synthetic oligonucleotide
  Target: ATXN2; (+) strand; PAM type: YTN; PAM sequence: TTT
tgtactcctgacctcaagtg

SEQ ID NO: 90639 - DNA, 20 bp, Artificial Sequence
  Description of Artificial Sequence: Synthetic oligonucleotide
  Target: ATXN2; (+) strand; PAM type: YTN; PAM sequence: TTT
gtactcctgacctcaagtga

SEQ ID NO: 90640 - DNA, 20 bp, Artificial Sequence
  Description of Artificial Sequence: Synthetic oligonucleotide
  Target: ATXN2; (+) strand; PAM type: YTN; PAM sequence: TTG
tactcctgacctcaagtgat

SEQ ID NO: 90641 - DNA, 20 bp, Artificial Sequence
  Description of Artificial Sequence: Synthetic oligonucleotide
  Target: ATXN2; (+) strand; PAM type: YTN; PAM sequence: CTC
ctgacctcaagtgatctgcc

SEQ ID NO: 90642 - DNA, 20 bp, Artificial Sequence
  Description of Artificial Sequence: Synthetic oligonucleotide
  Target: ATXN2; (+) strand; PAM type: YTN; PAM sequence: CTG
acctcaagtgatctgcccac

SEQ ID NO: 90643 - DNA, 20 bp, Artificial Sequence
  Description of Artificial Sequence: Synthetic oligonucleotide
  Target: ATXN2; (+) strand; PAM type: YTN; PAM sequence: CTC
aagtgatctgcccacctcgg

SEQ ID NO: 90644 - DNA, 20 bp, Artificial Sequence
  Description of Artificial Sequence: Synthetic oligonucleotide
  Target: ATXN2; (+) strand; PAM type: YTN; PAM sequence: CTG
cccacctcggcttcccagag

SEQ ID NO: 90645 - DNA, 20 bp, Artificial Sequence
  Description of Artificial Sequence: Synthetic oligonucleotide
  Target: ATXN2; (+) strand; PAM type: YTN; PAM sequence: CTC
ggcttcccagagtgttgggc

SEQ ID NO: 90646 - DNA, 20 bp, Artificial Sequence
  Description of Artificial Sequence: Synthetic oligonucleotide
  Target: ATXN2; (+) strand; PAM type: YTN; PAM sequence: CTT
cccagagtgttgggcttaca

SEQ ID NO: 90647 - DNA, 20 bp, Artificial Sequence
  Description of Artificial Sequence: Synthetic oligonucleotide
  Target: ATXN2; (+) strand; PAM type: YTN; PAM sequence: TTC
ccagagtgttgggcttacag

SEQ ID NO: 90648 - DNA, 20 bp, Artificial Sequence
  Description of Artificial Sequence: Synthetic oligonucleotide
  Target: ATXN2; (+) strand; PAM type: YTN; PAM sequence: TTG
ggcttacagatgtgagccac

SEQ ID NO: 90649 - DNA, 20 bp, Artificial Sequence
  Description of Artificial Sequence: Synthetic oligonucleotide
  Target: ATXN2; (+) strand; PAM type: YTN; PAM sequence: CTT
acagatgtgagccaccacac

SEQ ID NO: 90650 - DNA, 20 bp, Artificial Sequence
  Description of Artificial Sequence: Synthetic oligonucleotide
  Target: ATXN2; (+) strand; PAM type: YTN; PAM sequence: TTA
cagatgtgagccaccacacc

SEQ ID NO: 90651 - DNA, 20 bp, Artificial Sequence
  Description of Artificial Sequence: Synthetic oligonucleotide
  Target: ATXN2; (+) strand; PAM type: YTN; PAM sequence: CTG
gccaaaagatttccttttaa

SEQ ID NO: 90652 - DNA, 20 bp, Artificial Sequence
  Description of Artificial Sequence: Synthetic oligonucleotide
  Target: ATXN2; (+) strand; PAM type: YTN; PAM sequence: TTT
ccttttaagaaaaatgtggg

SEQ ID NO: 90653 - DNA, 20 bp, Artificial Sequence
  Description of Artificial Sequence: Synthetic oligonucleotide
  Target: ATXN2; (+) strand; PAM type: YTN; PAM sequence: TTC
cttttaagaaaaatgtggga

SEQ ID NO: 90654 - DNA, 20 bp, Artificial Sequence
  Description of Artificial Sequence: Synthetic oligonucleotide
  Target: ATXN2; (+) strand; PAM type: YTN; PAM sequence: CTT
ttaagaaaaatgtgggattt

SEQ ID NO: 90655 - DNA, 20 bp, Artificial Sequence
  Description of Artificial Sequence: Synthetic oligonucleotide
  Target: ATXN2; (+) strand; PAM type: YTN; PAM sequence: TTT
taagaaaaatgtgggatttt

SEQ ID NO: 90656 - DNA, 20 bp, Artificial Sequence
  Description of Artificial Sequence: Synthetic oligonucleotide
  Target: ATXN2; (+) strand; PAM type: YTN; PAM sequence: TTT
aagaaaaatgtgggattttt

SEQ ID NO: 90657 - DNA, 20 bp, Artificial Sequence
  Description of Artificial Sequence: Synthetic oligonucleotide
  Target: ATXN2; (+) strand; PAM type: YTN; PAM sequence: TTA
agaaaaatgtgggatttttt

SEQ ID NO: 90658 - DNA, 20 bp, Artificial Sequence
  Description of Artificial Sequence: Synthetic oligonucleotide
  Target: ATXN2; (+) strand; PAM type: YTN; PAM sequence: TTT
tttctacgaaggctctttaa

SEQ ID NO: 90659 - DNA, 20 bp, Artificial Sequence
  Description of Artificial Sequence: Synthetic oligonucleotide
  Target: ATXN2; (+) strand; PAM type: YTN; PAM sequence: TTT
ttctacgaaggctctttaac

SEQ ID NO: 90660 - DNA, 20 bp, Artificial Sequence
  Description of Artificial Sequence: Synthetic oligonucleotide
  Target: ATXN2; (+) strand; PAM type: YTN; PAM sequence: TTT
tctacgaaggctctttaacc

SEQ ID NO: 90661 - DNA, 20 bp, Artificial Sequence
  Description of Artificial Sequence: Synthetic oligonucleotide
  Target: ATXN2; (+) strand; PAM type: YTN; PAM sequence: TTT
ctacgaaggctctttaacca

SEQ ID NO: 90662 - DNA, 20 bp, Artificial Sequence
  Description of Artificial Sequence: Synthetic oligonucleotide
  Target: ATXN2; (+) strand; PAM type: YTN; PAM sequence: TTC
tacgaaggctctttaaccac

SEQ ID NO: 90663 - DNA, 20 bp, Artificial Sequence
  Description of Artificial Sequence: Synthetic oligonucleotide
  Target: ATXN2; (+) strand; PAM type: YTN; PAM sequence: CTA
cgaaggctctttaaccacac

SEQ ID NO: 90664 - DNA, 20 bp, Artificial Sequence
  Description of Artificial Sequence: Synthetic oligonucleotide
  Target: ATXN2; (+) strand; PAM type: YTN; PAM sequence: CTC
tttaaccacacaagcacaga

SEQ ID NO: 90665 - DNA, 20 bp, Artificial Sequence
  Description of Artificial Sequence: Synthetic oligonucleotide
  Target: ATXN2; (+) strand; PAM type: YTN; PAM sequence: CTT
taaccacacaagcacagaat

SEQ ID NO: 90666 - DNA, 20 bp, Artificial Sequence
  Description of Artificial Sequence: Synthetic oligonucleotide
  Target: ATXN2; (+) strand; PAM type: YTN; PAM sequence: TTT
aaccacacaagcacagaata

SEQ ID NO: 90667 - DNA, 20 bp, Artificial Sequence
  Description of Artificial Sequence: Synthetic oligonucleotide
  Target: ATXN2; (+) strand; PAM type: YTN; PAM sequence: TTA
accacacaagcacagaatac

SEQ ID NO: 90668 - DNA, 20 bp, Artificial Sequence
  Description of Artificial Sequence: Synthetic oligonucleotide
  Target: ATXN2; (+) strand; PAM type: YTN; PAM sequence: CTA
gtttatgcaactacattata

SEQ ID NO: 90669 - DNA, 20 bp, Artificial Sequence
  Description of Artificial Sequence: Synthetic oligonucleotide
  Target: ATXN2; (+) strand; PAM type: YTN; PAM sequence: TTT
atgcaactacattatacgac

SEQ ID NO: 90670 - DNA, 20 bp, Artificial Sequence
  Description of Artificial Sequence: Synthetic oligonucleotide
  Target: ATXN2; (+) strand; PAM type: YTN; PAM sequence: TTA
tgcaactacattatacgaca

SEQ ID NO: 90671 - DNA, 20 bp, Artificial Sequence
  Description of Artificial Sequence: Synthetic oligonucleotide
  Target: ATXN2; (+) strand; PAM type: YTN; PAM sequence: CTA
cattatacgacaactcccta

SEQ ID NO: 90672 - DNA, 20 bp, Artificial Sequence
  Description of Artificial Sequence: Synthetic oligonucleotide
  Target: ATXN2; (+) strand; PAM type: YTN; PAM sequence: TTA
tacgacaactccctaatttt

SEQ ID NO: 90673 - DNA, 20 bp, Artificial Sequence
  Description of Artificial Sequence: Synthetic oligonucleotide
  Target: ATXN2; (+) strand; PAM type: YTN; PAM sequence: CTC
cctaattttaatgcagaaac

SEQ ID NO: 90674 - DNA, 20 bp, Artificial Sequence
  Description of Artificial Sequence: Synthetic oligonucleotide
  Target: ATXN2; (+) strand; PAM type: YTN; PAM sequence: CTA
attttaatgcagaaacatcc

SEQ ID NO: 90675 - DNA, 20 bp, Artificial Sequence
  Description of Artificial Sequence: Synthetic oligonucleotide
  Target: ATXN2; (+) strand; PAM type: YTN; PAM sequence: TTT
taatgcagaaacatccatct

SEQ ID NO: 90676 - DNA, 20 bp, Artificial Sequence
  Description of Artificial Sequence: Synthetic oligonucleotide
  Target: ATXN2; (+) strand; PAM type: YTN; PAM sequence: TTT
aatgcagaaacatccatctt

SEQ ID NO: 90677 - DNA, 20 bp, Artificial Sequence
  Description of Artificial Sequence: Synthetic oligonucleotide
  Target: ATXN2; (+) strand; PAM type: YTN; PAM sequence: TTA
atgcagaaacatccatctta

SEQ ID NO: 90678 - DNA, 20 bp, Artificial Sequence
  Description of Artificial Sequence: Synthetic oligonucleotide
  Target: ATXN2; (+) strand; PAM type: YTN; PAM sequence: CTT
atttttctttttgaggcagg

SEQ ID NO: 90679 - DNA, 20 bp, Artificial Sequence
  Description of Artificial Sequence: Synthetic oligonucleotide
  Target: ATXN2; (+) strand; PAM type: YTN; PAM sequence: TTA
tttttctttttgaggcaggg

SEQ ID NO: 90680 - DNA, 20 bp, Artificial Sequence
  Description of Artificial Sequence: Synthetic oligonucleotide
  Target: ATXN2; (+) strand; PAM type: YTN; PAM sequence: TTT
ttctttttgaggcagggttt

SEQ ID NO: 90681 - DNA, 20 bp, Artificial Sequence
  Description of Artificial Sequence: Synthetic oligonucleotide
  Target: ATXN2; (+) strand; PAM type: YTN; PAM sequence: TTT
tctttttgaggcagggtttc

SEQ ID NO: 90682 - DNA, 20 bp, Artificial Sequence
  Description of Artificial Sequence: Synthetic oligonucleotide
  Target: ATXN2; (+) strand; PAM type: YTN; PAM sequence: TTT
ctttttgaggcagggtttcg

SEQ ID NO: 90683 - DNA, 20 bp, Artificial Sequence
  Description of Artificial Sequence: Synthetic oligonucleotide
  Target: ATXN2; (+) strand; PAM type: YTN; PAM sequence: TTC
tttttgaggcagggtttcgc

SEQ ID NO: 90684 - DNA, 20 bp, Artificial Sequence
  Description of Artificial Sequence: Synthetic oligonucleotide
  Target: ATXN2; (+) strand; PAM type: YTN; PAM sequence: CTT
tttgaggcagggtttcgctc

SEQ ID NO: 90685 - DNA, 20 bp, Artificial Sequence
  Description of Artificial Sequence: Synthetic oligonucleotide
  Target: ATXN2; (+) strand; PAM type: YTN; PAM sequence: TTT
ttgaggcagggtttcgctct

SEQ ID NO: 90686 - DNA, 20 bp, Artificial Sequence
  Description of Artificial Sequence: Synthetic oligonucleotide
  Target: ATXN2; (+) strand; PAM type: YTN; PAM sequence: TTT
tgaggcagggtttcgctctt

SEQ ID NO: 90687 - DNA, 20 bp, Artificial Sequence
  Description of Artificial Sequence: Synthetic oligonucleotide
  Target: ATXN2; (+) strand; PAM type: YTN; PAM sequence: TTT
gaggcagggtttcgctcttt

SEQ ID NO: 90688 - DNA, 20 bp, Artificial Sequence
  Description of Artificial Sequence: Synthetic oligonucleotide
  Target: ATXN2; (+) strand; PAM type: YTN; PAM sequence: TTG
aggcagggtttcgctctttc

SEQ ID NO: 90689 - DNA, 20 bp, Artificial Sequence
  Description of Artificial Sequence: Synthetic oligonucleotide
  Target: ATXN2; (+) strand; PAM type: YTN; PAM sequence: TTT
cgctctttcacccaagctgg

SEQ ID NO: 90690 - DNA, 20 bp, Artificial Sequence
  Description of Artificial Sequence: Synthetic oligonucleotide
  Target: ATXN2; (+) strand; PAM type: YTN; PAM sequence: TTC
gctctttcacccaagctgga

SEQ ID NO: 90691 - DNA, 20 bp, Artificial Sequence
  Description of Artificial Sequence: Synthetic oligonucleotide
  Target: ATXN2; (+) strand; PAM type: YTN; PAM sequence: CTC
tttcacccaagctggagccc

SEQ ID NO: 90692 - DNA, 20 bp, Artificial Sequence
  Description of Artificial Sequence: Synthetic oligonucleotide
  Target: ATXN2; (+) strand; PAM type: YTN; PAM sequence: CTT
tcacccaagctggagcccag

SEQ ID NO: 90693 - DNA, 20 bp, Artificial Sequence
  Description of Artificial Sequence: Synthetic oligonucleotide
  Target: ATXN2; (+) strand; PAM type: YTN; PAM sequence: TTT
cacccaagctggagcccagt

SEQ ID NO: 90694 - DNA, 20 bp, Artificial Sequence
  Description of Artificial Sequence: Synthetic oligonucleotide
  Target: ATXN2; (+) strand; PAM type: YTN; PAM sequence: TTC
acccaagctggagcccagtg

SEQ ID NO: 90695 - DNA, 20 bp, Artificial Sequence
  Description of Artificial Sequence: Synthetic oligonucleotide
  Target: ATXN2; (+) strand; PAM type: YTN; PAM sequence: CTG
gagcccagtggtgcagtcac

SEQ ID NO: 90696 - DNA, 20 bp, Artificial Sequence
  Description of Artificial Sequence: Synthetic oligonucleotide
  Target: ATXN2; (+) strand; PAM type: YTN; PAM sequence: TTC
cctgcagcctggaccttctg

SEQ ID NO: 90697 - DNA, 20 bp, Artificial Sequence
  Description of Artificial Sequence: Synthetic oligonucleotide
  Target: ATXN2; (+) strand; PAM type: YTN; PAM sequence: CTG
cagcctggaccttctggttt

SEQ ID NO: 90698 - DNA, 20 bp, Artificial Sequence
  Description of Artificial Sequence: Synthetic oligonucleotide
  Target: ATXN2; (+) strand; PAM type: YTN; PAM sequence: CTG
gaccttctggtttcaattga

SEQ ID NO: 90699 - DNA, 20 bp, Artificial Sequence
  Description of Artificial Sequence: Synthetic oligonucleotide
  Target: ATXN2; (+) strand; PAM type: YTN; PAM sequence: CTT
ctggtttcaattgatcctcc

SEQ ID NO: 90700 - DNA, 20 bp, Artificial Sequence
  Description of Artificial Sequence: Synthetic oligonucleotide
  Target: ATXN2; (+) strand; PAM type: YTN; PAM sequence: TTC
tggtttcaattgatcctccc

SEQ ID NO: 90701 - DNA, 20 bp, Artificial Sequence
  Description of Artificial Sequence: Synthetic oligonucleotide
  Target: ATXN2; (+) strand; PAM type: YTN; PAM sequence: CTG
gtttcaattgatcctcccac

SEQ ID NO: 90702 - DNA, 20 bp, Artificial Sequence
  Description of Artificial Sequence: Synthetic oligonucleotide
  Target: ATXN2; (+) strand; PAM type: YTN; PAM sequence: TTT
caattgatcctcccacctca

SEQ ID NO: 90703 - DNA, 20 bp, Artificial Sequence
  Description of Artificial Sequence: Synthetic oligonucleotide
  Target: ATXN2; (+) strand; PAM type: YTN; PAM sequence: TTC
aattgatcctcccacctcag

SEQ ID NO: 90704 - DNA, 20 bp, Artificial Sequence
  Description of Artificial Sequence: Synthetic oligonucleotide
  Target: ATXN2; (+) strand; PAM type: YTN; PAM sequence: TTG
atcctcccacctcagtctcc

SEQ ID NO: 90705 - DNA, 20 bp, Artificial Sequence
  Description of Artificial Sequence: Synthetic oligonucleotide
  Target: ATXN2; (+) strand; PAM type: YTN; PAM sequence: CTC
ccacctcagtctcccaagta

SEQ ID NO: 90706 - DNA, 20 bp, Artificial Sequence
  Description of Artificial Sequence: Synthetic oligonucleotide
  Target: ATXN2; (+) strand; PAM type: YTN; PAM sequence: CTC
agtctcccaagtagctagga

SEQ ID NO: 90707 - DNA, 20 bp, Artificial Sequence
  Description of Artificial Sequence: Synthetic oligonucleotide
  Target: ATXN2; (+) strand; PAM type: YTN; PAM sequence: CTC
ccaagtagctaggactacag

SEQ ID NO: 90708 - DNA, 20 bp, Artificial Sequence
  Description of Artificial Sequence: Synthetic oligonucleotide
  Target: ATXN2; (+) strand; PAM type: YTN; PAM sequence: CTA
ggactacaggagcacaccat

SEQ ID NO: 90709 - DNA, 20 bp, Artificial Sequence
  Description of Artificial Sequence: Synthetic oligonucleotide
  Target: ATXN2; (+) strand; PAM type: YTN; PAM sequence: CTA
caggagcacaccatgacggc

SEQ ID NO: 90710 - DNA, 20 bp, Artificial Sequence
  Description of Artificial Sequence: Synthetic oligonucleotide
  Target: ATXN2; (+) strand; PAM type: YTN; PAM sequence: CTG
gctaagatttctattttttt

SEQ ID NO: 90711 - DNA, 20 bp, Artificial Sequence
  Description of Artificial Sequence: Synthetic oligonucleotide
  Target: ATXN2; (+) strand; PAM type: YTN; PAM sequence: CTA
agatttctattttttttttg

SEQ ID NO: 90712 - DNA, 20 bp, Artificial Sequence
  Description of Artificial Sequence: Synthetic oligonucleotide
  Target: ATXN2; (+) strand; PAM type: YTN; PAM sequence: TTT
ctattttttttttgcagaga

SEQ ID NO: 90713 - DNA, 20 bp, Artificial Sequence
  Description of Artificial Sequence: Synthetic oligonucleotide
  Target: ATXN2; (+) strand; PAM type: YTN; PAM sequence: TTC
tattttttttttgcagagat

SEQ ID NO: 90714 - DNA, 20 bp, Artificial Sequence
  Description of Artificial Sequence: Synthetic oligonucleotide
  Target: ATXN2; (+) strand; PAM type: YTN; PAM sequence: CTA
ttttttttttgcagagatag

SEQ ID NO: 90715 - DNA, 20 bp, Artificial Sequence
  Description of Artificial Sequence: Synthetic oligonucleotide
  Target: ATXN2; (+) strand; PAM type: YTN; PAM sequence: TTT
tttttttgcagagataggtt

SEQ ID NO: 90716 - DNA, 20 bp, Artificial Sequence
  Description of Artificial Sequence: Synthetic oligonucleotide
  Target: ATXN2; (+) strand; PAM type: YTN; PAM sequence: TTT
ttttttgcagagataggttt

SEQ ID NO: 90717 - DNA, 20 bp, Artificial Sequence
  Description of Artificial Sequence: Synthetic oligonucleotide
  Target: ATXN2; (+) strand; PAM type: YTN; PAM sequence: TTT
tttttgcagagataggtttt

SEQ ID NO: 90718 - DNA, 20 bp, Artificial Sequence
  Description of Artificial Sequence: Synthetic oligonucleotide
  Target: ATXN2; (+) strand; PAM type: YTN; PAM sequence: TTT
ttttgcagagataggttttt

SEQ ID NO: 90719 - DNA, 20 bp, Artificial Sequence
  Description of Artificial Sequence: Synthetic oligonucleotide
  Target: ATXN2; (+) strand; PAM type: YTN; PAM sequence: TTT
tttgcagagataggtttttg

SEQ ID NO: 90720 - DNA, 20 bp, Artificial Sequence
  Description of Artificial Sequence: Synthetic oligonucleotide
  Target: ATXN2; (+) strand; PAM type: YTN; PAM sequence: TTT
ttgcagagataggtttttgc

SEQ ID NO: 90721 - DNA, 20 bp, Artificial Sequence
  Description of Artificial Sequence: Synthetic oligonucleotide
  Target: ATXN2; (+) strand; PAM type: YTN; PAM sequence: TTT
tgcagagataggtttttgcc

SEQ ID NO: 90722 - DNA, 20 bp, Artificial Sequence
  Description of Artificial Sequence: Synthetic oligonucleotide
  Target: ATXN2; (+) strand; PAM type: YTN; PAM sequence: TTT
gcagagataggtttttgcca

SEQ ID NO: 90723 - DNA, 20 bp, Artificial Sequence
  Description of Artificial Sequence: Synthetic oligonucleotide
  Target: ATXN2; (+) strand; PAM type: YTN; PAM sequence: TTG
cagagataggtttttgccat

SEQ ID NO: 90724 - DNA, 20 bp, Artificial Sequence
  Description of Artificial Sequence: Synthetic oligonucleotide
  Target: ATXN2; (+) strand; PAM type: YTN; PAM sequence: TTT
ttgccatgttgcccaggctg

SEQ ID NO: 90725 - DNA, 20 bp, Artificial Sequence
  Description of Artificial Sequence: Synthetic oligonucleotide
  Target: ATXN2; (+) strand; PAM type: YTN; PAM sequence: TTT
tgccatgttgcccaggctgg

SEQ ID NO: 90726 - DNA, 20 bp, Artificial Sequence
  Description of Artificial Sequence: Synthetic oligonucleotide
  Target: ATXN2; (+) strand; PAM type: YTN; PAM sequence: TTT
gccatgttgcccaggctggt

SEQ ID NO: 90727 - DNA, 20 bp, Artificial Sequence
  Description of Artificial Sequence: Synthetic oligonucleotide
  Target: ATXN2; (+) strand; PAM type: YTN; PAM sequence: TTG
ccatgttgcccaggctggtc

SEQ ID NO: 90728 - DNA, 20 bp, Artificial Sequence
  Description of Artificial Sequence: Synthetic oligonucleotide
  Target: ATXN2; (+) strand; PAM type: YTN; PAM sequence: TTG
cccaggctggtcttaaaact

SEQ ID NO: 90729 - DNA, 20 bp, Artificial Sequence
  Description of Artificial Sequence: Synthetic oligonucleotide
  Target: ATXN2; (+) strand; PAM type: YTN; PAM sequence: CTG
gtcttaaaactcccggtcat

SEQ ID NO: 90730 - DNA, 20 bp, Artificial Sequence
  Description of Artificial Sequence: Synthetic oligonucleotide
  Target: ATXN2; (+) strand; PAM type: YTN; PAM sequence: CTT
aaaactcccggtcatgtgat

SEQ ID NO: 90731 - DNA, 20 bp, Artificial Sequence
  Description of Artificial Sequence: Synthetic oligonucleotide
  Target: ATXN2; (+) strand; PAM type: YTN; PAM sequence: TTA
aaactcccggtcatgtgatc

SEQ ID NO: 90732 - DNA, 20 bp, Artificial Sequence
  Description of Artificial Sequence: Synthetic oligonucleotide
  Target: ATXN2; (+) strand; PAM type: YTN; PAM sequence: CTC
ccggtcatgtgatctgccca

SEQ ID NO: 90733 - DNA, 20 bp, Artificial Sequence
  Description of Artificial Sequence: Synthetic oligonucleotide
  Target: ATXN2; (+) strand; PAM type: YTN; PAM sequence: CTG
cccacctcagcctctcaaag

SEQ ID NO: 90734 - DNA, 20 bp, Artificial Sequence
  Description of Artificial Sequence: Synthetic oligonucleotide
  Target: ATXN2; (+) strand; PAM type: YTN; PAM sequence: CTC
agcctctcaaagtgctggaa

SEQ ID NO: 90735 - DNA, 20 bp, Artificial Sequence
  Description of Artificial Sequence: Synthetic oligonucleotide
  Target: ATXN2; (+) strand; PAM type: YTN; PAM sequence: CTC
tcaaagtgctggaattacac

SEQ ID NO: 90736 - DNA, 20 bp, Artificial Sequence
  Description of Artificial Sequence: Synthetic oligonucleotide
  Target: ATXN2; (+) strand; PAM type: YTN; PAM sequence: CTC
aaagtgctggaattacacgt

SEQ ID NO: 90737 - DNA, 20 bp, Artificial Sequence
  Description of Artificial Sequence: Synthetic oligonucleotide
  Target: ATXN2; (+) strand; PAM type: YTN; PAM sequence: CTG
gaattacacgtgagccacca

SEQ ID NO: 90738 - DNA, 20 bp, Artificial Sequence
  Description of Artificial Sequence: Synthetic oligonucleotide
  Target: ATXN2; (+) strand; PAM type: YTN; PAM sequence: TTA
cacgtgagccaccaagccta

SEQ ID NO: 90739 - DNA, 20 bp, Artificial Sequence
  Description of Artificial Sequence: Synthetic oligonucleotide
  Target: ATXN2; (+) strand; PAM type: YTN; PAM sequence: CTA
gccgaaacatccttctaata

SEQ ID NO: 90740 - DNA, 20 bp, Artificial Sequence
  Description of Artificial Sequence: Synthetic oligonucleotide
  Target: ATXN2; (+) strand; PAM type: YTN; PAM sequence: CTT
ctaataggatcttaacattg

SEQ ID NO: 90741 - DNA, 20 bp, Artificial Sequence
  Description of Artificial Sequence: Synthetic oligonucleotide
  Target: ATXN2; (+) strand; PAM type: YTN; PAM sequence: TTC
taataggatcttaacattgg

SEQ ID NO: 90742 - DNA, 20 bp, Artificial Sequence
  Description of Artificial Sequence: Synthetic oligonucleotide
  Target: ATXN2; (+) strand; PAM type: YTN; PAM sequence: CTA
ataggatcttaacattggtt

SEQ ID NO: 90743 - DNA, 20 bp, Artificial Sequence
  Description of Artificial Sequence: Synthetic oligonucleotide
  Target: ATXN2; (+) strand; PAM type: YTN; PAM sequence: CTT
aacattggttgaagttagtt

SEQ ID NO: 90744 - DNA, 20 bp, Artificial Sequence
  Description of Artificial Sequence: Synthetic oligonucleotide
  Target: ATXN2; (+) strand; PAM type: YTN; PAM sequence: TTA
acattggttgaagttagttg

SEQ ID NO: 90745 - DNA, 20 bp, Artificial Sequence
  Description of Artificial Sequence: Synthetic oligonucleotide
  Target: ATXN2; (+) strand; PAM type: YTN; PAM sequence: TTG
gttgaagttagttgcccctc

SEQ ID NO: 90746 - DNA, 20 bp, Artificial Sequence
  Description of Artificial Sequence: Synthetic oligonucleotide
  Target: ATXN2; (+) strand; PAM type: YTN; PAM sequence: TTG
aagttagttgcccctctgct

SEQ ID NO: 90747 - DNA, 20 bp, Artificial Sequence
  Description of Artificial Sequence: Synthetic oligonucleotide
  Target: ATXN2; (+) strand; PAM type: YTN; PAM sequence: TTA
gttgcccctctgcttcaaaa

SEQ ID NO: 90748 - DNA, 20 bp, Artificial Sequence
  Description of Artificial Sequence: Synthetic oligonucleotide
  Target: ATXN2; (+) strand; PAM type: YTN; PAM sequence: TTG
cccctctgcttcaaaagaaa

SEQ ID NO: 90749 - DNA, 20 bp, Artificial Sequence
  Description of Artificial Sequence: Synthetic oligonucleotide
  Target: ATXN2; (+) strand; PAM type: YTN; PAM sequence: CTC
tgcttcaaaagaaattctgg

SEQ ID NO: 90750 - DNA, 20 bp, Artificial Sequence
  Description of Artificial Sequence: Synthetic oligonucleotide
  Target: ATXN2; (+) strand; PAM type: YTN; PAM sequence: CTG
cttcaaaagaaattctggct

SEQ ID NO: 90751 - DNA, 20 bp, Artificial Sequence
  Description of Artificial Sequence: Synthetic oligonucleotide
  Target: ATXN2; (+) strand; PAM type: YTN; PAM sequence: CTT
caaaagaaattctggctttg

SEQ ID NO: 90752 - DNA, 20 bp, Artificial Sequence
  Description of Artificial Sequence: Synthetic oligonucleotide
  Target: ATXN2; (+) strand; PAM type: YTN; PAM sequence: TTC
aaaagaaattctggctttgg

SEQ ID NO: 90753 - DNA, 20 bp, Artificial Sequence
  Description of Artificial Sequence: Synthetic oligonucleotide
  Target: ATXN2; (+) strand; PAM type: YTN; PAM sequence: TTC
tggctttggggaaataactg

SEQ ID NO: 90754 - DNA, 20 bp, Artificial Sequence
  Description of Artificial Sequence: Synthetic oligonucleotide
  Target: ATXN2; (+) strand; PAM type: YTN; PAM sequence: CTG
gctttggggaaataactgta

SEQ ID NO: 90755 - DNA, 20 bp, Artificial Sequence
  Description of Artificial Sequence: Synthetic oligonucleotide
  Target: ATXN2; (+) strand; PAM type: YTN; PAM sequence: CTT
tggggaaataactgtaggta

SEQ ID NO: 90756 - DNA, 20 bp, Artificial Sequence
  Description of Artificial Sequence: Synthetic oligonucleotide
  Target: ATXN2; (+) strand; PAM type: YTN; PAM sequence: TTT
ggggaaataactgtaggtat

SEQ ID NO: 90757 - DNA, 20 bp, Artificial Sequence
  Description of Artificial Sequence: Synthetic oligonucleotide
  Target: ATXN2; (+) strand; PAM type: YTN; PAM sequence: TTG
gggaaataactgtaggtata

SEQ ID NO: 90758 - DNA, 20 bp, Artificial Sequence
  Description of Artificial Sequence: Synthetic oligonucleotide
  Target: ATXN2; (+) strand; PAM type: YTN; PAM sequence: CTG
taggtatatataaagcaagg

SEQ ID NO: 90759 - DNA, 20 bp, Artificial Sequence
  Description of Artificial Sequence: Synthetic oligonucleotide
  Target: ATXN2; (+) strand; PAM type: YTN; PAM sequence: TTA
gcaatctagtaaattaatct

SEQ ID NO: 90760 - DNA, 20 bp, Artificial Sequence
  Description of Artificial Sequence: Synthetic oligonucleotide
  Target: ATXN2; (+) strand; PAM type: YTN; PAM sequence: CTA
gtaaattaatctagcaaacc

SEQ ID NO: 90761 - DNA, 20 bp, Artificial Sequence
  Description of Artificial Sequence: Synthetic oligonucleotide
  Target: ATXN2; (+) strand; PAM type: YTN; PAM sequence: TTA
atctagcaaaccctcttctt

SEQ ID NO: 90762 - DNA, 20 bp, Artificial Sequence
  Description of Artificial Sequence: Synthetic oligonucleotide
  Target: ATXN2; (+) strand; PAM type: YTN; PAM sequence: CTA
gcaaaccctcttcttcaaat

SEQ ID NO: 90763 - DNA, 20 bp, Artificial Sequence
  Description of Artificial Sequence: Synthetic oligonucleotide
  Target: ATXN2; (+) strand; PAM type: YTN; PAM sequence: CTC
ttcttcaaatttaagttcag

SEQ ID NO: 90764 - DNA, 20 bp, Artificial Sequence
  Description of Artificial Sequence: Synthetic oligonucleotide
  Target: ATXN2; (+) strand; PAM type: YTN; PAM sequence: CTT
cttcaaatttaagttcagat

SEQ ID NO: 90765 - DNA, 20 bp, Artificial Sequence
  Description of Artificial Sequence: Synthetic oligonucleotide
  Target: ATXN2; (+) strand; PAM type: YTN; PAM sequence: TTC
ttcaaatttaagttcagatt

SEQ ID NO: 90766 - DNA, 20 bp, Artificial Sequence
  Description of Artificial Sequence: Synthetic oligonucleotide
  Target: ATXN2; (+) strand; PAM type: YTN; PAM sequence: CTT
caaatttaagttcagattta

SEQ ID NO: 90767 - DNA, 20 bp, Artificial Sequence
  Description of Artificial Sequence: Synthetic oligonucleotide
  Target: ATXN2; (+) strand; PAM type: YTN; PAM sequence: TTC
aaatttaagttcagatttaa

SEQ ID NO: 90768 - DNA, 20 bp, Artificial Sequence
  Description of Artificial Sequence: Synthetic oligonucleotide
  Target: ATXN2; (+) strand; PAM type: YTN; PAM sequence: TTT
aagttcagatttaaatcaga

SEQ ID NO: 90769 - DNA, 20 bp, Artificial Sequence
  Description of Artificial Sequence: Synthetic oligonucleotide
  Target: ATXN2; (+) strand; PAM type: YTN; PAM sequence: TTA
agttcagatttaaatcagat

SEQ ID NO: 90770 - DNA, 20 bp, Artificial Sequence
  Description of Artificial Sequence: Synthetic oligonucleotide
  Target: ATXN2; (+) strand; PAM type: YTN; PAM sequence: TTC
agatttaaatcagatttcag

SEQ ID NO: 90771 - DNA, 20 bp, Artificial Sequence
  Description of Artificial Sequence: Synthetic oligonucleotide
  Target: ATXN2; (+) strand; PAM type: YTN; PAM sequence: TTT
aaatcagatttcagatcaaa

SEQ ID NO: 90772 - DNA, 20 bp, Artificial Sequence
  Description of Artificial Sequence: Synthetic oligonucleotide
  Target: ATXN2; (+) strand; PAM type: YTN; PAM sequence: TTA
aatcagatttcagatcaaaa

SEQ ID NO: 90773 - DNA, 20 bp, Artificial Sequence
  Description of Artificial Sequence: Synthetic oligonucleotide
  Target: ATXN2; (+) strand; PAM type: YTN; PAM sequence: TTT
cagatcaaaaagctttggaa

SEQ ID NO: 90774 - DNA, 20 bp, Artificial Sequence
  Description of Artificial Sequence: Synthetic oligonucleotide
  Target: ATXN2; (+) strand; PAM type: YTN; PAM sequence: TTC
agatcaaaaagctttggaat

SEQ ID NO: 90775 - DNA, 20 bp, Artificial Sequence
  Description of Artificial Sequence: Synthetic oligonucleotide
  Target: ATXN2; (+) strand; PAM type: YTN; PAM sequence: CTT
tggaattaactttttttttt

SEQ ID NO: 90776 - DNA, 20 bp, Artificial Sequence
  Description of Artificial Sequence: Synthetic oligonucleotide
  Target: ATXN2; (+) strand; PAM type: YTN; PAM sequence: TTT
ggaattaacttttttttttt

SEQ ID NO: 90777 - DNA, 20 bp, Artificial Sequence
  Description of Artificial Sequence: Synthetic oligonucleotide
  Target: ATXN2; (+) strand; PAM type: YTN; PAM sequence: TTG
gaattaactttttttttttt

SEQ ID NO: 90778 - DNA, 20 bp, Artificial Sequence
  Description of Artificial Sequence: Synthetic oligonucleotide
  Target: ATXN2; (+) strand; PAM type: YTN; PAM sequence: TTA
acttttttttttttttttga

SEQ ID NO: 90779 - DNA, 20 bp, Artificial Sequence
  Description of Artificial Sequence: Synthetic oligonucleotide
  Target: ATXN2; (+) strand; PAM type: YTN; PAM sequence: CTT
ttttttttttttttgagata

SEQ ID NO: 90780 - DNA, 20 bp, Artificial Sequence
  Description of Artificial Sequence: Synthetic oligonucleotide
  Target: ATXN2; (+) strand; PAM type: YTN; PAM sequence: TTT
tttttttttttttgagatag

SEQ ID NO: 90781 - DNA, 20 bp, Artificial Sequence
  Description of Artificial Sequence: Synthetic oligonucleotide
  Target: ATXN2; (+) strand; PAM type: YTN; PAM sequence: TTT
ttttttttttttgagatagg

SEQ ID NO: 90782 - DNA, 20 bp, Artificial Sequence
  Description of Artificial Sequence: Synthetic oligonucleotide
  Target: ATXN2; (+) strand; PAM type: YTN; PAM sequence: TTT
tttttttttttgagataggg

SEQ ID NO: 90783 - DNA, 20 bp, Artificial Sequence
  Description of Artificial Sequence: Synthetic oligonucleotide
  Target: ATXN2; (+) strand; PAM type: YTN; PAM sequence: TTT
ttttttttttgagatagggt

SEQ ID NO: 90784 - DNA, 20 bp, Artificial Sequence
  Description of Artificial Sequence: Synthetic oligonucleotide
  Target: ATXN2; (+) strand; PAM type: YTN; PAM sequence: TTT
tttttttttgagatagggtc

SEQ ID NO: 90785 - DNA, 20 bp, Artificial Sequence
  Description of Artificial Sequence: Synthetic oligonucleotide
  Target: ATXN2; (+) strand; PAM type: YTN; PAM sequence: TTT
ttttttttgagatagggtct

SEQ ID NO: 90786 - DNA, 20 bp, Artificial Sequence
  Description of Artificial Sequence: Synthetic oligonucleotide
  Target: ATXN2; (+) strand; PAM type: YTN; PAM sequence: TTT
tttttttgagatagggtctc

SEQ ID NO: 90787 - DNA, 20 bp, Artificial Sequence
  Description of Artificial Sequence: Synthetic oligonucleotide
  Target: ATXN2; (+) strand; PAM type: YTN; PAM sequence: TTT
ttttttgagatagggtctca

SEQ ID NO: 90788 - DNA, 20 bp, Artificial Sequence
  Description of Artificial Sequence: Synthetic oligonucleotide
  Target: ATXN2; (+) strand; PAM type: YTN; PAM sequence: TTT
tttttgagatagggtctcac

SEQ ID NO: 90789 - DNA, 20 bp, Artificial Sequence
  Description of Artificial Sequence: Synthetic oligonucleotide
  Target: ATXN2; (+) strand; PAM type: YTN; PAM sequence: TTT
ttttgagatagggtctcact

SEQ ID NO: 90790 - DNA, 20 bp, Artificial Sequence
  Description of Artificial Sequence: Synthetic oligonucleotide
  Target: ATXN2; (+) strand; PAM type: YTN; PAM sequence: TTT
tttgagatagggtctcacta

SEQ ID NO: 90791 - DNA, 20 bp, Artificial Sequence
  Description of Artificial Sequence: Synthetic oligonucleotide
  Target: ATXN2; (+) strand; PAM type: YTN; PAM sequence: TTT
ttgagatagggtctcactat

SEQ ID NO: 90792 - DNA, 20 bp, Artificial Sequence
  Description of Artificial Sequence: Synthetic oligonucleotide
  Target: ATXN2; (+) strand; PAM type: YTN; PAM sequence: TTT
tgagatagggtctcactata

SEQ ID NO: 90793 - DNA, 20 bp, Artificial Sequence
  Description of Artificial Sequence: Synthetic oligonucleotide
  Target: ATXN2; (+) strand; PAM type: YTN; PAM sequence: TTT
gagatagggtctcactatat

SEQ ID NO: 90794 - DNA, 20 bp, Artificial Sequence
  Description of Artificial Sequence: Synthetic oligonucleotide
  Target: ATXN2; (+) strand; PAM type: YTN; PAM sequence: TTG
agatagggtctcactatatt

SEQ ID NO: 90795 - DNA, 20 bp, Artificial Sequence
  Description of Artificial Sequence: Synthetic oligonucleotide
  Target: ATXN2; (+) strand; PAM type: YTN; PAM sequence: CTC
actatattgcccatgctgct

SEQ ID NO: 90796 - DNA, 20 bp, Artificial Sequence
  Description of Artificial Sequence: Synthetic oligonucleotide
  Target: ATXN2; (+) strand; PAM type: YTN; PAM sequence: CTA
tattgcccatgctgctctcg

SEQ ID NO: 90797 - DNA, 20 bp, Artificial Sequence
  Description of Artificial Sequence: Synthetic oligonucleotide
  Target: ATXN2; (+) strand; PAM type: YTN; PAM sequence: TTG
cccatgctgctctcgaactc

SEQ ID NO: 90798 - DNA, 20 bp, Artificial Sequence
  Description of Artificial Sequence: Synthetic oligonucleotide
  Target: ATXN2; (+) strand; PAM type: YTN; PAM sequence: CTG
ctctcgaactcatgggttca

SEQ ID NO: 90799 - DNA, 20 bp, Artificial Sequence
  Description of Artificial Sequence: Synthetic oligonucleotide
  Target: ATXN2; (+) strand; PAM type: YTN; PAM sequence: CTC
tcgaactcatgggttcaagt

SEQ ID NO: 90800 - DNA, 20 bp, Artificial Sequence
  Description of Artificial Sequence: Synthetic oligonucleotide
  Target: ATXN2; (+) strand; PAM type: YTN; PAM sequence: CTC
gaactcatgggttcaagtca

SEQ ID NO: 90801 - DNA, 20 bp, Artificial Sequence
  Description of Artificial Sequence: Synthetic oligonucleotide
  Target: ATXN2; (+) strand; PAM type: YTN; PAM sequence: CTC
atgggttcaagtcatcctcc

SEQ ID NO: 90802 - DNA, 20 bp, Artificial Sequence
  Description of Artificial Sequence: Synthetic oligonucleotide
  Target: ATXN2; (+) strand; PAM type: YTN; PAM sequence: TTC
aagtcatcctccagctggga

SEQ ID NO: 90803 - DNA, 20 bp, Artificial Sequence
  Description of Artificial Sequence: Synthetic oligonucleotide
  Target: ATXN2; (+) strand; PAM type: YTN; PAM sequence: CTC
cagctgggatatcaggcatg

SEQ ID NO: 90804 - DNA, 20 bp, Artificial Sequence
  Description of Artificial Sequence: Synthetic oligonucleotide
  Target: ATXN2; (+) strand; PAM type: YTN; PAM sequence: CTG
ggatatcaggcatggagcca

SEQ ID NO: 90805 - DNA, 20 bp, Artificial Sequence
  Description of Artificial Sequence: Synthetic oligonucleotide
  Target: ATXN2; (+) strand; PAM type: YTN; PAM sequence: CTG
tgtccagccaattagtctgg

SEQ ID NO: 90806 - DNA, 20 bp, Artificial Sequence
  Description of Artificial Sequence: Synthetic oligonucleotide
  Target: ATXN2; (+) strand; PAM type: YTN; PAM sequence: TTA
gtctggtttttttgtttgtt

SEQ ID NO: 90807 - DNA, 20 bp, Artificial Sequence
  Description of Artificial Sequence: Synthetic oligonucleotide
  Target: ATXN2; (+) strand; PAM type: YTN; PAM sequence: CTG
gtttttttgtttgtttgttt

SEQ ID NO: 90808 - DNA, 20 bp, Artificial Sequence
  Description of Artificial Sequence: Synthetic oligonucleotide
  Target: ATXN2; (+) strand; PAM type: YTN; PAM sequence: TTT
ttttgtttgtttgttttttg

SEQ ID NO: 90809 - DNA, 20 bp, Artificial Sequence
  Description of Artificial Sequence: Synthetic oligonucleotide
  Target: ATXN2; (+) strand; PAM type: YTN; PAM sequence: TTT
tttgtttgtttgttttttgt

SEQ ID NO: 90810 - DNA, 20 bp, Artificial Sequence
  Description of Artificial Sequence: Synthetic oligonucleotide
  Target: ATXN2; (+) strand; PAM type: YTN; PAM sequence: TTT
ttgtttgtttgttttttgtt

SEQ ID NO: 90811 - DNA, 20 bp, Artificial Sequence
  Description of Artificial Sequence: Synthetic oligonucleotide
  Target: ATXN2; (+) strand; PAM type: YTN; PAM sequence: TTT
tgtttgtttgttttttgttt

SEQ ID NO: 90812 - DNA, 20 bp, Artificial Sequence
  Description of Artificial Sequence: Synthetic oligonucleotide
  Target: ATXN2; (+) strand; PAM type: YTN; PAM sequence: TTT
gtttgtttgttttttgtttg

SEQ ID NO: 90813 - DNA, 20 bp, Artificial Sequence
  Description of Artificial Sequence: Synthetic oligonucleotide
  Target: ATXN2; (+) strand; PAM type: YTN; PAM sequence: TTG
tttgtttgttttttgtttgt

SEQ ID NO: 90814 - DNA, 20 bp, Artificial Sequence
  Description of Artificial Sequence: Synthetic oligonucleotide
  Target: ATXN2; (+) strand; PAM type: YTN; PAM sequence: TTT
gtttgttttttgtttgtttg

SEQ ID NO: 90815 - DNA, 20 bp, Artificial Sequence
  Description of Artificial Sequence: Synthetic oligonucleotide
  Target: ATXN2; (+) strand; PAM type: YTN; PAM sequence: TTG
tttgttttttgtttgtttgt

SEQ ID NO: 90816 - DNA, 20 bp, Artificial Sequence
  Description of Artificial Sequence: Synthetic oligonucleotide
  Target: ATXN2; (+) strand; PAM type: YTN; PAM sequence: TTT
gttttttgtttgtttgtttg

SEQ ID NO: 90817 - DNA, 20 bp, Artificial Sequence
  Description of Artificial Sequence: Synthetic oligonucleotide
  Target: ATXN2; (+) strand; PAM type: YTN; PAM sequence: TTG
ttttttgtttgtttgtttgt

SEQ ID NO: 90818 - DNA, 20 bp, Artificial Sequence
  Description of Artificial Sequence: Synthetic oligonucleotide
  Target: ATXN2; (+) strand; PAM type: YTN; PAM sequence: TTT
tttgtttgtttgtttgtttt

SEQ ID NO: 90819 - DNA, 20 bp, Artificial Sequence
  Description of Artificial Sequence: Synthetic oligonucleotide
  Target: ATXN2; (+) strand; PAM type: YTN; PAM sequence: TTT
ttgtttgtttgtttgttttg

SEQ ID NO: 90820 - DNA, 20 bp, Artificial Sequence
  Description of Artificial Sequence: Synthetic oligonucleotide
  Target: ATXN2; (+) strand; PAM type: YTN; PAM sequence: TTT
tgtttgtttgtttgttttga

SEQ ID NO: 90821 - DNA, 20 bp, Artificial Sequence
  Description of Artificial Sequence: Synthetic oligonucleotide
  Target: ATXN2; (+) strand; PAM type: YTN; PAM sequence: TTT
gtttgtttgtttgttttgag

SEQ ID NO: 90822 - DNA, 20 bp, Artificial Sequence
  Description of Artificial Sequence: Synthetic oligonucleotide
  Target: ATXN2; (+) strand; PAM type: YTN; PAM sequence: TTG
tttgtttgtttgttttgaga

SEQ ID NO: 90823 - DNA, 20 bp, Artificial Sequence
  Description of Artificial Sequence: Synthetic oligonucleotide
  Target: ATXN2; (+) strand; PAM type: YTN; PAM sequence: TTT
gtttgtttgttttgagatgg

SEQ ID NO: 90824 - DNA, 20 bp, Artificial Sequence
  Description of Artificial Sequence: Synthetic oligonucleotide
  Target: ATXN2; (+) strand; PAM type: YTN; PAM sequence: TTG
tttgtttgttttgagatgga

SEQ ID NO: 90825 - DNA, 20 bp, Artificial Sequence
  Description of Artificial Sequence: Synthetic oligonucleotide
  Target: ATXN2; (+) strand; PAM type: YTN; PAM sequence: TTT
gtttgttttgagatggagtc

SEQ ID NO: 90826 - DNA, 20 bp, Artificial Sequence
  Description of Artificial Sequence: Synthetic oligonucleotide
  Target: ATXN2; (+) strand; PAM type: YTN; PAM sequence: TTG
tttgttttgagatggagtct

SEQ ID NO: 90827 - DNA, 20 bp, Artificial Sequence
  Description of Artificial Sequence: Synthetic oligonucleotide
  Target: ATXN2; (+) strand; PAM type: YTN; PAM sequence: TTT
gttttgagatggagtctcac

SEQ ID NO: 90828 - DNA, 20 bp, Artificial Sequence
  Description of Artificial Sequence: Synthetic oligonucleotide
  Target: ATXN2; (+) strand; PAM type: YTN; PAM sequence: TTG
ttttgagatggagtctcact

SEQ ID NO: 90829 - DNA, 20 bp, Artificial Sequence
  Description of Artificial Sequence: Synthetic oligonucleotide
  Target: ATXN2; (+) strand; PAM type: YTN; PAM sequence: TTT
tgagatggagtctcactctg

SEQ ID NO: 90830 - DNA, 20 bp, Artificial Sequence
  Description of Artificial Sequence: Synthetic oligonucleotide
  Target: ATXN2; (+) strand; PAM type: YTN; PAM sequence: TTT
gagatggagtctcactctgt

SEQ ID NO: 90831 - DNA, 20 bp, Artificial Sequence
  Description of Artificial Sequence: Synthetic oligonucleotide
  Target: ATXN2; (+) strand; PAM type: YTN; PAM sequence: TTG
agatggagtctcactctgtt

SEQ ID NO: 90832 - DNA, 20 bp, Artificial Sequence
  Description of Artificial Sequence: Synthetic oligonucleotide
  Target: ATXN2; (+) strand; PAM type: YTN; PAM sequence: CTC
actctgttgcccaggctgaa

SEQ ID NO: 90833 - DNA, 20 bp, Artificial Sequence
  Description of Artificial Sequence: Synthetic oligonucleotide
  Target: ATXN2; (+) strand; PAM type: YTN; PAM sequence: CTC
tgttgcccaggctgaagtgc

SEQ ID NO: 90834 - DNA, 20 bp, Artificial Sequence
  Description of Artificial Sequence: Synthetic oligonucleotide
  Target: ATXN2; (+) strand; PAM type: YTN; PAM sequence: CTG
ttgcccaggctgaagtgcag

SEQ ID NO: 90835 - DNA, 20 bp, Artificial Sequence
  Description of Artificial Sequence: Synthetic oligonucleotide
  Target: ATXN2; (+) strand; PAM type: YTN; PAM sequence: TTG
cccaggctgaagtgcagtgg

SEQ ID NO: 90836 - DNA, 20 bp, Artificial Sequence
  Description of Artificial Sequence: Synthetic oligonucleotide
  Target: ATXN2; (+) strand; PAM type: YTN; PAM sequence: CTG
aagtgcagtggcacgatctt

SEQ ID NO: 90837 - DNA, 20 bp, Artificial Sequence
  Description of Artificial Sequence: Synthetic oligonucleotide
  Target: ATXN2; (+) strand; PAM type: YTN; PAM sequence: CTT
ggctcactgcaacccctgcc

SEQ ID NO: 90838 - DNA, 20 bp, Artificial Sequence
  Description of Artificial Sequence: Synthetic oligonucleotide
  Target: ATXN2; (+) strand; PAM type: YTN; PAM sequence: TTG
gctcactgcaacccctgcct

SEQ ID NO: 90839 - DNA, 20 bp, Artificial Sequence
  Description of Artificial Sequence: Synthetic oligonucleotide
  Target: ATXN2; (+) strand; PAM type: YTN; PAM sequence: CTC
actgcaacccctgcctcccg

SEQ ID NO: 90840 - DNA, 20 bp, Artificial Sequence
  Description of Artificial Sequence: Synthetic oligonucleotide
  Target: ATXN2; (+) strand; PAM type: YTN; PAM sequence: CTG
caacccctgcctcccgggtt

SEQ ID NO: 90841 - DNA, 20 bp, Artificial Sequence
  Description of Artificial Sequence: Synthetic oligonucleotide
  Target: ATXN2; (+) strand; PAM type: YTN; PAM sequence: CTG
cctcccgggttcaagcaatt

SEQ ID NO: 90842 - DNA, 20 bp, Artificial Sequence
  Description of Artificial Sequence: Synthetic oligonucleotide
  Target: ATXN2; (+) strand; PAM type: YTN; PAM sequence: CTC
ccgggttcaagcaattctcc

SEQ ID NO: 90843 - DNA, 20 bp, Artificial Sequence
  Description of Artificial Sequence: Synthetic oligonucleotide
  Target: ATXN2; (+) strand; PAM type: YTN; PAM sequence: TTC
aagcaattctcctgcctcag

SEQ ID NO: 90844 - DNA, 20 bp, Artificial Sequence
  Description of Artificial Sequence: Synthetic oligonucleotide
  Target: ATXN2; (+) strand; PAM type: YTN; PAM sequence: TTC
tcctgcctcagccccaccta

SEQ ID NO: 90845 - DNA, 20 bp, Artificial Sequence
  Description of Artificial Sequence: Synthetic oligonucleotide
  Target: ATXN2; (+) strand; PAM type: YTN; PAM sequence: CTC
ctgcctcagccccacctagt

SEQ ID NO: 90846 - DNA, 20 bp, Artificial Sequence
  Description of Artificial Sequence: Synthetic oligonucleotide
  Target: ATXN2; (+) strand; PAM type: YTN; PAM sequence: CTG
cctcagccccacctagtagc

SEQ ID NO: 90847 - DNA, 20 bp, Artificial Sequence
  Description of Artificial Sequence: Synthetic oligonucleotide
  Target: ATXN2; (+) strand; PAM type: YTN; PAM sequence: CTC
agccccacctagtagctggg

SEQ ID NO: 90848 - DNA, 20 bp, Artificial Sequence
  Description of Artificial Sequence: Synthetic oligonucleotide
  Target: ATXN2; (+) strand; PAM type: YTN; PAM sequence: CTA
gtagctgggattacaggcgg

SEQ ID NO: 90849 - DNA, 20 bp, Artificial Sequence
  Description of Artificial Sequence: Synthetic oligonucleotide
  Target: ATXN2; (+) strand; PAM type: YTN; PAM sequence: CTG
ggattacaggcggcaggtgc

SEQ ID NO: 90850 - DNA, 20 bp, Artificial Sequence
  Description of Artificial Sequence: Synthetic oligonucleotide
  Target: ATXN2; (+) strand; PAM type: YTN; PAM sequence: TTA
caggcggcaggtgccaccat

SEQ ID NO: 90851 - DNA, 20 bp, Artificial Sequence
  Description of Artificial Sequence: Synthetic oligonucleotide
  Target: ATXN2; (+) strand; PAM type: YTN; PAM sequence: CTA
atttttgtattttagtagag

SEQ ID NO: 90852 - DNA, 20 bp, Artificial Sequence
  Description of Artificial Sequence: Synthetic oligonucleotide
  Target: ATXN2; (+) strand; PAM type: YTN; PAM sequence: TTT
ttgtattttagtagagatgg

SEQ ID NO: 90853 - DNA, 20 bp, Artificial Sequence
  Description of Artificial Sequence: Synthetic oligonucleotide
  Target: ATXN2; (+) strand; PAM type: YTN; PAM sequence: TTT
tgtattttagtagagatggg

SEQ ID NO: 90854 - DNA, 20 bp, Artificial Sequence
  Description of Artificial Sequence: Synthetic oligonucleotide
  Target: ATXN2; (+) strand; PAM type: YTN; PAM sequence: TTT
gtattttagtagagatgggg

SEQ ID NO: 90855 - DNA, 20 bp, Artificial Sequence
  Description of Artificial Sequence: Synthetic oligonucleotide
  Target: ATXN2; (+) strand; PAM type: YTN; PAM sequence: TTG
tattttagtagagatggggt

SEQ ID NO: 90856 - DNA, 20 bp, Artificial Sequence
  Description of Artificial Sequence: Synthetic oligonucleotide
  Target: ATXN2; (+) strand; PAM type: YTN; PAM sequence: TTT
tagtagagatggggtttcgc

SEQ ID NO: 90857 - DNA, 20 bp, Artificial Sequence
  Description of Artificial Sequence: Synthetic oligonucleotide
  Target: ATXN2; (+) strand; PAM type: YTN; PAM sequence: TTT
agtagagatggggtttcgcc

SEQ ID NO: 90858 - DNA, 20 bp, Artificial Sequence
  Description of Artificial Sequence: Synthetic oligonucleotide
  Target: ATXN2; (+) strand; PAM type: YTN; PAM sequence: TTA
gtagagatggggtttcgcca

SEQ ID NO: 90859 - DNA, 20 bp, Artificial Sequence
  Description of Artificial Sequence: Synthetic oligonucleotide
  Target: ATXN2; (+) strand; PAM type: YTN; PAM sequence: TTT
cgccatgttggccaggctgg

SEQ ID NO: 90860 - DNA, 20 bp, Artificial Sequence
  Description of Artificial Sequence: Synthetic oligonucleotide
  Target: ATXN2; (+) strand; PAM type: YTN; PAM sequence: TTC
gccatgttggccaggctggt

SEQ ID NO: 90861 - DNA, 20 bp, Artificial Sequence
  Description of Artificial Sequence: Synthetic oligonucleotide
  Target: ATXN2; (+) strand; PAM type: YTN; PAM sequence: TTG
gccaggctggtctcaaacta

SEQ ID NO: 90862 - DNA, 20 bp, Artificial Sequence
  Description of Artificial Sequence: Synthetic oligonucleotide
  Target: ATXN2; (+) strand; PAM type: YTN; PAM sequence: CTG
gtctcaaactactgacctca

SEQ ID NO: 90863 - DNA, 20 bp, Artificial Sequence
  Description of Artificial Sequence: Synthetic oligonucleotide
  Target: ATXN2; (+) strand; PAM type: YTN; PAM sequence: CTC
aaactactgacctcaggtga

SEQ ID NO: 90864 - DNA, 20 bp, Artificial Sequence
  Description of Artificial Sequence: Synthetic oligonucleotide
  Target: ATXN2; (+) strand; PAM type: YTN; PAM sequence: CTA
ctgacctcaggtgatacacc

SEQ ID NO: 90865 - DNA, 20 bp, Artificial Sequence
  Description of Artificial Sequence: Synthetic oligonucleotide
  Target: ATXN2; (+) strand; PAM type: YTN; PAM sequence: CTG
acctcaggtgatacacccac

SEQ ID NO: 90866 - DNA, 20 bp, Artificial Sequence
  Description of Artificial Sequence: Synthetic oligonucleotide
  Target: ATXN2; (+) strand; PAM type: YTN; PAM sequence: CTC
aggtgatacacccacctcgg

SEQ ID NO: 90867 - DNA, 20 bp, Artificial Sequence
  Description of Artificial Sequence: Synthetic oligonucleotide
  Target: ATXN2; (+) strand; PAM type: YTN; PAM sequence: CTC
ggcctcccaaagtgctggga

SEQ ID NO: 90868 - DNA, 20 bp, Artificial Sequence
  Description of Artificial Sequence: Synthetic oligonucleotide
  Target: ATXN2; (+) strand; PAM type: YTN; PAM sequence: CTC
ccaaagtgctgggattacag

SEQ ID NO: 90869 - DNA, 20 bp, Artificial Sequence
  Description of Artificial Sequence: Synthetic oligonucleotide
  Target: ATXN2; (+) strand; PAM type: YTN; PAM sequence: CTG
ggattacaggcataagccac

SEQ ID NO: 90870 - DNA, 20 bp, Artificial Sequence
  Description of Artificial Sequence: Synthetic oligonucleotide
  Target: ATXN2; (+) strand; PAM type: YTN; PAM sequence: TTA
caggcataagccaccatgcc

SEQ ID NO: 90871 - DNA, 20 bp, Artificial Sequence
  Description of Artificial Sequence: Synthetic oligonucleotide
  Target: ATXN2; (+) strand; PAM type: YTN; PAM sequence: TTT
atgtttgagacggggtctca

SEQ ID NO: 90872 - DNA, 20 bp, Artificial Sequence
  Description of Artificial Sequence: Synthetic oligonucleotide
  Target: ATXN2; (+) strand; PAM type: YTN; PAM sequence: TTA
tgtttgagacggggtctcac

SEQ ID NO: 90873 - DNA, 20 bp, Artificial Sequence
  Description of Artificial Sequence: Synthetic oligonucleotide
  Target: ATXN2; (+) strand; PAM type: YTN; PAM sequence: TTT
gagacggggtctcactctgt

SEQ ID NO: 90874 - DNA, 20 bp, Artificial Sequence
  Description of Artificial Sequence: Synthetic oligonucleotide
  Target: ATXN2; (+) strand; PAM type: YTN; PAM sequence: TTG
agacggggtctcactctgtc

SEQ ID NO: 90875 - DNA, 20 bp, Artificial Sequence
  Description of Artificial Sequence: Synthetic oligonucleotide
  Target: ATXN2; (+) strand; PAM type: YTN; PAM sequence: CTC
actctgtcgcccaggctgga

SEQ ID NO: 90876 - DNA, 20 bp, Artificial Sequence
  Description of Artificial Sequence: Synthetic oligonucleotide
  Target: ATXN2; (+) strand; PAM type: YTN; PAM sequence: CTC
tgtcgcccaggctggagggc

SEQ ID NO: 90877 - DNA, 20 bp, Artificial Sequence
  Description of Artificial Sequence: Synthetic oligonucleotide
  Target: ATXN2; (+) strand; PAM type: YTN; PAM sequence: CTG
tcgcccaggctggagggcag

SEQ ID NO: 90878 - DNA, 20 bp, Artificial Sequence
  Description of Artificial Sequence: Synthetic oligonucleotide
  Target: ATXN2; (+) strand; PAM type: YTN; PAM sequence: CTG
gagggcagtggcataatcac

SEQ ID NO: 90879 - DNA, 20 bp, Artificial Sequence
  Description of Artificial Sequence: Synthetic oligonucleotide
  Target: ATXN2; (+) strand; PAM type: YTN; PAM sequence: CTC
actgcagcctctacttcctg

SEQ ID NO: 90880 - DNA, 20 bp, Artificial Sequence
  Description of Artificial Sequence: Synthetic oligonucleotide
  Target: ATXN2; (+) strand; PAM type: YTN; PAM sequence: CTG
cagcctctacttcctgggct

SEQ ID NO: 90881 - DNA, 20 bp, Artificial Sequence
  Description of Artificial Sequence: Synthetic oligonucleotide
  Target: ATXN2; (+) strand; PAM type: YTN; PAM sequence: CTC
tacttcctgggctcaagtga

SEQ ID NO: 90882 - DNA, 20 bp, Artificial Sequence
  Description of Artificial Sequence: Synthetic oligonucleotide
  Target: ATXN2; (+) strand; PAM type: YTN; PAM sequence: CTA
cttcctgggctcaagtgatc

SEQ ID NO: 90883 - DNA, 20 bp, Artificial Sequence
  Description of Artificial Sequence: Synthetic oligonucleotide
  Target: ATXN2; (+) strand; PAM type: YTN; PAM sequence: CTT
cctgggctcaagtgatcctc

SEQ ID NO: 90884 - DNA, 20 bp, Artificial Sequence
  Description of Artificial Sequence: Synthetic oligonucleotide
  Target: ATXN2; (+) strand; PAM type: YTN; PAM sequence: TTC
ctgggctcaagtgatcctct

SEQ ID NO: 90885 - DNA, 20 bp, Artificial Sequence
  Description of Artificial Sequence: Synthetic oligonucleotide
  Target: ATXN2; (+) strand; PAM type: YTN; PAM sequence: CTG
ggctcaagtgatcctctcgc

SEQ ID NO: 90886 - DNA, 20 bp, Artificial Sequence
  Description of Artificial Sequence: Synthetic oligonucleotide
  Target: ATXN2; (+) strand; PAM type: YTN; PAM sequence: CTC
aagtgatcctctcgcctcag

SEQ ID NO: 90887 - DNA, 20 bp, Artificial Sequence
  Description of Artificial Sequence: Synthetic oligonucleotide
  Target: ATXN2; (+) strand; PAM type: YTN; PAM sequence: CTC
tcgcctcagtcccccaaaca

SEQ ID NO: 90888 - DNA, 20 bp, Artificial Sequence
  Description of Artificial Sequence: Synthetic oligonucleotide
  Target: ATXN2; (+) strand; PAM type: YTN; PAM sequence: CTC
gcctcagtcccccaaacagc

SEQ ID NO: 90889 - DNA, 20 bp, Artificial Sequence
  Description of Artificial Sequence: Synthetic oligonucleotide
  Target: ATXN2; (+) strand; PAM type: YTN; PAM sequence: CTC
agtcccccaaacagctgggg

SEQ ID NO: 90890 - DNA, 20 bp, Artificial Sequence
  Description of Artificial Sequence: Synthetic oligonucleotide
  Target: ATXN2; (+) strand; PAM type: YTN; PAM sequence: CTG
gggctacaggcatatgccac

SEQ ID NO: 90891 - DNA, 20 bp, Artificial Sequence
  Description of Artificial Sequence: Synthetic oligonucleotide
  Target: ATXN2; (+) strand; PAM type: YTN; PAM sequence: CTA
caggcatatgccaccatgcc

SEQ ID NO: 90892 - DNA, 20 bp, Artificial Sequence
  Description of Artificial Sequence: Synthetic oligonucleotide
  Target: ATXN2; (+) strand; PAM type: YTN; PAM sequence: CTA
atttttttgaattttagtag

SEQ ID NO: 90893 - DNA, 20 bp, Artificial Sequence
  Description of Artificial Sequence: Synthetic oligonucleotide
  Target: ATXN2; (+) strand; PAM type: YTN; PAM sequence: TTT
ttttgaattttagtagagac

SEQ ID NO: 90894 - DNA, 20 bp, Artificial Sequence
  Description of Artificial Sequence: Synthetic oligonucleotide
  Target: ATXN2; (+) strand; PAM type: YTN; PAM sequence: TTT
tttgaattttagtagagaca

SEQ ID NO: 90895 - DNA, 20 bp, Artificial Sequence
  Description of Artificial Sequence: Synthetic oligonucleotide
  Target: ATXN2; (+) strand; PAM type: YTN; PAM sequence: TTT
ttgaattttagtagagacaa

SEQ ID NO: 90896 - DNA, 20 bp, Artificial Sequence
  Description of Artificial Sequence: Synthetic oligonucleotide
  Target: ATXN2; (+) strand; PAM type: YTN; PAM sequence: TTT
tgaattttagtagagacaaa

SEQ ID NO: 90897 - DNA, 20 bp, Artificial Sequence
  Description of Artificial Sequence: Synthetic oligonucleotide
  Target: ATXN2; (+) strand; PAM type: YTN; PAM sequence: TTT
gaattttagtagagacaaag

SEQ ID NO: 90898 - DNA, 20 bp, Artificial Sequence
  Description of Artificial Sequence: Synthetic oligonucleotide
  Target: ATXN2; (+) strand; PAM type: YTN; PAM sequence: TTG
aattttagtagagacaaagt

SEQ ID NO: 90899 - DNA, 20 bp, Artificial Sequence
  Description of Artificial Sequence: Synthetic oligonucleotide
  Target: ATXN2; (+) strand; PAM type: YTN; PAM sequence: TTT
tagtagagacaaagtctctg

SEQ ID NO: 90900 - DNA, 20 bp, Artificial Sequence
  Description of Artificial Sequence: Synthetic oligonucleotide
  Target: ATXN2; (+) strand; PAM type: YTN; PAM sequence: TTT
agtagagacaaagtctctgt

SEQ ID NO: 90901 - DNA, 20 bp, Artificial Sequence
  Description of Artificial Sequence: Synthetic oligonucleotide
  Target: ATXN2; (+) strand; PAM type: YTN; PAM sequence: TTA
gtagagacaaagtctctgtt

SEQ ID NO: 90902 - DNA, 20 bp, Artificial Sequence
  Description of Artificial Sequence: Synthetic oligonucleotide
  Target: ATXN2; (+) strand; PAM type: YTN; PAM sequence: CTC
tgttgtccaggctgatcttg

SEQ ID NO: 90903 - DNA, 20 bp, Artificial Sequence
  Description of Artificial Sequence: Synthetic oligonucleotide
  Target: ATXN2; (+) strand; PAM type: YTN; PAM sequence: CTG
ttgtccaggctgatcttggg

SEQ ID NO: 90904 - DNA, 20 bp, Artificial Sequence
  Description of Artificial Sequence: Synthetic oligonucleotide
  Target: ATXN2; (+) strand; PAM type: YTN; PAM sequence: TTG
tccaggctgatcttgggctc

SEQ ID NO: 90905 - DNA, 20 bp, Artificial Sequence
  Description of Artificial Sequence: Synthetic oligonucleotide
  Target: ATXN2; (+) strand; PAM type: YTN; PAM sequence: CTG
atcttgggctcctgagctca

SEQ ID NO: 90906 - DNA, 20 bp, Artificial Sequence
  Description of Artificial Sequence: Synthetic oligonucleotide
  Target: ATXN2; (+) strand; PAM type: YTN; PAM sequence: CTT
gggctcctgagctcaagcaa

SEQ ID NO: 90907 - DNA, 20 bp, Artificial Sequence
  Description of Artificial Sequence: Synthetic oligonucleotide
  Target: ATXN2; (+) strand; PAM type: YTN; PAM sequence: TTG
ggctcctgagctcaagcaat

SEQ ID NO: 90908 - DNA, 20 bp, Artificial Sequence
  Description of Artificial Sequence: Synthetic oligonucleotide
  Target: ATXN2; (+) strand; PAM type: YTN; PAM sequence: CTC
ctgagctcaagcaatcctcc

SEQ ID NO: 90909 - DNA, 20 bp, Artificial Sequence
  Description of Artificial Sequence: Synthetic oligonucleotide
  Target: ATXN2; (+) strand; PAM type: YTN; PAM sequence: CTG
agctcaagcaatcctcctgc

SEQ ID NO: 90910 - DNA, 20 bp, Artificial Sequence
  Description of Artificial Sequence: Synthetic oligonucleotide
  Target: ATXN2; (+) strand; PAM type: YTN; PAM sequence: CTC
aagcaatcctcctgccttgg

SEQ ID NO: 90911 - DNA, 20 bp, Artificial Sequence
  Description of Artificial Sequence: Synthetic oligonucleotide
  Target: ATXN2; (+) strand; PAM type: YTN; PAM sequence: CTC
ctgccttggcctcccaaagt

SEQ ID NO: 90912 - DNA, 20 bp, Artificial Sequence
  Description of Artificial Sequence: Synthetic oligonucleotide
  Target: ATXN2; (+) strand; PAM type: YTN; PAM sequence: CTG
ccttggcctcccaaagtgct

SEQ ID NO: 90913 - DNA, 20 bp, Artificial Sequence
  Description of Artificial Sequence: Synthetic oligonucleotide
  Target: ATXN2; (+) strand; PAM type: YTN; PAM sequence: CTT
ggcctcccaaagtgctaaaa

SEQ ID NO: 90914 - DNA, 20 bp, Artificial Sequence
  Description of Artificial Sequence: Synthetic oligonucleotide
  Target: ATXN2; (+) strand; PAM type: YTN; PAM sequence: TTG
gcctcccaaagtgctaaaat

SEQ ID NO: 90915 - DNA, 20 bp, Artificial Sequence
  Description of Artificial Sequence: Synthetic oligonucleotide
  Target: ATXN2; (+) strand; PAM type: YTN; PAM sequence: CTC
ccaaagtgctaaaattacag

SEQ ID NO: 90916 - DNA, 20 bp, Artificial Sequence
  Description of Artificial Sequence: Synthetic oligonucleotide
  Target: ATXN2; (+) strand; PAM type: YTN; PAM sequence: CTA
aaattacaggtgtgagccat

SEQ ID NO: 90917 - DNA, 20 bp, Artificial Sequence
  Description of Artificial Sequence: Synthetic oligonucleotide
  Target: ATXN2; (+) strand; PAM type: YTN; PAM sequence: TTA
caggtgtgagccatcacacc

SEQ ID NO: 90918 - DNA, 20 bp, Artificial Sequence
  Description of Artificial Sequence: Synthetic oligonucleotide
  Target: ATXN2; (+) strand; PAM type: YTN; PAM sequence: CTC
caattactctttttgaagag

SEQ ID NO: 90919 - DNA, 20 bp, Artificial Sequence
  Description of Artificial Sequence: Synthetic oligonucleotide
  Target: ATXN2; (+) strand; PAM type: YTN; PAM sequence: TTA
ctctttttgaagaggatact

SEQ ID NO: 90920 - DNA, 20 bp, Artificial Sequence
  Description of Artificial Sequence: Synthetic oligonucleotide
  Target: ATXN2; (+) strand; PAM type: YTN; PAM sequence: CTC
tttttgaagaggatactata

SEQ ID NO: 90921 - DNA, 20 bp, Artificial Sequence
  Description of Artificial Sequence: Synthetic oligonucleotide
  Target: ATXN2; (+) strand; PAM type: YTN; PAM sequence: CTT
tttgaagaggatactatata

SEQ ID NO: 90922 - DNA, 20 bp, Artificial Sequence
  Description of Artificial Sequence: Synthetic oligonucleotide
  Target: ATXN2; (+) strand; PAM type: YTN; PAM sequence: TTT
ttgaagaggatactatataa

SEQ ID NO: 90923 - DNA, 20 bp, Artificial Sequence
  Description of Artificial Sequence: Synthetic oligonucleotide
  Target: ATXN2; (+) strand; PAM type: YTN; PAM sequence: TTT
tgaagaggatactatataat

SEQ ID NO: 90924 - DNA, 20 bp, Artificial Sequence
  Description of Artificial Sequence: Synthetic oligonucleotide
  Target: ATXN2; (+) strand; PAM type: YTN; PAM sequence: TTT
gaagaggatactatataatc

SEQ ID NO: 90925 - DNA, 20 bp, Artificial Sequence
  Description of Artificial Sequence: Synthetic oligonucleotide
  Target: ATXN2; (+) strand; PAM type: YTN; PAM sequence: TTG
aagaggatactatataatca

SEQ ID NO: 90926 - DNA, 20 bp, Artificial Sequence
  Description of Artificial Sequence: Synthetic oligonucleotide
  Target: ATXN2; (+) strand; PAM type: YTN; PAM sequence: CTA
tataatcacaactgatgggc

SEQ ID NO: 90927 - DNA, 20 bp, Artificial Sequence
  Description of Artificial Sequence: Synthetic oligonucleotide
  Target: ATXN2; (+) strand; PAM type: YTN; PAM sequence: CTG
atgggcattttttctcccct

SEQ ID NO: 90928 - DNA, 20 bp, Artificial Sequence
  Description of Artificial Sequence: Synthetic oligonucleotide
  Target: ATXN2; (+) strand; PAM type: YTN; PAM sequence: TTT
tttctcccctgtttttcttc

SEQ ID NO: 90929 - DNA, 20 bp, Artificial Sequence
  Description of Artificial Sequence: Synthetic oligonucleotide
  Target: ATXN2; (+) strand; PAM type: YTN; PAM sequence: TTT
ttctcccctgtttttcttca

SEQ ID NO: 90930 - DNA, 20 bp, Artificial Sequence
  Description of Artificial Sequence: Synthetic oligonucleotide
  Target: ATXN2; (+) strand; PAM type: YTN; PAM sequence: TTT
tctcccctgtttttcttcat

SEQ ID NO: 90931 - DNA, 20 bp, Artificial Sequence
  Description of Artificial Sequence: Synthetic oligonucleotide
  Target: ATXN2; (+) strand; PAM type: YTN; PAM sequence: TTT
ctcccctgtttttcttcata

SEQ ID NO: 90932 - DNA, 20 bp, Artificial Sequence
  Description of Artificial Sequence: Synthetic oligonucleotide
  Target: ATXN2; (+) strand; PAM type: YTN; PAM sequence: TTC
tcccctgtttttcttcataa

SEQ ID NO: 90933 - DNA, 20 bp, Artificial Sequence
  Description of Artificial Sequence: Synthetic oligonucleotide
  Target: ATXN2; (+) strand; PAM type: YTN; PAM sequence: CTC
ccctgtttttcttcataaaa

SEQ ID NO: 90934 - DNA, 20 bp, Artificial Sequence
  Description of Artificial Sequence: Synthetic oligonucleotide
  Target: ATXN2; (+) strand; PAM type: YTN; PAM sequence: CTG
tttttcttcataaaatccat

SEQ ID NO: 90935 - DNA, 20 bp, Artificial Sequence
  Description of Artificial Sequence: Synthetic oligonucleotide
  Target: ATXN2; (+) strand; PAM type: YTN; PAM sequence: TTT
ttcttcataaaatccatgtg

SEQ ID NO: 90936 - DNA, 20 bp, Artificial Sequence
  Description of Artificial Sequence: Synthetic oligonucleotide
  Target: ATXN2; (+) strand; PAM type: YTN; PAM sequence: TTT
tcttcataaaatccatgtga

SEQ ID NO: 90937 - DNA, 20 bp, Artificial Sequence
  Description of Artificial Sequence: Synthetic oligonucleotide
  Target: ATXN2; (+) strand; PAM type: YTN; PAM sequence: TTT
cttcataaaatccatgtgaa

SEQ ID NO: 90938 - DNA, 20 bp, Artificial Sequence
  Description of Artificial Sequence: Synthetic oligonucleotide
  Target: ATXN2; (+) strand; PAM type: YTN; PAM sequence: TTC
ttcataaaatccatgtgaat

SEQ ID NO: 90939 - DNA, 20 bp, Artificial Sequence
  Description of Artificial Sequence: Synthetic oligonucleotide
  Target: ATXN2; (+) strand; PAM type: YTN; PAM sequence: CTT
cataaaatccatgtgaatat

SEQ ID NO: 90940 - DNA, 20 bp, Artificial Sequence
  Description of Artificial Sequence: Synthetic oligonucleotide
  Target: ATXN2; (+) strand; PAM type: YTN; PAM sequence: TTC
ataaaatccatgtgaatatc

SEQ ID NO: 90941 - DNA, 20 bp, Artificial Sequence
  Description of Artificial Sequence: Synthetic oligonucleotide
  Target: ATXN2; (+) strand; PAM type: YTN; PAM sequence: CTA
tgtaatgttgttcatcaaaa

SEQ ID NO: 90942 - DNA, 20 bp, Artificial Sequence
  Description of Artificial Sequence: Synthetic oligonucleotide
  Target: ATXN2; (+) strand; PAM type: YTN; PAM sequence: TTG
ttcatcaaaagccaatgcat

SEQ ID NO: 90943 - DNA, 20 bp, Artificial Sequence
  Description of Artificial Sequence: Synthetic oligonucleotide
  Target: ATXN2; (+) strand; PAM type: YTN; PAM sequence: TTC
atcaaaagccaatgcatagc

SEQ ID NO: 90944 - DNA, 20 bp, Artificial Sequence
  Description of Artificial Sequence: Synthetic oligonucleotide
  Target: ATXN2; (+) strand; PAM type: YTN; PAM sequence: CTC
atcaaaaagtcagagctaaa

SEQ ID NO: 90945 - DNA, 20 bp, Artificial Sequence
  Description of Artificial Sequence: Synthetic oligonucleotide
  Target: ATXN2; (+) strand; PAM type: YTN; PAM sequence: CTA
aactacaactatttattcat

SEQ ID NO: 90946 - DNA, 20 bp, Artificial Sequence
  Description of Artificial Sequence: Synthetic oligonucleotide
  Target: ATXN2; (+) strand; PAM type: YTN; PAM sequence: CTA
caactatttattcattataa

SEQ ID NO: 90947 - DNA, 20 bp, Artificial Sequence
  Description of Artificial Sequence: Synthetic oligonucleotide
  Target: ATXN2; (+) strand; PAM type: YTN; PAM sequence: CTA
tttattcattataaacttag

SEQ ID NO: 90948 - DNA, 20 bp, Artificial Sequence
  Description of Artificial Sequence: Synthetic oligonucleotide
  Target: ATXN2; (+) strand; PAM type: YTN; PAM sequence: TTT
attcattataaacttagtta

SEQ ID NO: 90949 - DNA, 20 bp, Artificial Sequence
  Description of Artificial Sequence: Synthetic oligonucleotide
  Target: ATXN2; (+) strand; PAM type: YTN; PAM sequence: TTA
ttcattataaacttagttac

SEQ ID NO: 90950 - DNA, 20 bp, Artificial Sequence
  Description of Artificial Sequence: Synthetic oligonucleotide
  Target: ATXN2; (+) strand; PAM type: YTN; PAM sequence: TTC
attataaacttagttactca

SEQ ID NO: 90951 - DNA, 20 bp, Artificial Sequence
  Description of Artificial Sequence: Synthetic oligonucleotide
  Target: ATXN2; (+) strand; PAM type: YTN; PAM sequence: TTA
taaacttagttactcaattc

SEQ ID NO: 90952 - DNA, 20 bp, Artificial Sequence
  Description of Artificial Sequence: Synthetic oligonucleotide
  Target: ATXN2; (+) strand; PAM type: YTN; PAM sequence: CTT
agttactcaattcatgcagc

SEQ ID NO: 90953 - DNA, 20 bp, Artificial Sequence
  Description of Artificial Sequence: Synthetic oligonucleotide
  Target: ATXN2; (+) strand; PAM type: YTN; PAM sequence: TTA
gttactcaattcatgcagca

SEQ ID NO: 90954 - DNA, 20 bp, Artificial Sequence
  Description of Artificial Sequence: Synthetic oligonucleotide
  Target: ATXN2; (+) strand; PAM type: YTN; PAM sequence: TTA
ctcaattcatgcagcatgca

SEQ ID NO: 90955 - DNA, 20 bp, Artificial Sequence
  Description of Artificial Sequence: Synthetic oligonucleotide
  Target: ATXN2; (+) strand; PAM type: YTN; PAM sequence: CTC
aattcatgcagcatgcaaac

SEQ ID NO: 90956 - DNA, 20 bp, Artificial Sequence
  Description of Artificial Sequence: Synthetic oligonucleotide
  Target: ATXN2; (+) strand; PAM type: YTN; PAM sequence: TTC
atgcagcatgcaaactacaa

SEQ ID NO: 90957 - DNA, 20 bp, Artificial Sequence
  Description of Artificial Sequence: Synthetic oligonucleotide
  Target: ATXN2; (+) strand; PAM type: YTN; PAM sequence: CTA
caagcaaacacaggcaggat

SEQ ID NO: 90958 - DNA, 20 bp, Artificial Sequence
  Description of Artificial Sequence: Synthetic oligonucleotide
  Target: ATXN2; (+) strand; PAM type: YTN; PAM sequence: TTA
ttctcacctttacctgctct

SEQ ID NO: 90959 - DNA, 20 bp, Artificial Sequence
  Description of Artificial Sequence: Synthetic oligonucleotide
  Target: ATXN2; (+) strand; PAM type: YTN; PAM sequence: TTC
tcacctttacctgctctata

SEQ ID NO: 90960 - DNA, 20 bp, Artificial Sequence
  Description of Artificial Sequence: Synthetic oligonucleotide
  Target: ATXN2; (+) strand; PAM type: YTN; PAM sequence: CTC
acctttacctgctctatatg

SEQ ID NO: 90961 - DNA, 20 bp, Artificial Sequence
  Description of Artificial Sequence: Synthetic oligonucleotide
  Target: ATXN2; (+) strand; PAM type: YTN; PAM sequence: CTT
tacctgctctatatgtcttg

SEQ ID NO: 90962 - DNA, 20 bp, Artificial Sequence
  Description of Artificial Sequence: Synthetic oligonucleotide
  Target: ATXN2; (+) strand; PAM type: YTN; PAM sequence: TTT
acctgctctatatgtcttgg

SEQ ID NO: 90963 - DNA, 20 bp, Artificial Sequence
  Description of Artificial Sequence: Synthetic oligonucleotide
  Target: ATXN2; (+) strand; PAM type: YTN; PAM sequence: TTA
cctgctctatatgtcttggc

SEQ ID NO: 90964 - DNA, 20 bp, Artificial Sequence
  Description of Artificial Sequence: Synthetic oligonucleotide
  Target: ATXN2; (+) strand; PAM type: YTN; PAM sequence: CTG
ctctatatgtcttggcttga

SEQ ID NO: 90965 - DNA, 20 bp, Artificial Sequence
  Description of Artificial Sequence: Synthetic oligonucleotide
  Target: ATXN2; (+) strand; PAM type: YTN; PAM sequence: CTC
tatatgtcttggcttgattc

SEQ ID NO: 90966 - DNA, 20 bp, Artificial Sequence
  Description of Artificial Sequence: Synthetic oligonucleotide
  Target: ATXN2; (+) strand; PAM type: YTN; PAM sequence: CTA
tatgtcttggcttgattcac

SEQ ID NO: 90967 - DNA, 20 bp, Artificial Sequence
  Description of Artificial Sequence: Synthetic oligonucleotide
  Target: ATXN2; (+) strand; PAM type: YTN; PAM sequence: CTT
ggcttgattcactggcatgg

SEQ ID NO: 90968 - DNA, 20 bp, Artificial Sequence
  Description of Artificial Sequence: Synthetic oligonucleotide
  Target: ATXN2; (+) strand; PAM type: YTN; PAM sequence: TTG
gcttgattcactggcatggg

SEQ ID NO: 90969 - DNA, 20 bp, Artificial Sequence
  Description of Artificial Sequence: Synthetic oligonucleotide
  Target: ATXN2; (+) strand; PAM type: YTN; PAM sequence: CTT
gattcactggcatgggcgtc

SEQ ID NO: 90970 - DNA, 20 bp, Artificial Sequence
  Description of Artificial Sequence: Synthetic oligonucleotide
  Target: ATXN2; (+) strand; PAM type: YTN; PAM sequence: TTG
attcactggcatgggcgtca

SEQ ID NO: 90971 - DNA, 20 bp, Artificial Sequence
  Description of Artificial Sequence: Synthetic oligonucleotide
  Target: ATXN2; (+) strand; PAM type: YTN; PAM sequence: TTC
actggcatgggcgtcatagg

SEQ ID NO: 90972 - DNA, 20 bp, Artificial Sequence
  Description of Artificial Sequence: Synthetic oligonucleotide
  Target: ATXN2; (+) strand; PAM type: YTN; PAM sequence: CTG
gcatgggcgtcataggtatt

SEQ ID NO: 90973 - DNA, 20 bp, Artificial Sequence
  Description of Artificial Sequence: Synthetic oligonucleotide
  Target: ATXN2; (+) strand; PAM type: YTN; PAM sequence: TTG
ggtataaaggcttgagagaa

SEQ ID NO: 90974 - DNA, 20 bp, Artificial Sequence
  Description of Artificial Sequence: Synthetic oligonucleotide
  Target: ATXN2; (+) strand; PAM type: YTN; PAM sequence: CTT
gagagaattaaaaaaaaaat

SEQ ID NO: 90975 - DNA, 20 bp, Artificial Sequence
  Description of Artificial Sequence: Synthetic oligonucleotide
  Target: ATXN2; (+) strand; PAM type: YTN; PAM sequence: TTG
agagaattaaaaaaaaaatt

SEQ ID NO: 90976 - DNA, 20 bp, Artificial Sequence
  Description of Artificial Sequence: Synthetic oligonucleotide
  Target: ATXN2; (+) strand; PAM type: YTN; PAM sequence: TTA
aaaaaaaaattaacattagg

SEQ ID NO: 90977 - DNA, 20 bp, Artificial Sequence
  Description of Artificial Sequence: Synthetic oligonucleotide
  Target: ATXN2; (+) strand; PAM type: YTN; PAM sequence: TTA
acattaggcacctatgataa

SEQ ID NO: 90978 - DNA, 20 bp, Artificial Sequence
  Description of Artificial Sequence: Synthetic oligonucleotide
  Target: ATXN2; (+) strand; PAM type: YTN; PAM sequence: TTA
ggcacctatgataataacaa

SEQ ID NO: 90979 - DNA, 20 bp, Artificial Sequence
  Description of Artificial Sequence: Synthetic oligonucleotide
  Target: ATXN2; (+) strand; PAM type: YTN; PAM sequence: CTA
tgataataacaaggtattct

SEQ ID NO: 90980 - DNA, 20 bp, Artificial Sequence
  Description of Artificial Sequence: Synthetic oligonucleotide
  Target: ATXN2; (+) strand; PAM type: YTN; PAM sequence: TTC
tgtcactcttagttttatat

SEQ ID NO: 90981 - DNA, 20 bp, Artificial Sequence
  Description of Artificial Sequence: Synthetic oligonucleotide
  Target: ATXN2; (+) strand; PAM type: YTN; PAM sequence: CTG
tcactcttagttttatattg

SEQ ID NO: 90982 - DNA, 20 bp, Artificial Sequence
  Description of Artificial Sequence: Synthetic oligonucleotide
  Target: ATXN2; (+) strand; PAM type: YTN; PAM sequence: CTC
ttagttttatattgctagag

SEQ ID NO: 90983 - DNA, 20 bp, Artificial Sequence
  Description of Artificial Sequence: Synthetic oligonucleotide
  Target: ATXN2; (+) strand; PAM type: YTN; PAM sequence: CTT
agttttatattgctagagag

SEQ ID NO: 90984 - DNA, 20 bp, Artificial Sequence
  Description of Artificial Sequence: Synthetic oligonucleotide
  Target: ATXN2; (+) strand; PAM type: YTN; PAM sequence: TTA
gttttatattgctagagagc

SEQ ID NO: 90985 - DNA, 20 bp, Artificial Sequence
  Description of Artificial Sequence: Synthetic oligonucleotide
  Target: ATXN2; (+) strand; PAM type: YTN; PAM sequence: TTT
tatattgctagagagctagg

SEQ ID NO: 90986 - DNA, 20 bp, Artificial Sequence
  Description of Artificial Sequence: Synthetic oligonucleotide
  Target: ATXN2; (+) strand; PAM type: YTN; PAM sequence: TTT
atattgctagagagctaggc

SEQ ID NO: 90987 - DNA, 20 bp, Artificial Sequence
  Description of Artificial Sequence: Synthetic oligonucleotide
  Target: ATXN2; (+) strand; PAM type: YTN; PAM sequence: TTA
tattgctagagagctaggca

SEQ ID NO: 90988 - DNA, 20 bp, Artificial Sequence
  Description of Artificial Sequence: Synthetic oligonucleotide
  Target: ATXN2; (+) strand; PAM type: YTN; PAM sequence: TTG
ctagagagctaggcatgaga

SEQ ID NO: 90989 - DNA, 20 bp, Artificial Sequence
  Description of Artificial Sequence: Synthetic oligonucleotide
  Target: ATXN2; (+) strand; PAM type: YTN; PAM sequence: CTA
gagagctaggcatgagaagg

SEQ ID NO: 90990 - DNA, 20 bp, Artificial Sequence
  Description of Artificial Sequence: Synthetic oligonucleotide
  Target: ATXN2; (+) strand; PAM type: YTN; PAM sequence: CTA
ggcatgagaaggtttcctga

SEQ ID NO: 90991 - DNA, 20 bp, Artificial Sequence
  Description of Artificial Sequence: Synthetic oligonucleotide
  Target: ATXN2; (+) strand; PAM type: YTN; PAM sequence: TTT
cctgattctccattagtcat

SEQ ID NO: 90992 - DNA, 20 bp, Artificial Sequence
  Description of Artificial Sequence: Synthetic oligonucleotide
  Target: ATXN2; (+) strand; PAM type: YTN; PAM sequence: TTC
ctgattctccattagtcatt

SEQ ID NO: 90993 - DNA, 20 bp, Artificial Sequence
  Description of Artificial Sequence: Synthetic oligonucleotide
  Target: ATXN2; (+) strand; PAM type: YTN; PAM sequence: CTG
attctccattagtcattaaa

SEQ ID NO: 90994 - DNA, 20 bp, Artificial Sequence
  Description of Artificial Sequence: Synthetic oligonucleotide
  Target: ATXN2; (+) strand; PAM type: YTN; PAM sequence: TTC
tccattagtcattaaaaaat

SEQ ID NO: 90995 - DNA, 20 bp, Artificial Sequence
  Description of Artificial Sequence: Synthetic oligonucleotide
  Target: ATXN2; (+) strand; PAM type: YTN; PAM sequence: CTC
cattagtcattaaaaaatta

SEQ ID NO: 90996 - DNA, 20 bp, Artificial Sequence
  Description of Artificial Sequence: Synthetic oligonucleotide
  Target: ATXN2; (+) strand; PAM type: YTN; PAM sequence: TTA
gtcattaaaaaattagatca

SEQ ID NO: 90997 - DNA, 20 bp, Artificial Sequence
  Description of Artificial Sequence: Synthetic oligonucleotide
  Target: ATXN2; (+) strand; PAM type: YTN; PAM sequence: TTA
aaaaattagatcatacccac

SEQ ID NO: 90998 - DNA, 20 bp, Artificial Sequence
  Description of Artificial Sequence: Synthetic oligonucleotide
  Target: ATXN2; (+) strand; PAM type: YTN; PAM sequence: TTA
gatcatacccacagctaaaa

SEQ ID NO: 90999 - DNA, 20 bp, Artificial Sequence
  Description of Artificial Sequence: Synthetic oligonucleotide
  Target: ATXN2; (+) strand; PAM type: YTN; PAM sequence: CTA
aaaggaacaaaccccaaact

SEQ ID NO: 91000 - DNA, 20 bp, Artificial Sequence
  Description of Artificial Sequence: Synthetic oligonucleotide
  Target: ATXN2; (+) strand; PAM type: YTN; PAM sequence: CTA
cagtaaatctaaaccatctt

SEQ ID NO: 91001 - DNA, 20 bp, Artificial Sequence
  Description of Artificial Sequence: Synthetic oligonucleotide
  Target: ATXN2; (+) strand; PAM type: YTN; PAM sequence: CTA
aaccatctttttcacagaaa

SEQ ID NO: 91002 - DNA, 20 bp, Artificial Sequence
  Description of Artificial Sequence: Synthetic oligonucleotide
  Target: ATXN2; (+) strand; PAM type: YTN; PAM sequence: CTT
tttcacagaaaacattctca

SEQ ID NO: 91003 - DNA, 20 bp, Artificial Sequence
  Description of Artificial Sequence: Synthetic oligonucleotide
  Target: ATXN2; (+) strand; PAM type: YTN; PAM sequence: TTT
ttcacagaaaacattctcag

SEQ ID NO: 91004 - DNA, 20 bp, Artificial Sequence
  Description of Artificial Sequence: Synthetic oligonucleotide
  Target: ATXN2; (+) strand; PAM type: YTN; PAM sequence: TTT
tcacagaaaacattctcaga

SEQ ID NO: 91005 - DNA, 20 bp, Artificial Sequence
  Description of Artificial Sequence: Synthetic oligonucleotide
  Target: ATXN2; (+) strand; PAM type: YTN; PAM sequence: TTT
cacagaaaacattctcagat

SEQ ID NO: 91006 - DNA, 20 bp, Artificial Sequence
  Description of Artificial Sequence: Synthetic oligonucleotide
  Target: ATXN2; (+) strand; PAM type: YTN; PAM sequence: TTC
acagaaaacattctcagatt

SEQ ID NO: 91007 - DNA, 20 bp, Artificial Sequence
  Description of Artificial Sequence: Synthetic oligonucleotide
  Target: ATXN2; (+) strand; PAM type: YTN; PAM sequence: TTC
tcagatttaggtcctcatac

SEQ ID NO: 91008 - DNA, 20 bp, Artificial Sequence
  Description of Artificial Sequence: Synthetic oligonucleotide
  Target: ATXN2; (+) strand; PAM type: YTN; PAM sequence: CTC
agatttaggtcctcatactt

SEQ ID NO: 91009 - DNA, 20 bp, Artificial Sequence
  Description of Artificial Sequence: Synthetic oligonucleotide
  Target: ATXN2; (+) strand; PAM type: YTN; PAM sequence: TTT
aggtcctcatacttaacaac

SEQ ID NO: 91010 - DNA, 20 bp, Artificial Sequence
  Description of Artificial Sequence: Synthetic oligonucleotide
  Target: ATXN2; (+) strand; PAM type: YTN; PAM sequence: TTA
ggtcctcatacttaacaaca

SEQ ID NO: 91011 - DNA, 20 bp, Artificial Sequence
  Description of Artificial Sequence: Synthetic oligonucleotide
  Target: ATXN2; (+) strand; PAM type: YTN; PAM sequence: CTC
atacttaacaacacactgaa

SEQ ID NO: 91012 - DNA, 20 bp, Artificial Sequence
  Description of Artificial Sequence: Synthetic oligonucleotide
  Target: ATXN2; (+) strand; PAM type: YTN; PAM sequence: CTT
aacaacacactgaatctctg

SEQ ID NO: 91013 - DNA, 20 bp, Artificial Sequence
  Description of Artificial Sequence: Synthetic oligonucleotide
  Target: ATXN2; (+) strand; PAM type: YTN; PAM sequence: TTA
acaacacactgaatctctgc

SEQ ID NO: 91014 - DNA, 20 bp, Artificial Sequence
  Description of Artificial Sequence: Synthetic oligonucleotide
  Target: ATXN2; (+) strand; PAM type: YTN; PAM sequence: CTG
aatctctgcatgcctgtctg

SEQ ID NO: 91015 - DNA, 20 bp, Artificial Sequence
  Description of Artificial Sequence: Synthetic oligonucleotide
  Target: ATXN2; (+) strand; PAM type: YTN; PAM sequence: CTC
tgcatgcctgtctgtttcaa

SEQ ID NO: 91016 - DNA, 20 bp, Artificial Sequence
  Description of Artificial Sequence: Synthetic oligonucleotide
  Target: ATXN2; (+) strand; PAM type: YTN; PAM sequence: CTG
catgcctgtctgtttcaaat

SEQ ID NO: 91017 - DNA, 20 bp, Artificial Sequence
  Description of Artificial Sequence: Synthetic oligonucleotide
  Target: ATXN2; (+) strand; PAM type: YTN; PAM sequence: CTG
tctgtttcaaatgcatatgc

SEQ ID NO: 91018 - DNA, 20 bp, Artificial Sequence
  Description of Artificial Sequence: Synthetic oligonucleotide
  Target: ATXN2; (+) strand; PAM type: YTN; PAM sequence: CTG
tttcaaatgcatatgcataa

SEQ ID NO: 91019 - DNA, 20 bp, Artificial Sequence
  Description of Artificial Sequence: Synthetic oligonucleotide
  Target: ATXN2; (+) strand; PAM type: YTN; PAM sequence: TTT
caaatgcatatgcataacca

SEQ ID NO: 91020 - DNA, 20 bp, Artificial Sequence
  Description of Artificial Sequence: Synthetic oligonucleotide
  Target: ATXN2; (+) strand; PAM type: YTN; PAM sequence: TTC
aaatgcatatgcataaccat

SEQ ID NO: 91021 - DNA, 20 bp, Artificial Sequence
  Description of Artificial Sequence: Synthetic oligonucleotide
  Target: ATXN2; (+) strand; PAM type: YTN; PAM sequence: CTC
aagtcactgaaaacctaaag

SEQ ID NO: 91022 - DNA, 20 bp, Artificial Sequence
  Description of Artificial Sequence: Synthetic oligonucleotide
  Target: ATXN2; (+) strand; PAM type: YTN; PAM sequence: CTG
aaaacctaaagagtgcttgg

SEQ ID NO: 91023 - DNA, 20 bp, Artificial Sequence
  Description of Artificial Sequence: Synthetic oligonucleotide
  Target: ATXN2; (+) strand; PAM type: YTN; PAM sequence: CTA
aagagtgcttggtgtcagat

SEQ ID NO: 91024 - DNA, 20 bp, Artificial Sequence
  Description of Artificial Sequence: Synthetic oligonucleotide
  Target: ATXN2; (+) strand; PAM type: YTN; PAM sequence: CTT
ggtgtcagatacaaacaatt

SEQ ID NO: 91025 - DNA, 20 bp, Artificial Sequence
  Description of Artificial Sequence: Synthetic oligonucleotide
  Target: ATXN2; (+) strand; PAM type: YTN; PAM sequence: TTG
gtgtcagatacaaacaattg

SEQ ID NO: 91026 - DNA, 20 bp, Artificial Sequence
  Description of Artificial Sequence: Synthetic oligonucleotide
  Target: ATXN2; (+) strand; PAM type: YTN; PAM sequence: TTG
gggaggctaagtgaacatca

SEQ ID NO: 91027 - DNA, 20 bp, Artificial Sequence
  Description of Artificial Sequence: Synthetic oligonucleotide
  Target: ATXN2; (+) strand; PAM type: YTN; PAM sequence: CTA
agtgaacatcaaattctatg

SEQ ID NO: 91028 - DNA, 20 bp, Artificial Sequence
  Description of Artificial Sequence: Synthetic oligonucleotide
  Target: ATXN2; (+) strand; PAM type: YTN; PAM sequence: TTC
tatgacttacttgcacgcct

SEQ ID NO: 91029 - DNA, 20 bp, Artificial Sequence
  Description of Artificial Sequence: Synthetic oligonucleotide
  Target: ATXN2; (+) strand; PAM type: YTN; PAM sequence: CTA
tgacttacttgcacgcctgg

SEQ ID NO: 91030 - DNA, 20 bp, Artificial Sequence
  Description of Artificial Sequence: Synthetic oligonucleotide
  Target: ATXN2; (+) strand; PAM type: YTN; PAM sequence: CTT
acttgcacgcctgggctcac

SEQ ID NO: 91031 - DNA, 20 bp, Artificial Sequence
  Description of Artificial Sequence: Synthetic oligonucleotide
  Target: ATXN2; (+) strand; PAM type: YTN; PAM sequence: TTA
cttgcacgcctgggctcact

SEQ ID NO: 91032 - DNA, 20 bp, Artificial Sequence
  Description of Artificial Sequence: Synthetic oligonucleotide
  Target: ATXN2; (+) strand; PAM type: YTN; PAM sequence: CTT
gcacgcctgggctcactggg

SEQ ID NO: 91033 - DNA, 20 bp, Artificial Sequence
  Description of Artificial Sequence: Synthetic oligonucleotide
  Target: ATXN2; (+) strand; PAM type: YTN; PAM sequence: TTG
cacgcctgggctcactggga

SEQ ID NO: 91034 - DNA, 20 bp, Artificial Sequence
  Description of Artificial Sequence: Synthetic oligonucleotide
  Target: ATXN2; (+) strand; PAM type: YTN; PAM sequence: CTG
ggctcactgggactggatac

SEQ ID NO: 91035 - DNA, 20 bp, Artificial Sequence
  Description of Artificial Sequence: Synthetic oligonucleotide
  Target: ATXN2; (+) strand; PAM type: YTN; PAM sequence: CTC
actgggactggatacatcat

SEQ ID NO: 91036 - DNA, 20 bp, Artificial Sequence
  Description of Artificial Sequence: Synthetic oligonucleotide
  Target: ATXN2; (+) strand; PAM type: YTN; PAM sequence: CTG
ggactggatacatcatattt

SEQ ID NO: 91037 - DNA, 20 bp, Artificial Sequence
  Description of Artificial Sequence: Synthetic oligonucleotide
  Target: ATXN2; (+) strand; PAM type: YTN; PAM sequence: CTG
gatacatcatatttggtgca

SEQ ID NO: 91038 - DNA, 20 bp, Artificial Sequence
  Description of Artificial Sequence: Synthetic oligonucleotide
  Target: ATXN2; (+) strand; PAM type: YTN; PAM sequence: TTT
ggtgcaaaacaaacaggctg

SEQ ID NO: 91039 - DNA, 20 bp, Artificial Sequence
  Description of Artificial Sequence: Synthetic oligonucleotide
  Target: ATXN2; (+) strand; PAM type: YTN; PAM sequence: TTG
gtgcaaaacaaacaggctga

SEQ ID NO: 91040 - DNA, 20 bp, Artificial Sequence
  Description of Artificial Sequence: Synthetic oligonucleotide
  Target: ATXN2; (+) strand; PAM type: YTN; PAM sequence: CTG
agtataaactggagttggct

SEQ ID NO: 91041 - DNA, 20 bp, Artificial Sequence
  Description of Artificial Sequence: Synthetic oligonucleotide
  Target: ATXN2; (+) strand; PAM type: YTN; PAM sequence: CTG
gagttggctgttgatgaccc

SEQ ID NO: 91042 - DNA, 20 bp, Artificial Sequence
  Description of Artificial Sequence: Synthetic oligonucleotide
  Target: ATXN2; (+) strand; PAM type: YTN; PAM sequence: TTG
gctgttgatgacccaccata

SEQ ID NO: 91043 - DNA, 20 bp, Artificial Sequence
  Description of Artificial Sequence: Synthetic oligonucleotide
  Target: ATXN2; (+) strand; PAM type: YTN; PAM sequence: CTG
ttgatgacccaccatagatg

SEQ ID NO: 91044 - DNA, 20 bp, Artificial Sequence
  Description of Artificial Sequence: Synthetic oligonucleotide
  Target: ATXN2; (+) strand; PAM type: YTN; PAM sequence: TTG
atgacccaccatagatgggc

SEQ ID NO: 91045 - DNA, 20 bp, Artificial Sequence
  Description of Artificial Sequence: Synthetic oligonucleotide
  Target: ATXN2; (+) strand; PAM type: YTN; PAM sequence: CTA
ggttgtgcttgaggccgagg

SEQ ID NO: 91046 - DNA, 20 bp, Artificial Sequence
  Description of Artificial Sequence: Synthetic oligonucleotide
  Target: ATXN2; (+) strand; PAM type: YTN; PAM sequence: TTG
tgcttgaggccgaggtgaag

SEQ ID NO: 91047 - DNA, 20 bp, Artificial Sequence
  Description of Artificial Sequence: Synthetic oligonucleotide
  Target: ATXN2; (+) strand; PAM type: YTN; PAM sequence: CTT
gaggccgaggtgaagttggg

SEQ ID NO: 91048 - DNA, 20 bp, Artificial Sequence
  Description of Artificial Sequence: Synthetic oligonucleotide
  Target: ATXN2; (+) strand; PAM type: YTN; PAM sequence: TTG
aggccgaggtgaagttgggg

SEQ ID NO: 91049 - DNA, 20 bp, Artificial Sequence
  Description of Artificial Sequence: Synthetic oligonucleotide
  Target: ATXN2; (+) strand; PAM type: YTN; PAM sequence: TTG
gggtagtagaaggctttggc

SEQ ID NO: 91050 - DNA, 20 bp, Artificial Sequence
  Description of Artificial Sequence: Synthetic oligonucleotide
  Target: ATXN2; (+) strand; PAM type: YTN; PAM sequence: CTT
tggctacaaaaacaacaata

SEQ ID NO: 91051 - DNA, 20 bp, Artificial Sequence
  Description of Artificial Sequence: Synthetic oligonucleotide
  Target: ATXN2; (+) strand; PAM type: YTN; PAM sequence: TTT
ggctacaaaaacaacaataa

SEQ ID NO: 91052 - DNA, 20 bp, Artificial Sequence
  Description of Artificial Sequence: Synthetic oligonucleotide
  Target: ATXN2; (+) strand; PAM type: YTN; PAM sequence: TTG
gctacaaaaacaacaataaa

SEQ ID NO: 91053 - DNA, 20 bp, Artificial Sequence
  Description of Artificial Sequence: Synthetic oligonucleotide
  Target: ATXN2; (+) strand; PAM type: YTN; PAM sequence: CTA
caaaaacaacaataaattca

SEQ ID NO: 91054 - DNA, 20 bp, Artificial Sequence
  Description of Artificial Sequence: Synthetic oligonucleotide
  Target: ATXN2; (+) strand; PAM type: YTN; PAM sequence: TTC
aattatctcaaggtaacaga

SEQ ID NO: 91055 - DNA, 20 bp, Artificial Sequence
  Description of Artificial Sequence: Synthetic oligonucleotide
  Target: ATXN2; (+) strand; PAM type: YTN; PAM sequence: TTA
tctcaaggtaacagatgaac

SEQ ID NO: 91056 - DNA, 20 bp, Artificial Sequence
  Description of Artificial Sequence: Synthetic oligonucleotide
  Target: ATXN2; (+) strand; PAM type: YTN; PAM sequence: CTC
aaggtaacagatgaactatt

SEQ ID NO: 91057 - DNA, 20 bp, Artificial Sequence
  Description of Artificial Sequence: Synthetic oligonucleotide
  Target: ATXN2; (+) strand; PAM type: YTN; PAM sequence: CTA
ttattgcaatttaaagacgg

SEQ ID NO: 91058 - DNA, 20 bp, Artificial Sequence
  Description of Artificial Sequence: Synthetic oligonucleotide
  Target: ATXN2; (+) strand; PAM type: YTN; PAM sequence: TTA
ttgcaatttaaagacggatt

SEQ ID NO: 91059 - DNA, 20 bp, Artificial Sequence
  Description of Artificial Sequence: Synthetic oligonucleotide
  Target: ATXN2; (+) strand; PAM type: YTN; PAM sequence: TTG
caatttaaagacggattttc

SEQ ID NO: 91060 - DNA, 20 bp, Artificial Sequence
  Description of Artificial Sequence: Synthetic oligonucleotide
  Target: ATXN2; (+) strand; PAM type: YTN; PAM sequence: TTT
aaagacggattttcccagtc

SEQ ID NO: 91061 - DNA, 20 bp, Artificial Sequence
  Description of Artificial Sequence: Synthetic oligonucleotide
  Target: ATXN2; (+) strand; PAM type: YTN; PAM sequence: TTA
aagacggattttcccagtct

SEQ ID NO: 91062 - DNA, 20 bp, Artificial Sequence
  Description of Artificial Sequence: Synthetic oligonucleotide
  Target: ATXN2; (+) strand; PAM type: YTN; PAM sequence: TTT
tcccagtctttctaatttta

SEQ ID NO: 91063 - DNA, 20 bp, Artificial Sequence
  Description of Artificial Sequence: Synthetic oligonucleotide
  Target: ATXN2; (+) strand; PAM type: YTN; PAM sequence: TTT
cccagtctttctaattttac

SEQ ID NO: 91064 - DNA, 20 bp, Artificial Sequence
  Description of Artificial Sequence: Synthetic oligonucleotide
  Target: ATXN2; (+) strand; PAM type: YTN; PAM sequence: TTC
ccagtctttctaattttact

SEQ ID NO: 91065 - DNA, 20 bp, Artificial Sequence
  Description of Artificial Sequence: Synthetic oligonucleotide
  Target: ATXN2; (+) strand; PAM type: YTN; PAM sequence: CTT
tctaattttacttgctttaa

SEQ ID NO: 91066 - DNA, 20 bp, Artificial Sequence
  Description of Artificial Sequence: Synthetic oligonucleotide
  Target: ATXN2; (+) strand; PAM type: YTN; PAM sequence: TTT
ctaattttacttgctttaac

SEQ ID NO: 91067 - DNA, 20 bp, Artificial Sequence
  Description of Artificial Sequence: Synthetic oligonucleotide
  Target: ATXN2; (+) strand; PAM type: YTN; PAM sequence: TTC
taattttacttgctttaact

SEQ ID NO: 91068 - DNA, 20 bp, Artificial Sequence
  Description of Artificial Sequence: Synthetic oligonucleotide
  Target: ATXN2; (+) strand; PAM type: YTN; PAM sequence: CTA
attttacttgctttaactat

SEQ ID NO: 91069 - DNA, 20 bp, Artificial Sequence
  Description of Artificial Sequence: Synthetic oligonucleotide
  Target: ATXN2; (+) strand; PAM type: YTN; PAM sequence: TTT
tacttgctttaactatgtcc

SEQ ID NO: 91070 - DNA, 20 bp, Artificial Sequence
  Description of Artificial Sequence: Synthetic oligonucleotide
  Target: ATXN2; (+) strand; PAM type: YTN; PAM sequence: TTT
acttgctttaactatgtccc

SEQ ID NO: 91071 - DNA, 20 bp, Artificial Sequence
  Description of Artificial Sequence: Synthetic oligonucleotide
  Target: ATXN2; (+) strand; PAM type: YTN; PAM sequence: TTA
cttgctttaactatgtccct

SEQ ID NO: 91072 - DNA, 20 bp, Artificial Sequence
  Description of Artificial Sequence: Synthetic oligonucleotide
  Target: ATXN2; (+) strand; PAM type: YTN; PAM sequence: CTT
gctttaactatgtccctttt

SEQ ID NO: 91073 - DNA, 20 bp, Artificial Sequence
  Description of Artificial Sequence: Synthetic oligonucleotide
  Target: ATXN2; (+) strand; PAM type: YTN; PAM sequence: TTG
ctttaactatgtccctttta

SEQ ID NO: 91074 - DNA, 20 bp, Artificial Sequence
  Description of Artificial Sequence: Synthetic oligonucleotide
  Target: ATXN2; (+) strand; PAM type: YTN; PAM sequence: CTT
taactatgtcccttttattg

SEQ ID NO: 91075 - DNA, 20 bp, Artificial Sequence
  Description of Artificial Sequence: Synthetic oligonucleotide
  Target: ATXN2; (+) strand; PAM type: YTN; PAM sequence: TTT
aactatgtcccttttattga

SEQ ID NO: 91076 - DNA, 20 bp, Artificial Sequence
  Description of Artificial Sequence: Synthetic oligonucleotide
  Target: ATXN2; (+) strand; PAM type: YTN; PAM sequence: TTA
actatgtcccttttattgaa

SEQ ID NO: 91077 - DNA, 20 bp, Artificial Sequence
  Description of Artificial Sequence: Synthetic oligonucleotide
  Target: ATXN2; (+) strand; PAM type: YTN; PAM sequence: CTA
tgtcccttttattgaaaaca

SEQ ID NO: 91078 - DNA, 20 bp, Artificial Sequence
  Description of Artificial Sequence: Synthetic oligonucleotide
  Target: ATXN2; (+) strand; PAM type: YTN; PAM sequence: CTT
ttattgaaaacaaaaacaca

SEQ ID NO: 91079 - DNA, 20 bp, Artificial Sequence
  Description of Artificial Sequence: Synthetic oligonucleotide
  Target: ATXN2; (+) strand; PAM type: YTN; PAM sequence: TTT
tattgaaaacaaaaacacag

SEQ ID NO: 91080 - DNA, 20 bp, Artificial Sequence
  Description of Artificial Sequence: Synthetic oligonucleotide
  Target: ATXN2; (+) strand; PAM type: YTN; PAM sequence: TTT
attgaaaacaaaaacacagc

SEQ ID NO: 91081 - DNA, 20 bp, Artificial Sequence
  Description of Artificial Sequence: Synthetic oligonucleotide
  Target: ATXN2; (+) strand; PAM type: YTN; PAM sequence: TTA
ttgaaaacaaaaacacagca

SEQ ID NO: 91082 - DNA, 20 bp, Artificial Sequence
  Description of Artificial Sequence: Synthetic oligonucleotide
  Target: ATXN2; (+) strand; PAM type: YTN; PAM sequence: TTG
aaaacaaaaacacagcacat

SEQ ID NO: 91083 - DNA, 20 bp, Artificial Sequence
  Description of Artificial Sequence: Synthetic oligonucleotide
  Target: ATXN2; (+) strand; PAM type: YTN; PAM sequence: TTT
tcacatttcaataaaagaaa

SEQ ID NO: 91084 - DNA, 20 bp, Artificial Sequence
  Description of Artificial Sequence: Synthetic oligonucleotide
  Target: ATXN2; (+) strand; PAM type: YTN; PAM sequence: TTT
cacatttcaataaaagaaaa

SEQ ID NO: 91085 - DNA, 20 bp, Artificial Sequence
  Description of Artificial Sequence: Synthetic oligonucleotide
  Target: ATXN2; (+) strand; PAM type: YTN; PAM sequence: TTC
acatttcaataaaagaaaaa

SEQ ID NO: 91086 - DNA, 20 bp, Artificial Sequence
  Description of Artificial Sequence: Synthetic oligonucleotide
  Target: ATXN2; (+) strand; PAM type: YTN; PAM sequence: TTT
caataaaagaaaaaatgttt

SEQ ID NO: 91087 - DNA, 20 bp, Artificial Sequence
  Description of Artificial Sequence: Synthetic oligonucleotide
  Target: ATXN2; (+) strand; PAM type: YTN; PAM sequence: TTC
aataaaagaaaaaatgtttc

SEQ ID NO: 91088 - DNA, 20 bp, Artificial Sequence
  Description of Artificial Sequence: Synthetic oligonucleotide
  Target: ATXN2; (+) strand; PAM type: YTN; PAM sequence: TTT
cagtaggaacttaaaacttt

SEQ ID NO: 91089 - DNA, 20 bp, Artificial Sequence
  Description of Artificial Sequence: Synthetic oligonucleotide
  Target: ATXN2; (+) strand; PAM type: YTN; PAM sequence: TTC
agtaggaacttaaaactttg

SEQ ID NO: 91090 - DNA, 20 bp, Artificial Sequence
  Description of Artificial Sequence: Synthetic oligonucleotide
  Target: ATXN2; (+) strand; PAM type: YTN; PAM sequence: CTT
aaaactttgtcaattaaaaa

SEQ ID NO: 91091 - DNA, 20 bp, Artificial Sequence
  Description of Artificial Sequence: Synthetic oligonucleotide
  Target: ATXN2; (+) strand; PAM type: YTN; PAM sequence: TTA
aaactttgtcaattaaaaaa

SEQ ID NO: 91092 - DNA, 20 bp, Artificial Sequence
  Description of Artificial Sequence: Synthetic oligonucleotide
  Target: ATXN2; (+) strand; PAM type: YTN; PAM sequence: CTT
tgtcaattaaaaaatattaa

SEQ ID NO: 91093 - DNA, 20 bp, Artificial Sequence
  Description of Artificial Sequence: Synthetic oligonucleotide
  Target: ATXN2; (+) strand; PAM type: YTN; PAM sequence: TTT
gtcaattaaaaaatattaaa

SEQ ID NO: 91094 - DNA, 20 bp, Artificial Sequence
  Description of Artificial Sequence: Synthetic oligonucleotide
  Target: ATXN2; (+) strand; PAM type: YTN; PAM sequence: TTG
tcaattaaaaaatattaaaa

SEQ ID NO: 91095 - DNA, 20 bp, Artificial Sequence
  Description of Artificial Sequence: Synthetic oligonucleotide
  Target: ATXN2; (+) strand; PAM type: YTN; PAM sequence: TTA
aaaaatattaaaaacagtgg

SEQ ID NO: 91096 - DNA, 20 bp, Artificial Sequence
  Description of Artificial Sequence: Synthetic oligonucleotide
  Target: ATXN2; (+) strand; PAM type: YTN; PAM sequence: TTA
aaaacagtggcagctatttt

SEQ ID NO: 91097 - DNA, 20 bp, Artificial Sequence
  Description of Artificial Sequence: Synthetic oligonucleotide
  Target: ATXN2; (+) strand; PAM type: YTN; PAM sequence: CTA
tttttaagaaactgatggaa

SEQ ID NO: 91098 - DNA, 20 bp, Artificial Sequence
  Description of Artificial Sequence: Synthetic oligonucleotide
  Target: ATXN2; (+) strand; PAM type: YTN; PAM sequence: TTT
ttaagaaactgatggaagtg

SEQ ID NO: 91099 - DNA, 20 bp, Artificial Sequence
  Description of Artificial Sequence: Synthetic oligonucleotide
  Target: ATXN2; (+) strand; PAM type: YTN; PAM sequence: TTT
taagaaactgatggaagtgt

SEQ ID NO: 91100 - DNA, 20 bp, Artificial Sequence
  Description of Artificial Sequence: Synthetic oligonucleotide
  Target: ATXN2; (+) strand; PAM type: YTN; PAM sequence: TTT
aagaaactgatggaagtgtt

SEQ ID NO: 91101 - DNA, 20 bp, Artificial Sequence
  Description of Artificial Sequence: Synthetic oligonucleotide
  Target: ATXN2; (+) strand; PAM type: YTN; PAM sequence: TTA
agaaactgatggaagtgttt

SEQ ID NO: 91102 - DNA, 20 bp, Artificial Sequence
  Description of Artificial Sequence: Synthetic oligonucleotide
  Target: ATXN2; (+) strand; PAM type: YTN; PAM sequence: CTG
atggaagtgtttttaaaaat

SEQ ID NO: 91103 - DNA, 20 bp, Artificial Sequence
  Description of Artificial Sequence: Synthetic oligonucleotide
  Target: ATXN2; (+) strand; PAM type: YTN; PAM sequence: TTT
ttaaaaattaaaaataaata

SEQ ID NO: 91104 - DNA, 20 bp, Artificial Sequence
  Description of Artificial Sequence: Synthetic oligonucleotide
  Target: ATXN2; (+) strand; PAM type: YTN; PAM sequence: TTT
taaaaattaaaaataaatat

SEQ ID NO: 91105 - DNA, 20 bp, Artificial Sequence
  Description of Artificial Sequence: Synthetic oligonucleotide
  Target: ATXN2; (+) strand; PAM type: YTN; PAM sequence: TTT
aaaaattaaaaataaatata

SEQ ID NO: 91106 - DNA, 20 bp, Artificial Sequence
  Description of Artificial Sequence: Synthetic oligonucleotide
  Target: ATXN2; (+) strand; PAM type: YTN; PAM sequence: TTA
aaaattaaaaataaatatat

SEQ ID NO: 91107 - DNA, 20 bp, Artificial Sequence
  Description of Artificial Sequence: Synthetic oligonucleotide
  Target: ATXN2; (+) strand; PAM type: YTN; PAM sequence: TTA
aaaataaatatatcttctta

SEQ ID NO: 91108 - DNA, 20 bp, Artificial Sequence
  Description of Artificial Sequence: Synthetic oligonucleotide
  Target: ATXN2; (+) strand; PAM type: YTN; PAM sequence: CTT
cttatgatctcagtcgaata

SEQ ID NO: 91109 - DNA, 20 bp, Artificial Sequence
  Description of Artificial Sequence: Synthetic oligonucleotide
  Target: ATXN2; (+) strand; PAM type: YTN; PAM sequence: TTC
ttatgatctcagtcgaataa

SEQ ID NO: 91110 - DNA, 20 bp, Artificial Sequence
  Description of Artificial Sequence: Synthetic oligonucleotide
  Target: ATXN2; (+) strand; PAM type: YTN; PAM sequence: CTT
atgatctcagtcgaataata

SEQ ID NO: 91111 - DNA, 20 bp, Artificial Sequence
  Description of Artificial Sequence: Synthetic oligonucleotide
  Target: ATXN2; (+) strand; PAM type: YTN; PAM sequence: TTA
tgatctcagtcgaataataa

SEQ ID NO: 91112 - DNA, 20 bp, Artificial Sequence
  Description of Artificial Sequence: Synthetic oligonucleotide
  Target: ATXN2; (+) strand; PAM type: YTN; PAM sequence: CTC
agtcgaataataacaatagt

SEQ ID NO: 91113 - DNA, 20 bp, Artificial Sequence
  Description of Artificial Sequence: Synthetic oligonucleotide
  Target: ATXN2; (+) strand; PAM type: YTN; PAM sequence: CTC
ttagtatctgtgggggattg

SEQ ID NO: 91114 - DNA, 20 bp, Artificial Sequence
  Description of Artificial Sequence: Synthetic oligonucleotide
  Target: ATXN2; (+) strand; PAM type: YTN; PAM sequence: CTT
agtatctgtgggggattggt

SEQ ID NO: 91115 - DNA, 20 bp, Artificial Sequence
  Description of Artificial Sequence: Synthetic oligonucleotide
  Target: ATXN2; (+) strand; PAM type: YTN; PAM sequence: TTA
gtatctgtgggggattggtt

SEQ ID NO: 91116 - DNA, 20 bp, Artificial Sequence
  Description of Artificial Sequence: Synthetic oligonucleotide
  Target: ATXN2; (+) strand; PAM type: YTN; PAM sequence: CTG
tgggggattggttacagtac

SEQ ID NO: 91117 - DNA, 20 bp, Artificial Sequence
  Description of Artificial Sequence: Synthetic oligonucleotide
  Target: ATXN2; (+) strand; PAM type: YTN; PAM sequence: TTG
gttacagtaccctgtgaaga

SEQ ID NO: 91118 - DNA, 20 bp, Artificial Sequence
  Description of Artificial Sequence: Synthetic oligonucleotide
  Target: ATXN2; (+) strand; PAM type: YTN; PAM sequence: TTA
cagtaccctgtgaagatacc

SEQ ID NO: 91119 - DNA, 20 bp, Artificial Sequence
  Description of Artificial Sequence: Synthetic oligonucleotide
  Target: ATXN2; (+) strand; PAM type: YTN; PAM sequence: CTG
tgaagataccaaagtcttgg

SEQ ID NO: 91120 - DNA, 20 bp, Artificial Sequence
  Description of Artificial Sequence: Synthetic oligonucleotide
  Target: ATXN2; (+) strand; PAM type: YTN; PAM sequence: CTT
ggaatgctcaagtcccttac

SEQ ID NO: 91121 - DNA, 20 bp, Artificial Sequence
  Description of Artificial Sequence: Synthetic oligonucleotide
  Target: ATXN2; (+) strand; PAM type: YTN; PAM sequence: TTG
gaatgctcaagtcccttaca

SEQ ID NO: 91122 - DNA, 20 bp, Artificial Sequence
  Description of Artificial Sequence: Synthetic oligonucleotide
  Target: ATXN2; (+) strand; PAM type: YTN; PAM sequence: CTC
aagtcccttacataaaatca

SEQ ID NO: 91123 - DNA, 20 bp, Artificial Sequence
  Description of Artificial Sequence: Synthetic oligonucleotide
  Target: ATXN2; (+) strand; PAM type: YTN; PAM sequence: CTT
acataaaatcatgtagtatt

SEQ ID NO: 91124 - DNA, 20 bp, Artificial Sequence
  Description of Artificial Sequence: Synthetic oligonucleotide
  Target: ATXN2; (+) strand; PAM type: YTN; PAM sequence: TTA
cataaaatcatgtagtattc

SEQ ID NO: 91125 - DNA, 20 bp, Artificial Sequence
  Description of Artificial Sequence: Synthetic oligonucleotide
  Target: ATXN2; (+) strand; PAM type: YTN; PAM sequence: TTC
gcatacaacctatgcatatc

SEQ ID NO: 91126 - DNA, 20 bp, Artificial Sequence
  Description of Artificial Sequence: Synthetic oligonucleotide
  Target: ATXN2; (+) strand; PAM type: YTN; PAM sequence: CTA
tgcatatcctcctatatact

SEQ ID NO: 91127 - DNA, 20 bp, Artificial Sequence
  Description of Artificial Sequence: Synthetic oligonucleotide
  Target: ATXN2; (+) strand; PAM type: YTN; PAM sequence: CTC
ctatatactttacatcatct

SEQ ID NO: 91128 - DNA, 20 bp, Artificial Sequence
  Description of Artificial Sequence: Synthetic oligonucleotide
  Target: ATXN2; (+) strand; PAM type: YTN; PAM sequence: CTA
tatactttacatcatctcta

SEQ ID NO: 91129 - DNA, 20 bp, Artificial Sequence
  Description of Artificial Sequence: Synthetic oligonucleotide
  Target: ATXN2; (+) strand; PAM type: YTN; PAM sequence: CTT
tacatcatctctagattatt

SEQ ID NO: 91130 - DNA, 20 bp, Artificial Sequence
  Description of Artificial Sequence: Synthetic oligonucleotide
  Target: ATXN2; (+) strand; PAM type: YTN; PAM sequence: TTT
acatcatctctagattattt

SEQ ID NO: 91131 - DNA, 20 bp, Artificial Sequence
  Description of Artificial Sequence: Synthetic oligonucleotide
  Target: ATXN2; (+) strand; PAM type: YTN; PAM sequence: TTA
catcatctctagattattta

SEQ ID NO: 91132 - DNA, 20 bp, Artificial Sequence
  Description of Artificial Sequence: Synthetic oligonucleotide
  Target: ATXN2; (+) strand; PAM type: YTN; PAM sequence: CTC
tagattatttataataccta

SEQ ID NO: 91133 - DNA, 20 bp, Artificial Sequence
  Description of Artificial Sequence: Synthetic oligonucleotide
  Target: ATXN2; (+) strand; PAM type: YTN; PAM sequence: CTA
gattatttataatacctaaa

SEQ ID NO: 91134 - DNA, 20 bp, Artificial Sequence
  Description of Artificial Sequence: Synthetic oligonucleotide
  Target: ATXN2; (+) strand; PAM type: YTN; PAM sequence: TTA
tttataatacctaaaacaag

SEQ ID NO: 91135 - DNA, 20 bp, Artificial Sequence
  Description of Artificial Sequence: Synthetic oligonucleotide
  Target: ATXN2; (+) strand; PAM type: YTN; PAM sequence: TTT
ataatacctaaaacaaggta

SEQ ID NO: 91136 - DNA, 20 bp, Artificial Sequence
  Description of Artificial Sequence: Synthetic oligonucleotide
  Target: ATXN2; (+) strand; PAM type: YTN; PAM sequence: TTA
taatacctaaaacaaggtaa

SEQ ID NO: 91137 - DNA, 20 bp, Artificial Sequence
  Description of Artificial Sequence: Synthetic oligonucleotide
  Target: ATXN2; (+) strand; PAM type: YTN; PAM sequence: CTA
aaacaaggtaaatgctttac

SEQ ID NO: 91138 - DNA, 20 bp, Artificial Sequence
  Description of Artificial Sequence: Synthetic oligonucleotide
  Target: ATXN2; (+) strand; PAM type: YTN; PAM sequence: CTT
tactgtattgttttggaata

SEQ ID NO: 91139 - DNA, 20 bp, Artificial Sequence
  Description of Artificial Sequence: Synthetic oligonucleotide
  Target: ATXN2; (+) strand; PAM type: YTN; PAM sequence: TTT
actgtattgttttggaataa

SEQ ID NO: 91140 - DNA, 20 bp, Artificial Sequence
  Description of Artificial Sequence: Synthetic oligonucleotide
  Target: ATXN2; (+) strand; PAM type: YTN; PAM sequence: TTA
ctgtattgttttggaataat

SEQ ID NO: 91141 - DNA, 20 bp, Artificial Sequence
  Description of Artificial Sequence: Synthetic oligonucleotide
  Target: ATXN2; (+) strand; PAM type: YTN; PAM sequence: CTG
tattgttttggaataatgac

SEQ ID NO: 91142 - DNA, 20 bp, Artificial Sequence
  Description of Artificial Sequence: Synthetic oligonucleotide
  Target: ATXN2; (+) strand; PAM type: YTN; PAM sequence: TTG
ttttggaataatgacaagga

SEQ ID NO: 91143 - DNA, 20 bp, Artificial Sequence
  Description of Artificial Sequence: Synthetic oligonucleotide
  Target: ATXN2; (+) strand; PAM type: YTN; PAM sequence: TTT
tggaataatgacaaggaaac

SEQ ID NO: 91144 - DNA, 20 bp, Artificial Sequence
  Description of Artificial Sequence: Synthetic oligonucleotide
  Target: ATXN2; (+) strand; PAM type: YTN; PAM sequence: TTT
ggaataatgacaaggaaacg

SEQ ID NO: 91145 - DNA, 20 bp, Artificial Sequence
  Description of Artificial Sequence: Synthetic oligonucleotide
  Target: ATXN2; (+) strand; PAM type: YTN; PAM sequence: TTG
gaataatgacaaggaaacgt

SEQ ID NO: 91146 - DNA, 20 bp, Artificial Sequence
  Description of Artificial Sequence: Synthetic oligonucleotide
  Target: ATXN2; (+) strand; PAM type: YTN; PAM sequence: CTG
catgtgttcagtatagatta

SEQ ID NO: 91147 - DNA, 20 bp, Artificial Sequence
  Description of Artificial Sequence: Synthetic oligonucleotide
  Target: ATXN2; (+) strand; PAM type: YTN; PAM sequence: TTC
agtatagattatcctaacta

SEQ ID NO: 91148 - DNA, 20 bp, Artificial Sequence
  Description of Artificial Sequence: Synthetic oligonucleotide
  Target: ATXN2; (+) strand; PAM type: YTN; PAM sequence: TTA
tcctaactatgtttttgatc

SEQ ID NO: 91149 - DNA, 20 bp, Artificial Sequence
  Description of Artificial Sequence: Synthetic oligonucleotide
  Target: ATXN2; (+) strand; PAM type: YTN; PAM sequence: CTA
actatgtttttgatccatgg

SEQ ID NO: 91150 - DNA, 20 bp, Artificial Sequence
  Description of Artificial Sequence: Synthetic oligonucleotide
  Target: ATXN2; (+) strand; PAM type: YTN; PAM sequence: CTA
tgtttttgatccatggttgg

SEQ ID NO: 91151 - DNA, 20 bp, Artificial Sequence
  Description of Artificial Sequence: Synthetic oligonucleotide
  Target: ATXN2; (+) strand; PAM type: YTN; PAM sequence: TTT
ttgatccatggttggttgaa

SEQ ID NO: 91152 - DNA, 20 bp, Artificial Sequence
  Description of Artificial Sequence: Synthetic oligonucleotide
  Target: ATXN2; (+) strand; PAM type: YTN; PAM sequence: TTT
tgatccatggttggttgaat

SEQ ID NO: 91153 - DNA, 20 bp, Artificial Sequence
  Description of Artificial Sequence: Synthetic oligonucleotide
  Target: ATXN2; (+) strand; PAM type: YTN; PAM sequence: TTT
gatccatggttggttgaatc

SEQ ID NO: 91154 - DNA, 20 bp, Artificial Sequence
  Description of Artificial Sequence: Synthetic oligonucleotide
  Target: ATXN2; (+) strand; PAM type: YTN; PAM sequence: TTG
atccatggttggttgaatcc

SEQ ID NO: 91155 - DNA, 20 bp, Artificial Sequence
  Description of Artificial Sequence: Synthetic oligonucleotide
  Target: ATXN2; (+) strand; PAM type: YTN; PAM sequence: TTG
gttgaatccagtgatgcaaa

SEQ ID NO: 91156 - DNA, 20 bp, Artificial Sequence
  Description of Artificial Sequence: Synthetic oligonucleotide
  Target: ATXN2; (+) strand; PAM type: YTN; PAM sequence: TTG
aatccagtgatgcaaaaccc

SEQ ID NO: 91157 - DNA, 20 bp, Artificial Sequence
  Description of Artificial Sequence: Synthetic oligonucleotide
  Target: ATXN2; (+) strand; PAM type: YTN; PAM sequence: CTC
aggtgcagaggacgtatcta

SEQ ID NO: 91158 - DNA, 20 bp, Artificial Sequence
  Description of Artificial Sequence: Synthetic oligonucleotide
  Target: ATXN2; (+) strand; PAM type: YTN; PAM sequence: CTA
taaacctgacagcctagcta

SEQ ID NO: 91159 - DNA, 20 bp, Artificial Sequence
  Description of Artificial Sequence: Synthetic oligonucleotide
  Target: ATXN2; (+) strand; PAM type: YTN; PAM sequence: CTG
acagcctagctagccaacca

SEQ ID NO: 91160 - DNA, 20 bp, Artificial Sequence
  Description of Artificial Sequence: Synthetic oligonucleotide
  Target: ATXN2; (+) strand; PAM type: YTN; PAM sequence: CTA
gctagccaaccatcgtcaaa

SEQ ID NO: 91161 - DNA, 20 bp, Artificial Sequence
  Description of Artificial Sequence: Synthetic oligonucleotide
  Target: ATXN2; (+) strand; PAM type: YTN; PAM sequence: CTA
gccaaccatcgtcaaattct

SEQ ID NO: 91162 - DNA, 20 bp, Artificial Sequence
  Description of Artificial Sequence: Synthetic oligonucleotide
  Target: ATXN2; (+) strand; PAM type: YTN; PAM sequence: TTC
tgggtcagagaaattcaaag

SEQ ID NO: 91163 - DNA, 20 bp, Artificial Sequence
  Description of Artificial Sequence: Synthetic oligonucleotide
  Target: ATXN2; (+) strand; PAM type: YTN; PAM sequence: CTG
ggtcagagaaattcaaagat

SEQ ID NO: 91164 - DNA, 20 bp, Artificial Sequence
  Description of Artificial Sequence: Synthetic oligonucleotide
  Target: ATXN2; (+) strand; PAM type: YTN; PAM sequence: TTC
aaagatttgcccaagatcac

SEQ ID NO: 91165 - DNA, 20 bp, Artificial Sequence
  Description of Artificial Sequence: Synthetic oligonucleotide
  Target: ATXN2; (+) strand; PAM type: YTN; PAM sequence: TTT
gcccaagatcacatctaatt

SEQ ID NO: 91166 - DNA, 20 bp, Artificial Sequence
  Description of Artificial Sequence: Synthetic oligonucleotide
  Target: ATXN2; (+) strand; PAM type: YTN; PAM sequence: TTG
cccaagatcacatctaattg

SEQ ID NO: 91167 - DNA, 20 bp, Artificial Sequence
  Description of Artificial Sequence: Synthetic oligonucleotide
  Target: ATXN2; (+) strand; PAM type: YTN; PAM sequence: CTA
attgatgacaaaacaaagac

SEQ ID NO: 91168 - DNA, 20 bp, Artificial Sequence
  Description of Artificial Sequence: Synthetic oligonucleotide
  Target: ATXN2; (+) strand; PAM type: YTN; PAM sequence: TTG
atgacaaaacaaagaccttt

SEQ ID NO: 91169 - DNA, 20 bp, Artificial Sequence
  Description of Artificial Sequence: Synthetic oligonucleotide
  Target: ATXN2; (+) strand; PAM type: YTN; PAM sequence: CTT
tttttaatgtttaaaaagta

SEQ ID NO: 91170 - DNA, 20 bp, Artificial Sequence
  Description of Artificial Sequence: Synthetic oligonucleotide
  Target: ATXN2; (+) strand; PAM type: YTN; PAM sequence: TTT
ttttaatgtttaaaaagtat

SEQ ID NO: 91171 - DNA, 20 bp, Artificial Sequence
  Description of Artificial Sequence: Synthetic oligonucleotide
  Target: ATXN2; (+) strand; PAM type: YTN; PAM sequence: TTT
tttaatgtttaaaaagtatt

SEQ ID NO: 91172 - DNA, 20 bp, Artificial Sequence
  Description of Artificial Sequence: Synthetic oligonucleotide
  Target: ATXN2; (+) strand; PAM type: YTN; PAM sequence: TTT
ttaatgtttaaaaagtattc

SEQ ID NO: 91173 - DNA, 20 bp, Artificial Sequence
  Description of Artificial Sequence: Synthetic oligonucleotide
  Target: ATXN2; (+) strand; PAM type: YTN; PAM sequence: TTT
taatgtttaaaaagtattca

SEQ ID NO: 91174 - DNA, 20 bp, Artificial Sequence
  Description of Artificial Sequence: Synthetic oligonucleotide
  Target: ATXN2; (+) strand; PAM type: YTN; PAM sequence: TTT
aatgtttaaaaagtattcat

SEQ ID NO: 91175 - DNA, 20 bp, Artificial Sequence
  Description of Artificial Sequence: Synthetic oligonucleotide
  Target: ATXN2; (+) strand; PAM type: YTN; PAM sequence: TTA
atgtttaaaaagtattcatt

SEQ ID NO: 91176 - DNA, 20 bp, Artificial Sequence
  Description of Artificial Sequence: Synthetic oligonucleotide
  Target: ATXN2; (+) strand; PAM type: YTN; PAM sequence: TTT
aaaaagtattcattaatggc

SEQ ID NO: 91177 - DNA, 20 bp, Artificial Sequence
  Description of Artificial Sequence: Synthetic oligonucleotide
  Target: ATXN2; (+) strand; PAM type: YTN; PAM sequence: TTA
aaaagtattcattaatggcc

SEQ ID NO: 91178 - DNA, 20 bp, Artificial Sequence
  Description of Artificial Sequence: Synthetic oligonucleotide
  Target: ATXN2; (+) strand; PAM type: YTN; PAM sequence: TTC
attaatggccatgtaaaaaa

SEQ ID NO: 91179 - DNA, 20 bp, Artificial Sequence
  Description of Artificial Sequence: Synthetic oligonucleotide
  Target: ATXN2; (+) strand; PAM type: YTN; PAM sequence: TTA
atggccatgtaaaaaaaaga

SEQ ID NO: 91180 - DNA, 20 bp, Artificial Sequence
  Description of Artificial Sequence: Synthetic oligonucleotide
  Target: ATXN2; (+) strand; PAM type: YTN; PAM sequence: TTG
gttcagcacactaaaacaaa

SEQ ID NO: 91181 - DNA, 20 bp, Artificial Sequence
  Description of Artificial Sequence: Synthetic oligonucleotide
  Target: ATXN2; (+) strand; PAM type: YTN; PAM sequence: TTC
agcacactaaaacaaaattc

SEQ ID NO: 91182 - DNA, 20 bp, Artificial Sequence
  Description of Artificial Sequence: Synthetic oligonucleotide
  Target: ATXN2; (+) strand; PAM type: YTN; PAM sequence: CTA
aaacaaaattcagatggcag

SEQ ID NO: 91183 - DNA, 20 bp, Artificial Sequence
  Description of Artificial Sequence: Synthetic oligonucleotide
  Target: ATXN2; (+) strand; PAM type: YTN; PAM sequence: TTC
agatggcaggtatggaagaa

SEQ ID NO: 91184 - DNA, 20 bp, Artificial Sequence
  Description of Artificial Sequence: Synthetic oligonucleotide
  Target: ATXN2; (+) strand; PAM type: YTN; PAM sequence: CTA
ttactaataatttttctttt

SEQ ID NO: 91185 - DNA, 20 bp, Artificial Sequence
  Description of Artificial Sequence: Synthetic oligonucleotide
  Target: ATXN2; (+) strand; PAM type: YTN; PAM sequence: TTA
ctaataatttttcttttttt

SEQ ID NO: 91186 - DNA, 20 bp, Artificial Sequence
  Description of Artificial Sequence: Synthetic oligonucleotide
  Target: ATXN2; (+) strand; PAM type: YTN; PAM sequence: CTA
ataatttttctttttttggg

SEQ ID NO: 91187 - DNA, 20 bp, Artificial Sequence
  Description of Artificial Sequence: Synthetic oligonucleotide
  Target: ATXN2; (+) strand; PAM type: YTN; PAM sequence: TTT
ttctttttttgggactagat

SEQ ID NO: 91188 - DNA, 20 bp, Artificial Sequence
  Description of Artificial Sequence: Synthetic oligonucleotide
  Target: ATXN2; (+) strand; PAM type: YTN; PAM sequence: TTT
tctttttttgggactagata

SEQ ID NO: 91189 - DNA, 20 bp, Artificial Sequence
  Description of Artificial Sequence: Synthetic oligonucleotide
  Target: ATXN2; (+) strand; PAM type: YTN; PAM sequence: TTT
ctttttttgggactagataa

SEQ ID NO: 91190 - DNA, 20 bp, Artificial Sequence
  Description of Artificial Sequence: Synthetic oligonucleotide
  Target: ATXN2; (+) strand; PAM type: YTN; PAM sequence: TTC
tttttttgggactagataac

SEQ ID NO: 91191 - DNA, 20 bp, Artificial Sequence
  Description of Artificial Sequence: Synthetic oligonucleotide
  Target: ATXN2; (+) strand; PAM type: YTN; PAM sequence: CTT
tttttgggactagataacct

SEQ ID NO: 91192 - DNA, 20 bp, Artificial Sequence
  Description of Artificial Sequence: Synthetic oligonucleotide
  Target: ATXN2; (+) strand; PAM type: YTN; PAM sequence: TTT
ttttgggactagataacctc

SEQ ID NO: 91193 - DNA, 20 bp, Artificial Sequence
  Description of Artificial Sequence: Synthetic oligonucleotide
  Target: ATXN2; (+) strand; PAM type: YTN; PAM sequence: TTT
tttgggactagataacctca

SEQ ID NO: 91194 - DNA, 20 bp, Artificial Sequence
  Description of Artificial Sequence: Synthetic oligonucleotide
  Target: ATXN2; (+) strand; PAM type: YTN; PAM sequence: TTT
ttgggactagataacctcaa

SEQ ID NO: 91195 - DNA, 20 bp, Artificial Sequence
  Description of Artificial Sequence: Synthetic oligonucleotide
  Target: ATXN2; (+) strand; PAM type: YTN; PAM sequence: TTT
tgggactagataacctcaaa

SEQ ID NO: 91196 - DNA, 20 bp, Artificial Sequence
  Description of Artificial Sequence: Synthetic oligonucleotide
  Target: ATXN2; (+) strand; PAM type: YTN; PAM sequence: TTT
gggactagataacctcaaag

SEQ ID NO: 91197 - DNA, 20 bp, Artificial Sequence
  Description of Artificial Sequence: Synthetic oligonucleotide
  Target: ATXN2; (+) strand; PAM type: YTN; PAM sequence: TTG
ggactagataacctcaaaga

SEQ ID NO: 91198 - DNA, 20 bp, Artificial Sequence
  Description of Artificial Sequence: Synthetic oligonucleotide
  Target: ATXN2; (+) strand; PAM type: YTN; PAM sequence: CTA
gataacctcaaagaaagtaa

SEQ ID NO: 91199 - DNA, 20 bp, Artificial Sequence
  Description of Artificial Sequence: Synthetic oligonucleotide
  Target: ATXN2; (+) strand; PAM type: YTN; PAM sequence: CTC
aaagaaagtaataaacctac

SEQ ID NO: 91200 - DNA, 20 bp, Artificial Sequence
  Description of Artificial Sequence: Synthetic oligonucleotide
  Target: ATXN2; (+) strand; PAM type: YTN; PAM sequence: CTA
cctgagagaaggaacgtggg

SEQ ID NO: 91201 - DNA, 20 bp, Artificial Sequence
  Description of Artificial Sequence: Synthetic oligonucleotide
  Target: ATXN2; (+) strand; PAM type: YTN; PAM sequence: CTG
agagaaggaacgtgggttga

SEQ ID NO: 91202 - DNA, 20 bp, Artificial Sequence
  Description of Artificial Sequence: Synthetic oligonucleotide
  Target: ATXN2; (+) strand; PAM type: YTN; PAM sequence: TTG
aactcctttgcattgggatt

SEQ ID NO: 91203 - DNA, 20 bp, Artificial Sequence
  Description of Artificial Sequence: Synthetic oligonucleotide
  Target: ATXN2; (+) strand; PAM type: YTN; PAM sequence: CTC
ctttgcattgggattcaatg

SEQ ID NO: 91204 - DNA, 20 bp, Artificial Sequence
  Description of Artificial Sequence: Synthetic oligonucleotide
  Target: ATXN2; (+) strand; PAM type: YTN; PAM sequence: CTT
tgcattgggattcaatgttg

SEQ ID NO: 91205 - DNA, 20 bp, Artificial Sequence
  Description of Artificial Sequence: Synthetic oligonucleotide
  Target: ATXN2; (+) strand; PAM type: YTN; PAM sequence: TTT
gcattgggattcaatgttga

SEQ ID NO: 91206 - DNA, 20 bp, Artificial Sequence
  Description of Artificial Sequence: Synthetic oligonucleotide
  Target: ATXN2; (+) strand; PAM type: YTN; PAM sequence: TTG
cattgggattcaatgttgat

SEQ ID NO: 91207 - DNA, 20 bp, Artificial Sequence
  Description of Artificial Sequence: Synthetic oligonucleotide
  Target: ATXN2; (+) strand; PAM type: YTN; PAM sequence: TTG
ggattcaatgttgatttcct

SEQ ID NO: 91208 - DNA, 20 bp, Artificial Sequence
  Description of Artificial Sequence: Synthetic oligonucleotide
  Target: ATXN2; (+) strand; PAM type: YTN; PAM sequence: TTC
aatgttgatttcctaacttg

SEQ ID NO: 91209 - DNA, 20 bp, Artificial Sequence
  Description of Artificial Sequence: Synthetic oligonucleotide
  Target: ATXN2; (+) strand; PAM type: YTN; PAM sequence: TTG
atttcctaacttgcctaaaa

SEQ ID NO: 91210 - DNA, 20 bp, Artificial Sequence
  Description of Artificial Sequence: Synthetic oligonucleotide
  Target: ATXN2; (+) strand; PAM type: YTN; PAM sequence: TTT
cctaacttgcctaaaaaaaa

SEQ ID NO: 91211 - DNA, 20 bp, Artificial Sequence
  Description of Artificial Sequence: Synthetic oligonucleotide
  Target: ATXN2; (+) strand; PAM type: YTN; PAM sequence: TTC
ctaacttgcctaaaaaaaat

SEQ ID NO: 91212 - DNA, 20 bp, Artificial Sequence
  Description of Artificial Sequence: Synthetic oligonucleotide
  Target: ATXN2; (+) strand; PAM type: YTN; PAM sequence: CTA
acttgcctaaaaaaaatata

SEQ ID NO: 91213 - DNA, 20 bp, Artificial Sequence
  Description of Artificial Sequence: Synthetic oligonucleotide
  Target: ATXN2; (+) strand; PAM type: YTN; PAM sequence: CTT
gcctaaaaaaaatataaagg

SEQ ID NO: 91214 - DNA, 20 bp, Artificial Sequence
  Description of Artificial Sequence: Synthetic oligonucleotide
  Target: ATXN2; (+) strand; PAM type: YTN; PAM sequence: TTG
cctaaaaaaaatataaaggc

SEQ ID NO: 91215 - DNA, 20 bp, Artificial Sequence
  Description of Artificial Sequence: Synthetic oligonucleotide
  Target: ATXN2; (+) strand; PAM type: YTN; PAM sequence: CTA
aaaaaaatataaaggccagt

SEQ ID NO: 91216 - DNA, 20 bp, Artificial Sequence
  Description of Artificial Sequence: Synthetic oligonucleotide
  Target: ATXN2; (+) strand; PAM type: YTN; PAM sequence: CTA
catggactttacgttgctct

SEQ ID NO: 91217 - DNA, 20 bp, Artificial Sequence
  Description of Artificial Sequence: Synthetic oligonucleotide
  Target: ATXN2; (+) strand; PAM type: YTN; PAM sequence: CTT
tacgttgctctaaaatcttc

SEQ ID NO: 91218 - DNA, 20 bp, Artificial Sequence
  Description of Artificial Sequence: Synthetic oligonucleotide
  Target: ATXN2; (+) strand; PAM type: YTN; PAM sequence: TTT
acgttgctctaaaatcttcc

SEQ ID NO: 91219 - DNA, 20 bp, Artificial Sequence
  Description of Artificial Sequence: Synthetic oligonucleotide
  Target: ATXN2; (+) strand; PAM type: YTN; PAM sequence: TTA
cgttgctctaaaatcttcca

SEQ ID NO: 91220 - DNA, 20 bp, Artificial Sequence
  Description of Artificial Sequence: Synthetic oligonucleotide
  Target: ATXN2; (+) strand; PAM type: YTN; PAM sequence: TTG
ctctaaaatcttccatacct

SEQ ID NO: 91221 - DNA, 20 bp, Artificial Sequence
  Description of Artificial Sequence: Synthetic oligonucleotide
  Target: ATXN2; (+) strand; PAM type: YTN; PAM sequence: CTC
taaaatcttccatacctgac

SEQ ID NO: 91222 - DNA, 20 bp, Artificial Sequence
  Description of Artificial Sequence: Synthetic oligonucleotide
  Target: ATXN2; (+) strand; PAM type: YTN; PAM sequence: CTA
aaatcttccatacctgacaa

SEQ ID NO: 91223 - DNA, 20 bp, Artificial Sequence
  Description of Artificial Sequence: Synthetic oligonucleotide
  Target: ATXN2; (+) strand; PAM type: YTN; PAM sequence: CTT
ccatacctgacaatttaaaa

SEQ ID NO: 91224 - DNA, 20 bp, Artificial Sequence
  Description of Artificial Sequence: Synthetic oligonucleotide
  Target: ATXN2; (+) strand; PAM type: YTN; PAM sequence: TTC
catacctgacaatttaaaaa

SEQ ID NO: 91225 - DNA, 20 bp, Artificial Sequence
  Description of Artificial Sequence: Synthetic oligonucleotide
  Target: ATXN2; (+) strand; PAM type: YTN; PAM sequence: CTG
acaatttaaaaaaaattgct

SEQ ID NO: 91226 - DNA, 20 bp, Artificial Sequence
  Description of Artificial Sequence: Synthetic oligonucleotide
  Target: ATXN2; (+) strand; PAM type: YTN; PAM sequence: TTT
aaaaaaaattgctaaatata

SEQ ID NO: 91227 - DNA, 20 bp, Artificial Sequence
  Description of Artificial Sequence: Synthetic oligonucleotide
  Target: ATXN2; (+) strand; PAM type: YTN; PAM sequence: TTA
aaaaaaattgctaaatatag

SEQ ID NO: 91228 - DNA, 20 bp, Artificial Sequence
  Description of Artificial Sequence: Synthetic oligonucleotide
  Target: ATXN2; (+) strand; PAM type: YTN; PAM sequence: TTG
ctaaatatagatttaaactg

SEQ ID NO: 91229 - DNA, 20 bp, Artificial Sequence
  Description of Artificial Sequence: Synthetic oligonucleotide
  Target: ATXN2; (+) strand; PAM type: YTN; PAM sequence: CTA
aatatagatttaaactgttc

SEQ ID NO: 91230 - DNA, 20 bp, Artificial Sequence
  Description of Artificial Sequence: Synthetic oligonucleotide
  Target: ATXN2; (+) strand; PAM type: YTN; PAM sequence: TTT
aaactgttctcactagaaga

SEQ ID NO: 91231 - DNA, 20 bp, Artificial Sequence
  Description of Artificial Sequence: Synthetic oligonucleotide
  Target: ATXN2; (+) strand; PAM type: YTN; PAM sequence: TTA
aactgttctcactagaagat

SEQ ID NO: 91232 - DNA, 20 bp, Artificial Sequence
  Description of Artificial Sequence: Synthetic oligonucleotide
  Target: ATXN2; (+) strand; PAM type: YTN; PAM sequence: CTG
ttctcactagaagatcacta

SEQ ID NO: 91233 - DNA, 20 bp, Artificial Sequence
  Description of Artificial Sequence: Synthetic oligonucleotide
  Target: ATXN2; (+) strand; PAM type: YTN; PAM sequence: TTC
tcactagaagatcactaatc

SEQ ID NO: 91234 - DNA, 20 bp, Artificial Sequence
  Description of Artificial Sequence: Synthetic oligonucleotide
  Target: ATXN2; (+) strand; PAM type: YTN; PAM sequence: CTC
actagaagatcactaatcgt

SEQ ID NO: 91235 - DNA, 20 bp, Artificial Sequence
  Description of Artificial Sequence: Synthetic oligonucleotide
  Target: ATXN2; (+) strand; PAM type: YTN; PAM sequence: CTA
gaagatcactaatcgttttt

SEQ ID NO: 91236 - DNA, 20 bp, Artificial Sequence
  Description of Artificial Sequence: Synthetic oligonucleotide
  Target: ATXN2; (+) strand; PAM type: YTN; PAM sequence: CTA
atcgtttttattgaaacata

SEQ ID NO: 91237 - DNA, 20 bp, Artificial Sequence
  Description of Artificial Sequence: Synthetic oligonucleotide
  Target: ATXN2; (+) strand; PAM type: YTN; PAM sequence: TTT
ttattgaaacatatacactt

SEQ ID NO: 91238 - DNA, 20 bp, Artificial Sequence
  Description of Artificial Sequence: Synthetic oligonucleotide
  Target: ATXN2; (+) strand; PAM type: YTN; PAM sequence: TTT
tattgaaacatatacactta

SEQ ID NO: 91239 - DNA, 20 bp, Artificial Sequence
  Description of Artificial Sequence: Synthetic oligonucleotide
  Target: ATXN2; (+) strand; PAM type: YTN; PAM sequence: TTT
attgaaacatatacacttat

SEQ ID NO: 91240 - DNA, 20 bp, Artificial Sequence
  Description of Artificial Sequence: Synthetic oligonucleotide
  Target: ATXN2; (+) strand; PAM type: YTN; PAM sequence: TTA
ttgaaacatatacacttata

SEQ ID NO: 91241 - DNA, 20 bp, Artificial Sequence
  Description of Artificial Sequence: Synthetic oligonucleotide
  Target: ATXN2; (+) strand; PAM type: YTN; PAM sequence: TTG
aaacatatacacttatattg

SEQ ID NO: 91242 - DNA, 20 bp, Artificial Sequence
  Description of Artificial Sequence: Synthetic oligonucleotide
  Target: ATXN2; (+) strand; PAM type: YTN; PAM sequence: CTT
atattgcccattccttaatc

SEQ ID NO: 91243 - DNA, 20 bp, Artificial Sequence
  Description of Artificial Sequence: Synthetic oligonucleotide
  Target: ATXN2; (+) strand; PAM type: YTN; PAM sequence: TTA
tattgcccattccttaatcc

SEQ ID NO: 91244 - DNA, 20 bp, Artificial Sequence
  Description of Artificial Sequence: Synthetic oligonucleotide
  Target: ATXN2; (+) strand; PAM type: YTN; PAM sequence: TTG
cccattccttaatcccttaa

SEQ ID NO: 91245 - DNA, 20 bp, Artificial Sequence
  Description of Artificial Sequence: Synthetic oligonucleotide
  Target: ATXN2; (+) strand; PAM type: YTN; PAM sequence: TTC
cttaatcccttaaagaatac

SEQ ID NO: 91246 - DNA, 20 bp, Artificial Sequence
  Description of Artificial Sequence: Synthetic oligonucleotide
  Target: ATXN2; (+) strand; PAM type: YTN; PAM sequence: CTT
aatcccttaaagaatacagc

SEQ ID NO: 91247 - DNA, 20 bp, Artificial Sequence
  Description of Artificial Sequence: Synthetic oligonucleotide
  Target: ATXN2; (+) strand; PAM type: YTN; PAM sequence: TTA
atcccttaaagaatacagcc

SEQ ID NO: 91248 - DNA, 20 bp, Artificial Sequence
  Description of Artificial Sequence: Synthetic oligonucleotide
  Target: ATXN2; (+) strand; PAM type: YTN; PAM sequence: CTT
aaagaatacagccataaaag

SEQ ID NO: 91249 - DNA, 20 bp, Artificial Sequence
  Description of Artificial Sequence: Synthetic oligonucleotide
  Target: ATXN2; (+) strand; PAM type: YTN; PAM sequence: TTA
aagaatacagccataaaaga

SEQ ID NO: 91250 - DNA, 20 bp, Artificial Sequence
  Description of Artificial Sequence: Synthetic oligonucleotide
  Target: ATXN2; (+) strand; PAM type: YTN; PAM sequence: TTT
tttaaaaatctgagtaatat

SEQ ID NO: 91251 - DNA, 20 bp, Artificial Sequence
  Description of Artificial Sequence: Synthetic oligonucleotide
  Target: ATXN2; (+) strand; PAM type: YTN; PAM sequence: TTT
ttaaaaatctgagtaatata

SEQ ID NO: 91252 - DNA, 20 bp, Artificial Sequence
  Description of Artificial Sequence: Synthetic oligonucleotide
  Target: ATXN2; (+) strand; PAM type: YTN; PAM sequence: TTT
taaaaatctgagtaatatac

SEQ ID NO: 91253 - DNA, 20 bp, Artificial Sequence
  Description of Artificial Sequence: Synthetic oligonucleotide
  Target: ATXN2; (+) strand; PAM type: YTN; PAM sequence: TTT
aaaaatctgagtaatataca

SEQ ID NO: 91254 - DNA, 20 bp, Artificial Sequence
  Description of Artificial Sequence: Synthetic oligonucleotide
  Target: ATXN2; (+) strand; PAM type: YTN; PAM sequence: TTA
aaaatctgagtaatatacaa

SEQ ID NO: 91255 - DNA, 20 bp, Artificial Sequence
  Description of Artificial Sequence: Synthetic oligonucleotide
  Target: ATXN2; (+) strand; PAM type: YTN; PAM sequence: CTG
agtaatatacaaccgttcct

SEQ ID NO: 91256 - DNA, 20 bp, Artificial Sequence
  Description of Artificial Sequence: Synthetic oligonucleotide
  Target: ATXN2; (+) strand; PAM type: YTN; PAM sequence: TTC
ctctcaaaggcaatcaaaaa

SEQ ID NO: 91257 - DNA, 20 bp, Artificial Sequence
  Description of Artificial Sequence: Synthetic oligonucleotide
  Target: ATXN2; (+) strand; PAM type: YTN; PAM sequence: CTC
tcaaaggcaatcaaaaaata

SEQ ID NO: 91258 - DNA, 20 bp, Artificial Sequence
  Description of Artificial Sequence: Synthetic oligonucleotide
  Target: ATXN2; (+) strand; PAM type: YTN; PAM sequence: CTC
aaaggcaatcaaaaaatact

SEQ ID NO: 91259 - DNA, 20 bp, Artificial Sequence
  Description of Artificial Sequence: Synthetic oligonucleotide
  Target: ATXN2; (+) strand; PAM type: YTN; PAM sequence: CTT
tttttttttccttcacagag

SEQ ID NO: 91260 - DNA, 20 bp, Artificial Sequence
  Description of Artificial Sequence: Synthetic oligonucleotide
  Target: ATXN2; (+) strand; PAM type: YTN; PAM sequence: TTT
ttttttttccttcacagagt

SEQ ID NO: 91261 - DNA, 20 bp, Artificial Sequence
  Description of Artificial Sequence: Synthetic oligonucleotide
  Target: ATXN2; (+) strand; PAM type: YTN; PAM sequence: TTT
tttttttccttcacagagtc

SEQ ID NO: 91262 - DNA, 20 bp, Artificial Sequence
  Description of Artificial Sequence: Synthetic oligonucleotide
  Target: ATXN2; (+) strand; PAM type: YTN; PAM sequence: TTT
ttttttccttcacagagtcc

SEQ ID NO: 91263 - DNA, 20 bp, Artificial Sequence
  Description of Artificial Sequence: Synthetic oligonucleotide
  Target: ATXN2; (+) strand; PAM type: YTN; PAM sequence: TTT
tttttccttcacagagtccc

SEQ ID NO: 91264 - DNA, 20 bp, Artificial Sequence
  Description of Artificial Sequence: Synthetic oligonucleotide
  Target: ATXN2; (+) strand; PAM type: YTN; PAM sequence: TTT
ttttccttcacagagtccca

SEQ ID NO: 91265 - DNA, 20 bp, Artificial Sequence
  Description of Artificial Sequence: Synthetic oligonucleotide
  Target: ATXN2; (+) strand; PAM type: YTN; PAM sequence: TTT
tttccttcacagagtcccac

SEQ ID NO: 91266 - DNA, 20 bp, Artificial Sequence
  Description of Artificial Sequence: Synthetic oligonucleotide
  Target: ATXN2; (+) strand; PAM type: YTN; PAM sequence: TTT
ttccttcacagagtcccact

SEQ ID NO: 91267 - DNA, 20 bp, Artificial Sequence
  Description of Artificial Sequence: Synthetic oligonucleotide
  Target: ATXN2; (+) strand; PAM type: YTN; PAM sequence: TTT
tccttcacagagtcccactc

SEQ ID NO: 91268 - DNA, 20 bp, Artificial Sequence
  Description of Artificial Sequence: Synthetic oligonucleotide
  Target: ATXN2; (+) strand; PAM type: YTN; PAM sequence: TTT
ccttcacagagtcccactct

SEQ ID NO: 91269 - DNA, 20 bp, Artificial Sequence
  Description of Artificial Sequence: Synthetic oligonucleotide
  Target: ATXN2; (+) strand; PAM type: YTN; PAM sequence: TTC
cttcacagagtcccactctg

SEQ ID NO: 91270 - DNA, 20 bp, Artificial Sequence
  Description of Artificial Sequence: Synthetic oligonucleotide
  Target: ATXN2; (+) strand; PAM type: YTN; PAM sequence: CTT
cacagagtcccactctgttg

SEQ ID NO: 91271 - DNA, 20 bp, Artificial Sequence
  Description of Artificial Sequence: Synthetic oligonucleotide
  Target: ATXN2; (+) strand; PAM type: YTN; PAM sequence: TTC
acagagtcccactctgttgc

SEQ ID NO: 91272 - DNA, 20 bp, Artificial Sequence
  Description of Artificial Sequence: Synthetic oligonucleotide
  Target: ATXN2; (+) strand; PAM type: YTN; PAM sequence: CTC
tgttgctcaggttggagtgc

SEQ ID NO: 91273 - DNA, 20 bp, Artificial Sequence
  Description of Artificial Sequence: Synthetic oligonucleotide
  Target: ATXN2; (+) strand; PAM type: YTN; PAM sequence: CTG
ttgctcaggttggagtgcag

SEQ ID NO: 91274 - DNA, 20 bp, Artificial Sequence
  Description of Artificial Sequence: Synthetic oligonucleotide
  Target: ATXN2; (+) strand; PAM type: YTN; PAM sequence: TTG
ctcaggttggagtgcagcag

SEQ ID NO: 91275 - DNA, 20 bp, Artificial Sequence
  Description of Artificial Sequence: Synthetic oligonucleotide
  Target: ATXN2; (+) strand; PAM type: YTN; PAM sequence: CTC
aggttggagtgcagcagtgc

SEQ ID NO: 91276 - DNA, 20 bp, Artificial Sequence
  Description of Artificial Sequence: Synthetic oligonucleotide
  Target: ATXN2; (+) strand; PAM type: YTN; PAM sequence: TTG
gagtgcagcagtgcaatctt

SEQ ID NO: 91277 - DNA, 20 bp, Artificial Sequence
  Description of Artificial Sequence: Synthetic oligonucleotide
  Target: ATXN2; (+) strand; PAM type: YTN; PAM sequence: CTT
ggctcactgcaacctctgcc

SEQ ID NO: 91278 - DNA, 20 bp, Artificial Sequence
  Description of Artificial Sequence: Synthetic oligonucleotide
  Target: ATXN2; (+) strand; PAM type: YTN; PAM sequence: TTG
gctcactgcaacctctgcct

SEQ ID NO: 91279 - DNA, 20 bp, Artificial Sequence
  Description of Artificial Sequence: Synthetic oligonucleotide
  Target: ATXN2; (+) strand; PAM type: YTN; PAM sequence: CTC
actgcaacctctgcctcccg

SEQ ID NO: 91280 - DNA, 20 bp, Artificial Sequence
  Description of Artificial Sequence: Synthetic oligonucleotide
  Target: ATXN2; (+) strand; PAM type: YTN; PAM sequence: CTG
caacctctgcctcccgagtt

SEQ ID NO: 91281 - DNA, 20 bp, Artificial Sequence
  Description of Artificial Sequence: Synthetic oligonucleotide
  Target: ATXN2; (+) strand; PAM type: YTN; PAM sequence: CTC
tgcctcccgagtttaagcca

SEQ ID NO: 91282 - DNA, 20 bp, Artificial Sequence
  Description of Artificial Sequence: Synthetic oligonucleotide
  Target: ATXN2; (+) strand; PAM type: YTN; PAM sequence: CTG
cctcccgagtttaagccatt

SEQ ID NO: 91283 - DNA, 20 bp, Artificial Sequence
  Description of Artificial Sequence: Synthetic oligonucleotide
  Target: ATXN2; (+) strand; PAM type: YTN; PAM sequence: CTC
ccgagtttaagccattctct

SEQ ID NO: 91284 - DNA, 20 bp, Artificial Sequence
  Description of Artificial Sequence: Synthetic oligonucleotide
  Target: ATXN2; (+) strand; PAM type: YTN; PAM sequence: TTT
aagccattctcttgccttag

SEQ ID NO: 91285 - DNA, 20 bp, Artificial Sequence
  Description of Artificial Sequence: Synthetic oligonucleotide
  Target: ATXN2; (+) strand; PAM type: YTN; PAM sequence: TTA
agccattctcttgccttagc

SEQ ID NO: 91286 - DNA, 20 bp, Artificial Sequence
  Description of Artificial Sequence: Synthetic oligonucleotide
  Target: ATXN2; (+) strand; PAM type: YTN; PAM sequence: TTC
tcttgccttagcctcctgat

SEQ ID NO: 91287 - DNA, 20 bp, Artificial Sequence
  Description of Artificial Sequence: Synthetic oligonucleotide
  Target: ATXN2; (+) strand; PAM type: YTN; PAM sequence: CTC
ttgccttagcctcctgatta

SEQ ID NO: 91288 - DNA, 20 bp, Artificial Sequence
  Description of Artificial Sequence: Synthetic oligonucleotide
  Target: ATXN2; (+) strand; PAM type: YTN; PAM sequence: CTT
gccttagcctcctgattagc

SEQ ID NO: 91289 - DNA, 20 bp, Artificial Sequence
  Description of Artificial Sequence: Synthetic oligonucleotide
  Target: ATXN2; (+) strand; PAM type: YTN; PAM sequence: TTG
ccttagcctcctgattagct

SEQ ID NO: 91290 - DNA, 20 bp, Artificial Sequence
  Description of Artificial Sequence: Synthetic oligonucleotide
  Target: ATXN2; (+) strand; PAM type: YTN; PAM sequence: CTT
agcctcctgattagctggga

SEQ ID NO: 91291 - DNA, 20 bp, Artificial Sequence
  Description of Artificial Sequence: Synthetic oligonucleotide
  Target: ATXN2; (+) strand; PAM type: YTN; PAM sequence: TTA
gcctcctgattagctgggat

SEQ ID NO: 91292 - DNA, 20 bp, Artificial Sequence
  Description of Artificial Sequence: Synthetic oligonucleotide
  Target: ATXN2; (+) strand; PAM type: YTN; PAM sequence: CTC
ctgattagctgggattacag

SEQ ID NO: 91293 - DNA, 20 bp, Artificial Sequence
  Description of Artificial Sequence: Synthetic oligonucleotide
  Target: ATXN2; (+) strand; PAM type: YTN; PAM sequence: CTG
attagctgggattacaggag

SEQ ID NO: 91294 - DNA, 20 bp, Artificial Sequence
  Description of Artificial Sequence: Synthetic oligonucleotide
  Target: ATXN2; (+) strand; PAM type: YTN; PAM sequence: TTA
gctgggattacaggagactg

SEQ ID NO: 91295 - DNA, 20 bp, Artificial Sequence
  Description of Artificial Sequence: Synthetic oligonucleotide
  Target: ATXN2; (+) strand; PAM type: YTN; PAM sequence: CTG
ggattacaggagactgccac

SEQ ID NO: 91296 - DNA, 20 bp, Artificial Sequence
  Description of Artificial Sequence: Synthetic oligonucleotide
  Target: ATXN2; (+) strand; PAM type: YTN; PAM sequence: TTA
caggagactgccaccacgcc

SEQ ID NO: 91297 - DNA, 20 bp, Artificial Sequence
  Description of Artificial Sequence: Synthetic oligonucleotide
  Target: ATXN2; (+) strand; PAM type: YTN; PAM sequence: CTG
ccaccacgcccagctaattt

SEQ ID NO: 91298 - DNA, 20 bp, Artificial Sequence
  Description of Artificial Sequence: Synthetic oligonucleotide
  Target: ATXN2; (+) strand; PAM type: YTN; PAM sequence: CTA
attttttttaatatttattt

SEQ ID NO: 91299 - DNA, 20 bp, Artificial Sequence
  Description of Artificial Sequence: Synthetic oligonucleotide
  Target: ATXN2; (+) strand; PAM type: YTN; PAM sequence: TTT
tttttaatatttatttttag

SEQ ID NO: 91300 - DNA, 20 bp, Artificial Sequence
  Description of Artificial Sequence: Synthetic oligonucleotide
  Target: ATXN2; (+) strand; PAM type: YTN; PAM sequence: TTT
ttttaatatttatttttagt

SEQ ID NO: 91301 - DNA, 20 bp, Artificial Sequence
  Description of Artificial Sequence: Synthetic oligonucleotide
  Target: ATXN2; (+) strand; PAM type: YTN; PAM sequence: TTT
tttaatatttatttttagta

SEQ ID NO: 91302 - DNA, 20 bp, Artificial Sequence
  Description of Artificial Sequence: Synthetic oligonucleotide
  Target: ATXN2; (+) strand; PAM type: YTN; PAM sequence: TTT
ttaatatttatttttagtaa

SEQ ID NO: 91303 - DNA, 20 bp, Artificial Sequence
  Description of Artificial Sequence: Synthetic oligonucleotide
  Target: ATXN2; (+) strand; PAM type: YTN; PAM sequence: TTT
taatatttatttttagtaaa

SEQ ID NO: 91304 - DNA, 20 bp, Artificial Sequence
  Description of Artificial Sequence: Synthetic oligonucleotide
  Target: ATXN2; (+) strand; PAM type: YTN; PAM sequence: TTT
aatatttatttttagtaaag

SEQ ID NO: 91305 - DNA, 20 bp, Artificial Sequence
  Description of Artificial Sequence: Synthetic oligonucleotide
  Target: ATXN2; (+) strand; PAM type: YTN; PAM sequence: TTA
atatttatttttagtaaaga

SEQ ID NO: 91306 - DNA, 20 bp, Artificial Sequence
  Description of Artificial Sequence: Synthetic oligonucleotide
  Target: ATXN2; (+) strand; PAM type: YTN; PAM sequence: TTT
atttttagtaaagatggggt

SEQ ID NO: 91307 - DNA, 20 bp, Artificial Sequence
  Description of Artificial Sequence: Synthetic oligonucleotide
  Target: ATXN2; (+) strand; PAM type: YTN; PAM sequence: TTA
tttttagtaaagatggggtt

SEQ ID NO: 91308 - DNA, 20 bp, Artificial Sequence
  Description of Artificial Sequence: Synthetic oligonucleotide
  Target: ATXN2; (+) strand; PAM type: YTN; PAM sequence: TTT
ttagtaaagatggggtttca

SEQ ID NO: 91309 - DNA, 20 bp, Artificial Sequence
  Description of Artificial Sequence: Synthetic oligonucleotide
  Target: ATXN2; (+) strand; PAM type: YTN; PAM sequence: TTT
tagtaaagatggggtttcac

SEQ ID NO: 91310 - DNA, 20 bp, Artificial Sequence
  Description of Artificial Sequence: Synthetic oligonucleotide
  Target: ATXN2; (+) strand; PAM type: YTN; PAM sequence: TTT
agtaaagatggggtttcacc

SEQ ID NO: 91311 - DNA, 20 bp, Artificial Sequence
  Description of Artificial Sequence: Synthetic oligonucleotide
  Target: ATXN2; (+) strand; PAM type: YTN; PAM sequence: TTA
gtaaagatggggtttcacca

SEQ ID NO: 91312 - DNA, 20 bp, Artificial Sequence
  Description of Artificial Sequence: Synthetic oligonucleotide
  Target: ATXN2; (+) strand; PAM type: YTN; PAM sequence: TTT
caccattttggccacgctga

SEQ ID NO: 91313 - DNA, 20 bp, Artificial Sequence
  Description of Artificial Sequence: Synthetic oligonucleotide
  Target: ATXN2; (+) strand; PAM type: YTN; PAM sequence: TTC
accattttggccacgctgac

SEQ ID NO: 91314 - DNA, 20 bp, Artificial Sequence
  Description of Artificial Sequence: Synthetic oligonucleotide
  Target: ATXN2; (+) strand; PAM type: YTN; PAM sequence: TTT
tggccacgctgaccttaagt

SEQ ID NO: 91315 - DNA, 20 bp, Artificial Sequence
  Description of Artificial Sequence: Synthetic oligonucleotide
  Target: ATXN2; (+) strand; PAM type: YTN; PAM sequence: TTT
ggccacgctgaccttaagtg

SEQ ID NO: 91316 - DNA, 20 bp, Artificial Sequence
  Description of Artificial Sequence: Synthetic oligonucleotide
  Target: ATXN2; (+) strand; PAM type: YTN; PAM sequence: TTG
gccacgctgaccttaagtga

SEQ ID NO: 91317 - DNA, 20 bp, Artificial Sequence
  Description of Artificial Sequence: Synthetic oligonucleotide
  Target: ATXN2; (+) strand; PAM type: YTN; PAM sequence: CTG
accttaagtgatctgcctga

SEQ ID NO: 91318 - DNA, 20 bp, Artificial Sequence
  Description of Artificial Sequence: Synthetic oligonucleotide
  Target: ATXN2; (+) strand; PAM type: YTN; PAM sequence: CTT
aagtgatctgcctgactcag

SEQ ID NO: 91319 - DNA, 20 bp, Artificial Sequence
  Description of Artificial Sequence: Synthetic oligonucleotide
  Target: ATXN2; (+) strand; PAM type: YTN; PAM sequence: TTA
agtgatctgcctgactcagc

SEQ ID NO: 91320 - DNA, 20 bp, Artificial Sequence
  Description of Artificial Sequence: Synthetic oligonucleotide
  Target: ATXN2; (+) strand; PAM type: YTN; PAM sequence: CTG
cctgactcagcctcccaaag

SEQ ID NO: 91321 - DNA, 20 bp, Artificial Sequence
  Description of Artificial Sequence: Synthetic oligonucleotide
  Target: ATXN2; (+) strand; PAM type: YTN; PAM sequence: CTG
actcagcctcccaaagtgct

SEQ ID NO: 91322 - DNA, 20 bp, Artificial Sequence
  Description of Artificial Sequence: Synthetic oligonucleotide
  Target: ATXN2; (+) strand; PAM type: YTN; PAM sequence: CTC
agcctcccaaagtgctggga

SEQ ID NO: 91323 - DNA, 20 bp, Artificial Sequence
  Description of Artificial Sequence: Synthetic oligonucleotide
  Target: ATXN2; (+) strand; PAM type: YTN; PAM sequence: CTC
ccaaagtgctgggattacag

SEQ ID NO: 91324 - DNA, 20 bp, Artificial Sequence
  Description of Artificial Sequence: Synthetic oligonucleotide
  Target: ATXN2; (+) strand; PAM type: YTN; PAM sequence: CTG
ggattacaggtatgagctac

SEQ ID NO: 91325 - DNA, 20 bp, Artificial Sequence
  Description of Artificial Sequence: Synthetic oligonucleotide
  Target: ATXN2; (+) strand; PAM type: YTN; PAM sequence: TTA
caggtatgagctaccacgcc

SEQ ID NO: 91326 - DNA, 20 bp, Artificial Sequence
  Description of Artificial Sequence: Synthetic oligonucleotide
  Target: ATXN2; (+) strand; PAM type: YTN; PAM sequence: CTA
ccacgcctggccaatcaaca

SEQ ID NO: 91327 - DNA, 20 bp, Artificial Sequence
  Description of Artificial Sequence: Synthetic oligonucleotide
  Target: ATXN2; (+) strand; PAM type: YTN; PAM sequence: CTG
gccaatcaacaaacacttga

SEQ ID NO: 91328 - DNA, 20 bp, Artificial Sequence
  Description of Artificial Sequence: Synthetic oligonucleotide
  Target: ATXN2; (+) strand; PAM type: YTN; PAM sequence: CTT
gagctgaaaagacagtagct

SEQ ID NO: 91329 - DNA, 20 bp, Artificial Sequence
  Description of Artificial Sequence: Synthetic oligonucleotide
  Target: ATXN2; (+) strand; PAM type: YTN; PAM sequence: TTG
agctgaaaagacagtagcta

SEQ ID NO: 91330 - DNA, 20 bp, Artificial Sequence
  Description of Artificial Sequence: Synthetic oligonucleotide
  Target: ATXN2; (+) strand; PAM type: YTN; PAM sequence: CTG
aaaagacagtagctacttat

SEQ ID NO: 91331 - DNA, 20 bp, Artificial Sequence
  Description of Artificial Sequence: Synthetic oligonucleotide
  Target: ATXN2; (+) strand; PAM type: YTN; PAM sequence: CTA
cttatgaaatatccttaaaa

SEQ ID NO: 91332 - DNA, 20 bp, Artificial Sequence
  Description of Artificial Sequence: Synthetic oligonucleotide
  Target: ATXN2; (+) strand; PAM type: YTN; PAM sequence: CTT
atgaaatatccttaaaagca

SEQ ID NO: 91333 - DNA, 20 bp, Artificial Sequence
  Description of Artificial Sequence: Synthetic oligonucleotide
  Target: ATXN2; (+) strand; PAM type: YTN; PAM sequence: TTA
tgaaatatccttaaaagcaa

SEQ ID NO: 91334 - DNA, 20 bp, Artificial Sequence
  Description of Artificial Sequence: Synthetic oligonucleotide
  Target: ATXN2; (+) strand; PAM type: YTN; PAM sequence: CTT
aaaagcaattcttaacataa

SEQ ID NO: 91335 - DNA, 20 bp, Artificial Sequence
  Description of Artificial Sequence: Synthetic oligonucleotide
  Target: ATXN2; (+) strand; PAM type: YTN; PAM sequence: TTA
aaagcaattcttaacataac

SEQ ID NO: 91336 - DNA, 20 bp, Artificial Sequence
  Description of Artificial Sequence: Synthetic oligonucleotide
  Target: ATXN2; (+) strand; PAM type: YTN; PAM sequence: TTC
ttaacataacagtatccttt

SEQ ID NO: 91337 - DNA, 20 bp, Artificial Sequence
  Description of Artificial Sequence: Synthetic oligonucleotide
  Target: ATXN2; (+) strand; PAM type: YTN; PAM sequence: CTT
aacataacagtatcctttta

SEQ ID NO: 91338 - DNA, 20 bp, Artificial Sequence
  Description of Artificial Sequence: Synthetic oligonucleotide
  Target: ATXN2; (+) strand; PAM type: YTN; PAM sequence: TTA
acataacagtatccttttat

SEQ ID NO: 91339 - DNA, 20 bp, Artificial Sequence
  Description of Artificial Sequence: Synthetic oligonucleotide
  Target: ATXN2; (+) strand; PAM type: YTN; PAM sequence: CTT
ttatttatttatttatttat

SEQ ID NO: 91340 - DNA, 20 bp, Artificial Sequence
  Description of Artificial Sequence: Synthetic oligonucleotide
  Target: ATXN2; (+) strand; PAM type: YTN; PAM sequence: TTT
tatttatttatttatttatt

SEQ ID NO: 91341 - DNA, 20 bp, Artificial Sequence
  Description of Artificial Sequence: Synthetic oligonucleotide
  Target: ATXN2; (+) strand; PAM type: YTN; PAM sequence: TTT
atttatttatttatttattt

SEQ ID NO: 91342 - DNA, 20 bp, Artificial Sequence
  Description of Artificial Sequence: Synthetic oligonucleotide
  Target: ATXN2; (+) strand; PAM type: YTN; PAM sequence: TTA
tttatttatttatttatttt

SEQ ID NO: 91343 - DNA, 20 bp, Artificial Sequence
  Description of Artificial Sequence: Synthetic oligonucleotide
  Target: ATXN2; (+) strand; PAM type: YTN; PAM sequence: TTT
atttatttatttatttttga

SEQ ID NO: 91344 - DNA, 20 bp, Artificial Sequence
  Description of Artificial Sequence: Synthetic oligonucleotide
  Target: ATXN2; (+) strand; PAM type: YTN; PAM sequence: TTA
tttatttatttatttttgag

SEQ ID NO: 91345 - DNA, 20 bp, Artificial Sequence
  Description of Artificial Sequence: Synthetic oligonucleotide
  Target: ATXN2; (+) strand; PAM type: YTN; PAM sequence: TTT
atttatttatttttgagaca

SEQ ID NO: 91346 - DNA, 20 bp, Artificial Sequence
  Description of Artificial Sequence: Synthetic oligonucleotide
  Target: ATXN2; (+) strand; PAM type: YTN; PAM sequence: TTA
tttatttatttttgagacag

SEQ ID NO: 91347 - DNA, 20 bp, Artificial Sequence
  Description of Artificial Sequence: Synthetic oligonucleotide
  Target: ATXN2; (+) strand; PAM type: YTN; PAM sequence: TTT
atttatttttgagacagagt

SEQ ID NO: 91348 - DNA, 20 bp, Artificial Sequence
  Description of Artificial Sequence: Synthetic oligonucleotide
  Target: ATXN2; (+) strand; PAM type: YTN; PAM sequence: TTA
tttatttttgagacagagtc

SEQ ID NO: 91349 - DNA, 20 bp, Artificial Sequence
  Description of Artificial Sequence: Synthetic oligonucleotide
  Target: ATXN2; (+) strand; PAM type: YTN; PAM sequence: TTT
atttttgagacagagtctcg

SEQ ID NO: 91350 - DNA, 20 bp, Artificial Sequence
  Description of Artificial Sequence: Synthetic oligonucleotide
  Target: ATXN2; (+) strand; PAM type: YTN; PAM sequence: TTA
tttttgagacagagtctcgc

SEQ ID NO: 91351 - DNA, 20 bp, Artificial Sequence
  Description of Artificial Sequence: Synthetic oligonucleotide
  Target: ATXN2; (+) strand; PAM type: YTN; PAM sequence: TTT
ttgagacagagtctcgctct

SEQ ID NO: 91352 - DNA, 20 bp, Artificial Sequence
  Description of Artificial Sequence: Synthetic oligonucleotide
  Target: ATXN2; (+) strand; PAM type: YTN; PAM sequence: TTT
tgagacagagtctcgctctg

SEQ ID NO: 91353 - DNA, 20 bp, Artificial Sequence
  Description of Artificial Sequence: Synthetic oligonucleotide
  Target: ATXN2; (+) strand; PAM type: YTN; PAM sequence: TTT
gagacagagtctcgctctgt

SEQ ID NO: 91354 - DNA, 20 bp, Artificial Sequence
  Description of Artificial Sequence: Synthetic oligonucleotide
  Target: ATXN2; (+) strand; PAM type: YTN; PAM sequence: TTG
agacagagtctcgctctgtc

SEQ ID NO: 91355 - DNA, 20 bp, Artificial Sequence
  Description of Artificial Sequence: Synthetic oligonucleotide
  Target: ATXN2; (+) strand; PAM type: YTN; PAM sequence: CTC
gctctgtcacccaggctgga

SEQ ID NO: 91356 - DNA, 20 bp, Artificial Sequence
  Description of Artificial Sequence: Synthetic oligonucleotide
  Target: ATXN2; (+) strand; PAM type: YTN; PAM sequence: CTC
tgtcacccaggctggagtgc

SEQ ID NO: 91357 - DNA, 20 bp, Artificial Sequence
  Description of Artificial Sequence: Synthetic oligonucleotide
  Target: ATXN2; (+) strand; PAM type: YTN; PAM sequence: CTG
tcacccaggctggagtgcag

SEQ ID NO: 91358 - DNA, 20 bp, Artificial Sequence
  Description of Artificial Sequence: Synthetic oligonucleotide
  Target: ATXN2; (+) strand; PAM type: YTN; PAM sequence: CTG
gagtgcagtggcatgatctc

SEQ ID NO: 91359 - DNA, 20 bp, Artificial Sequence
  Description of Artificial Sequence: Synthetic oligonucleotide
  Target: ATXN2; (+) strand; PAM type: YTN; PAM sequence: CTC
ggctcactgcagcctccacc

SEQ ID NO: 91360 - DNA, 20 bp, Artificial Sequence
  Description of Artificial Sequence: Synthetic oligonucleotide
  Target: ATXN2; (+) strand; PAM type: YTN; PAM sequence: CTC
actgcagcctccaccttctg

SEQ ID NO: 91361 - DNA, 20 bp, Artificial Sequence
  Description of Artificial Sequence: Synthetic oligonucleotide
  Target: ATXN2; (+) strand; PAM type: YTN; PAM sequence: CTG
cagcctccaccttctgggtt

SEQ ID NO: 91362 - DNA, 20 bp, Artificial Sequence
  Description of Artificial Sequence: Synthetic oligonucleotide
  Target: ATXN2; (+) strand; PAM type: YTN; PAM sequence: CTC
caccttctgggttcaagcaa

SEQ ID NO: 91363 - DNA, 20 bp, Artificial Sequence
  Description of Artificial Sequence: Synthetic oligonucleotide
  Target: ATXN2; (+) strand; PAM type: YTN; PAM sequence: CTT
ctgggttcaagcaattctcc

SEQ ID NO: 91364 - DNA, 20 bp, Artificial Sequence
  Description of Artificial Sequence: Synthetic oligonucleotide
  Target: ATXN2; (+) strand; PAM type: YTN; PAM sequence: TTC
tgggttcaagcaattctcct

SEQ ID NO: 91365 - DNA, 20 bp, Artificial Sequence
  Description of Artificial Sequence: Synthetic oligonucleotide
  Target: ATXN2; (+) strand; PAM type: YTN; PAM sequence: CTG
ggttcaagcaattctcctgc

SEQ ID NO: 91366 - DNA, 20 bp, Artificial Sequence
  Description of Artificial Sequence: Synthetic oligonucleotide
  Target: ATXN2; (+) strand; PAM type: YTN; PAM sequence: TTC
aagcaattctcctgcctcag

SEQ ID NO: 91367 - DNA, 20 bp, Artificial Sequence
  Description of Artificial Sequence: Synthetic oligonucleotide
  Target: ATXN2; (+) strand; PAM type: YTN; PAM sequence: TTC
tcctgcctcagcctcccgag

SEQ ID NO: 91368 - DNA, 20 bp, Artificial Sequence
  Description of Artificial Sequence: Synthetic oligonucleotide
  Target: ATXN2; (+) strand; PAM type: YTN; PAM sequence: CTC
ctgcctcagcctcccgagta

SEQ ID NO: 91369 - DNA, 20 bp, Artificial Sequence
  Description of Artificial Sequence: Synthetic oligonucleotide
  Target: ATXN2; (+) strand; PAM type: YTN; PAM sequence: CTG
cctcagcctcccgagtagct

SEQ ID NO: 91370 - DNA, 20 bp, Artificial Sequence
  Description of Artificial Sequence: Synthetic oligonucleotide
  Target: ATXN2; (+) strand; PAM type: YTN; PAM sequence: CTC
agcctcccgagtagctggga

SEQ ID NO: 91371 - DNA, 20 bp, Artificial Sequence
  Description of Artificial Sequence: Synthetic oligonucleotide
  Target: ATXN2; (+) strand; PAM type: YTN; PAM sequence: CTC
ccgagtagctgggatacagg

SEQ ID NO: 91372 - DNA, 20 bp, Artificial Sequence
  Description of Artificial Sequence: Synthetic oligonucleotide
  Target: ATXN2; (+) strand; PAM type: YTN; PAM sequence: CTG
ggatacaggcacctaccacc

SEQ ID NO: 91373 - DNA, 20 bp, Artificial Sequence
  Description of Artificial Sequence: Synthetic oligonucleotide
  Target: ATXN2; (+) strand; PAM type: YTN; PAM sequence: CTA
ccaccatgcctggctaattt

SEQ ID NO: 91374 - DNA, 20 bp, Artificial Sequence
  Description of Artificial Sequence: Synthetic oligonucleotide
  Target: ATXN2; (+) strand; PAM type: YTN; PAM sequence: CTG
gctaatttttgtatttttag

SEQ ID NO: 91375 - DNA, 20 bp, Artificial Sequence
  Description of Artificial Sequence: Synthetic oligonucleotide
  Target: ATXN2; (+) strand; PAM type: YTN; PAM sequence: CTA
atttttgtatttttagtaca

SEQ ID NO: 91376 - DNA, 20 bp, Artificial Sequence
  Description of Artificial Sequence: Synthetic oligonucleotide
  Target: ATXN2; (+) strand; PAM type: YTN; PAM sequence: TTT
ttgtatttttagtacagaca

SEQ ID NO: 91377 - DNA, 20 bp, Artificial Sequence
  Description of Artificial Sequence: Synthetic oligonucleotide
  Target: ATXN2; (+) strand; PAM type: YTN; PAM sequence: TTT
tgtatttttagtacagacag

SEQ ID NO: 91378 - DNA, 20 bp, Artificial Sequence
  Description of Artificial Sequence: Synthetic oligonucleotide
  Target: ATXN2; (+) strand; PAM type: YTN; PAM sequence: TTT
gtatttttagtacagacagg

SEQ ID NO: 91379 - DNA, 20 bp, Artificial Sequence
  Description of Artificial Sequence: Synthetic oligonucleotide
  Target: ATXN2; (+) strand; PAM type: YTN; PAM sequence: TTG
tatttttagtacagacaggg

SEQ ID NO: 91380 - DNA, 20 bp, Artificial Sequence
  Description of Artificial Sequence: Synthetic oligonucleotide
  Target: ATXN2; (+) strand; PAM type: YTN; PAM sequence: TTT
ttagtacagacagggtttca

SEQ ID NO: 91381 - DNA, 20 bp, Artificial Sequence
  Description of Artificial Sequence: Synthetic oligonucleotide
  Target: ATXN2; (+) strand; PAM type: YTN; PAM sequence: TTT
tagtacagacagggtttcac

SEQ ID NO: 91382 - DNA, 20 bp, Artificial Sequence
  Description of Artificial Sequence: Synthetic oligonucleotide
  Target: ATXN2; (+) strand; PAM type: YTN; PAM sequence: TTT
agtacagacagggtttcaca

SEQ ID NO: 91383 - DNA, 20 bp, Artificial Sequence
  Description of Artificial Sequence: Synthetic oligonucleotide
  Target: ATXN2; (+) strand; PAM type: YTN; PAM sequence: TTA
gtacagacagggtttcacat

SEQ ID NO: 91384 - DNA, 20 bp, Artificial Sequence
  Description of Artificial Sequence: Synthetic oligonucleotide
  Target: ATXN2; (+) strand; PAM type: YTN; PAM sequence: TTT
cacatgttggccaggctggt

SEQ ID NO: 91385 - DNA, 20 bp, Artificial Sequence
  Description of Artificial Sequence: Synthetic oligonucleotide
  Target: ATXN2; (+) strand; PAM type: YTN; PAM sequence: TTC
acatgttggccaggctggtc

SEQ ID NO: 91386 - DNA, 20 bp, Artificial Sequence
  Description of Artificial Sequence: Synthetic oligonucleotide
  Target: ATXN2; (+) strand; PAM type: YTN; PAM sequence: TTG
gccaggctggtcttcaactc

SEQ ID NO: 91387 - DNA, 20 bp, Artificial Sequence
  Description of Artificial Sequence: Synthetic oligonucleotide
  Target: ATXN2; (+) strand; PAM type: YTN; PAM sequence: CTG
gtcttcaactcctaacctca

SEQ ID NO: 91388 - DNA, 20 bp, Artificial Sequence
  Description of Artificial Sequence: Synthetic oligonucleotide
  Target: ATXN2; (+) strand; PAM type: YTN; PAM sequence: CTT
caactcctaacctcaagtaa

SEQ ID NO: 91389 - DNA, 20 bp, Artificial Sequence
  Description of Artificial Sequence: Synthetic oligonucleotide
  Target: ATXN2; (+) strand; PAM type: YTN; PAM sequence: TTC
aactcctaacctcaagtaat

SEQ ID NO: 91390 - DNA, 20 bp, Artificial Sequence
  Description of Artificial Sequence: Synthetic oligonucleotide
  Target: ATXN2; (+) strand; PAM type: YTN; PAM sequence: CTC
ctaacctcaagtaatctacc

SEQ ID NO: 91391 - DNA, 20 bp, Artificial Sequence
  Description of Artificial Sequence: Synthetic oligonucleotide
  Target: ATXN2; (+) strand; PAM type: YTN; PAM sequence: CTA
acctcaagtaatctacctgc

SEQ ID NO: 91392 - DNA, 20 bp, Artificial Sequence
  Description of Artificial Sequence: Synthetic oligonucleotide
  Target: ATXN2; (+) strand; PAM type: YTN; PAM sequence: CTC
aagtaatctacctgcttgga

SEQ ID NO: 91393 - DNA, 20 bp, Artificial Sequence
  Description of Artificial Sequence: Synthetic oligonucleotide
  Target: ATXN2; (+) strand; PAM type: YTN; PAM sequence: CTA
cctgcttggacctcccagag

SEQ ID NO: 91394 - DNA, 20 bp, Artificial Sequence
  Description of Artificial Sequence: Synthetic oligonucleotide
  Target: ATXN2; (+) strand; PAM type: YTN; PAM sequence: CTG
cttggacctcccagagtgct

SEQ ID NO: 91395 - DNA, 20 bp, Artificial Sequence
  Description of Artificial Sequence: Synthetic oligonucleotide
  Target: ATXN2; (+) strand; PAM type: YTN; PAM sequence: CTT
ggacctcccagagtgctggg

SEQ ID NO: 91396 - DNA, 20 bp, Artificial Sequence
  Description of Artificial Sequence: Synthetic oligonucleotide
  Target: ATXN2; (+) strand; PAM type: YTN; PAM sequence: TTG
gacctcccagagtgctggga

SEQ ID NO: 91397 - DNA, 20 bp, Artificial Sequence
  Description of Artificial Sequence: Synthetic oligonucleotide
  Target: ATXN2; (+) strand; PAM type: YTN; PAM sequence: CTC
ccagagtgctgggattatag

SEQ ID NO: 91398 - DNA, 20 bp, Artificial Sequence
  Description of Artificial Sequence: Synthetic oligonucleotide
  Target: ATXN2; (+) strand; PAM type: YTN; PAM sequence: CTG
ggattataggtatgagctac

SEQ ID NO: 91399 - DNA, 20 bp, Artificial Sequence
  Description of Artificial Sequence: Synthetic oligonucleotide
  Target: ATXN2; (+) strand; PAM type: YTN; PAM sequence: TTA
taggtatgagctaccagtca

SEQ ID NO: 91400 - DNA, 20 bp, Artificial Sequence
  Description of Artificial Sequence: Synthetic oligonucleotide
  Target: ATXN2; (+) strand; PAM type: YTN; PAM sequence: CTA
ccagtcaacataccaatatt

SEQ ID NO: 91401 - DNA, 20 bp, Artificial Sequence
  Description of Artificial Sequence: Synthetic oligonucleotide
  Target: ATXN2; (+) strand; PAM type: YTN; PAM sequence: TTC
tagcatgcagtaattcttat

SEQ ID NO: 91402 - DNA, 20 bp, Artificial Sequence
  Description of Artificial Sequence: Synthetic oligonucleotide
  Target: ATXN2; (+) strand; PAM type: YTN; PAM sequence: CTA
gcatgcagtaattcttatgt

SEQ ID NO: 91403 - DNA, 20 bp, Artificial Sequence
  Description of Artificial Sequence: Synthetic oligonucleotide
  Target: ATXN2; (+) strand; PAM type: YTN; PAM sequence: TTC
ttatgtgagaagatatttta

SEQ ID NO: 91404 - DNA, 20 bp, Artificial Sequence
  Description of Artificial Sequence: Synthetic oligonucleotide
  Target: ATXN2; (+) strand; PAM type: YTN; PAM sequence: CTT
atgtgagaagatattttaca

SEQ ID NO: 91405 - DNA, 20 bp, Artificial Sequence
  Description of Artificial Sequence: Synthetic oligonucleotide
  Target: ATXN2; (+) strand; PAM type: YTN; PAM sequence: TTA
tgtgagaagatattttacat

SEQ ID NO: 91406 - DNA, 20 bp, Artificial Sequence
  Description of Artificial Sequence: Synthetic oligonucleotide
  Target: ATXN2; (+) strand; PAM type: YTN; PAM sequence: TTT
tacatgacatacctggaaaa

SEQ ID NO: 91407 - DNA, 20 bp, Artificial Sequence
  Description of Artificial Sequence: Synthetic oligonucleotide
  Target: ATXN2; (+) strand; PAM type: YTN; PAM sequence: TTT
acatgacatacctggaaaaa

SEQ ID NO: 91408 - DNA, 20 bp, Artificial Sequence
  Description of Artificial Sequence: Synthetic oligonucleotide
  Target: ATXN2; (+) strand; PAM type: YTN; PAM sequence: TTA
catgacatacctggaaaaag

SEQ ID NO: 91409 - DNA, 20 bp, Artificial Sequence
  Description of Artificial Sequence: Synthetic oligonucleotide
  Target: ATXN2; (+) strand; PAM type: YTN; PAM sequence: CTG
gaaaaagtcatggctgtaaa

SEQ ID NO: 91410 - DNA, 20 bp, Artificial Sequence
  Description of Artificial Sequence: Synthetic oligonucleotide
  Target: ATXN2; (+) strand; PAM type: YTN; PAM sequence: CTG
taaaaaaaaattgcctcaaa

SEQ ID NO: 91411 - DNA, 20 bp, Artificial Sequence
  Description of Artificial Sequence: Synthetic oligonucleotide
  Target: ATXN2; (+) strand; PAM type: YTN; PAM sequence: TTG
cctcaaatcaagaataagca

SEQ ID NO: 91412 - DNA, 20 bp, Artificial Sequence
  Description of Artificial Sequence: Synthetic oligonucleotide
  Target: ATXN2; (+) strand; PAM type: YTN; PAM sequence: CTC
aaatcaagaataagcagtcc

SEQ ID NO: 91413 - DNA, 20 bp, Artificial Sequence
  Description of Artificial Sequence: Synthetic oligonucleotide
  Target: ATXN2; (+) strand; PAM type: YTN; PAM sequence: TTT
atcaataagctgcattccaa

SEQ ID NO: 91414 - DNA, 20 bp, Artificial Sequence
  Description of Artificial Sequence: Synthetic oligonucleotide
  Target: ATXN2; (+) strand; PAM type: YTN; PAM sequence: TTA
tcaataagctgcattccaaa

SEQ ID NO: 91415 - DNA, 20 bp, Artificial Sequence
  Description of Artificial Sequence: Synthetic oligonucleotide
  Target: ATXN2; (+) strand; PAM type: YTN; PAM sequence: CTG
cattccaaaacttcagcttt

SEQ ID NO: 91416 - DNA, 20 bp, Artificial Sequence
  Description of Artificial Sequence: Synthetic oligonucleotide
  Target: ATXN2; (+) strand; PAM type: YTN; PAM sequence: TTC
caaaacttcagctttaactg

SEQ ID NO: 91417 - DNA, 20 bp, Artificial Sequence
  Description of Artificial Sequence: Synthetic oligonucleotide
  Target: ATXN2; (+) strand; PAM type: YTN; PAM sequence: CTT
cagctttaactggattgttt

SEQ ID NO: 91418 - DNA, 20 bp, Artificial Sequence
  Description of Artificial Sequence: Synthetic oligonucleotide
  Target: ATXN2; (+) strand; PAM type: YTN; PAM sequence: TTC
agctttaactggattgtttg

SEQ ID NO: 91419 - DNA, 20 bp, Artificial Sequence
  Description of Artificial Sequence: Synthetic oligonucleotide
  Target: ATXN2; (+) strand; PAM type: YTN; PAM sequence: CTT
taactggattgtttggtacc

SEQ ID NO: 91420 - DNA, 20 bp, Artificial Sequence
  Description of Artificial Sequence: Synthetic oligonucleotide
  Target: ATXN2; (+) strand; PAM type: YTN; PAM sequence: TTT
aactggattgtttggtaccc

SEQ ID NO: 91421 - DNA, 20 bp, Artificial Sequence
  Description of Artificial Sequence: Synthetic oligonucleotide
  Target: ATXN2; (+) strand; PAM type: YTN; PAM sequence: TTA
actggattgtttggtaccca

SEQ ID NO: 91422 - DNA, 20 bp, Artificial Sequence
  Description of Artificial Sequence: Synthetic oligonucleotide
  Target: ATXN2; (+) strand; PAM type: YTN; PAM sequence: CTG
gattgtttggtacccaaaca

SEQ ID NO: 91423 - DNA, 20 bp, Artificial Sequence
  Description of Artificial Sequence: Synthetic oligonucleotide
  Target: ATXN2; (+) strand; PAM type: YTN; PAM sequence: TTG
tttggtacccaaacacctaa

SEQ ID NO: 91424 - DNA, 20 bp, Artificial Sequence
  Description of Artificial Sequence: Synthetic oligonucleotide
  Target: ATXN2; (+) strand; PAM type: YTN; PAM sequence: TTT
ggtacccaaacacctaagtc

SEQ ID NO: 91425 - DNA, 20 bp, Artificial Sequence
  Description of Artificial Sequence: Synthetic oligonucleotide
  Target: ATXN2; (+) strand; PAM type: YTN; PAM sequence: TTG
gtacccaaacacctaagtca

SEQ ID NO: 91426 - DNA, 20 bp, Artificial Sequence
  Description of Artificial Sequence: Synthetic oligonucleotide
  Target: ATXN2; (+) strand; PAM type: YTN; PAM sequence: CTA
agtcaatggtagttaagttc

SEQ ID NO: 91427 - DNA, 20 bp, Artificial Sequence
  Description of Artificial Sequence: Synthetic oligonucleotide
  Target: ATXN2; (+) strand; PAM type: YTN; PAM sequence: TTA
agttctgaggttagccccta

SEQ ID NO: 91428 - DNA, 20 bp, Artificial Sequence
  Description of Artificial Sequence: Synthetic oligonucleotide
  Target: ATXN2; (+) strand; PAM type: YTN; PAM sequence: TTC
tgaggttagcccctaaaagt

SEQ ID NO: 91429 - DNA, 20 bp, Artificial Sequence
  Description of Artificial Sequence: Synthetic oligonucleotide
  Target: ATXN2; (+) strand; PAM type: YTN; PAM sequence: CTG
aggttagcccctaaaagtcc

SEQ ID NO: 91430 - DNA, 20 bp, Artificial Sequence
  Description of Artificial Sequence: Synthetic oligonucleotide
  Target: ATXN2; (+) strand; PAM type: YTN; PAM sequence: TTA
gcccctaaaagtccatttaa

SEQ ID NO: 91431 - DNA, 20 bp, Artificial Sequence
  Description of Artificial Sequence: Synthetic oligonucleotide
  Target: ATXN2; (+) strand; PAM type: YTN; PAM sequence: CTA
aaagtccatttaattaatat

SEQ ID NO: 91432 - DNA, 20 bp, Artificial Sequence
  Description of Artificial Sequence: Synthetic oligonucleotide
  Target: ATXN2; (+) strand; PAM type: YTN; PAM sequence: TTT
aattaatatactgaatgtgc

SEQ ID NO: 91433 - DNA, 20 bp, Artificial Sequence
  Description of Artificial Sequence: Synthetic oligonucleotide
  Target: ATXN2; (+) strand; PAM type: YTN; PAM sequence: TTA
attaatatactgaatgtgca

SEQ ID NO: 91434 - DNA, 20 bp, Artificial Sequence
  Description of Artificial Sequence: Synthetic oligonucleotide
  Target: ATXN2; (+) strand; PAM type: YTN; PAM sequence: TTA
atatactgaatgtgcagaat

SEQ ID NO: 91435 - DNA, 20 bp, Artificial Sequence
  Description of Artificial Sequence: Synthetic oligonucleotide
  Target: ATXN2; (+) strand; PAM type: YTN; PAM sequence: CTG
aatgtgcagaattaagtcta

SEQ ID NO: 91436 - DNA, 20 bp, Artificial Sequence
  Description of Artificial Sequence: Synthetic oligonucleotide
  Target: ATXN2; (+) strand; PAM type: YTN; PAM sequence: TTA
agtctatcttaacaaatcta

SEQ ID NO: 91437 - DNA, 20 bp, Artificial Sequence
  Description of Artificial Sequence: Synthetic oligonucleotide
  Target: ATXN2; (+) strand; PAM type: YTN; PAM sequence: CTA
tcttaacaaatctaaacatt

SEQ ID NO: 91438 - DNA, 20 bp, Artificial Sequence
  Description of Artificial Sequence: Synthetic oligonucleotide
  Target: ATXN2; (+) strand; PAM type: YTN; PAM sequence: CTT
aacaaatctaaacattaact

SEQ ID NO: 91439 - DNA, 20 bp, Artificial Sequence
  Description of Artificial Sequence: Synthetic oligonucleotide
  Target: ATXN2; (+) strand; PAM type: YTN; PAM sequence: TTA
acaaatctaaacattaacta

SEQ ID NO: 91440 - DNA, 20 bp, Artificial Sequence
  Description of Artificial Sequence: Synthetic oligonucleotide
  Target: ATXN2; (+) strand; PAM type: YTN; PAM sequence: CTA
aacattaactaaaacacagt

SEQ ID NO: 91441 - DNA, 20 bp, Artificial Sequence
  Description of Artificial Sequence: Synthetic oligonucleotide
  Target: ATXN2; (+) strand; PAM type: YTN; PAM sequence: TTA
actaaaacacagtttctgat

SEQ ID NO: 91442 - DNA, 20 bp, Artificial Sequence
  Description of Artificial Sequence: Synthetic oligonucleotide
  Target: ATXN2; (+) strand; PAM type: YTN; PAM sequence: CTA
aaacacagtttctgatgaaa

SEQ ID NO: 91443 - DNA, 20 bp, Artificial Sequence
  Description of Artificial Sequence: Synthetic oligonucleotide
  Target: ATXN2; (+) strand; PAM type: YTN; PAM sequence: TTT
ctgatgaaaaatattttgaa

SEQ ID NO: 91444 - DNA, 20 bp, Artificial Sequence
  Description of Artificial Sequence: Synthetic oligonucleotide
  Target: ATXN2; (+) strand; PAM type: YTN; PAM sequence: TTC
tgatgaaaaatattttgaat

SEQ ID NO: 91445 - DNA, 20 bp, Artificial Sequence
  Description of Artificial Sequence: Synthetic oligonucleotide
  Target: ATXN2; (+) strand; PAM type: YTN; PAM sequence: CTG
atgaaaaatattttgaattc

SEQ ID NO: 91446 - DNA, 20 bp, Artificial Sequence
  Description of Artificial Sequence: Synthetic oligonucleotide
  Target: ATXN2; (+) strand; PAM type: YTN; PAM sequence: TTT
tgaattccaagtagaagcac

SEQ ID NO: 91447 - DNA, 20 bp, Artificial Sequence
  Description of Artificial Sequence: Synthetic oligonucleotide
  Target: ATXN2; (+) strand; PAM type: YTN; PAM sequence: TTT
gaattccaagtagaagcacc

SEQ ID NO: 91448 - DNA, 20 bp, Artificial Sequence
  Description of Artificial Sequence: Synthetic oligonucleotide
  Target: ATXN2; (+) strand; PAM type: YTN; PAM sequence: TTG
aattccaagtagaagcaccg

SEQ ID NO: 91449 - DNA, 20 bp, Artificial Sequence
  Description of Artificial Sequence: Synthetic oligonucleotide
  Target: ATXN2; (+) strand; PAM type: YTN; PAM sequence: TTC
caagtagaagcaccgcatgc

SEQ ID NO: 91450 - DNA, 20 bp, Artificial Sequence
  Description of Artificial Sequence: Synthetic oligonucleotide
  Target: ATXN2; (+) strand; PAM type: YTN; PAM sequence: CTT
ctctccttgacagtggcagt

SEQ ID NO: 91451 - DNA, 20 bp, Artificial Sequence
  Description of Artificial Sequence: Synthetic oligonucleotide
  Target: ATXN2; (+) strand; PAM type: YTN; PAM sequence: TTC
tctccttgacagtggcagtt

SEQ ID NO: 91452 - DNA, 20 bp, Artificial Sequence
  Description of Artificial Sequence: Synthetic oligonucleotide
  Target: ATXN2; (+) strand; PAM type: YTN; PAM sequence: CTC
tccttgacagtggcagtttt

SEQ ID NO: 91453 - DNA, 20 bp, Artificial Sequence
  Description of Artificial Sequence: Synthetic oligonucleotide
  Target: ATXN2; (+) strand; PAM type: YTN; PAM sequence: CTC
cttgacagtggcagtttttc

SEQ ID NO: 91454 - DNA, 20 bp, Artificial Sequence
  Description of Artificial Sequence: Synthetic oligonucleotide
  Target: ATXN2; (+) strand; PAM type: YTN; PAM sequence: CTT
gacagtggcagtttttcaac

SEQ ID NO: 91455 - DNA, 20 bp, Artificial Sequence
  Description of Artificial Sequence: Synthetic oligonucleotide
  Target: ATXN2; (+) strand; PAM type: YTN; PAM sequence: TTG
acagtggcagtttttcaacc

SEQ ID NO: 91456 - DNA, 20 bp, Artificial Sequence
  Description of Artificial Sequence: Synthetic oligonucleotide
  Target: ATXN2; (+) strand; PAM type: YTN; PAM sequence: TTT
ttcaacctagcagcacagtg

SEQ ID NO: 91457 - DNA, 20 bp, Artificial Sequence
  Description of Artificial Sequence: Synthetic oligonucleotide
  Target: ATXN2; (+) strand; PAM type: YTN; PAM sequence: TTT
tcaacctagcagcacagtga

SEQ ID NO: 91458 - DNA, 20 bp, Artificial Sequence
  Description of Artificial Sequence: Synthetic oligonucleotide
  Target: ATXN2; (+) strand; PAM type: YTN; PAM sequence: TTT
caacctagcagcacagtgag

SEQ ID NO: 91459 - DNA, 20 bp, Artificial Sequence
  Description of Artificial Sequence: Synthetic oligonucleotide
  Target: ATXN2; (+) strand; PAM type: YTN; PAM sequence: TTC
aacctagcagcacagtgagg

SEQ ID NO: 91460 - DNA, 20 bp, Artificial Sequence
  Description of Artificial Sequence: Synthetic oligonucleotide
  Target: ATXN2; (+) strand; PAM type: YTN; PAM sequence: CTA
gcagcacagtgagggtgact

SEQ ID NO: 91461 - DNA, 20 bp, Artificial Sequence
  Description of Artificial Sequence: Synthetic oligonucleotide
  Target: ATXN2; (+) strand; PAM type: YTN; PAM sequence: CTA
atgagtggaatccagtaaag

SEQ ID NO: 91462 - DNA, 20 bp, Artificial Sequence
  Description of Artificial Sequence: Synthetic oligonucleotide
  Target: ATXN2; (+) strand; PAM type: YTN; PAM sequence: CTG
aattgataatttttcaactc

SEQ ID NO: 91463 - DNA, 20 bp, Artificial Sequence
  Description of Artificial Sequence: Synthetic oligonucleotide
  Target: ATXN2; (+) strand; PAM type: YTN; PAM sequence: TTG
ataatttttcaactcctgtt

SEQ ID NO: 91464 - DNA, 20 bp, Artificial Sequence
  Description of Artificial Sequence: Synthetic oligonucleotide
  Target: ATXN2; (+) strand; PAM type: YTN; PAM sequence: TTT
ttcaactcctgttcatttac

SEQ ID NO: 91465 - DNA, 20 bp, Artificial Sequence
  Description of Artificial Sequence: Synthetic oligonucleotide
  Target: ATXN2; (+) strand; PAM type: YTN; PAM sequence: TTT
tcaactcctgttcatttaca

SEQ ID NO: 91466 - DNA, 20 bp, Artificial Sequence
  Description of Artificial Sequence: Synthetic oligonucleotide
  Target: ATXN2; (+) strand; PAM type: YTN; PAM sequence: TTT
caactcctgttcatttacag

SEQ ID NO: 91467 - DNA, 20 bp, Artificial Sequence
  Description of Artificial Sequence: Synthetic oligonucleotide
  Target: ATXN2; (+) strand; PAM type: YTN; PAM sequence: TTC
aactcctgttcatttacaga

SEQ ID NO: 91468 - DNA, 20 bp, Artificial Sequence
  Description of Artificial Sequence: Synthetic oligonucleotide
  Target: ATXN2; (+) strand; PAM type: YTN; PAM sequence: CTC
ctgttcatttacagaaaaac

SEQ ID NO: 91469 - DNA, 20 bp, Artificial Sequence
  Description of Artificial Sequence: Synthetic oligonucleotide
  Target: ATXN2; (+) strand; PAM type: YTN; PAM sequence: CTG
ttcatttacagaaaaacttt

SEQ ID NO: 91470 - DNA, 20 bp, Artificial Sequence
  Description of Artificial Sequence: Synthetic oligonucleotide
  Target: ATXN2; (+) strand; PAM type: YTN; PAM sequence: TTC
atttacagaaaaacttttct

SEQ ID NO: 91471 - DNA, 20 bp, Artificial Sequence
  Description of Artificial Sequence: Synthetic oligonucleotide
  Target: ATXN2; (+) strand; PAM type: YTN; PAM sequence: TTT
acagaaaaacttttcttaat

SEQ ID NO: 91472 - DNA, 20 bp, Artificial Sequence
  Description of Artificial Sequence: Synthetic oligonucleotide
  Target: ATXN2; (+) strand; PAM type: YTN; PAM sequence: TTA
cagaaaaacttttcttaatt

SEQ ID NO: 91473 - DNA, 20 bp, Artificial Sequence
  Description of Artificial Sequence: Synthetic oligonucleotide
  Target: ATXN2; (+) strand; PAM type: YTN; PAM sequence: CTT
ttcttaatttatgccttgtt

SEQ ID NO: 91474 - DNA, 20 bp, Artificial Sequence
  Description of Artificial Sequence: Synthetic oligonucleotide
  Target: ATXN2; (+) strand; PAM type: YTN; PAM sequence: TTT
tcttaatttatgccttgttt

SEQ ID NO: 91475 - DNA, 20 bp, Artificial Sequence
  Description of Artificial Sequence: Synthetic oligonucleotide
  Target: ATXN2; (+) strand; PAM type: YTN; PAM sequence: TTT
cttaatttatgccttgtttt

SEQ ID NO: 91476 - DNA, 20 bp, Artificial Sequence
  Description of Artificial Sequence: Synthetic oligonucleotide
  Target: ATXN2; (+) strand; PAM type: YTN; PAM sequence: TTC
ttaatttatgccttgttttt

SEQ ID NO: 91477 - DNA, 20 bp, Artificial Sequence
  Description of Artificial Sequence: Synthetic oligonucleotide
  Target: ATXN2; (+) strand; PAM type: YTN; PAM sequence: CTT
aatttatgccttgtttttct

SEQ ID NO: 91478 - DNA, 20 bp, Artificial Sequence
  Description of Artificial Sequence: Synthetic oligonucleotide
  Target: ATXN2; (+) strand; PAM type: YTN; PAM sequence: TTA
atttatgccttgtttttcta

SEQ ID NO: 91479 - DNA, 20 bp, Artificial Sequence
  Description of Artificial Sequence: Synthetic oligonucleotide
  Target: ATXN2; (+) strand; PAM type: YTN; PAM sequence: TTT
atgccttgtttttctagccc

SEQ ID NO: 91480 - DNA, 20 bp, Artificial Sequence
  Description of Artificial Sequence: Synthetic oligonucleotide
  Target: ATXN2; (+) strand; PAM type: YTN; PAM sequence: TTA
tgccttgtttttctagccct

SEQ ID NO: 91481 - DNA, 20 bp, Artificial Sequence
  Description of Artificial Sequence: Synthetic oligonucleotide
  Target: ATXN2; (+) strand; PAM type: YTN; PAM sequence: CTT
gtttttctagccctggggta

SEQ ID NO: 91482 - DNA, 20 bp, Artificial Sequence
  Description of Artificial Sequence: Synthetic oligonucleotide
  Target: ATXN2; (+) strand; PAM type: YTN; PAM sequence: TTG
tttttctagccctggggtac

SEQ ID NO: 91483 - DNA, 20 bp, Artificial Sequence
  Description of Artificial Sequence: Synthetic oligonucleotide
  Target: ATXN2; (+) strand; PAM type: YTN; PAM sequence: TTT
ttctagccctggggtacaaa

SEQ ID NO: 91484 - DNA, 20 bp, Artificial Sequence
  Description of Artificial Sequence: Synthetic oligonucleotide
  Target: ATXN2; (+) strand; PAM type: YTN; PAM sequence: TTT
tctagccctggggtacaaaa

SEQ ID NO: 91485 - DNA, 20 bp, Artificial Sequence
  Description of Artificial Sequence: Synthetic oligonucleotide
  Target: ATXN2; (+) strand; PAM type: YTN; PAM sequence: TTT
ctagccctggggtacaaaaa

SEQ ID NO: 91486 - DNA, 20 bp, Artificial Sequence
  Description of Artificial Sequence: Synthetic oligonucleotide
  Target: ATXN2; (+) strand; PAM type: YTN; PAM sequence: TTC
tagccctggggtacaaaaaa

SEQ ID NO: 91487 - DNA, 20 bp, Artificial Sequence
  Description of Artificial Sequence: Synthetic oligonucleotide
  Target: ATXN2; (+) strand; PAM type: YTN; PAM sequence: CTA
gccctggggtacaaaaaagg

SEQ ID NO: 91488 - DNA, 20 bp, Artificial Sequence
  Description of Artificial Sequence: Synthetic oligonucleotide
  Target: ATXN2; (+) strand; PAM type: YTN; PAM sequence: CTG
gggtacaaaaaaggggaaga

SEQ ID NO: 91489 - DNA, 20 bp, Artificial Sequence
  Description of Artificial Sequence: Synthetic oligonucleotide
  Target: ATXN2; (+) strand; PAM type: YTN; PAM sequence: CTC
atttacttaagatgtcattt

SEQ ID NO: 91490 - DNA, 20 bp, Artificial Sequence
  Description of Artificial Sequence: Synthetic oligonucleotide
  Target: ATXN2; (+) strand; PAM type: YTN; PAM sequence: TTT
acttaagatgtcatttgttt

SEQ ID NO: 91491 - DNA, 20 bp, Artificial Sequence
  Description of Artificial Sequence: Synthetic oligonucleotide
  Target: ATXN2; (+) strand; PAM type: YTN; PAM sequence: TTA
cttaagatgtcatttgtttg

SEQ ID NO: 91492 - DNA, 20 bp, Artificial Sequence
  Description of Artificial Sequence: Synthetic oligonucleotide
  Target: ATXN2; (+) strand; PAM type: YTN; PAM sequence: CTT
aagatgtcatttgtttggac

SEQ ID NO: 91493 - DNA, 20 bp, Artificial Sequence
  Description of Artificial Sequence: Synthetic oligonucleotide
  Target: ATXN2; (+) strand; PAM type: YTN; PAM sequence: TTA
agatgtcatttgtttggact

SEQ ID NO: 91494 - DNA, 20 bp, Artificial Sequence
  Description of Artificial Sequence: Synthetic oligonucleotide
  Target: ATXN2; (+) strand; PAM type: YTN; PAM sequence: TTT
gtttggactagctgtttgta

SEQ ID NO: 91495 - DNA, 20 bp, Artificial Sequence
  Description of Artificial Sequence: Synthetic oligonucleotide
  Target: ATXN2; (+) strand; PAM type: YTN; PAM sequence: TTG
tttggactagctgtttgtaa

SEQ ID NO: 91496 - DNA, 20 bp, Artificial Sequence
  Description of Artificial Sequence: Synthetic oligonucleotide
  Target: ATXN2; (+) strand; PAM type: YTN; PAM sequence: TTT
ggactagctgtttgtaaact

SEQ ID NO: 91497 - DNA, 20 bp, Artificial Sequence
  Description of Artificial Sequence: Synthetic oligonucleotide
  Target: ATXN2; (+) strand; PAM type: YTN; PAM sequence: TTG
gactagctgtttgtaaacta

SEQ ID NO: 91498 - DNA, 20 bp, Artificial Sequence
  Description of Artificial Sequence: Synthetic oligonucleotide
  Target: ATXN2; (+) strand; PAM type: YTN; PAM sequence: CTA
gctgtttgtaaactaagggc

SEQ ID NO: 91499 - DNA, 20 bp, Artificial Sequence
  Description of Artificial Sequence: Synthetic oligonucleotide
  Target: ATXN2; (+) strand; PAM type: YTN; PAM sequence: CTG
tttgtaaactaagggcaatg

SEQ ID NO: 91500 - DNA, 20 bp, Artificial Sequence
  Description of Artificial Sequence: Synthetic oligonucleotide
  Target: ATXN2; (+) strand; PAM type: YTN; PAM sequence: TTT
gtaaactaagggcaatgtat

SEQ ID NO: 91501 - DNA, 20 bp, Artificial Sequence
  Description of Artificial Sequence: Synthetic oligonucleotide
  Target: ATXN2; (+) strand; PAM type: YTN; PAM sequence: TTG
taaactaagggcaatgtata

SEQ ID NO: 91502 - DNA, 20 bp, Artificial Sequence
  Description of Artificial Sequence: Synthetic oligonucleotide
  Target: ATXN2; (+) strand; PAM type: YTN; PAM sequence: CTA
agggcaatgtataaagtagt

SEQ ID NO: 91503 - DNA, 20 bp, Artificial Sequence
  Description of Artificial Sequence: Synthetic oligonucleotide
  Target: ATXN2; (+) strand; PAM type: YTN; PAM sequence: CTA
aaagtccagatggattcttc

SEQ ID NO: 91504 - DNA, 20 bp, Artificial Sequence
  Description of Artificial Sequence: Synthetic oligonucleotide
  Target: ATXN2; (+) strand; PAM type: YTN; PAM sequence: TTC
ttcacagttggaaggaccta

SEQ ID NO: 91505 - DNA, 20 bp, Artificial Sequence
  Description of Artificial Sequence: Synthetic oligonucleotide
  Target: ATXN2; (+) strand; PAM type: YTN; PAM sequence: CTT
cacagttggaaggacctaaa

SEQ ID NO: 91506 - DNA, 20 bp, Artificial Sequence
  Description of Artificial Sequence: Synthetic oligonucleotide
  Target: ATXN2; (+) strand; PAM type: YTN; PAM sequence: TTC
acagttggaaggacctaaat

SEQ ID NO: 91507 - DNA, 20 bp, Artificial Sequence
  Description of Artificial Sequence: Synthetic oligonucleotide
  Target: ATXN2; (+) strand; PAM type: YTN; PAM sequence: TTG
gaaggacctaaatgccttta

SEQ ID NO: 91508 - DNA, 20 bp, Artificial Sequence
  Description of Artificial Sequence: Synthetic oligonucleotide
  Target: ATXN2; (+) strand; PAM type: YTN; PAM sequence: CTA
aatgcctttaaaaaaaaaaa

SEQ ID NO: 91509 - DNA, 20 bp, Artificial Sequence
  Description of Artificial Sequence: Synthetic oligonucleotide
  Target: ATXN2; (+) strand; PAM type: YTN; PAM sequence: CTT
taaaaaaaaaaaagttaatt

SEQ ID NO: 91510 - DNA, 20 bp, Artificial Sequence
  Description of Artificial Sequence: Synthetic oligonucleotide
  Target: ATXN2; (+) strand; PAM type: YTN; PAM sequence: TTT
aaaaaaaaaaaagttaattg

SEQ ID NO: 91511 - DNA, 20 bp, Artificial Sequence
  Description of Artificial Sequence: Synthetic oligonucleotide
  Target: ATXN2; (+) strand; PAM type: YTN; PAM sequence: TTA
aaaaaaaaaaagttaattga

SEQ ID NO: 91512 - DNA, 20 bp, Artificial Sequence
  Description of Artificial Sequence: Synthetic oligonucleotide
  Target: ATXN2; (+) strand; PAM type: YTN; PAM sequence: TTA
attgagtaacaggatggtct

SEQ ID NO: 91513 - DNA, 20 bp, Artificial Sequence
  Description of Artificial Sequence: Synthetic oligonucleotide
  Target: ATXN2; (+) strand; PAM type: YTN; PAM sequence: TTG
agtaacaggatggtctaagt

SEQ ID NO: 91514 - DNA, 20 bp, Artificial Sequence
  Description of Artificial Sequence: Synthetic oligonucleotide
  Target: ATXN2; (+) strand; PAM type: YTN; PAM sequence: CTA
agttccaggtttactcactc

SEQ ID NO: 91515 - DNA, 20 bp, Artificial Sequence
  Description of Artificial Sequence: Synthetic oligonucleotide
  Target: ATXN2; (+) strand; PAM type: YTN; PAM sequence: TTC
caggtttactcactcagctg

SEQ ID NO: 91516 - DNA, 20 bp, Artificial Sequence
  Description of Artificial Sequence: Synthetic oligonucleotide
  Target: ATXN2; (+) strand; PAM type: YTN; PAM sequence: TTT
actcactcagctgcgtcttt

SEQ ID NO: 91517 - DNA, 20 bp, Artificial Sequence
  Description of Artificial Sequence: Synthetic oligonucleotide
  Target: ATXN2; (+) strand; PAM type: YTN; PAM sequence: TTA
ctcactcagctgcgtctttc

SEQ ID NO: 91518 - DNA, 20 bp, Artificial Sequence
  Description of Artificial Sequence: Synthetic oligonucleotide
  Target: ATXN2; (+) strand; PAM type: YTN; PAM sequence: CTC
actcagctgcgtctttcttc

SEQ ID NO: 91519 - DNA, 20 bp, Artificial Sequence
  Description of Artificial Sequence: Synthetic oligonucleotide
  Target: ATXN2; (+) strand; PAM type: YTN; PAM sequence: CTC
agctgcgtctttcttctctt

SEQ ID NO: 91520 - DNA, 20 bp, Artificial Sequence
  Description of Artificial Sequence: Synthetic oligonucleotide
  Target: ATXN2; (+) strand; PAM type: YTN; PAM sequence: CTG
cgtctttcttctcttcctta

SEQ ID NO: 91521 - DNA, 20 bp, Artificial Sequence
  Description of Artificial Sequence: Synthetic oligonucleotide
  Target: ATXN2; (+) strand; PAM type: YTN; PAM sequence: CTT
tcttctcttccttatcgtct

SEQ ID NO: 91522 - DNA, 20 bp, Artificial Sequence
  Description of Artificial Sequence: Synthetic oligonucleotide
  Target: ATXN2; (+) strand; PAM type: YTN; PAM sequence: TTT
cttctcttccttatcgtctt

SEQ ID NO: 91523 - DNA, 20 bp, Artificial Sequence
  Description of Artificial Sequence: Synthetic oligonucleotide
  Target: ATXN2; (+) strand; PAM type: YTN; PAM sequence: TTC
ttctcttccttatcgtcttt

SEQ ID NO: 91524 - DNA, 20 bp, Artificial Sequence
  Description of Artificial Sequence: Synthetic oligonucleotide
  Target: ATXN2; (+) strand; PAM type: YTN; PAM sequence: CTT
ctcttccttatcgtctttct

SEQ ID NO: 91525 - DNA, 20 bp, Artificial Sequence
  Description of Artificial Sequence: Synthetic oligonucleotide
  Target: ATXN2; (+) strand; PAM type: YTN; PAM sequence: TTC
tcttccttatcgtctttctc

SEQ ID NO: 91526 - DNA, 20 bp, Artificial Sequence
  Description of Artificial Sequence: Synthetic oligonucleotide
  Target: ATXN2; (+) strand; PAM type: YTN; PAM sequence: CTC
ttccttatcgtctttctctt

SEQ ID NO: 91527 - DNA, 20 bp, Artificial Sequence
  Description of Artificial Sequence: Synthetic oligonucleotide
  Target: ATXN2; (+) strand; PAM type: YTN; PAM sequence: CTT
ccttatcgtctttctcttgt

SEQ ID NO: 91528 - DNA, 20 bp, Artificial Sequence
  Description of Artificial Sequence: Synthetic oligonucleotide
  Target: ATXN2; (+) strand; PAM type: YTN; PAM sequence: TTC
cttatcgtctttctcttgtt

SEQ ID NO: 91529 - DNA, 20 bp, Artificial Sequence
  Description of Artificial Sequence: Synthetic oligonucleotide
  Target: ATXN2; (+) strand; PAM type: YTN; PAM sequence: CTT
atcgtctttctcttgtttac

SEQ ID NO: 91530 - DNA, 20 bp, Artificial Sequence
  Description of Artificial Sequence: Synthetic oligonucleotide
  Target: ATXN2; (+) strand; PAM type: YTN; PAM sequence: TTA
tcgtctttctcttgtttaca

SEQ ID NO: 91531 - DNA, 20 bp, Artificial Sequence
  Description of Artificial Sequence: Synthetic oligonucleotide
  Target: ATXN2; (+) strand; PAM type: YTN; PAM sequence: CTT
tctcttgtttacatgctggg

SEQ ID NO: 91532 - DNA, 20 bp, Artificial Sequence
  Description of Artificial Sequence: Synthetic oligonucleotide
  Target: ATXN2; (+) strand; PAM type: YTN; PAM sequence: TTT
ctcttgtttacatgctgggc

SEQ ID NO: 91533 - DNA, 20 bp, Artificial Sequence
  Description of Artificial Sequence: Synthetic oligonucleotide
  Target: ATXN2; (+) strand; PAM type: YTN; PAM sequence: TTC
tcttgtttacatgctgggct

SEQ ID NO: 91534 - DNA, 20 bp, Artificial Sequence
  Description of Artificial Sequence: Synthetic oligonucleotide
  Target: ATXN2; (+) strand; PAM type: YTN; PAM sequence: CTC
ttgtttacatgctgggctgg

SEQ ID NO: 91535 - DNA, 20 bp, Artificial Sequence
  Description of Artificial Sequence: Synthetic oligonucleotide
  Target: ATXN2; (+) strand; PAM type: YTN; PAM sequence: CTT
gtttacatgctgggctggaa

SEQ ID NO: 91536 - DNA, 20 bp, Artificial Sequence
  Description of Artificial Sequence: Synthetic oligonucleotide
  Target: ATXN2; (+) strand; PAM type: YTN; PAM sequence: TTG
tttacatgctgggctggaag

SEQ ID NO: 91537 - DNA, 20 bp, Artificial Sequence
  Description of Artificial Sequence: Synthetic oligonucleotide
  Target: ATXN2; (+) strand; PAM type: YTN; PAM sequence: TTT
acatgctgggctggaagtct

SEQ ID NO: 91538 - DNA, 20 bp, Artificial Sequence
  Description of Artificial Sequence: Synthetic oligonucleotide
  Target: ATXN2; (+) strand; PAM type: YTN; PAM sequence: TTA
catgctgggctggaagtctg

SEQ ID NO: 91539 - DNA, 20 bp, Artificial Sequence
  Description of Artificial Sequence: Synthetic oligonucleotide
  Target: ATXN2; (+) strand; PAM type: YTN; PAM sequence: CTG
ggctggaagtctgaacccct

SEQ ID NO: 91540 - DNA, 20 bp, Artificial Sequence
  Description of Artificial Sequence: Synthetic oligonucleotide
  Target: ATXN2; (+) strand; PAM type: YTN; PAM sequence: CTG
gaagtctgaaccccttggga

SEQ ID NO: 91541 - DNA, 20 bp, Artificial Sequence
  Description of Artificial Sequence: Synthetic oligonucleotide
  Target: ATXN2; (+) strand; PAM type: YTN; PAM sequence: CTG
aaccccttgggaagtgacct

SEQ ID NO: 91542 - DNA, 20 bp, Artificial Sequence
  Description of Artificial Sequence: Synthetic oligonucleotide
  Target: ATXN2; (+) strand; PAM type: YTN; PAM sequence: CTT
gggaagtgacctcaggtccc

SEQ ID NO: 91543 - DNA, 20 bp, Artificial Sequence
  Description of Artificial Sequence: Synthetic oligonucleotide
  Target: ATXN2; (+) strand; PAM type: YTN; PAM sequence: TTG
ggaagtgacctcaggtcccc

SEQ ID NO: 91544 - DNA, 20 bp, Artificial Sequence
  Description of Artificial Sequence: Synthetic oligonucleotide
  Target: ATXN2; (+) strand; PAM type: YTN; PAM sequence: CTC
aggtcccctcttgtgctccg

SEQ ID NO: 91545 - DNA, 20 bp, Artificial Sequence
  Description of Artificial Sequence: Synthetic oligonucleotide
  Target: ATXN2; (+) strand; PAM type: YTN; PAM sequence: CTC
ttgtgctccgtgttactaag

SEQ ID NO: 91546 - DNA, 20 bp, Artificial Sequence
  Description of Artificial Sequence: Synthetic oligonucleotide
  Target: ATXN2; (+) strand; PAM type: YTN; PAM sequence: CTT
gtgctccgtgttactaagta

SEQ ID NO: 91547 - DNA, 20 bp, Artificial Sequence
  Description of Artificial Sequence: Synthetic oligonucleotide
  Target: ATXN2; (+) strand; PAM type: YTN; PAM sequence: TTG
tgctccgtgttactaagtat

SEQ ID NO: 91548 - DNA, 20 bp, Artificial Sequence
  Description of Artificial Sequence: Synthetic oligonucleotide
  Target: ATXN2; (+) strand; PAM type: YTN; PAM sequence: CTC
cgtgttactaagtattgaag

SEQ ID NO: 91549 - DNA, 20 bp, Artificial Sequence
  Description of Artificial Sequence: Synthetic oligonucleotide
  Target: ATXN2; (+) strand; PAM type: YTN; PAM sequence: TTA
ctaagtattgaaggggaaat

SEQ ID NO: 91550 - DNA, 20 bp, Artificial Sequence
  Description of Artificial Sequence: Synthetic oligonucleotide
  Target: ATXN2; (+) strand; PAM type: YTN; PAM sequence: CTA
agtattgaaggggaaatgct

SEQ ID NO: 91551 - DNA, 20 bp, Artificial Sequence
  Description of Artificial Sequence: Synthetic oligonucleotide
  Target: ATXN2; (+) strand; PAM type: YTN; PAM sequence: TTG
aaggggaaatgctggggcta

SEQ ID NO: 91552 - DNA, 20 bp, Artificial Sequence
  Description of Artificial Sequence: Synthetic oligonucleotide
  Target: ATXN2; (+) strand; PAM type: YTN; PAM sequence: CTG
gggctattcggcttgctgct

SEQ ID NO: 91553 - DNA, 20 bp, Artificial Sequence
  Description of Artificial Sequence: Synthetic oligonucleotide
  Target: ATXN2; (+) strand; PAM type: YTN; PAM sequence: CTA
ttcggcttgctgctgccact

SEQ ID NO: 91554 - DNA, 20 bp, Artificial Sequence
  Description of Artificial Sequence: Synthetic oligonucleotide
  Target: ATXN2; (+) strand; PAM type: YTN; PAM sequence: TTC
ggcttgctgctgccactggt

SEQ ID NO: 91555 - DNA, 20 bp, Artificial Sequence
  Description of Artificial Sequence: Synthetic oligonucleotide
  Target: ATXN2; (+) strand; PAM type: YTN; PAM sequence: CTT
gctgctgccactggtacagt

SEQ ID NO: 91556 - DNA, 20 bp, Artificial Sequence
  Description of Artificial Sequence: Synthetic oligonucleotide
  Target: ATXN2; (+) strand; PAM type: YTN; PAM sequence: TTG
ctgctgccactggtacagtt

SEQ ID NO: 91557 - DNA, 20 bp, Artificial Sequence
  Description of Artificial Sequence: Synthetic oligonucleotide
  Target: ATXN2; (+) strand; PAM type: YTN; PAM sequence: CTG
ctgccactggtacagttgct

SEQ ID NO: 91558 - DNA, 20 bp, Artificial Sequence
  Description of Artificial Sequence: Synthetic oligonucleotide
  Target: ATXN2; (+) strand; PAM type: YTN; PAM sequence: CTG
ccactggtacagttgctgct

SEQ ID NO: 91559 - DNA, 20 bp, Artificial Sequence
  Description of Artificial Sequence: Synthetic oligonucleotide
  Target: ATXN2; (+) strand; PAM type: YTN; PAM sequence: CTG
gtacagttgctgctgctatt

SEQ ID NO: 91560 - DNA, 20 bp, Artificial Sequence
  Description of Artificial Sequence: Synthetic oligonucleotide
  Target: ATXN2; (+) strand; PAM type: YTN; PAM sequence: TTG
ctgctgctattttcaatgaa

SEQ ID NO: 91561 - DNA, 20 bp, Artificial Sequence
  Description of Artificial Sequence: Synthetic oligonucleotide
  Target: ATXN2; (+) strand; PAM type: YTN; PAM sequence: CTG
ctgctattttcaatgaaaga

SEQ ID NO: 91562 - DNA, 20 bp, Artificial Sequence
  Description of Artificial Sequence: Synthetic oligonucleotide
  Target: ATXN2; (+) strand; PAM type: YTN; PAM sequence: CTG
ctattttcaatgaaagaatc

SEQ ID NO: 91563 - DNA, 20 bp, Artificial Sequence
  Description of Artificial Sequence: Synthetic oligonucleotide
  Target: ATXN2; (+) strand; PAM type: YTN; PAM sequence: CTA
ttttcaatgaaagaatcctt

SEQ ID NO: 91564 - DNA, 20 bp, Artificial Sequence
  Description of Artificial Sequence: Synthetic oligonucleotide
  Target: ATXN2; (+) strand; PAM type: YTN; PAM sequence: TTT
tcaatgaaagaatccttagc

SEQ ID NO: 91565 - DNA, 20 bp, Artificial Sequence
  Description of Artificial Sequence: Synthetic oligonucleotide
  Target: ATXN2; (+) strand; PAM type: YTN; PAM sequence: TTT
caatgaaagaatccttagca

SEQ ID NO: 91566 - DNA, 20 bp, Artificial Sequence
  Description of Artificial Sequence: Synthetic oligonucleotide
  Target: ATXN2; (+) strand; PAM type: YTN; PAM sequence: TTC
aatgaaagaatccttagcac

SEQ ID NO: 91567 - DNA, 20 bp, Artificial Sequence
  Description of Artificial Sequence: Synthetic oligonucleotide
  Target: ATXN2; (+) strand; PAM type: YTN; PAM sequence: CTT
agcacttggttcaattttgt

SEQ ID NO: 91568 - DNA, 20 bp, Artificial Sequence
  Description of Artificial Sequence: Synthetic oligonucleotide
  Target: ATXN2; (+) strand; PAM type: YTN; PAM sequence: TTA
gcacttggttcaattttgtc

SEQ ID NO: 91569 - DNA, 20 bp, Artificial Sequence
  Description of Artificial Sequence: Synthetic oligonucleotide
  Target: ATXN2; (+) strand; PAM type: YTN; PAM sequence: CTT
ggttcaattttgtctttgat

SEQ ID NO: 91570 - DNA, 20 bp, Artificial Sequence
  Description of Artificial Sequence: Synthetic oligonucleotide
  Target: ATXN2; (+) strand; PAM type: YTN; PAM sequence: TTG
gttcaattttgtctttgatc

SEQ ID NO: 91571 - DNA, 20 bp, Artificial Sequence
  Description of Artificial Sequence: Synthetic oligonucleotide
  Target: ATXN2; (+) strand; PAM type: YTN; PAM sequence: TTC
aattttgtctttgatcaaat

SEQ ID NO: 91572 - DNA, 20 bp, Artificial Sequence
  Description of Artificial Sequence: Synthetic oligonucleotide
  Target: ATXN2; (+) strand; PAM type: YTN; PAM sequence: TTT
tgtctttgatcaaatctctt

SEQ ID NO: 91573 - DNA, 20 bp, Artificial Sequence
  Description of Artificial Sequence: Synthetic oligonucleotide
  Target: ATXN2; (+) strand; PAM type: YTN; PAM sequence: TTT
gtctttgatcaaatctcttg

SEQ ID NO: 91574 - DNA, 20 bp, Artificial Sequence
  Description of Artificial Sequence: Synthetic oligonucleotide
  Target: ATXN2; (+) strand; PAM type: YTN; PAM sequence: TTG
tctttgatcaaatctcttga

SEQ ID NO: 91575 - DNA, 20 bp, Artificial Sequence
  Description of Artificial Sequence: Synthetic oligonucleotide
  Target: ATXN2; (+) strand; PAM type: YTN; PAM sequence: CTT
tgatcaaatctcttgatttt

SEQ ID NO: 91576 - DNA, 20 bp, Artificial Sequence
  Description of Artificial Sequence: Synthetic oligonucleotide
  Target: ATXN2; (+) strand; PAM type: YTN; PAM sequence: TTT
gatcaaatctcttgattttt

SEQ ID NO: 91577 - DNA, 20 bp, Artificial Sequence
  Description of Artificial Sequence: Synthetic oligonucleotide
  Target: ATXN2; (+) strand; PAM type: YTN; PAM sequence: TTG
atcaaatctcttgatttttc

SEQ ID NO: 91578 - DNA, 20 bp, Artificial Sequence
  Description of Artificial Sequence: Synthetic oligonucleotide
  Target: ATXN2; (+) strand; PAM type: YTN; PAM sequence: CTC
ttgatttttctccctctcta

SEQ ID NO: 91579 - DNA, 20 bp, Artificial Sequence
  Description of Artificial Sequence: Synthetic oligonucleotide
  Target: ATXN2; (+) strand; PAM type: YTN; PAM sequence: CTT
gatttttctccctctctatt

SEQ ID NO: 91580 - DNA, 20 bp, Artificial Sequence
  Description of Artificial Sequence: Synthetic oligonucleotide
  Target: ATXN2; (+) strand; PAM type: YTN; PAM sequence: TTG
atttttctccctctctattt

SEQ ID NO: 91581 - DNA, 20 bp, Artificial Sequence
  Description of Artificial Sequence: Synthetic oligonucleotide
  Target: ATXN2; (+) strand; PAM type: YTN; PAM sequence: TTT
ttctccctctctatttttgt

SEQ ID NO: 91582 - DNA, 20 bp, Artificial Sequence
  Description of Artificial Sequence: Synthetic oligonucleotide
  Target: ATXN2; (+) strand; PAM type: YTN; PAM sequence: TTT
tctccctctctatttttgtt

SEQ ID NO: 91583 - DNA, 20 bp, Artificial Sequence
  Description of Artificial Sequence: Synthetic oligonucleotide
  Target: ATXN2; (+) strand; PAM type: YTN; PAM sequence: TTT
ctccctctctatttttgttt

SEQ ID NO: 91584 - DNA, 20 bp, Artificial Sequence
  Description of Artificial Sequence: Synthetic oligonucleotide
  Target: ATXN2; (+) strand; PAM type: YTN; PAM sequence: TTC
tccctctctatttttgttta

SEQ ID NO: 91585 - DNA, 20 bp, Artificial Sequence
  Description of Artificial Sequence: Synthetic oligonucleotide
  Target: ATXN2; (+) strand; PAM type: YTN; PAM sequence: CTC
cctctctatttttgtttagt

SEQ ID NO: 91586 - DNA, 20 bp, Artificial Sequence
  Description of Artificial Sequence: Synthetic oligonucleotide
  Target: ATXN2; (+) strand; PAM type: YTN; PAM sequence: CTC
tctatttttgtttagtagtt

SEQ ID NO: 91587 - DNA, 20 bp, Artificial Sequence
  Description of Artificial Sequence: Synthetic oligonucleotide
  Target: ATXN2; (+) strand; PAM type: YTN; PAM sequence: CTC
tatttttgtttagtagttga

SEQ ID NO: 91588 - DNA, 20 bp, Artificial Sequence
  Description of Artificial Sequence: Synthetic oligonucleotide
  Target: ATXN2; (+) strand; PAM type: YTN; PAM sequence: CTA
tttttgtttagtagttgatc

SEQ ID NO: 91589 - DNA, 20 bp, Artificial Sequence
  Description of Artificial Sequence: Synthetic oligonucleotide
  Target: ATXN2; (+) strand; PAM type: YTN; PAM sequence: TTT
ttgtttagtagttgatccat

SEQ ID NO: 91590 - DNA, 20 bp, Artificial Sequence
  Description of Artificial Sequence: Synthetic oligonucleotide
  Target: ATXN2; (+) strand; PAM type: YTN; PAM sequence: TTT
tgtttagtagttgatccata

SEQ ID NO: 91591 - DNA, 20 bp, Artificial Sequence
  Description of Artificial Sequence: Synthetic oligonucleotide
  Target: ATXN2; (+) strand; PAM type: YTN; PAM sequence: TTT
gtttagtagttgatccatag

SEQ ID NO: 91592 - DNA, 20 bp, Artificial Sequence
  Description of Artificial Sequence: Synthetic oligonucleotide
  Target: ATXN2; (+) strand; PAM type: YTN; PAM sequence: TTG
tttagtagttgatccataga

SEQ ID NO: 91593 - DNA, 20 bp, Artificial Sequence
  Description of Artificial Sequence: Synthetic oligonucleotide
  Target: ATXN2; (+) strand; PAM type: YTN; PAM sequence: TTT
agtagttgatccatagattc

SEQ ID NO: 91594 - DNA, 20 bp, Artificial Sequence
  Description of Artificial Sequence: Synthetic oligonucleotide
  Target: ATXN2; (+) strand; PAM type: YTN; PAM sequence: TTA
gtagttgatccatagattca

SEQ ID NO: 91595 - DNA, 20 bp, Artificial Sequence
  Description of Artificial Sequence: Synthetic oligonucleotide
  Target: ATXN2; (+) strand; PAM type: YTN; PAM sequence: TTG
atccatagattcagaagtag

SEQ ID NO: 91596 - DNA, 20 bp, Artificial Sequence
  Description of Artificial Sequence: Synthetic oligonucleotide
  Target: ATXN2; (+) strand; PAM type: YTN; PAM sequence: TTC
agaagtagaacttggctgta

SEQ ID NO: 91597 - DNA, 20 bp, Artificial Sequence
  Description of Artificial Sequence: Synthetic oligonucleotide
  Target: ATXN2; (+) strand; PAM type: YTN; PAM sequence: CTT
ggctgtaactaaataaagga

SEQ ID NO: 91598 - DNA, 20 bp, Artificial Sequence
  Description of Artificial Sequence: Synthetic oligonucleotide
  Target: ATXN2; (+) strand; PAM type: YTN; PAM sequence: TTG
gctgtaactaaataaaggaa

SEQ ID NO: 91599 - DNA, 20 bp, Artificial Sequence
  Description of Artificial Sequence: Synthetic oligonucleotide
  Target: ATXN2; (+) strand; PAM type: YTN; PAM sequence: CTG
taactaaataaaggaaacaa

SEQ ID NO: 91600 - DNA, 20 bp, Artificial Sequence
  Description of Artificial Sequence: Synthetic oligonucleotide
  Target: ATXN2; (+) strand; PAM type: YTN; PAM sequence: CTA
aataaaggaaacaattatac

SEQ ID NO: 91601 - DNA, 20 bp, Artificial Sequence
  Description of Artificial Sequence: Synthetic oligonucleotide
  Target: ATXN2; (+) strand; PAM type: YTN; PAM sequence: TTA
tacttaaatatcttaaataa

SEQ ID NO: 91602 - DNA, 20 bp, Artificial Sequence
  Description of Artificial Sequence: Synthetic oligonucleotide
  Target: ATXN2; (+) strand; PAM type: YTN; PAM sequence: CTT
aaatatcttaaataacttta

SEQ ID NO: 91603 - DNA, 20 bp, Artificial Sequence
  Description of Artificial Sequence: Synthetic oligonucleotide
  Target: ATXN2; (+) strand; PAM type: YTN; PAM sequence: TTA
aatatcttaaataactttag

SEQ ID NO: 91604 - DNA, 20 bp, Artificial Sequence
  Description of Artificial Sequence: Synthetic oligonucleotide
  Target: ATXN2; (+) strand; PAM type: YTN; PAM sequence: CTT
aaataactttagtaatacat

SEQ ID NO: 91605 - DNA, 20 bp, Artificial Sequence
  Description of Artificial Sequence: Synthetic oligonucleotide
  Target: ATXN2; (+) strand; PAM type: YTN; PAM sequence: TTA
aataactttagtaatacatt

SEQ ID NO: 91606 - DNA, 20 bp, Artificial Sequence
  Description of Artificial Sequence: Synthetic oligonucleotide
  Target: ATXN2; (+) strand; PAM type: YTN; PAM sequence: CTT
tagtaatacatttttgccat

SEQ ID NO: 91607 - DNA, 20 bp, Artificial Sequence
  Description of Artificial Sequence: Synthetic oligonucleotide
  Target: ATXN2; (+) strand; PAM type: YTN; PAM sequence: TTT
agtaatacatttttgccatg

SEQ ID NO: 91608 - DNA, 20 bp, Artificial Sequence
  Description of Artificial Sequence: Synthetic oligonucleotide
  Target: ATXN2; (+) strand; PAM type: YTN; PAM sequence: TTA
gtaatacatttttgccatga

SEQ ID NO: 91609 - DNA, 20 bp, Artificial Sequence
  Description of Artificial Sequence: Synthetic oligonucleotide
  Target: ATXN2; (+) strand; PAM type: YTN; PAM sequence: TTT
ttgccatgagcacaagctac

SEQ ID NO: 91610 - DNA, 20 bp, Artificial Sequence
  Description of Artificial Sequence: Synthetic oligonucleotide
  Target: ATXN2; (+) strand; PAM type: YTN; PAM sequence: TTT
tgccatgagcacaagctacg

SEQ ID NO: 91611 - DNA, 20 bp, Artificial Sequence
  Description of Artificial Sequence: Synthetic oligonucleotide
  Target: ATXN2; (+) strand; PAM type: YTN; PAM sequence: TTT
gccatgagcacaagctacgt

SEQ ID NO: 91612 - DNA, 20 bp, Artificial Sequence
  Description of Artificial Sequence: Synthetic oligonucleotide
  Target: ATXN2; (+) strand; PAM type: YTN; PAM sequence: TTG
ccatgagcacaagctacgta

SEQ ID NO: 91613 - DNA, 20 bp, Artificial Sequence
  Description of Artificial Sequence: Synthetic oligonucleotide
  Target: ATXN2; (+) strand; PAM type: YTN; PAM sequence: CTA
cgtaatattaactatacgca

SEQ ID NO: 91614 - DNA, 20 bp, Artificial Sequence
  Description of Artificial Sequence: Synthetic oligonucleotide
  Target: ATXN2; (+) strand; PAM type: YTN; PAM sequence: TTA
actatacgcatgaaatgttc

SEQ ID NO: 91615 - DNA, 20 bp, Artificial Sequence
  Description of Artificial Sequence: Synthetic oligonucleotide
  Target: ATXN2; (+) strand; PAM type: YTN; PAM sequence: CTA
tacgcatgaaatgttctgaa

SEQ ID NO: 91616 - DNA, 20 bp, Artificial Sequence
  Description of Artificial Sequence: Synthetic oligonucleotide
  Target: ATXN2; (+) strand; PAM type: YTN; PAM sequence: TTC
tgaataaggcttttttcata

SEQ ID NO: 91617 - DNA, 20 bp, Artificial Sequence
  Description of Artificial Sequence: Synthetic oligonucleotide
  Target: ATXN2; (+) strand; PAM type: YTN; PAM sequence: CTG
aataaggcttttttcatact

SEQ ID NO: 91618 - DNA, 20 bp, Artificial Sequence
  Description of Artificial Sequence: Synthetic oligonucleotide
  Target: ATXN2; (+) strand; PAM type: YTN; PAM sequence: CTT
ttttcatactttaagagtaa

SEQ ID NO: 91619 - DNA, 20 bp, Artificial Sequence
  Description of Artificial Sequence: Synthetic oligonucleotide
  Target: ATXN2; (+) strand; PAM type: YTN; PAM sequence: TTT
tttcatactttaagagtaat

SEQ ID NO: 91620 - DNA, 20 bp, Artificial Sequence
  Description of Artificial Sequence: Synthetic oligonucleotide
  Target: ATXN2; (+) strand; PAM type: YTN; PAM sequence: TTT
ttcatactttaagagtaatg

SEQ ID NO: 91621 - DNA, 20 bp, Artificial Sequence
  Description of Artificial Sequence: Synthetic oligonucleotide
  Target: ATXN2; (+) strand; PAM type: YTN; PAM sequence: TTT
tcatactttaagagtaatgc

SEQ ID NO: 91622 - DNA, 20 bp, Artificial Sequence
  Description of Artificial Sequence: Synthetic oligonucleotide
  Target: ATXN2; (+) strand; PAM type: YTN; PAM sequence: TTT
catactttaagagtaatgct

SEQ ID NO: 91623 - DNA, 20 bp, Artificial Sequence
  Description of Artificial Sequence: Synthetic oligonucleotide
  Target: ATXN2; (+) strand; PAM type: YTN; PAM sequence: TTC
atactttaagagtaatgctt

SEQ ID NO: 91624 - DNA, 20 bp, Artificial Sequence
  Description of Artificial Sequence: Synthetic oligonucleotide
  Target: ATXN2; (+) strand; PAM type: YTN; PAM sequence: CTT
taagagtaatgcttttacta

SEQ ID NO: 91625 - DNA, 20 bp, Artificial Sequence
  Description of Artificial Sequence: Synthetic oligonucleotide
  Target: ATXN2; (+) strand; PAM type: YTN; PAM sequence: TTT
aagagtaatgcttttactat

SEQ ID NO: 91626 - DNA, 20 bp, Artificial Sequence
  Description of Artificial Sequence: Synthetic oligonucleotide
  Target: ATXN2; (+) strand; PAM type: YTN; PAM sequence: TTA
agagtaatgcttttactata

SEQ ID NO: 91627 - DNA, 20 bp, Artificial Sequence
  Description of Artificial Sequence: Synthetic oligonucleotide
  Target: ATXN2; (+) strand; PAM type: YTN; PAM sequence: CTT
ttactataaactaacaataa

SEQ ID NO: 91628 - DNA, 20 bp, Artificial Sequence
  Description of Artificial Sequence: Synthetic oligonucleotide
  Target: ATXN2; (+) strand; PAM type: YTN; PAM sequence: TTT
tactataaactaacaataac

SEQ ID NO: 91629 - DNA, 20 bp, Artificial Sequence
  Description of Artificial Sequence: Synthetic oligonucleotide
  Target: ATXN2; (+) strand; PAM type: YTN; PAM sequence: TTT
actataaactaacaataaca

SEQ ID NO: 91630 - DNA, 20 bp, Artificial Sequence
  Description of Artificial Sequence: Synthetic oligonucleotide
  Target: ATXN2; (+) strand; PAM type: YTN; PAM sequence: TTA
ctataaactaacaataacag

SEQ ID NO: 91631 - DNA, 20 bp, Artificial Sequence
  Description of Artificial Sequence: Synthetic oligonucleotide
  Target: ATXN2; (+) strand; PAM type: YTN; PAM sequence: CTA
taaactaacaataacagagt

SEQ ID NO: 91632 - DNA, 20 bp, Artificial Sequence
  Description of Artificial Sequence: Synthetic oligonucleotide
  Target: ATXN2; (+) strand; PAM type: YTN; PAM sequence: CTA
acaataacagagtacctata

SEQ ID NO: 91633 - DNA, 20 bp, Artificial Sequence
  Description of Artificial Sequence: Synthetic oligonucleotide
  Target: ATXN2; (+) strand; PAM type: YTN; PAM sequence: CTA
tatagcacaaccacagtcac

SEQ ID NO: 91634 - DNA, 20 bp, Artificial Sequence
  Description of Artificial Sequence: Synthetic oligonucleotide
  Target: ATXN2; (+) strand; PAM type: YTN; PAM sequence: CTC
aaatgtcctagcctctaaag

SEQ ID NO: 91635 - DNA, 20 bp, Artificial Sequence
  Description of Artificial Sequence: Synthetic oligonucleotide
  Target: ATXN2; (+) strand; PAM type: YTN; PAM sequence: CTA
gcctctaaagttcaatattt

SEQ ID NO: 91636 - DNA, 20 bp, Artificial Sequence
  Description of Artificial Sequence: Synthetic oligonucleotide
  Target: ATXN2; (+) strand; PAM type: YTN; PAM sequence: CTC
taaagttcaatatttactga

SEQ ID NO: 91637 - DNA, 20 bp, Artificial Sequence
  Description of Artificial Sequence: Synthetic oligonucleotide
  Target: ATXN2; (+) strand; PAM type: YTN; PAM sequence: CTA
aagttcaatatttactgagt

SEQ ID NO: 91638 - DNA, 20 bp, Artificial Sequence
  Description of Artificial Sequence: Synthetic oligonucleotide
  Target: ATXN2; (+) strand; PAM type: YTN; PAM sequence: TTC
aatatttactgagtgcttac

SEQ ID NO: 91639 - DNA, 20 bp, Artificial Sequence
  Description of Artificial Sequence: Synthetic oligonucleotide
  Target: ATXN2; (+) strand; PAM type: YTN; PAM sequence: TTT
actgagtgcttaccacatgt

SEQ ID NO: 91640 - DNA, 20 bp, Artificial Sequence
  Description of Artificial Sequence: Synthetic oligonucleotide
  Target: ATXN2; (+) strand; PAM type: YTN; PAM sequence: TTA
ctgagtgcttaccacatgtc

SEQ ID NO: 91641 - DNA, 20 bp, Artificial Sequence
  Description of Artificial Sequence: Synthetic oligonucleotide
  Target: ATXN2; (+) strand; PAM type: YTN; PAM sequence: CTG
agtgcttaccacatgtcaga

SEQ ID NO: 91642 - DNA, 20 bp, Artificial Sequence
  Description of Artificial Sequence: Synthetic oligonucleotide
  Target: ATXN2; (+) strand; PAM type: YTN; PAM sequence: CTT
accacatgtcagaaattgtg

SEQ ID NO: 91643 - DNA, 20 bp, Artificial Sequence
  Description of Artificial Sequence: Synthetic oligonucleotide
  Target: ATXN2; (+) strand; PAM type: YTN; PAM sequence: TTA
ccacatgtcagaaattgtgc

SEQ ID NO: 91644 - DNA, 20 bp, Artificial Sequence
  Description of Artificial Sequence: Synthetic oligonucleotide
  Target: ATXN2; (+) strand; PAM type: YTN; PAM sequence: TTG
tgcctgctgggtgagaaaaa

SEQ ID NO: 91645 - DNA, 20 bp, Artificial Sequence
  Description of Artificial Sequence: Synthetic oligonucleotide
  Target: ATXN2; (+) strand; PAM type: YTN; PAM sequence: CTG
ctgggtgagaaaaatatgaa

SEQ ID NO: 91646 - DNA, 20 bp, Artificial Sequence
  Description of Artificial Sequence: Synthetic oligonucleotide
  Target: ATXN2; (+) strand; PAM type: YTN; PAM sequence: CTG
ggtgagaaaaatatgaaata

SEQ ID NO: 91647 - DNA, 20 bp, Artificial Sequence
  Description of Artificial Sequence: Synthetic oligonucleotide
  Target: ATXN2; (+) strand; PAM type: YTN; PAM sequence: TTT
ctatcctcttatacttgtca

SEQ ID NO: 91648 - DNA, 20 bp, Artificial Sequence
  Description of Artificial Sequence: Synthetic oligonucleotide
  Target: ATXN2; (+) strand; PAM type: YTN; PAM sequence: TTC
tatcctcttatacttgtcat

SEQ ID NO: 91649 - DNA, 20 bp, Artificial Sequence
  Description of Artificial Sequence: Synthetic oligonucleotide
  Target: ATXN2; (+) strand; PAM type: YTN; PAM sequence: CTA
tcctcttatacttgtcattt

SEQ ID NO: 91650 - DNA, 20 bp, Artificial Sequence
  Description of Artificial Sequence: Synthetic oligonucleotide
  Target: ATXN2; (+) strand; PAM type: YTN; PAM sequence: CTC
ttatacttgtcatttaaata

SEQ ID NO: 91651 - DNA, 20 bp, Artificial Sequence
  Description of Artificial Sequence: Synthetic oligonucleotide
  Target: ATXN2; (+) strand; PAM type: YTN; PAM sequence: CTT
atacttgtcatttaaataag

SEQ ID NO: 91652 - DNA, 20 bp, Artificial Sequence
  Description of Artificial Sequence: Synthetic oligonucleotide
  Target: ATXN2; (+) strand; PAM type: YTN; PAM sequence: TTA
tacttgtcatttaaataaga

SEQ ID NO: 91653 - DNA, 20 bp, Artificial Sequence
  Description of Artificial Sequence: Synthetic oligonucleotide
  Target: ATXN2; (+) strand; PAM type: YTN; PAM sequence: CTT
gtcatttaaataagatcaga

SEQ ID NO: 91654 - DNA, 20 bp, Artificial Sequence
  Description of Artificial Sequence: Synthetic oligonucleotide
  Target: ATXN2; (+) strand; PAM type: YTN; PAM sequence: TTG
tcatttaaataagatcagac

SEQ ID NO: 91655 - DNA, 20 bp, Artificial Sequence
  Description of Artificial Sequence: Synthetic oligonucleotide
  Target: ATXN2; (+) strand; PAM type: YTN; PAM sequence: TTT
aaataagatcagacacttca

SEQ ID NO: 91656 - DNA, 20 bp, Artificial Sequence
  Description of Artificial Sequence: Synthetic oligonucleotide
  Target: ATXN2; (+) strand; PAM type: YTN; PAM sequence: TTA
aataagatcagacacttcac

SEQ ID NO: 91657 - DNA, 20 bp, Artificial Sequence
  Description of Artificial Sequence: Synthetic oligonucleotide
  Target: ATXN2; (+) strand; PAM type: YTN; PAM sequence: CTT
cacaataaaatgagtaaatg

SEQ ID NO: 91658 - DNA, 20 bp, Artificial Sequence
  Description of Artificial Sequence: Synthetic oligonucleotide
  Target: ATXN2; (+) strand; PAM type: YTN; PAM sequence: TTC
acaataaaatgagtaaatgc

SEQ ID NO: 91659 - DNA, 20 bp, Artificial Sequence
  Description of Artificial Sequence: Synthetic oligonucleotide
  Target: ATXN2; (+) strand; PAM type: YTN; PAM sequence: CTA
agagagtctatagaaaaagc

SEQ ID NO: 91660 - DNA, 20 bp, Artificial Sequence
  Description of Artificial Sequence: Synthetic oligonucleotide
  Target: ATXN2; (+) strand; PAM type: YTN; PAM sequence: CTA
tagaaaaagcaacctataaa

SEQ ID NO: 91661 - DNA, 20 bp, Artificial Sequence
  Description of Artificial Sequence: Synthetic oligonucleotide
  Target: ATXN2; (+) strand; PAM type: YTN; PAM sequence: CTA
taaaaaagaaaggtttctca

SEQ ID NO: 91662 - DNA, 20 bp, Artificial Sequence
  Description of Artificial Sequence: Synthetic oligonucleotide
  Target: ATXN2; (+) strand; PAM type: YTN; PAM sequence: TTT
ctcagtaaagtgtcagctag

SEQ ID NO: 91663 - DNA, 20 bp, Artificial Sequence
  Description of Artificial Sequence: Synthetic oligonucleotide
  Target: ATXN2; (+) strand; PAM type: YTN; PAM sequence: TTC
tcagtaaagtgtcagctagt

SEQ ID NO: 91664 - DNA, 20 bp, Artificial Sequence
  Description of Artificial Sequence: Synthetic oligonucleotide
  Target: ATXN2; (+) strand; PAM type: YTN; PAM sequence: CTC
agtaaagtgtcagctagtct

SEQ ID NO: 91665 - DNA, 20 bp, Artificial Sequence
  Description of Artificial Sequence: Synthetic oligonucleotide
  Target: ATXN2; (+) strand; PAM type: YTN; PAM sequence: CTA
gtctaaggtgtgaaagaagt

SEQ ID NO: 91666 - DNA, 20 bp, Artificial Sequence
  Description of Artificial Sequence: Synthetic oligonucleotide
  Target: ATXN2; (+) strand; PAM type: YTN; PAM sequence: CTA
aggtgtgaaagaagtttagg

SEQ ID NO: 91667 - DNA, 20 bp, Artificial Sequence
  Description of Artificial Sequence: Synthetic oligonucleotide
  Target: ATXN2; (+) strand; PAM type: YTN; PAM sequence: TTT
aggaaaggtgttgggatgga

SEQ ID NO: 91668 - DNA, 20 bp, Artificial Sequence
  Description of Artificial Sequence: Synthetic oligonucleotide
  Target: ATXN2; (+) strand; PAM type: YTN; PAM sequence: TTA
ggaaaggtgttgggatggag

SEQ ID NO: 91669 - DNA, 20 bp, Artificial Sequence
  Description of Artificial Sequence: Synthetic oligonucleotide
  Target: ATXN2; (+) strand; PAM type: YTN; PAM sequence: TTG
ggatggagaatagtctaagt

SEQ ID NO: 91670 - DNA, 20 bp, Artificial Sequence
  Description of Artificial Sequence: Synthetic oligonucleotide
  Target: ATXN2; (+) strand; PAM type: YTN; PAM sequence: CTA
agtaaaaggaagagtatgtt

SEQ ID NO: 91671 - DNA, 20 bp, Artificial Sequence
  Description of Artificial Sequence: Synthetic oligonucleotide
  Target: ATXN2; (+) strand; PAM type: YTN; PAM sequence: TTT
aaaaatccaaagaaaaggga

SEQ ID NO: 91672 - DNA, 20 bp, Artificial Sequence
  Description of Artificial Sequence: Synthetic oligonucleotide
  Target: ATXN2; (+) strand; PAM type: YTN; PAM sequence: TTA
aaaatccaaagaaaagggag

SEQ ID NO: 91673 - DNA, 20 bp, Artificial Sequence
  Description of Artificial Sequence: Synthetic oligonucleotide
  Target: ATXN2; (+) strand; PAM type: YTN; PAM sequence: CTG
gctctatcacataaaacaat

SEQ ID NO: 91674 - DNA, 20 bp, Artificial Sequence
  Description of Artificial Sequence: Synthetic oligonucleotide
  Target: ATXN2; (+) strand; PAM type: YTN; PAM sequence: CTC
tatcacataaaacaatagca

SEQ ID NO: 91675 - DNA, 20 bp, Artificial Sequence
  Description of Artificial Sequence: Synthetic oligonucleotide
  Target: ATXN2; (+) strand; PAM type: YTN; PAM sequence: CTA
tcacataaaacaatagcacc

SEQ ID NO: 91676 - DNA, 20 bp, Artificial Sequence
  Description of Artificial Sequence: Synthetic oligonucleotide
  Target: ATXN2; (+) strand; PAM type: YTN; PAM sequence: CTC
acgcctgtaatcccagcact

SEQ ID NO: 91677 - DNA, 20 bp, Artificial Sequence
  Description of Artificial Sequence: Synthetic oligonucleotide
  Target: ATXN2; (+) strand; PAM type: YTN; PAM sequence: CTG
taatcccagcactttgggag

SEQ ID NO: 91678 - DNA, 20 bp, Artificial Sequence
  Description of Artificial Sequence: Synthetic oligonucleotide
  Target: ATXN2; (+) strand; PAM type: YTN; PAM sequence: CTT
tgggaggccaaggcaggcgg

SEQ ID NO: 91679 - DNA, 20 bp, Artificial Sequence
  Description of Artificial Sequence: Synthetic oligonucleotide
  Target: ATXN2; (+) strand; PAM type: YTN; PAM sequence: TTT
gggaggccaaggcaggcgga

SEQ ID NO: 91680 - DNA, 20 bp, Artificial Sequence
  Description of Artificial Sequence: Synthetic oligonucleotide
  Target: ATXN2; (+) strand; PAM type: YTN; PAM sequence: TTG
ggaggccaaggcaggcggat

SEQ ID NO: 91681 - DNA, 20 bp, Artificial Sequence
  Description of Artificial Sequence: Synthetic oligonucleotide
  Target: ATXN2; (+) strand; PAM type: YTN; PAM sequence: CTT
ggctcacacgctgaaacccc

SEQ ID NO: 91682 - DNA, 20 bp, Artificial Sequence
  Description of Artificial Sequence: Synthetic oligonucleotide
  Target: ATXN2; (+) strand; PAM type: YTN; PAM sequence: TTG
gctcacacgctgaaacccca

SEQ ID NO: 91683 - DNA, 20 bp, Artificial Sequence
  Description of Artificial Sequence: Synthetic oligonucleotide
  Target: ATXN2; (+) strand; PAM type: YTN; PAM sequence: CTC
acacgctgaaaccccatctc

SEQ ID NO: 91684 - DNA, 20 bp, Artificial Sequence
  Description of Artificial Sequence: Synthetic oligonucleotide
  Target: ATXN2; (+) strand; PAM type: YTN; PAM sequence: CTG
aaaccccatctctactaaaa

SEQ ID NO: 91685 - DNA, 20 bp, Artificial Sequence
  Description of Artificial Sequence: Synthetic oligonucleotide
  Target: ATXN2; (+) strand; PAM type: YTN; PAM sequence: CTC
tactaaaaatacaaaaatta

SEQ ID NO: 91686 - DNA, 20 bp, Artificial Sequence
  Description of Artificial Sequence: Synthetic oligonucleotide
  Target: ATXN2; (+) strand; PAM type: YTN; PAM sequence: CTA
ctaaaaatacaaaaattagc

SEQ ID NO: 91687 - DNA, 20 bp, Artificial Sequence
  Description of Artificial Sequence: Synthetic oligonucleotide
  Target: ATXN2; (+) strand; PAM type: YTN; PAM sequence: CTA
aaaatacaaaaattagccag

SEQ ID NO: 91688 - DNA, 20 bp, Artificial Sequence
  Description of Artificial Sequence: Synthetic oligonucleotide
  Target: ATXN2; (+) strand; PAM type: YTN; PAM sequence: TTA
gccaggcatggtggcaggcg

SEQ ID NO: 91689 - DNA, 20 bp, Artificial Sequence
  Description of Artificial Sequence: Synthetic oligonucleotide
  Target: ATXN2; (+) strand; PAM type: YTN; PAM sequence: CTA
tagtccctgctactcgggag

SEQ ID NO: 91690 - DNA, 20 bp, Artificial Sequence
  Description of Artificial Sequence: Synthetic oligonucleotide
  Target: ATXN2; (+) strand; PAM type: YTN; PAM sequence: CTG
ctactcgggaggctgaggta

SEQ ID NO: 91691 - DNA, 20 bp, Artificial Sequence
  Description of Artificial Sequence: Synthetic oligonucleotide
  Target: ATXN2; (+) strand; PAM type: YTN; PAM sequence: CTA
ctcgggaggctgaggtagga

SEQ ID NO: 91692 - DNA, 20 bp, Artificial Sequence
  Description of Artificial Sequence: Synthetic oligonucleotide
  Target: ATXN2; (+) strand; PAM type: YTN; PAM sequence: CTC
gggaggctgaggtaggagaa

SEQ ID NO: 91693 - DNA, 20 bp, Artificial Sequence
  Description of Artificial Sequence: Synthetic oligonucleotide
  Target: ATXN2; (+) strand; PAM type: YTN; PAM sequence: CTG
aggtaggagaatggtgtgaa

SEQ ID NO: 91694 - DNA, 20 bp, Artificial Sequence
  Description of Artificial Sequence: Synthetic oligonucleotide
  Target: ATXN2; (+) strand; PAM type: YTN; PAM sequence: CTG
ggaagtggagctgcagtgag

SEQ ID NO: 91695 - DNA, 20 bp, Artificial Sequence
  Description of Artificial Sequence: Synthetic oligonucleotide
  Target: ATXN2; (+) strand; PAM type: YTN; PAM sequence: CTG
cagtgagccaagatcacgcc

SEQ ID NO: 91696 - DNA, 20 bp, Artificial Sequence
  Description of Artificial Sequence: Synthetic oligonucleotide
  Target: ATXN2; (+) strand; PAM type: YTN; PAM sequence: CTG
cactccagcctgggtgacag

SEQ ID NO: 91697 - DNA, 20 bp, Artificial Sequence
  Description of Artificial Sequence: Synthetic oligonucleotide
  Target: ATXN2; (+) strand; PAM type: YTN; PAM sequence: CTC
cagcctgggtgacagagcga

SEQ ID NO: 91698 - DNA, 20 bp, Artificial Sequence
  Description of Artificial Sequence: Synthetic oligonucleotide
  Target: ATXN2; (+) strand; PAM type: YTN; PAM sequence: CTG
ggtgacagagcgagactccg

SEQ ID NO: 91699 - DNA, 20 bp, Artificial Sequence
  Description of Artificial Sequence: Synthetic oligonucleotide
  Target: ATXN2; (+) strand; PAM type: YTN; PAM sequence: CTC
cgtctcaaaaaaaaaaaaaa

SEQ ID NO: 91700 - DNA, 20 bp, Artificial Sequence
  Description of Artificial Sequence: Synthetic oligonucleotide
  Target: ATXN2; (+) strand; PAM type: YTN; PAM sequence: CTC
aaaaaaaaaaaaaaagatag

SEQ ID NO: 91701 - DNA, 20 bp, Artificial Sequence
  Description of Artificial Sequence: Synthetic oligonucleotide
  Target: ATXN2; (+) strand; PAM type: YTN; PAM sequence: CTG
ggcacagtagctcatcactg

SEQ ID NO: 91702 - DNA, 20 bp, Artificial Sequence
  Description of Artificial Sequence: Synthetic oligonucleotide
  Target: ATXN2; (+) strand; PAM type: YTN; PAM sequence: CTC
atcactgtaattccagccct

SEQ ID NO: 91703 - DNA, 20 bp, Artificial Sequence
  Description of Artificial Sequence: Synthetic oligonucleotide
  Target: ATXN2; (+) strand; PAM type: YTN; PAM sequence: CTG
taattccagccctttgggag

SEQ ID NO: 91704 - DNA, 20 bp, Artificial Sequence
  Description of Artificial Sequence: Synthetic oligonucleotide
  Target: ATXN2; (+) strand; PAM type: YTN; PAM sequence: TTC
cagccctttgggaggctgag

SEQ ID NO: 91705 - DNA, 20 bp, Artificial Sequence
  Description of Artificial Sequence: Synthetic oligonucleotide
  Target: ATXN2; (+) strand; PAM type: YTN; PAM sequence: CTT
tgggaggctgagacaagcag

SEQ ID NO: 91706 - DNA, 20 bp, Artificial Sequence
  Description of Artificial Sequence: Synthetic oligonucleotide
  Target: ATXN2; (+) strand; PAM type: YTN; PAM sequence: TTT
gggaggctgagacaagcaga

SEQ ID NO: 91707 - DNA, 20 bp, Artificial Sequence
  Description of Artificial Sequence: Synthetic oligonucleotide
  Target: ATXN2; (+) strand; PAM type: YTN; PAM sequence: TTG
ggaggctgagacaagcagac

SEQ ID NO: 91708 - DNA, 20 bp, Artificial Sequence
  Description of Artificial Sequence: Synthetic oligonucleotide
  Target: ATXN2; (+) strand; PAM type: YTN; PAM sequence: CTG
agacaagcagactgcttaag

SEQ ID NO: 91709 - DNA, 20 bp, Artificial Sequence
  Description of Artificial Sequence: Synthetic oligonucleotide
  Target: ATXN2; (+) strand; PAM type: YTN; PAM sequence: CTG
cttaagctcaggagttcaag

SEQ ID NO: 91710 - DNA, 20 bp, Artificial Sequence
  Description of Artificial Sequence: Synthetic oligonucleotide
  Target: ATXN2; (+) strand; PAM type: YTN; PAM sequence: CTT
aagctcaggagttcaagacc

SEQ ID NO: 91711 - DNA, 20 bp, Artificial Sequence
  Description of Artificial Sequence: Synthetic oligonucleotide
  Target: ATXN2; (+) strand; PAM type: YTN; PAM sequence: TTA
agctcaggagttcaagacca

SEQ ID NO: 91712 - DNA, 20 bp, Artificial Sequence
  Description of Artificial Sequence: Synthetic oligonucleotide
  Target: ATXN2; (+) strand; PAM type: YTN; PAM sequence: CTC
aggagttcaagaccagcctg

SEQ ID NO: 91713 - DNA, 20 bp, Artificial Sequence
  Description of Artificial Sequence: Synthetic oligonucleotide
  Target: ATXN2; (+) strand; PAM type: YTN; PAM sequence: TTC
aagaccagcctgggcaacat

SEQ ID NO: 91714 - DNA, 20 bp, Artificial Sequence
  Description of Artificial Sequence: Synthetic oligonucleotide
  Target: ATXN2; (+) strand; PAM type: YTN; PAM sequence: CTG
ggcaacatagtgataccctg

SEQ ID NO: 91715 - DNA, 20 bp, Artificial Sequence
  Description of Artificial Sequence: Synthetic oligonucleotide
  Target: ATXN2; (+) strand; PAM type: YTN; PAM sequence: CTG
tctcatttaaaaaataataa

SEQ ID NO: 91716 - DNA, 20 bp, Artificial Sequence
  Description of Artificial Sequence: Synthetic oligonucleotide
  Target: ATXN2; (+) strand; PAM type: YTN; PAM sequence: CTC
atttaaaaaataataataaa

SEQ ID NO: 91717 - DNA, 20 bp, Artificial Sequence
  Description of Artificial Sequence: Synthetic oligonucleotide
  Target: ATXN2; (+) strand; PAM type: YTN; PAM sequence: TTT
aaaaaataataataaaataa

SEQ ID NO: 91718 - DNA, 20 bp, Artificial Sequence
  Description of Artificial Sequence: Synthetic oligonucleotide
  Target: ATXN2; (+) strand; PAM type: YTN; PAM sequence: TTA
aaaaataataataaaataaa

SEQ ID NO: 91719 - DNA, 20 bp, Artificial Sequence
  Description of Artificial Sequence: Synthetic oligonucleotide
  Target: ATXN2; (+) strand; PAM type: YTN; PAM sequence: CTG
gaccaagggtgagacacaca

SEQ ID NO: 91720 - DNA, 20 bp, Artificial Sequence
  Description of Artificial Sequence: Synthetic oligonucleotide
  Target: ATXN2; (+) strand; PAM type: YTN; PAM sequence: CTC
gtcaaaaggaatatgacaat

SEQ ID NO: 91721 - DNA, 20 bp, Artificial Sequence
  Description of Artificial Sequence: Synthetic oligonucleotide
  Target: ATXN2; (+) strand; PAM type: YTN; PAM sequence: CTT
aaaagctatgttcagggctg

SEQ ID NO: 91722 - DNA, 20 bp, Artificial Sequence
  Description of Artificial Sequence: Synthetic oligonucleotide
  Target: ATXN2; (+) strand; PAM type: YTN; PAM sequence: TTA
aaagctatgttcagggctgc

SEQ ID NO: 91723 - DNA, 20 bp, Artificial Sequence
  Description of Artificial Sequence: Synthetic oligonucleotide
  Target: ATXN2; (+) strand; PAM type: YTN; PAM sequence: CTA
tgttcagggctgcgtgcagt

SEQ ID NO: 91724 - DNA, 20 bp, Artificial Sequence
  Description of Artificial Sequence: Synthetic oligonucleotide
  Target: ATXN2; (+) strand; PAM type: YTN; PAM sequence: TTC
agggctgcgtgcagtggcta

SEQ ID NO: 91725 - DNA, 20 bp, Artificial Sequence
  Description of Artificial Sequence: Synthetic oligonucleotide
  Target: ATXN2; (+) strand; PAM type: YTN; PAM sequence: CTG
cgtgcagtggctaacaccta

SEQ ID NO: 91726 - DNA, 20 bp, Artificial Sequence
  Description of Artificial Sequence: Synthetic oligonucleotide
  Target: ATXN2; (+) strand; PAM type: YTN; PAM sequence: CTA
acacctatcatcctagcact

SEQ ID NO: 91727 - DNA, 20 bp, Artificial Sequence
  Description of Artificial Sequence: Synthetic oligonucleotide
  Target: ATXN2; (+) strand; PAM type: YTN; PAM sequence: CTA
tcatcctagcactttgggaa

SEQ ID NO: 91728 - DNA, 20 bp, Artificial Sequence
  Description of Artificial Sequence: Synthetic oligonucleotide
  Target: ATXN2; (+) strand; PAM type: YTN; PAM sequence: CTA
gcactttgggaagccaaggc

SEQ ID NO: 91729 - DNA, 20 bp, Artificial Sequence
  Description of Artificial Sequence: Synthetic oligonucleotide
  Target: ATXN2; (+) strand; PAM type: YTN; PAM sequence: CTT
tgggaagccaaggcaggtgg

SEQ ID NO: 91730 - DNA, 20 bp, Artificial Sequence
  Description of Artificial Sequence: Synthetic oligonucleotide
  Target: ATXN2; (+) strand; PAM type: YTN; PAM sequence: TTT
gggaagccaaggcaggtgga

SEQ ID NO: 91731 - DNA, 20 bp, Artificial Sequence
  Description of Artificial Sequence: Synthetic oligonucleotide
  Target: ATXN2; (+) strand; PAM type: YTN; PAM sequence: TTG
ggaagccaaggcaggtggat

SEQ ID NO: 91732 - DNA, 20 bp, Artificial Sequence
  Description of Artificial Sequence: Synthetic oligonucleotide
  Target: ATXN2; (+) strand; PAM type: YTN; PAM sequence: CTT
gaggtcaggagtttaagacc

SEQ ID NO: 91733 - DNA, 20 bp, Artificial Sequence
  Description of Artificial Sequence: Synthetic oligonucleotide
  Target: ATXN2; (+) strand; PAM type: YTN; PAM sequence: TTG
aggtcaggagtttaagacca

SEQ ID NO: 91734 - DNA, 20 bp, Artificial Sequence
  Description of Artificial Sequence: Synthetic oligonucleotide
  Target: ATXN2; (+) strand; PAM type: YTN; PAM sequence: TTT
aagaccagactggccaacat

SEQ ID NO: 91735 - DNA, 20 bp, Artificial Sequence
  Description of Artificial Sequence: Synthetic oligonucleotide
  Target: ATXN2; (+) strand; PAM type: YTN; PAM sequence: TTA
agaccagactggccaacatg

SEQ ID NO: 91736 - DNA, 20 bp, Artificial Sequence
  Description of Artificial Sequence: Synthetic oligonucleotide
  Target: ATXN2; (+) strand; PAM type: YTN; PAM sequence: CTG
gccaacatggtgaaactccg

SEQ ID NO: 91737 - DNA, 20 bp, Artificial Sequence
  Description of Artificial Sequence: Synthetic oligonucleotide
  Target: ATXN2; (+) strand; PAM type: YTN; PAM sequence: CTC
cgtctctactaaagataaaa

SEQ ID NO: 91738 - DNA, 20 bp, Artificial Sequence
  Description of Artificial Sequence: Synthetic oligonucleotide
  Target: ATXN2; (+) strand; PAM type: YTN; PAM sequence: CTC
tactaaagataaaaaaaaaa

SEQ ID NO: 91739 - DNA, 20 bp, Artificial Sequence
  Description of Artificial Sequence: Synthetic oligonucleotide
  Target: ATXN2; (+) strand; PAM type: YTN; PAM sequence: CTA
ctaaagataaaaaaaaaaaa

SEQ ID NO: 91740 - DNA, 20 bp, Artificial Sequence
  Description of Artificial Sequence: Synthetic oligonucleotide
  Target: ATXN2; (+) strand; PAM type: YTN; PAM sequence: CTA
aagataaaaaaaaaaaatta

SEQ ID NO: 91741 - DNA, 20 bp, Artificial Sequence
  Description of Artificial Sequence: Synthetic oligonucleotide
  Target: ATXN2; (+) strand; PAM type: YTN; PAM sequence: TTA
gccaggcgtgatggcacacg

SEQ ID NO: 91742 - DNA, 20 bp, Artificial Sequence
  Description of Artificial Sequence: Synthetic oligonucleotide
  Target: ATXN2; (+) strand; PAM type: YTN; PAM sequence: CTA
cttgggaggctgacatatga

SEQ ID NO: 91743 - DNA, 20 bp, Artificial Sequence
  Description of Artificial Sequence: Synthetic oligonucleotide
  Target: ATXN2; (+) strand; PAM type: YTN; PAM sequence: CTT
gggaggctgacatatgagaa

SEQ ID NO: 91744 - DNA, 20 bp, Artificial Sequence
  Description of Artificial Sequence: Synthetic oligonucleotide
  Target: ATXN2; (+) strand; PAM type: YTN; PAM sequence: TTG
ggaggctgacatatgagaat

SEQ ID NO: 91745 - DNA, 20 bp, Artificial Sequence
  Description of Artificial Sequence: Synthetic oligonucleotide
  Target: ATXN2; (+) strand; PAM type: YTN; PAM sequence: CTG
acatatgagaattgcttgaa

SEQ ID NO: 91746 - DNA, 20 bp, Artificial Sequence
  Description of Artificial Sequence: Synthetic oligonucleotide
  Target: ATXN2; (+) strand; PAM type: YTN; PAM sequence: TTG
cttgaacccaggaggcggag

SEQ ID NO: 91747 - DNA, 20 bp, Artificial Sequence
  Description of Artificial Sequence: Synthetic oligonucleotide
  Target: ATXN2; (+) strand; PAM type: YTN; PAM sequence: CTT
gaacccaggaggcggaggtt

SEQ ID NO: 91748 - DNA, 20 bp, Artificial Sequence
  Description of Artificial Sequence: Synthetic oligonucleotide
  Target: ATXN2; (+) strand; PAM type: YTN; PAM sequence: TTG
aacccaggaggcggaggttg

SEQ ID NO: 91749 - DNA, 20 bp, Artificial Sequence
  Description of Artificial Sequence: Synthetic oligonucleotide
  Target: ATXN2; (+) strand; PAM type: YTN; PAM sequence: TTG
cagtgagccaagatcacacc

SEQ ID NO: 91750 - DNA, 20 bp, Artificial Sequence
  Description of Artificial Sequence: Synthetic oligonucleotide
  Target: ATXN2; (+) strand; PAM type: YTN; PAM sequence: CTG
cactccagcctgggtgacag

SEQ ID NO: 91751 - DNA, 20 bp, Artificial Sequence
  Description of Artificial Sequence: Synthetic oligonucleotide
  Target: ATXN2; (+) strand; PAM type: YTN; PAM sequence: CTC
cagcctgggtgacagagcaa

SEQ ID NO: 91752 - DNA, 20 bp, Artificial Sequence
  Description of Artificial Sequence: Synthetic oligonucleotide
  Target: ATXN2; (+) strand; PAM type: YTN; PAM sequence: CTG
ggtgacagagcaagactcca

SEQ ID NO: 91753 - DNA, 20 bp, Artificial Sequence
  Description of Artificial Sequence: Synthetic oligonucleotide
  Target: ATXN2; (+) strand; PAM type: YTN; PAM sequence: CTC
catctaaaaattaaaaaaaa

SEQ ID NO: 91754 - DNA, 20 bp, Artificial Sequence
  Description of Artificial Sequence: Synthetic oligonucleotide
  Target: ATXN2; (+) strand; PAM type: YTN; PAM sequence: CTA
aaaattaaaaaaaaaaaaaa

SEQ ID NO: 91755 - DNA, 20 bp, Artificial Sequence
  Description of Artificial Sequence: Synthetic oligonucleotide
  Target: ATXN2; (+) strand; PAM type: YTN; PAM sequence: TTA
aaaaaaaaaaaaaaaaagtt

SEQ ID NO: 91756 - DNA, 20 bp, Artificial Sequence
  Description of Artificial Sequence: Synthetic oligonucleotide
  Target: ATXN2; (+) strand; PAM type: YTN; PAM sequence: TTT
taaaaagctacgtttaggac

SEQ ID NO: 91757 - DNA, 20 bp, Artificial Sequence
  Description of Artificial Sequence: Synthetic oligonucleotide
  Target: ATXN2; (+) strand; PAM type: YTN; PAM sequence: TTT
aaaaagctacgtttaggact

SEQ ID NO: 91758 - DNA, 20 bp, Artificial Sequence
  Description of Artificial Sequence: Synthetic oligonucleotide
  Target: ATXN2; (+) strand; PAM type: YTN; PAM sequence: TTA
aaaagctacgtttaggactt

SEQ ID NO: 91759 - DNA, 20 bp, Artificial Sequence
  Description of Artificial Sequence: Synthetic oligonucleotide
  Target: ATXN2; (+) strand; PAM type: YTN; PAM sequence: CTA
cgtttaggactttggctttt

SEQ ID NO: 91760 - DNA, 20 bp, Artificial Sequence
  Description of Artificial Sequence: Synthetic oligonucleotide
  Target: ATXN2; (+) strand; PAM type: YTN; PAM sequence: TTT
aggactttggcttttaattc

SEQ ID NO: 91761 - DNA, 20 bp, Artificial Sequence
  Description of Artificial Sequence: Synthetic oligonucleotide
  Target: ATXN2; (+) strand; PAM type: YTN; PAM sequence: TTA
ggactttggcttttaattct

SEQ ID NO: 91762 - DNA, 20 bp, Artificial Sequence
  Description of Artificial Sequence: Synthetic oligonucleotide
  Target: ATXN2; (+) strand; PAM type: YTN; PAM sequence: CTT
tggcttttaattctcagggc

SEQ ID NO: 91763 - DNA, 20 bp, Artificial Sequence
  Description of Artificial Sequence: Synthetic oligonucleotide
  Target: ATXN2; (+) strand; PAM type: YTN; PAM sequence: TTT
ggcttttaattctcagggca

SEQ ID NO: 91764 - DNA, 20 bp, Artificial Sequence
  Description of Artificial Sequence: Synthetic oligonucleotide
  Target: ATXN2; (+) strand; PAM type: YTN; PAM sequence: TTG
gcttttaattctcagggcaa

SEQ ID NO: 91765 - DNA, 20 bp, Artificial Sequence
  Description of Artificial Sequence: Synthetic oligonucleotide
  Target: ATXN2; (+) strand; PAM type: YTN; PAM sequence: CTT
ttaattctcagggcaaatgg

SEQ ID NO: 91766 - DNA, 20 bp, Artificial Sequence
  Description of Artificial Sequence: Synthetic oligonucleotide
  Target: ATXN2; (+) strand; PAM type: YTN; PAM sequence: TTT
taattctcagggcaaatggg

SEQ ID NO: 91767 - DNA, 20 bp, Artificial Sequence
  Description of Artificial Sequence: Synthetic oligonucleotide
  Target: ATXN2; (+) strand; PAM type: YTN; PAM sequence: TTT
aattctcagggcaaatgggc

SEQ ID NO: 91768 - DNA, 20 bp, Artificial Sequence
  Description of Artificial Sequence: Synthetic oligonucleotide
  Target: ATXN2; (+) strand; PAM type: YTN; PAM sequence: TTA
attctcagggcaaatgggca

SEQ ID NO: 91769 - DNA, 20 bp, Artificial Sequence
  Description of Artificial Sequence: Synthetic oligonucleotide
  Target: ATXN2; (+) strand; PAM type: YTN; PAM sequence: TTC
tcagggcaaatgggcagtct

SEQ ID NO: 91770 - DNA, 20 bp, Artificial Sequence
  Description of Artificial Sequence: Synthetic oligonucleotide
  Target: ATXN2; (+) strand; PAM type: YTN; PAM sequence: CTC
agggcaaatgggcagtctat

SEQ ID NO: 91771 - DNA, 20 bp, Artificial Sequence
  Description of Artificial Sequence: Synthetic oligonucleotide
  Target: ATXN2; (+) strand; PAM type: YTN; PAM sequence: CTA
tacggaattttaagtagggt

SEQ ID NO: 91772 - DNA, 20 bp, Artificial Sequence
  Description of Artificial Sequence: Synthetic oligonucleotide
  Target: ATXN2; (+) strand; PAM type: YTN; PAM sequence: TTT
taagtagggtagagtactgg

SEQ ID NO: 91773 - DNA, 20 bp, Artificial Sequence
  Description of Artificial Sequence: Synthetic oligonucleotide
  Target: ATXN2; (+) strand; PAM type: YTN; PAM sequence: TTT
aagtagggtagagtactggg

SEQ ID NO: 91774 - DNA, 20 bp, Artificial Sequence
  Description of Artificial Sequence: Synthetic oligonucleotide
  Target: ATXN2; (+) strand; PAM type: YTN; PAM sequence: TTA
agtagggtagagtactgggc

SEQ ID NO: 91775 - DNA, 20 bp, Artificial Sequence
  Description of Artificial Sequence: Synthetic oligonucleotide
  Target: ATXN2; (+) strand; PAM type: YTN; PAM sequence: CTG
ggcagatttatagttcagaa

SEQ ID NO: 91776 - DNA, 20 bp, Artificial Sequence
  Description of Artificial Sequence: Synthetic oligonucleotide
  Target: ATXN2; (+) strand; PAM type: YTN; PAM sequence: TTT
atagttcagaaaggtgaaca

SEQ ID NO: 91777 - DNA, 20 bp, Artificial Sequence
  Description of Artificial Sequence: Synthetic oligonucleotide
  Target: ATXN2; (+) strand; PAM type: YTN; PAM sequence: TTA
tagttcagaaaggtgaacac

SEQ ID NO: 91778 - DNA, 20 bp, Artificial Sequence
  Description of Artificial Sequence: Synthetic oligonucleotide
  Target: ATXN2; (+) strand; PAM type: YTN; PAM sequence: TTC
agaaaggtgaacacagcagc

SEQ ID NO: 91779 - DNA, 20 bp, Artificial Sequence
  Description of Artificial Sequence: Synthetic oligonucleotide
  Target: ATXN2; (+) strand; PAM type: YTN; PAM sequence: CTT
tgtgtgaaatgaactggagg

SEQ ID NO: 91780 - DNA, 20 bp, Artificial Sequence
  Description of Artificial Sequence: Synthetic oligonucleotide
  Target: ATXN2; (+) strand; PAM type: YTN; PAM sequence: TTT
gtgtgaaatgaactggaggg

SEQ ID NO: 91781 - DNA, 20 bp, Artificial Sequence
  Description of Artificial Sequence: Synthetic oligonucleotide
  Target: ATXN2; (+) strand; PAM type: YTN; PAM sequence: TTG
tgtgaaatgaactggaggga

SEQ ID NO: 91782 - DNA, 20 bp, Artificial Sequence
  Description of Artificial Sequence: Synthetic oligonucleotide
  Target: ATXN2; (+) strand; PAM type: YTN; PAM sequence: CTG
gagggaggctaattaggatg

SEQ ID NO: 91783 - DNA, 20 bp, Artificial Sequence
  Description of Artificial Sequence: Synthetic oligonucleotide
  Target: ATXN2; (+) strand; PAM type: YTN; PAM sequence: CTA
attaggatgtggagggaccg

SEQ ID NO: 91784 - DNA, 20 bp, Artificial Sequence
  Description of Artificial Sequence: Synthetic oligonucleotide
  Target: ATXN2; (+) strand; PAM type: YTN; PAM sequence: TTA
ggatgtggagggaccgtcat

SEQ ID NO: 91785 - DNA, 20 bp, Artificial Sequence
  Description of Artificial Sequence: Synthetic oligonucleotide
  Target: ATXN2; (+) strand; PAM type: YTN; PAM sequence: CTG
gactaagcgctgggcctagt

SEQ ID NO: 91786 - DNA, 20 bp, Artificial Sequence
  Description of Artificial Sequence: Synthetic oligonucleotide
  Target: ATXN2; (+) strand; PAM type: YTN; PAM sequence: CTA
agcgctgggcctagtcagct

SEQ ID NO: 91787 - DNA, 20 bp, Artificial Sequence
  Description of Artificial Sequence: Synthetic oligonucleotide
  Target: ATXN2; (+) strand; PAM type: YTN; PAM sequence: CTG
ggcctagtcagcttggaagg

SEQ ID NO: 91788 - DNA, 20 bp, Artificial Sequence
  Description of Artificial Sequence: Synthetic oligonucleotide
  Target: ATXN2; (+) strand; PAM type: YTN; PAM sequence: CTA
gtcagcttggaaggtcatta

SEQ ID NO: 91789 - DNA, 20 bp, Artificial Sequence
  Description of Artificial Sequence: Synthetic oligonucleotide
  Target: ATXN2; (+) strand; PAM type: YTN; PAM sequence: CTT
ggaaggtcattaagtaggtg

SEQ ID NO: 91790 - DNA, 20 bp, Artificial Sequence
  Description of Artificial Sequence: Synthetic oligonucleotide
  Target: ATXN2; (+) strand; PAM type: YTN; PAM sequence: TTG
gaaggtcattaagtaggtga

SEQ ID NO: 91791 - DNA, 20 bp, Artificial Sequence
  Description of Artificial Sequence: Synthetic oligonucleotide
  Target: ATXN2; (+) strand; PAM type: YTN; PAM sequence: TTA
agtaggtgaattcagaatga

SEQ ID NO: 91792 - DNA, 20 bp, Artificial Sequence
  Description of Artificial Sequence: Synthetic oligonucleotide
  Target: ATXN2; (+) strand; PAM type: YTN; PAM sequence: TTC
agaatgagacctgactgtac

SEQ ID NO: 91793 - DNA, 20 bp, Artificial Sequence
  Description of Artificial Sequence: Synthetic oligonucleotide
  Target: ATXN2; (+) strand; PAM type: YTN; PAM sequence: CTG
actgtacatattggtcagtt

SEQ ID NO: 91794 - DNA, 20 bp, Artificial Sequence
  Description of Artificial Sequence: Synthetic oligonucleotide
  Target: ATXN2; (+) strand; PAM type: YTN; PAM sequence: CTG
tacatattggtcagttagac

SEQ ID NO: 91795 - DNA, 20 bp, Artificial Sequence
  Description of Artificial Sequence: Synthetic oligonucleotide
  Target: ATXN2; (+) strand; PAM type: YTN; PAM sequence: TTG
gtcagttagacattctaaac

SEQ ID NO: 91796 - DNA, 20 bp, Artificial Sequence
  Description of Artificial Sequence: Synthetic oligonucleotide
  Target: ATXN2; (+) strand; PAM type: YTN; PAM sequence: TTA
gacattctaaacccctaagt

SEQ ID NO: 91797 - DNA, 20 bp, Artificial Sequence
  Description of Artificial Sequence: Synthetic oligonucleotide
  Target: ATXN2; (+) strand; PAM type: YTN; PAM sequence: TTC
taaacccctaagtaaaaaaa

SEQ ID NO: 91798 - DNA, 20 bp, Artificial Sequence
  Description of Artificial Sequence: Synthetic oligonucleotide
  Target: ATXN2; (+) strand; PAM type: YTN; PAM sequence: CTA
aacccctaagtaaaaaaagg

SEQ ID NO: 91799 - DNA, 20 bp, Artificial Sequence
  Description of Artificial Sequence: Synthetic oligonucleotide
  Target: ATXN2; (+) strand; PAM type: YTN; PAM sequence: CTA
agtaaaaaaaggagatggca

SEQ ID NO: 91800 - DNA, 20 bp, Artificial Sequence
  Description of Artificial Sequence: Synthetic oligonucleotide
  Target: ATXN2; (+) strand; PAM type: YTN; PAM sequence: CTT
ccagtgatcatccccaacaa

SEQ ID NO: 91801 - DNA, 20 bp, Artificial Sequence
  Description of Artificial Sequence: Synthetic oligonucleotide
  Target: ATXN2; (+) strand; PAM type: YTN; PAM sequence: TTC
cagtgatcatccccaacaag

SEQ ID NO: 91802 - DNA, 20 bp, Artificial Sequence
  Description of Artificial Sequence: Synthetic oligonucleotide
  Target: ATXN2; (+) strand; PAM type: YTN; PAM sequence: TTG
aacaactatccacacaagaa

SEQ ID NO: 91803 - DNA, 20 bp, Artificial Sequence
  Description of Artificial Sequence: Synthetic oligonucleotide
  Target: ATXN2; (+) strand; PAM type: YTN; PAM sequence: CTA
tccacacaagaaagcacctt

SEQ ID NO: 91804 - DNA, 20 bp, Artificial Sequence
  Description of Artificial Sequence: Synthetic oligonucleotide
  Target: ATXN2; (+) strand; PAM type: YTN; PAM sequence: CTT
cataagaaccaaaaattagg

SEQ ID NO: 91805 - DNA, 20 bp, Artificial Sequence
  Description of Artificial Sequence: Synthetic oligonucleotide
  Target: ATXN2; (+) strand; PAM type: YTN; PAM sequence: TTC
ataagaaccaaaaattaggt

SEQ ID NO: 91806 - DNA, 20 bp, Artificial Sequence
  Description of Artificial Sequence: Synthetic oligonucleotide
  Target: ATXN2; (+) strand; PAM type: YTN; PAM sequence: TTA
ggtaagcgatcacagtaccc

SEQ ID NO: 91807 - DNA, 20 bp, Artificial Sequence
  Description of Artificial Sequence: Synthetic oligonucleotide
  Target: ATXN2; (+) strand; PAM type: YTN; PAM sequence: TTT
tgacatcctatcaaggaaaa

SEQ ID NO: 91808 - DNA, 20 bp, Artificial Sequence
  Description of Artificial Sequence: Synthetic oligonucleotide
  Target: ATXN2; (+) strand; PAM type: YTN; PAM sequence: TTT
gacatcctatcaaggaaaaa

SEQ ID NO: 91809 - DNA, 20 bp, Artificial Sequence
  Description of Artificial Sequence: Synthetic oligonucleotide
  Target: ATXN2; (+) strand; PAM type: YTN; PAM sequence: TTG
acatcctatcaaggaaaaag

SEQ ID NO: 91810 - DNA, 20 bp, Artificial Sequence
  Description of Artificial Sequence: Synthetic oligonucleotide
  Target: ATXN2; (+) strand; PAM type: YTN; PAM sequence: CTA
tcaaggaaaaagacaccaaa

SEQ ID NO: 91811 - DNA, 20 bp, Artificial Sequence
  Description of Artificial Sequence: Synthetic oligonucleotide
  Target: ATXN2; (+) strand; PAM type: YTN; PAM sequence: CTT
gaactgcccctccaacaccc

SEQ ID NO: 91812 - DNA, 20 bp, Artificial Sequence
  Description of Artificial Sequence: Synthetic oligonucleotide
  Target: ATXN2; (+) strand; PAM type: YTN; PAM sequence: TTG
aactgcccctccaacacccc

SEQ ID NO: 91813 - DNA, 20 bp, Artificial Sequence
  Description of Artificial Sequence: Synthetic oligonucleotide
  Target: ATXN2; (+) strand; PAM type: YTN; PAM sequence: CTG
cccctccaacacccctgaca

SEQ ID NO: 91814 - DNA, 20 bp, Artificial Sequence
  Description of Artificial Sequence: Synthetic oligonucleotide
  Target: ATXN2; (+) strand; PAM type: YTN; PAM sequence: CTC
caacacccctgacattcccc

SEQ ID NO: 91815 - DNA, 20 bp, Artificial Sequence
  Description of Artificial Sequence: Synthetic oligonucleotide
  Target: ATXN2; (+) strand; PAM type: YTN; PAM sequence: CTG
acattcccccacaatgcagt

SEQ ID NO: 91816 - DNA, 20 bp, Artificial Sequence
  Description of Artificial Sequence: Synthetic oligonucleotide
  Target: ATXN2; (+) strand; PAM type: YTN; PAM sequence: TTC
ccccacaatgcagtgtgggg

SEQ ID NO: 91817 - DNA, 20 bp, Artificial Sequence
  Description of Artificial Sequence: Synthetic oligonucleotide
  Target: ATXN2; (+) strand; PAM type: YTN; PAM sequence: CTG
tgtgctcgggggagagagag

SEQ ID NO: 91818 - DNA, 20 bp, Artificial Sequence
  Description of Artificial Sequence: Synthetic oligonucleotide
  Target: ATXN2; (+) strand; PAM type: YTN; PAM sequence: CTC
gggggagagagagagaaatg

SEQ ID NO: 91819 - DNA, 20 bp, Artificial Sequence
  Description of Artificial Sequence: Synthetic oligonucleotide
  Target: ATXN2; (+) strand; PAM type: YTN; PAM sequence: CTG
tgggattttgcattgaaact

SEQ ID NO: 91820 - DNA, 20 bp, Artificial Sequence
  Description of Artificial Sequence: Synthetic oligonucleotide
  Target: ATXN2; (+) strand; PAM type: YTN; PAM sequence: TTT
tgcattgaaactcagtgctg

SEQ ID NO: 91821 - DNA, 20 bp, Artificial Sequence
  Description of Artificial Sequence: Synthetic oligonucleotide
  Target: ATXN2; (+) strand; PAM type: YTN; PAM sequence: TTT
gcattgaaactcagtgctgc

SEQ ID NO: 91822 - DNA, 20 bp, Artificial Sequence
  Description of Artificial Sequence: Synthetic oligonucleotide
  Target: ATXN2; (+) strand; PAM type: YTN; PAM sequence: TTG
cattgaaactcagtgctgcc

SEQ ID NO: 91823 - DNA, 20 bp, Artificial Sequence
  Description of Artificial Sequence: Synthetic oligonucleotide
  Target: ATXN2; (+) strand; PAM type: YTN; PAM sequence: TTG
aaactcagtgctgccctgtc

SEQ ID NO: 91824 - DNA, 20 bp, Artificial Sequence
  Description of Artificial Sequence: Synthetic oligonucleotide
  Target: ATXN2; (+) strand; PAM type: YTN; PAM sequence: CTC
agtgctgccctgtcacagtg

SEQ ID NO: 91825 - DNA, 20 bp, Artificial Sequence
  Description of Artificial Sequence: Synthetic oligonucleotide
  Target: ATXN2; (+) strand; PAM type: YTN; PAM sequence: CTG
ccctgtcacagtggaaagca

SEQ ID NO: 91826 - DNA, 20 bp, Artificial Sequence
  Description of Artificial Sequence: Synthetic oligonucleotide
  Target: ATXN2; (+) strand; PAM type: YTN; PAM sequence: CTG
tcacagtggaaagcagcata

SEQ ID NO: 91827 - DNA, 20 bp, Artificial Sequence
  Description of Artificial Sequence: Synthetic oligonucleotide
  Target: ATXN2; (+) strand; PAM type: YTN; PAM sequence: TTC
agccagcacccacagaggga

SEQ ID NO: 91828 - DNA, 20 bp, Artificial Sequence
  Description of Artificial Sequence: Synthetic oligonucleotide
  Target: ATXN2; (+) strand; PAM type: YTN; PAM sequence: TTT
agactagccctagtcagagg

SEQ ID NO: 91829 - DNA, 20 bp, Artificial Sequence
  Description of Artificial Sequence: Synthetic oligonucleotide
  Target: ATXN2; (+) strand; PAM type: YTN; PAM sequence: TTA
gactagccctagtcagaggg

SEQ ID NO: 91830 - DNA, 20 bp, Artificial Sequence
  Description of Artificial Sequence: Synthetic oligonucleotide
  Target: ATXN2; (+) strand; PAM type: YTN; PAM sequence: CTA
gccctagtcagaggggaatt

SEQ ID NO: 91831 - DNA, 20 bp, Artificial Sequence
  Description of Artificial Sequence: Synthetic oligonucleotide
  Target: ATXN2; (+) strand; PAM type: YTN; PAM sequence: CTA
gtcagaggggaattgtccat

SEQ ID NO: 91832 - DNA, 20 bp, Artificial Sequence
  Description of Artificial Sequence: Synthetic oligonucleotide
  Target: ATXN2; (+) strand; PAM type: YTN; PAM sequence: TTG
tccatcccagtgattagaat

SEQ ID NO: 91833 - DNA, 20 bp, Artificial Sequence
  Description of Artificial Sequence: Synthetic oligonucleotide
  Target: ATXN2; (+) strand; PAM type: YTN; PAM sequence: TTA
gaatctgaatttcgggctgg

SEQ ID NO: 91834 - DNA, 20 bp, Artificial Sequence
  Description of Artificial Sequence: Synthetic oligonucleotide
  Target: ATXN2; (+) strand; PAM type: YTN; PAM sequence: CTG
aatttcgggctgggcactat

SEQ ID NO: 91835 - DNA, 20 bp, Artificial Sequence
  Description of Artificial Sequence: Synthetic oligonucleotide
  Target: ATXN2; (+) strand; PAM type: YTN; PAM sequence: TTT
cgggctgggcactatggtct

SEQ ID NO: 91836 - DNA, 20 bp, Artificial Sequence
  Description of Artificial Sequence: Synthetic oligonucleotide
  Target: ATXN2; (+) strand; PAM type: YTN; PAM sequence: TTC
gggctgggcactatggtctg

SEQ ID NO: 91837 - DNA, 20 bp, Artificial Sequence
  Description of Artificial Sequence: Synthetic oligonucleotide
  Target: ATXN2; (+) strand; PAM type: YTN; PAM sequence: CTG
ggcactatggtctgtaatcc

SEQ ID NO: 91838 - DNA, 20 bp, Artificial Sequence
  Description of Artificial Sequence: Synthetic oligonucleotide
  Target: ATXN2; (+) strand; PAM type: YTN; PAM sequence: CTA
tggtctgtaatcccagcact

SEQ ID NO: 91839 - DNA, 20 bp, Artificial Sequence
  Description of Artificial Sequence: Synthetic oligonucleotide
  Target: ATXN2; (+) strand; PAM type: YTN; PAM sequence: CTG
taatcccagcactttgggag

SEQ ID NO: 91840 - DNA, 20 bp, Artificial Sequence
  Description of Artificial Sequence: Synthetic oligonucleotide
  Target: ATXN2; (+) strand; PAM type: YTN; PAM sequence: CTT
tgggaggccgaggcggacgg

SEQ ID NO: 91841 - DNA, 20 bp, Artificial Sequence
  Description of Artificial Sequence: Synthetic oligonucleotide
  Target: ATXN2; (+) strand; PAM type: YTN; PAM sequence: TTT
gggaggccgaggcggacgga

SEQ ID NO: 91842 - DNA, 20 bp, Artificial Sequence
  Description of Artificial Sequence: Synthetic oligonucleotide
  Target: ATXN2; (+) strand; PAM type: YTN; PAM sequence: TTG
ggaggccgaggcggacggat

SEQ ID NO: 91843 - DNA, 20 bp, Artificial Sequence
  Description of Artificial Sequence: Synthetic oligonucleotide
  Target: ATXN2; (+) strand; PAM type: YTN; PAM sequence: CTG
aggtcgggagttcaagacca

SEQ ID NO: 91844 - DNA, 20 bp, Artificial Sequence
  Description of Artificial Sequence: Synthetic oligonucleotide
  Target: ATXN2; (+) strand; PAM type: YTN; PAM sequence: TTC
aagaccagcctgaccaacat

SEQ ID NO: 91845 - DNA, 20 bp, Artificial Sequence
  Description of Artificial Sequence: Synthetic oligonucleotide
  Target: ATXN2; (+) strand; PAM type: YTN; PAM sequence: CTG
accaacatggagaaacctca

SEQ ID NO: 91846 - DNA, 20 bp, Artificial Sequence
  Description of Artificial Sequence: Synthetic oligonucleotide
  Target: ATXN2; (+) strand; PAM type: YTN; PAM sequence: CTC
atctctactaaaaaacaaaa

SEQ ID NO: 91847 - DNA, 20 bp, Artificial Sequence
  Description of Artificial Sequence: Synthetic oligonucleotide
  Target: ATXN2; (+) strand; PAM type: YTN; PAM sequence: CTC
tactaaaaaacaaaaaaatt

SEQ ID NO: 91848 - DNA, 20 bp, Artificial Sequence
  Description of Artificial Sequence: Synthetic oligonucleotide
  Target: ATXN2; (+) strand; PAM type: YTN; PAM sequence: CTA
ctaaaaaacaaaaaaattag

SEQ ID NO: 91849 - DNA, 20 bp, Artificial Sequence
  Description of Artificial Sequence: Synthetic oligonucleotide
  Target: ATXN2; (+) strand; PAM type: YTN; PAM sequence: CTA
aaaaacaaaaaaattagcca

SEQ ID NO: 91850 - DNA, 20 bp, Artificial Sequence
  Description of Artificial Sequence: Synthetic oligonucleotide
  Target: ATXN2; (+) strand; PAM type: YTN; PAM sequence: TTA
gccagaggtggtagcgcatg

SEQ ID NO: 91851 - DNA, 20 bp, Artificial Sequence
  Description of Artificial Sequence: Synthetic oligonucleotide
  Target: ATXN2; (+) strand; PAM type: YTN; PAM sequence: CTA
ctcaggaggctgaggtagga

SEQ ID NO: 91852 - DNA, 20 bp, Artificial Sequence
  Description of Artificial Sequence: Synthetic oligonucleotide
  Target: ATXN2; (+) strand; PAM type: YTN; PAM sequence: CTC
aggaggctgaggtaggagaa

SEQ ID NO: 91853 - DNA, 20 bp, Artificial Sequence
  Description of Artificial Sequence: Synthetic oligonucleotide
  Target: ATXN2; (+) strand; PAM type: YTN; PAM sequence: CTG
aggtaggagaattatttgaa

SEQ ID NO: 91854 - DNA, 20 bp, Artificial Sequence
  Description of Artificial Sequence: Synthetic oligonucleotide
  Target: ATXN2; (+) strand; PAM type: YTN; PAM sequence: TTA
tttgaacccgggaggcggag

SEQ ID NO: 91855 - DNA, 20 bp, Artificial Sequence
  Description of Artificial Sequence: Synthetic oligonucleotide
  Target: ATXN2; (+) strand; PAM type: YTN; PAM sequence: TTT
gaacccgggaggcggaggtt

SEQ ID NO: 91856 - DNA, 20 bp, Artificial Sequence
  Description of Artificial Sequence: Synthetic oligonucleotide
  Target: ATXN2; (+) strand; PAM type: YTN; PAM sequence: TTG
aacccgggaggcggaggttg

SEQ ID NO: 91857 - DNA, 20 bp, Artificial Sequence
  Description of Artificial Sequence: Synthetic oligonucleotide
  Target: ATXN2; (+) strand; PAM type: YTN; PAM sequence: TTG
tggtgagctgagattgcgtc

SEQ ID NO: 91858 - DNA, 20 bp, Artificial Sequence
  Description of Artificial Sequence: Synthetic oligonucleotide
  Target: ATXN2; (+) strand; PAM type: YTN; PAM sequence: CTG
agattgcgtcactatactcc

SEQ ID NO: 91859 - DNA, 20 bp, Artificial Sequence
  Description of Artificial Sequence: Synthetic oligonucleotide
  Target: ATXN2; (+) strand; PAM type: YTN; PAM sequence: TTG
cgtcactatactccagcctg

SEQ ID NO: 91860 - DNA, 20 bp, Artificial Sequence
  Description of Artificial Sequence: Synthetic oligonucleotide
  Target: ATXN2; (+) strand; PAM type: YTN; PAM sequence: CTA
tactccagcctgggcaataa

SEQ ID NO: 91861 - DNA, 20 bp, Artificial Sequence
  Description of Artificial Sequence: Synthetic oligonucleotide
  Target: ATXN2; (+) strand; PAM type: YTN; PAM sequence: CTC
cagcctgggcaataagagcg

SEQ ID NO: 91862 - DNA, 20 bp, Artificial Sequence
  Description of Artificial Sequence: Synthetic oligonucleotide
  Target: ATXN2; (+) strand; PAM type: YTN; PAM sequence: CTG
ggcaataagagcgaaactct

SEQ ID NO: 91863 - DNA, 20 bp, Artificial Sequence
  Description of Artificial Sequence: Synthetic oligonucleotide
  Target: ATXN2; (+) strand; PAM type: YTN; PAM sequence: CTC
tgccaaaaaaaaccaaaaga

SEQ ID NO: 91864 - DNA, 20 bp, Artificial Sequence
  Description of Artificial Sequence: Synthetic oligonucleotide
  Target: ATXN2; (+) strand; PAM type: YTN; PAM sequence: CTG
ccaaaaaaaaccaaaagaat

SEQ ID NO: 91865 - DNA, 20 bp, Artificial Sequence
  Description of Artificial Sequence: Synthetic oligonucleotide
  Target: ATXN2; (+) strand; PAM type: YTN; PAM sequence: CTT
aattttggtaagccccacca

SEQ ID NO: 91866 - DNA, 20 bp, Artificial Sequence
  Description of Artificial Sequence: Synthetic oligonucleotide
  Target: ATXN2; (+) strand; PAM type: YTN; PAM sequence: TTA
attttggtaagccccaccac

SEQ ID NO: 91867 - DNA, 20 bp, Artificial Sequence
  Description of Artificial Sequence: Synthetic oligonucleotide
  Target: ATXN2; (+) strand; PAM type: YTN; PAM sequence: TTT
tggtaagccccaccaccgtg

SEQ ID NO: 91868 - DNA, 20 bp, Artificial Sequence
  Description of Artificial Sequence: Synthetic oligonucleotide
  Target: ATXN2; (+) strand; PAM type: YTN; PAM sequence: TTT
ggtaagccccaccaccgtgg

SEQ ID NO: 91869 - DNA, 20 bp, Artificial Sequence
  Description of Artificial Sequence: Synthetic oligonucleotide
  Target: ATXN2; (+) strand; PAM type: YTN; PAM sequence: TTG
gtaagccccaccaccgtggg

SEQ ID NO: 91870 - DNA, 20 bp, Artificial Sequence
  Description of Artificial Sequence: Synthetic oligonucleotide
  Target: ATXN2; (+) strand; PAM type: YTN; PAM sequence: CTC
tggggtcctaaataaacttg

SEQ ID NO: 91871 - DNA, 20 bp, Artificial Sequence
  Description of Artificial Sequence: Synthetic oligonucleotide
  Target: ATXN2; (+) strand; PAM type: YTN; PAM sequence: CTG
gggtcctaaataaacttgaa

SEQ ID NO: 91872 - DNA, 20 bp, Artificial Sequence
  Description of Artificial Sequence: Synthetic oligonucleotide
  Target: ATXN2; (+) strand; PAM type: YTN; PAM sequence: CTA
aataaacttgaaaggcagtc

SEQ ID NO: 91873 - DNA, 20 bp, Artificial Sequence
  Description of Artificial Sequence: Synthetic oligonucleotide
  Target: ATXN2; (+) strand; PAM type: YTN; PAM sequence: CTT
gaaaggcagtctagaccaga

SEQ ID NO: 91874 - DNA, 20 bp, Artificial Sequence
  Description of Artificial Sequence: Synthetic oligonucleotide
  Target: ATXN2; (+) strand; PAM type: YTN; PAM sequence: TTG
aaaggcagtctagaccagaa

SEQ ID NO: 91875 - DNA, 20 bp, Artificial Sequence
  Description of Artificial Sequence: Synthetic oligonucleotide
  Target: ATXN2; (+) strand; PAM type: YTN; PAM sequence: CTA
gaccagaaggactgcaattc

SEQ ID NO: 91876 - DNA, 20 bp, Artificial Sequence
  Description of Artificial Sequence: Synthetic oligonucleotide
  Target: ATXN2; (+) strand; PAM type: YTN; PAM sequence: CTG
caattcctggacaagtcatg

SEQ ID NO: 91877 - DNA, 20 bp, Artificial Sequence
  Description of Artificial Sequence: Synthetic oligonucleotide
  Target: ATXN2; (+) strand; PAM type: YTN; PAM sequence: TTC
ctggacaagtcatggtactg

SEQ ID NO: 91878 - DNA, 20 bp, Artificial Sequence
  Description of Artificial Sequence: Synthetic oligonucleotide
  Target: ATXN2; (+) strand; PAM type: YTN; PAM sequence: CTG
gacaagtcatggtactgtgc

SEQ ID NO: 91879 - DNA, 20 bp, Artificial Sequence
  Description of Artificial Sequence: Synthetic oligonucleotide
  Target: ATXN2; (+) strand; PAM type: YTN; PAM sequence: CTG
tgctgggctcatagtcagtg

SEQ ID NO: 91880 - DNA, 20 bp, Artificial Sequence
  Description of Artificial Sequence: Synthetic oligonucleotide
  Target: ATXN2; (+) strand; PAM type: YTN; PAM sequence: CTG
ggctcatagtcagtggactt

SEQ ID NO: 91881 - DNA, 20 bp, Artificial Sequence
  Description of Artificial Sequence: Synthetic oligonucleotide
  Target: ATXN2; (+) strand; PAM type: YTN; PAM sequence: CTC
atagtcagtggacttggggt

SEQ ID NO: 91882 - DNA, 20 bp, Artificial Sequence
  Description of Artificial Sequence: Synthetic oligonucleotide
  Target: ATXN2; (+) strand; PAM type: YTN; PAM sequence: CTT
ggggtacatgtgacccactg

SEQ ID NO: 91883 - DNA, 20 bp, Artificial Sequence
  Description of Artificial Sequence: Synthetic oligonucleotide
  Target: ATXN2; (+) strand; PAM type: YTN; PAM sequence: TTG
gggtacatgtgacccactga

SEQ ID NO: 91884 - DNA, 20 bp, Artificial Sequence
  Description of Artificial Sequence: Synthetic oligonucleotide
  Target: ATXN2; (+) strand; PAM type: YTN; PAM sequence: CTG
agacaccagctagggtggcc

SEQ ID NO: 91885 - DNA, 20 bp, Artificial Sequence
  Description of Artificial Sequence: Synthetic oligonucleotide
  Target: ATXN2; (+) strand; PAM type: YTN; PAM sequence: CTA
gggtggccaagggagtgctt

SEQ ID NO: 91886 - DNA, 20 bp, Artificial Sequence
  Description of Artificial Sequence: Synthetic oligonucleotide
  Target: ATXN2; (+) strand; PAM type: YTN; PAM sequence: CTT
gtgccagccttcccccaact

SEQ ID NO: 91887 - DNA, 20 bp, Artificial Sequence
  Description of Artificial Sequence: Synthetic oligonucleotide
  Target: ATXN2; (+) strand; PAM type: YTN; PAM sequence: TTG
tgccagccttcccccaactc

SEQ ID NO: 91888 - DNA, 20 bp, Artificial Sequence
  Description of Artificial Sequence: Synthetic oligonucleotide
  Target: ATXN2; (+) strand; PAM type: YTN; PAM sequence: CTT
cccccaactccaggtaccac

SEQ ID NO: 91889 - DNA, 20 bp, Artificial Sequence
  Description of Artificial Sequence: Synthetic oligonucleotide
  Target: ATXN2; (+) strand; PAM type: YTN; PAM sequence: TTC
ccccaactccaggtaccaca

SEQ ID NO: 91890 - DNA, 20 bp, Artificial Sequence
  Description of Artificial Sequence: Synthetic oligonucleotide
  Target: ATXN2; (+) strand; PAM type: YTN; PAM sequence: CTC
caggtaccacagctcacagc

SEQ ID NO: 91891 - DNA, 20 bp, Artificial Sequence
  Description of Artificial Sequence: Synthetic oligonucleotide
  Target: ATXN2; (+) strand; PAM type: YTN; PAM sequence: CTC
acagctctgggaggagaggg

SEQ ID NO: 91892 - DNA, 20 bp, Artificial Sequence
  Description of Artificial Sequence: Synthetic oligonucleotide
  Target: ATXN2; (+) strand; PAM type: YTN; PAM sequence: CTC
tgggaggagagggaagagta

SEQ ID NO: 91893 - DNA, 20 bp, Artificial Sequence
  Description of Artificial Sequence: Synthetic oligonucleotide
  Target: ATXN2; (+) strand; PAM type: YTN; PAM sequence: CTG
ggaggagagggaagagtagg

SEQ ID NO: 91894 - DNA, 20 bp, Artificial Sequence
  Description of Artificial Sequence: Synthetic oligonucleotide
  Target: ATXN2; (+) strand; PAM type: YTN; PAM sequence: CTT
tgtcttgcaatgtggatact

SEQ ID NO: 91895 - DNA, 20 bp, Artificial Sequence
  Description of Artificial Sequence: Synthetic oligonucleotide
  Target: ATXN2; (+) strand; PAM type: YTN; PAM sequence: TTT
gtcttgcaatgtggatacta

SEQ ID NO: 91896 - DNA, 20 bp, Artificial Sequence
  Description of Artificial Sequence: Synthetic oligonucleotide
  Target: ATXN2; (+) strand; PAM type: YTN; PAM sequence: TTG
tcttgcaatgtggatactag

SEQ ID NO: 91897 - DNA, 20 bp, Artificial Sequence
  Description of Artificial Sequence: Synthetic oligonucleotide
  Target: ATXN2; (+) strand; PAM type: YTN; PAM sequence: CTT
gcaatgtggatactagttca

SEQ ID NO: 91898 - DNA, 20 bp, Artificial Sequence
  Description of Artificial Sequence: Synthetic oligonucleotide
  Target: ATXN2; (+) strand; PAM type: YTN; PAM sequence: TTG
caatgtggatactagttcag

SEQ ID NO: 91899 - DNA, 20 bp, Artificial Sequence
  Description of Artificial Sequence: Synthetic oligonucleotide
  Target: ATXN2; (+) strand; PAM type: YTN; PAM sequence: CTA
gttcagccacagtaaaataa

SEQ ID NO: 91900 - DNA, 20 bp, Artificial Sequence
  Description of Artificial Sequence: Synthetic oligonucleotide
  Target: ATXN2; (+) strand; PAM type: YTN; PAM sequence: TTC
agccacagtaaaataaagca

SEQ ID NO: 91901 - DNA, 20 bp, Artificial Sequence
  Description of Artificial Sequence: Synthetic oligonucleotide
  Target: ATXN2; (+) strand; PAM type: YTN; PAM sequence: TTC
tgaagcctcaattctaggcc

SEQ ID NO: 91902 - DNA, 20 bp, Artificial Sequence
  Description of Artificial Sequence: Synthetic oligonucleotide
  Target: ATXN2; (+) strand; PAM type: YTN; PAM sequence: CTG
aagcctcaattctaggccat

SEQ ID NO: 91903 - DNA, 20 bp, Artificial Sequence
  Description of Artificial Sequence: Synthetic oligonucleotide
  Target: ATXN2; (+) strand; PAM type: YTN; PAM sequence: CTC
aattctaggccatagctccc

SEQ ID NO: 91904 - DNA, 20 bp, Artificial Sequence
  Description of Artificial Sequence: Synthetic oligonucleotide
  Target: ATXN2; (+) strand; PAM type: YTN; PAM sequence: TTC
taggccatagctcccagatg

SEQ ID NO: 91905 - DNA, 20 bp, Artificial Sequence
  Description of Artificial Sequence: Synthetic oligonucleotide
  Target: ATXN2; (+) strand; PAM type: YTN; PAM sequence: CTA
ggccatagctcccagatgac

SEQ ID NO: 91906 - DNA, 20 bp, Artificial Sequence
  Description of Artificial Sequence: Synthetic oligonucleotide
  Target: ATXN2; (+) strand; PAM type: YTN; PAM sequence: CTC
ccagatgacatttctagaca

SEQ ID NO: 91907 - DNA, 20 bp, Artificial Sequence
  Description of Artificial Sequence: Synthetic oligonucleotide
  Target: ATXN2; (+) strand; PAM type: YTN; PAM sequence: TTT
ctagacatattctggaccag

SEQ ID NO: 91908 - DNA, 20 bp, Artificial Sequence
  Description of Artificial Sequence: Synthetic oligonucleotide
  Target: ATXN2; (+) strand; PAM type: YTN; PAM sequence: TTC
tagacatattctggaccaga

SEQ ID NO: 91909 - DNA, 20 bp, Artificial Sequence
  Description of Artificial Sequence: Synthetic oligonucleotide
  Target: ATXN2; (+) strand; PAM type: YTN; PAM sequence: CTA
gacatattctggaccagaag

SEQ ID NO: 91910 - DNA, 20 bp, Artificial Sequence
  Description of Artificial Sequence: Synthetic oligonucleotide
  Target: ATXN2; (+) strand; PAM type: YTN; PAM sequence: TTC
tggaccagaagggaacccat

SEQ ID NO: 91911 - DNA, 20 bp, Artificial Sequence
  Description of Artificial Sequence: Synthetic oligonucleotide
  Target: ATXN2; (+) strand; PAM type: YTN; PAM sequence: CTG
gaccagaagggaacccattg

SEQ ID NO: 91912 - DNA, 20 bp, Artificial Sequence
  Description of Artificial Sequence: Synthetic oligonucleotide
  Target: ATXN2; (+) strand; PAM type: YTN; PAM sequence: TTG
ccttgaagggaaatacctag

SEQ ID NO: 91913 - DNA, 20 bp, Artificial Sequence
  Description of Artificial Sequence: Synthetic oligonucleotide
  Target: ATXN2; (+) strand; PAM type: YTN; PAM sequence: CTT
gaagggaaatacctagtcct

SEQ ID NO: 91914 - DNA, 20 bp, Artificial Sequence
  Description of Artificial Sequence: Synthetic oligonucleotide
  Target: ATXN2; (+) strand; PAM type: YTN; PAM sequence: TTG
aagggaaatacctagtccta

SEQ ID NO: 91915 - DNA, 20 bp, Artificial Sequence
  Description of Artificial Sequence: Synthetic oligonucleotide
  Target: ATXN2; (+) strand; PAM type: YTN; PAM sequence: CTA
gtcctagtaggattcaccac

SEQ ID NO: 91916 - DNA, 20 bp, Artificial Sequence
  Description of Artificial Sequence: Synthetic oligonucleotide
  Target: ATXN2; (+) strand; PAM type: YTN; PAM sequence: CTA
gtaggattcaccaccagctg

SEQ ID NO: 91917 - DNA, 20 bp, Artificial Sequence
  Description of Artificial Sequence: Synthetic oligonucleotide
  Target: ATXN2; (+) strand; PAM type: YTN; PAM sequence: TTC
accaccagctgactaaagag

SEQ ID NO: 91918 - DNA, 20 bp, Artificial Sequence
  Description of Artificial Sequence: Synthetic oligonucleotide
  Target: ATXN2; (+) strand; PAM type: YTN; PAM sequence: CTG
actaaagagcccttgtgcct

SEQ ID NO: 91919 - DNA, 20 bp, Artificial Sequence
  Description of Artificial Sequence: Synthetic oligonucleotide
  Target: ATXN2; (+) strand; PAM type: YTN; PAM sequence: CTA
aagagcccttgtgccttgaa

SEQ ID NO: 91920 - DNA, 20 bp, Artificial Sequence
  Description of Artificial Sequence: Synthetic oligonucleotide
  Target: ATXN2; (+) strand; PAM type: YTN; PAM sequence: CTT
gtgccttgaataaaaaacaa

SEQ ID NO: 91921 - DNA, 20 bp, Artificial Sequence
  Description of Artificial Sequence: Synthetic oligonucleotide
  Target: ATXN2; (+) strand; PAM type: YTN; PAM sequence: TTG
tgccttgaataaaaaacaag

SEQ ID NO: 91922 - DNA, 20 bp, Artificial Sequence
  Description of Artificial Sequence: Synthetic oligonucleotide
  Target: ATXN2; (+) strand; PAM type: YTN; PAM sequence: CTT
gaataaaaaacaaggtgcca

SEQ ID NO: 91923 - DNA, 20 bp, Artificial Sequence
  Description of Artificial Sequence: Synthetic oligonucleotide
  Target: ATXN2; (+) strand; PAM type: YTN; PAM sequence: TTG
aataaaaaacaaggtgccat

SEQ ID NO: 91924 - DNA, 20 bp, Artificial Sequence
  Description of Artificial Sequence: Synthetic oligonucleotide
  Target: ATXN2; (+) strand; PAM type: YTN; PAM sequence: TTG
tgccagcttcagatatgacc

SEQ ID NO: 91925 - DNA, 20 bp, Artificial Sequence
  Description of Artificial Sequence: Synthetic oligonucleotide
  Target: ATXN2; (+) strand; PAM type: YTN; PAM sequence: CTT
cagatatgaccccgcacatt

SEQ ID NO: 91926 - DNA, 20 bp, Artificial Sequence
  Description of Artificial Sequence: Synthetic oligonucleotide
  Target: ATXN2; (+) strand; PAM type: YTN; PAM sequence: TTC
agatatgaccccgcacattc

SEQ ID NO: 91927 - DNA, 20 bp, Artificial Sequence
  Description of Artificial Sequence: Synthetic oligonucleotide
  Target: ATXN2; (+) strand; PAM type: YTN; PAM sequence: TTC
acagctgtggtgtccatggg

SEQ ID NO: 91928 - DNA, 20 bp, Artificial Sequence
  Description of Artificial Sequence: Synthetic oligonucleotide
  Target: ATXN2; (+) strand; PAM type: YTN; PAM sequence: CTG
tggtgtccatggggagaccc

SEQ ID NO: 91929 - DNA, 20 bp, Artificial Sequence
  Description of Artificial Sequence: Synthetic oligonucleotide
  Target: ATXN2; (+) strand; PAM type: YTN; PAM sequence: CTG
cttgaggtgagagaagagta

SEQ ID NO: 91930 - DNA, 20 bp, Artificial Sequence
  Description of Artificial Sequence: Synthetic oligonucleotide
  Target: ATXN2; (+) strand; PAM type: YTN; PAM sequence: CTT
gaggtgagagaagagtaaaa

SEQ ID NO: 91931 - DNA, 20 bp, Artificial Sequence
  Description of Artificial Sequence: Synthetic oligonucleotide
  Target: ATXN2; (+) strand; PAM type: YTN; PAM sequence: TTG
aggtgagagaagagtaaaaa

SEQ ID NO: 91932 - DNA, 20 bp, Artificial Sequence
  Description of Artificial Sequence: Synthetic oligonucleotide
  Target: ATXN2; (+) strand; PAM type: YTN; PAM sequence: CTT
tatcttgcaagtgggtgcca

SEQ ID NO: 91933 - DNA, 20 bp, Artificial Sequence
  Description of Artificial Sequence: Synthetic oligonucleotide
  Target: ATXN2; (+) strand; PAM type: YTN; PAM sequence: TTT
atcttgcaagtgggtgccag

SEQ ID NO: 91934 - DNA, 20 bp, Artificial Sequence
  Description of Artificial Sequence: Synthetic oligonucleotide
  Target: ATXN2; (+) strand; PAM type: YTN; PAM sequence: TTA
tcttgcaagtgggtgccagc

SEQ ID NO: 91935 - DNA, 20 bp, Artificial Sequence
  Description of Artificial Sequence: Synthetic oligonucleotide
  Target: ATXN2; (+) strand; PAM type: YTN; PAM sequence: CTT
gcaagtgggtgccagctcag

SEQ ID NO: 91936 - DNA, 20 bp, Artificial Sequence
  Description of Artificial Sequence: Synthetic oligonucleotide
  Target: ATXN2; (+) strand; PAM type: YTN; PAM sequence: TTG
caagtgggtgccagctcagc

SEQ ID NO: 91937 - DNA, 20 bp, Artificial Sequence
  Description of Artificial Sequence: Synthetic oligonucleotide
  Target: ATXN2; (+) strand; PAM type: YTN; PAM sequence: CTC
agccccagtacaataaagca

SEQ ID NO: 91938 - DNA, 20 bp, Artificial Sequence
  Description of Artificial Sequence: Synthetic oligonucleotide
  Target: ATXN2; (+) strand; PAM type: YTN; PAM sequence: TTC
ctaaagctcccgatcccagg

SEQ ID NO: 91939 - DNA, 20 bp, Artificial Sequence
  Description of Artificial Sequence: Synthetic oligonucleotide
  Target: ATXN2; (+) strand; PAM type: YTN; PAM sequence: CTA
aagctcccgatcccaggccc

SEQ ID NO: 91940 - DNA, 20 bp, Artificial Sequence
  Description of Artificial Sequence: Synthetic oligonucleotide
  Target: ATXN2; (+) strand; PAM type: YTN; PAM sequence: CTC
ccgatcccaggccctggctc

SEQ ID NO: 91941 - DNA, 20 bp, Artificial Sequence
  Description of Artificial Sequence: Synthetic oligonucleotide
  Target: ATXN2; (+) strand; PAM type: YTN; PAM sequence: CTG
gctcctgggcagcatttcta

SEQ ID NO: 91942 - DNA, 20 bp, Artificial Sequence
  Description of Artificial Sequence: Synthetic oligonucleotide
  Target: ATXN2; (+) strand; PAM type: YTN; PAM sequence: CTC
ctgggcagcatttctagaca

SEQ ID NO: 91943 - DNA, 20 bp, Artificial Sequence
  Description of Artificial Sequence: Synthetic oligonucleotide
  Target: ATXN2; (+) strand; PAM type: YTN; PAM sequence: CTG
ggcagcatttctagacacac

SEQ ID NO: 91944 - DNA, 20 bp, Artificial Sequence
  Description of Artificial Sequence: Synthetic oligonucleotide
  Target: ATXN2; (+) strand; PAM type: YTN; PAM sequence: TTT
ctagacacaccctgggccag

SEQ ID NO: 91945 - DNA, 20 bp, Artificial Sequence
  Description of Artificial Sequence: Synthetic oligonucleotide
  Target: ATXN2; (+) strand; PAM type: YTN; PAM sequence: TTC
tagacacaccctgggccaga

SEQ ID NO: 91946 - DNA, 20 bp, Artificial Sequence
  Description of Artificial Sequence: Synthetic oligonucleotide
  Target: ATXN2; (+) strand; PAM type: YTN; PAM sequence: CTA
gacacaccctgggccagaag

SEQ ID NO: 91947 - DNA, 20 bp, Artificial Sequence
  Description of Artificial Sequence: Synthetic oligonucleotide
  Target: ATXN2; (+) strand; PAM type: YTN; PAM sequence: CTG
ggccagaagggaacctgctg

SEQ ID NO: 91948 - DNA, 20 bp, Artificial Sequence
  Description of Artificial Sequence: Synthetic oligonucleotide
  Target: ATXN2; (+) strand; PAM type: YTN; PAM sequence: CTG
ctgcactgaaagtaaagacc

SEQ ID NO: 91949 - DNA, 20 bp, Artificial Sequence
  Description of Artificial Sequence: Synthetic oligonucleotide
  Target: ATXN2; (+) strand; PAM type: YTN; PAM sequence: CTG
cactgaaagtaaagacccag

SEQ ID NO: 91950 - DNA, 20 bp, Artificial Sequence
  Description of Artificial Sequence: Synthetic oligonucleotide
  Target: ATXN2; (+) strand; PAM type: YTN; PAM sequence: CTG
aaagtaaagacccagttctt

SEQ ID NO: 91951 - DNA, 20 bp, Artificial Sequence
  Description of Artificial Sequence: Synthetic oligonucleotide
  Target: ATXN2; (+) strand; PAM type: YTN; PAM sequence: TTC
ttgcaggattcttcacctac

SEQ ID NO: 91952 - DNA, 20 bp, Artificial Sequence
  Description of Artificial Sequence: Synthetic oligonucleotide
  Target: ATXN2; (+) strand; PAM type: YTN; PAM sequence: CTT
gcaggattcttcacctactg

SEQ ID NO: 91953 - DNA, 20 bp, Artificial Sequence
  Description of Artificial Sequence: Synthetic oligonucleotide
  Target: ATXN2; (+) strand; PAM type: YTN; PAM sequence: TTG
caggattcttcacctactga

SEQ ID NO: 91954 - DNA, 20 bp, Artificial Sequence
  Description of Artificial Sequence: Synthetic oligonucleotide
  Target: ATXN2; (+) strand; PAM type: YTN; PAM sequence: TTC
ttcacctactgactaaagca

SEQ ID NO: 91955 - DNA, 20 bp, Artificial Sequence
  Description of Artificial Sequence: Synthetic oligonucleotide
  Target: ATXN2; (+) strand; PAM type: YTN; PAM sequence: CTT
cacctactgactaaagcacc

SEQ ID NO: 91956 - DNA, 20 bp, Artificial Sequence
  Description of Artificial Sequence: Synthetic oligonucleotide
  Target: ATXN2; (+) strand; PAM type: YTN; PAM sequence: TTC
acctactgactaaagcaccc

SEQ ID NO: 91957 - DNA, 20 bp, Artificial Sequence
  Description of Artificial Sequence: Synthetic oligonucleotide
  Target: ATXN2; (+) strand; PAM type: YTN; PAM sequence: CTA
ctgactaaagcacccttggg

SEQ ID NO: 91958 - DNA, 20 bp, Artificial Sequence
  Description of Artificial Sequence: Synthetic oligonucleotide
  Target: ATXN2; (+) strand; PAM type: YTN; PAM sequence: CTG
actaaagcacccttgggcct

SEQ ID NO: 91959 - DNA, 20 bp, Artificial Sequence
  Description of Artificial Sequence: Synthetic oligonucleotide
  Target: ATXN2; (+) strand; PAM type: YTN; PAM sequence: CTA
aagcacccttgggccttaaa

SEQ ID NO: 91960 - DNA, 20 bp, Artificial Sequence
  Description of Artificial Sequence: Synthetic oligonucleotide
  Target: ATXN2; (+) strand; PAM type: YTN; PAM sequence: CTT
gggccttaaattaacatcag

SEQ ID NO: 91961 - DNA, 20 bp, Artificial Sequence
  Description of Artificial Sequence: Synthetic oligonucleotide
  Target: ATXN2; (+) strand; PAM type: YTN; PAM sequence: TTG
ggccttaaattaacatcagt

SEQ ID NO: 91962 - DNA, 20 bp, Artificial Sequence
  Description of Artificial Sequence: Synthetic oligonucleotide
  Target: ATXN2; (+) strand; PAM type: YTN; PAM sequence: CTT
aaattaacatcagtggtggc

SEQ ID NO: 91963 - DNA, 20 bp, Artificial Sequence
  Description of Artificial Sequence: Synthetic oligonucleotide
  Target: ATXN2; (+) strand; PAM type: YTN; PAM sequence: TTA
aattaacatcagtggtggcc

SEQ ID NO: 91964 - DNA, 20 bp, Artificial Sequence
  Description of Artificial Sequence: Synthetic oligonucleotide
  Target: ATXN2; (+) strand; PAM type: YTN; PAM sequence: TTA
acatcagtggtggccagaaa

SEQ ID NO: 91965 - DNA, 20 bp, Artificial Sequence
  Description of Artificial Sequence: Synthetic oligonucleotide
  Target: ATXN2; (+) strand; PAM type: YTN; PAM sequence: CTG
ccacaggccttgggtgagac

SEQ ID NO: 91966 - DNA, 20 bp, Artificial Sequence
  Description of Artificial Sequence: Synthetic oligonucleotide
  Target: ATXN2; (+) strand; PAM type: YTN; PAM sequence: CTT
gggtgagaccaagtacagtt

SEQ ID NO: 91967 - DNA, 20 bp, Artificial Sequence
  Description of Artificial Sequence: Synthetic oligonucleotide
  Target: ATXN2; (+) strand; PAM type: YTN; PAM sequence: TTG
ggtgagaccaagtacagttc

SEQ ID NO: 91968 - DNA, 20 bp, Artificial Sequence
  Description of Artificial Sequence: Synthetic oligonucleotide
  Target: ATXN2; (+) strand; PAM type: YTN; PAM sequence: TTC
cagtgacggtggccatggca

SEQ ID NO: 91969 - DNA, 20 bp, Artificial Sequence
  Description of Artificial Sequence: Synthetic oligonucleotide
  Target: ATXN2; (+) strand; PAM type: YTN; PAM sequence: CTT
gtgtcacccttccccaaact

SEQ ID NO: 91970 - DNA, 20 bp, Artificial Sequence
  Description of Artificial Sequence: Synthetic oligonucleotide
  Target: ATXN2; (+) strand; PAM type: YTN; PAM sequence: TTG
tgtcacccttccccaaactc

SEQ ID NO: 91971 - DNA, 20 bp, Artificial Sequence
  Description of Artificial Sequence: Synthetic oligonucleotide
  Target: ATXN2; (+) strand; PAM type: YTN; PAM sequence: CTT
ccccaaactccaagcagctc

SEQ ID NO: 91972 - DNA, 20 bp, Artificial Sequence
  Description of Artificial Sequence: Synthetic oligonucleotide
  Target: ATXN2; (+) strand; PAM type: YTN; PAM sequence: TTC
cccaaactccaagcagctca

SEQ ID NO: 91973 - DNA, 20 bp, Artificial Sequence
  Description of Artificial Sequence: Synthetic oligonucleotide
  Target: ATXN2; (+) strand; PAM type: YTN; PAM sequence: CTC
caagcagctcagcacaaaga

SEQ ID NO: 91974 - DNA, 20 bp, Artificial Sequence
  Description of Artificial Sequence: Synthetic oligonucleotide
  Target: ATXN2; (+) strand; PAM type: YTN; PAM sequence: CTC
agcacaaagagagactccat

SEQ ID NO: 91975 - DNA, 20 bp, Artificial Sequence
  Description of Artificial Sequence: Synthetic oligonucleotide
  Target: ATXN2; (+) strand; PAM type: YTN; PAM sequence: CTC
catttgtttggagaaatgta

SEQ ID NO: 91976 - DNA, 20 bp, Artificial Sequence
  Description of Artificial Sequence: Synthetic oligonucleotide
  Target: ATXN2; (+) strand; PAM type: YTN; PAM sequence: TTT
gtttggagaaatgtaagagg

SEQ ID NO: 91977 - DNA, 20 bp, Artificial Sequence
  Description of Artificial Sequence: Synthetic oligonucleotide
  Target: ATXN2; (+) strand; PAM type: YTN; PAM sequence: TTG
tttggagaaatgtaagagga

SEQ ID NO: 91978 - DNA, 20 bp, Artificial Sequence
  Description of Artificial Sequence: Synthetic oligonucleotide
  Target: ATXN2; (+) strand; PAM type: YTN; PAM sequence: TTT
ggagaaatgtaagaggacaa

SEQ ID NO: 91979 - DNA, 20 bp, Artificial Sequence
  Description of Artificial Sequence: Synthetic oligonucleotide
  Target: ATXN2; (+) strand; PAM type: YTN; PAM sequence: TTG
gagaaatgtaagaggacaag

SEQ ID NO: 91980 - DNA, 20 bp, Artificial Sequence
  Description of Artificial Sequence: Synthetic oligonucleotide
  Target: ATXN2; (+) strand; PAM type: YTN; PAM sequence: CTG
cctggtaatacagggaattc

SEQ ID NO: 91981 - DNA, 20 bp, Artificial Sequence
  Description of Artificial Sequence: Synthetic oligonucleotide
  Target: ATXN2; (+) strand; PAM type: YTN; PAM sequence: CTG
gtaatacagggaattctccc

SEQ ID NO: 91982 - DNA, 20 bp, Artificial Sequence
  Description of Artificial Sequence: Synthetic oligonucleotide
  Target: ATXN2; (+) strand; PAM type: YTN; PAM sequence: TTC
tcccagatcttccccaagac

SEQ ID NO: 91983 - DNA, 20 bp, Artificial Sequence
  Description of Artificial Sequence: Synthetic oligonucleotide
  Target: ATXN2; (+) strand; PAM type: YTN; PAM sequence: CTC
ccagatcttccccaagacta

SEQ ID NO: 91984 - DNA, 20 bp, Artificial Sequence
  Description of Artificial Sequence: Synthetic oligonucleotide
  Target: ATXN2; (+) strand; PAM type: YTN; PAM sequence: CTT
ccccaagactaccaaggtga

SEQ ID NO: 91985 - DNA, 20 bp, Artificial Sequence
  Description of Artificial Sequence: Synthetic oligonucleotide
  Target: ATXN2; (+) strand; PAM type: YTN; PAM sequence: TTC
cccaagactaccaaggtgat

SEQ ID NO: 91986 - DNA, 20 bp, Artificial Sequence
  Description of Artificial Sequence: Synthetic oligonucleotide
  Target: ATXN2; (+) strand; PAM type: YTN; PAM sequence: CTA
ccaaggtgatacctctacag

SEQ ID NO: 91987 - DNA, 20 bp, Artificial Sequence
  Description of Artificial Sequence: Synthetic oligonucleotide
  Target: ATXN2; (+) strand; PAM type: YTN; PAM sequence: CTC
tacagagtcacaacattact

SEQ ID NO: 91988 - DNA, 20 bp, Artificial Sequence
  Description of Artificial Sequence: Synthetic oligonucleotide
  Target: ATXN2; (+) strand; PAM type: YTN; PAM sequence: CTA
cagagtcacaacattactag

SEQ ID NO: 91989 - DNA, 20 bp, Artificial Sequence
  Description of Artificial Sequence: Synthetic oligonucleotide
  Target: ATXN2; (+) strand; PAM type: YTN; PAM sequence: TTA
ctagtcttggggtgccctct

SEQ ID NO: 91990 - DNA, 20 bp, Artificial Sequence
  Description of Artificial Sequence: Synthetic oligonucleotide
  Target: ATXN2; (+) strand; PAM type: YTN; PAM sequence: CTA
gtcttggggtgccctctaat

SEQ ID NO: 91991 - DNA, 20 bp, Artificial Sequence
  Description of Artificial Sequence: Synthetic oligonucleotide
  Target: ATXN2; (+) strand; PAM type: YTN; PAM sequence: CTT
ggggtgccctctaatgcatg

SEQ ID NO: 91992 - DNA, 20 bp, Artificial Sequence
  Description of Artificial Sequence: Synthetic oligonucleotide
  Target: ATXN2; (+) strand; PAM type: YTN; PAM sequence: TTG
gggtgccctctaatgcatgt

SEQ ID NO: 91993 - DNA, 20 bp, Artificial Sequence
  Description of Artificial Sequence: Synthetic oligonucleotide
  Target: ATXN2; (+) strand; PAM type: YTN; PAM sequence: CTC
taatgcatgtatggctgcag

SEQ ID NO: 91994 - DNA, 20 bp, Artificial Sequence
  Description of Artificial Sequence: Synthetic oligonucleotide
  Target: ATXN2; (+) strand; PAM type: YTN; PAM sequence: CTA
atgcatgtatggctgcagtg

SEQ ID NO: 91995 - DNA, 20 bp, Artificial Sequence
  Description of Artificial Sequence: Synthetic oligonucleotide
  Target: ATXN2; (+) strand; PAM type: YTN; PAM sequence: CTG
cagtgagcgaagacttagat

SEQ ID NO: 91996 - DNA, 20 bp, Artificial Sequence
  Description of Artificial Sequence: Synthetic oligonucleotide
  Target: ATXN2; (+) strand; PAM type: YTN; PAM sequence: CTT
agatgacaacacttaattcc

SEQ ID NO: 91997 - DNA, 20 bp, Artificial Sequence
  Description of Artificial Sequence: Synthetic oligonucleotide
  Target: ATXN2; (+) strand; PAM type: YTN; PAM sequence: TTA
gatgacaacacttaattccc

SEQ ID NO: 91998 - DNA, 20 bp, Artificial Sequence
  Description of Artificial Sequence: Synthetic oligonucleotide
  Target: ATXN2; (+) strand; PAM type: YTN; PAM sequence: CTT
aattccctttgaatacttga

SEQ ID NO: 91999 - DNA, 20 bp, Artificial Sequence
  Description of Artificial Sequence: Synthetic oligonucleotide
  Target: ATXN2; (+) strand; PAM type: YTN; PAM sequence: TTA
attccctttgaatacttgaa

SEQ ID NO: 92000 - DNA, 20 bp, Artificial Sequence
  Description of Artificial Sequence: Synthetic oligonucleotide
  Target: ATXN2; (+) strand; PAM type: YTN; PAM sequence: TTC
cctttgaatacttgaaaaac

SEQ ID NO: 92001 - DNA, 20 bp, Artificial Sequence
  Description of Artificial Sequence: Synthetic oligonucleotide
  Target: ATXN2; (+) strand; PAM type: YTN; PAM sequence: CTT
tgaatacttgaaaaaccttc

SEQ ID NO: 92002 - DNA, 20 bp, Artificial Sequence
  Description of Artificial Sequence: Synthetic oligonucleotide
  Target: ATXN2; (+) strand; PAM type: YTN; PAM sequence: TTT
gaatacttgaaaaaccttct

SEQ ID NO: 92003 - DNA, 20 bp, Artificial Sequence
  Description of Artificial Sequence: Synthetic oligonucleotide
  Target: ATXN2; (+) strand; PAM type: YTN; PAM sequence: TTG
aatacttgaaaaaccttctc

SEQ ID NO: 92004 - DNA, 20 bp, Artificial Sequence
  Description of Artificial Sequence: Synthetic oligonucleotide
  Target: ATXN2; (+) strand; PAM type: YTN; PAM sequence: CTT
gaaaaaccttctcaagaaga

SEQ ID NO: 92005 - DNA, 20 bp, Artificial Sequence
  Description of Artificial Sequence: Synthetic oligonucleotide
  Target: ATXN2; (+) strand; PAM type: YTN; PAM sequence: TTG
aaaaaccttctcaagaagaa

SEQ ID NO: 92006 - DNA, 20 bp, Artificial Sequence
  Description of Artificial Sequence: Synthetic oligonucleotide
  Target: ATXN2; (+) strand; PAM type: YTN; PAM sequence: CTT
ctcaagaagaatgggagccg

SEQ ID NO: 92007 - DNA, 20 bp, Artificial Sequence
  Description of Artificial Sequence: Synthetic oligonucleotide
  Target: ATXN2; (+) strand; PAM type: YTN; PAM sequence: TTC
tcaagaagaatgggagccgg

SEQ ID NO: 92008 - DNA, 20 bp, Artificial Sequence
  Description of Artificial Sequence: Synthetic oligonucleotide
  Target: ATXN2; (+) strand; PAM type: YTN; PAM sequence: CTC
aagaagaatgggagccggat

SEQ ID NO: 92009 - DNA, 20 bp, Artificial Sequence
  Description of Artificial Sequence: Synthetic oligonucleotide
  Target: ATXN2; (+) strand; PAM type: YTN; PAM sequence: CTA
acgcctgtaatcccaacact

SEQ ID NO: 92010 - DNA, 20 bp, Artificial Sequence
  Description of Artificial Sequence: Synthetic oligonucleotide
  Target: ATXN2; (+) strand; PAM type: YTN; PAM sequence: CTG
taatcccaacactctgagag

SEQ ID NO: 92011 - DNA, 20 bp, Artificial Sequence
  Description of Artificial Sequence: Synthetic oligonucleotide
  Target: ATXN2; (+) strand; PAM type: YTN; PAM sequence: CTC
tgagaggccaaggcggacag

SEQ ID NO: 92012 - DNA, 20 bp, Artificial Sequence
  Description of Artificial Sequence: Synthetic oligonucleotide
  Target: ATXN2; (+) strand; PAM type: YTN; PAM sequence: CTG
agaggccaaggcggacagat

SEQ ID NO: 92013 - DNA, 20 bp, Artificial Sequence
  Description of Artificial Sequence: Synthetic oligonucleotide
  Target: ATXN2; (+) strand; PAM type: YTN; PAM sequence: TTA
ggagttcgagaccagcctga

SEQ ID NO: 92014 - DNA, 20 bp, Artificial Sequence
  Description of Artificial Sequence: Synthetic oligonucleotide
  Target: ATXN2; (+) strand; PAM type: YTN; PAM sequence: TTC
gagaccagcctgaccaacat

SEQ ID NO: 92015 - DNA, 20 bp, Artificial Sequence
  Description of Artificial Sequence: Synthetic oligonucleotide
  Target: ATXN2; (+) strand; PAM type: YTN; PAM sequence: CTG
accaacatggtgaaacacca

SEQ ID NO: 92016 - DNA, 20 bp, Artificial Sequence
  Description of Artificial Sequence: Synthetic oligonucleotide
  Target: ATXN2; (+) strand; PAM type: YTN; PAM sequence: TTT
actaaaaatacaaaaattag

SEQ ID NO: 92017 - DNA, 20 bp, Artificial Sequence
  Description of Artificial Sequence: Synthetic oligonucleotide
  Target: ATXN2; (+) strand; PAM type: YTN; PAM sequence: TTA
ctaaaaatacaaaaattagc

SEQ ID NO: 92018 - DNA, 20 bp, Artificial Sequence
  Description of Artificial Sequence: Synthetic oligonucleotide
  Target: ATXN2; (+) strand; PAM type: YTN; PAM sequence: CTA
aaaatacaaaaattagccag

SEQ ID NO: 92019 - DNA, 20 bp, Artificial Sequence
  Description of Artificial Sequence: Synthetic oligonucleotide
  Target: ATXN2; (+) strand; PAM type: YTN; PAM sequence: TTA
gccaggcgtggtggcacgca

SEQ ID NO: 92020 - DNA, 20 bp, Artificial Sequence
  Description of Artificial Sequence: Synthetic oligonucleotide
  Target: ATXN2; (+) strand; PAM type: YTN; PAM sequence: CTG
taatcccagctactcaggag

SEQ ID NO: 92021 - DNA, 20 bp, Artificial Sequence
  Description of Artificial Sequence: Synthetic oligonucleotide
  Target: ATXN2; (+) strand; PAM type: YTN; PAM sequence: CTA
ctcaggaggctgaggcagga

SEQ ID NO: 92022 - DNA, 20 bp, Artificial Sequence
  Description of Artificial Sequence: Synthetic oligonucleotide
  Target: ATXN2; (+) strand; PAM type: YTN; PAM sequence: CTC
aggaggctgaggcaggagaa

SEQ ID NO: 92023 - DNA, 20 bp, Artificial Sequence
  Description of Artificial Sequence: Synthetic oligonucleotide
  Target: ATXN2; (+) strand; PAM type: YTN; PAM sequence: CTG
aggcaggagaattgcttgaa

SEQ ID NO: 92024 - DNA, 20 bp, Artificial Sequence
  Description of Artificial Sequence: Synthetic oligonucleotide
  Target: ATXN2; (+) strand; PAM type: YTN; PAM sequence: TTG
cttgaatccgggagacggag

SEQ ID NO: 92025 - DNA, 20 bp, Artificial Sequence
  Description of Artificial Sequence: Synthetic oligonucleotide
  Target: ATXN2; (+) strand; PAM type: YTN; PAM sequence: CTT
gaatccgggagacggaggtt

SEQ ID NO: 92026 - DNA, 20 bp, Artificial Sequence
  Description of Artificial Sequence: Synthetic oligonucleotide
  Target: ATXN2; (+) strand; PAM type: YTN; PAM sequence: TTG
aatccgggagacggaggttg

SEQ ID NO: 92027 - DNA, 20 bp, Artificial Sequence
  Description of Artificial Sequence: Synthetic oligonucleotide
  Target: ATXN2; (+) strand; PAM type: YTN; PAM sequence: TTG
cggtgagcaaagactgtgcc

SEQ ID NO: 92028 - DNA, 20 bp, Artificial Sequence
  Description of Artificial Sequence: Synthetic oligonucleotide
  Target: ATXN2; (+) strand; PAM type: YTN; PAM sequence: CTG
tgccactgcactccagcctg

SEQ ID NO: 92029 - DNA, 20 bp, Artificial Sequence
  Description of Artificial Sequence: Synthetic oligonucleotide
  Target: ATXN2; (+) strand; PAM type: YTN; PAM sequence: CTG
cactccagcctgggcgacag

SEQ ID NO: 92030 - DNA, 20 bp, Artificial Sequence
  Description of Artificial Sequence: Synthetic oligonucleotide
  Target: ATXN2; (+) strand; PAM type: YTN; PAM sequence: CTC
cagcctgggcgacagagcga

SEQ ID NO: 92031 - DNA, 20 bp, Artificial Sequence
  Description of Artificial Sequence: Synthetic oligonucleotide
  Target: ATXN2; (+) strand; PAM type: YTN; PAM sequence: CTG
ggcgacagagcgagactctg

SEQ ID NO: 92032 - DNA, 20 bp, Artificial Sequence
  Description of Artificial Sequence: Synthetic oligonucleotide
  Target: ATXN2; (+) strand; PAM type: YTN; PAM sequence: CTC
tgtctcaaaaacagaaaaaa

SEQ ID NO: 92033 - DNA, 20 bp, Artificial Sequence
  Description of Artificial Sequence: Synthetic oligonucleotide
  Target: ATXN2; (+) strand; PAM type: YTN; PAM sequence: CTG
tctcaaaaacagaaaaaaaa

SEQ ID NO: 92034 - DNA, 20 bp, Artificial Sequence
  Description of Artificial Sequence: Synthetic oligonucleotide
  Target: ATXN2; (+) strand; PAM type: YTN; PAM sequence: CTC
aaaaacagaaaaaaaaaaaa

SEQ ID NO: 92035 - DNA, 20 bp, Artificial Sequence
  Description of Artificial Sequence: Synthetic oligonucleotide
  Target: ATXN2; (+) strand; PAM type: YTN; PAM sequence: CTA
caaagaacagaatacccaac

SEQ ID NO: 92036 - DNA, 20 bp, Artificial Sequence
  Description of Artificial Sequence: Synthetic oligonucleotide
  Target: ATXN2; (+) strand; PAM type: YTN; PAM sequence: CTC
ttcaatgcccagacactgat

SEQ ID NO: 92037 - DNA, 20 bp, Artificial Sequence
  Description of Artificial Sequence: Synthetic oligonucleotide
  Target: ATXN2; (+) strand; PAM type: YTN; PAM sequence: CTT
caatgcccagacactgatga

SEQ ID NO: 92038 - DNA, 20 bp, Artificial Sequence
  Description of Artificial Sequence: Synthetic oligonucleotide
  Target: ATXN2; (+) strand; PAM type: YTN; PAM sequence: TTC
aatgcccagacactgatgaa

SEQ ID NO: 92039 - DNA, 20 bp, Artificial Sequence
  Description of Artificial Sequence: Synthetic oligonucleotide
  Target: ATXN2; (+) strand; PAM type: YTN; PAM sequence: CTG
atgaacatccacaagcatca

SEQ ID NO: 92040 - DNA, 20 bp, Artificial Sequence
  Description of Artificial Sequence: Synthetic oligonucleotide
  Target: ATXN2; (+) strand; PAM type: YTN; PAM sequence: CTG
agaaaacatgacctcaccaa

SEQ ID NO: 92041 - DNA, 20 bp, Artificial Sequence
  Description of Artificial Sequence: Synthetic oligonucleotide
  Target: ATXN2; (+) strand; PAM type: YTN; PAM sequence: CTC
accaaatgaactaaaaataa

SEQ ID NO: 92042 - DNA, 20 bp, Artificial Sequence
  Description of Artificial Sequence: Synthetic oligonucleotide
  Target: ATXN2; (+) strand; PAM type: YTN; PAM sequence: CTA
aaaataaaggacaccagtga

SEQ ID NO: 92043 - DNA, 20 bp, Artificial Sequence
  Description of Artificial Sequence: Synthetic oligonucleotide
  Target: ATXN2; (+) strand; PAM type: YTN; PAM sequence: TTC
ccaagtgataagagatatgt

SEQ ID NO: 92044 - DNA, 20 bp, Artificial Sequence
  Description of Artificial Sequence: Synthetic oligonucleotide
  Target: ATXN2; (+) strand; PAM type: YTN; PAM sequence: CTT
tcagacagaattcaagctga

SEQ ID NO: 92045 - DNA, 20 bp, Artificial Sequence
  Description of Artificial Sequence: Synthetic oligonucleotide
  Target: ATXN2; (+) strand; PAM type: YTN; PAM sequence: TTT
cagacagaattcaagctgaa

SEQ ID NO: 92046 - DNA, 20 bp, Artificial Sequence
  Description of Artificial Sequence: Synthetic oligonucleotide
  Target: ATXN2; (+) strand; PAM type: YTN; PAM sequence: TTC
agacagaattcaagctgaat

SEQ ID NO: 92047 - DNA, 20 bp, Artificial Sequence
  Description of Artificial Sequence: Synthetic oligonucleotide
  Target: ATXN2; (+) strand; PAM type: YTN; PAM sequence: TTC
aagctgaatgctttgagaaa

SEQ ID NO: 92048 - DNA, 20 bp, Artificial Sequence
  Description of Artificial Sequence: Synthetic oligonucleotide
  Target: ATXN2; (+) strand; PAM type: YTN; PAM sequence: CTG
aatgctttgagaaagttcaa

SEQ ID NO: 92049 - DNA, 20 bp, Artificial Sequence
  Description of Artificial Sequence: Synthetic oligonucleotide
  Target: ATXN2; (+) strand; PAM type: YTN; PAM sequence: CTT
tgagaaagttcaacgaaatc

SEQ ID NO: 92050 - DNA, 20 bp, Artificial Sequence
  Description of Artificial Sequence: Synthetic oligonucleotide
  Target: ATXN2; (+) strand; PAM type: YTN; PAM sequence: TTT
gagaaagttcaacgaaatcc

SEQ ID NO: 92051 - DNA, 20 bp, Artificial Sequence
  Description of Artificial Sequence: Synthetic oligonucleotide
  Target: ATXN2; (+) strand; PAM type: YTN; PAM sequence: TTG
agaaagttcaacgaaatcca

SEQ ID NO: 92052 - DNA, 20 bp, Artificial Sequence
  Description of Artificial Sequence: Synthetic oligonucleotide
  Target: ATXN2; (+) strand; PAM type: YTN; PAM sequence: TTC
aacgaaatccaagataatac

SEQ ID NO: 92053 - DNA, 20 bp, Artificial Sequence
  Description of Artificial Sequence: Synthetic oligonucleotide
  Target: ATXN2; (+) strand; PAM type: YTN; PAM sequence: TTC
agaatcctataaatttaaaa

SEQ ID NO: 92054 - DNA, 20 bp, Artificial Sequence
  Description of Artificial Sequence: Synthetic oligonucleotide
  Target: ATXN2; (+) strand; PAM type: YTN; PAM sequence: CTA
taaatttaaaaaagagactg

SEQ ID NO: 92055 - DNA, 20 bp, Artificial Sequence
  Description of Artificial Sequence: Synthetic oligonucleotide
  Target: ATXN2; (+) strand; PAM type: YTN; PAM sequence: TTT
aaaaaagagactgcaataat

SEQ ID NO: 92056 - DNA, 20 bp, Artificial Sequence
  Description of Artificial Sequence: Synthetic oligonucleotide
  Target: ATXN2; (+) strand; PAM type: YTN; PAM sequence: TTA
aaaaagagactgcaataatt

SEQ ID NO: 92057 - DNA, 20 bp, Artificial Sequence
  Description of Artificial Sequence: Synthetic oligonucleotide
  Target: ATXN2; (+) strand; PAM type: YTN; PAM sequence: CTG
caataattattagtaaaaag

SEQ ID NO: 92058 - DNA, 20 bp, Artificial Sequence
  Description of Artificial Sequence: Synthetic oligonucleotide
  Target: ATXN2; (+) strand; PAM type: YTN; PAM sequence: TTA
ttagtaaaaagaatcaagca

SEQ ID NO: 92059 - DNA, 20 bp, Artificial Sequence
  Description of Artificial Sequence: Synthetic oligonucleotide
  Target: ATXN2; (+) strand; PAM type: YTN; PAM sequence: TTA
gtaaaaagaatcaagcagaa

SEQ ID NO: 92060 - DNA, 20 bp, Artificial Sequence
  Description of Artificial Sequence: Synthetic oligonucleotide
  Target: ATXN2; (+) strand; PAM type: YTN; PAM sequence: TTC
aattgacaaactgaaaaatg

SEQ ID NO: 92061 - DNA, 20 bp, Artificial Sequence
  Description of Artificial Sequence: Synthetic oligonucleotide
  Target: ATXN2; (+) strand; PAM type: YTN; PAM sequence: TTG
acaaactgaaaaatgcatca

SEQ ID NO: 92062 - DNA, 20 bp, Artificial Sequence
  Description of Artificial Sequence: Synthetic oligonucleotide
  Target: ATXN2; (+) strand; PAM type: YTN; PAM sequence: CTG
aaaaatgcatcagtctctca

SEQ ID NO: 92063 - DNA, 20 bp, Artificial Sequence
  Description of Artificial Sequence: Synthetic oligonucleotide
  Target: ATXN2; (+) strand; PAM type: YTN; PAM sequence: CTC
tcaatagcagaaatgtatca

SEQ ID NO: 92064 - DNA, 20 bp, Artificial Sequence
  Description of Artificial Sequence: Synthetic oligonucleotide
  Target: ATXN2; (+) strand; PAM type: YTN; PAM sequence: CTC
aatagcagaaatgtatcaag

SEQ ID NO: 92065 - DNA, 20 bp, Artificial Sequence
  Description of Artificial Sequence: Synthetic oligonucleotide
  Target: ATXN2; (+) strand; PAM type: YTN; PAM sequence: TTA
gtgagcttgaattcaggcta

SEQ ID NO: 92066 - DNA, 20 bp, Artificial Sequence
  Description of Artificial Sequence: Synthetic oligonucleotide
  Target: ATXN2; (+) strand; PAM type: YTN; PAM sequence: CTT
gaattcaggctatttgaaaa

SEQ ID NO: 92067 - DNA, 20 bp, Artificial Sequence
  Description of Artificial Sequence: Synthetic oligonucleotide
  Target: ATXN2; (+) strand; PAM type: YTN; PAM sequence: TTG
aattcaggctatttgaaaat

SEQ ID NO: 92068 - DNA, 20 bp, Artificial Sequence
  Description of Artificial Sequence: Synthetic oligonucleotide
  Target: ATXN2; (+) strand; PAM type: YTN; PAM sequence: TTC
aggctatttgaaaataaaca

SEQ ID NO: 92069 - DNA, 20 bp, Artificial Sequence
  Description of Artificial Sequence: Synthetic oligonucleotide
  Target: ATXN2; (+) strand; PAM type: YTN; PAM sequence: CTA
tttgaaaataaacaaccaag

SEQ ID NO: 92070 - DNA, 20 bp, Artificial Sequence
  Description of Artificial Sequence: Synthetic oligonucleotide
  Target: ATXN2; (+) strand; PAM type: YTN; PAM sequence: TTT
gaaaataaacaaccaagttg

SEQ ID NO: 92071 - DNA, 20 bp, Artificial Sequence
  Description of Artificial Sequence: Synthetic oligonucleotide
  Target: ATXN2; (+) strand; PAM type: YTN; PAM sequence: TTG
aaaataaacaaccaagttgg

SEQ ID NO: 92072 - DNA, 20 bp, Artificial Sequence
  Description of Artificial Sequence: Synthetic oligonucleotide
  Target: ATXN2; (+) strand; PAM type: YTN; PAM sequence: TTG
ggcacgatgactcacgctta

SEQ ID NO: 92073 - DNA, 20 bp, Artificial Sequence
  Description of Artificial Sequence: Synthetic oligonucleotide
  Target: ATXN2; (+) strand; PAM type: YTN; PAM sequence: CTC
acgcttataatcctagcact

SEQ ID NO: 92074 - DNA, 20 bp, Artificial Sequence
  Description of Artificial Sequence: Synthetic oligonucleotide
  Target: ATXN2; (+) strand; PAM type: YTN; PAM sequence: CTT
ataatcctagcactttagga

SEQ ID NO: 92075 - DNA, 20 bp, Artificial Sequence
  Description of Artificial Sequence: Synthetic oligonucleotide
  Target: ATXN2; (+) strand; PAM type: YTN; PAM sequence: TTA
taatcctagcactttaggat

SEQ ID NO: 92076 - DNA, 20 bp, Artificial Sequence
  Description of Artificial Sequence: Synthetic oligonucleotide
  Target: ATXN2; (+) strand; PAM type: YTN; PAM sequence: CTA
gcactttaggatgccaaggc

SEQ ID NO: 92077 - DNA, 20 bp, Artificial Sequence
  Description of Artificial Sequence: Synthetic oligonucleotide
  Target: ATXN2; (+) strand; PAM type: YTN; PAM sequence: CTT
taggatgccaaggcgggcgg

SEQ ID NO: 92078 - DNA, 20 bp, Artificial Sequence
  Description of Artificial Sequence: Synthetic oligonucleotide
  Target: ATXN2; (+) strand; PAM type: YTN; PAM sequence: TTT
aggatgccaaggcgggcgga

SEQ ID NO: 92079 - DNA, 20 bp, Artificial Sequence
  Description of Artificial Sequence: Synthetic oligonucleotide
  Target: ATXN2; (+) strand; PAM type: YTN; PAM sequence: TTA
ggatgccaaggcgggcggat

SEQ ID NO: 92080 - DNA, 20 bp, Artificial Sequence
  Description of Artificial Sequence: Synthetic oligonucleotide
  Target: ATXN2; (+) strand; PAM type: YTN; PAM sequence: CTG
aggtcaggagctcaagacca

SEQ ID NO: 92081 - DNA, 20 bp, Artificial Sequence
  Description of Artificial Sequence: Synthetic oligonucleotide
  Target: ATXN2; (+) strand; PAM type: YTN; PAM sequence: CTC
aagaccagcctggcaaatat

SEQ ID NO: 92082 - DNA, 20 bp, Artificial Sequence
  Description of Artificial Sequence: Synthetic oligonucleotide
  Target: ATXN2; (+) strand; PAM type: YTN; PAM sequence: CTG
gcaaatatggcaaaaccccg

SEQ ID NO: 92083 - DNA, 20 bp, Artificial Sequence
  Description of Artificial Sequence: Synthetic oligonucleotide
  Target: ATXN2; (+) strand; PAM type: YTN; PAM sequence: CTT
tactaaaaatacaaaaagta

SEQ ID NO: 92084 - DNA, 20 bp, Artificial Sequence
  Description of Artificial Sequence: Synthetic oligonucleotide
  Target: ATXN2; (+) strand; PAM type: YTN; PAM sequence: TTT
actaaaaatacaaaaagtag

SEQ ID NO: 92085 - DNA, 20 bp, Artificial Sequence
  Description of Artificial Sequence: Synthetic oligonucleotide
  Target: ATXN2; (+) strand; PAM type: YTN; PAM sequence: TTA
ctaaaaatacaaaaagtagc

SEQ ID NO: 92086 - DNA, 20 bp, Artificial Sequence
  Description of Artificial Sequence: Synthetic oligonucleotide
  Target: ATXN2; (+) strand; PAM type: YTN; PAM sequence: CTA
aaaatacaaaaagtagctgg

SEQ ID NO: 92087 - DNA, 20 bp, Artificial Sequence
  Description of Artificial Sequence: Synthetic oligonucleotide
  Target: ATXN2; (+) strand; PAM type: YTN; PAM sequence: CTG
ggcgtggtggcacatgcttg

SEQ ID NO: 92088 - DNA, 20 bp, Artificial Sequence
  Description of Artificial Sequence: Synthetic oligonucleotide
  Target: ATXN2; (+) strand; PAM type: YTN; PAM sequence: CTT
gtaatcccagctacttggga

SEQ ID NO: 92089 - DNA, 20 bp, Artificial Sequence
  Description of Artificial Sequence: Synthetic oligonucleotide
  Target: ATXN2; (+) strand; PAM type: YTN; PAM sequence: TTG
taatcccagctacttgggag

SEQ ID NO: 92090 - DNA, 20 bp, Artificial Sequence
  Description of Artificial Sequence: Synthetic oligonucleotide
  Target: ATXN2; (+) strand; PAM type: YTN; PAM sequence: CTA
cttgggaggctgaggcagaa

SEQ ID NO: 92091 - DNA, 20 bp, Artificial Sequence
  Description of Artificial Sequence: Synthetic oligonucleotide
  Target: ATXN2; (+) strand; PAM type: YTN; PAM sequence: CTT
gggaggctgaggcagaagaa

SEQ ID NO: 92092 - DNA, 20 bp, Artificial Sequence
  Description of Artificial Sequence: Synthetic oligonucleotide
  Target: ATXN2; (+) strand; PAM type: YTN; PAM sequence: TTG
ggaggctgaggcagaagaat

SEQ ID NO: 92093 - DNA, 20 bp, Artificial Sequence
  Description of Artificial Sequence: Synthetic oligonucleotide
  Target: ATXN2; (+) strand; PAM type: YTN; PAM sequence: CTG
aggcagaagaatcgcttgaa

SEQ ID NO: 92094 - DNA, 20 bp, Artificial Sequence
  Description of Artificial Sequence: Synthetic oligonucleotide
  Target: ATXN2; (+) strand; PAM type: YTN; PAM sequence: CTT
gaacctgggagttggaggtt

SEQ ID NO: 92095 - DNA, 20 bp, Artificial Sequence
  Description of Artificial Sequence: Synthetic oligonucleotide
  Target: ATXN2; (+) strand; PAM type: YTN; PAM sequence: TTG
aacctgggagttggaggttg

SEQ ID NO: 92096 - DNA, 20 bp, Artificial Sequence
  Description of Artificial Sequence: Synthetic oligonucleotide
  Target: ATXN2; (+) strand; PAM type: YTN; PAM sequence: CTG
ggagttggaggttgtagtga

SEQ ID NO: 92097 - DNA, 20 bp, Artificial Sequence
  Description of Artificial Sequence: Synthetic oligonucleotide
  Target: ATXN2; (+) strand; PAM type: YTN; PAM sequence: TTG
gaggttgtagtgagccaaga

SEQ ID NO: 92098 - DNA, 20 bp, Artificial Sequence
  Description of Artificial Sequence: Synthetic oligonucleotide
  Target: ATXN2; (+) strand; PAM type: YTN; PAM sequence: TTG
tagtgagccaagatggcacc

SEQ ID NO: 92099 - DNA, 20 bp, Artificial Sequence
  Description of Artificial Sequence: Synthetic oligonucleotide
  Target: ATXN2; (+) strand; PAM type: YTN; PAM sequence: CTG
cactccaggctggtaacaga

SEQ ID NO: 92100 - DNA, 20 bp, Artificial Sequence
  Description of Artificial Sequence: Synthetic oligonucleotide
  Target: ATXN2; (+) strand; PAM type: YTN; PAM sequence: CTC
caggctggtaacagagcatg

SEQ ID NO: 92101 - DNA, 20 bp, Artificial Sequence
  Description of Artificial Sequence: Synthetic oligonucleotide
  Target: ATXN2; (+) strand; PAM type: YTN; PAM sequence: CTG
gtaacagagcatgactctgt

SEQ ID NO: 92102 - DNA, 20 bp, Artificial Sequence
  Description of Artificial Sequence: Synthetic oligonucleotide
  Target: ATXN2; (+) strand; PAM type: YTN; PAM sequence: CTC
tgtctcaaaaaaaaaaaaaa

SEQ ID NO: 92103 - DNA, 20 bp, Artificial Sequence
  Description of Artificial Sequence: Synthetic oligonucleotide
  Target: ATXN2; (+) strand; PAM type: YTN; PAM sequence: CTG
tctcaaaaaaaaaaaaaaaa

SEQ ID NO: 92104 - DNA, 20 bp, Artificial Sequence
  Description of Artificial Sequence: Synthetic oligonucleotide
  Target: ATXN2; (+) strand; PAM type: YTN; PAM sequence: CTC
aaaaaaaaaaaaaaaaaaaa

SEQ ID NO: 92105 - DNA, 20 bp, Artificial Sequence
  Description of Artificial Sequence: Synthetic oligonucleotide
  Target: ATXN2; (+) strand; PAM type: YTN; PAM sequence: TTC
ttcaatctgcaagaaaagga

SEQ ID NO: 92106 - DNA, 20 bp, Artificial Sequence
  Description of Artificial Sequence: Synthetic oligonucleotide
  Target: ATXN2; (+) strand; PAM type: YTN; PAM sequence: CTT
caatctgcaagaaaaggatg

SEQ ID NO: 92107 - DNA, 20 bp, Artificial Sequence
  Description of Artificial Sequence: Synthetic oligonucleotide
  Target: ATXN2; (+) strand; PAM type: YTN; PAM sequence: TTC
aatctgcaagaaaaggatgt

SEQ ID NO: 92108 - DNA, 20 bp, Artificial Sequence
  Description of Artificial Sequence: Synthetic oligonucleotide
  Target: ATXN2; (+) strand; PAM type: YTN; PAM sequence: CTG
caagaaaaggatgttaacaa

SEQ ID NO: 92109 - DNA, 20 bp, Artificial Sequence
  Description of Artificial Sequence: Synthetic oligonucleotide
  Target: ATXN2; (+) strand; PAM type: YTN; PAM sequence: TTA
acaaacaataataaatcacc

SEQ ID NO: 92110 - DNA, 20 bp, Artificial Sequence
  Description of Artificial Sequence: Synthetic oligonucleotide
  Target: ATXN2; (+) strand; PAM type: YTN; PAM sequence: CTG
aaggtgcaaaaactcactgg

SEQ ID NO: 92111 - DNA, 20 bp, Artificial Sequence
  Description of Artificial Sequence: Synthetic oligonucleotide
  Target: ATXN2; (+) strand; PAM type: YTN; PAM sequence: CTC
actggtaacaagtacacaga

SEQ ID NO: 92112 - DNA, 20 bp, Artificial Sequence
  Description of Artificial Sequence: Synthetic oligonucleotide
  Target: ATXN2; (+) strand; PAM type: YTN; PAM sequence: CTG
gtaacaagtacacagaaaaa

SEQ ID NO: 92113 - DNA, 20 bp, Artificial Sequence
  Description of Artificial Sequence: Synthetic oligonucleotide
  Target: ATXN2; (+) strand; PAM type: YTN; PAM sequence: TTG
taacactgtaattgtggtgt

SEQ ID NO: 92114 - DNA, 20 bp, Artificial Sequence
  Description of Artificial Sequence: Synthetic oligonucleotide
  Target: ATXN2; (+) strand; PAM type: YTN; PAM sequence: CTG
taattgtggtgtataaacta

SEQ ID NO: 92115 - DNA, 20 bp, Artificial Sequence
  Description of Artificial Sequence: Synthetic oligonucleotide
  Target: ATXN2; (+) strand; PAM type: YTN; PAM sequence: TTG
tggtgtataaactactactc

SEQ ID NO: 92116 - DNA, 20 bp, Artificial Sequence
  Description of Artificial Sequence: Synthetic oligonucleotide
  Target: ATXN2; (+) strand; PAM type: YTN; PAM sequence: CTA
ctactcatattttgagcagg

SEQ ID NO: 92117 - DNA, 20 bp, Artificial Sequence
  Description of Artificial Sequence: Synthetic oligonucleotide
  Target: ATXN2; (+) strand; PAM type: YTN; PAM sequence: CTA
ctcatattttgagcaggaag

SEQ ID NO: 92118 - DNA, 20 bp, Artificial Sequence
  Description of Artificial Sequence: Synthetic oligonucleotide
  Target: ATXN2; (+) strand; PAM type: YTN; PAM sequence: CTC
atattttgagcaggaagaat

SEQ ID NO: 92119 - DNA, 20 bp, Artificial Sequence
  Description of Artificial Sequence: Synthetic oligonucleotide
  Target: ATXN2; (+) strand; PAM type: YTN; PAM sequence: TTT
tgagcaggaagaataaaaaa

SEQ ID NO: 92120 - DNA, 20 bp, Artificial Sequence
  Description of Artificial Sequence: Synthetic oligonucleotide
  Target: ATXN2; (+) strand; PAM type: YTN; PAM sequence: TTT
gagcaggaagaataaaaaat

SEQ ID NO: 92121 - DNA, 20 bp, Artificial Sequence
  Description of Artificial Sequence: Synthetic oligonucleotide
  Target: ATXN2; (+) strand; PAM type: YTN; PAM sequence: TTG
agcaggaagaataaaaaatg

SEQ ID NO: 92122 - DNA, 20 bp, Artificial Sequence
  Description of Artificial Sequence: Synthetic oligonucleotide
  Target: ATXN2; (+) strand; PAM type: YTN; PAM sequence: CTT
tcaaaaataagaactacaat

SEQ ID NO: 92123 - DNA, 20 bp, Artificial Sequence
  Description of Artificial Sequence: Synthetic oligonucleotide
  Target: ATXN2; (+) strand; PAM type: YTN; PAM sequence: TTT
caaaaataagaactacaatt

SEQ ID NO: 92124 - DNA, 20 bp, Artificial Sequence
  Description of Artificial Sequence: Synthetic oligonucleotide
  Target: ATXN2; (+) strand; PAM type: YTN; PAM sequence: TTC
aaaaataagaactacaattt

SEQ ID NO: 92125 - DNA, 20 bp, Artificial Sequence
  Description of Artificial Sequence: Synthetic oligonucleotide
  Target: ATXN2; (+) strand; PAM type: YTN; PAM sequence: CTA
caattttttttttttttgtg

SEQ ID NO: 92126 - DNA, 20 bp, Artificial Sequence
  Description of Artificial Sequence: Synthetic oligonucleotide
  Target: ATXN2; (+) strand; PAM type: YTN; PAM sequence: TTT
tttttttttttgtgagacag

SEQ ID NO: 92127 - DNA, 20 bp, Artificial Sequence
  Description of Artificial Sequence: Synthetic oligonucleotide
  Target: ATXN2; (+) strand; PAM type: YTN; PAM sequence: TTT
ttttttttttgtgagacaga

SEQ ID NO: 92128 - DNA, 20 bp, Artificial Sequence
  Description of Artificial Sequence: Synthetic oligonucleotide
  Target: ATXN2; (+) strand; PAM type: YTN; PAM sequence: TTT
tttttttttgtgagacagag

SEQ ID NO: 92129 - DNA, 20 bp, Artificial Sequence
  Description of Artificial Sequence: Synthetic oligonucleotide
  Target: ATXN2; (+) strand; PAM type: YTN; PAM sequence: TTT
ttttttttgtgagacagagt

SEQ ID NO: 92130 - DNA, 20 bp, Artificial Sequence
  Description of Artificial Sequence: Synthetic oligonucleotide
  Target: ATXN2; (+) strand; PAM type: YTN; PAM sequence: TTT
tttttttgtgagacagagtc

SEQ ID NO: 92131 - DNA, 20 bp, Artificial Sequence
  Description of Artificial Sequence: Synthetic oligonucleotide
  Target: ATXN2; (+) strand; PAM type: YTN; PAM sequence: TTT
ttttttgtgagacagagtct

SEQ ID NO: 92132 - DNA, 20 bp, Artificial Sequence
  Description of Artificial Sequence: Synthetic oligonucleotide
  Target: ATXN2; (+) strand; PAM type: YTN; PAM sequence: TTT
tttttgtgagacagagtctt

SEQ ID NO: 92133 - DNA, 20 bp, Artificial Sequence
  Description of Artificial Sequence: Synthetic oligonucleotide
  Target: ATXN2; (+) strand; PAM type: YTN; PAM sequence: TTT
ttttgtgagacagagtcttg

SEQ ID NO: 92134 - DNA, 20 bp, Artificial Sequence
  Description of Artificial Sequence: Synthetic oligonucleotide
  Target: ATXN2; (+) strand; PAM type: YTN; PAM sequence: TTT
tttgtgagacagagtcttgc

SEQ ID NO: 92135 - DNA, 20 bp, Artificial Sequence
  Description of Artificial Sequence: Synthetic oligonucleotide
  Target: ATXN2; (+) strand; PAM type: YTN; PAM sequence: TTT
ttgtgagacagagtcttgct

SEQ ID NO: 92136 - DNA, 20 bp, Artificial Sequence
  Description of Artificial Sequence: Synthetic oligonucleotide
  Target: ATXN2; (+) strand; PAM type: YTN; PAM sequence: TTT
tgtgagacagagtcttgctc

SEQ ID NO: 92137 - DNA, 20 bp, Artificial Sequence
  Description of Artificial Sequence: Synthetic oligonucleotide
  Target: ATXN2; (+) strand; PAM type: YTN; PAM sequence: TTT
gtgagacagagtcttgctct

SEQ ID NO: 92138 - DNA, 20 bp, Artificial Sequence
  Description of Artificial Sequence: Synthetic oligonucleotide
  Target: ATXN2; (+) strand; PAM type: YTN; PAM sequence: TTG
tgagacagagtcttgctctg

SEQ ID NO: 92139 - DNA, 20 bp, Artificial Sequence
  Description of Artificial Sequence: Synthetic oligonucleotide
  Target: ATXN2; (+) strand; PAM type: YTN; PAM sequence: CTT
gctctgctgcccaggctgga

SEQ ID NO: 92140 - DNA, 20 bp, Artificial Sequence
  Description of Artificial Sequence: Synthetic oligonucleotide
  Target: ATXN2; (+) strand; PAM type: YTN; PAM sequence: TTG
ctctgctgcccaggctggac

SEQ ID NO: 92141 - DNA, 20 bp, Artificial Sequence
  Description of Artificial Sequence: Synthetic oligonucleotide
  Target: ATXN2; (+) strand; PAM type: YTN; PAM sequence: CTC
tgctgcccaggctggacggc

SEQ ID NO: 92142 - DNA, 20 bp, Artificial Sequence
  Description of Artificial Sequence: Synthetic oligonucleotide
  Target: ATXN2; (+) strand; PAM type: YTN; PAM sequence: CTG
ctgcccaggctggacggcag

SEQ ID NO: 92143 - DNA, 20 bp, Artificial Sequence
  Description of Artificial Sequence: Synthetic oligonucleotide
  Target: ATXN2; (+) strand; PAM type: YTN; PAM sequence: CTG
cccaggctggacggcagtgg

SEQ ID NO: 92144 - DNA, 20 bp, Artificial Sequence
  Description of Artificial Sequence: Synthetic oligonucleotide
  Target: ATXN2; (+) strand; PAM type: YTN; PAM sequence: CTG
gacggcagtggcgcgatctc

SEQ ID NO: 92145 - DNA, 20 bp, Artificial Sequence
  Description of Artificial Sequence: Synthetic oligonucleotide
  Target: ATXN2; (+) strand; PAM type: YTN; PAM sequence: CTC
ggctaactgcaacctccgcc

SEQ ID NO: 92146 - DNA, 20 bp, Artificial Sequence
  Description of Artificial Sequence: Synthetic oligonucleotide
  Target: ATXN2; (+) strand; PAM type: YTN; PAM sequence: CTA
actgcaacctccgcctccca

SEQ ID NO: 92147 - DNA, 20 bp, Artificial Sequence
  Description of Artificial Sequence: Synthetic oligonucleotide
  Target: ATXN2; (+) strand; PAM type: YTN; PAM sequence: CTG
caacctccgcctcccaggtt

SEQ ID NO: 92148 - DNA, 20 bp, Artificial Sequence
  Description of Artificial Sequence: Synthetic oligonucleotide
  Target: ATXN2; (+) strand; PAM type: YTN; PAM sequence: CTC
cgcctcccaggttcaagcga

SEQ ID NO: 92149 - DNA, 20 bp, Artificial Sequence
  Description of Artificial Sequence: Synthetic oligonucleotide
  Target: ATXN2; (+) strand; PAM type: YTN; PAM sequence: CTC
ccaggttcaagcgattctcc

SEQ ID NO: 92150 - DNA, 20 bp, Artificial Sequence
  Description of Artificial Sequence: Synthetic oligonucleotide
  Target: ATXN2; (+) strand; PAM type: YTN; PAM sequence: TTC
aagcgattctcctgcctcag

SEQ ID NO: 92151 - DNA, 20 bp, Artificial Sequence
  Description of Artificial Sequence: Synthetic oligonucleotide
  Target: ATXN2; (+) strand; PAM type: YTN; PAM sequence: TTC
tcctgcctcagcctcctgag

SEQ ID NO: 92152 - DNA, 20 bp, Artificial Sequence
  Description of Artificial Sequence: Synthetic oligonucleotide
  Target: ATXN2; (+) strand; PAM type: YTN; PAM sequence: CTC
ctgcctcagcctcctgagta

SEQ ID NO: 92153 - DNA, 20 bp, Artificial Sequence
  Description of Artificial Sequence: Synthetic oligonucleotide
  Target: ATXN2; (+) strand; PAM type: YTN; PAM sequence: CTG
cctcagcctcctgagtagct

SEQ ID NO: 92154 - DNA, 20 bp, Artificial Sequence
  Description of Artificial Sequence: Synthetic oligonucleotide
  Target: ATXN2; (+) strand; PAM type: YTN; PAM sequence: CTC
agcctcctgagtagctagga

SEQ ID NO: 92155 - DNA, 20 bp, Artificial Sequence
  Description of Artificial Sequence: Synthetic oligonucleotide
  Target: ATXN2; (+) strand; PAM type: YTN; PAM sequence: CTC
ctgagtagctaggattacag

SEQ ID NO: 92156 - DNA, 20 bp, Artificial Sequence
  Description of Artificial Sequence: Synthetic oligonucleotide
  Target: ATXN2; (+) strand; PAM type: YTN; PAM sequence: CTG
agtagctaggattacaggtg

SEQ ID NO: 92157 - DNA, 20 bp, Artificial Sequence
  Description of Artificial Sequence: Synthetic oligonucleotide
  Target: ATXN2; (+) strand; PAM type: YTN; PAM sequence: CTA
ggattacaggtgcgtgccac

SEQ ID NO: 92158 - DNA, 20 bp, Artificial Sequence
  Description of Artificial Sequence: Synthetic oligonucleotide
  Target: ATXN2; (+) strand; PAM type: YTN; PAM sequence: TTA
caggtgcgtgccaccacgcc

SEQ ID NO: 92159 - DNA, 20 bp, Artificial Sequence
  Description of Artificial Sequence: Synthetic oligonucleotide
  Target: ATXN2; (+) strand; PAM type: YTN; PAM sequence: CTG
gctaatttttgtatttttag

SEQ ID NO: 92160 - DNA, 20 bp, Artificial Sequence
  Description of Artificial Sequence: Synthetic oligonucleotide
  Target: ATXN2; (+) strand; PAM type: YTN; PAM sequence: CTA
atttttgtatttttagtaga

SEQ ID NO: 92161 - DNA, 20 bp, Artificial Sequence
  Description of Artificial Sequence: Synthetic oligonucleotide
  Target: ATXN2; (+) strand; PAM type: YTN; PAM sequence: TTT
ttgtatttttagtagagaca

SEQ ID NO: 92162 - DNA, 20 bp, Artificial Sequence
  Description of Artificial Sequence: Synthetic oligonucleotide
  Target: ATXN2; (+) strand; PAM type: YTN; PAM sequence: TTT
tgtatttttagtagagacag

SEQ ID NO: 92163 - DNA, 20 bp, Artificial Sequence
  Description of Artificial Sequence: Synthetic oligonucleotide
  Target: ATXN2; (+) strand; PAM type: YTN; PAM sequence: TTT
gtatttttagtagagacaga

SEQ ID NO: 92164 - DNA, 20 bp, Artificial Sequence
  Description of Artificial Sequence: Synthetic oligonucleotide
  Target: ATXN2; (+) strand; PAM type: YTN; PAM sequence: TTG
tatttttagtagagacagag

SEQ ID NO: 92165 - DNA, 20 bp, Artificial Sequence
  Description of Artificial Sequence: Synthetic oligonucleotide
  Target: ATXN2; (+) strand; PAM type: YTN; PAM sequence: TTT
ttagtagagacagagtttca

SEQ ID NO: 92166 - DNA, 20 bp, Artificial Sequence
  Description of Artificial Sequence: Synthetic oligonucleotide
  Target: ATXN2; (+) strand; PAM type: YTN; PAM sequence: TTT
tagtagagacagagtttcac

SEQ ID NO: 92167 - DNA, 20 bp, Artificial Sequence
  Description of Artificial Sequence: Synthetic oligonucleotide
  Target: ATXN2; (+) strand; PAM type: YTN; PAM sequence: TTT
agtagagacagagtttcacc

SEQ ID NO: 92168 - DNA, 20 bp, Artificial Sequence
  Description of Artificial Sequence: Synthetic oligonucleotide
  Target: ATXN2; (+) strand; PAM type: YTN; PAM sequence: TTA
gtagagacagagtttcacca

SEQ ID NO: 92169 - DNA, 20 bp, Artificial Sequence
  Description of Artificial Sequence: Synthetic oligonucleotide
  Target: ATXN2; (+) strand; PAM type: YTN; PAM sequence: TTT
caccacgttggtcaggctgg

SEQ ID NO: 92170 - DNA, 20 bp, Artificial Sequence
  Description of Artificial Sequence: Synthetic oligonucleotide
  Target: ATXN2; (+) strand; PAM type: YTN; PAM sequence: TTC
accacgttggtcaggctggt

SEQ ID NO: 92171 - DNA, 20 bp, Artificial Sequence
  Description of Artificial Sequence: Synthetic oligonucleotide
  Target: ATXN2; (+) strand; PAM type: YTN; PAM sequence: TTG
gtcaggctggtctcgaactc

SEQ ID NO: 92172 - DNA, 20 bp, Artificial Sequence
  Description of Artificial Sequence: Synthetic oligonucleotide
  Target: ATXN2; (+) strand; PAM type: YTN; PAM sequence: CTG
gtctcgaactcctaaccttg

SEQ ID NO: 92173 - DNA, 20 bp, Artificial Sequence
  Description of Artificial Sequence: Synthetic oligonucleotide
  Target: ATXN2; (+) strand; PAM type: YTN; PAM sequence: CTC
gaactcctaaccttgtgatt

SEQ ID NO: 92174 - DNA, 20 bp, Artificial Sequence
  Description of Artificial Sequence: Synthetic oligonucleotide
  Target: ATXN2; (+) strand; PAM type: YTN; PAM sequence: CTC
ctaaccttgtgattcgcccc

SEQ ID NO: 92175 - DNA, 20 bp, Artificial Sequence
  Description of Artificial Sequence: Synthetic oligonucleotide
  Target: ATXN2; (+) strand; PAM type: YTN; PAM sequence: CTA
accttgtgattcgccccacc

SEQ ID NO: 92176 - DNA, 20 bp, Artificial Sequence
  Description of Artificial Sequence: Synthetic oligonucleotide
  Target: ATXN2; (+) strand; PAM type: YTN; PAM sequence: CTT
gtgattcgccccacctttgc

SEQ ID NO: 92177 - DNA, 20 bp, Artificial Sequence
  Description of Artificial Sequence: Synthetic oligonucleotide
  Target: ATXN2; (+) strand; PAM type: YTN; PAM sequence: TTG
tgattcgccccacctttgcc

SEQ ID NO: 92178 - DNA, 20 bp, Artificial Sequence
  Description of Artificial Sequence: Synthetic oligonucleotide
  Target: ATXN2; (+) strand; PAM type: YTN; PAM sequence: TTC
gccccacctttgccttccaa

SEQ ID NO: 92179 - DNA, 20 bp, Artificial Sequence
  Description of Artificial Sequence: Synthetic oligonucleotide
  Target: ATXN2; (+) strand; PAM type: YTN; PAM sequence: CTT
tgccttccaaagtgctggga

SEQ ID NO: 92180 - DNA, 20 bp, Artificial Sequence
  Description of Artificial Sequence: Synthetic oligonucleotide
  Target: ATXN2; (+) strand; PAM type: YTN; PAM sequence: TTT
gccttccaaagtgctgggat

SEQ ID NO: 92181 - DNA, 20 bp, Artificial Sequence
  Description of Artificial Sequence: Synthetic oligonucleotide
  Target: ATXN2; (+) strand; PAM type: YTN; PAM sequence: TTG
ccttccaaagtgctgggatt

SEQ ID NO: 92182 - DNA, 20 bp, Artificial Sequence
  Description of Artificial Sequence: Synthetic oligonucleotide
  Target: ATXN2; (+) strand; PAM type: YTN; PAM sequence: CTT
ccaaagtgctgggattaggc

SEQ ID NO: 92183 - DNA, 20 bp, Artificial Sequence
  Description of Artificial Sequence: Synthetic oligonucleotide
  Target: ATXN2; (+) strand; PAM type: YTN; PAM sequence: TTC
caaagtgctgggattaggcg

SEQ ID NO: 92184 - DNA, 20 bp, Artificial Sequence
  Description of Artificial Sequence: Synthetic oligonucleotide
  Target: ATXN2; (+) strand; PAM type: YTN; PAM sequence: CTG
ggattaggcgtgagccacta

SEQ ID NO: 92185 - DNA, 20 bp, Artificial Sequence
  Description of Artificial Sequence: Synthetic oligonucleotide
  Target: ATXN2; (+) strand; PAM type: YTN; PAM sequence: TTA
ggcgtgagccactaggccag

SEQ ID NO: 92186 - DNA, 20 bp, Artificial Sequence
  Description of Artificial Sequence: Synthetic oligonucleotide
  Target: ATXN2; (+) strand; PAM type: YTN; PAM sequence: CTA
ggccagggttttgttttgtt

SEQ ID NO: 92187 - DNA, 20 bp, Artificial Sequence
  Description of Artificial Sequence: Synthetic oligonucleotide
  Target: ATXN2; (+) strand; PAM type: YTN; PAM sequence: TTT
tgttttgttttgtattgttt

SEQ ID NO: 92188 - DNA, 20 bp, Artificial Sequence
  Description of Artificial Sequence: Synthetic oligonucleotide
  Target: ATXN2; (+) strand; PAM type: YTN; PAM sequence: TTT
gttttgttttgtattgtttt

SEQ ID NO: 92189 - DNA, 20 bp, Artificial Sequence
  Description of Artificial Sequence: Synthetic oligonucleotide
  Target: ATXN2; (+) strand; PAM type: YTN; PAM sequence: TTG
ttttgttttgtattgttttt

SEQ ID NO: 92190 - DNA, 20 bp, Artificial Sequence
  Description of Artificial Sequence: Synthetic oligonucleotide
  Target: ATXN2; (+) strand; PAM type: YTN; PAM sequence: TTT
tgttttgtattgttttttga

SEQ ID NO: 92191 - DNA, 20 bp, Artificial Sequence
  Description of Artificial Sequence: Synthetic oligonucleotide
  Target: ATXN2; (+) strand; PAM type: YTN; PAM sequence: TTT
gttttgtattgttttttgag

SEQ ID NO: 92192 - DNA, 20 bp, Artificial Sequence
  Description of Artificial Sequence: Synthetic oligonucleotide
  Target: ATXN2; (+) strand; PAM type: YTN; PAM sequence: TTG
ttttgtattgttttttgaga

SEQ ID NO: 92193 - DNA, 20 bp, Artificial Sequence
  Description of Artificial Sequence: Synthetic oligonucleotide
  Target: ATXN2; (+) strand; PAM type: YTN; PAM sequence: TTT
tgtattgttttttgagacag

SEQ ID NO: 92194 - DNA, 20 bp, Artificial Sequence
  Description of Artificial Sequence: Synthetic oligonucleotide
  Target: ATXN2; (+) strand; PAM type: YTN; PAM sequence: TTT
gtattgttttttgagacagt

SEQ ID NO: 92195 - DNA, 20 bp, Artificial Sequence
  Description of Artificial Sequence: Synthetic oligonucleotide
  Target: ATXN2; (+) strand; PAM type: YTN; PAM sequence: TTG
tattgttttttgagacagtc

SEQ ID NO: 92196 - DNA, 20 bp, Artificial Sequence
  Description of Artificial Sequence: Synthetic oligonucleotide
  Target: ATXN2; (+) strand; PAM type: YTN; PAM sequence: TTG
ttttttgagacagtcttact

SEQ ID NO: 92197 - DNA, 20 bp, Artificial Sequence
  Description of Artificial Sequence: Synthetic oligonucleotide
  Target: ATXN2; (+) strand; PAM type: YTN; PAM sequence: TTT
tttgagacagtcttactctg

SEQ ID NO: 92198 - DNA, 20 bp, Artificial Sequence
  Description of Artificial Sequence: Synthetic oligonucleotide
  Target: ATXN2; (+) strand; PAM type: YTN; PAM sequence: TTT
ttgagacagtcttactctgt

SEQ ID NO: 92199 - DNA, 20 bp, Artificial Sequence
  Description of Artificial Sequence: Synthetic oligonucleotide
  Target: ATXN2; (+) strand; PAM type: YTN; PAM sequence: TTT
tgagacagtcttactctgtt

SEQ ID NO: 92200 - DNA, 20 bp, Artificial Sequence
  Description of Artificial Sequence: Synthetic oligonucleotide
  Target: ATXN2; (+) strand; PAM type: YTN; PAM sequence: TTT
gagacagtcttactctgttg

SEQ ID NO: 92201 - DNA, 20 bp, Artificial Sequence
  Description of Artificial Sequence: Synthetic oligonucleotide
  Target: ATXN2; (+) strand; PAM type: YTN; PAM sequence: TTG
agacagtcttactctgttgc

SEQ ID NO: 92202 - DNA, 20 bp, Artificial Sequence
  Description of Artificial Sequence: Synthetic oligonucleotide
  Target: ATXN2; (+) strand; PAM type: YTN; PAM sequence: CTT
actctgttgcccagactgga

SEQ ID NO: 92203 - DNA, 20 bp, Artificial Sequence
  Description of Artificial Sequence: Synthetic oligonucleotide
  Target: ATXN2; (+) strand; PAM type: YTN; PAM sequence: TTA
ctctgttgcccagactggag

SEQ ID NO: 92204 - DNA, 20 bp, Artificial Sequence
  Description of Artificial Sequence: Synthetic oligonucleotide
  Target: ATXN2; (+) strand; PAM type: YTN; PAM sequence: CTC
tgttgcccagactggagtgc

SEQ ID NO: 92205 - DNA, 20 bp, Artificial Sequence
  Description of Artificial Sequence: Synthetic oligonucleotide
  Target: ATXN2; (+) strand; PAM type: YTN; PAM sequence: CTG
ttgcccagactggagtgcag

SEQ ID NO: 92206 - DNA, 20 bp, Artificial Sequence
  Description of Artificial Sequence: Synthetic oligonucleotide
  Target: ATXN2; (+) strand; PAM type: YTN; PAM sequence: TTG
cccagactggagtgcagtgg

SEQ ID NO: 92207 - DNA, 20 bp, Artificial Sequence
  Description of Artificial Sequence: Synthetic oligonucleotide
  Target: ATXN2; (+) strand; PAM type: YTN; PAM sequence: CTG
gagtgcagtggcgcactctc

SEQ ID NO: 92208 - DNA, 20 bp, Artificial Sequence
  Description of Artificial Sequence: Synthetic oligonucleotide
  Target: ATXN2; (+) strand; PAM type: YTN; PAM sequence: CTC
tcggctcactgcaacctggg

SEQ ID NO: 92209 - DNA, 20 bp, Artificial Sequence
  Description of Artificial Sequence: Synthetic oligonucleotide
  Target: ATXN2; (+) strand; PAM type: YTN; PAM sequence: CTC
ggctcactgcaacctgggcc

SEQ ID NO: 92210 - DNA, 20 bp, Artificial Sequence
  Description of Artificial Sequence: Synthetic oligonucleotide
  Target: ATXN2; (+) strand; PAM type: YTN; PAM sequence: CTC
actgcaacctgggcctcctg

SEQ ID NO: 92211 - DNA, 20 bp, Artificial Sequence
  Description of Artificial Sequence: Synthetic oligonucleotide
  Target: ATXN2; (+) strand; PAM type: YTN; PAM sequence: CTG
caacctgggcctcctgggtt

SEQ ID NO: 92212 - DNA, 20 bp, Artificial Sequence
  Description of Artificial Sequence: Synthetic oligonucleotide
  Target: ATXN2; (+) strand; PAM type: YTN; PAM sequence: CTG
ggcctcctgggttcaagtga

SEQ ID NO: 92213 - DNA, 20 bp, Artificial Sequence
  Description of Artificial Sequence: Synthetic oligonucleotide
  Target: ATXN2; (+) strand; PAM type: YTN; PAM sequence: CTC
ctgggttcaagtgattctcc

SEQ ID NO: 92214 - DNA, 20 bp, Artificial Sequence
  Description of Artificial Sequence: Synthetic oligonucleotide
  Target: ATXN2; (+) strand; PAM type: YTN; PAM sequence: CTG
ggttcaagtgattctcctgc

SEQ ID NO: 92215 - DNA, 20 bp, Artificial Sequence
  Description of Artificial Sequence: Synthetic oligonucleotide
  Target: ATXN2; (+) strand; PAM type: YTN; PAM sequence: TTC
aagtgattctcctgcctcag

SEQ ID NO: 92216 - DNA, 20 bp, Artificial Sequence
  Description of Artificial Sequence: Synthetic oligonucleotide
  Target: ATXN2; (+) strand; PAM type: YTN; PAM sequence: TTC
tcctgcctcagcctccgagt

SEQ ID NO: 92217 - DNA, 20 bp, Artificial Sequence
  Description of Artificial Sequence: Synthetic oligonucleotide
  Target: ATXN2; (+) strand; PAM type: YTN; PAM sequence: CTC
ctgcctcagcctccgagtag

SEQ ID NO: 92218 - DNA, 20 bp, Artificial Sequence
  Description of Artificial Sequence: Synthetic oligonucleotide
  Target: ATXN2; (+) strand; PAM type: YTN; PAM sequence: CTG
cctcagcctccgagtagctg

SEQ ID NO: 92219 - DNA, 20 bp, Artificial Sequence
  Description of Artificial Sequence: Synthetic oligonucleotide
  Target: ATXN2; (+) strand; PAM type: YTN; PAM sequence: CTC
agcctccgagtagctgggat

SEQ ID NO: 92220 - DNA, 20 bp, Artificial Sequence
  Description of Artificial Sequence: Synthetic oligonucleotide
  Target: ATXN2; (+) strand; PAM type: YTN; PAM sequence: CTC
cgagtagctgggattacagg

SEQ ID NO: 92221 - DNA, 20 bp, Artificial Sequence
  Description of Artificial Sequence: Synthetic oligonucleotide
  Target: ATXN2; (+) strand; PAM type: YTN; PAM sequence: CTG
ggattacaggcacccgccac

SEQ ID NO: 92222 - DNA, 20 bp, Artificial Sequence
  Description of Artificial Sequence: Synthetic oligonucleotide
  Target: ATXN2; (+) strand; PAM type: YTN; PAM sequence: TTA
caggcacccgccaccatgtc

SEQ ID NO: 92223 - DNA, 20 bp, Artificial Sequence
  Description of Artificial Sequence: Synthetic oligonucleotide
  Target: ATXN2; (+) strand; PAM type: YTN; PAM sequence: CTA
atttttctatttttagtaga

SEQ ID NO: 92224 - DNA, 20 bp, Artificial Sequence
  Description of Artificial Sequence: Synthetic oligonucleotide
  Target: ATXN2; (+) strand; PAM type: YTN; PAM sequence: TTT
ttctatttttagtagagagg

SEQ ID NO: 92225 - DNA, 20 bp, Artificial Sequence
  Description of Artificial Sequence: Synthetic oligonucleotide
  Target: ATXN2; (+) strand; PAM type: YTN; PAM sequence: TTT
tctatttttagtagagaggg

SEQ ID NO: 92226 - DNA, 20 bp, Artificial Sequence
  Description of Artificial Sequence: Synthetic oligonucleotide
  Target: ATXN2; (+) strand; PAM type: YTN; PAM sequence: TTT
ctatttttagtagagagggg

SEQ ID NO: 92227 - DNA, 20 bp, Artificial Sequence
  Description of Artificial Sequence: Synthetic oligonucleotide
  Target: ATXN2; (+) strand; PAM type: YTN; PAM sequence: TTC
tatttttagtagagaggggg

SEQ ID NO: 92228 - DNA, 20 bp, Artificial Sequence
  Description of Artificial Sequence: Synthetic oligonucleotide
  Target: ATXN2; (+) strand; PAM type: YTN; PAM sequence: CTA
tttttagtagagagggggtt

SEQ ID NO: 92229 - DNA, 20 bp, Artificial Sequence
  Description of Artificial Sequence: Synthetic oligonucleotide
  Target: ATXN2; (+) strand; PAM type: YTN; PAM sequence: TTT
ttagtagagagggggttttg

SEQ ID NO: 92230 - DNA, 20 bp, Artificial Sequence
  Description of Artificial Sequence: Synthetic oligonucleotide
  Target: ATXN2; (+) strand; PAM type: YTN; PAM sequence: TTT
tagtagagagggggttttgc

SEQ ID NO: 92231 - DNA, 20 bp, Artificial Sequence
  Description of Artificial Sequence: Synthetic oligonucleotide
  Target: ATXN2; (+) strand; PAM type: YTN; PAM sequence: TTT
agtagagagggggttttgcc

SEQ ID NO: 92232 - DNA, 20 bp, Artificial Sequence
  Description of Artificial Sequence: Synthetic oligonucleotide
  Target: ATXN2; (+) strand; PAM type: YTN; PAM sequence: TTA
gtagagagggggttttgcca

SEQ ID NO: 92233 - DNA, 20 bp, Artificial Sequence
  Description of Artificial Sequence: Synthetic oligonucleotide
  Target: ATXN2; (+) strand; PAM type: YTN; PAM sequence: TTT
tgccatattggctaggctgg

SEQ ID NO: 92234 - DNA, 20 bp, Artificial Sequence
  Description of Artificial Sequence: Synthetic oligonucleotide
  Target: ATXN2; (+) strand; PAM type: YTN; PAM sequence: TTT
gccatattggctaggctggt

SEQ ID NO: 92235 - DNA, 20 bp, Artificial Sequence
  Description of Artificial Sequence: Synthetic oligonucleotide
  Target: ATXN2; (+) strand; PAM type: YTN; PAM sequence: TTG
ccatattggctaggctggtc

SEQ ID NO: 92236 - DNA, 20 bp, Artificial Sequence
  Description of Artificial Sequence: Synthetic oligonucleotide
  Target: ATXN2; (+) strand; PAM type: YTN; PAM sequence: TTG
gctaggctggtctcgaactc

SEQ ID NO: 92237 - DNA, 20 bp, Artificial Sequence
  Description of Artificial Sequence: Synthetic oligonucleotide
  Target: ATXN2; (+) strand; PAM type: YTN; PAM sequence: CTA
ggctggtctcgaactcctga

SEQ ID NO: 92238 - DNA, 20 bp, Artificial Sequence
  Description of Artificial Sequence: Synthetic oligonucleotide
  Target: ATXN2; (+) strand; PAM type: YTN; PAM sequence: CTG
gtctcgaactcctgacctta

SEQ ID NO: 92239 - DNA, 20 bp, Artificial Sequence
  Description of Artificial Sequence: Synthetic oligonucleotide
  Target: ATXN2; (+) strand; PAM type: YTN; PAM sequence: CTC
gaactcctgaccttaggtga

SEQ ID NO: 92240 - DNA, 20 bp, Artificial Sequence
  Description of Artificial Sequence: Synthetic oligonucleotide
  Target: ATXN2; (+) strand; PAM type: YTN; PAM sequence: CTC
ctgaccttaggtgatccgcc

SEQ ID NO: 92241 - DNA, 20 bp, Artificial Sequence
  Description of Artificial Sequence: Synthetic oligonucleotide
  Target: ATXN2; (+) strand; PAM type: YTN; PAM sequence: CTG
accttaggtgatccgcccac

SEQ ID NO: 92242 - DNA, 20 bp, Artificial Sequence
  Description of Artificial Sequence: Synthetic oligonucleotide
  Target: ATXN2; (+) strand; PAM type: YTN; PAM sequence: CTT
aggtgatccgcccacctcag

SEQ ID NO: 92243 - DNA, 20 bp, Artificial Sequence
  Description of Artificial Sequence: Synthetic oligonucleotide
  Target: ATXN2; (+) strand; PAM type: YTN; PAM sequence: TTA
ggtgatccgcccacctcagc

SEQ ID NO: 92244 - DNA, 20 bp, Artificial Sequence
  Description of Artificial Sequence: Synthetic oligonucleotide
  Target: ATXN2; (+) strand; PAM type: YTN; PAM sequence: CTC
agcctcccaaagtgctggga

SEQ ID NO: 92245 - DNA, 20 bp, Artificial Sequence
  Description of Artificial Sequence: Synthetic oligonucleotide
  Target: ATXN2; (+) strand; PAM type: YTN; PAM sequence: CTC
ccaaagtgctgggattacac

SEQ ID NO: 92246 - DNA, 20 bp, Artificial Sequence
  Description of Artificial Sequence: Synthetic oligonucleotide
  Target: ATXN2; (+) strand; PAM type: YTN; PAM sequence: CTG
ggattacacacgtgaaccac

SEQ ID NO: 92247 - DNA, 20 bp, Artificial Sequence
  Description of Artificial Sequence: Synthetic oligonucleotide
  Target: ATXN2; (+) strand; PAM type: YTN; PAM sequence: TTA
cacacgtgaaccactgcgcc

SEQ ID NO: 92248 - DNA, 20 bp, Artificial Sequence
  Description of Artificial Sequence: Synthetic oligonucleotide
  Target: ATXN2; (+) strand; PAM type: YTN; PAM sequence: CTG
cgcctggcttataactacag

SEQ ID NO: 92249 - DNA, 20 bp, Artificial Sequence
  Description of Artificial Sequence: Synthetic oligonucleotide
  Target: ATXN2; (+) strand; PAM type: YTN; PAM sequence: CTG
gcttataactacagtttttt

SEQ ID NO: 92250 - DNA, 20 bp, Artificial Sequence
  Description of Artificial Sequence: Synthetic oligonucleotide
  Target: ATXN2; (+) strand; PAM type: YTN; PAM sequence: CTT
ataactacagttttttaaga

SEQ ID NO: 92251 - DNA, 20 bp, Artificial Sequence
  Description of Artificial Sequence: Synthetic oligonucleotide
  Target: ATXN2; (+) strand; PAM type: YTN; PAM sequence: TTA
taactacagttttttaagac

SEQ ID NO: 92252 - DNA, 20 bp, Artificial Sequence
  Description of Artificial Sequence: Synthetic oligonucleotide
  Target: ATXN2; (+) strand; PAM type: YTN; PAM sequence: CTA
cagttttttaagacatagta

SEQ ID NO: 92253 - DNA, 20 bp, Artificial Sequence
  Description of Artificial Sequence: Synthetic oligonucleotide
  Target: ATXN2; (+) strand; PAM type: YTN; PAM sequence: TTT
tttaagacatagtataataa

SEQ ID NO: 92254 - DNA, 20 bp, Artificial Sequence
  Description of Artificial Sequence: Synthetic oligonucleotide
  Target: ATXN2; (+) strand; PAM type: YTN; PAM sequence: TTT
ttaagacatagtataataaa

SEQ ID NO: 92255 - DNA, 20 bp, Artificial Sequence
  Description of Artificial Sequence: Synthetic oligonucleotide
  Target: ATXN2; (+) strand; PAM type: YTN; PAM sequence: TTT
taagacatagtataataaag

SEQ ID NO: 92256 - DNA, 20 bp, Artificial Sequence
  Description of Artificial Sequence: Synthetic oligonucleotide
  Target: ATXN2; (+) strand; PAM type: YTN; PAM sequence: TTT
aagacatagtataataaaga

SEQ ID NO: 92257 - DNA, 20 bp, Artificial Sequence
  Description of Artificial Sequence: Synthetic oligonucleotide
  Target: ATXN2; (+) strand; PAM type: YTN; PAM sequence: TTA
agacatagtataataaagat

SEQ ID NO: 92258 - DNA, 20 bp, Artificial Sequence
  Description of Artificial Sequence: Synthetic oligonucleotide
  Target: ATXN2; (+) strand; PAM type: YTN; PAM sequence: TTA
aaaagcgggcagatgaagtg

SEQ ID NO: 92259 - DNA, 20 bp, Artificial Sequence
  Description of Artificial Sequence: Synthetic oligonucleotide
  Target: ATXN2; (+) strand; PAM type: YTN; PAM sequence: TTT
ttattagttttctctttgct

SEQ ID NO: 92260 - DNA, 20 bp, Artificial Sequence
  Description of Artificial Sequence: Synthetic oligonucleotide
  Target: ATXN2; (+) strand; PAM type: YTN; PAM sequence: TTT
tattagttttctctttgctt

SEQ ID NO: 92261 - DNA, 20 bp, Artificial Sequence
  Description of Artificial Sequence: Synthetic oligonucleotide
  Target: ATXN2; (+) strand; PAM type: YTN; PAM sequence: TTT
attagttttctctttgcttg

SEQ ID NO: 92262 - DNA, 20 bp, Artificial Sequence
  Description of Artificial Sequence: Synthetic oligonucleotide
  Target: ATXN2; (+) strand; PAM type: YTN; PAM sequence: TTA
ttagttttctctttgcttgc

SEQ ID NO: 92263 - DNA, 20 bp, Artificial Sequence
  Description of Artificial Sequence: Synthetic oligonucleotide
  Target: ATXN2; (+) strand; PAM type: YTN; PAM sequence: TTA
gttttctctttgcttgcttg

SEQ ID NO: 92264 - DNA, 20 bp, Artificial Sequence
  Description of Artificial Sequence: Synthetic oligonucleotide
  Target: ATXN2; (+) strand; PAM type: YTN; PAM sequence: TTT
tctctttgcttgcttgtttt

SEQ ID NO: 92265 - DNA, 20 bp, Artificial Sequence
  Description of Artificial Sequence: Synthetic oligonucleotide
  Target: ATXN2; (+) strand; PAM type: YTN; PAM sequence: TTT
ctctttgcttgcttgttttt

SEQ ID NO: 92266 - DNA, 20 bp, Artificial Sequence
  Description of Artificial Sequence: Synthetic oligonucleotide
  Target: ATXN2; (+) strand; PAM type: YTN; PAM sequence: TTC
tctttgcttgcttgtttttg

SEQ ID NO: 92267 - DNA, 20 bp, Artificial Sequence
  Description of Artificial Sequence: Synthetic oligonucleotide
  Target: ATXN2; (+) strand; PAM type: YTN; PAM sequence: CTC
tttgcttgcttgtttttgca

SEQ ID NO: 92268 - DNA, 20 bp, Artificial Sequence
  Description of Artificial Sequence: Synthetic oligonucleotide
  Target: ATXN2; (+) strand; PAM type: YTN; PAM sequence: CTT
tgcttgcttgtttttgcaat

SEQ ID NO: 92269 - DNA, 20 bp, Artificial Sequence
  Description of Artificial Sequence: Synthetic oligonucleotide
  Target: ATXN2; (+) strand; PAM type: YTN; PAM sequence: TTT
gcttgcttgtttttgcaatc

SEQ ID NO: 92270 - DNA, 20 bp, Artificial Sequence
  Description of Artificial Sequence: Synthetic oligonucleotide
  Target: ATXN2; (+) strand; PAM type: YTN; PAM sequence: TTG
cttgcttgtttttgcaatca

SEQ ID NO: 92271 - DNA, 20 bp, Artificial Sequence
  Description of Artificial Sequence: Synthetic oligonucleotide
  Target: ATXN2; (+) strand; PAM type: YTN; PAM sequence: CTT
gcttgtttttgcaatcaaag

SEQ ID NO: 92272 - DNA, 20 bp, Artificial Sequence
  Description of Artificial Sequence: Synthetic oligonucleotide
  Target: ATXN2; (+) strand; PAM type: YTN; PAM sequence: TTG
cttgtttttgcaatcaaagt

SEQ ID NO: 92273 - DNA, 20 bp, Artificial Sequence
  Description of Artificial Sequence: Synthetic oligonucleotide
  Target: ATXN2; (+) strand; PAM type: YTN; PAM sequence: CTT
gtttttgcaatcaaagtttc

SEQ ID NO: 92274 - DNA, 20 bp, Artificial Sequence
  Description of Artificial Sequence: Synthetic oligonucleotide
  Target: ATXN2; (+) strand; PAM type: YTN; PAM sequence: TTG
tttttgcaatcaaagtttca

SEQ ID NO: 92275 - DNA, 20 bp, Artificial Sequence
  Description of Artificial Sequence: Synthetic oligonucleotide
  Target: ATXN2; (+) strand; PAM type: YTN; PAM sequence: TTT
ttgcaatcaaagtttcaagt

SEQ ID NO: 92276 - DNA, 20 bp, Artificial Sequence
  Description of Artificial Sequence: Synthetic oligonucleotide
  Target: ATXN2; (+) strand; PAM type: YTN; PAM sequence: TTT
tgcaatcaaagtttcaagtt

SEQ ID NO: 92277 - DNA, 20 bp, Artificial Sequence
  Description of Artificial Sequence: Synthetic oligonucleotide
  Target: ATXN2; (+) strand; PAM type: YTN; PAM sequence: TTT
gcaatcaaagtttcaagttg

SEQ ID NO: 92278 - DNA, 20 bp, Artificial Sequence
  Description of Artificial Sequence: Synthetic oligonucleotide
  Target: ATXN2; (+) strand; PAM type: YTN; PAM sequence: TTG
caatcaaagtttcaagttgt

SEQ ID NO: 92279 - DNA, 20 bp, Artificial Sequence
  Description of Artificial Sequence: Synthetic oligonucleotide
  Target: ATXN2; (+) strand; PAM type: YTN; PAM sequence: TTT
caagttgtcattggtttaaa

SEQ ID NO: 92280 - DNA, 20 bp, Artificial Sequence
  Description of Artificial Sequence: Synthetic oligonucleotide
  Target: ATXN2; (+) strand; PAM type: YTN; PAM sequence: TTC
aagttgtcattggtttaaaa

SEQ ID NO: 92281 - DNA, 20 bp, Artificial Sequence
  Description of Artificial Sequence: Synthetic oligonucleotide
  Target: ATXN2; (+) strand; PAM type: YTN; PAM sequence: TTG
tcattggtttaaaataatgg

SEQ ID NO: 92282 - DNA, 20 bp, Artificial Sequence
  Description of Artificial Sequence: Synthetic oligonucleotide
  Target: ATXN2; (+) strand; PAM type: YTN; PAM sequence: TTG
gtttaaaataatgggttata

SEQ ID NO: 92283 - DNA, 20 bp, Artificial Sequence
  Description of Artificial Sequence: Synthetic oligonucleotide
  Target: ATXN2; (+) strand; PAM type: YTN; PAM sequence: TTT
aaaataatgggttataaaat

SEQ ID NO: 92284 - DNA, 20 bp, Artificial Sequence
  Description of Artificial Sequence: Synthetic oligonucleotide
  Target: ATXN2; (+) strand; PAM type: YTN; PAM sequence: TTA
aaataatgggttataaaatg

SEQ ID NO: 92285 - DNA, 20 bp, Artificial Sequence
  Description of Artificial Sequence: Synthetic oligonucleotide
  Target: ATXN2; (+) strand; PAM type: YTN; PAM sequence: TTA
taaaatgttatttgcaaccc

SEQ ID NO: 92286 - DNA, 20 bp, Artificial Sequence
  Description of Artificial Sequence: Synthetic oligonucleotide
  Target: ATXN2; (+) strand; PAM type: YTN; PAM sequence: TTA
tttgcaacccttatgtgatc

SEQ ID NO: 92287 - DNA, 20 bp, Artificial Sequence
  Description of Artificial Sequence: Synthetic oligonucleotide
  Target: ATXN2; (+) strand; PAM type: YTN; PAM sequence: TTT
gcaacccttatgtgatctct

SEQ ID NO: 92288 - DNA, 20 bp, Artificial Sequence
  Description of Artificial Sequence: Synthetic oligonucleotide
  Target: ATXN2; (+) strand; PAM type: YTN; PAM sequence: TTG
caacccttatgtgatctctt

SEQ ID NO: 92289 - DNA, 20 bp, Artificial Sequence
  Description of Artificial Sequence: Synthetic oligonucleotide
  Target: ATXN2; (+) strand; PAM type: YTN; PAM sequence: CTT
atgtgatctctttttttttt

SEQ ID NO: 92290 - DNA, 20 bp, Artificial Sequence
  Description of Artificial Sequence: Synthetic oligonucleotide
  Target: ATXN2; (+) strand; PAM type: YTN; PAM sequence: TTA
tgtgatctcttttttttttt

SEQ ID NO: 92291 - DNA, 20 bp, Artificial Sequence
  Description of Artificial Sequence: Synthetic oligonucleotide
  Target: ATXN2; (+) strand; PAM type: YTN; PAM sequence: CTC
ttttttttttttttttttga

SEQ ID NO: 92292 - DNA, 20 bp, Artificial Sequence
  Description of Artificial Sequence: Synthetic oligonucleotide
  Target: ATXN2; (+) strand; PAM type: YTN; PAM sequence: CTT
ttttttttttttttttgaga

SEQ ID NO: 92293 - DNA, 20 bp, Artificial Sequence
  Description of Artificial Sequence: Synthetic oligonucleotide
  Target: ATXN2; (+) strand; PAM type: YTN; PAM sequence: TTT
tttttttttttttttgagac

SEQ ID NO: 92294 - DNA, 20 bp, Artificial Sequence
  Description of Artificial Sequence: Synthetic oligonucleotide
  Target: ATXN2; (+) strand; PAM type: YTN; PAM sequence: TTT
ttttttttttttttgagacg

SEQ ID NO: 92295 - DNA, 20 bp, Artificial Sequence
  Description of Artificial Sequence: Synthetic oligonucleotide
  Target: ATXN2; (+) strand; PAM type: YTN; PAM sequence: TTT
tttttttttttttgagacgg

SEQ ID NO: 92296 - DNA, 20 bp, Artificial Sequence
  Description of Artificial Sequence: Synthetic oligonucleotide
  Target: ATXN2; (+) strand; PAM type: YTN; PAM sequence: TTT
ttttttttttttgagacgga

SEQ ID NO: 92297 - DNA, 20 bp, Artificial Sequence
  Description of Artificial Sequence: Synthetic oligonucleotide
  Target: ATXN2; (+) strand; PAM type: YTN; PAM sequence: TTT
tttttttttttgagacggag

SEQ ID NO: 92298 - DNA, 20 bp, Artificial Sequence
  Description of Artificial Sequence: Synthetic oligonucleotide
  Target: ATXN2; (+) strand; PAM type: YTN; PAM sequence: TTT
ttttttttttgagacggagt

SEQ ID NO: 92299 - DNA, 20 bp, Artificial Sequence
  Description of Artificial Sequence: Synthetic oligonucleotide
  Target: ATXN2; (+) strand; PAM type: YTN; PAM sequence: TTT
tttttttttgagacggagtc

SEQ ID NO: 92300 - DNA, 20 bp, Artificial Sequence
  Description of Artificial Sequence: Synthetic oligonucleotide
  Target: ATXN2; (+) strand; PAM type: YTN; PAM sequence: TTT
ttttttttgagacggagtct

SEQ ID NO: 92301 - DNA, 20 bp, Artificial Sequence
  Description of Artificial Sequence: Synthetic oligonucleotide
  Target: ATXN2; (+) strand; PAM type: YTN; PAM sequence: TTT
tttttttgagacggagtctc

SEQ ID NO: 92302 - DNA, 20 bp, Artificial Sequence
  Description of Artificial Sequence: Synthetic oligonucleotide
  Target: ATXN2; (+) strand; PAM type: YTN; PAM sequence: TTT
ttttttgagacggagtctca

SEQ ID NO: 92303 - DNA, 20 bp, Artificial Sequence
  Description of Artificial Sequence: Synthetic oligonucleotide
  Target: ATXN2; (+) strand; PAM type: YTN; PAM sequence: TTT
tttttgagacggagtctcac

SEQ ID NO: 92304 - DNA, 20 bp, Artificial Sequence
  Description of Artificial Sequence: Synthetic oligonucleotide
  Target: ATXN2; (+) strand; PAM type: YTN; PAM sequence: TTT
ttttgagacggagtctcact

SEQ ID NO: 92305 - DNA, 20 bp, Artificial Sequence
  Description of Artificial Sequence: Synthetic oligonucleotide
  Target: ATXN2; (+) strand; PAM type: YTN; PAM sequence: TTT
tttgagacggagtctcactc

SEQ ID NO: 92306 - DNA, 20 bp, Artificial Sequence
  Description of Artificial Sequence: Synthetic oligonucleotide
  Target: ATXN2; (+) strand; PAM type: YTN; PAM sequence: TTT
ttgagacggagtctcactct

SEQ ID NO: 92307 - DNA, 20 bp, Artificial Sequence
  Description of Artificial Sequence: Synthetic oligonucleotide
  Target: ATXN2; (+) strand; PAM type: YTN; PAM sequence: TTT
tgagacggagtctcactctg

SEQ ID NO: 92308 - DNA, 20 bp, Artificial Sequence
  Description of Artificial Sequence: Synthetic oligonucleotide
  Target: ATXN2; (+) strand; PAM type: YTN; PAM sequence: TTT
gagacggagtctcactctgt

SEQ ID NO: 92309 - DNA, 20 bp, Artificial Sequence
  Description of Artificial Sequence: Synthetic oligonucleotide
  Target: ATXN2; (+) strand; PAM type: YTN; PAM sequence: TTG
agacggagtctcactctgtc

SEQ ID NO: 92310 - DNA, 20 bp, Artificial Sequence
  Description of Artificial Sequence: Synthetic oligonucleotide
  Target: ATXN2; (+) strand; PAM type: YTN; PAM sequence: CTC
actctgtcgcccaggctggg

SEQ ID NO: 92311 - DNA, 20 bp, Artificial Sequence
  Description of Artificial Sequence: Synthetic oligonucleotide
  Target: ATXN2; (+) strand; PAM type: YTN; PAM sequence: CTC
tgtcgcccaggctggggtgc

SEQ ID NO: 92312 - DNA, 20 bp, Artificial Sequence
  Description of Artificial Sequence: Synthetic oligonucleotide
  Target: ATXN2; (+) strand; PAM type: YTN; PAM sequence: CTG
tcgcccaggctggggtgcag

SEQ ID NO: 92313 - DNA, 20 bp, Artificial Sequence
  Description of Artificial Sequence: Synthetic oligonucleotide
  Target: ATXN2; (+) strand; PAM type: YTN; PAM sequence: CTG
gggtgcagtggcacaatatt

SEQ ID NO: 92314 - DNA, 20 bp, Artificial Sequence
  Description of Artificial Sequence: Synthetic oligonucleotide
  Target: ATXN2; (+) strand; PAM type: YTN; PAM sequence: TTG
actcactgcaacctctgcct

SEQ ID NO: 92315 - DNA, 20 bp, Artificial Sequence
  Description of Artificial Sequence: Synthetic oligonucleotide
  Target: ATXN2; (+) strand; PAM type: YTN; PAM sequence: CTC
actgcaacctctgcctcctg

SEQ ID NO: 92316 - DNA, 20 bp, Artificial Sequence
  Description of Artificial Sequence: Synthetic oligonucleotide
  Target: ATXN2; (+) strand; PAM type: YTN; PAM sequence: CTG
caacctctgcctcctgggtt

SEQ ID NO: 92317 - DNA, 20 bp, Artificial Sequence
  Description of Artificial Sequence: Synthetic oligonucleotide
  Target: ATXN2; (+) strand; PAM type: YTN; PAM sequence: CTC
tgcctcctgggttcaagcaa

SEQ ID NO: 92318 - DNA, 20 bp, Artificial Sequence
  Description of Artificial Sequence: Synthetic oligonucleotide
  Target: ATXN2; (+) strand; PAM type: YTN; PAM sequence: CTG
cctcctgggttcaagcaatt

SEQ ID NO: 92319 - DNA, 20 bp, Artificial Sequence
  Description of Artificial Sequence: Synthetic oligonucleotide
  Target: ATXN2; (+) strand; PAM type: YTN; PAM sequence: CTC
ctgggttcaagcaattctcc

SEQ ID NO: 92320 - DNA, 20 bp, Artificial Sequence
  Description of Artificial Sequence: Synthetic oligonucleotide
  Target: ATXN2; (+) strand; PAM type: YTN; PAM sequence: CTG
ggttcaagcaattctcctgc

SEQ ID NO: 92321 - DNA, 20 bp, Artificial Sequence
  Description of Artificial Sequence: Synthetic oligonucleotide
  Target: ATXN2; (+) strand; PAM type: YTN; PAM sequence: TTC
aagcaattctcctgcctcag

SEQ ID NO: 92322 - DNA, 20 bp, Artificial Sequence
  Description of Artificial Sequence: Synthetic oligonucleotide
  Target: ATXN2; (+) strand; PAM type: YTN; PAM sequence: TTC
tcctgcctcagcctcctgag

SEQ ID NO: 92323 - DNA, 20 bp, Artificial Sequence
  Description of Artificial Sequence: Synthetic oligonucleotide
  Target: ATXN2; (+) strand; PAM type: YTN; PAM sequence: CTC
ctgcctcagcctcctgagta

SEQ ID NO: 92324 - DNA, 20 bp, Artificial Sequence
  Description of Artificial Sequence: Synthetic oligonucleotide
  Target: ATXN2; (+) strand; PAM type: YTN; PAM sequence: CTG
cctcagcctcctgagtatct

SEQ ID NO: 92325 - DNA, 20 bp, Artificial Sequence
  Description of Artificial Sequence: Synthetic oligonucleotide
  Target: ATXN2; (+) strand; PAM type: YTN; PAM sequence: CTC
agcctcctgagtatctgaga

SEQ ID NO: 92326 - DNA, 20 bp, Artificial Sequence
  Description of Artificial Sequence: Synthetic oligonucleotide
  Target: ATXN2; (+) strand; PAM type: YTN; PAM sequence: CTC
ctgagtatctgagattacag

SEQ ID NO: 92327 - DNA, 20 bp, Artificial Sequence
  Description of Artificial Sequence: Synthetic oligonucleotide
  Target: ATXN2; (+) strand; PAM type: YTN; PAM sequence: CTG
agtatctgagattacaggca

SEQ ID NO: 92328 - DNA, 20 bp, Artificial Sequence
  Description of Artificial Sequence: Synthetic oligonucleotide
  Target: ATXN2; (+) strand; PAM type: YTN; PAM sequence: CTG
agattacaggcacgtgcctc

SEQ ID NO: 92329 - DNA, 20 bp, Artificial Sequence
  Description of Artificial Sequence: Synthetic oligonucleotide
  Target: ATXN2; (+) strand; PAM type: YTN; PAM sequence: TTA
caggcacgtgcctccacgcc

SEQ ID NO: 92330 - DNA, 20 bp, Artificial Sequence
  Description of Artificial Sequence: Synthetic oligonucleotide
  Target: ATXN2; (+) strand; PAM type: YTN; PAM sequence: CTC
cacgcctggctaagttttgt

SEQ ID NO: 92331 - DNA, 20 bp, Artificial Sequence
  Description of Artificial Sequence: Synthetic oligonucleotide
  Target: ATXN2; (+) strand; PAM type: YTN; PAM sequence: CTG
gctaagttttgtatttttag

SEQ ID NO: 92332 - DNA, 20 bp, Artificial Sequence
  Description of Artificial Sequence: Synthetic oligonucleotide
  Target: ATXN2; (+) strand; PAM type: YTN; PAM sequence: CTA
agttttgtatttttagtaga

SEQ ID NO: 92333 - DNA, 20 bp, Artificial Sequence
  Description of Artificial Sequence: Synthetic oligonucleotide
  Target: ATXN2; (+) strand; PAM type: YTN; PAM sequence: TTT
tgtatttttagtagagatgg

SEQ ID NO: 92334 - DNA, 20 bp, Artificial Sequence
  Description of Artificial Sequence: Synthetic oligonucleotide
  Target: ATXN2; (+) strand; PAM type: YTN; PAM sequence: TTT
gtatttttagtagagatggg

SEQ ID NO: 92335 - DNA, 20 bp, Artificial Sequence
  Description of Artificial Sequence: Synthetic oligonucleotide
  Target: ATXN2; (+) strand; PAM type: YTN; PAM sequence: TTG
tatttttagtagagatgggg

SEQ ID NO: 92336 - DNA, 20 bp, Artificial Sequence
  Description of Artificial Sequence: Synthetic oligonucleotide
  Target: ATXN2; (+) strand; PAM type: YTN; PAM sequence: TTT
ttagtagagatggggtttca

SEQ ID NO: 92337 - DNA, 20 bp, Artificial Sequence
  Description of Artificial Sequence: Synthetic oligonucleotide
  Target: ATXN2; (+) strand; PAM type: YTN; PAM sequence: TTT
tagtagagatggggtttcac

SEQ ID NO: 92338 - DNA, 20 bp, Artificial Sequence
  Description of Artificial Sequence: Synthetic oligonucleotide
  Target: ATXN2; (+) strand; PAM type: YTN; PAM sequence: TTT
agtagagatggggtttcacc

SEQ ID NO: 92339 - DNA, 20 bp, Artificial Sequence
  Description of Artificial Sequence: Synthetic oligonucleotide
  Target: ATXN2; (+) strand; PAM type: YTN; PAM sequence: TTA
gtagagatggggtttcacca

SEQ ID NO: 92340 - DNA, 20 bp, Artificial Sequence
  Description of Artificial Sequence: Synthetic oligonucleotide
  Target: ATXN2; (+) strand; PAM type: YTN; PAM sequence: TTT
caccatgttagccaggctgg

SEQ ID NO: 92341 - DNA, 20 bp, Artificial Sequence
  Description of Artificial Sequence: Synthetic oligonucleotide
  Target: ATXN2; (+) strand; PAM type: YTN; PAM sequence: TTC
accatgttagccaggctggt

SEQ ID NO: 92342 - DNA, 20 bp, Artificial Sequence
  Description of Artificial Sequence: Synthetic oligonucleotide
  Target: ATXN2; (+) strand; PAM type: YTN; PAM sequence: TTA
gccaggctggtctcaatctc

SEQ ID NO: 92343 - DNA, 20 bp, Artificial Sequence
  Description of Artificial Sequence: Synthetic oligonucleotide
  Target: ATXN2; (+) strand; PAM type: YTN; PAM sequence: CTG
gtctcaatctcctgacctct

SEQ ID NO: 92344 - DNA, 20 bp, Artificial Sequence
  Description of Artificial Sequence: Synthetic oligonucleotide
  Target: ATXN2; (+) strand; PAM type: YTN; PAM sequence: CTC
aatctcctgacctcttgatc

SEQ ID NO: 92345 - DNA, 20 bp, Artificial Sequence
  Description of Artificial Sequence: Synthetic oligonucleotide
  Target: ATXN2; (+) strand; PAM type: YTN; PAM sequence: CTC
ctgacctcttgatccaccca

SEQ ID NO: 92346 - DNA, 20 bp, Artificial Sequence
  Description of Artificial Sequence: Synthetic oligonucleotide
  Target: ATXN2; (+) strand; PAM type: YTN; PAM sequence: CTG
acctcttgatccacccacct

SEQ ID NO: 92347 - DNA, 20 bp, Artificial Sequence
  Description of Artificial Sequence: Synthetic oligonucleotide
  Target: ATXN2; (+) strand; PAM type: YTN; PAM sequence: CTC
ttgatccacccacctcggcc

SEQ ID NO: 92348 - DNA, 20 bp, Artificial Sequence
  Description of Artificial Sequence: Synthetic oligonucleotide
  Target: ATXN2; (+) strand; PAM type: YTN; PAM sequence: CTT
gatccacccacctcggcctc

SEQ ID NO: 92349 - DNA, 20 bp, Artificial Sequence
  Description of Artificial Sequence: Synthetic oligonucleotide
  Target: ATXN2; (+) strand; PAM type: YTN; PAM sequence: TTG
atccacccacctcggcctcc

SEQ ID NO: 92350 - DNA, 20 bp, Artificial Sequence
  Description of Artificial Sequence: Synthetic oligonucleotide
  Target: ATXN2; (+) strand; PAM type: YTN; PAM sequence: CTC
ggcctcccaaagtgctggga

SEQ ID NO: 92351 - DNA, 20 bp, Artificial Sequence
  Description of Artificial Sequence: Synthetic oligonucleotide
  Target: ATXN2; (+) strand; PAM type: YTN; PAM sequence: CTC
ccaaagtgctgggattacag

SEQ ID NO: 92352 - DNA, 20 bp, Artificial Sequence
  Description of Artificial Sequence: Synthetic oligonucleotide
  Target: ATXN2; (+) strand; PAM type: YTN; PAM sequence: CTG
ggattacaggtgtgaaccac

SEQ ID NO: 92353 - DNA, 20 bp, Artificial Sequence
  Description of Artificial Sequence: Synthetic oligonucleotide
  Target: ATXN2; (+) strand; PAM type: YTN; PAM sequence: TTA
caggtgtgaaccactgcacc

SEQ ID NO: 92354 - DNA, 20 bp, Artificial Sequence
  Description of Artificial Sequence: Synthetic oligonucleotide
  Target: ATXN2; (+) strand; PAM type: YTN; PAM sequence: CTG
cacccagctgtcatggtgat

SEQ ID NO: 92355 - DNA, 20 bp, Artificial Sequence
  Description of Artificial Sequence: Synthetic oligonucleotide
  Target: ATXN2; (+) strand; PAM type: YTN; PAM sequence: CTG
tcatggtgatcttaaatcaa

SEQ ID NO: 92356 - DNA, 20 bp, Artificial Sequence
  Description of Artificial Sequence: Synthetic oligonucleotide
  Target: ATXN2; (+) strand; PAM type: YTN; PAM sequence: CTT
aaatcaaaaacacctacaac

SEQ ID NO: 92357 - DNA, 20 bp, Artificial Sequence
  Description of Artificial Sequence: Synthetic oligonucleotide
  Target: ATXN2; (+) strand; PAM type: YTN; PAM sequence: TTA
aatcaaaaacacctacaaca

SEQ ID NO: 92358 - DNA, 20 bp, Artificial Sequence
  Description of Artificial Sequence: Synthetic oligonucleotide
  Target: ATXN2; (+) strand; PAM type: YTN; PAM sequence: CTA
caacagatacacaaaaaata

SEQ ID NO: 92359 - DNA, 20 bp, Artificial Sequence
  Description of Artificial Sequence: Synthetic oligonucleotide
  Target: ATXN2; (+) strand; PAM type: YTN; PAM sequence: TTA
aaacataccaccagagaaaa

SEQ ID NO: 92360 - DNA, 20 bp, Artificial Sequence
  Description of Artificial Sequence: Synthetic oligonucleotide
  Target: ATXN2; (+) strand; PAM type: YTN; PAM sequence: CTT
tcaaaacaaggaagggaggg

SEQ ID NO: 92361 - DNA, 20 bp, Artificial Sequence
  Description of Artificial Sequence: Synthetic oligonucleotide
  Target: ATXN2; (+) strand; PAM type: YTN; PAM sequence: TTT
caaaacaaggaagggaggga

SEQ ID NO: 92362 - DNA, 20 bp, Artificial Sequence
  Description of Artificial Sequence: Synthetic oligonucleotide
  Target: ATXN2; (+) strand; PAM type: YTN; PAM sequence: TTC
aaaacaaggaagggagggag

SEQ ID NO: 92363 - DNA, 20 bp, Artificial Sequence
  Description of Artificial Sequence: Synthetic oligonucleotide
  Target: ATXN2; (+) strand; PAM type: YTN; PAM sequence: CTA
caaaacaaccagataataag

SEQ ID NO: 92364 - DNA, 20 bp, Artificial Sequence
  Description of Artificial Sequence: Synthetic oligonucleotide
  Target: ATXN2; (+) strand; PAM type: YTN; PAM sequence: TTA
agtcctcactaatcagtaac

SEQ ID NO: 92365 - DNA, 20 bp, Artificial Sequence
  Description of Artificial Sequence: Synthetic oligonucleotide
  Target: ATXN2; (+) strand; PAM type: YTN; PAM sequence: CTC
actaatcagtaacaacactg

SEQ ID NO: 92366 - DNA, 20 bp, Artificial Sequence
  Description of Artificial Sequence: Synthetic oligonucleotide
  Target: ATXN2; (+) strand; PAM type: YTN; PAM sequence: CTA
atcagtaacaacactgaatg

SEQ ID NO: 92367 - DNA, 20 bp, Artificial Sequence
  Description of Artificial Sequence: Synthetic oligonucleotide
  Target: ATXN2; (+) strand; PAM type: YTN; PAM sequence: CTG
aatgtaaatcgactaaactc

SEQ ID NO: 92368 - DNA, 20 bp, Artificial Sequence
  Description of Artificial Sequence: Synthetic oligonucleotide
  Target: ATXN2; (+) strand; PAM type: YTN; PAM sequence: CTA
aactctccaatcaaaagata

SEQ ID NO: 92369 - DNA, 20 bp, Artificial Sequence
  Description of Artificial Sequence: Synthetic oligonucleotide
  Target: ATXN2; (+) strand; PAM type: YTN; PAM sequence: CTC
tccaatcaaaagatacagag

SEQ ID NO: 92370 - DNA, 20 bp, Artificial Sequence
  Description of Artificial Sequence: Synthetic oligonucleotide
  Target: ATXN2; (+) strand; PAM type: YTN; PAM sequence: CTC
caatcaaaagatacagagtg

SEQ ID NO: 92371 - DNA, 20 bp, Artificial Sequence
  Description of Artificial Sequence: Synthetic oligonucleotide
  Target: ATXN2; (+) strand; PAM type: YTN; PAM sequence: CTA
aatggatttaaaaaaaaggc

SEQ ID NO: 92372 - DNA, 20 bp, Artificial Sequence
  Description of Artificial Sequence: Synthetic oligonucleotide
  Target: ATXN2; (+) strand; PAM type: YTN; PAM sequence: TTT
aaaaaaaaggctgggtgcgg

SEQ ID NO: 92373 - DNA, 20 bp, Artificial Sequence
  Description of Artificial Sequence: Synthetic oligonucleotide
  Target: ATXN2; (+) strand; PAM type: YTN; PAM sequence: TTA
aaaaaaaggctgggtgcggt

SEQ ID NO: 92374 - DNA, 20 bp, Artificial Sequence
  Description of Artificial Sequence: Synthetic oligonucleotide
  Target: ATXN2; (+) strand; PAM type: YTN; PAM sequence: CTG
ggtgcggtggctcacgcctg

SEQ ID NO: 92375 - DNA, 20 bp, Artificial Sequence
  Description of Artificial Sequence: Synthetic oligonucleotide
  Target: ATXN2; (+) strand; PAM type: YTN; PAM sequence: CTC
acgcctgtaatcccaggact

SEQ ID NO: 92376 - DNA, 20 bp, Artificial Sequence
  Description of Artificial Sequence: Synthetic oligonucleotide
  Target: ATXN2; (+) strand; PAM type: YTN; PAM sequence: CTG
taatcccaggactttgggag

SEQ ID NO: 92377 - DNA, 20 bp, Artificial Sequence
  Description of Artificial Sequence: Synthetic oligonucleotide
  Target: ATXN2; (+) strand; PAM type: YTN; PAM sequence: CTT
tgggaggccaaggcaggcaa

SEQ ID NO: 92378 - DNA, 20 bp, Artificial Sequence
  Description of Artificial Sequence: Synthetic oligonucleotide
  Target: ATXN2; (+) strand; PAM type: YTN; PAM sequence: TTT
gggaggccaaggcaggcaaa

SEQ ID NO: 92379 - DNA, 20 bp, Artificial Sequence
  Description of Artificial Sequence: Synthetic oligonucleotide
  Target: ATXN2; (+) strand; PAM type: YTN; PAM sequence: TTG
ggaggccaaggcaggcaaat

SEQ ID NO: 92380 - DNA, 20 bp, Artificial Sequence
  Description of Artificial Sequence: Synthetic oligonucleotide
  Target: ATXN2; (+) strand; PAM type: YTN; PAM sequence: CTG
aggttaggagttcaagaaca

SEQ ID NO: 92381 - DNA, 20 bp, Artificial Sequence
  Description of Artificial Sequence: Synthetic oligonucleotide
  Target: ATXN2; (+) strand; PAM type: YTN; PAM sequence: TTA
ggagttcaagaacagcctga

SEQ ID NO: 92382 - DNA, 20 bp, Artificial Sequence
  Description of Artificial Sequence: Synthetic oligonucleotide
  Target: ATXN2; (+) strand; PAM type: YTN; PAM sequence: TTC
aagaacagcctgacgaacat

SEQ ID NO: 92383 - DNA, 20 bp, Artificial Sequence
  Description of Artificial Sequence: Synthetic oligonucleotide
  Target: ATXN2; (+) strand; PAM type: YTN; PAM sequence: CTG
acgaacatactgaaacccca

SEQ ID NO: 92384 - DNA, 20 bp, Artificial Sequence
  Description of Artificial Sequence: Synthetic oligonucleotide
  Target: ATXN2; (+) strand; PAM type: YTN; PAM sequence: CTG
aaaccccatctctactgaaa

SEQ ID NO: 92385 - DNA, 20 bp, Artificial Sequence
  Description of Artificial Sequence: Synthetic oligonucleotide
  Target: ATXN2; (+) strand; PAM type: YTN; PAM sequence: CTC
tactgaaaatacaaaaaatt

SEQ ID NO: 92386 - DNA, 20 bp, Artificial Sequence
  Description of Artificial Sequence: Synthetic oligonucleotide
  Target: ATXN2; (+) strand; PAM type: YTN; PAM sequence: CTA
ctgaaaatacaaaaaattta

SEQ ID NO: 92387 - DNA, 20 bp, Artificial Sequence
  Description of Artificial Sequence: Synthetic oligonucleotide
  Target: ATXN2; (+) strand; PAM type: YTN; PAM sequence: CTG
aaaatacaaaaaatttagct

SEQ ID NO: 92388 - DNA, 20 bp, Artificial Sequence
  Description of Artificial Sequence: Synthetic oligonucleotide
  Target: ATXN2; (+) strand; PAM type: YTN; PAM sequence: TTT
agctgggcttggtggcaggc

SEQ ID NO: 92389 - DNA, 20 bp, Artificial Sequence
  Description of Artificial Sequence: Synthetic oligonucleotide
  Target: ATXN2; (+) strand; PAM type: YTN; PAM sequence: TTA
gctgggcttggtggcaggcg

SEQ ID NO: 92390 - DNA, 20 bp, Artificial Sequence
  Description of Artificial Sequence: Synthetic oligonucleotide
  Target: ATXN2; (+) strand; PAM type: YTN; PAM sequence: CTG
ggcttggtggcaggcgcctg

SEQ ID NO: 92391 - DNA, 20 bp, Artificial Sequence
  Description of Artificial Sequence: Synthetic oligonucleotide
  Target: ATXN2; (+) strand; PAM type: YTN; PAM sequence: CTT
ggtggcaggcgcctgtaatc

SEQ ID NO: 92392 - DNA, 20 bp, Artificial Sequence
  Description of Artificial Sequence: Synthetic oligonucleotide
  Target: ATXN2; (+) strand; PAM type: YTN; PAM sequence: TTG
gtggcaggcgcctgtaatcc

SEQ ID NO: 92393 - DNA, 20 bp, Artificial Sequence
  Description of Artificial Sequence: Synthetic oligonucleotide
  Target: ATXN2; (+) strand; PAM type: YTN; PAM sequence: CTG
taatcccagctacttgggag

SEQ ID NO: 92394 - DNA, 20 bp, Artificial Sequence
  Description of Artificial Sequence: Synthetic oligonucleotide
  Target: ATXN2; (+) strand; PAM type: YTN; PAM sequence: CTA
cttgggaggctgaggcagga

SEQ ID NO: 92395 - DNA, 20 bp, Artificial Sequence
  Description of Artificial Sequence: Synthetic oligonucleotide
  Target: ATXN2; (+) strand; PAM type: YTN; PAM sequence: CTT
gggaggctgaggcaggagaa

SEQ ID NO: 92396 - DNA, 20 bp, Artificial Sequence
  Description of Artificial Sequence: Synthetic oligonucleotide
  Target: ATXN2; (+) strand; PAM type: YTN; PAM sequence: TTG
ggaggctgaggcaggagaat

SEQ ID NO: 92397 - DNA, 20 bp, Artificial Sequence
  Description of Artificial Sequence: Synthetic oligonucleotide
  Target: ATXN2; (+) strand; PAM type: YTN; PAM sequence: CTG
aggcaggagaatcgcttgaa

SEQ ID NO: 92398 - DNA, 20 bp, Artificial Sequence
  Description of Artificial Sequence: Synthetic oligonucleotide
  Target: ATXN2; (+) strand; PAM type: YTN; PAM sequence: CTT
gaactcaggaggcggaggtt

SEQ ID NO: 92399 - DNA, 20 bp, Artificial Sequence
  Description of Artificial Sequence: Synthetic oligonucleotide
  Target: ATXN2; (+) strand; PAM type: YTN; PAM sequence: TTG
aactcaggaggcggaggttg

SEQ ID NO: 92400 - DNA, 20 bp, Artificial Sequence
  Description of Artificial Sequence: Synthetic oligonucleotide
  Target: ATXN2; (+) strand; PAM type: YTN; PAM sequence: CTC
aggaggcggaggttgcagtg

SEQ ID NO: 92401 - DNA, 20 bp, Artificial Sequence
  Description of Artificial Sequence: Synthetic oligonucleotide
  Target: ATXN2; (+) strand; PAM type: YTN; PAM sequence: TTG
cagtgagctgagatagcgcc

SEQ ID NO: 92402 - DNA, 20 bp, Artificial Sequence
  Description of Artificial Sequence: Synthetic oligonucleotide
  Target: ATXN2; (+) strand; PAM type: YTN; PAM sequence: CTG
agatagcgccattgccctcc

SEQ ID NO: 92403 - DNA, 20 bp, Artificial Sequence
  Description of Artificial Sequence: Synthetic oligonucleotide
  Target: ATXN2; (+) strand; PAM type: YTN; PAM sequence: TTG
ccctccagcctgggcaacaa

SEQ ID NO: 92404 - DNA, 20 bp, Artificial Sequence
  Description of Artificial Sequence: Synthetic oligonucleotide
  Target: ATXN2; (+) strand; PAM type: YTN; PAM sequence: CTC
cagcctgggcaacaatagca

SEQ ID NO: 92405 - DNA, 20 bp, Artificial Sequence
  Description of Artificial Sequence: Synthetic oligonucleotide
  Target: ATXN2; (+) strand; PAM type: YTN; PAM sequence: CTG
ggcaacaatagcaaaactct

SEQ ID NO: 92406 - DNA, 20 bp, Artificial Sequence
  Description of Artificial Sequence: Synthetic oligonucleotide
  Target: ATXN2; (+) strand; PAM type: YTN; PAM sequence: CTC
tgtctcaaaaaaaaaaaaaa

SEQ ID NO: 92407 - DNA, 20 bp, Artificial Sequence
  Description of Artificial Sequence: Synthetic oligonucleotide
  Target: ATXN2; (+) strand; PAM type: YTN; PAM sequence: CTG
tctcaaaaaaaaaaaaaaaa

SEQ ID NO: 92408 - DNA, 20 bp, Artificial Sequence
  Description of Artificial Sequence: Synthetic oligonucleotide
  Target: ATXN2; (+) strand; PAM type: YTN; PAM sequence: CTC
aaaaaaaaaaaaaaaaaaac

SEQ ID NO: 92409 - DNA, 20 bp, Artificial Sequence
  Description of Artificial Sequence: Synthetic oligonucleotide
  Target: ATXN2; (+) strand; PAM type: YTN; PAM sequence: TTG
cctacaagaaacacacttta

SEQ ID NO: 92410 - DNA, 20 bp, Artificial Sequence
  Description of Artificial Sequence: Synthetic oligonucleotide
  Target: ATXN2; (+) strand; PAM type: YTN; PAM sequence: CTA
caagaaacacactttaccta

SEQ ID NO: 92411 - DNA, 20 bp, Artificial Sequence
  Description of Artificial Sequence: Synthetic oligonucleotide
  Target: ATXN2; (+) strand; PAM type: YTN; PAM sequence: CTT
tacctataaaatcacacata

SEQ ID NO: 92412 - DNA, 20 bp, Artificial Sequence
  Description of Artificial Sequence: Synthetic oligonucleotide
  Target: ATXN2; (+) strand; PAM type: YTN; PAM sequence: TTT
acctataaaatcacacatag

SEQ ID NO: 92413 - DNA, 20 bp, Artificial Sequence
  Description of Artificial Sequence: Synthetic oligonucleotide
  Target: ATXN2; (+) strand; PAM type: YTN; PAM sequence: TTA
cctataaaatcacacataga

SEQ ID NO: 92414 - DNA, 20 bp, Artificial Sequence
  Description of Artificial Sequence: Synthetic oligonucleotide
  Target: ATXN2; (+) strand; PAM type: YTN; PAM sequence: CTA
taaaatcacacatagactaa

SEQ ID NO: 92415 - DNA, 20 bp, Artificial Sequence
  Description of Artificial Sequence: Synthetic oligonucleotide
  Target: ATXN2; (+) strand; PAM type: YTN; PAM sequence: CTA
aaattgaagagctggaaaac

SEQ ID NO: 92416 - DNA, 20 bp, Artificial Sequence
  Description of Artificial Sequence: Synthetic oligonucleotide
  Target: ATXN2; (+) strand; PAM type: YTN; PAM sequence: TTG
aagagctggaaaacaatatt

SEQ ID NO: 92417 - DNA, 20 bp, Artificial Sequence
  Description of Artificial Sequence: Synthetic oligonucleotide
  Target: ATXN2; (+) strand; PAM type: YTN; PAM sequence: CTG
gaaaacaatattccatgcaa

SEQ ID NO: 92418 - DNA, 20 bp, Artificial Sequence
  Description of Artificial Sequence: Synthetic oligonucleotide
  Target: ATXN2; (+) strand; PAM type: YTN; PAM sequence: TTC
catgcaaatggaaaccagaa

SEQ ID NO: 92419 - DNA, 20 bp, Artificial Sequence
  Description of Artificial Sequence: Synthetic oligonucleotide
  Target: ATXN2; (+) strand; PAM type: YTN; PAM sequence: CTA
tgcttagataaaatagattt

SEQ ID NO: 92420 - DNA, 20 bp, Artificial Sequence
  Description of Artificial Sequence: Synthetic oligonucleotide
  Target: ATXN2; (+) strand; PAM type: YTN; PAM sequence: CTT
agataaaatagattttgaga

SEQ ID NO: 92421 - DNA, 20 bp, Artificial Sequence
  Description of Artificial Sequence: Synthetic oligonucleotide
  Target: ATXN2; (+) strand; PAM type: YTN; PAM sequence: TTA
gataaaatagattttgagac

SEQ ID NO: 92422 - DNA, 20 bp, Artificial Sequence
  Description of Artificial Sequence: Synthetic oligonucleotide
  Target: ATXN2; (+) strand; PAM type: YTN; PAM sequence: TTT
tgagacaaagtctataaaaa

SEQ ID NO: 92423 - DNA, 20 bp, Artificial Sequence
  Description of Artificial Sequence: Synthetic oligonucleotide
  Target: ATXN2; (+) strand; PAM type: YTN; PAM sequence: TTT
gagacaaagtctataaaaac

SEQ ID NO: 92424 - DNA, 20 bp, Artificial Sequence
  Description of Artificial Sequence: Synthetic oligonucleotide
  Target: ATXN2; (+) strand; PAM type: YTN; PAM sequence: TTG
agacaaagtctataaaaaca

SEQ ID NO: 92425 - DNA, 20 bp, Artificial Sequence
  Description of Artificial Sequence: Synthetic oligonucleotide
  Target: ATXN2; (+) strand; PAM type: YTN; PAM sequence: CTA
taaaaacagacaaagaagat

SEQ ID NO: 92426 - DNA, 20 bp, Artificial Sequence
  Description of Artificial Sequence: Synthetic oligonucleotide
  Target: ATXN2; (+) strand; PAM type: YTN; PAM sequence: TTA
ttgtataatgataaagggat

SEQ ID NO: 92427 - DNA, 20 bp, Artificial Sequence
  Description of Artificial Sequence: Synthetic oligonucleotide
  Target: ATXN2; (+) strand; PAM type: YTN; PAM sequence: TTG
tataatgataaagggatcaa

SEQ ID NO: 92428 - DNA, 20 bp, Artificial Sequence
  Description of Artificial Sequence: Synthetic oligonucleotide
  Target: ATXN2; (+) strand; PAM type: YTN; PAM sequence: TTC
ggcaagaggttataacaagt

SEQ ID NO: 92429 - DNA, 20 bp, Artificial Sequence
  Description of Artificial Sequence: Synthetic oligonucleotide
  Target: ATXN2; (+) strand; PAM type: YTN; PAM sequence: TTA
taacaagtataaatacatat

SEQ ID NO: 92430 - DNA, 20 bp, Artificial Sequence
  Description of Artificial Sequence: Synthetic oligonucleotide
  Target: ATXN2; (+) strand; PAM type: YTN; PAM sequence: CTG
gagcatccagatatataaag

SEQ ID NO: 92431 - DNA, 20 bp, Artificial Sequence
  Description of Artificial Sequence: Synthetic oligonucleotide
  Target: ATXN2; (+) strand; PAM type: YTN; PAM sequence: TTA
ttagagcaaaaaagagaaac

SEQ ID NO: 92432 - DNA, 20 bp, Artificial Sequence
  Description of Artificial Sequence: Synthetic oligonucleotide
  Target: ATXN2; (+) strand; PAM type: YTN; PAM sequence: TTA
gagcaaaaaagagaaacaga

SEQ ID NO: 92433 - DNA, 20 bp, Artificial Sequence
  Description of Artificial Sequence: Synthetic oligonucleotide
  Target: ATXN2; (+) strand; PAM type: YTN; PAM sequence: CTC
agtaacagtcggaaacttca

SEQ ID NO: 92434 - DNA, 20 bp, Artificial Sequence
  Description of Artificial Sequence: Synthetic oligonucleotide
  Target: ATXN2; (+) strand; PAM type: YTN; PAM sequence: CTT
caacaccccactctcagcaa

SEQ ID NO: 92435 - DNA, 20 bp, Artificial Sequence
  Description of Artificial Sequence: Synthetic oligonucleotide
  Target: ATXN2; (+) strand; PAM type: YTN; PAM sequence: TTC
aacaccccactctcagcaat

SEQ ID NO: 92436 - DNA, 20 bp, Artificial Sequence
  Description of Artificial Sequence: Synthetic oligonucleotide
  Target: ATXN2; (+) strand; PAM type: YTN; PAM sequence: CTC
tcagcaatggacagatcatt

SEQ ID NO: 92437 - DNA, 20 bp, Artificial Sequence
  Description of Artificial Sequence: Synthetic oligonucleotide
  Target: ATXN2; (+) strand; PAM type: YTN; PAM sequence: CTC
agcaatggacagatcattca

SEQ ID NO: 92438 - DNA, 20 bp, Artificial Sequence
  Description of Artificial Sequence: Synthetic oligonucleotide
  Target: ATXN2; (+) strand; PAM type: YTN; PAM sequence: TTC
agacagaaaatcaacaaaga

SEQ ID NO: 92439 - DNA, 20 bp, Artificial Sequence
  Description of Artificial Sequence: Synthetic oligonucleotide
  Target: ATXN2; (+) strand; PAM type: YTN; PAM sequence: TTA
gacctaatttgctctataga

SEQ ID NO: 92440 - DNA, 20 bp, Artificial Sequence
  Description of Artificial Sequence: Synthetic oligonucleotide
  Target: ATXN2; (+) strand; PAM type: YTN; PAM sequence: CTA
atttgctctatagaccaaat

SEQ ID NO: 92441 - DNA, 20 bp, Artificial Sequence
  Description of Artificial Sequence: Synthetic oligonucleotide
  Target: ATXN2; (+) strand; PAM type: YTN; PAM sequence: TTT
gctctatagaccaaataggc

SEQ ID NO: 92442 - DNA, 20 bp, Artificial Sequence
  Description of Artificial Sequence: Synthetic oligonucleotide
  Target: ATXN2; (+) strand; PAM type: YTN; PAM sequence: TTG
ctctatagaccaaataggcc

SEQ ID NO: 92443 - DNA, 20 bp, Artificial Sequence
  Description of Artificial Sequence: Synthetic oligonucleotide
  Target: ATXN2; (+) strand; PAM type: YTN; PAM sequence: CTC
tatagaccaaataggcccaa

SEQ ID NO: 92444 - DNA, 20 bp, Artificial Sequence
  Description of Artificial Sequence: Synthetic oligonucleotide
  Target: ATXN2; (+) strand; PAM type: YTN; PAM sequence: CTA
tagaccaaataggcccaata

SEQ ID NO: 92445 - DNA, 20 bp, Artificial Sequence
  Description of Artificial Sequence: Synthetic oligonucleotide
  Target: ATXN2; (+) strand; PAM type: YTN; PAM sequence: TTT
acagaacattgtgtccaaca

SEQ ID NO: 92446 - DNA, 20 bp, Artificial Sequence
  Description of Artificial Sequence: Synthetic oligonucleotide
  Target: ATXN2; (+) strand; PAM type: YTN; PAM sequence: TTA
cagaacattgtgtccaacag

SEQ ID NO: 92447 - DNA, 20 bp, Artificial Sequence
  Description of Artificial Sequence: Synthetic oligonucleotide
  Target: ATXN2; (+) strand; PAM type: YTN; PAM sequence: TTG
tgtccaacagctatagaata

SEQ ID NO: 92448 - DNA, 20 bp, Artificial Sequence
  Description of Artificial Sequence: Synthetic oligonucleotide
  Target: ATXN2; (+) strand; PAM type: YTN; PAM sequence: CTA
tagaatacacattcttctcc

SEQ ID NO: 92449 - DNA, 20 bp, Artificial Sequence
  Description of Artificial Sequence: Synthetic oligonucleotide
  Target: ATXN2; (+) strand; PAM type: YTN; PAM sequence: TTC
ttctcctcaacatatggatt

SEQ ID NO: 92450 - DNA, 20 bp, Artificial Sequence
  Description of Artificial Sequence: Synthetic oligonucleotide
  Target: ATXN2; (+) strand; PAM type: YTN; PAM sequence: CTT
ctcctcaacatatggattgc

SEQ ID NO: 92451 - DNA, 20 bp, Artificial Sequence
  Description of Artificial Sequence: Synthetic oligonucleotide
  Target: ATXN2; (+) strand; PAM type: YTN; PAM sequence: TTC
tcctcaacatatggattgct

SEQ ID NO: 92452 - DNA, 20 bp, Artificial Sequence
  Description of Artificial Sequence: Synthetic oligonucleotide
  Target: ATXN2; (+) strand; PAM type: YTN; PAM sequence: CTC
ctcaacatatggattgctct

SEQ ID NO: 92453 - DNA, 20 bp, Artificial Sequence
  Description of Artificial Sequence: Synthetic oligonucleotide
  Target: ATXN2; (+) strand; PAM type: YTN; PAM sequence: CTC
aacatatggattgctctcaa

SEQ ID NO: 92454 - DNA, 20 bp, Artificial Sequence
  Description of Artificial Sequence: Synthetic oligonucleotide
  Target: ATXN2; (+) strand; PAM type: YTN; PAM sequence: TTG
ctctcaaagatagaccctat

SEQ ID NO: 92455 - DNA, 20 bp, Artificial Sequence
  Description of Artificial Sequence: Synthetic oligonucleotide
  Target: ATXN2; (+) strand; PAM type: YTN; PAM sequence: CTC
tcaaagatagaccctatgtt

SEQ ID NO: 92456 - DNA, 20 bp, Artificial Sequence
  Description of Artificial Sequence: Synthetic oligonucleotide
  Target: ATXN2; (+) strand; PAM type: YTN; PAM sequence: CTC
aaagatagaccctatgttaa

SEQ ID NO: 92457 - DNA, 20 bp, Artificial Sequence
  Description of Artificial Sequence: Synthetic oligonucleotide
  Target: ATXN2; (+) strand; PAM type: YTN; PAM sequence: CTA
tgttaagccacaaaacaagt

SEQ ID NO: 92458 - DNA, 20 bp, Artificial Sequence
  Description of Artificial Sequence: Synthetic oligonucleotide
  Target: ATXN2; (+) strand; PAM type: YTN; PAM sequence: TTA
agccacaaaacaagtctaaa

SEQ ID NO: 92459 - DNA, 20 bp, Artificial Sequence
  Description of Artificial Sequence: Synthetic oligonucleotide
  Target: ATXN2; (+) strand; PAM type: YTN; PAM sequence: CTA
aagatttgacgtggcacagt

SEQ ID NO: 92460 - DNA, 20 bp, Artificial Sequence
  Description of Artificial Sequence: Synthetic oligonucleotide
  Target: ATXN2; (+) strand; PAM type: YTN; PAM sequence: TTT
gacgtggcacagtggctcat

SEQ ID NO: 92461 - DNA, 20 bp, Artificial Sequence
  Description of Artificial Sequence: Synthetic oligonucleotide
  Target: ATXN2; (+) strand; PAM type: YTN; PAM sequence: TTG
acgtggcacagtggctcatg

SEQ ID NO: 92462 - DNA, 20 bp, Artificial Sequence
  Description of Artificial Sequence: Synthetic oligonucleotide
  Target: ATXN2; (+) strand; PAM type: YTN; PAM sequence: CTC
atgtctgtaatcccagcacc

SEQ ID NO: 92463 - DNA, 20 bp, Artificial Sequence
  Description of Artificial Sequence: Synthetic oligonucleotide
  Target: ATXN2; (+) strand; PAM type: YTN; PAM sequence: CTG
taatcccagcaccttgggag

SEQ ID NO: 92464 - DNA, 20 bp, Artificial Sequence
  Description of Artificial Sequence: Synthetic oligonucleotide
  Target: ATXN2; (+) strand; PAM type: YTN; PAM sequence: CTT
gggaggccgaaataggtgga

SEQ ID NO: 92465 - DNA, 20 bp, Artificial Sequence
  Description of Artificial Sequence: Synthetic oligonucleotide
  Target: ATXN2; (+) strand; PAM type: YTN; PAM sequence: TTG
ggaggccgaaataggtggat

SEQ ID NO: 92466 - DNA, 20 bp, Artificial Sequence
  Description of Artificial Sequence: Synthetic oligonucleotide
  Target: ATXN2; (+) strand; PAM type: YTN; PAM sequence: TTG
cttgagctcaggagttcgaa

SEQ ID NO: 92467 - DNA, 20 bp, Artificial Sequence
  Description of Artificial Sequence: Synthetic oligonucleotide
  Target: ATXN2; (+) strand; PAM type: YTN; PAM sequence: CTT
gagctcaggagttcgaaaca

SEQ ID NO: 92468 - DNA, 20 bp, Artificial Sequence
  Description of Artificial Sequence: Synthetic oligonucleotide
  Target: ATXN2; (+) strand; PAM type: YTN; PAM sequence: TTG
agctcaggagttcgaaacaa

SEQ ID NO: 92469 - DNA, 20 bp, Artificial Sequence
  Description of Artificial Sequence: Synthetic oligonucleotide
  Target: ATXN2; (+) strand; PAM type: YTN; PAM sequence: CTC
aggagttcgaaacaaccctg

SEQ ID NO: 92470 - DNA, 20 bp, Artificial Sequence
  Description of Artificial Sequence: Synthetic oligonucleotide
  Target: ATXN2; (+) strand; PAM type: YTN; PAM sequence: TTC
gaaacaaccctgggacacat

SEQ ID NO: 92471 - DNA, 20 bp, Artificial Sequence
  Description of Artificial Sequence: Synthetic oligonucleotide
  Target: ATXN2; (+) strand; PAM type: YTN; PAM sequence: CTG
ggacacatcgcaaagcccca

SEQ ID NO: 92472 - DNA, 20 bp, Artificial Sequence
  Description of Artificial Sequence: Synthetic oligonucleotide
  Target: ATXN2; (+) strand; PAM type: YTN; PAM sequence: CTC
tacaaaaaaaaaaaaaatcc

SEQ ID NO: 92473 - DNA, 20 bp, Artificial Sequence
  Description of Artificial Sequence: Synthetic oligonucleotide
  Target: ATXN2; (+) strand; PAM type: YTN; PAM sequence: CTA
caaaaaaaaaaaaaatccaa

SEQ ID NO: 92474 - DNA, 20 bp, Artificial Sequence
  Description of Artificial Sequence: Synthetic oligonucleotide
  Target: ATXN2; (+) strand; PAM type: YTN; PAM sequence: CTG
tagtcccagctacttggaag

SEQ ID NO: 92475 - DNA, 20 bp, Artificial Sequence
  Description of Artificial Sequence: Synthetic oligonucleotide
  Target: ATXN2; (+) strand; PAM type: YTN; PAM sequence: CTA
cttggaaggctaaggtggga

SEQ ID NO: 92476 - DNA, 20 bp, Artificial Sequence
  Description of Artificial Sequence: Synthetic oligonucleotide
  Target: ATXN2; (+) strand; PAM type: YTN; PAM sequence: CTT
ggaaggctaaggtgggagga

SEQ ID NO: 92477 - DNA, 20 bp, Artificial Sequence
  Description of Artificial Sequence: Synthetic oligonucleotide
  Target: ATXN2; (+) strand; PAM type: YTN; PAM sequence: TTG
gaaggctaaggtgggaggat

SEQ ID NO: 92478 - DNA, 20 bp, Artificial Sequence
  Description of Artificial Sequence: Synthetic oligonucleotide
  Target: ATXN2; (+) strand; PAM type: YTN; PAM sequence: CTA
aggtgggaggattgcttgag

SEQ ID NO: 92479 - DNA, 20 bp, Artificial Sequence
  Description of Artificial Sequence: Synthetic oligonucleotide
  Target: ATXN2; (+) strand; PAM type: YTN; PAM sequence: TTG
cttgagccaggaaggcggag

SEQ ID NO: 92480 - DNA, 20 bp, Artificial Sequence
  Description of Artificial Sequence: Synthetic oligonucleotide
  Target: ATXN2; (+) strand; PAM type: YTN; PAM sequence: CTT
gagccaggaaggcggaggtt

SEQ ID NO: 92481 - DNA, 20 bp, Artificial Sequence
  Description of Artificial Sequence: Synthetic oligonucleotide
  Target: ATXN2; (+) strand; PAM type: YTN; PAM sequence: TTG
agccaggaaggcggaggttg

SEQ ID NO: 92482 - DNA, 20 bp, Artificial Sequence
  Description of Artificial Sequence: Synthetic oligonucleotide
  Target: ATXN2; (+) strand; PAM type: YTN; PAM sequence: TTG
caggtgagccaagatcatga

SEQ ID NO: 92483 - DNA, 20 bp, Artificial Sequence
  Description of Artificial Sequence: Synthetic oligonucleotide
  Target: ATXN2; (+) strand; PAM type: YTN; PAM sequence: CTC
cagcctgggtaacagagtga

SEQ ID NO: 92484 - DNA, 20 bp, Artificial Sequence
  Description of Artificial Sequence: Synthetic oligonucleotide
  Target: ATXN2; (+) strand; PAM type: YTN; PAM sequence: CTG
ggtaacagagtgagactctg

SEQ ID NO: 92485 - DNA, 20 bp, Artificial Sequence
  Description of Artificial Sequence: Synthetic oligonucleotide
  Target: ATXN2; (+) strand; PAM type: YTN; PAM sequence: CTC
tgttacaaacaaacaaacaa

SEQ ID NO: 92486 - DNA, 20 bp, Artificial Sequence
  Description of Artificial Sequence: Synthetic oligonucleotide
  Target: ATXN2; (+) strand; PAM type: YTN; PAM sequence: CTG
ttacaaacaaacaaacaaac

SEQ ID NO: 92487 - DNA, 20 bp, Artificial Sequence
  Description of Artificial Sequence: Synthetic oligonucleotide
  Target: ATXN2; (+) strand; PAM type: YTN; PAM sequence: TTA
caaacaaacaaacaaacaaa

SEQ ID NO: 92488 - DNA, 20 bp, Artificial Sequence
  Description of Artificial Sequence: Synthetic oligonucleotide
  Target: ATXN2; (+) strand; PAM type: YTN; PAM sequence: TTC
aaaaaagttaaaatcatatc

SEQ ID NO: 92489 - DNA, 20 bp, Artificial Sequence
  Description of Artificial Sequence: Synthetic oligonucleotide
  Target: ATXN2; (+) strand; PAM type: YTN; PAM sequence: TTA
aaatcatatcaactatcttc

SEQ ID NO: 92490 - DNA, 20 bp, Artificial Sequence
  Description of Artificial Sequence: Synthetic oligonucleotide
  Target: ATXN2; (+) strand; PAM type: YTN; PAM sequence: CTA
tcttctctgatcacaataag

SEQ ID NO: 92491 - DNA, 20 bp, Artificial Sequence
  Description of Artificial Sequence: Synthetic oligonucleotide
  Target: ATXN2; (+) strand; PAM type: YTN; PAM sequence: CTT
ctctgatcacaataagataa

SEQ ID NO: 92492 - DNA, 20 bp, Artificial Sequence
  Description of Artificial Sequence: Synthetic oligonucleotide
  Target: ATXN2; (+) strand; PAM type: YTN; PAM sequence: TTC
tctgatcacaataagataac

SEQ ID NO: 92493 - DNA, 20 bp, Artificial Sequence
  Description of Artificial Sequence: Synthetic oligonucleotide
  Target: ATXN2; (+) strand; PAM type: YTN; PAM sequence: CTC
tgatcacaataagataacac

SEQ ID NO: 92494 - DNA, 20 bp, Artificial Sequence
  Description of Artificial Sequence: Synthetic oligonucleotide
  Target: ATXN2; (+) strand; PAM type: YTN; PAM sequence: CTG
atcacaataagataacacta

SEQ ID NO: 92495 - DNA, 20 bp, Artificial Sequence
  Description of Artificial Sequence: Synthetic oligonucleotide
  Target: ATXN2; (+) strand; PAM type: YTN; PAM sequence: CTA
gaggccgggcacggtggctc

SEQ ID NO: 92496 - DNA, 20 bp, Artificial Sequence
  Description of Artificial Sequence: Synthetic oligonucleotide
  Target: ATXN2; (+) strand; PAM type: YTN; PAM sequence: CTC
atgcctgtaattccagcact

SEQ ID NO: 92497 - DNA, 20 bp, Artificial Sequence
  Description of Artificial Sequence: Synthetic oligonucleotide
  Target: ATXN2; (+) strand; PAM type: YTN; PAM sequence: CTG
taattccagcactttaggag

SEQ ID NO: 92498 - DNA, 20 bp, Artificial Sequence
  Description of Artificial Sequence: Synthetic oligonucleotide
  Target: ATXN2; (+) strand; PAM type: YTN; PAM sequence: TTC
cagcactttaggaggccaag

SEQ ID NO: 92499 - DNA, 20 bp, Artificial Sequence
  Description of Artificial Sequence: Synthetic oligonucleotide
  Target: ATXN2; (+) strand; PAM type: YTN; PAM sequence: CTT
taggaggccaaggtgggtgg

SEQ ID NO: 92500 - DNA, 20 bp, Artificial Sequence
  Description of Artificial Sequence: Synthetic oligonucleotide
  Target: ATXN2; (+) strand; PAM type: YTN; PAM sequence: TTT
aggaggccaaggtgggtgga

SEQ ID NO: 92501 - DNA, 20 bp, Artificial Sequence
  Description of Artificial Sequence: Synthetic oligonucleotide
  Target: ATXN2; (+) strand; PAM type: YTN; PAM sequence: TTA
ggaggccaaggtgggtggat

SEQ ID NO: 92502 - DNA, 20 bp, Artificial Sequence
  Description of Artificial Sequence: Synthetic oligonucleotide
  Target: ATXN2; (+) strand; PAM type: YTN; PAM sequence: CTG
aggtcaggagttcgagatca

SEQ ID NO: 92503 - DNA, 20 bp, Artificial Sequence
  Description of Artificial Sequence: Synthetic oligonucleotide
  Target: ATXN2; (+) strand; PAM type: YTN; PAM sequence: TTC
gagatcagcttgaccaacat

SEQ ID NO: 92504 - DNA, 20 bp, Artificial Sequence
  Description of Artificial Sequence: Synthetic oligonucleotide
  Target: ATXN2; (+) strand; PAM type: YTN; PAM sequence: CTT
gaccaacatggtgaaacccc

SEQ ID NO: 92505 - DNA, 20 bp, Artificial Sequence
  Description of Artificial Sequence: Synthetic oligonucleotide
  Target: ATXN2; (+) strand; PAM type: YTN; PAM sequence: TTG
accaacatggtgaaaccccc

SEQ ID NO: 92506 - DNA, 20 bp, Artificial Sequence
  Description of Artificial Sequence: Synthetic oligonucleotide
  Target: ATXN2; (+) strand; PAM type: YTN; PAM sequence: CTC
tctactaaaaatacaaaaaa

SEQ ID NO: 92507 - DNA, 20 bp, Artificial Sequence
  Description of Artificial Sequence: Synthetic oligonucleotide
  Target: ATXN2; (+) strand; PAM type: YTN; PAM sequence: CTC
tactaaaaatacaaaaaaaa

SEQ ID NO: 92508 - DNA, 20 bp, Artificial Sequence
  Description of Artificial Sequence: Synthetic oligonucleotide
  Target: ATXN2; (+) strand; PAM type: YTN; PAM sequence: CTA
ctaaaaatacaaaaaaaaat

SEQ ID NO: 92509 - DNA, 20 bp, Artificial Sequence
  Description of Artificial Sequence: Synthetic oligonucleotide
  Target: ATXN2; (+) strand; PAM type: YTN; PAM sequence: CTA
aaaatacaaaaaaaaattag

SEQ ID NO: 92510 - DNA, 20 bp, Artificial Sequence
  Description of Artificial Sequence: Synthetic oligonucleotide
  Target: ATXN2; (+) strand; PAM type: YTN; PAM sequence: TTA
gccaggagtggtggtacatg

SEQ ID NO: 92511 - DNA, 20 bp, Artificial Sequence
  Description of Artificial Sequence: Synthetic oligonucleotide
  Target: ATXN2; (+) strand; PAM type: YTN; PAM sequence: CTG
taatcccagctactcaggag

SEQ ID NO: 92512 - DNA, 20 bp, Artificial Sequence
  Description of Artificial Sequence: Synthetic oligonucleotide
  Target: ATXN2; (+) strand; PAM type: YTN; PAM sequence: CTA
ctcaggaggctgaggcagaa

SEQ ID NO: 92513 - DNA, 20 bp, Artificial Sequence
  Description of Artificial Sequence: Synthetic oligonucleotide
  Target: ATXN2; (+) strand; PAM type: YTN; PAM sequence: CTC
aggaggctgaggcagaagaa

SEQ ID NO: 92514 - DNA, 20 bp, Artificial Sequence
  Description of Artificial Sequence: Synthetic oligonucleotide
  Target: ATXN2; (+) strand; PAM type: YTN; PAM sequence: CTG
aggcagaagaatcacttgaa

SEQ ID NO: 92515 - DNA, 20 bp, Artificial Sequence
  Description of Artificial Sequence: Synthetic oligonucleotide
  Target: ATXN2; (+) strand; PAM type: YTN; PAM sequence: CTT
gaactggggaggcagaggtt

SEQ ID NO: 92516 - DNA, 20 bp, Artificial Sequence
  Description of Artificial Sequence: Synthetic oligonucleotide
  Target: ATXN2; (+) strand; PAM type: YTN; PAM sequence: TTG
aactggggaggcagaggttg

SEQ ID NO: 92517 - DNA, 20 bp, Artificial Sequence
  Description of Artificial Sequence: Synthetic oligonucleotide
  Target: ATXN2; (+) strand; PAM type: YTN; PAM sequence: CTG
gggaggcagaggttgcagta

SEQ ID NO: 92518 - DNA, 20 bp, Artificial Sequence
  Description of Artificial Sequence: Synthetic oligonucleotide
  Target: ATXN2; (+) strand; PAM type: YTN; PAM sequence: TTG
cagtaagccgagatcgcgcc

SEQ ID NO: 92519 - DNA, 20 bp, Artificial Sequence
  Description of Artificial Sequence: Synthetic oligonucleotide
  Target: ATXN2; (+) strand; PAM type: YTN; PAM sequence: CTA
cactccagcatgggtgacag

SEQ ID NO: 92520 - DNA, 20 bp, Artificial Sequence
  Description of Artificial Sequence: Synthetic oligonucleotide
  Target: ATXN2; (+) strand; PAM type: YTN; PAM sequence: CTC
cagcatgggtgacagagcga

SEQ ID NO: 92521 - DNA, 20 bp, Artificial Sequence
  Description of Artificial Sequence: Synthetic oligonucleotide
  Target: ATXN2; (+) strand; PAM type: YTN; PAM sequence: CTC
catctcaaaaaaacaaaaat

SEQ ID NO: 92522 - DNA, 20 bp, Artificial Sequence
  Description of Artificial Sequence: Synthetic oligonucleotide
  Target: ATXN2; (+) strand; PAM type: YTN; PAM sequence: CTC
aaaaaaacaaaaataaaaat

SEQ ID NO: 92523 - DNA, 20 bp, Artificial Sequence
  Description of Artificial Sequence: Synthetic oligonucleotide
  Target: ATXN2; (+) strand; PAM type: YTN; PAM sequence: CTA
gataacaagaggaactttgg

SEQ ID NO: 92524 - DNA, 20 bp, Artificial Sequence
  Description of Artificial Sequence: Synthetic oligonucleotide
  Target: ATXN2; (+) strand; PAM type: YTN; PAM sequence: CTT
tggaaagtatacaaatacat

SEQ ID NO: 92525 - DNA, 20 bp, Artificial Sequence
  Description of Artificial Sequence: Synthetic oligonucleotide
  Target: ATXN2; (+) strand; PAM type: YTN; PAM sequence: TTT
ggaaagtatacaaatacatg

SEQ ID NO: 92526 - DNA, 20 bp, Artificial Sequence
  Description of Artificial Sequence: Synthetic oligonucleotide
  Target: ATXN2; (+) strand; PAM type: YTN; PAM sequence: TTG
gaaagtatacaaatacatga

SEQ ID NO: 92527 - DNA, 20 bp, Artificial Sequence
  Description of Artificial Sequence: Synthetic oligonucleotide
  Target: ATXN2; (+) strand; PAM type: YTN; PAM sequence: TTA
agcaatatgctcctgaatga

SEQ ID NO: 92528 - DNA, 20 bp, Artificial Sequence
  Description of Artificial Sequence: Synthetic oligonucleotide
  Target: ATXN2; (+) strand; PAM type: YTN; PAM sequence: CTC
ctgaatgaccagtgggtcca

SEQ ID NO: 92529 - DNA, 20 bp, Artificial Sequence
  Description of Artificial Sequence: Synthetic oligonucleotide
  Target: ATXN2; (+) strand; PAM type: YTN; PAM sequence: CTG
aatgaccagtgggtccatga

SEQ ID NO: 92530 - DNA, 20 bp, Artificial Sequence
  Description of Artificial Sequence: Synthetic oligonucleotide
  Target: ATXN2; (+) strand; PAM type: YTN; PAM sequence: TTA
agaagaaaactggaaaattc

SEQ ID NO: 92531 - DNA, 20 bp, Artificial Sequence
  Description of Artificial Sequence: Synthetic oligonucleotide
  Target: ATXN2; (+) strand; PAM type: YTN; PAM sequence: CTG
gaaaattccttgaaacaaat

SEQ ID NO: 92532 - DNA, 20 bp, Artificial Sequence
  Description of Artificial Sequence: Synthetic oligonucleotide
  Target: ATXN2; (+) strand; PAM type: YTN; PAM sequence: TTC
cttgaaacaaatgaaaatgg

SEQ ID NO: 92533 - DNA, 20 bp, Artificial Sequence
  Description of Artificial Sequence: Synthetic oligonucleotide
  Target: ATXN2; (+) strand; PAM type: YTN; PAM sequence: CTT
gaaacaaatgaaaatggaaa

SEQ ID NO: 92534 - DNA, 20 bp, Artificial Sequence
  Description of Artificial Sequence: Synthetic oligonucleotide
  Target: ATXN2; (+) strand; PAM type: YTN; PAM sequence: TTG
aaacaaatgaaaatggaaac

SEQ ID NO: 92535 - DNA, 20 bp, Artificial Sequence
  Description of Artificial Sequence: Synthetic oligonucleotide
  Target: ATXN2; (+) strand; PAM type: YTN; PAM sequence: CTT
atcaaaacctataggataca

SEQ ID NO: 92536 - DNA, 20 bp, Artificial Sequence
  Description of Artificial Sequence: Synthetic oligonucleotide
  Target: ATXN2; (+) strand; PAM type: YTN; PAM sequence: TTA
tcaaaacctataggatacag

SEQ ID NO: 92537 - DNA, 20 bp, Artificial Sequence
  Description of Artificial Sequence: Synthetic oligonucleotide
  Target: ATXN2; (+) strand; PAM type: YTN; PAM sequence: CTA
taggatacagtaaaagcaac

SEQ ID NO: 92538 - DNA, 20 bp, Artificial Sequence
  Description of Artificial Sequence: Synthetic oligonucleotide
  Target: ATXN2; (+) strand; PAM type: YTN; PAM sequence: TTT
acagcagtaagtgcctacat

SEQ ID NO: 92539 - DNA, 20 bp, Artificial Sequence
  Description of Artificial Sequence: Synthetic oligonucleotide
  Target: ATXN2; (+) strand; PAM type: YTN; PAM sequence: TTA
cagcagtaagtgcctacatc

SEQ ID NO: 92540 - DNA, 20 bp, Artificial Sequence
  Description of Artificial Sequence: Synthetic oligonucleotide
  Target: ATXN2; (+) strand; PAM type: YTN; PAM sequence: CTA
catcaaaaaagtggaaaaac

SEQ ID NO: 92541 - DNA, 20 bp, Artificial Sequence
  Description of Artificial Sequence: Synthetic oligonucleotide
  Target: ATXN2; (+) strand; PAM type: YTN; PAM sequence: CTT
catctgccaatacatcctaa

SEQ ID NO: 92542 - DNA, 20 bp, Artificial Sequence
  Description of Artificial Sequence: Synthetic oligonucleotide
  Target: ATXN2; (+) strand; PAM type: YTN; PAM sequence: TTC
atctgccaatacatcctaaa

SEQ ID NO: 92543 - DNA, 20 bp, Artificial Sequence
  Description of Artificial Sequence: Synthetic oligonucleotide
  Target: ATXN2; (+) strand; PAM type: YTN; PAM sequence: CTG
ccaatacatcctaaagaact

SEQ ID NO: 92544 - DNA, 20 bp, Artificial Sequence
  Description of Artificial Sequence: Synthetic oligonucleotide
  Target: ATXN2; (+) strand; PAM type: YTN; PAM sequence: CTA
aagaactagaaaagcaagga

SEQ ID NO: 92545 - DNA, 20 bp, Artificial Sequence
  Description of Artificial Sequence: Synthetic oligonucleotide
  Target: ATXN2; (+) strand; PAM type: YTN; PAM sequence: CTA
gaaaagcaaggacaaaacct

SEQ ID NO: 92546 - DNA, 20 bp, Artificial Sequence
  Description of Artificial Sequence: Synthetic oligonucleotide
  Target: ATXN2; (+) strand; PAM type: YTN; PAM sequence: CTA
aaatcagtagaagaaataaa

SEQ ID NO: 92547 - DNA, 20 bp, Artificial Sequence
  Description of Artificial Sequence: Synthetic oligonucleotide
  Target: ATXN2; (+) strand; PAM type: YTN; PAM sequence: TTG
aaatgaagaaaatacaaaag

SEQ ID NO: 92548 - DNA, 20 bp, Artificial Sequence
  Description of Artificial Sequence: Synthetic oligonucleotide
  Target: ATXN2; (+) strand; PAM type: YTN; PAM sequence: TTG
ttttgaagagataaacaaaa

SEQ ID NO: 92549 - DNA, 20 bp, Artificial Sequence
  Description of Artificial Sequence: Synthetic oligonucleotide
  Target: ATXN2; (+) strand; PAM type: YTN; PAM sequence: TTT
tgaagagataaacaaaactg

SEQ ID NO: 92550 - DNA, 20 bp, Artificial Sequence
  Description of Artificial Sequence: Synthetic oligonucleotide
  Target: ATXN2; (+) strand; PAM type: YTN; PAM sequence: TTT
gaagagataaacaaaactga

SEQ ID NO: 92551 - DNA, 20 bp, Artificial Sequence
  Description of Artificial Sequence: Synthetic oligonucleotide
  Target: ATXN2; (+) strand; PAM type: YTN; PAM sequence: TTG
aagagataaacaaaactgac

SEQ ID NO: 92552 - DNA, 20 bp, Artificial Sequence
  Description of Artificial Sequence: Synthetic oligonucleotide
  Target: ATXN2; (+) strand; PAM type: YTN; PAM sequence: CTG
acaaacctttagccagactc

SEQ ID NO: 92553 - DNA, 20 bp, Artificial Sequence
  Description of Artificial Sequence: Synthetic oligonucleotide
  Target: ATXN2; (+) strand; PAM type: YTN; PAM sequence: CTT
tagccagactcagaaaaaaa

SEQ ID NO: 92554 - DNA, 20 bp, Artificial Sequence
  Description of Artificial Sequence: Synthetic oligonucleotide
  Target: ATXN2; (+) strand; PAM type: YTN; PAM sequence: TTT
agccagactcagaaaaaaaa

SEQ ID NO: 92555 - DNA, 20 bp, Artificial Sequence
  Description of Artificial Sequence: Synthetic oligonucleotide
  Target: ATXN2; (+) strand; PAM type: YTN; PAM sequence: TTA
gccagactcagaaaaaaaag

SEQ ID NO: 92556 - DNA, 20 bp, Artificial Sequence
  Description of Artificial Sequence: Synthetic oligonucleotide
  Target: ATXN2; (+) strand; PAM type: YTN; PAM sequence: CTC
agaaaaaaaagagaaaaccc

SEQ ID NO: 92557 - DNA, 20 bp, Artificial Sequence
  Description of Artificial Sequence: Synthetic oligonucleotide
  Target: ATXN2; (+) strand; PAM type: YTN; PAM sequence: TTA
taattgttaccaccgaaatt

SEQ ID NO: 92558 - DNA, 20 bp, Artificial Sequence
  Description of Artificial Sequence: Synthetic oligonucleotide
  Target: ATXN2; (+) strand; PAM type: YTN; PAM sequence: TTG
ttaccaccgaaattcaaagg

SEQ ID NO: 92559 - DNA, 20 bp, Artificial Sequence
  Description of Artificial Sequence: Synthetic oligonucleotide
  Target: ATXN2; (+) strand; PAM type: YTN; PAM sequence: TTA
ccaccgaaattcaaaggatc

SEQ ID NO: 92560 - DNA, 20 bp, Artificial Sequence
  Description of Artificial Sequence: Synthetic oligonucleotide
  Target: ATXN2; (+) strand; PAM type: YTN; PAM sequence: TTC
aaaggatcattagagactac

SEQ ID NO: 92561 - DNA, 20 bp, Artificial Sequence
  Description of Artificial Sequence: Synthetic oligonucleotide
  Target: ATXN2; (+) strand; PAM type: YTN; PAM sequence: TTA
gagactactatgagcatcta

SEQ ID NO: 92562 - DNA, 20 bp, Artificial Sequence
  Description of Artificial Sequence: Synthetic oligonucleotide
  Target: ATXN2; (+) strand; PAM type: YTN; PAM sequence: CTA
ctatgagcatctatatgctg

SEQ ID NO: 92563 - DNA, 20 bp, Artificial Sequence
  Description of Artificial Sequence: Synthetic oligonucleotide
  Target: ATXN2; (+) strand; PAM type: YTN; PAM sequence: CTA
tgagcatctatatgctgata

SEQ ID NO: 92564 - DNA, 20 bp, Artificial Sequence
  Description of Artificial Sequence: Synthetic oligonucleotide
  Target: ATXN2; (+) strand; PAM type: YTN; PAM sequence: CTA
tatgctgatacattggaaaa

SEQ ID NO: 92565 - DNA, 20 bp, Artificial Sequence
  Description of Artificial Sequence: Synthetic oligonucleotide
  Target: ATXN2; (+) strand; PAM type: YTN; PAM sequence: CTG
atacattggaaaaccttgaa

SEQ ID NO: 92566 - DNA, 20 bp, Artificial Sequence
  Description of Artificial Sequence: Synthetic oligonucleotide
  Target: ATXN2; (+) strand; PAM type: YTN; PAM sequence: TTG
gaaaaccttgaagaaatgga

SEQ ID NO: 92567 - DNA, 20 bp, Artificial Sequence
  Description of Artificial Sequence: Synthetic oligonucleotide
  Target: ATXN2; (+) strand; PAM type: YTN; PAM sequence: CTT
gaagaaatggataaattcct

SEQ ID NO: 92568 - DNA, 20 bp, Artificial Sequence
  Description of Artificial Sequence: Synthetic oligonucleotide
  Target: ATXN2; (+) strand; PAM type: YTN; PAM sequence: TTG
aagaaatggataaattccta

SEQ ID NO: 92569 - DNA, 20 bp, Artificial Sequence
  Description of Artificial Sequence: Synthetic oligonucleotide
  Target: ATXN2; (+) strand; PAM type: YTN; PAM sequence: TTC
ctagacacatacaacctacc

SEQ ID NO: 92570 - DNA, 20 bp, Artificial Sequence
  Description of Artificial Sequence: Synthetic oligonucleotide
  Target: ATXN2; (+) strand; PAM type: YTN; PAM sequence: CTA
gacacatacaacctaccaag

SEQ ID NO: 92571 - DNA, 20 bp, Artificial Sequence
  Description of Artificial Sequence: Synthetic oligonucleotide
  Target: ATXN2; (+) strand; PAM type: YTN; PAM sequence: CTA
ccaagactgaaccacaaaga

SEQ ID NO: 92572 - DNA, 20 bp, Artificial Sequence
  Description of Artificial Sequence: Synthetic oligonucleotide
  Target: ATXN2; (+) strand; PAM type: YTN; PAM sequence: CTG
aaccacaaagaaatccaaaa

SEQ ID NO: 92573 - DNA, 20 bp, Artificial Sequence
  Description of Artificial Sequence: Synthetic oligonucleotide
  Target: ATXN2; (+) strand; PAM type: YTN; PAM sequence: CTA
taagaaatagtctcccagca

SEQ ID NO: 92574 - DNA, 20 bp, Artificial Sequence
  Description of Artificial Sequence: Synthetic oligonucleotide
  Target: ATXN2; (+) strand; PAM type: YTN; PAM sequence: CTC
ccagcaaagaaaagccatgg

SEQ ID NO: 92575 - DNA, 20 bp, Artificial Sequence
  Description of Artificial Sequence: Synthetic oligonucleotide
  Target: ATXN2; (+) strand; PAM type: YTN; PAM sequence: CTG
atggcttcactgctgaattc

SEQ ID NO: 92576 - DNA, 20 bp, Artificial Sequence
  Description of Artificial Sequence: Synthetic oligonucleotide
  Target: ATXN2; (+) strand; PAM type: YTN; PAM sequence: CTT
cactgctgaattctactaaa

SEQ ID NO: 92577 - DNA, 20 bp, Artificial Sequence
  Description of Artificial Sequence: Synthetic oligonucleotide
  Target: ATXN2; (+) strand; PAM type: YTN; PAM sequence: TTC
actgctgaattctactaaac

SEQ ID NO: 92578 - DNA, 20 bp, Artificial Sequence
  Description of Artificial Sequence: Synthetic oligonucleotide
  Target: ATXN2; (+) strand; PAM type: YTN; PAM sequence: CTG
ctgaattctactaaaccttt

SEQ ID NO: 92579 - DNA, 20 bp, Artificial Sequence
  Description of Artificial Sequence: Synthetic oligonucleotide
  Target: ATXN2; (+) strand; PAM type: YTN; PAM sequence: CTG
aattctactaaacctttaaa

SEQ ID NO: 92580 - DNA, 20 bp, Artificial Sequence
  Description of Artificial Sequence: Synthetic oligonucleotide
  Target: ATXN2; (+) strand; PAM type: YTN; PAM sequence: TTC
tactaaacctttaaagaaga

SEQ ID NO: 92581 - DNA, 20 bp, Artificial Sequence
  Description of Artificial Sequence: Synthetic oligonucleotide
  Target: ATXN2; (+) strand; PAM type: YTN; PAM sequence: CTA
ctaaacctttaaagaagaac

SEQ ID NO: 92582 - DNA, 20 bp, Artificial Sequence
  Description of Artificial Sequence: Synthetic oligonucleotide
  Target: ATXN2; (+) strand; PAM type: YTN; PAM sequence: CTA
aacctttaaagaagaactaa

SEQ ID NO: 92583 - DNA, 20 bp, Artificial Sequence
  Description of Artificial Sequence: Synthetic oligonucleotide
  Target: ATXN2; (+) strand; PAM type: YTN; PAM sequence: CTT
taaagaagaactaataccaa

SEQ ID NO: 92584 - DNA, 20 bp, Artificial Sequence
  Description of Artificial Sequence: Synthetic oligonucleotide
  Target: ATXN2; (+) strand; PAM type: YTN; PAM sequence: TTT
aaagaagaactaataccaat

SEQ ID NO: 92585 - DNA, 20 bp, Artificial Sequence
  Description of Artificial Sequence: Synthetic oligonucleotide
  Target: ATXN2; (+) strand; PAM type: YTN; PAM sequence: TTA
aagaagaactaataccaatc

SEQ ID NO: 92586 - DNA, 20 bp, Artificial Sequence
  Description of Artificial Sequence: Synthetic oligonucleotide
  Target: ATXN2; (+) strand; PAM type: YTN; PAM sequence: CTA
ataccaatcctactcaaact

SEQ ID NO: 92587 - DNA, 20 bp, Artificial Sequence
  Description of Artificial Sequence: Synthetic oligonucleotide
  Target: ATXN2; (+) strand; PAM type: YTN; PAM sequence: CTA
ctcaaactattccaacacaa

SEQ ID NO: 92588 - DNA, 20 bp, Artificial Sequence
  Description of Artificial Sequence: Synthetic oligonucleotide
  Target: ATXN2; (+) strand; PAM type: YTN; PAM sequence: CTC
aaactattccaacacaatac

SEQ ID NO: 92589 - DNA, 20 bp, Artificial Sequence
  Description of Artificial Sequence: Synthetic oligonucleotide
  Target: ATXN2; (+) strand; PAM type: YTN; PAM sequence: CTA
ttccaacacaatacaggaag

SEQ ID NO: 92590 - DNA, 20 bp, Artificial Sequence
  Description of Artificial Sequence: Synthetic oligonucleotide
  Target: ATXN2; (+) strand; PAM type: YTN; PAM sequence: TTC
caacacaatacaggaagagg

SEQ ID NO: 92591 - DNA, 20 bp, Artificial Sequence
  Description of Artificial Sequence: Synthetic oligonucleotide
  Target: ATXN2; (+) strand; PAM type: YTN; PAM sequence: CTT
ctaaactcattctacaaggc

SEQ ID NO: 92592 - DNA, 20 bp, Artificial Sequence
  Description of Artificial Sequence: Synthetic oligonucleotide
  Target: ATXN2; (+) strand; PAM type: YTN; PAM sequence: TTC
taaactcattctacaaggcc

SEQ ID NO: 92593 - DNA, 20 bp, Artificial Sequence
  Description of Artificial Sequence: Synthetic oligonucleotide
  Target: ATXN2; (+) strand; PAM type: YTN; PAM sequence: CTA
aactcattctacaaggccac

SEQ ID NO: 92594 - DNA, 20 bp, Artificial Sequence
  Description of Artificial Sequence: Synthetic oligonucleotide
  Target: ATXN2; (+) strand; PAM type: YTN; PAM sequence: CTC
attctacaaggccactatta

SEQ ID NO: 92595 - DNA, 20 bp, Artificial Sequence
  Description of Artificial Sequence: Synthetic oligonucleotide
  Target: ATXN2; (+) strand; PAM type: YTN; PAM sequence: TTC
tacaaggccactattaccct

SEQ ID NO: 92596 - DNA, 20 bp, Artificial Sequence
  Description of Artificial Sequence: Synthetic oligonucleotide
  Target: ATXN2; (+) strand; PAM type: YTN; PAM sequence: CTA
caaggccactattaccctat

SEQ ID NO: 92597 - DNA, 20 bp, Artificial Sequence
  Description of Artificial Sequence: Synthetic oligonucleotide
  Target: ATXN2; (+) strand; PAM type: YTN; PAM sequence: CTA
ttaccctatacaaaaccaaa

SEQ ID NO: 92598 - DNA, 20 bp, Artificial Sequence
  Description of Artificial Sequence: Synthetic oligonucleotide
  Target: ATXN2; (+) strand; PAM type: YTN; PAM sequence: TTA
ccctatacaaaaccaaagga

SEQ ID NO: 92599 - DNA, 20 bp, Artificial Sequence
  Description of Artificial Sequence: Synthetic oligonucleotide
  Target: ATXN2; (+) strand; PAM type: YTN; PAM sequence: CTA
tacaaaaccaaaggacacat

SEQ ID NO: 92600 - DNA, 20 bp, Artificial Sequence
  Description of Artificial Sequence: Synthetic oligonucleotide
  Target: ATXN2; (+) strand; PAM type: YTN; PAM sequence: CTA
gaagccagtgtctctgaaga

SEQ ID NO: 92601 - DNA, 20 bp, Artificial Sequence
  Description of Artificial Sequence: Synthetic oligonucleotide
  Target: ATXN2; (+) strand; PAM type: YTN; PAM sequence: CTC
tgaagaacattatgcaaaaa

SEQ ID NO: 92602 - DNA, 20 bp, Artificial Sequence
  Description of Artificial Sequence: Synthetic oligonucleotide
  Target: ATXN2; (+) strand; PAM type: YTN; PAM sequence: CTG
aagaacattatgcaaaaatc

SEQ ID NO: 92603 - DNA, 20 bp, Artificial Sequence
  Description of Artificial Sequence: Synthetic oligonucleotide
  Target: ATXN2; (+) strand; PAM type: YTN; PAM sequence: TTA
tgcaaaaatcctcaatataa

SEQ ID NO: 92604 - DNA, 20 bp, Artificial Sequence
  Description of Artificial Sequence: Synthetic oligonucleotide
  Target: ATXN2; (+) strand; PAM type: YTN; PAM sequence: CTC
aatataatactagcaaaccg

SEQ ID NO: 92605 - DNA, 20 bp, Artificial Sequence
  Description of Artificial Sequence: Synthetic oligonucleotide
  Target: ATXN2; (+) strand; PAM type: YTN; PAM sequence: CTA
gcaaaccgaattcagtaaca

SEQ ID NO: 92606 - DNA, 20 bp, Artificial Sequence
  Description of Artificial Sequence: Synthetic oligonucleotide
  Target: ATXN2; (+) strand; PAM type: YTN; PAM sequence: TTC
agtaacacattaaaaagatc

SEQ ID NO: 92607 - DNA, 20 bp, Artificial Sequence
  Description of Artificial Sequence: Synthetic oligonucleotide
  Target: ATXN2; (+) strand; PAM type: YTN; PAM sequence: TTA
aaaagatcattcatcatgac

SEQ ID NO: 92608 - DNA, 20 bp, Artificial Sequence
  Description of Artificial Sequence: Synthetic oligonucleotide
  Target: ATXN2; (+) strand; PAM type: YTN; PAM sequence: TTC
atcatgactaagtgggattc

SEQ ID NO: 92609 - DNA, 20 bp, Artificial Sequence
  Description of Artificial Sequence: Synthetic oligonucleotide
  Target: ATXN2; (+) strand; PAM type: YTN; PAM sequence: CTA
agtgggattcatcccaggga

SEQ ID NO: 92610 - DNA, 20 bp, Artificial Sequence
  Description of Artificial Sequence: Synthetic oligonucleotide
  Target: ATXN2; (+) strand; PAM type: YTN; PAM sequence: TTC
atcccagggatgcaaggatg

SEQ ID NO: 92611 - DNA, 20 bp, Artificial Sequence
  Description of Artificial Sequence: Synthetic oligonucleotide
  Target: ATXN2; (+) strand; PAM type: YTN; PAM sequence: TTC
gacatacgcaaatcaataaa

SEQ ID NO: 92612 - DNA, 20 bp, Artificial Sequence
  Description of Artificial Sequence: Synthetic oligonucleotide
  Target: ATXN2; (+) strand; PAM type: YTN; PAM sequence: CTT
aacagaataaaagacaaaga

SEQ ID NO: 92613 - DNA, 20 bp, Artificial Sequence
  Description of Artificial Sequence: Synthetic oligonucleotide
  Target: ATXN2; (+) strand; PAM type: YTN; PAM sequence: TTA
acagaataaaagacaaagac

SEQ ID NO: 92614 - DNA, 20 bp, Artificial Sequence
  Description of Artificial Sequence: Synthetic oligonucleotide
  Target: ATXN2; (+) strand; PAM type: YTN; PAM sequence: CTA
aaaaatatatatatatatta

SEQ ID NO: 92615 - DNA, 20 bp, Artificial Sequence
  Description of Artificial Sequence: Synthetic oligonucleotide
  Target: ATXN2; (+) strand; PAM type: YTN; PAM sequence: TTA
tttatactgtgtatgatata

SEQ ID NO: 92616 - DNA, 20 bp, Artificial Sequence
  Description of Artificial Sequence: Synthetic oligonucleotide
  Target: ATXN2; (+) strand; PAM type: YTN; PAM sequence: TTT
atactgtgtatgatataaat

SEQ ID NO: 92617 - DNA, 20 bp, Artificial Sequence
  Description of Artificial Sequence: Synthetic oligonucleotide
  Target: ATXN2; (+) strand; PAM type: YTN; PAM sequence: TTA
tactgtgtatgatataaata

SEQ ID NO: 92618 - DNA, 20 bp, Artificial Sequence
  Description of Artificial Sequence: Synthetic oligonucleotide
  Target: ATXN2; (+) strand; PAM type: YTN; PAM sequence: CTG
tgtatgatataaatatatat

SEQ ID NO: 92619 - DNA, 20 bp, Artificial Sequence
  Description of Artificial Sequence: Synthetic oligonucleotide
  Target: ATXN2; (+) strand; PAM type: YTN; PAM sequence: TTT
atatcacataaaatgccaca

SEQ ID NO: 92620 - DNA, 20 bp, Artificial Sequence
  Description of Artificial Sequence: Synthetic oligonucleotide
  Target: ATXN2; (+) strand; PAM type: YTN; PAM sequence: TTA
tatcacataaaatgccacat

SEQ ID NO: 92621 - DNA, 20 bp, Artificial Sequence
  Description of Artificial Sequence: Synthetic oligonucleotide
  Target: ATXN2; (+) strand; PAM type: YTN; PAM sequence: CTT
atgattaaaacccttggccg

SEQ ID NO: 92622 - DNA, 20 bp, Artificial Sequence
  Description of Artificial Sequence: Synthetic oligonucleotide
  Target: ATXN2; (+) strand; PAM type: YTN; PAM sequence: TTA
tgattaaaacccttggccgg

SEQ ID NO: 92623 - DNA, 20 bp, Artificial Sequence
  Description of Artificial Sequence: Synthetic oligonucleotide
  Target: ATXN2; (+) strand; PAM type: YTN; PAM sequence: TTA
aaacccttggccgggcgtgg

SEQ ID NO: 92624 - DNA, 20 bp, Artificial Sequence
  Description of Artificial Sequence: Synthetic oligonucleotide
  Target: ATXN2; (+) strand; PAM type: YTN; PAM sequence: CTT
ggccgggcgtggtggctcac

SEQ ID NO: 92625 - DNA, 20 bp, Artificial Sequence
  Description of Artificial Sequence: Synthetic oligonucleotide
  Target: ATXN2; (+) strand; PAM type: YTN; PAM sequence: TTG
gccgggcgtggtggctcacg

SEQ ID NO: 92626 - DNA, 20 bp, Artificial Sequence
  Description of Artificial Sequence: Synthetic oligonucleotide
  Target: ATXN2; (+) strand; PAM type: YTN; PAM sequence: CTC
acgcctgtaatcccagcact

SEQ ID NO: 92627 - DNA, 20 bp, Artificial Sequence
  Description of Artificial Sequence: Synthetic oligonucleotide
  Target: ATXN2; (+) strand; PAM type: YTN; PAM sequence: CTG
taatcccagcactttgggag

SEQ ID NO: 92628 - DNA, 20 bp, Artificial Sequence
  Description of Artificial Sequence: Synthetic oligonucleotide
  Target: ATXN2; (+) strand; PAM type: YTN; PAM sequence: CTT
tgggaggctgagacgggcag

SEQ ID NO: 92629 - DNA, 20 bp, Artificial Sequence
  Description of Artificial Sequence: Synthetic oligonucleotide
  Target: ATXN2; (+) strand; PAM type: YTN; PAM sequence: TTT
gggaggctgagacgggcaga

SEQ ID NO: 92630 - DNA, 20 bp, Artificial Sequence
  Description of Artificial Sequence: Synthetic oligonucleotide
  Target: ATXN2; (+) strand; PAM type: YTN; PAM sequence: TTG
ggaggctgagacgggcagat

SEQ ID NO: 92631 - DNA, 20 bp, Artificial Sequence
  Description of Artificial Sequence: Synthetic oligonucleotide
  Target: ATXN2; (+) strand; PAM type: YTN; PAM sequence: CTG
agacgggcagatcatgaggt

SEQ ID NO: 92632 - DNA, 20 bp, Artificial Sequence
  Description of Artificial Sequence: Synthetic oligonucleotide
  Target: ATXN2; (+) strand; PAM type: YTN; PAM sequence: TTC
gagaccatcctggctaacac

SEQ ID NO: 92633 - DNA, 20 bp, Artificial Sequence
  Description of Artificial Sequence: Synthetic oligonucleotide
  Target: ATXN2; (+) strand; PAM type: YTN; PAM sequence: CTG
gctaacacggtgaaaccccg

SEQ ID NO: 92634 - DNA, 20 bp, Artificial Sequence
  Description of Artificial Sequence: Synthetic oligonucleotide
  Target: ATXN2; (+) strand; PAM type: YTN; PAM sequence: CTA
acacggtgaaaccccgtctc

SEQ ID NO: 92635 - DNA, 20 bp, Artificial Sequence
  Description of Artificial Sequence: Synthetic oligonucleotide
  Target: ATXN2; (+) strand; PAM type: YTN; PAM sequence: CTC
tactaaaaatacaaaaaatt

SEQ ID NO: 92636 - DNA, 20 bp, Artificial Sequence
  Description of Artificial Sequence: Synthetic oligonucleotide
  Target: ATXN2; (+) strand; PAM type: YTN; PAM sequence: CTA
ctaaaaatacaaaaaattag

SEQ ID NO: 92637 - DNA, 20 bp, Artificial Sequence
  Description of Artificial Sequence: Synthetic oligonucleotide
  Target: ATXN2; (+) strand; PAM type: YTN; PAM sequence: CTA
aaaatacaaaaaattagccg

SEQ ID NO: 92638 - DNA, 20 bp, Artificial Sequence
  Description of Artificial Sequence: Synthetic oligonucleotide
  Target: ATXN2; (+) strand; PAM type: YTN; PAM sequence: TTA
gccgggcgtgttagcggaca

SEQ ID NO: 92639 - DNA, 20 bp, Artificial Sequence
  Description of Artificial Sequence: Synthetic oligonucleotide
  Target: ATXN2; (+) strand; PAM type: YTN; PAM sequence: TTA
gcggacacctgtagtcccag

SEQ ID NO: 92640 - DNA, 20 bp, Artificial Sequence
  Description of Artificial Sequence: Synthetic oligonucleotide
  Target: ATXN2; (+) strand; PAM type: YTN; PAM sequence: CTG
tagtcccagctactcgggag

SEQ ID NO: 92641 - DNA, 20 bp, Artificial Sequence
  Description of Artificial Sequence: Synthetic oligonucleotide
  Target: ATXN2; (+) strand; PAM type: YTN; PAM sequence: CTA
ctcgggaggctgaggcagga

SEQ ID NO: 92642 - DNA, 20 bp, Artificial Sequence
  Description of Artificial Sequence: Synthetic oligonucleotide
  Target: ATXN2; (+) strand; PAM type: YTN; PAM sequence: CTC
gggaggctgaggcaggagaa

SEQ ID NO: 92643 - DNA, 20 bp, Artificial Sequence
  Description of Artificial Sequence: Synthetic oligonucleotide
  Target: ATXN2; (+) strand; PAM type: YTN; PAM sequence: CTG
aggcaggagaacggcatgaa

SEQ ID NO: 92644 - DNA, 20 bp, Artificial Sequence
  Description of Artificial Sequence: Synthetic oligonucleotide
  Target: ATXN2; (+) strand; PAM type: YTN; PAM sequence: CTT
gcagtgagccaacattgcgc

SEQ ID NO: 92645 - DNA, 20 bp, Artificial Sequence
  Description of Artificial Sequence: Synthetic oligonucleotide
  Target: ATXN2; (+) strand; PAM type: YTN; PAM sequence: TTG
cagtgagccaacattgcgcc

SEQ ID NO: 92646 - DNA, 20 bp, Artificial Sequence
  Description of Artificial Sequence: Synthetic oligonucleotide
  Target: ATXN2; (+) strand; PAM type: YTN; PAM sequence: TTG
cgccactgcactccagcctg

SEQ ID NO: 92647 - DNA, 20 bp, Artificial Sequence
  Description of Artificial Sequence: Synthetic oligonucleotide
  Target: ATXN2; (+) strand; PAM type: YTN; PAM sequence: CTG
cactccagcctgggtgacag

SEQ ID NO: 92648 - DNA, 20 bp, Artificial Sequence
  Description of Artificial Sequence: Synthetic oligonucleotide
  Target: ATXN2; (+) strand; PAM type: YTN; PAM sequence: CTC
cagcctgggtgacagagtga

SEQ ID NO: 92649 - DNA, 20 bp, Artificial Sequence
  Description of Artificial Sequence: Synthetic oligonucleotide
  Target: ATXN2; (+) strand; PAM type: YTN; PAM sequence: CTG
ggtgacagagtgagactcca

SEQ ID NO: 92650 - DNA, 20 bp, Artificial Sequence
  Description of Artificial Sequence: Synthetic oligonucleotide
  Target: ATXN2; (+) strand; PAM type: YTN; PAM sequence: CTC
catctcaaaaacaaacaaac

SEQ ID NO: 92651 - DNA, 20 bp, Artificial Sequence
  Description of Artificial Sequence: Synthetic oligonucleotide
  Target: ATXN2; (+) strand; PAM type: YTN; PAM sequence: CTC
aaaaacaaacaaacaaaaaa

SEQ ID NO: 92652 - DNA, 20 bp, Artificial Sequence
  Description of Artificial Sequence: Synthetic oligonucleotide
  Target: ATXN2; (+) strand; PAM type: YTN; PAM sequence: CTG
ggtatagaaggaatatacct

SEQ ID NO: 92653 - DNA, 20 bp, Artificial Sequence
  Description of Artificial Sequence: Synthetic oligonucleotide
  Target: ATXN2; (+) strand; PAM type: YTN; PAM sequence: CTC
aacaaaacagaagccatata

SEQ ID NO: 92654 - DNA, 20 bp, Artificial Sequence
  Description of Artificial Sequence: Synthetic oligonucleotide
  Target: ATXN2; (+) strand; PAM type: YTN; PAM sequence: CTA
gtaccatactgaaaagggaa

SEQ ID NO: 92655 - DNA, 20 bp, Artificial Sequence
  Description of Artificial Sequence: Synthetic oligonucleotide
  Target: ATXN2; (+) strand; PAM type: YTN; PAM sequence: CTG
aaaagggaaaaactgaaagg

SEQ ID NO: 92656 - DNA, 20 bp, Artificial Sequence
  Description of Artificial Sequence: Synthetic oligonucleotide
  Target: ATXN2; (+) strand; PAM type: YTN; PAM sequence: CTG
aaaggctttcctctaagatc

SEQ ID NO: 92657 - DNA, 20 bp, Artificial Sequence
  Description of Artificial Sequence: Synthetic oligonucleotide
  Target: ATXN2; (+) strand; PAM type: YTN; PAM sequence: CTT
tcctctaagatctggaacaa

SEQ ID NO: 92658 - DNA, 20 bp, Artificial Sequence
  Description of Artificial Sequence: Synthetic oligonucleotide
  Target: ATXN2; (+) strand; PAM type: YTN; PAM sequence: TTT
cctctaagatctggaacaag

SEQ ID NO: 92659 - DNA, 20 bp, Artificial Sequence
  Description of Artificial Sequence: Synthetic oligonucleotide
  Target: ATXN2; (+) strand; PAM type: YTN; PAM sequence: TTC
ctctaagatctggaacaaga

SEQ ID NO: 92660 - DNA, 20 bp, Artificial Sequence
  Description of Artificial Sequence: Synthetic oligonucleotide
  Target: ATXN2; (+) strand; PAM type: YTN; PAM sequence: CTC
taagatctggaacaagacaa

SEQ ID NO: 92661 - DNA, 20 bp, Artificial Sequence
  Description of Artificial Sequence: Synthetic oligonucleotide
  Target: ATXN2; (+) strand; PAM type: YTN; PAM sequence: CTA
agatctggaacaagacaagg

SEQ ID NO: 92662 - DNA, 20 bp, Artificial Sequence
  Description of Artificial Sequence: Synthetic oligonucleotide
  Target: ATXN2; (+) strand; PAM type: YTN; PAM sequence: CTG
gaacaagacaaggatgccca

SEQ ID NO: 92663 - DNA, 20 bp, Artificial Sequence
  Description of Artificial Sequence: Synthetic oligonucleotide
  Target: ATXN2; (+) strand; PAM type: YTN; PAM sequence: CTT
tcaccattgttattcaacat

SEQ ID NO: 92664 - DNA, 20 bp, Artificial Sequence
  Description of Artificial Sequence: Synthetic oligonucleotide
  Target: ATXN2; (+) strand; PAM type: YTN; PAM sequence: TTT
caccattgttattcaacata

SEQ ID NO: 92665 - DNA, 20 bp, Artificial Sequence
  Description of Artificial Sequence: Synthetic oligonucleotide
  Target: ATXN2; (+) strand; PAM type: YTN; PAM sequence: TTC
accattgttattcaacataa

SEQ ID NO: 92666 - DNA, 20 bp, Artificial Sequence
  Description of Artificial Sequence: Synthetic oligonucleotide
  Target: ATXN2; (+) strand; PAM type: YTN; PAM sequence: TTG
ttattcaacataatactcgg

SEQ ID NO: 92667 - DNA, 20 bp, Artificial Sequence
  Description of Artificial Sequence: Synthetic oligonucleotide
  Target: ATXN2; (+) strand; PAM type: YTN; PAM sequence: TTA
ttcaacataatactcggaag

SEQ ID NO: 92668 - DNA, 20 bp, Artificial Sequence
  Description of Artificial Sequence: Synthetic oligonucleotide
  Target: ATXN2; (+) strand; PAM type: YTN; PAM sequence: TTC
aacataatactcggaagtcc

SEQ ID NO: 92669 - DNA, 20 bp, Artificial Sequence
  Description of Artificial Sequence: Synthetic oligonucleotide
  Target: ATXN2; (+) strand; PAM type: YTN; PAM sequence: CTC
ggaagtcctaattggagcaa

SEQ ID NO: 92670 - DNA, 20 bp, Artificial Sequence
  Description of Artificial Sequence: Synthetic oligonucleotide
  Target: ATXN2; (+) strand; PAM type: YTN; PAM sequence: CTA
attggagcaatcagacaaca

SEQ ID NO: 92671 - DNA, 20 bp, Artificial Sequence
  Description of Artificial Sequence: Synthetic oligonucleotide
  Target: ATXN2; (+) strand; PAM type: YTN; PAM sequence: TTG
gagcaatcagacaacagaaa

SEQ ID NO: 92672 - DNA, 20 bp, Artificial Sequence
  Description of Artificial Sequence: Synthetic oligonucleotide
  Target: ATXN2; (+) strand; PAM type: YTN; PAM sequence: CTG
gaatggaagaagtcaaatta

SEQ ID NO: 92673 - DNA, 20 bp, Artificial Sequence
  Description of Artificial Sequence: Synthetic oligonucleotide
  Target: ATXN2; (+) strand; PAM type: YTN; PAM sequence: TTA
tccttgtttgcagataatat

SEQ ID NO: 92674 - DNA, 20 bp, Artificial Sequence
  Description of Artificial Sequence: Synthetic oligonucleotide
  Target: ATXN2; (+) strand; PAM type: YTN; PAM sequence: CTT
gtttgcagataatatgatct

SEQ ID NO: 92675 - DNA, 20 bp, Artificial Sequence
  Description of Artificial Sequence: Synthetic oligonucleotide
  Target: ATXN2; (+) strand; PAM type: YTN; PAM sequence: TTG
tttgcagataatatgatctt

SEQ ID NO: 92676 - DNA, 20 bp, Artificial Sequence
  Description of Artificial Sequence: Synthetic oligonucleotide
  Target: ATXN2; (+) strand; PAM type: YTN; PAM sequence: TTT
gcagataatatgatcttaca

SEQ ID NO: 92677 - DNA, 20 bp, Artificial Sequence
  Description of Artificial Sequence: Synthetic oligonucleotide
  Target: ATXN2; (+) strand; PAM type: YTN; PAM sequence: TTG
cagataatatgatcttacat

SEQ ID NO: 92678 - DNA, 20 bp, Artificial Sequence
  Description of Artificial Sequence: Synthetic oligonucleotide
  Target: ATXN2; (+) strand; PAM type: YTN; PAM sequence: CTT
acatttggaaaaacctagac

SEQ ID NO: 92679 - DNA, 20 bp, Artificial Sequence
  Description of Artificial Sequence: Synthetic oligonucleotide
  Target: ATXN2; (+) strand; PAM type: YTN; PAM sequence: TTA
catttggaaaaacctagact

SEQ ID NO: 92680 - DNA, 20 bp, Artificial Sequence
  Description of Artificial Sequence: Synthetic oligonucleotide
  Target: ATXN2; (+) strand; PAM type: YTN; PAM sequence: TTT
ggaaaaacctagactccaaa

SEQ ID NO: 92681 - DNA, 20 bp, Artificial Sequence
  Description of Artificial Sequence: Synthetic oligonucleotide
  Target: ATXN2; (+) strand; PAM type: YTN; PAM sequence: TTG
gaaaaacctagactccaaaa

SEQ ID NO: 92682 - DNA, 20 bp, Artificial Sequence
  Description of Artificial Sequence: Synthetic oligonucleotide
  Target: ATXN2; (+) strand; PAM type: YTN; PAM sequence: CTA
gactccaaaaaagaaaaacc

SEQ ID NO: 92683 - DNA, 20 bp, Artificial Sequence
  Description of Artificial Sequence: Synthetic oligonucleotide
  Target: ATXN2; (+) strand; PAM type: YTN; PAM sequence: CTC
caaaaaagaaaaacctatta

SEQ ID NO: 92684 - DNA, 20 bp, Artificial Sequence
  Description of Artificial Sequence: Synthetic oligonucleotide
  Target: ATXN2; (+) strand; PAM type: YTN; PAM sequence: CTA
ttagaactgacaaacaaatt

SEQ ID NO: 92685 - DNA, 20 bp, Artificial Sequence
  Description of Artificial Sequence: Synthetic oligonucleotide
  Target: ATXN2; (+) strand; PAM type: YTN; PAM sequence: TTA
gaactgacaaacaaattcag

SEQ ID NO: 92686 - DNA, 20 bp, Artificial Sequence
  Description of Artificial Sequence: Synthetic oligonucleotide
  Target: ATXN2; (+) strand; PAM type: YTN; PAM sequence: CTG
acaaacaaattcagtaaaat

SEQ ID NO: 92687 - DNA, 20 bp, Artificial Sequence
  Description of Artificial Sequence: Synthetic oligonucleotide
  Target: ATXN2; (+) strand; PAM type: YTN; PAM sequence: TTC
agtaaaattgcaggatacaa

SEQ ID NO: 92688 - DNA, 20 bp, Artificial Sequence
  Description of Artificial Sequence: Synthetic oligonucleotide
  Target: ATXN2; (+) strand; PAM type: YTN; PAM sequence: TTG
caggatacaaaaatcaacac

SEQ ID NO: 92689 - DNA, 20 bp, Artificial Sequence
  Description of Artificial Sequence: Synthetic oligonucleotide
  Target: ATXN2; (+) strand; PAM type: YTN; PAM sequence: TTT
ttatatttaacagcaaacaa

SEQ ID NO: 92690 - DNA, 20 bp, Artificial Sequence
  Description of Artificial Sequence: Synthetic oligonucleotide
  Target: ATXN2; (+) strand; PAM type: YTN; PAM sequence: TTT
tatatttaacagcaaacaat

SEQ ID NO: 92691 - DNA, 20 bp, Artificial Sequence
  Description of Artificial Sequence: Synthetic oligonucleotide
  Target: ATXN2; (+) strand; PAM type: YTN; PAM sequence: TTT
atatttaacagcaaacaatc

SEQ ID NO: 92692 - DNA, 20 bp, Artificial Sequence
  Description of Artificial Sequence: Synthetic oligonucleotide
  Target: ATXN2; (+) strand; PAM type: YTN; PAM sequence: TTA
tatttaacagcaaacaatct

SEQ ID NO: 92693 - DNA, 20 bp, Artificial Sequence
  Description of Artificial Sequence: Synthetic oligonucleotide
  Target: ATXN2; (+) strand; PAM type: YTN; PAM sequence: TTT
aacagcaaacaatctgaaaa

SEQ ID NO: 92694 - DNA, 20 bp, Artificial Sequence
  Description of Artificial Sequence: Synthetic oligonucleotide
  Target: ATXN2; (+) strand; PAM type: YTN; PAM sequence: TTA
acagcaaacaatctgaaaaa

SEQ ID NO: 92695 - DNA, 20 bp, Artificial Sequence
  Description of Artificial Sequence: Synthetic oligonucleotide
  Target: ATXN2; (+) strand; PAM type: YTN; PAM sequence: CTG
aaaaattttttaaacgcaat

SEQ ID NO: 92696 - DNA, 20 bp, Artificial Sequence
  Description of Artificial Sequence: Synthetic oligonucleotide
  Target: ATXN2; (+) strand; PAM type: YTN; PAM sequence: TTT
tttaaacgcaatcccattta

SEQ ID NO: 92697 - DNA, 20 bp, Artificial Sequence
  Description of Artificial Sequence: Synthetic oligonucleotide
  Target: ATXN2; (+) strand; PAM type: YTN; PAM sequence: TTT
ttaaacgcaatcccatttac

SEQ ID NO: 92698 - DNA, 20 bp, Artificial Sequence
  Description of Artificial Sequence: Synthetic oligonucleotide
  Target: ATXN2; (+) strand; PAM type: YTN; PAM sequence: TTT
taaacgcaatcccatttaca

SEQ ID NO: 92699 - DNA, 20 bp, Artificial Sequence
  Description of Artificial Sequence: Synthetic oligonucleotide
  Target: ATXN2; (+) strand; PAM type: YTN; PAM sequence: TTT
aaacgcaatcccatttacaa

SEQ ID NO: 92700 - DNA, 20 bp, Artificial Sequence
  Description of Artificial Sequence: Synthetic oligonucleotide
  Target: ATXN2; (+) strand; PAM type: YTN; PAM sequence: TTA
aacgcaatcccatttacaat

SEQ ID NO: 92701 - DNA, 20 bp, Artificial Sequence
  Description of Artificial Sequence: Synthetic oligonucleotide
  Target: ATXN2; (+) strand; PAM type: YTN; PAM sequence: TTT
acaatagctacaaatataat

SEQ ID NO: 92702 - DNA, 20 bp, Artificial Sequence
  Description of Artificial Sequence: Synthetic oligonucleotide
  Target: ATXN2; (+) strand; PAM type: YTN; PAM sequence: TTA
caatagctacaaatataata

SEQ ID NO: 92703 - DNA, 20 bp, Artificial Sequence
  Description of Artificial Sequence: Synthetic oligonucleotide
  Target: ATXN2; (+) strand; PAM type: YTN; PAM sequence: CTA
caaatataataaaatactta

SEQ ID NO: 92704 - DNA, 20 bp, Artificial Sequence
  Description of Artificial Sequence: Synthetic oligonucleotide
  Target: ATXN2; (+) strand; PAM type: YTN; PAM sequence: CTT
aggaataaacttaaccaaat

SEQ ID NO: 92705 - DNA, 20 bp, Artificial Sequence
  Description of Artificial Sequence: Synthetic oligonucleotide
  Target: ATXN2; (+) strand; PAM type: YTN; PAM sequence: TTA
ggaataaacttaaccaaatg

SEQ ID NO: 92706 - DNA, 20 bp, Artificial Sequence
  Description of Artificial Sequence: Synthetic oligonucleotide
  Target: ATXN2; (+) strand; PAM type: YTN; PAM sequence: CTT
aaccaaatgagtaaaagatt

SEQ ID NO: 92707 - DNA, 20 bp, Artificial Sequence
  Description of Artificial Sequence: Synthetic oligonucleotide
  Target: ATXN2; (+) strand; PAM type: YTN; PAM sequence: TTA
accaaatgagtaaaagattt

SEQ ID NO: 92708 - DNA, 20 bp, Artificial Sequence
  Description of Artificial Sequence: Synthetic oligonucleotide
  Target: ATXN2; (+) strand; PAM type: YTN; PAM sequence: TTT
ctataatgacaactttaaaa

SEQ ID NO: 92709 - DNA, 20 bp, Artificial Sequence
  Description of Artificial Sequence: Synthetic oligonucleotide
  Target: ATXN2; (+) strand; PAM type: YTN; PAM sequence: TTC
tataatgacaactttaaaac

SEQ ID NO: 92710 - DNA, 20 bp, Artificial Sequence
  Description of Artificial Sequence: Synthetic oligonucleotide
  Target: ATXN2; (+) strand; PAM type: YTN; PAM sequence: CTA
taatgacaactttaaaacac

SEQ ID NO: 92711 - DNA, 20 bp, Artificial Sequence
  Description of Artificial Sequence: Synthetic oligonucleotide
  Target: ATXN2; (+) strand; PAM type: YTN; PAM sequence: CTT
taaaacactgaaattgatga

SEQ ID NO: 92712 - DNA, 20 bp, Artificial Sequence
  Description of Artificial Sequence: Synthetic oligonucleotide
  Target: ATXN2; (+) strand; PAM type: YTN; PAM sequence: TTT
aaaacactgaaattgatgac

SEQ ID NO: 92713 - DNA, 20 bp, Artificial Sequence
  Description of Artificial Sequence: Synthetic oligonucleotide
  Target: ATXN2; (+) strand; PAM type: YTN; PAM sequence: TTA
aaacactgaaattgatgaca

SEQ ID NO: 92714 - DNA, 20 bp, Artificial Sequence
  Description of Artificial Sequence: Synthetic oligonucleotide
  Target: ATXN2; (+) strand; PAM type: YTN; PAM sequence: CTG
aaattgatgacacagaaaaa

SEQ ID NO: 92715 - DNA, 20 bp, Artificial Sequence
  Description of Artificial Sequence: Synthetic oligonucleotide
  Target: ATXN2; (+) strand; PAM type: YTN; PAM sequence: TTG
atgacacagaaaaaacatga

SEQ ID NO: 92716 - DNA, 20 bp, Artificial Sequence
  Description of Artificial Sequence: Synthetic oligonucleotide
  Target: ATXN2; (+) strand; PAM type: YTN; PAM sequence: TTC
catgtttatggattagaaga

SEQ ID NO: 92717 - DNA, 20 bp, Artificial Sequence
  Description of Artificial Sequence: Synthetic oligonucleotide
  Target: ATXN2; (+) strand; PAM type: YTN; PAM sequence: TTT
atggattagaagaattaata

SEQ ID NO: 92718 - DNA, 20 bp, Artificial Sequence
  Description of Artificial Sequence: Synthetic oligonucleotide
  Target: ATXN2; (+) strand; PAM type: YTN; PAM sequence: TTA
tggattagaagaattaatat

SEQ ID NO: 92719 - DNA, 20 bp, Artificial Sequence
  Description of Artificial Sequence: Synthetic oligonucleotide
  Target: ATXN2; (+) strand; PAM type: YTN; PAM sequence: TTA
gaagaattaatattgctaaa

SEQ ID NO: 92720 - DNA, 20 bp, Artificial Sequence
  Description of Artificial Sequence: Synthetic oligonucleotide
  Target: ATXN2; (+) strand; PAM type: YTN; PAM sequence: TTA
atattgctaaaatgttgata

SEQ ID NO: 92721 - DNA, 20 bp, Artificial Sequence
  Description of Artificial Sequence: Synthetic oligonucleotide
  Target: ATXN2; (+) strand; PAM type: YTN; PAM sequence: TTG
ctaaaatgttgataatactc

SEQ ID NO: 92722 - DNA, 20 bp, Artificial Sequence
  Description of Artificial Sequence: Synthetic oligonucleotide
  Target: ATXN2; (+) strand; PAM type: YTN; PAM sequence: CTA
aaatgttgataatactcaaa

SEQ ID NO: 92723 - DNA, 20 bp, Artificial Sequence
  Description of Artificial Sequence: Synthetic oligonucleotide
  Target: ATXN2; (+) strand; PAM type: YTN; PAM sequence: TTG
ataatactcaaagcaatcta

SEQ ID NO: 92724 - DNA, 20 bp, Artificial Sequence
  Description of Artificial Sequence: Synthetic oligonucleotide
  Target: ATXN2; (+) strand; PAM type: YTN; PAM sequence: CTC
aaagcaatctacagattcag

SEQ ID NO: 92725 - DNA, 20 bp, Artificial Sequence
  Description of Artificial Sequence: Synthetic oligonucleotide
  Target: ATXN2; (+) strand; PAM type: YTN; PAM sequence: CTA
cagattcagtgcaatcccta

SEQ ID NO: 92726 - DNA, 20 bp, Artificial Sequence
  Description of Artificial Sequence: Synthetic oligonucleotide
  Target: ATXN2; (+) strand; PAM type: YTN; PAM sequence: TTC
agtgcaatccctatcaaaat

SEQ ID NO: 92727 - DNA, 20 bp, Artificial Sequence
  Description of Artificial Sequence: Synthetic oligonucleotide
  Target: ATXN2; (+) strand; PAM type: YTN; PAM sequence: CTA
tcaaaataccaatgacattc

SEQ ID NO: 92728 - DNA, 20 bp, Artificial Sequence
  Description of Artificial Sequence: Synthetic oligonucleotide
  Target: ATXN2; (+) strand; PAM type: YTN; PAM sequence: TTC
ctcacagaagtagacaaaaa

SEQ ID NO: 92729 - DNA, 20 bp, Artificial Sequence
  Description of Artificial Sequence: Synthetic oligonucleotide
  Target: ATXN2; (+) strand; PAM type: YTN; PAM sequence: CTC
acagaagtagacaaaaataa

SEQ ID NO: 92730 - DNA, 20 bp, Artificial Sequence
  Description of Artificial Sequence: Synthetic oligonucleotide
  Target: ATXN2; (+) strand; PAM type: YTN; PAM sequence: TTC
taaaatttgtagggaaccac

SEQ ID NO: 92731 - DNA, 20 bp, Artificial Sequence
  Description of Artificial Sequence: Synthetic oligonucleotide
  Target: ATXN2; (+) strand; PAM type: YTN; PAM sequence: CTA
aaatttgtagggaaccacaa

SEQ ID NO: 92732 - DNA, 20 bp, Artificial Sequence
  Description of Artificial Sequence: Synthetic oligonucleotide
  Target: ATXN2; (+) strand; PAM type: YTN; PAM sequence: TTT
gtagggaaccacaaaaggcc

SEQ ID NO: 92733 - DNA, 20 bp, Artificial Sequence
  Description of Artificial Sequence: Synthetic oligonucleotide
  Target: ATXN2; (+) strand; PAM type: YTN; PAM sequence: TTG
tagggaaccacaaaaggccc

SEQ ID NO: 92734 - DNA, 20 bp, Artificial Sequence
  Description of Artificial Sequence: Synthetic oligonucleotide
  Target: ATXN2; (+) strand; PAM type: YTN; PAM sequence: CTG
agcaaaatgaacaaaacggg

SEQ ID NO: 92735 - DNA, 20 bp, Artificial Sequence
  Description of Artificial Sequence: Synthetic oligonucleotide
  Target: ATXN2; (+) strand; PAM type: YTN; PAM sequence: TTA
tctgacttcaaattattgta

SEQ ID NO: 92736 - DNA, 20 bp, Artificial Sequence
  Description of Artificial Sequence: Synthetic oligonucleotide
  Target: ATXN2; (+) strand; PAM type: YTN; PAM sequence: CTG
acttcaaattattgtaacca

SEQ ID NO: 92737 - DNA, 20 bp, Artificial Sequence
  Description of Artificial Sequence: Synthetic oligonucleotide
  Target: ATXN2; (+) strand; PAM type: YTN; PAM sequence: CTT
caaattattgtaaccaaaat

SEQ ID NO: 92738 - DNA, 20 bp, Artificial Sequence
  Description of Artificial Sequence: Synthetic oligonucleotide
  Target: ATXN2; (+) strand; PAM type: YTN; PAM sequence: TTC
aaattattgtaaccaaaatg

SEQ ID NO: 92739 - DNA, 20 bp, Artificial Sequence
  Description of Artificial Sequence: Synthetic oligonucleotide
  Target: ATXN2; (+) strand; PAM type: YTN; PAM sequence: TTA
ttgtaaccaaaatggcatgg

SEQ ID NO: 92740 - DNA, 20 bp, Artificial Sequence
  Description of Artificial Sequence: Synthetic oligonucleotide
  Target: ATXN2; (+) strand; PAM type: YTN; PAM sequence: TTG
taaccaaaatggcatggtac

SEQ ID NO: 92741 - DNA, 20 bp, Artificial Sequence
  Description of Artificial Sequence: Synthetic oligonucleotide
  Target: ATXN2; (+) strand; PAM type: YTN; PAM sequence: CTG
gcataaaaaaagatatagat

SEQ ID NO: 92742 - DNA, 20 bp, Artificial Sequence
  Description of Artificial Sequence: Synthetic oligonucleotide
  Target: ATXN2; (+) strand; PAM type: YTN; PAM sequence: CTC
agaaatgaatccatacgtct

SEQ ID NO: 92743 - DNA, 20 bp, Artificial Sequence
  Description of Artificial Sequence: Synthetic oligonucleotide
  Target: ATXN2; (+) strand; PAM type: YTN; PAM sequence: CTA
agtgaactcattttccacaa

SEQ ID NO: 92744 - DNA, 20 bp, Artificial Sequence
  Description of Artificial Sequence: Synthetic oligonucleotide
  Target: ATXN2; (+) strand; PAM type: YTN; PAM sequence: CTC
attttccacaaagaagccat

SEQ ID NO: 92745 - DNA, 20 bp, Artificial Sequence
  Description of Artificial Sequence: Synthetic oligonucleotide
  Target: ATXN2; (+) strand; PAM type: YTN; PAM sequence: TTT
tccacaaagaagccatgaac

SEQ ID NO: 92746 - DNA, 20 bp, Artificial Sequence
  Description of Artificial Sequence: Synthetic oligonucleotide
  Target: ATXN2; (+) strand; PAM type: YTN; PAM sequence: TTT
ccacaaagaagccatgaaca

SEQ ID NO: 92747 - DNA, 20 bp, Artificial Sequence
  Description of Artificial Sequence: Synthetic oligonucleotide
  Target: ATXN2; (+) strand; PAM type: YTN; PAM sequence: TTC
cacaaagaagccatgaacat

SEQ ID NO: 92748 - DNA, 20 bp, Artificial Sequence
  Description of Artificial Sequence: Synthetic oligonucleotide
  Target: ATXN2; (+) strand; PAM type: YTN; PAM sequence: CTG
gggaaaggacagtctcttca

SEQ ID NO: 92749 - DNA, 20 bp, Artificial Sequence
  Description of Artificial Sequence: Synthetic oligonucleotide
  Target: ATXN2; (+) strand; PAM type: YTN; PAM sequence: CTC
ttcaataaatggtgctggga

SEQ ID NO: 92750 - DNA, 20 bp, Artificial Sequence
  Description of Artificial Sequence: Synthetic oligonucleotide
  Target: ATXN2; (+) strand; PAM type: YTN; PAM sequence: CTT
caataaatggtgctgggaaa

SEQ ID NO: 92751 - DNA, 20 bp, Artificial Sequence
  Description of Artificial Sequence: Synthetic oligonucleotide
  Target: ATXN2; (+) strand; PAM type: YTN; PAM sequence: TTC
aataaatggtgctgggaaaa

SEQ ID NO: 92752 - DNA, 20 bp, Artificial Sequence
  Description of Artificial Sequence: Synthetic oligonucleotide
  Target: ATXN2; (+) strand; PAM type: YTN; PAM sequence: CTG
ggaaaactggatatccatat

SEQ ID NO: 92753 - DNA, 20 bp, Artificial Sequence
  Description of Artificial Sequence: Synthetic oligonucleotide
  Target: ATXN2; (+) strand; PAM type: YTN; PAM sequence: CTG
gatatccatatgcagaagaa

SEQ ID NO: 92754 - DNA, 20 bp, Artificial Sequence
  Description of Artificial Sequence: Synthetic oligonucleotide
  Target: ATXN2; (+) strand; PAM type: YTN; PAM sequence: CTG
tgtcccaccatattaaaaaa

SEQ ID NO: 92755 - DNA, 20 bp, Artificial Sequence
  Description of Artificial Sequence: Synthetic oligonucleotide
  Target: ATXN2; (+) strand; PAM type: YTN; PAM sequence: TTA
aaaaaaaatcaaatcaaaat

SEQ ID NO: 92756 - DNA, 20 bp, Artificial Sequence
  Description of Artificial Sequence: Synthetic oligonucleotide
  Target: ATXN2; (+) strand; PAM type: YTN; PAM sequence: CTA
aagatttaaatctaagacct

SEQ ID NO: 92757 - DNA, 20 bp, Artificial Sequence
  Description of Artificial Sequence: Synthetic oligonucleotide
  Target: ATXN2; (+) strand; PAM type: YTN; PAM sequence: TTT
aaatctaagacctcaaacta

SEQ ID NO: 92758 - DNA, 20 bp, Artificial Sequence
  Description of Artificial Sequence: Synthetic oligonucleotide
  Target: ATXN2; (+) strand; PAM type: YTN; PAM sequence: TTA
aatctaagacctcaaactat

SEQ ID NO: 92759 - DNA, 20 bp, Artificial Sequence
  Description of Artificial Sequence: Synthetic oligonucleotide
  Target: ATXN2; (+) strand; PAM type: YTN; PAM sequence: CTA
agacctcaaactatgaaact

SEQ ID NO: 92760 - DNA, 20 bp, Artificial Sequence
  Description of Artificial Sequence: Synthetic oligonucleotide
  Target: ATXN2; (+) strand; PAM type: YTN; PAM sequence: CTC
aaactatgaaactactaaaa

SEQ ID NO: 92761 - DNA, 20 bp, Artificial Sequence
  Description of Artificial Sequence: Synthetic oligonucleotide
  Target: ATXN2; (+) strand; PAM type: YTN; PAM sequence: CTA
tgaaactactaaaagaaaac

SEQ ID NO: 92762 - DNA, 20 bp, Artificial Sequence
  Description of Artificial Sequence: Synthetic oligonucleotide
  Target: ATXN2; (+) strand; PAM type: YTN; PAM sequence: CTA
ctaaaagaaaacattaaact

SEQ ID NO: 92763 - DNA, 20 bp, Artificial Sequence
  Description of Artificial Sequence: Synthetic oligonucleotide
  Target: ATXN2; (+) strand; PAM type: YTN; PAM sequence: CTA
aaagaaaacattaaactccc

SEQ ID NO: 92764 - DNA, 20 bp, Artificial Sequence
  Description of Artificial Sequence: Synthetic oligonucleotide
  Target: ATXN2; (+) strand; PAM type: YTN; PAM sequence: TTA
aactcccagggacattactc

SEQ ID NO: 92765 - DNA, 20 bp, Artificial Sequence
  Description of Artificial Sequence: Synthetic oligonucleotide
  Target: ATXN2; (+) strand; PAM type: YTN; PAM sequence: CTC
ccagggacattactctgggc

SEQ ID NO: 92766 - DNA, 20 bp, Artificial Sequence
  Description of Artificial Sequence: Synthetic oligonucleotide
  Target: ATXN2; (+) strand; PAM type: YTN; PAM sequence: TTA
ctctgggcaaagatttcttg

SEQ ID NO: 92767 - DNA, 20 bp, Artificial Sequence
  Description of Artificial Sequence: Synthetic oligonucleotide
  Target: ATXN2; (+) strand; PAM type: YTN; PAM sequence: CTC
tgggcaaagatttcttgagt

SEQ ID NO: 92768 - DNA, 20 bp, Artificial Sequence
  Description of Artificial Sequence: Synthetic oligonucleotide
  Target: ATXN2; (+) strand; PAM type: YTN; PAM sequence: CTG
ggcaaagatttcttgagtaa

SEQ ID NO: 92769 - DNA, 20 bp, Artificial Sequence
  Description of Artificial Sequence: Synthetic oligonucleotide
  Target: ATXN2; (+) strand; PAM type: YTN; PAM sequence: TTT
cttgagtaataccccaaaag

SEQ ID NO: 92770 - DNA, 20 bp, Artificial Sequence
  Description of Artificial Sequence: Synthetic oligonucleotide
  Target: ATXN2; (+) strand; PAM type: YTN; PAM sequence: TTC
ttgagtaataccccaaaagt

SEQ ID NO: 92771 - DNA, 20 bp, Artificial Sequence
  Description of Artificial Sequence: Synthetic oligonucleotide
  Target: ATXN2; (+) strand; PAM type: YTN; PAM sequence: CTT
gagtaataccccaaaagtac

SEQ ID NO: 92772 - DNA, 20 bp, Artificial Sequence
  Description of Artificial Sequence: Synthetic oligonucleotide
  Target: ATXN2; (+) strand; PAM type: YTN; PAM sequence: TTG
agtaataccccaaaagtaca

SEQ ID NO: 92773 - DNA, 20 bp, Artificial Sequence
  Description of Artificial Sequence: Synthetic oligonucleotide
  Target: ATXN2; (+) strand; PAM type: YTN; PAM sequence: TTA
aaaagcttctgcacagcaaa

SEQ ID NO: 92774 - DNA, 20 bp, Artificial Sequence
  Description of Artificial Sequence: Synthetic oligonucleotide
  Target: ATXN2; (+) strand; PAM type: YTN; PAM sequence: CTT
ctgcacagcaaaggaaacca

SEQ ID NO: 92775 - DNA, 20 bp, Artificial Sequence
  Description of Artificial Sequence: Synthetic oligonucleotide
  Target: ATXN2; (+) strand; PAM type: YTN; PAM sequence: TTC
tgcacagcaaaggaaaccat

SEQ ID NO: 92776 - DNA, 20 bp, Artificial Sequence
  Description of Artificial Sequence: Synthetic oligonucleotide
  Target: ATXN2; (+) strand; PAM type: YTN; PAM sequence: CTG
cacagcaaaggaaaccatca

SEQ ID NO: 92777 - DNA, 20 bp, Artificial Sequence
  Description of Artificial Sequence: Synthetic oligonucleotide
  Target: ATXN2; (+) strand; PAM type: YTN; PAM sequence: TTT
gcaaactactcatctgacaa

SEQ ID NO: 92778 - DNA, 20 bp, Artificial Sequence
  Description of Artificial Sequence: Synthetic oligonucleotide
  Target: ATXN2; (+) strand; PAM type: YTN; PAM sequence: TTG
caaactactcatctgacaag

SEQ ID NO: 92779 - DNA, 20 bp, Artificial Sequence
  Description of Artificial Sequence: Synthetic oligonucleotide
  Target: ATXN2; (+) strand; PAM type: YTN; PAM sequence: CTA
ctcatctgacaagggatcaa

SEQ ID NO: 92780 - DNA, 20 bp, Artificial Sequence
  Description of Artificial Sequence: Synthetic oligonucleotide
  Target: ATXN2; (+) strand; PAM type: YTN; PAM sequence: CTC
atctgacaagggatcaataa

SEQ ID NO: 92781 - DNA, 20 bp, Artificial Sequence
  Description of Artificial Sequence: Synthetic oligonucleotide
  Target: ATXN2; (+) strand; PAM type: YTN; PAM sequence: CTG
acaagggatcaataaccaga

SEQ ID NO: 92782 - DNA, 20 bp, Artificial Sequence
  Description of Artificial Sequence: Synthetic oligonucleotide
  Target: ATXN2; (+) strand; PAM type: YTN; PAM sequence: CTC
aagcaactccatagggaaaa

SEQ ID NO: 92783 - DNA, 20 bp, Artificial Sequence
  Description of Artificial Sequence: Synthetic oligonucleotide
  Target: ATXN2; (+) strand; PAM type: YTN; PAM sequence: CTC
catagggaaaattttagtaa

SEQ ID NO: 92784 - DNA, 20 bp, Artificial Sequence
  Description of Artificial Sequence: Synthetic oligonucleotide
  Target: ATXN2; (+) strand; PAM type: YTN; PAM sequence: TTT
tagtaactcaattaaaaatg

SEQ ID NO: 92785 - DNA, 20 bp, Artificial Sequence
  Description of Artificial Sequence: Synthetic oligonucleotide
  Target: ATXN2; (+) strand; PAM type: YTN; PAM sequence: TTT
agtaactcaattaaaaatgg

SEQ ID NO: 92786 - DNA, 20 bp, Artificial Sequence
  Description of Artificial Sequence: Synthetic oligonucleotide
  Target: ATXN2; (+) strand; PAM type: YTN; PAM sequence: TTA
gtaactcaattaaaaatggg

SEQ ID NO: 92787 - DNA, 20 bp, Artificial Sequence
  Description of Artificial Sequence: Synthetic oligonucleotide
  Target: ATXN2; (+) strand; PAM type: YTN; PAM sequence: CTC
aattaaaaatgggcaaaaga

SEQ ID NO: 92788 - DNA, 20 bp, Artificial Sequence
  Description of Artificial Sequence: Synthetic oligonucleotide
  Target: ATXN2; (+) strand; PAM type: YTN; PAM sequence: TTA
aaaatgggcaaaagatctga

SEQ ID NO: 92789 - DNA, 20 bp, Artificial Sequence
  Description of Artificial Sequence: Synthetic oligonucleotide
  Target: ATXN2; (+) strand; PAM type: YTN; PAM sequence: CTG
aatagacatttctcaaaaga

SEQ ID NO: 92790 - DNA, 20 bp, Artificial Sequence
  Description of Artificial Sequence: Synthetic oligonucleotide
  Target: ATXN2; (+) strand; PAM type: YTN; PAM sequence: TTT
ctcaaaagacgacatacagg

SEQ ID NO: 92791 - DNA, 20 bp, Artificial Sequence
  Description of Artificial Sequence: Synthetic oligonucleotide
  Target: ATXN2; (+) strand; PAM type: YTN; PAM sequence: TTC
tcaaaagacgacatacaggc

SEQ ID NO: 92792 - DNA, 20 bp, Artificial Sequence
  Description of Artificial Sequence: Synthetic oligonucleotide
  Target: ATXN2; (+) strand; PAM type: YTN; PAM sequence: CTC
aaaagacgacatacaggctg

SEQ ID NO: 92793 - DNA, 20 bp, Artificial Sequence
  Description of Artificial Sequence: Synthetic oligonucleotide
  Target: ATXN2; (+) strand; PAM type: YTN; PAM sequence: CTG
ggcgcagcagctcacgcctg

SEQ ID NO: 92794 - DNA, 20 bp, Artificial Sequence
  Description of Artificial Sequence: Synthetic oligonucleotide
  Target: ATXN2; (+) strand; PAM type: YTN; PAM sequence: CTC
acgcctgtaatcctagcact

SEQ ID NO: 92795 - DNA, 20 bp, Artificial Sequence
  Description of Artificial Sequence: Synthetic oligonucleotide
  Target: ATXN2; (+) strand; PAM type: YTN; PAM sequence: CTG
taatcctagcactttgggag

SEQ ID NO: 92796 - DNA, 20 bp, Artificial Sequence
  Description of Artificial Sequence: Synthetic oligonucleotide
  Target: ATXN2; (+) strand; PAM type: YTN; PAM sequence: CTA
gcactttgggaggctgaggc

SEQ ID NO: 92797 - DNA, 20 bp, Artificial Sequence
  Description of Artificial Sequence: Synthetic oligonucleotide
  Target: ATXN2; (+) strand; PAM type: YTN; PAM sequence: CTT
tgggaggctgaggcaggtaa

SEQ ID NO: 92798 - DNA, 20 bp, Artificial Sequence
  Description of Artificial Sequence: Synthetic oligonucleotide
  Target: ATXN2; (+) strand; PAM type: YTN; PAM sequence: TTT
gggaggctgaggcaggtaaa

SEQ ID NO: 92799 - DNA, 20 bp, Artificial Sequence
  Description of Artificial Sequence: Synthetic oligonucleotide
  Target: ATXN2; (+) strand; PAM type: YTN; PAM sequence: TTG
ggaggctgaggcaggtaaat

SEQ ID NO: 92800 - DNA, 20 bp, Artificial Sequence
  Description of Artificial Sequence: Synthetic oligonucleotide
  Target: ATXN2; (+) strand; PAM type: YTN; PAM sequence: CTG
aggcaggtaaatcacctgag

SEQ ID NO: 92801 - DNA, 20 bp, Artificial Sequence
  Description of Artificial Sequence: Synthetic oligonucleotide
  Target: ATXN2; (+) strand; PAM type: YTN; PAM sequence: CTG
aggttaggagttcaagacca

SEQ ID NO: 92802 - DNA, 20 bp, Artificial Sequence
  Description of Artificial Sequence: Synthetic oligonucleotide
  Target: ATXN2; (+) strand; PAM type: YTN; PAM sequence: TTA
ggagttcaagaccagcctgg

SEQ ID NO: 92803 - DNA, 20 bp, Artificial Sequence
  Description of Artificial Sequence: Synthetic oligonucleotide
  Target: ATXN2; (+) strand; PAM type: YTN; PAM sequence: TTC
aagaccagcctgggcaacaa

SEQ ID NO: 92804 - DNA, 20 bp, Artificial Sequence
  Description of Artificial Sequence: Synthetic oligonucleotide
  Target: ATXN2; (+) strand; PAM type: YTN; PAM sequence: CTG
ggcaacaaggagaaatcccg

SEQ ID NO: 92805 - DNA, 20 bp, Artificial Sequence
  Description of Artificial Sequence: Synthetic oligonucleotide
  Target: ATXN2; (+) strand; PAM type: YTN; PAM sequence: CTC
tactaaaaatacaaaaatta

SEQ ID NO: 92806 - DNA, 20 bp, Artificial Sequence
  Description of Artificial Sequence: Synthetic oligonucleotide
  Target: ATXN2; (+) strand; PAM type: YTN; PAM sequence: CTA
ctaaaaatacaaaaattagg

SEQ ID NO: 92807 - DNA, 20 bp, Artificial Sequence
  Description of Artificial Sequence: Synthetic oligonucleotide
  Target: ATXN2; (+) strand; PAM type: YTN; PAM sequence: CTA
aaaatacaaaaattaggcag

SEQ ID NO: 92808 - DNA, 20 bp, Artificial Sequence
  Description of Artificial Sequence: Synthetic oligonucleotide
  Target: ATXN2; (+) strand; PAM type: YTN; PAM sequence: TTA
ggcagacatggtggcaggag

SEQ ID NO: 92809 - DNA, 20 bp, Artificial Sequence
  Description of Artificial Sequence: Synthetic oligonucleotide
  Target: ATXN2; (+) strand; PAM type: YTN; PAM sequence: TTG
cttgaatccgggaggtgtag

SEQ ID NO: 92810 - DNA, 20 bp, Artificial Sequence
  Description of Artificial Sequence: Synthetic oligonucleotide
  Target: ATXN2; (+) strand; PAM type: YTN; PAM sequence: CTT
gaatccgggaggtgtagggc

SEQ ID NO: 92811 - DNA, 20 bp, Artificial Sequence
  Description of Artificial Sequence: Synthetic oligonucleotide
  Target: ATXN2; (+) strand; PAM type: YTN; PAM sequence: TTG
aatccgggaggtgtagggcg

SEQ ID NO: 92812 - DNA, 20 bp, Artificial Sequence
  Description of Artificial Sequence: Synthetic oligonucleotide
  Target: ATXN2; (+) strand; PAM type: YTN; PAM sequence: CTA
cgctccagcctgggcaacaa

SEQ ID NO: 92813 - DNA, 20 bp, Artificial Sequence
  Description of Artificial Sequence: Synthetic oligonucleotide
  Target: ATXN2; (+) strand; PAM type: YTN; PAM sequence: CTC
cagcctgggcaacaaagtga

SEQ ID NO: 92814 - DNA, 20 bp, Artificial Sequence
  Description of Artificial Sequence: Synthetic oligonucleotide
  Target: ATXN2; (+) strand; PAM type: YTN; PAM sequence: CTG
ggcaacaaagtgagactctg

SEQ ID NO: 92815 - DNA, 20 bp, Artificial Sequence
  Description of Artificial Sequence: Synthetic oligonucleotide
  Target: ATXN2; (+) strand; PAM type: YTN; PAM sequence: CTC
tgtctcaaaaacaaaacaaa

SEQ ID NO: 92816 - DNA, 20 bp, Artificial Sequence
  Description of Artificial Sequence: Synthetic oligonucleotide
  Target: ATXN2; (+) strand; PAM type: YTN; PAM sequence: CTG
tctcaaaaacaaaacaaaac

SEQ ID NO: 92817 - DNA, 20 bp, Artificial Sequence
  Description of Artificial Sequence: Synthetic oligonucleotide
  Target: ATXN2; (+) strand; PAM type: YTN; PAM sequence: CTC
aaaaacaaaacaaaacaaaa

SEQ ID NO: 92818 - DNA, 20 bp, Artificial Sequence
  Description of Artificial Sequence: Synthetic oligonucleotide
  Target: ATXN2; (+) strand; PAM type: YTN; PAM sequence: CTC
acaactataatttcagcatt

SEQ ID NO: 92819 - DNA, 20 bp, Artificial Sequence
  Description of Artificial Sequence: Synthetic oligonucleotide
  Target: ATXN2; (+) strand; PAM type: YTN; PAM sequence: CTA
taatttcagcattttgggaa

SEQ ID NO: 92820 - DNA, 20 bp, Artificial Sequence
  Description of Artificial Sequence: Synthetic oligonucleotide
  Target: ATXN2; (+) strand; PAM type: YTN; PAM sequence: TTT
cagcattttgggaagccaag

SEQ ID NO: 92821 - DNA, 20 bp, Artificial Sequence
  Description of Artificial Sequence: Synthetic oligonucleotide
  Target: ATXN2; (+) strand; PAM type: YTN; PAM sequence: TTC
agcattttgggaagccaagg

SEQ ID NO: 92822 - DNA, 20 bp, Artificial Sequence
  Description of Artificial Sequence: Synthetic oligonucleotide
  Target: ATXN2; (+) strand; PAM type: YTN; PAM sequence: TTT
tgggaagccaaggtgggagg

SEQ ID NO: 92823 - DNA, 20 bp, Artificial Sequence
  Description of Artificial Sequence: Synthetic oligonucleotide
  Target: ATXN2; (+) strand; PAM type: YTN; PAM sequence: TTT
gggaagccaaggtgggagga

SEQ ID NO: 92824 - DNA, 20 bp, Artificial Sequence
  Description of Artificial Sequence: Synthetic oligonucleotide
  Target: ATXN2; (+) strand; PAM type: YTN; PAM sequence: TTG
ggaagccaaggtgggaggat

SEQ ID NO: 92825 - DNA, 20 bp, Artificial Sequence
  Description of Artificial Sequence: Synthetic oligonucleotide
  Target: ATXN2; (+) strand; PAM type: YTN; PAM sequence: TTG
cttgagcccaggagttcgag

SEQ ID NO: 92826 - DNA, 20 bp, Artificial Sequence
  Description of Artificial Sequence: Synthetic oligonucleotide
  Target: ATXN2; (+) strand; PAM type: YTN; PAM sequence: CTT
gagcccaggagttcgagacc

SEQ ID NO: 92827 - DNA, 20 bp, Artificial Sequence
  Description of Artificial Sequence: Synthetic oligonucleotide
  Target: ATXN2; (+) strand; PAM type: YTN; PAM sequence: TTG
agcccaggagttcgagacca

SEQ ID NO: 92828 - DNA, 20 bp, Artificial Sequence
  Description of Artificial Sequence: Synthetic oligonucleotide
  Target: ATXN2; (+) strand; PAM type: YTN; PAM sequence: TTC
gagaccagcctgggccaaac

SEQ ID NO: 92829 - DNA, 20 bp, Artificial Sequence
  Description of Artificial Sequence: Synthetic oligonucleotide
  Target: ATXN2; (+) strand; PAM type: YTN; PAM sequence: CTG
ggccaaacagcaagacctca

SEQ ID NO: 92830 - DNA, 20 bp, Artificial Sequence
  Description of Artificial Sequence: Synthetic oligonucleotide
  Target: ATXN2; (+) strand; PAM type: YTN; PAM sequence: CTC
atcgttatttatgaatggca

SEQ ID NO: 92831 - DNA, 20 bp, Artificial Sequence
  Description of Artificial Sequence: Synthetic oligonucleotide
  Target: ATXN2; (+) strand; PAM type: YTN; PAM sequence: TTA
tttatgaatggcaaacaggt

SEQ ID NO: 92832 - DNA, 20 bp, Artificial Sequence
  Description of Artificial Sequence: Synthetic oligonucleotide
  Target: ATXN2; (+) strand; PAM type: YTN; PAM sequence: TTT
atgaatggcaaacaggtata

SEQ ID NO: 92833 - DNA, 20 bp, Artificial Sequence
  Description of Artificial Sequence: Synthetic oligonucleotide
  Target: ATXN2; (+) strand; PAM type: YTN; PAM sequence: TTA
tgaatggcaaacaggtatat

SEQ ID NO: 92834 - DNA, 20 bp, Artificial Sequence
  Description of Artificial Sequence: Synthetic oligonucleotide
  Target: ATXN2; (+) strand; PAM type: YTN; PAM sequence: TTC
aatactactgatcaccagaa

SEQ ID NO: 92835 - DNA, 20 bp, Artificial Sequence
  Description of Artificial Sequence: Synthetic oligonucleotide
  Target: ATXN2; (+) strand; PAM type: YTN; PAM sequence: CTA
ctgatcaccagaaaaatgga

SEQ ID NO: 92836 - DNA, 20 bp, Artificial Sequence
  Description of Artificial Sequence: Synthetic oligonucleotide
  Target: ATXN2; (+) strand; PAM type: YTN; PAM sequence: CTG
atcaccagaaaaatggaaat

SEQ ID NO: 92837 - DNA, 20 bp, Artificial Sequence
  Description of Artificial Sequence: Synthetic oligonucleotide
  Target: ATXN2; (+) strand; PAM type: YTN; PAM sequence: TTA
aaactacaacaagatatcat

SEQ ID NO: 92838 - DNA, 20 bp, Artificial Sequence
  Description of Artificial Sequence: Synthetic oligonucleotide
  Target: ATXN2; (+) strand; PAM type: YTN; PAM sequence: CTA
caacaagatatcatctcacc

SEQ ID NO: 92839 - DNA, 20 bp, Artificial Sequence
  Description of Artificial Sequence: Synthetic oligonucleotide
  Target: ATXN2; (+) strand; PAM type: YTN; PAM sequence: CTC
accccagttaaaatggcttt

SEQ ID NO: 92840 - DNA, 20 bp, Artificial Sequence
  Description of Artificial Sequence: Synthetic oligonucleotide
  Target: ATXN2; (+) strand; PAM type: YTN; PAM sequence: TTA
aaatggcttttatccaaaag

SEQ ID NO: 92841 - DNA, 20 bp, Artificial Sequence
  Description of Artificial Sequence: Synthetic oligonucleotide
  Target: ATXN2; (+) strand; PAM type: YTN; PAM sequence: CTT
ttatccaaaagacaggcaat

SEQ ID NO: 92842 - DNA, 20 bp, Artificial Sequence
  Description of Artificial Sequence: Synthetic oligonucleotide
  Target: ATXN2; (+) strand; PAM type: YTN; PAM sequence: TTT
tatccaaaagacaggcaata

SEQ ID NO: 92843 - DNA, 20 bp, Artificial Sequence
  Description of Artificial Sequence: Synthetic oligonucleotide
  Target: ATXN2; (+) strand; PAM type: YTN; PAM sequence: TTT
atccaaaagacaggcaataa

SEQ ID NO: 92844 - DNA, 20 bp, Artificial Sequence
  Description of Artificial Sequence: Synthetic oligonucleotide
  Target: ATXN2; (+) strand; PAM type: YTN; PAM sequence: TTA
tccaaaagacaggcaataac

SEQ ID NO: 92845 - DNA, 20 bp, Artificial Sequence
  Description of Artificial Sequence: Synthetic oligonucleotide
  Target: ATXN2; (+) strand; PAM type: YTN; PAM sequence: CTG
gtaacgatgtggataaaggg

SEQ ID NO: 92846 - DNA, 20 bp, Artificial Sequence
  Description of Artificial Sequence: Synthetic oligonucleotide
  Target: ATXN2; (+) strand; PAM type: YTN; PAM sequence: CTT
cacacactgttggtggacat

SEQ ID NO: 92847 - DNA, 20 bp, Artificial Sequence
  Description of Artificial Sequence: Synthetic oligonucleotide
  Target: ATXN2; (+) strand; PAM type: YTN; PAM sequence: TTC
acacactgttggtggacatg

SEQ ID NO: 92848 - DNA, 20 bp, Artificial Sequence
  Description of Artificial Sequence: Synthetic oligonucleotide
  Target: ATXN2; (+) strand; PAM type: YTN; PAM sequence: CTG
ttggtggacatgtaaattgg

SEQ ID NO: 92849 - DNA, 20 bp, Artificial Sequence
  Description of Artificial Sequence: Synthetic oligonucleotide
  Target: ATXN2; (+) strand; PAM type: YTN; PAM sequence: TTG
gtggacatgtaaattggtaa

SEQ ID NO: 92850 - DNA, 20 bp, Artificial Sequence
  Description of Artificial Sequence: Synthetic oligonucleotide
  Target: ATXN2; (+) strand; PAM type: YTN; PAM sequence: TTG
gtaaaaccactatggagaac

SEQ ID NO: 92851 - DNA, 20 bp, Artificial Sequence
  Description of Artificial Sequence: Synthetic oligonucleotide
  Target: ATXN2; (+) strand; PAM type: YTN; PAM sequence: CTA
tggagaacagtatggaaatt

SEQ ID NO: 92852 - DNA, 20 bp, Artificial Sequence
  Description of Artificial Sequence: Synthetic oligonucleotide
  Target: ATXN2; (+) strand; PAM type: YTN; PAM sequence: TTC
ctcaaaaaactaaaaataga

SEQ ID NO: 92853 - DNA, 20 bp, Artificial Sequence
  Description of Artificial Sequence: Synthetic oligonucleotide
  Target: ATXN2; (+) strand; PAM type: YTN; PAM sequence: CTC
aaaaaactaaaaatagagct

SEQ ID NO: 92854 - DNA, 20 bp, Artificial Sequence
  Description of Artificial Sequence: Synthetic oligonucleotide
  Target: ATXN2; (+) strand; PAM type: YTN; PAM sequence: CTA
aaaatagagctaccatatga

SEQ ID NO: 92855 - DNA, 20 bp, Artificial Sequence
  Description of Artificial Sequence: Synthetic oligonucleotide
  Target: ATXN2; (+) strand; PAM type: YTN; PAM sequence: CTA
ccatatgatccagcaattgc

SEQ ID NO: 92856 - DNA, 20 bp, Artificial Sequence
  Description of Artificial Sequence: Synthetic oligonucleotide
  Target: ATXN2; (+) strand; PAM type: YTN; PAM sequence: TTG
cactgctaggtatatactca

SEQ ID NO: 92857 - DNA, 20 bp, Artificial Sequence
  Description of Artificial Sequence: Synthetic oligonucleotide
  Target: ATXN2; (+) strand; PAM type: YTN; PAM sequence: CTG
ctaggtatatactcagaaag

SEQ ID NO: 92858 - DNA, 20 bp, Artificial Sequence
  Description of Artificial Sequence: Synthetic oligonucleotide
  Target: ATXN2; (+) strand; PAM type: YTN; PAM sequence: CTA
ggtatatactcagaaaggaa

SEQ ID NO: 92859 - DNA, 20 bp, Artificial Sequence
  Description of Artificial Sequence: Synthetic oligonucleotide
  Target: ATXN2; (+) strand; PAM type: YTN; PAM sequence: CTC
agaaaggaaatcagtttatt

SEQ ID NO: 92860 - DNA, 20 bp, Artificial Sequence
  Description of Artificial Sequence: Synthetic oligonucleotide
  Target: ATXN2; (+) strand; PAM type: YTN; PAM sequence: TTT
attgaaggaatatctgcact

SEQ ID NO: 92861 - DNA, 20 bp, Artificial Sequence
  Description of Artificial Sequence: Synthetic oligonucleotide
  Target: ATXN2; (+) strand; PAM type: YTN; PAM sequence: TTA
ttgaaggaatatctgcactc

SEQ ID NO: 92862 - DNA, 20 bp, Artificial Sequence
  Description of Artificial Sequence: Synthetic oligonucleotide
  Target: ATXN2; (+) strand; PAM type: YTN; PAM sequence: TTG
aaggaatatctgcactccca

SEQ ID NO: 92863 - DNA, 20 bp, Artificial Sequence
  Description of Artificial Sequence: Synthetic oligonucleotide
  Target: ATXN2; (+) strand; PAM type: YTN; PAM sequence: CTG
cactcccatgtttactacgg

SEQ ID NO: 92864 - DNA, 20 bp, Artificial Sequence
  Description of Artificial Sequence: Synthetic oligonucleotide
  Target: ATXN2; (+) strand; PAM type: YTN; PAM sequence: CTC
ccatgtttactacggcacta

SEQ ID NO: 92865 - DNA, 20 bp, Artificial Sequence
  Description of Artificial Sequence: Synthetic oligonucleotide
  Target: ATXN2; (+) strand; PAM type: YTN; PAM sequence: TTT
actacggcactatatacaca

SEQ ID NO: 92866 - DNA, 20 bp, Artificial Sequence
  Description of Artificial Sequence: Synthetic oligonucleotide
  Target: ATXN2; (+) strand; PAM type: YTN; PAM sequence: TTA
ctacggcactatatacacaa

SEQ ID NO: 92867 - DNA, 20 bp, Artificial Sequence
  Description of Artificial Sequence: Synthetic oligonucleotide
  Target: ATXN2; (+) strand; PAM type: YTN; PAM sequence: CTA
cggcactatatacacaacag

SEQ ID NO: 92868 - DNA, 20 bp, Artificial Sequence
  Description of Artificial Sequence: Synthetic oligonucleotide
  Target: ATXN2; (+) strand; PAM type: YTN; PAM sequence: CTA
tatacacaacagccaagatt

SEQ ID NO: 92869 - DNA, 20 bp, Artificial Sequence
  Description of Artificial Sequence: Synthetic oligonucleotide
  Target: ATXN2; (+) strand; PAM type: YTN; PAM sequence: TTT
ggaatcaacctacgtgtcca

SEQ ID NO: 92870 - DNA, 20 bp, Artificial Sequence
  Description of Artificial Sequence: Synthetic oligonucleotide
  Target: ATXN2; (+) strand; PAM type: YTN; PAM sequence: TTG
gaatcaacctacgtgtccac

SEQ ID NO: 92871 - DNA, 20 bp, Artificial Sequence
  Description of Artificial Sequence: Synthetic oligonucleotide
  Target: ATXN2; (+) strand; PAM type: YTN; PAM sequence: CTA
cgtgtccactgacagacaaa

SEQ ID NO: 92872 - DNA, 20 bp, Artificial Sequence
  Description of Artificial Sequence: Synthetic oligonucleotide
  Target: ATXN2; (+) strand; PAM type: YTN; PAM sequence: CTG
acagacaaatggagaaagaa

SEQ ID NO: 92873 - DNA, 20 bp, Artificial Sequence
  Description of Artificial Sequence: Synthetic oligonucleotide
  Target: ATXN2; (+) strand; PAM type: YTN; PAM sequence: TTA
ccattcagccataaaaaaga

SEQ ID NO: 92874 - DNA, 20 bp, Artificial Sequence
  Description of Artificial Sequence: Synthetic oligonucleotide
  Target: ATXN2; (+) strand; PAM type: YTN; PAM sequence: TTC
agccataaaaaagaatgaga

SEQ ID NO: 92875 - DNA, 20 bp, Artificial Sequence
  Description of Artificial Sequence: Synthetic oligonucleotide
  Target: ATXN2; (+) strand; PAM type: YTN; PAM sequence: CTG
tcatttgcagcaatgtagat

SEQ ID NO: 92876 - DNA, 20 bp, Artificial Sequence
  Description of Artificial Sequence: Synthetic oligonucleotide
  Target: ATXN2; (+) strand; PAM type: YTN; PAM sequence: TTT
gcagcaatgtagatggcact

SEQ ID NO: 92877 - DNA, 20 bp, Artificial Sequence
  Description of Artificial Sequence: Synthetic oligonucleotide
  Target: ATXN2; (+) strand; PAM type: YTN; PAM sequence: TTG
cagcaatgtagatggcactg

SEQ ID NO: 92878 - DNA, 20 bp, Artificial Sequence
  Description of Artificial Sequence: Synthetic oligonucleotide
  Target: ATXN2; (+) strand; PAM type: YTN; PAM sequence: CTG
gaggacattatgttaagtaa

SEQ ID NO: 92879 - DNA, 20 bp, Artificial Sequence
  Description of Artificial Sequence: Synthetic oligonucleotide
  Target: ATXN2; (+) strand; PAM type: YTN; PAM sequence: TTA
tgttaagtaaaataagccag

SEQ ID NO: 92880 - DNA, 20 bp, Artificial Sequence
  Description of Artificial Sequence: Synthetic oligonucleotide
  Target: ATXN2; (+) strand; PAM type: YTN; PAM sequence: TTA
agtaaaataagccagggaca

SEQ ID NO: 92881 - DNA, 20 bp, Artificial Sequence
  Description of Artificial Sequence: Synthetic oligonucleotide
  Target: ATXN2; (+) strand; PAM type: YTN; PAM sequence: CTT
tgcatattcttactcgtttg

SEQ ID NO: 92882 - DNA, 20 bp, Artificial Sequence
  Description of Artificial Sequence: Synthetic oligonucleotide
  Target: ATXN2; (+) strand; PAM type: YTN; PAM sequence: TTT
gcatattcttactcgtttgc

SEQ ID NO: 92883 - DNA, 20 bp, Artificial Sequence
  Description of Artificial Sequence: Synthetic oligonucleotide
  Target: ATXN2; (+) strand; PAM type: YTN; PAM sequence: TTG
catattcttactcgtttgca

SEQ ID NO: 92884 - DNA, 20 bp, Artificial Sequence
  Description of Artificial Sequence: Synthetic oligonucleotide
  Target: ATXN2; (+) strand; PAM type: YTN; PAM sequence: TTC
ttactcgtttgcaggcacta

SEQ ID NO: 92885 - DNA, 20 bp, Artificial Sequence
  Description of Artificial Sequence: Synthetic oligonucleotide
  Target: ATXN2; (+) strand; PAM type: YTN; PAM sequence: CTT
actcgtttgcaggcactaaa

SEQ ID NO: 92886 - DNA, 20 bp, Artificial Sequence
  Description of Artificial Sequence: Synthetic oligonucleotide
  Target: ATXN2; (+) strand; PAM type: YTN; PAM sequence: TTA
ctcgtttgcaggcactaaaa

SEQ ID NO: 92887 - DNA, 20 bp, Artificial Sequence
  Description of Artificial Sequence: Synthetic oligonucleotide
  Target: ATXN2; (+) strand; PAM type: YTN; PAM sequence: CTC
gtttgcaggcactaaaaata

SEQ ID NO: 92888 - DNA, 20 bp, Artificial Sequence
  Description of Artificial Sequence: Synthetic oligonucleotide
  Target: ATXN2; (+) strand; PAM type: YTN; PAM sequence: TTT
gcaggcactaaaaataaaaa

SEQ ID NO: 92889 - DNA, 20 bp, Artificial Sequence
  Description of Artificial Sequence: Synthetic oligonucleotide
  Target: ATXN2; (+) strand; PAM type: YTN; PAM sequence: TTG
caggcactaaaaataaaaac

SEQ ID NO: 92890 - DNA, 20 bp, Artificial Sequence
  Description of Artificial Sequence: Synthetic oligonucleotide
  Target: ATXN2; (+) strand; PAM type: YTN; PAM sequence: CTA
aaaataaaaacaattgaaca

SEQ ID NO: 92891 - DNA, 20 bp, Artificial Sequence
  Description of Artificial Sequence: Synthetic oligonucleotide
  Target: ATXN2; (+) strand; PAM type: YTN; PAM sequence: TTG
aacacatggagatagcagaa

SEQ ID NO: 92892 - DNA, 20 bp, Artificial Sequence
  Description of Artificial Sequence: Synthetic oligonucleotide
  Target: ATXN2; (+) strand; PAM type: YTN; PAM sequence: TTA
ccagaagttgggaagggtaa

SEQ ID NO: 92893 - DNA, 20 bp, Artificial Sequence
  Description of Artificial Sequence: Synthetic oligonucleotide
  Target: ATXN2; (+) strand; PAM type: YTN; PAM sequence: TTG
ggaagggtaatggggagaag

SEQ ID NO: 92894 - DNA, 20 bp, Artificial Sequence
  Description of Artificial Sequence: Synthetic oligonucleotide
  Target: ATXN2; (+) strand; PAM type: YTN; PAM sequence: TTA
gtgggtgcaaagaaaattta

SEQ ID NO: 92895 - DNA, 20 bp, Artificial Sequence
  Description of Artificial Sequence: Synthetic oligonucleotide
  Target: ATXN2; (+) strand; PAM type: YTN; PAM sequence: TTT
agaaagaacgaataagaact

SEQ ID NO: 92896 - DNA, 20 bp, Artificial Sequence
  Description of Artificial Sequence: Synthetic oligonucleotide
  Target: ATXN2; (+) strand; PAM type: YTN; PAM sequence: TTA
gaaagaacgaataagaactc

SEQ ID NO: 92897 - DNA, 20 bp, Artificial Sequence
  Description of Artificial Sequence: Synthetic oligonucleotide
  Target: ATXN2; (+) strand; PAM type: YTN; PAM sequence: CTC
tgcaggaccggaggcagaaa

SEQ ID NO: 92898 - DNA, 20 bp, Artificial Sequence
  Description of Artificial Sequence: Synthetic oligonucleotide
  Target: ATXN2; (+) strand; PAM type: YTN; PAM sequence: CTG
caggaccggaggcagaaatg

SEQ ID NO: 92899 - DNA, 20 bp, Artificial Sequence
  Description of Artificial Sequence: Synthetic oligonucleotide
  Target: ATXN2; (+) strand; PAM type: YTN; PAM sequence: TTA
aaatgatttaaaataatttt

SEQ ID NO: 92900 - DNA, 20 bp, Artificial Sequence
  Description of Artificial Sequence: Synthetic oligonucleotide
  Target: ATXN2; (+) strand; PAM type: YTN; PAM sequence: TTT
aaaataattttaaaggccgg

SEQ ID NO: 92901 - DNA, 20 bp, Artificial Sequence
  Description of Artificial Sequence: Synthetic oligonucleotide
  Target: ATXN2; (+) strand; PAM type: YTN; PAM sequence: TTA
aaataattttaaaggccggg

SEQ ID NO: 92902 - DNA, 20 bp, Artificial Sequence
  Description of Artificial Sequence: Synthetic oligonucleotide
  Target: ATXN2; (+) strand; PAM type: YTN; PAM sequence: TTT
taaaggccgggcacggtggc

SEQ ID NO: 92903 - DNA, 20 bp, Artificial Sequence
  Description of Artificial Sequence: Synthetic oligonucleotide
  Target: ATXN2; (+) strand; PAM type: YTN; PAM sequence: TTT
aaaggccgggcacggtggct

SEQ ID NO: 92904 - DNA, 20 bp, Artificial Sequence
  Description of Artificial Sequence: Synthetic oligonucleotide
  Target: ATXN2; (+) strand; PAM type: YTN; PAM sequence: TTA
aaggccgggcacggtggctc

SEQ ID NO: 92905 - DNA, 20 bp, Artificial Sequence
  Description of Artificial Sequence: Synthetic oligonucleotide
  Target: ATXN2; (+) strand; PAM type: YTN; PAM sequence: CTC
acgcctgcaaccccagcact

SEQ ID NO: 92906 - DNA, 20 bp, Artificial Sequence
  Description of Artificial Sequence: Synthetic oligonucleotide
  Target: ATXN2; (+) strand; PAM type: YTN; PAM sequence: CTG
caaccccagcactttgggag

SEQ ID NO: 92907 - DNA, 20 bp, Artificial Sequence
  Description of Artificial Sequence: Synthetic oligonucleotide
  Target: ATXN2; (+) strand; PAM type: YTN; PAM sequence: CTT
tgggaggctgtggcagccgg

SEQ ID NO: 92908 - DNA, 20 bp, Artificial Sequence
  Description of Artificial Sequence: Synthetic oligonucleotide
  Target: ATXN2; (+) strand; PAM type: YTN; PAM sequence: TTT
gggaggctgtggcagccgga

SEQ ID NO: 92909 - DNA, 20 bp, Artificial Sequence
  Description of Artificial Sequence: Synthetic oligonucleotide
  Target: ATXN2; (+) strand; PAM type: YTN; PAM sequence: TTG
ggaggctgtggcagccggat

SEQ ID NO: 92910 - DNA, 20 bp, Artificial Sequence
  Description of Artificial Sequence: Synthetic oligonucleotide
  Target: ATXN2; (+) strand; PAM type: YTN; PAM sequence: CTG
tggcagccggatcacaaggt

SEQ ID NO: 92911 - DNA, 20 bp, Artificial Sequence
  Description of Artificial Sequence: Synthetic oligonucleotide
  Target: ATXN2; (+) strand; PAM type: YTN; PAM sequence: CTC
tactaaaaatacaaaaatta

SEQ ID NO: 92912 - DNA, 20 bp, Artificial Sequence
  Description of Artificial Sequence: Synthetic oligonucleotide
  Target: ATXN2; (+) strand; PAM type: YTN; PAM sequence: CTA
ctaaaaatacaaaaattagc

SEQ ID NO: 92913 - DNA, 20 bp, Artificial Sequence
  Description of Artificial Sequence: Synthetic oligonucleotide
  Target: ATXN2; (+) strand; PAM type: YTN; PAM sequence: CTA
aaaatacaaaaattagctgg

SEQ ID NO: 92914 - DNA, 20 bp, Artificial Sequence
  Description of Artificial Sequence: Synthetic oligonucleotide
  Target: ATXN2; (+) strand; PAM type: YTN; PAM sequence: TTA
gctgggcgtggtggcacgtg

SEQ ID NO: 92915 - DNA, 20 bp, Artificial Sequence
  Description of Artificial Sequence: Synthetic oligonucleotide
  Target: ATXN2; (+) strand; PAM type: YTN; PAM sequence: CTG
ggcgtggtggcacgtgcctg

SEQ ID NO: 92916 - DNA, 20 bp, Artificial Sequence
  Description of Artificial Sequence: Synthetic oligonucleotide
  Target: ATXN2; (+) strand; PAM type: YTN; PAM sequence: CTG
tagttccagctagtcaggag

SEQ ID NO: 92917 - DNA, 20 bp, Artificial Sequence
  Description of Artificial Sequence: Synthetic oligonucleotide
  Target: ATXN2; (+) strand; PAM type: YTN; PAM sequence: TTC
cagctagtcaggaggctgag

SEQ ID NO: 92918 - DNA, 20 bp, Artificial Sequence
  Description of Artificial Sequence: Synthetic oligonucleotide
  Target: ATXN2; (+) strand; PAM type: YTN; PAM sequence: CTA
gtcaggaggctgaggcagga

SEQ ID NO: 92919 - DNA, 20 bp, Artificial Sequence
  Description of Artificial Sequence: Synthetic oligonucleotide
  Target: ATXN2; (+) strand; PAM type: YTN; PAM sequence: CTG
aggcaggagaatcacttgaa

SEQ ID NO: 92920 - DNA, 20 bp, Artificial Sequence
  Description of Artificial Sequence: Synthetic oligonucleotide
  Target: ATXN2; (+) strand; PAM type: YTN; PAM sequence: CTT
gaaccctggaggcggaggtt

SEQ ID NO: 92921 - DNA, 20 bp, Artificial Sequence
  Description of Artificial Sequence: Synthetic oligonucleotide
  Target: ATXN2; (+) strand; PAM type: YTN; PAM sequence: TTG
aaccctggaggcggaggttg

SEQ ID NO: 92922 - DNA, 20 bp, Artificial Sequence
  Description of Artificial Sequence: Synthetic oligonucleotide
  Target: ATXN2; (+) strand; PAM type: YTN; PAM sequence: CTG
gaggcggaggttgcagtgag

SEQ ID NO: 92923 - DNA, 20 bp, Artificial Sequence
  Description of Artificial Sequence: Synthetic oligonucleotide
  Target: ATXN2; (+) strand; PAM type: YTN; PAM sequence: TTG
cagtgagttgagactgcgcc

SEQ ID NO: 92924 - DNA, 20 bp, Artificial Sequence
  Description of Artificial Sequence: Synthetic oligonucleotide
  Target: ATXN2; (+) strand; PAM type: YTN; PAM sequence: TTG
agactgcgccaccgcactcc

SEQ ID NO: 92925 - DNA, 20 bp, Artificial Sequence
  Description of Artificial Sequence: Synthetic oligonucleotide
  Target: ATXN2; (+) strand; PAM type: YTN; PAM sequence: CTG
cgccaccgcactccagcctg

SEQ ID NO: 92926 - DNA, 20 bp, Artificial Sequence
  Description of Artificial Sequence: Synthetic oligonucleotide
  Target: ATXN2; (+) strand; PAM type: YTN; PAM sequence: CTC
cagcctggcgacagagtgag

SEQ ID NO: 92927 - DNA, 20 bp, Artificial Sequence
  Description of Artificial Sequence: Synthetic oligonucleotide
  Target: ATXN2; (+) strand; PAM type: YTN; PAM sequence: CTG
gcgacagagtgagactccgt

SEQ ID NO: 92928 - DNA, 20 bp, Artificial Sequence
  Description of Artificial Sequence: Synthetic oligonucleotide
  Target: ATXN2; (+) strand; PAM type: YTN; PAM sequence: CTC
cgtctaaaaataaataaata

SEQ ID NO: 92929 - DNA, 20 bp, Artificial Sequence
  Description of Artificial Sequence: Synthetic oligonucleotide
  Target: ATXN2; (+) strand; PAM type: YTN; PAM sequence: CTA
aaaataaataaataaaataa

SEQ ID NO: 92930 - DNA, 20 bp, Artificial Sequence
  Description of Artificial Sequence: Synthetic oligonucleotide
  Target: ATXN2; (+) strand; PAM type: YTN; PAM sequence: TTT
aaaatttaaaaagttaaata

SEQ ID NO: 92931 - DNA, 20 bp, Artificial Sequence
  Description of Artificial Sequence: Synthetic oligonucleotide
  Target: ATXN2; (+) strand; PAM type: YTN; PAM sequence: TTA
aaatttaaaaagttaaataa

SEQ ID NO: 92932 - DNA, 20 bp, Artificial Sequence
  Description of Artificial Sequence: Synthetic oligonucleotide
  Target: ATXN2; (+) strand; PAM type: YTN; PAM sequence: TTT
aaaaagttaaataaagaatg

SEQ ID NO: 92933 - DNA, 20 bp, Artificial Sequence
  Description of Artificial Sequence: Synthetic oligonucleotide
  Target: ATXN2; (+) strand; PAM type: YTN; PAM sequence: TTA
aaaagttaaataaagaatga

SEQ ID NO: 92934 - DNA, 20 bp, Artificial Sequence
  Description of Artificial Sequence: Synthetic oligonucleotide
  Target: ATXN2; (+) strand; PAM type: YTN; PAM sequence: TTA
aataaagaatgaataagatc

SEQ ID NO: 92935 - DNA, 20 bp, Artificial Sequence
  Description of Artificial Sequence: Synthetic oligonucleotide
  Target: ATXN2; (+) strand; PAM type: YTN; PAM sequence: CTA
gtatttgacaacaaagcagg

SEQ ID NO: 92936 - DNA, 20 bp, Artificial Sequence
  Description of Artificial Sequence: Synthetic oligonucleotide
  Target: ATXN2; (+) strand; PAM type: YTN; PAM sequence: TTT
gacaacaaagcagggtgact

SEQ ID NO: 92937 - DNA, 20 bp, Artificial Sequence
  Description of Artificial Sequence: Synthetic oligonucleotide
  Target: ATXN2; (+) strand; PAM type: YTN; PAM sequence: TTG
acaacaaagcagggtgacta

SEQ ID NO: 92938 - DNA, 20 bp, Artificial Sequence
  Description of Artificial Sequence: Synthetic oligonucleotide
  Target: ATXN2; (+) strand; PAM type: YTN; PAM sequence: CTA
cagtcagcattaatttgttg

SEQ ID NO: 92939 - DNA, 20 bp, Artificial Sequence
  Description of Artificial Sequence: Synthetic oligonucleotide
  Target: ATXN2; (+) strand; PAM type: YTN; PAM sequence: TTA
atttgttgtactttttagaa

SEQ ID NO: 92940 - DNA, 20 bp, Artificial Sequence
  Description of Artificial Sequence: Synthetic oligonucleotide
  Target: ATXN2; (+) strand; PAM type: YTN; PAM sequence: TTT
gttgtactttttagaataac

SEQ ID NO: 92941 - DNA, 20 bp, Artificial Sequence
  Description of Artificial Sequence: Synthetic oligonucleotide
  Target: ATXN2; (+) strand; PAM type: YTN; PAM sequence: TTG
ttgtactttttagaataact

SEQ ID NO: 92942 - DNA, 20 bp, Artificial Sequence
  Description of Artificial Sequence: Synthetic oligonucleotide
  Target: ATXN2; (+) strand; PAM type: YTN; PAM sequence: TTG
tactttttagaataactgag

SEQ ID NO: 92943 - DNA, 20 bp, Artificial Sequence
  Description of Artificial Sequence: Synthetic oligonucleotide
  Target: ATXN2; (+) strand; PAM type: YTN; PAM sequence: CTT
tttagaataactgagggagt

SEQ ID NO: 92944 - DNA, 20 bp, Artificial Sequence
  Description of Artificial Sequence: Synthetic oligonucleotide
  Target: ATXN2; (+) strand; PAM type: YTN; PAM sequence: TTT
ttagaataactgagggagta

SEQ ID NO: 92945 - DNA, 20 bp, Artificial Sequence
  Description of Artificial Sequence: Synthetic oligonucleotide
  Target: ATXN2; (+) strand; PAM type: YTN; PAM sequence: TTT
tagaataactgagggagtac

SEQ ID NO: 92946 - DNA, 20 bp, Artificial Sequence
  Description of Artificial Sequence: Synthetic oligonucleotide
  Target: ATXN2; (+) strand; PAM type: YTN; PAM sequence: TTT
agaataactgagggagtaca

SEQ ID NO: 92947 - DNA, 20 bp, Artificial Sequence
  Description of Artificial Sequence: Synthetic oligonucleotide
  Target: ATXN2; (+) strand; PAM type: YTN; PAM sequence: TTA
gaataactgagggagtacaa

SEQ ID NO: 92948 - DNA, 20 bp, Artificial Sequence
  Description of Artificial Sequence: Synthetic oligonucleotide
  Target: ATXN2; (+) strand; PAM type: YTN; PAM sequence: CTG
agggagtacaattgcaacgt

SEQ ID NO: 92949 - DNA, 20 bp, Artificial Sequence
  Description of Artificial Sequence: Synthetic oligonucleotide
  Target: ATXN2; (+) strand; PAM type: YTN; PAM sequence: TTG
caacgttcattacacaaaga

SEQ ID NO: 92950 - DNA, 20 bp, Artificial Sequence
  Description of Artificial Sequence: Synthetic oligonucleotide
  Target: ATXN2; (+) strand; PAM type: YTN; PAM sequence: TTC
attacacaaagaaatgatga

SEQ ID NO: 92951 - DNA, 20 bp, Artificial Sequence
  Description of Artificial Sequence: Synthetic oligonucleotide
  Target: ATXN2; (+) strand; PAM type: YTN; PAM sequence: TTA
cacaaagaaatgatgaatga

SEQ ID NO: 92952 - DNA, 20 bp, Artificial Sequence
  Description of Artificial Sequence: Synthetic oligonucleotide
  Target: ATXN2; (+) strand; PAM type: YTN; PAM sequence: TTT
accctaatgtgattattaca

SEQ ID NO: 92953 - DNA, 20 bp, Artificial Sequence
  Description of Artificial Sequence: Synthetic oligonucleotide
  Target: ATXN2; (+) strand; PAM type: YTN; PAM sequence: TTA
ccctaatgtgattattacac

SEQ ID NO: 92954 - DNA, 20 bp, Artificial Sequence
  Description of Artificial Sequence: Synthetic oligonucleotide
  Target: ATXN2; (+) strand; PAM type: YTN; PAM sequence: CTA
atgtgattattacacattat

SEQ ID NO: 92955 - DNA, 20 bp, Artificial Sequence
  Description of Artificial Sequence: Synthetic oligonucleotide
  Target: ATXN2; (+) strand; PAM type: YTN; PAM sequence: TTA
ttacacattatatgccttta

SEQ ID NO: 92956 - DNA, 20 bp, Artificial Sequence
  Description of Artificial Sequence: Synthetic oligonucleotide
  Target: ATXN2; (+) strand; PAM type: YTN; PAM sequence: TTA
cacattatatgcctttatct

SEQ ID NO: 92957 - DNA, 20 bp, Artificial Sequence
  Description of Artificial Sequence: Synthetic oligonucleotide
  Target: ATXN2; (+) strand; PAM type: YTN; PAM sequence: TTA
tatgcctttatctaaatatc

SEQ ID NO: 92958 - DNA, 20 bp, Artificial Sequence
  Description of Artificial Sequence: Synthetic oligonucleotide
  Target: ATXN2; (+) strand; PAM type: YTN; PAM sequence: CTT
tatctaaatatctcacagac

SEQ ID NO: 92959 - DNA, 20 bp, Artificial Sequence
  Description of Artificial Sequence: Synthetic oligonucleotide
  Target: ATXN2; (+) strand; PAM type: YTN; PAM sequence: TTT
atctaaatatctcacagacc

SEQ ID NO: 92960 - DNA, 20 bp, Artificial Sequence
  Description of Artificial Sequence: Synthetic oligonucleotide
  Target: ATXN2; (+) strand; PAM type: YTN; PAM sequence: TTA
tctaaatatctcacagaccc

SEQ ID NO: 92961 - DNA, 20 bp, Artificial Sequence
  Description of Artificial Sequence: Synthetic oligonucleotide
  Target: ATXN2; (+) strand; PAM type: YTN; PAM sequence: CTA
aatatctcacagaccctatg

SEQ ID NO: 92962 - DNA, 20 bp, Artificial Sequence
  Description of Artificial Sequence: Synthetic oligonucleotide
  Target: ATXN2; (+) strand; PAM type: YTN; PAM sequence: CTC
acagaccctatgaataatac

SEQ ID NO: 92963 - DNA, 20 bp, Artificial Sequence
  Description of Artificial Sequence: Synthetic oligonucleotide
  Target: ATXN2; (+) strand; PAM type: YTN; PAM sequence: CTA
tgaataatacgtctactatg

SEQ ID NO: 92964 - DNA, 20 bp, Artificial Sequence
  Description of Artificial Sequence: Synthetic oligonucleotide
  Target: ATXN2; (+) strand; PAM type: YTN; PAM sequence: CTA
ctatgtacccataaaaaaat

SEQ ID NO: 92965 - DNA, 20 bp, Artificial Sequence
  Description of Artificial Sequence: Synthetic oligonucleotide
  Target: ATXN2; (+) strand; PAM type: YTN; PAM sequence: CTA
tgtacccataaaaaaataaa

SEQ ID NO: 92966 - DNA, 20 bp, Artificial Sequence
  Description of Artificial Sequence: Synthetic oligonucleotide
  Target: ATXN2; (+) strand; PAM type: YTN; PAM sequence: CTT
taaagtagactgcaaaacca

SEQ ID NO: 92967 - DNA, 20 bp, Artificial Sequence
  Description of Artificial Sequence: Synthetic oligonucleotide
  Target: ATXN2; (+) strand; PAM type: YTN; PAM sequence: TTT
aaagtagactgcaaaaccaa

SEQ ID NO: 92968 - DNA, 20 bp, Artificial Sequence
  Description of Artificial Sequence: Synthetic oligonucleotide
  Target: ATXN2; (+) strand; PAM type: YTN; PAM sequence: TTA
aagtagactgcaaaaccaag

SEQ ID NO: 92969 - DNA, 20 bp, Artificial Sequence
  Description of Artificial Sequence: Synthetic oligonucleotide
  Target: ATXN2; (+) strand; PAM type: YTN; PAM sequence: CTG
caaaaccaaggaccatcaaa

SEQ ID NO: 92970 - DNA, 20 bp, Artificial Sequence
  Description of Artificial Sequence: Synthetic oligonucleotide
  Target: ATXN2; (+) strand; PAM type: YTN; PAM sequence: TTA
gcaaaataagtgatgaggtt

SEQ ID NO: 92971 - DNA, 20 bp, Artificial Sequence
  Description of Artificial Sequence: Synthetic oligonucleotide
  Target: ATXN2; (+) strand; PAM type: YTN; PAM sequence: TTT
ttaagtttgcagaccagaaa

SEQ ID NO: 92972 - DNA, 20 bp, Artificial Sequence
  Description of Artificial Sequence: Synthetic oligonucleotide
  Target: ATXN2; (+) strand; PAM type: YTN; PAM sequence: TTT
taagtttgcagaccagaaaa

SEQ ID NO: 92973 - DNA, 20 bp, Artificial Sequence
  Description of Artificial Sequence: Synthetic oligonucleotide
  Target: ATXN2; (+) strand; PAM type: YTN; PAM sequence: TTT
aagtttgcagaccagaaaaa

SEQ ID NO: 92974 - DNA, 20 bp, Artificial Sequence
  Description of Artificial Sequence: Synthetic oligonucleotide
  Target: ATXN2; (+) strand; PAM type: YTN; PAM sequence: TTA
agtttgcagaccagaaaaaa

SEQ ID NO: 92975 - DNA, 20 bp, Artificial Sequence
  Description of Artificial Sequence: Synthetic oligonucleotide
  Target: ATXN2; (+) strand; PAM type: YTN; PAM sequence: TTT
gcagaccagaaaaaataaaa

SEQ ID NO: 92976 - DNA, 20 bp, Artificial Sequence
  Description of Artificial Sequence: Synthetic oligonucleotide
  Target: ATXN2; (+) strand; PAM type: YTN; PAM sequence: TTG
cagaccagaaaaaataaaat

SEQ ID NO: 92977 - DNA, 20 bp, Artificial Sequence
  Description of Artificial Sequence: Synthetic oligonucleotide
  Target: ATXN2; (+) strand; PAM type: YTN; PAM sequence: CTA
ccactggctgaagatgattt

SEQ ID NO: 92978 - DNA, 20 bp, Artificial Sequence
  Description of Artificial Sequence: Synthetic oligonucleotide
  Target: ATXN2; (+) strand; PAM type: YTN; PAM sequence: CTG
gctgaagatgatttaagatg

SEQ ID NO: 92979 - DNA, 20 bp, Artificial Sequence
  Description of Artificial Sequence: Synthetic oligonucleotide
  Target: ATXN2; (+) strand; PAM type: YTN; PAM sequence: CTG
aagatgatttaagatggcat

SEQ ID NO: 92980 - DNA, 20 bp, Artificial Sequence
  Description of Artificial Sequence: Synthetic oligonucleotide
  Target: ATXN2; (+) strand; PAM type: YTN; PAM sequence: TTT
aagatggcatcctctacaaa

SEQ ID NO: 92981 - DNA, 20 bp, Artificial Sequence
  Description of Artificial Sequence: Synthetic oligonucleotide
  Target: ATXN2; (+) strand; PAM type: YTN; PAM sequence: TTA
agatggcatcctctacaaaa

SEQ ID NO: 92982 - DNA, 20 bp, Artificial Sequence
  Description of Artificial Sequence: Synthetic oligonucleotide
  Target: ATXN2; (+) strand; PAM type: YTN; PAM sequence: CTC
tacaaaagaaagaaaacagg

SEQ ID NO: 92983 - DNA, 20 bp, Artificial Sequence
  Description of Artificial Sequence: Synthetic oligonucleotide
  Target: ATXN2; (+) strand; PAM type: YTN; PAM sequence: CTA
caaaagaaagaaaacaggaa

SEQ ID NO: 92984 - DNA, 20 bp, Artificial Sequence
  Description of Artificial Sequence: Synthetic oligonucleotide
  Target: ATXN2; (+) strand; PAM type: YTN; PAM sequence: CTG
aaaaaagggggagcaagtac

SEQ ID NO: 92985 - DNA, 20 bp, Artificial Sequence
  Description of Artificial Sequence: Synthetic oligonucleotide
  Target: ATXN2; (+) strand; PAM type: YTN; PAM sequence: CTA
agccacaggttaggacaacg

SEQ ID NO: 92986 - DNA, 20 bp, Artificial Sequence
  Description of Artificial Sequence: Synthetic oligonucleotide
  Target: ATXN2; (+) strand; PAM type: YTN; PAM sequence: TTA
ggacaacggacctaagccac

SEQ ID NO: 92987 - DNA, 20 bp, Artificial Sequence
  Description of Artificial Sequence: Synthetic oligonucleotide
  Target: ATXN2; (+) strand; PAM type: YTN; PAM sequence: CTA
agccacagccccaggtggtg

SEQ ID NO: 92988 - DNA, 20 bp, Artificial Sequence
  Description of Artificial Sequence: Synthetic oligonucleotide
  Target: ATXN2; (+) strand; PAM type: YTN; PAM sequence: CTA
aagagaaacctacacagcca

SEQ ID NO: 92989 - DNA, 20 bp, Artificial Sequence
  Description of Artificial Sequence: Synthetic oligonucleotide
  Target: ATXN2; (+) strand; PAM type: YTN; PAM sequence: CTA
cacagccaaaaaggttgcct

SEQ ID NO: 92990 - DNA, 20 bp, Artificial Sequence
  Description of Artificial Sequence: Synthetic oligonucleotide
  Target: ATXN2; (+) strand; PAM type: YTN; PAM sequence: TTG
ccttaaaattagagagccaa

SEQ ID NO: 92991 - DNA, 20 bp, Artificial Sequence
  Description of Artificial Sequence: Synthetic oligonucleotide
  Target: ATXN2; (+) strand; PAM type: YTN; PAM sequence: CTT
aaaattagagagccaagata

SEQ ID NO: 92992 - DNA, 20 bp, Artificial Sequence
  Description of Artificial Sequence: Synthetic oligonucleotide
  Target: ATXN2; (+) strand; PAM type: YTN; PAM sequence: TTA
aaattagagagccaagatac

SEQ ID NO: 92993 - DNA, 20 bp, Artificial Sequence
  Description of Artificial Sequence: Synthetic oligonucleotide
  Target: ATXN2; (+) strand; PAM type: YTN; PAM sequence: TTA
gagagccaagatacctcttc

SEQ ID NO: 92994 - DNA, 20 bp, Artificial Sequence
  Description of Artificial Sequence: Synthetic oligonucleotide
  Target: ATXN2; (+) strand; PAM type: YTN; PAM sequence: CTC
ttcagcctcagtataggcaa

SEQ ID NO: 92995 - DNA, 20 bp, Artificial Sequence
  Description of Artificial Sequence: Synthetic oligonucleotide
  Target: ATXN2; (+) strand; PAM type: YTN; PAM sequence: CTT
cagcctcagtataggcaaac

SEQ ID NO: 92996 - DNA, 20 bp, Artificial Sequence
  Description of Artificial Sequence: Synthetic oligonucleotide
  Target: ATXN2; (+) strand; PAM type: YTN; PAM sequence: TTC
agcctcagtataggcaaacc

SEQ ID NO: 92997 - DNA, 20 bp, Artificial Sequence
  Description of Artificial Sequence: Synthetic oligonucleotide
  Target: ATXN2; (+) strand; PAM type: YTN; PAM sequence: CTC
agtataggcaaaccaatttc

SEQ ID NO: 92998 - DNA, 20 bp, Artificial Sequence
  Description of Artificial Sequence: Synthetic oligonucleotide
  Target: ATXN2; (+) strand; PAM type: YTN; PAM sequence: TTT
caatggtttcattaccaagg

SEQ ID NO: 92999 - DNA, 20 bp, Artificial Sequence
  Description of Artificial Sequence: Synthetic oligonucleotide
  Target: ATXN2; (+) strand; PAM type: YTN; PAM sequence: TTC
aatggtttcattaccaaggc

SEQ ID NO: 93000 - DNA, 20 bp, Artificial Sequence
  Description of Artificial Sequence: Synthetic oligonucleotide
  Target: ATXN2; (+) strand; PAM type: YTN; PAM sequence: TTT
cattaccaaggctcttggtg

SEQ ID NO: 93001 - DNA, 20 bp, Artificial Sequence
  Description of Artificial Sequence: Synthetic oligonucleotide
  Target: ATXN2; (+) strand; PAM type: YTN; PAM sequence: TTC
attaccaaggctcttggtgt

SEQ ID NO: 93002 - DNA, 20 bp, Artificial Sequence
  Description of Artificial Sequence: Synthetic oligonucleotide
  Target: ATXN2; (+) strand; PAM type: YTN; PAM sequence: TTA
ccaaggctcttggtgtcatg

SEQ ID NO: 93003 - DNA, 20 bp, Artificial Sequence
  Description of Artificial Sequence: Synthetic oligonucleotide
  Target: ATXN2; (+) strand; PAM type: YTN; PAM sequence: CTC
ttggtgtcatggcaaacagc

SEQ ID NO: 93004 - DNA, 20 bp, Artificial Sequence
  Description of Artificial Sequence: Synthetic oligonucleotide
  Target: ATXN2; (+) strand; PAM type: YTN; PAM sequence: CTT
ggtgtcatggcaaacagcat

SEQ ID NO: 93005 - DNA, 20 bp, Artificial Sequence
  Description of Artificial Sequence: Synthetic oligonucleotide
  Target: ATXN2; (+) strand; PAM type: YTN; PAM sequence: TTG
gtgtcatggcaaacagcatt

SEQ ID NO: 93006 - DNA, 20 bp, Artificial Sequence
  Description of Artificial Sequence: Synthetic oligonucleotide
  Target: ATXN2; (+) strand; PAM type: YTN; PAM sequence: TTA
tgcaactctggcgcatcgca

SEQ ID NO: 93007 - DNA, 20 bp, Artificial Sequence
  Description of Artificial Sequence: Synthetic oligonucleotide
  Target: ATXN2; (+) strand; PAM type: YTN; PAM sequence: CTC
tggcgcatcgcaagctttac

SEQ ID NO: 93008 - DNA, 20 bp, Artificial Sequence
  Description of Artificial Sequence: Synthetic oligonucleotide
  Target: ATXN2; (+) strand; PAM type: YTN; PAM sequence: CTG
gcgcatcgcaagctttactg

SEQ ID NO: 93009 - DNA, 20 bp, Artificial Sequence
  Description of Artificial Sequence: Synthetic oligonucleotide
  Target: ATXN2; (+) strand; PAM type: YTN; PAM sequence: CTT
tactgcattaccaatatagc

SEQ ID NO: 93010 - DNA, 20 bp, Artificial Sequence
  Description of Artificial Sequence: Synthetic oligonucleotide
  Target: ATXN2; (+) strand; PAM type: YTN; PAM sequence: TTT
actgcattaccaatatagct

SEQ ID NO: 93011 - DNA, 20 bp, Artificial Sequence
  Description of Artificial Sequence: Synthetic oligonucleotide
  Target: ATXN2; (+) strand; PAM type: YTN; PAM sequence: TTA
ctgcattaccaatatagcta

SEQ ID NO: 93012 - DNA, 20 bp, Artificial Sequence
  Description of Artificial Sequence: Synthetic oligonucleotide
  Target: ATXN2; (+) strand; PAM type: YTN; PAM sequence: CTG
cattaccaatatagctaaag

SEQ ID NO: 93013 - DNA, 20 bp, Artificial Sequence
  Description of Artificial Sequence: Synthetic oligonucleotide
  Target: ATXN2; (+) strand; PAM type: YTN; PAM sequence: TTA
ccaatatagctaaagagtca

SEQ ID NO: 93014 - DNA, 20 bp, Artificial Sequence
  Description of Artificial Sequence: Synthetic oligonucleotide
  Target: ATXN2; (+) strand; PAM type: YTN; PAM sequence: CTA
aagagtcaagtggctaaggg

SEQ ID NO: 93015 - DNA, 20 bp, Artificial Sequence
  Description of Artificial Sequence: Synthetic oligonucleotide
  Target: ATXN2; (+) strand; PAM type: YTN; PAM sequence: CTA
agggcaaatgttgacagggt

SEQ ID NO: 93016 - DNA, 20 bp, Artificial Sequence
  Description of Artificial Sequence: Synthetic oligonucleotide
  Target: ATXN2; (+) strand; PAM type: YTN; PAM sequence: TTG
acagggtatttatgtgggca

SEQ ID NO: 93017 - DNA, 20 bp, Artificial Sequence
  Description of Artificial Sequence: Synthetic oligonucleotide
  Target: ATXN2; (+) strand; PAM type: YTN; PAM sequence: TTT
atgtgggcacactggcaatt

SEQ ID NO: 93018 - DNA, 20 bp, Artificial Sequence
  Description of Artificial Sequence: Synthetic oligonucleotide
  Target: ATXN2; (+) strand; PAM type: YTN; PAM sequence: TTA
tgtgggcacactggcaattt

SEQ ID NO: 93019 - DNA, 20 bp, Artificial Sequence
  Description of Artificial Sequence: Synthetic oligonucleotide
  Target: ATXN2; (+) strand; PAM type: YTN; PAM sequence: CTG
gcaatttaagtcacgatgta

SEQ ID NO: 93020 - DNA, 20 bp, Artificial Sequence
  Description of Artificial Sequence: Synthetic oligonucleotide
  Target: ATXN2; (+) strand; PAM type: YTN; PAM sequence: TTT
aagtcacgatgtaggaactt

SEQ ID NO: 93021 - DNA, 20 bp, Artificial Sequence
  Description of Artificial Sequence: Synthetic oligonucleotide
  Target: ATXN2; (+) strand; PAM type: YTN; PAM sequence: TTA
agtcacgatgtaggaactta

SEQ ID NO: 93022 - DNA, 20 bp, Artificial Sequence
  Description of Artificial Sequence: Synthetic oligonucleotide
  Target: ATXN2; (+) strand; PAM type: YTN; PAM sequence: CTT
actacttaaactttcatttg

SEQ ID NO: 93023 - DNA, 20 bp, Artificial Sequence
  Description of Artificial Sequence: Synthetic oligonucleotide
  Target: ATXN2; (+) strand; PAM type: YTN; PAM sequence: TTA
ctacttaaactttcatttgt

SEQ ID NO: 93024 - DNA, 20 bp, Artificial Sequence
  Description of Artificial Sequence: Synthetic oligonucleotide
  Target: ATXN2; (+) strand; PAM type: YTN; PAM sequence: CTA
cttaaactttcatttgttca

SEQ ID NO: 93025 - DNA, 20 bp, Artificial Sequence
  Description of Artificial Sequence: Synthetic oligonucleotide
  Target: ATXN2; (+) strand; PAM type: YTN; PAM sequence: CTT
aaactttcatttgttcacaa

SEQ ID NO: 93026 - DNA, 20 bp, Artificial Sequence
  Description of Artificial Sequence: Synthetic oligonucleotide
  Target: ATXN2; (+) strand; PAM type: YTN; PAM sequence: TTA
aactttcatttgttcacaaa

SEQ ID NO: 93027 - DNA, 20 bp, Artificial Sequence
  Description of Artificial Sequence: Synthetic oligonucleotide
  Target: ATXN2; (+) strand; PAM type: YTN; PAM sequence: CTT
tcatttgttcacaaaaatct

SEQ ID NO: 93028 - DNA, 20 bp, Artificial Sequence
  Description of Artificial Sequence: Synthetic oligonucleotide
  Target: ATXN2; (+) strand; PAM type: YTN; PAM sequence: TTT
catttgttcacaaaaatctt

SEQ ID NO: 93029 - DNA, 20 bp, Artificial Sequence
  Description of Artificial Sequence: Synthetic oligonucleotide
  Target: ATXN2; (+) strand; PAM type: YTN; PAM sequence: TTC
atttgttcacaaaaatcttt

SEQ ID NO: 93030 - DNA, 20 bp, Artificial Sequence
  Description of Artificial Sequence: Synthetic oligonucleotide
  Target: ATXN2; (+) strand; PAM type: YTN; PAM sequence: TTT
gttcacaaaaatctttagta

SEQ ID NO: 93031 - DNA, 20 bp, Artificial Sequence
  Description of Artificial Sequence: Synthetic oligonucleotide
  Target: ATXN2; (+) strand; PAM type: YTN; PAM sequence: TTG
ttcacaaaaatctttagtag

SEQ ID NO: 93032 - DNA, 20 bp, Artificial Sequence
  Description of Artificial Sequence: Synthetic oligonucleotide
  Target: ATXN2; (+) strand; PAM type: YTN; PAM sequence: TTC
acaaaaatctttagtagagg

SEQ ID NO: 93033 - DNA, 20 bp, Artificial Sequence
  Description of Artificial Sequence: Synthetic oligonucleotide
  Target: ATXN2; (+) strand; PAM type: YTN; PAM sequence: CTT
tagtagaggcgatccacata

SEQ ID NO: 93034 - DNA, 20 bp, Artificial Sequence
  Description of Artificial Sequence: Synthetic oligonucleotide
  Target: ATXN2; (+) strand; PAM type: YTN; PAM sequence: TTT
agtagaggcgatccacataa

SEQ ID NO: 93035 - DNA, 20 bp, Artificial Sequence
  Description of Artificial Sequence: Synthetic oligonucleotide
  Target: ATXN2; (+) strand; PAM type: YTN; PAM sequence: TTA
gtagaggcgatccacataac

SEQ ID NO: 93036 - DNA, 20 bp, Artificial Sequence
  Description of Artificial Sequence: Synthetic oligonucleotide
  Target: ATXN2; (+) strand; PAM type: YTN; PAM sequence: CTA
tatatattgccaaggacttc

SEQ ID NO: 93037 - DNA, 20 bp, Artificial Sequence
  Description of Artificial Sequence: Synthetic oligonucleotide
  Target: ATXN2; (+) strand; PAM type: YTN; PAM sequence: TTG
ccaaggacttcggagtttaa

SEQ ID NO: 93038 - DNA, 20 bp, Artificial Sequence
  Description of Artificial Sequence: Synthetic oligonucleotide
  Target: ATXN2; (+) strand; PAM type: YTN; PAM sequence: CTT
cggagtttaattatcataag

SEQ ID NO: 93039 - DNA, 20 bp, Artificial Sequence
  Description of Artificial Sequence: Synthetic oligonucleotide
  Target: ATXN2; (+) strand; PAM type: YTN; PAM sequence: TTC
ggagtttaattatcataaga

SEQ ID NO: 93040 - DNA, 20 bp, Artificial Sequence
  Description of Artificial Sequence: Synthetic oligonucleotide
  Target: ATXN2; (+) strand; PAM type: YTN; PAM sequence: TTT
aattatcataagagttcttg

SEQ ID NO: 93041 - DNA, 20 bp, Artificial Sequence
  Description of Artificial Sequence: Synthetic oligonucleotide
  Target: ATXN2; (+) strand; PAM type: YTN; PAM sequence: TTA
attatcataagagttcttga

SEQ ID NO: 93042 - DNA, 20 bp, Artificial Sequence
  Description of Artificial Sequence: Synthetic oligonucleotide
  Target: ATXN2; (+) strand; PAM type: YTN; PAM sequence: TTA
tcataagagttcttgagtga

SEQ ID NO: 93043 - DNA, 20 bp, Artificial Sequence
  Description of Artificial Sequence: Synthetic oligonucleotide
  Target: ATXN2; (+) strand; PAM type: YTN; PAM sequence: TTC
ttgagtgaaggcaaaaatca

SEQ ID NO: 93044 - DNA, 20 bp, Artificial Sequence
  Description of Artificial Sequence: Synthetic oligonucleotide
  Target: ATXN2; (+) strand; PAM type: YTN; PAM sequence: CTT
gagtgaaggcaaaaatcaga

SEQ ID NO: 93045 - DNA, 20 bp, Artificial Sequence
  Description of Artificial Sequence: Synthetic oligonucleotide
  Target: ATXN2; (+) strand; PAM type: YTN; PAM sequence: TTG
agtgaaggcaaaaatcagac

SEQ ID NO: 93046 - DNA, 20 bp, Artificial Sequence
  Description of Artificial Sequence: Synthetic oligonucleotide
  Target: ATXN2; (+) strand; PAM type: YTN; PAM sequence: CTT
ttggtgttgctttttcttac

SEQ ID NO: 93047 - DNA, 20 bp, Artificial Sequence
  Description of Artificial Sequence: Synthetic oligonucleotide
  Target: ATXN2; (+) strand; PAM type: YTN; PAM sequence: TTT
tggtgttgctttttcttaca

SEQ ID NO: 93048 - DNA, 20 bp, Artificial Sequence
  Description of Artificial Sequence: Synthetic oligonucleotide
  Target: ATXN2; (+) strand; PAM type: YTN; PAM sequence: TTT
ggtgttgctttttcttacaa

SEQ ID NO: 93049 - DNA, 20 bp, Artificial Sequence
  Description of Artificial Sequence: Synthetic oligonucleotide
  Target: ATXN2; (+) strand; PAM type: YTN; PAM sequence: TTG
gtgttgctttttcttacaat

SEQ ID NO: 93050 - DNA, 20 bp, Artificial Sequence
  Description of Artificial Sequence: Synthetic oligonucleotide
  Target: ATXN2; (+) strand; PAM type: YTN; PAM sequence: TTG
ctttttcttacaatgtcaaa

SEQ ID NO: 93051 - DNA, 20 bp, Artificial Sequence
  Description of Artificial Sequence: Synthetic oligonucleotide
  Target: ATXN2; (+) strand; PAM type: YTN; PAM sequence: CTT
tttcttacaatgtcaaacac

SEQ ID NO: 93052 - DNA, 20 bp, Artificial Sequence
  Description of Artificial Sequence: Synthetic oligonucleotide
  Target: ATXN2; (+) strand; PAM type: YTN; PAM sequence: TTT
ttcttacaatgtcaaacaca

SEQ ID NO: 93053 - DNA, 20 bp, Artificial Sequence
  Description of Artificial Sequence: Synthetic oligonucleotide
  Target: ATXN2; (+) strand; PAM type: YTN; PAM sequence: TTT
tcttacaatgtcaaacacat

SEQ ID NO: 93054 - DNA, 20 bp, Artificial Sequence
  Description of Artificial Sequence: Synthetic oligonucleotide
  Target: ATXN2; (+) strand; PAM type: YTN; PAM sequence: TTT
cttacaatgtcaaacacatc

SEQ ID NO: 93055 - DNA, 20 bp, Artificial Sequence
  Description of Artificial Sequence: Synthetic oligonucleotide
  Target: ATXN2; (+) strand; PAM type: YTN; PAM sequence: TTC
ttacaatgtcaaacacatct

SEQ ID NO: 93056 - DNA, 20 bp, Artificial Sequence
  Description of Artificial Sequence: Synthetic oligonucleotide
  Target: ATXN2; (+) strand; PAM type: YTN; PAM sequence: CTT
acaatgtcaaacacatctgc

SEQ ID NO: 93057 - DNA, 20 bp, Artificial Sequence
  Description of Artificial Sequence: Synthetic oligonucleotide
  Target: ATXN2; (+) strand; PAM type: YTN; PAM sequence: TTA
caatgtcaaacacatctgca

SEQ ID NO: 93058 - DNA, 20 bp, Artificial Sequence
  Description of Artificial Sequence: Synthetic oligonucleotide
  Target: ATXN2; (+) strand; PAM type: YTN; PAM sequence: CTG
catttcttactatgggttgg

SEQ ID NO: 93059 - DNA, 20 bp, Artificial Sequence
  Description of Artificial Sequence: Synthetic oligonucleotide
  Target: ATXN2; (+) strand; PAM type: YTN; PAM sequence: TTT
cttactatgggttggacact

SEQ ID NO: 93060 - DNA, 20 bp, Artificial Sequence
  Description of Artificial Sequence: Synthetic oligonucleotide
  Target: ATXN2; (+) strand; PAM type: YTN; PAM sequence: TTC
ttactatgggttggacactt

SEQ ID NO: 93061 - DNA, 20 bp, Artificial Sequence
  Description of Artificial Sequence: Synthetic oligonucleotide
  Target: ATXN2; (+) strand; PAM type: YTN; PAM sequence: CTT
actatgggttggacactttt

SEQ ID NO: 93062 - DNA, 20 bp, Artificial Sequence
  Description of Artificial Sequence: Synthetic oligonucleotide
  Target: ATXN2; (+) strand; PAM type: YTN; PAM sequence: TTA
ctatgggttggacacttttt

SEQ ID NO: 93063 - DNA, 20 bp, Artificial Sequence
  Description of Artificial Sequence: Synthetic oligonucleotide
  Target: ATXN2; (+) strand; PAM type: YTN; PAM sequence: CTA
tgggttggacactttttttt

SEQ ID NO: 93064 - DNA, 20 bp, Artificial Sequence
  Description of Artificial Sequence: Synthetic oligonucleotide
  Target: ATXN2; (+) strand; PAM type: YTN; PAM sequence: TTG
gacacttttttttttttttc

SEQ ID NO: 93065 - DNA, 20 bp, Artificial Sequence
  Description of Artificial Sequence: Synthetic oligonucleotide
  Target: ATXN2; (+) strand; PAM type: YTN; PAM sequence: CTT
ttttttttttttccaaacag

SEQ ID NO: 93066 - DNA, 20 bp, Artificial Sequence
  Description of Artificial Sequence: Synthetic oligonucleotide
  Target: ATXN2; (+) strand; PAM type: YTN; PAM sequence: TTT
tttttttttttccaaacagg

SEQ ID NO: 93067 - DNA, 20 bp, Artificial Sequence
  Description of Artificial Sequence: Synthetic oligonucleotide
  Target: ATXN2; (+) strand; PAM type: YTN; PAM sequence: TTT
ttttttttttccaaacaggg

SEQ ID NO: 93068 - DNA, 20 bp, Artificial Sequence
  Description of Artificial Sequence: Synthetic oligonucleotide
  Target: ATXN2; (+) strand; PAM type: YTN; PAM sequence: TTT
tttttttttccaaacagggt

SEQ ID NO: 93069 - DNA, 20 bp, Artificial Sequence
  Description of Artificial Sequence: Synthetic oligonucleotide
  Target: ATXN2; (+) strand; PAM type: YTN; PAM sequence: TTT
ttttttttccaaacagggtc

SEQ ID NO: 93070 - DNA, 20 bp, Artificial Sequence
  Description of Artificial Sequence: Synthetic oligonucleotide
  Target: ATXN2; (+) strand; PAM type: YTN; PAM sequence: TTT
tttttttccaaacagggtct

SEQ ID NO: 93071 - DNA, 20 bp, Artificial Sequence
  Description of Artificial Sequence: Synthetic oligonucleotide
  Target: ATXN2; (+) strand; PAM type: YTN; PAM sequence: TTT
ttttttccaaacagggtctg

SEQ ID NO: 93072 - DNA, 20 bp, Artificial Sequence
  Description of Artificial Sequence: Synthetic oligonucleotide
  Target: ATXN2; (+) strand; PAM type: YTN; PAM sequence: TTT
tttttccaaacagggtctga

SEQ ID NO: 93073 - DNA, 20 bp, Artificial Sequence
  Description of Artificial Sequence: Synthetic oligonucleotide
  Target: ATXN2; (+) strand; PAM type: YTN; PAM sequence: TTT
ttttccaaacagggtctgac

SEQ ID NO: 93074 - DNA, 20 bp, Artificial Sequence
  Description of Artificial Sequence: Synthetic oligonucleotide
  Target: ATXN2; (+) strand; PAM type: YTN; PAM sequence: TTT
tttccaaacagggtctgact

SEQ ID NO: 93075 - DNA, 20 bp, Artificial Sequence
  Description of Artificial Sequence: Synthetic oligonucleotide
  Target: ATXN2; (+) strand; PAM type: YTN; PAM sequence: TTT
ttccaaacagggtctgactc

SEQ ID NO: 93076 - DNA, 20 bp, Artificial Sequence
  Description of Artificial Sequence: Synthetic oligonucleotide
  Target: ATXN2; (+) strand; PAM type: YTN; PAM sequence: TTT
tccaaacagggtctgactcc

SEQ ID NO: 93077 - DNA, 20 bp, Artificial Sequence
  Description of Artificial Sequence: Synthetic oligonucleotide
  Target: ATXN2; (+) strand; PAM type: YTN; PAM sequence: TTT
ccaaacagggtctgactccg

SEQ ID NO: 93078 - DNA, 20 bp, Artificial Sequence
  Description of Artificial Sequence: Synthetic oligonucleotide
  Target: ATXN2; (+) strand; PAM type: YTN; PAM sequence: TTC
caaacagggtctgactccgt

SEQ ID NO: 93079 - DNA, 20 bp, Artificial Sequence
  Description of Artificial Sequence: Synthetic oligonucleotide
  Target: ATXN2; (+) strand; PAM type: YTN; PAM sequence: CTG
actccgttgcccagactgga

SEQ ID NO: 93080 - DNA, 20 bp, Artificial Sequence
  Description of Artificial Sequence: Synthetic oligonucleotide
  Target: ATXN2; (+) strand; PAM type: YTN; PAM sequence: CTC
cgttgcccagactggagcgc

SEQ ID NO: 93081 - DNA, 20 bp, Artificial Sequence
  Description of Artificial Sequence: Synthetic oligonucleotide
  Target: ATXN2; (+) strand; PAM type: YTN; PAM sequence: TTG
cccagactggagcgcagtgg

SEQ ID NO: 93082 - DNA, 20 bp, Artificial Sequence
  Description of Artificial Sequence: Synthetic oligonucleotide
  Target: ATXN2; (+) strand; PAM type: YTN; PAM sequence: CTG
gagcgcagtggtgcaagctc

SEQ ID NO: 93083 - DNA, 20 bp, Artificial Sequence
  Description of Artificial Sequence: Synthetic oligonucleotide
  Target: ATXN2; (+) strand; PAM type: YTN; PAM sequence: CTC
acctcactgcaacctccatc

SEQ ID NO: 93084 - DNA, 20 bp, Artificial Sequence
  Description of Artificial Sequence: Synthetic oligonucleotide
  Target: ATXN2; (+) strand; PAM type: YTN; PAM sequence: CTC
actgcaacctccatctccca

SEQ ID NO: 93085 - DNA, 20 bp, Artificial Sequence
  Description of Artificial Sequence: Synthetic oligonucleotide
  Target: ATXN2; (+) strand; PAM type: YTN; PAM sequence: CTG
caacctccatctcccaggct

SEQ ID NO: 93086 - DNA, 20 bp, Artificial Sequence
  Description of Artificial Sequence: Synthetic oligonucleotide
  Target: ATXN2; (+) strand; PAM type: YTN; PAM sequence: CTC
catctcccaggctcaagtga

SEQ ID NO: 93087 - DNA, 20 bp, Artificial Sequence
  Description of Artificial Sequence: Synthetic oligonucleotide
  Target: ATXN2; (+) strand; PAM type: YTN; PAM sequence: CTC
ccaggctcaagtgattctcc

SEQ ID NO: 93088 - DNA, 20 bp, Artificial Sequence
  Description of Artificial Sequence: Synthetic oligonucleotide
  Target: ATXN2; (+) strand; PAM type: YTN; PAM sequence: CTC
aagtgattctcccacctcag

SEQ ID NO: 93089 - DNA, 20 bp, Artificial Sequence
  Description of Artificial Sequence: Synthetic oligonucleotide
  Target: ATXN2; (+) strand; PAM type: YTN; PAM sequence: TTC
tcccacctcagcctcctgag

SEQ ID NO: 93090 - DNA, 20 bp, Artificial Sequence
  Description of Artificial Sequence: Synthetic oligonucleotide
  Target: ATXN2; (+) strand; PAM type: YTN; PAM sequence: CTC
ccacctcagcctcctgagta

SEQ ID NO: 93091 - DNA, 20 bp, Artificial Sequence
  Description of Artificial Sequence: Synthetic oligonucleotide
  Target: ATXN2; (+) strand; PAM type: YTN; PAM sequence: CTC
agcctcctgagtagctggta

SEQ ID NO: 93092 - DNA, 20 bp, Artificial Sequence
  Description of Artificial Sequence: Synthetic oligonucleotide
  Target: ATXN2; (+) strand; PAM type: YTN; PAM sequence: CTC
ctgagtagctggtactatta

SEQ ID NO: 93093 - DNA, 20 bp, Artificial Sequence
  Description of Artificial Sequence: Synthetic oligonucleotide
  Target: ATXN2; (+) strand; PAM type: YTN; PAM sequence: CTG
agtagctggtactattagca

SEQ ID NO: 93094 - DNA, 20 bp, Artificial Sequence
  Description of Artificial Sequence: Synthetic oligonucleotide
  Target: ATXN2; (+) strand; PAM type: YTN; PAM sequence: CTG
gtactattagcatgtgccac

SEQ ID NO: 93095 - DNA, 20 bp, Artificial Sequence
  Description of Artificial Sequence: Synthetic oligonucleotide
  Target: ATXN2; (+) strand; PAM type: YTN; PAM sequence: CTA
ttagcatgtgccaccacacc

SEQ ID NO: 93096 - DNA, 20 bp, Artificial Sequence
  Description of Artificial Sequence: Synthetic oligonucleotide
  Target: ATXN2; (+) strand; PAM type: YTN; PAM sequence: TTA
gcatgtgccaccacacctgg

SEQ ID NO: 93097 - DNA, 20 bp, Artificial Sequence
  Description of Artificial Sequence: Synthetic oligonucleotide
  Target: ATXN2; (+) strand; PAM type: YTN; PAM sequence: CTG
gctaatgtgtgtattttttt

SEQ ID NO: 93098 - DNA, 20 bp, Artificial Sequence
  Description of Artificial Sequence: Synthetic oligonucleotide
  Target: ATXN2; (+) strand; PAM type: YTN; PAM sequence: CTA
atgtgtgtatttttttgtag

SEQ ID NO: 93099 - DNA, 20 bp, Artificial Sequence
  Description of Artificial Sequence: Synthetic oligonucleotide
  Target: ATXN2; (+) strand; PAM type: YTN; PAM sequence: TTT
ttttgtagaaacagggtttt

SEQ ID NO: 93100 - DNA, 20 bp, Artificial Sequence
  Description of Artificial Sequence: Synthetic oligonucleotide
  Target: ATXN2; (+) strand; PAM type: YTN; PAM sequence: TTT
tttgtagaaacagggtttta

SEQ ID NO: 93101 - DNA, 20 bp, Artificial Sequence
  Description of Artificial Sequence: Synthetic oligonucleotide
  Target: ATXN2; (+) strand; PAM type: YTN; PAM sequence: TTT
ttgtagaaacagggttttac

SEQ ID NO: 93102 - DNA, 20 bp, Artificial Sequence
  Description of Artificial Sequence: Synthetic oligonucleotide
  Target: ATXN2; (+) strand; PAM type: YTN; PAM sequence: TTT
tgtagaaacagggttttacc

SEQ ID NO: 93103 - DNA, 20 bp, Artificial Sequence
  Description of Artificial Sequence: Synthetic oligonucleotide
  Target: ATXN2; (+) strand; PAM type: YTN; PAM sequence: TTT
gtagaaacagggttttacca

SEQ ID NO: 93104 - DNA, 20 bp, Artificial Sequence
  Description of Artificial Sequence: Synthetic oligonucleotide
  Target: ATXN2; (+) strand; PAM type: YTN; PAM sequence: TTG
tagaaacagggttttaccat

SEQ ID NO: 93105 - DNA, 20 bp, Artificial Sequence
  Description of Artificial Sequence: Synthetic oligonucleotide
  Target: ATXN2; (+) strand; PAM type: YTN; PAM sequence: TTT
taccatgttacccaggttgg

SEQ ID NO: 93106 - DNA, 20 bp, Artificial Sequence
  Description of Artificial Sequence: Synthetic oligonucleotide
  Target: ATXN2; (+) strand; PAM type: YTN; PAM sequence: TTT
accatgttacccaggttggt

SEQ ID NO: 93107 - DNA, 20 bp, Artificial Sequence
  Description of Artificial Sequence: Synthetic oligonucleotide
  Target: ATXN2; (+) strand; PAM type: YTN; PAM sequence: TTA
ccatgttacccaggttggtc

SEQ ID NO: 93108 - DNA, 20 bp, Artificial Sequence
  Description of Artificial Sequence: Synthetic oligonucleotide
  Target: ATXN2; (+) strand; PAM type: YTN; PAM sequence: TTA
cccaggttggtctttaatgc

SEQ ID NO: 93109 - DNA, 20 bp, Artificial Sequence
  Description of Artificial Sequence: Synthetic oligonucleotide
  Target: ATXN2; (+) strand; PAM type: YTN; PAM sequence: TTG
gtctttaatgcctgagctca

SEQ ID NO: 93110 - DNA, 20 bp, Artificial Sequence
  Description of Artificial Sequence: Synthetic oligonucleotide
  Target: ATXN2; (+) strand; PAM type: YTN; PAM sequence: CTT
taatgcctgagctcaagcta

SEQ ID NO: 93111 - DNA, 20 bp, Artificial Sequence
  Description of Artificial Sequence: Synthetic oligonucleotide
  Target: ATXN2; (+) strand; PAM type: YTN; PAM sequence: TTT
aatgcctgagctcaagctat

SEQ ID NO: 93112 - DNA, 20 bp, Artificial Sequence
  Description of Artificial Sequence: Synthetic oligonucleotide
  Target: ATXN2; (+) strand; PAM type: YTN; PAM sequence: TTA
atgcctgagctcaagctatc

SEQ ID NO: 93113 - DNA, 20 bp, Artificial Sequence
  Description of Artificial Sequence: Synthetic oligonucleotide
  Target: ATXN2; (+) strand; PAM type: YTN; PAM sequence: CTG
agctcaagctatccacctgt

SEQ ID NO: 93114 - DNA, 20 bp, Artificial Sequence
  Description of Artificial Sequence: Synthetic oligonucleotide
  Target: ATXN2; (+) strand; PAM type: YTN; PAM sequence: CTC
aagctatccacctgtctcag

SEQ ID NO: 93115 - DNA, 20 bp, Artificial Sequence
  Description of Artificial Sequence: Synthetic oligonucleotide
  Target: ATXN2; (+) strand; PAM type: YTN; PAM sequence: CTA
tccacctgtctcagcctccc

SEQ ID NO: 93116 - DNA, 20 bp, Artificial Sequence
  Description of Artificial Sequence: Synthetic oligonucleotide
  Target: ATXN2; (+) strand; PAM type: YTN; PAM sequence: CTG
tctcagcctcccaaagtgct

SEQ ID NO: 93117 - DNA, 20 bp, Artificial Sequence
  Description of Artificial Sequence: Synthetic oligonucleotide
  Target: ATXN2; (+) strand; PAM type: YTN; PAM sequence: CTC
agcctcccaaagtgctaaga

SEQ ID NO: 93118 - DNA, 20 bp, Artificial Sequence
  Description of Artificial Sequence: Synthetic oligonucleotide
  Target: ATXN2; (+) strand; PAM type: YTN; PAM sequence: CTC
ccaaagtgctaagattcagg

SEQ ID NO: 93119 - DNA, 20 bp, Artificial Sequence
  Description of Artificial Sequence: Synthetic oligonucleotide
  Target: ATXN2; (+) strand; PAM type: YTN; PAM sequence: CTA
agattcaggcatgagccact

SEQ ID NO: 93120 - DNA, 20 bp, Artificial Sequence
  Description of Artificial Sequence: Synthetic oligonucleotide
  Target: ATXN2; (+) strand; PAM type: YTN; PAM sequence: TTC
aggcatgagccactgtacct

SEQ ID NO: 93121 - DNA, 20 bp, Artificial Sequence
  Description of Artificial Sequence: Synthetic oligonucleotide
  Target: ATXN2; (+) strand; PAM type: YTN; PAM sequence: CTG
tacctgtccagacactgttc

SEQ ID NO: 93122 - DNA, 20 bp, Artificial Sequence
  Description of Artificial Sequence: Synthetic oligonucleotide
  Target: ATXN2; (+) strand; PAM type: YTN; PAM sequence: CTG
tccagacactgttctaaact

SEQ ID NO: 93123 - DNA, 20 bp, Artificial Sequence
  Description of Artificial Sequence: Synthetic oligonucleotide
  Target: ATXN2; (+) strand; PAM type: YTN; PAM sequence: CTG
ttctaaactatttatagact

SEQ ID NO: 93124 - DNA, 20 bp, Artificial Sequence
  Description of Artificial Sequence: Synthetic oligonucleotide
  Target: ATXN2; (+) strand; PAM type: YTN; PAM sequence: TTC
taaactatttatagacttat

SEQ ID NO: 93125 - DNA, 20 bp, Artificial Sequence
  Description of Artificial Sequence: Synthetic oligonucleotide
  Target: ATXN2; (+) strand; PAM type: YTN; PAM sequence: CTA
aactatttatagacttattc

SEQ ID NO: 93126 - DNA, 20 bp, Artificial Sequence
  Description of Artificial Sequence: Synthetic oligonucleotide
  Target: ATXN2; (+) strand; PAM type: YTN; PAM sequence: CTA
tttatagacttattcattta

SEQ ID NO: 93127 - DNA, 20 bp, Artificial Sequence
  Description of Artificial Sequence: Synthetic oligonucleotide
  Target: ATXN2; (+) strand; PAM type: YTN; PAM sequence: TTT
atagacttattcatttagtc

SEQ ID NO: 93128 - DNA, 20 bp, Artificial Sequence
  Description of Artificial Sequence: Synthetic oligonucleotide
  Target: ATXN2; (+) strand; PAM type: YTN; PAM sequence: TTA
tagacttattcatttagtct

SEQ ID NO: 93129 - DNA, 20 bp, Artificial Sequence
  Description of Artificial Sequence: Synthetic oligonucleotide
  Target: ATXN2; (+) strand; PAM type: YTN; PAM sequence: CTT
attcatttagtcttcacaac

SEQ ID NO: 93130 - DNA, 20 bp, Artificial Sequence
  Description of Artificial Sequence: Synthetic oligonucleotide
  Target: ATXN2; (+) strand; PAM type: YTN; PAM sequence: TTA
ttcatttagtcttcacaaca

SEQ ID NO: 93131 - DNA, 20 bp, Artificial Sequence
  Description of Artificial Sequence: Synthetic oligonucleotide
  Target: ATXN2; (+) strand; PAM type: YTN; PAM sequence: TTC
atttagtcttcacaacagcc

SEQ ID NO: 93132 - DNA, 20 bp, Artificial Sequence
  Description of Artificial Sequence: Synthetic oligonucleotide
  Target: ATXN2; (+) strand; PAM type: YTN; PAM sequence: TTT
agtcttcacaacagccctat

SEQ ID NO: 93133 - DNA, 20 bp, Artificial Sequence
  Description of Artificial Sequence: Synthetic oligonucleotide
  Target: ATXN2; (+) strand; PAM type: YTN; PAM sequence: TTA
gtcttcacaacagccctatt

SEQ ID NO: 93134 - DNA, 20 bp, Artificial Sequence
  Description of Artificial Sequence: Synthetic oligonucleotide
  Target: ATXN2; (+) strand; PAM type: YTN; PAM sequence: CTT
cacaacagccctatttgatg

SEQ ID NO: 93135 - DNA, 20 bp, Artificial Sequence
  Description of Artificial Sequence: Synthetic oligonucleotide
  Target: ATXN2; (+) strand; PAM type: YTN; PAM sequence: TTC
acaacagccctatttgatgt

SEQ ID NO: 93136 - DNA, 20 bp, Artificial Sequence
  Description of Artificial Sequence: Synthetic oligonucleotide
  Target: ATXN2; (+) strand; PAM type: YTN; PAM sequence: CTA
tttgatgtagatactattat

SEQ ID NO: 93137 - DNA, 20 bp, Artificial Sequence
  Description of Artificial Sequence: Synthetic oligonucleotide
  Target: ATXN2; (+) strand; PAM type: YTN; PAM sequence: TTT
gatgtagatactattattgc

SEQ ID NO: 93138 - DNA, 20 bp, Artificial Sequence
  Description of Artificial Sequence: Synthetic oligonucleotide
  Target: ATXN2; (+) strand; PAM type: YTN; PAM sequence: TTG
atgtagatactattattgcc

SEQ ID NO: 93139 - DNA, 20 bp, Artificial Sequence
  Description of Artificial Sequence: Synthetic oligonucleotide
  Target: ATXN2; (+) strand; PAM type: YTN; PAM sequence: CTA
ttattgccatcttacaaata

SEQ ID NO: 93140 - DNA, 20 bp, Artificial Sequence
  Description of Artificial Sequence: Synthetic oligonucleotide
  Target: ATXN2; (+) strand; PAM type: YTN; PAM sequence: TTA
ttgccatcttacaaatagca

SEQ ID NO: 93141 - DNA, 20 bp, Artificial Sequence
  Description of Artificial Sequence: Synthetic oligonucleotide
  Target: ATXN2; (+) strand; PAM type: YTN; PAM sequence: TTG
ccatcttacaaatagcaagt

SEQ ID NO: 93142 - DNA, 20 bp, Artificial Sequence
  Description of Artificial Sequence: Synthetic oligonucleotide
  Target: ATXN2; (+) strand; PAM type: YTN; PAM sequence: CTT
acaaatagcaagtccactag

SEQ ID NO: 93143 - DNA, 20 bp, Artificial Sequence
  Description of Artificial Sequence: Synthetic oligonucleotide
  Target: ATXN2; (+) strand; PAM type: YTN; PAM sequence: TTA
caaatagcaagtccactagt

SEQ ID NO: 93144 - DNA, 20 bp, Artificial Sequence
  Description of Artificial Sequence: Synthetic oligonucleotide
  Target: ATXN2; (+) strand; PAM type: YTN; PAM sequence: CTA
gttggtatctgaatatagca

SEQ ID NO: 93145 - DNA, 20 bp, Artificial Sequence
  Description of Artificial Sequence: Synthetic oligonucleotide
  Target: ATXN2; (+) strand; PAM type: YTN; PAM sequence: TTG
gtatctgaatatagcactct

SEQ ID NO: 93146 - DNA, 20 bp, Artificial Sequence
  Description of Artificial Sequence: Synthetic oligonucleotide
  Target: ATXN2; (+) strand; PAM type: YTN; PAM sequence: CTG
aatatagcactctgctgtat

SEQ ID NO: 93147 - DNA, 20 bp, Artificial Sequence
  Description of Artificial Sequence: Synthetic oligonucleotide
  Target: ATXN2; (+) strand; PAM type: YTN; PAM sequence: CTC
tgctgtattggaatatattg

SEQ ID NO: 93148 - DNA, 20 bp, Artificial Sequence
  Description of Artificial Sequence: Synthetic oligonucleotide
  Target: ATXN2; (+) strand; PAM type: YTN; PAM sequence: CTG
ctgtattggaatatattgtt

SEQ ID NO: 93149 - DNA, 20 bp, Artificial Sequence
  Description of Artificial Sequence: Synthetic oligonucleotide
  Target: ATXN2; (+) strand; PAM type: YTN; PAM sequence: CTG
tattggaatatattgttcta

SEQ ID NO: 93150 - DNA, 20 bp, Artificial Sequence
  Description of Artificial Sequence: Synthetic oligonucleotide
  Target: ATXN2; (+) strand; PAM type: YTN; PAM sequence: TTG
gaatatattgttctaatgct

SEQ ID NO: 93151 - DNA, 20 bp, Artificial Sequence
  Description of Artificial Sequence: Synthetic oligonucleotide
  Target: ATXN2; (+) strand; PAM type: YTN; PAM sequence: TTG
ttctaatgctatattgctat

SEQ ID NO: 93152 - DNA, 20 bp, Artificial Sequence
  Description of Artificial Sequence: Synthetic oligonucleotide
  Target: ATXN2; (+) strand; PAM type: YTN; PAM sequence: TTC
taatgctatattgctatata

SEQ ID NO: 93153 - DNA, 20 bp, Artificial Sequence
  Description of Artificial Sequence: Synthetic oligonucleotide
  Target: ATXN2; (+) strand; PAM type: YTN; PAM sequence: CTA
atgctatattgctatatatg

SEQ ID NO: 93154 - DNA, 20 bp, Artificial Sequence
  Description of Artificial Sequence: Synthetic oligonucleotide
  Target: ATXN2; (+) strand; PAM type: YTN; PAM sequence: CTA
tattgctatatatggaatat

SEQ ID NO: 93155 - DNA, 20 bp, Artificial Sequence
  Description of Artificial Sequence: Synthetic oligonucleotide
  Target: ATXN2; (+) strand; PAM type: YTN; PAM sequence: TTG
ctatatatggaatatagcac

SEQ ID NO: 93156 - DNA, 20 bp, Artificial Sequence
  Description of Artificial Sequence: Synthetic oligonucleotide
  Target: ATXN2; (+) strand; PAM type: YTN; PAM sequence: CTA
tatatggaatatagcactct

SEQ ID NO: 93157 - DNA, 20 bp, Artificial Sequence
  Description of Artificial Sequence: Synthetic oligonucleotide
  Target: ATXN2; (+) strand; PAM type: YTN; PAM sequence: CTC
tgctgtatttcctctctgca

SEQ ID NO: 93158 - DNA, 20 bp, Artificial Sequence
  Description of Artificial Sequence: Synthetic oligonucleotide
  Target: ATXN2; (+) strand; PAM type: YTN; PAM sequence: CTG
ctgtatttcctctctgcact

SEQ ID NO: 93159 - DNA, 20 bp, Artificial Sequence
  Description of Artificial Sequence: Synthetic oligonucleotide
  Target: ATXN2; (+) strand; PAM type: YTN; PAM sequence: CTG
tatttcctctctgcactata

SEQ ID NO: 93160 - DNA, 20 bp, Artificial Sequence
  Description of Artificial Sequence: Synthetic oligonucleotide
  Target: ATXN2; (+) strand; PAM type: YTN; PAM sequence: TTT
cctctctgcactatactaaa

SEQ ID NO: 93161 - DNA, 20 bp, Artificial Sequence
  Description of Artificial Sequence: Synthetic oligonucleotide
  Target: ATXN2; (+) strand; PAM type: YTN; PAM sequence: TTC
ctctctgcactatactaaat

SEQ ID NO: 93162 - DNA, 20 bp, Artificial Sequence
  Description of Artificial Sequence: Synthetic oligonucleotide
  Target: ATXN2; (+) strand; PAM type: YTN; PAM sequence: CTC
tctgcactatactaaatcta

SEQ ID NO: 93163 - DNA, 20 bp, Artificial Sequence
  Description of Artificial Sequence: Synthetic oligonucleotide
  Target: ATXN2; (+) strand; PAM type: YTN; PAM sequence: CTC
tgcactatactaaatctaat

SEQ ID NO: 93164 - DNA, 20 bp, Artificial Sequence
  Description of Artificial Sequence: Synthetic oligonucleotide
  Target: ATXN2; (+) strand; PAM type: YTN; PAM sequence: CTG
cactatactaaatctaatgg

SEQ ID NO: 93165 - DNA, 20 bp, Artificial Sequence
  Description of Artificial Sequence: Synthetic oligonucleotide
  Target: ATXN2; (+) strand; PAM type: YTN; PAM sequence: CTA
tactaaatctaatggaaaac

SEQ ID NO: 93166 - DNA, 20 bp, Artificial Sequence
  Description of Artificial Sequence: Synthetic oligonucleotide
  Target: ATXN2; (+) strand; PAM type: YTN; PAM sequence: CTA
aatctaatggaaaacttaag

SEQ ID NO: 93167 - DNA, 20 bp, Artificial Sequence
  Description of Artificial Sequence: Synthetic oligonucleotide
  Target: ATXN2; (+) strand; PAM type: YTN; PAM sequence: CTA
atggaaaacttaagttcttt

SEQ ID NO: 93168 - DNA, 20 bp, Artificial Sequence
  Description of Artificial Sequence: Synthetic oligonucleotide
  Target: ATXN2; (+) strand; PAM type: YTN; PAM sequence: CTT
aagttctttttttttctttt

SEQ ID NO: 93169 - DNA, 20 bp, Artificial Sequence
  Description of Artificial Sequence: Synthetic oligonucleotide
  Target: ATXN2; (+) strand; PAM type: YTN; PAM sequence: TTA
agttctttttttttcttttt

SEQ ID NO: 93170 - DNA, 20 bp, Artificial Sequence
  Description of Artificial Sequence: Synthetic oligonucleotide
  Target: ATXN2; (+) strand; PAM type: YTN; PAM sequence: TTC
tttttttttcttttttttgg

SEQ ID NO: 93171 - DNA, 20 bp, Artificial Sequence
  Description of Artificial Sequence: Synthetic oligonucleotide
  Target: ATXN2; (+) strand; PAM type: YTN; PAM sequence: CTT
tttttttcttttttttggag

SEQ ID NO: 93172 - DNA, 20 bp, Artificial Sequence
  Description of Artificial Sequence: Synthetic oligonucleotide
  Target: ATXN2; (+) strand; PAM type: YTN; PAM sequence: TTT
ttttttcttttttttggaga

SEQ ID NO: 93173 - DNA, 20 bp, Artificial Sequence
  Description of Artificial Sequence: Synthetic oligonucleotide
  Target: ATXN2; (+) strand; PAM type: YTN; PAM sequence: TTT
tttttcttttttttggagac

SEQ ID NO: 93174 - DNA, 20 bp, Artificial Sequence
  Description of Artificial Sequence: Synthetic oligonucleotide
  Target: ATXN2; (+) strand; PAM type: YTN; PAM sequence: TTT
ttttcttttttttggagacg

SEQ ID NO: 93175 - DNA, 20 bp, Artificial Sequence
  Description of Artificial Sequence: Synthetic oligonucleotide
  Target: ATXN2; (+) strand; PAM type: YTN; PAM sequence: TTT
tttcttttttttggagacgg

SEQ ID NO: 93176 - DNA, 20 bp, Artificial Sequence
  Description of Artificial Sequence: Synthetic oligonucleotide
  Target: ATXN2; (+) strand; PAM type: YTN; PAM sequence: TTT
ttcttttttttggagacgga

SEQ ID NO: 93177 - DNA, 20 bp, Artificial Sequence
  Description of Artificial Sequence: Synthetic oligonucleotide
  Target: ATXN2; (+) strand; PAM type: YTN; PAM sequence: TTT
tcttttttttggagacggag

SEQ ID NO: 93178 - DNA, 20 bp, Artificial Sequence
  Description of Artificial Sequence: Synthetic oligonucleotide
  Target: ATXN2; (+) strand; PAM type: YTN; PAM sequence: TTT
cttttttttggagacggagt

SEQ ID NO: 93179 - DNA, 20 bp, Artificial Sequence
  Description of Artificial Sequence: Synthetic oligonucleotide
  Target: ATXN2; (+) strand; PAM type: YTN; PAM sequence: TTC
ttttttttggagacggagtt

SEQ ID NO: 93180 - DNA, 20 bp, Artificial Sequence
  Description of Artificial Sequence: Synthetic oligonucleotide
  Target: ATXN2; (+) strand; PAM type: YTN; PAM sequence: CTT
ttttttggagacggagtttc

SEQ ID NO: 93181 - DNA, 20 bp, Artificial Sequence
  Description of Artificial Sequence: Synthetic oligonucleotide
  Target: ATXN2; (+) strand; PAM type: YTN; PAM sequence: TTT
tttttggagacggagtttcg

SEQ ID NO: 93182 - DNA, 20 bp, Artificial Sequence
  Description of Artificial Sequence: Synthetic oligonucleotide
  Target: ATXN2; (+) strand; PAM type: YTN; PAM sequence: TTT
ttttggagacggagtttcgc

SEQ ID NO: 93183 - DNA, 20 bp, Artificial Sequence
  Description of Artificial Sequence: Synthetic oligonucleotide
  Target: ATXN2; (+) strand; PAM type: YTN; PAM sequence: TTT
tttggagacggagtttcgct

SEQ ID NO: 93184 - DNA, 20 bp, Artificial Sequence
  Description of Artificial Sequence: Synthetic oligonucleotide
  Target: ATXN2; (+) strand; PAM type: YTN; PAM sequence: TTT
ttggagacggagtttcgctc

SEQ ID NO: 93185 - DNA, 20 bp, Artificial Sequence
  Description of Artificial Sequence: Synthetic oligonucleotide
  Target: ATXN2; (+) strand; PAM type: YTN; PAM sequence: TTT
tggagacggagtttcgctct

SEQ ID NO: 93186 - DNA, 20 bp, Artificial Sequence
  Description of Artificial Sequence: Synthetic oligonucleotide
  Target: ATXN2; (+) strand; PAM type: YTN; PAM sequence: TTT
ggagacggagtttcgctctt

SEQ ID NO: 93187 - DNA, 20 bp, Artificial Sequence
  Description of Artificial Sequence: Synthetic oligonucleotide
  Target: ATXN2; (+) strand; PAM type: YTN; PAM sequence: TTG
gagacggagtttcgctctta

SEQ ID NO: 93188 - DNA, 20 bp, Artificial Sequence
  Description of Artificial Sequence: Synthetic oligonucleotide
  Target: ATXN2; (+) strand; PAM type: YTN; PAM sequence: TTT
cgctcttattgcccaggctg

SEQ ID NO: 93189 - DNA, 20 bp, Artificial Sequence
  Description of Artificial Sequence: Synthetic oligonucleotide
  Target: ATXN2; (+) strand; PAM type: YTN; PAM sequence: TTC
gctcttattgcccaggctgg

SEQ ID NO: 93190 - DNA, 20 bp, Artificial Sequence
  Description of Artificial Sequence: Synthetic oligonucleotide
  Target: ATXN2; (+) strand; PAM type: YTN; PAM sequence: CTC
ttattgcccaggctggagtg

SEQ ID NO: 93191 - DNA, 20 bp, Artificial Sequence
  Description of Artificial Sequence: Synthetic oligonucleotide
  Target: ATXN2; (+) strand; PAM type: YTN; PAM sequence: CTT
attgcccaggctggagtgca

SEQ ID NO: 93192 - DNA, 20 bp, Artificial Sequence
  Description of Artificial Sequence: Synthetic oligonucleotide
  Target: ATXN2; (+) strand; PAM type: YTN; PAM sequence: TTA
ttgcccaggctggagtgcag

SEQ ID NO: 93193 - DNA, 20 bp, Artificial Sequence
  Description of Artificial Sequence: Synthetic oligonucleotide
  Target: ATXN2; (+) strand; PAM type: YTN; PAM sequence: TTG
cccaggctggagtgcagcgg

SEQ ID NO: 93194 - DNA, 20 bp, Artificial Sequence
  Description of Artificial Sequence: Synthetic oligonucleotide
  Target: ATXN2; (+) strand; PAM type: YTN; PAM sequence: CTG
gagtgcagcggcacgatctt

SEQ ID NO: 93195 - DNA, 20 bp, Artificial Sequence
  Description of Artificial Sequence: Synthetic oligonucleotide
  Target: ATXN2; (+) strand; PAM type: YTN; PAM sequence: CTT
aactcatggcaaccaccgcc

SEQ ID NO: 93196 - DNA, 20 bp, Artificial Sequence
  Description of Artificial Sequence: Synthetic oligonucleotide
  Target: ATXN2; (+) strand; PAM type: YTN; PAM sequence: TTA
actcatggcaaccaccgcct

SEQ ID NO: 93197 - DNA, 20 bp, Artificial Sequence
  Description of Artificial Sequence: Synthetic oligonucleotide
  Target: ATXN2; (+) strand; PAM type: YTN; PAM sequence: CTC
atggcaaccaccgcctcccg

SEQ ID NO: 93198 - DNA, 20 bp, Artificial Sequence
  Description of Artificial Sequence: Synthetic oligonucleotide
  Target: ATXN2; (+) strand; PAM type: YTN; PAM sequence: CTC
ccgggttcaagcatttctcc

SEQ ID NO: 93199 - DNA, 20 bp, Artificial Sequence
  Description of Artificial Sequence: Synthetic oligonucleotide
  Target: ATXN2; (+) strand; PAM type: YTN; PAM sequence: TTC
aagcatttctcctgcctcag

SEQ ID NO: 93200 - DNA, 20 bp, Artificial Sequence
  Description of Artificial Sequence: Synthetic oligonucleotide
  Target: ATXN2; (+) strand; PAM type: YTN; PAM sequence: TTT
ctcctgcctcagtcttgcga

SEQ ID NO: 93201 - DNA, 20 bp, Artificial Sequence
  Description of Artificial Sequence: Synthetic oligonucleotide
  Target: ATXN2; (+) strand; PAM type: YTN; PAM sequence: TTC
tcctgcctcagtcttgcgag

SEQ ID NO: 93202 - DNA, 20 bp, Artificial Sequence
  Description of Artificial Sequence: Synthetic oligonucleotide
  Target: ATXN2; (+) strand; PAM type: YTN; PAM sequence: CTC
ctgcctcagtcttgcgagta

SEQ ID NO: 93203 - DNA, 20 bp, Artificial Sequence
  Description of Artificial Sequence: Synthetic oligonucleotide
  Target: ATXN2; (+) strand; PAM type: YTN; PAM sequence: CTG
cctcagtcttgcgagtagct

SEQ ID NO: 93204 - DNA, 20 bp, Artificial Sequence
  Description of Artificial Sequence: Synthetic oligonucleotide
  Target: ATXN2; (+) strand; PAM type: YTN; PAM sequence: CTC
agtcttgcgagtagctggga

SEQ ID NO: 93205 - DNA, 20 bp, Artificial Sequence
  Description of Artificial Sequence: Synthetic oligonucleotide
  Target: ATXN2; (+) strand; PAM type: YTN; PAM sequence: CTT
gcgagtagctgggattacag

SEQ ID NO: 93206 - DNA, 20 bp, Artificial Sequence
  Description of Artificial Sequence: Synthetic oligonucleotide
  Target: ATXN2; (+) strand; PAM type: YTN; PAM sequence: TTG
cgagtagctgggattacagg

SEQ ID NO: 93207 - DNA, 20 bp, Artificial Sequence
  Description of Artificial Sequence: Synthetic oligonucleotide
  Target: ATXN2; (+) strand; PAM type: YTN; PAM sequence: CTG
ggattacaggcacctgccac

SEQ ID NO: 93208 - DNA, 20 bp, Artificial Sequence
  Description of Artificial Sequence: Synthetic oligonucleotide
  Target: ATXN2; (+) strand; PAM type: YTN; PAM sequence: TTA
caggcacctgccaccacgcc

SEQ ID NO: 93209 - DNA, 20 bp, Artificial Sequence
  Description of Artificial Sequence: Synthetic oligonucleotide
  Target: ATXN2; (+) strand; PAM type: YTN; PAM sequence: CTG
ccaccacgcctggctaattt

SEQ ID NO: 93210 - DNA, 20 bp, Artificial Sequence
  Description of Artificial Sequence: Synthetic oligonucleotide
  Target: ATXN2; (+) strand; PAM type: YTN; PAM sequence: CTG
gctaattttttgtattttta

SEQ ID NO: 93211 - DNA, 20 bp, Artificial Sequence
  Description of Artificial Sequence: Synthetic oligonucleotide
  Target: ATXN2; (+) strand; PAM type: YTN; PAM sequence: CTA
attttttgtatttttagtag

SEQ ID NO: 93212 - DNA, 20 bp, Artificial Sequence
  Description of Artificial Sequence: Synthetic oligonucleotide
  Target: ATXN2; (+) strand; PAM type: YTN; PAM sequence: TTT
tttgtatttttagtagagat

SEQ ID NO: 93213 - DNA, 20 bp, Artificial Sequence
  Description of Artificial Sequence: Synthetic oligonucleotide
  Target: ATXN2; (+) strand; PAM type: YTN; PAM sequence: TTT
ttgtatttttagtagagatg

SEQ ID NO: 93214 - DNA, 20 bp, Artificial Sequence
  Description of Artificial Sequence: Synthetic oligonucleotide
  Target: ATXN2; (+) strand; PAM type: YTN; PAM sequence: TTT
tgtatttttagtagagatgg

SEQ ID NO: 93215 - DNA, 20 bp, Artificial Sequence
  Description of Artificial Sequence: Synthetic oligonucleotide
  Target: ATXN2; (+) strand; PAM type: YTN; PAM sequence: TTT
gtatttttagtagagatggg

SEQ ID NO: 93216 - DNA, 20 bp, Artificial Sequence
  Description of Artificial Sequence: Synthetic oligonucleotide
  Target: ATXN2; (+) strand; PAM type: YTN; PAM sequence: TTG
tatttttagtagagatgggg

SEQ ID NO: 93217 - DNA, 20 bp, Artificial Sequence
  Description of Artificial Sequence: Synthetic oligonucleotide
  Target: ATXN2; (+) strand; PAM type: YTN; PAM sequence: TTT
ttagtagagatggggtttca

SEQ ID NO: 93218 - DNA, 20 bp, Artificial Sequence
  Description of Artificial Sequence: Synthetic oligonucleotide
  Target: ATXN2; (+) strand; PAM type: YTN; PAM sequence: TTT
tagtagagatggggtttcat

SEQ ID NO: 93219 - DNA, 20 bp, Artificial Sequence
  Description of Artificial Sequence: Synthetic oligonucleotide
  Target: ATXN2; (+) strand; PAM type: YTN; PAM sequence: TTT
agtagagatggggtttcatc

SEQ ID NO: 93220 - DNA, 20 bp, Artificial Sequence
  Description of Artificial Sequence: Synthetic oligonucleotide
  Target: ATXN2; (+) strand; PAM type: YTN; PAM sequence: TTA
gtagagatggggtttcatca

SEQ ID NO: 93221 - DNA, 20 bp, Artificial Sequence
  Description of Artificial Sequence: Synthetic oligonucleotide
  Target: ATXN2; (+) strand; PAM type: YTN; PAM sequence: TTT
catcatgtcggccaggctgg

SEQ ID NO: 93222 - DNA, 20 bp, Artificial Sequence
  Description of Artificial Sequence: Synthetic oligonucleotide
  Target: ATXN2; (+) strand; PAM type: YTN; PAM sequence: TTC
atcatgtcggccaggctggt

SEQ ID NO: 93223 - DNA, 20 bp, Artificial Sequence
  Description of Artificial Sequence: Synthetic oligonucleotide
  Target: ATXN2; (+) strand; PAM type: YTN; PAM sequence: CTG
gtctggaactcctgacctca

SEQ ID NO: 93224 - DNA, 20 bp, Artificial Sequence
  Description of Artificial Sequence: Synthetic oligonucleotide
  Target: ATXN2; (+) strand; PAM type: YTN; PAM sequence: CTG
gaactcctgacctcagctga

SEQ ID NO: 93225 - DNA, 20 bp, Artificial Sequence
  Description of Artificial Sequence: Synthetic oligonucleotide
  Target: ATXN2; (+) strand; PAM type: YTN; PAM sequence: CTC
ctgacctcagctgatccatc

SEQ ID NO: 93226 - DNA, 20 bp, Artificial Sequence
  Description of Artificial Sequence: Synthetic oligonucleotide
  Target: ATXN2; (+) strand; PAM type: YTN; PAM sequence: CTG
acctcagctgatccatccac

SEQ ID NO: 93227 - DNA, 20 bp, Artificial Sequence
  Description of Artificial Sequence: Synthetic oligonucleotide
  Target: ATXN2; (+) strand; PAM type: YTN; PAM sequence: CTC
agctgatccatccacctcag

SEQ ID NO: 93228 - DNA, 20 bp, Artificial Sequence
  Description of Artificial Sequence: Synthetic oligonucleotide
  Target: ATXN2; (+) strand; PAM type: YTN; PAM sequence: CTG
atccatccacctcagcctcc

SEQ ID NO: 93229 - DNA, 20 bp, Artificial Sequence
  Description of Artificial Sequence: Synthetic oligonucleotide
  Target: ATXN2; (+) strand; PAM type: YTN; PAM sequence: CTC
agcctcccaaagtgctggga

SEQ ID NO: 93230 - DNA, 20 bp, Artificial Sequence
  Description of Artificial Sequence: Synthetic oligonucleotide
  Target: ATXN2; (+) strand; PAM type: YTN; PAM sequence: CTC
ccaaagtgctgggattacag

SEQ ID NO: 93231 - DNA, 20 bp, Artificial Sequence
  Description of Artificial Sequence: Synthetic oligonucleotide
  Target: ATXN2; (+) strand; PAM type: YTN; PAM sequence: CTG
ggattacaggagtgagccat

SEQ ID NO: 93232 - DNA, 20 bp, Artificial Sequence
  Description of Artificial Sequence: Synthetic oligonucleotide
  Target: ATXN2; (+) strand; PAM type: YTN; PAM sequence: TTA
caggagtgagccatcatgcc

SEQ ID NO: 93233 - DNA, 20 bp, Artificial Sequence
  Description of Artificial Sequence: Synthetic oligonucleotide
  Target: ATXN2; (+) strand; PAM type: YTN; PAM sequence: CTG
aaattcttatgtgactccac

SEQ ID NO: 93234 - DNA, 20 bp, Artificial Sequence
  Description of Artificial Sequence: Synthetic oligonucleotide
  Target: ATXN2; (+) strand; PAM type: YTN; PAM sequence: TTC
ttatgtgactccacatgaaa

SEQ ID NO: 93235 - DNA, 20 bp, Artificial Sequence
  Description of Artificial Sequence: Synthetic oligonucleotide
  Target: ATXN2; (+) strand; PAM type: YTN; PAM sequence: CTT
atgtgactccacatgaaatg

SEQ ID NO: 93236 - DNA, 20 bp, Artificial Sequence
  Description of Artificial Sequence: Synthetic oligonucleotide
  Target: ATXN2; (+) strand; PAM type: YTN; PAM sequence: TTA
tgtgactccacatgaaatgg

SEQ ID NO: 93237 - DNA, 20 bp, Artificial Sequence
  Description of Artificial Sequence: Synthetic oligonucleotide
  Target: ATXN2; (+) strand; PAM type: YTN; PAM sequence: CTC
cacatgaaatggtacaatga

SEQ ID NO: 93238 - DNA, 20 bp, Artificial Sequence
  Description of Artificial Sequence: Synthetic oligonucleotide
  Target: ATXN2; (+) strand; PAM type: YTN; PAM sequence: TTG
tacatactctgtacaatact

SEQ ID NO: 93239 - DNA, 20 bp, Artificial Sequence
  Description of Artificial Sequence: Synthetic oligonucleotide
  Target: ATXN2; (+) strand; PAM type: YTN; PAM sequence: CTC
tgtacaatactgggtcatct

SEQ ID NO: 93240 - DNA, 20 bp, Artificial Sequence
  Description of Artificial Sequence: Synthetic oligonucleotide
  Target: ATXN2; (+) strand; PAM type: YTN; PAM sequence: CTG
tacaatactgggtcatctat

SEQ ID NO: 93241 - DNA, 20 bp, Artificial Sequence
  Description of Artificial Sequence: Synthetic oligonucleotide
  Target: ATXN2; (+) strand; PAM type: YTN; PAM sequence: CTG
ggtcatctatattttgctag

SEQ ID NO: 93242 - DNA, 20 bp, Artificial Sequence
  Description of Artificial Sequence: Synthetic oligonucleotide
  Target: ATXN2; (+) strand; PAM type: YTN; PAM sequence: CTA
tattttgctagtaagaatga

SEQ ID NO: 93243 - DNA, 20 bp, Artificial Sequence
  Description of Artificial Sequence: Synthetic oligonucleotide
  Target: ATXN2; (+) strand; PAM type: YTN; PAM sequence: TTT
tgctagtaagaatgaacatg

SEQ ID NO: 93244 - DNA, 20 bp, Artificial Sequence
  Description of Artificial Sequence: Synthetic oligonucleotide
  Target: ATXN2; (+) strand; PAM type: YTN; PAM sequence: TTT
gctagtaagaatgaacatgt

SEQ ID NO: 93245 - DNA, 20 bp, Artificial Sequence
  Description of Artificial Sequence: Synthetic oligonucleotide
  Target: ATXN2; (+) strand; PAM type: YTN; PAM sequence: TTG
ctagtaagaatgaacatgta

SEQ ID NO: 93246 - DNA, 20 bp, Artificial Sequence
  Description of Artificial Sequence: Synthetic oligonucleotide
  Target: ATXN2; (+) strand; PAM type: YTN; PAM sequence: CTA
gtaagaatgaacatgtattg

SEQ ID NO: 93247 - DNA, 20 bp, Artificial Sequence
  Description of Artificial Sequence: Synthetic oligonucleotide
  Target: ATXN2; (+) strand; PAM type: YTN; PAM sequence: TTG
aatacataccatgtgctagg

SEQ ID NO: 93248 - DNA, 20 bp, Artificial Sequence
  Description of Artificial Sequence: Synthetic oligonucleotide
  Target: ATXN2; (+) strand; PAM type: YTN; PAM sequence: CTA
ggcactatgctaaacacttt

SEQ ID NO: 93249 - DNA, 20 bp, Artificial Sequence
  Description of Artificial Sequence: Synthetic oligonucleotide
  Target: ATXN2; (+) strand; PAM type: YTN; PAM sequence: CTA
tgctaaacactttataggca

SEQ ID NO: 93250 - DNA, 20 bp, Artificial Sequence
  Description of Artificial Sequence: Synthetic oligonucleotide
  Target: ATXN2; (+) strand; PAM type: YTN; PAM sequence: CTA
aacactttataggcaatatc

SEQ ID NO: 93251 - DNA, 20 bp, Artificial Sequence
  Description of Artificial Sequence: Synthetic oligonucleotide
  Target: ATXN2; (+) strand; PAM type: YTN; PAM sequence: CTT
tataggcaatatctcatcga

SEQ ID NO: 93252 - DNA, 20 bp, Artificial Sequence
  Description of Artificial Sequence: Synthetic oligonucleotide
  Target: ATXN2; (+) strand; PAM type: YTN; PAM sequence: TTT
ataggcaatatctcatcgag

SEQ ID NO: 93253 - DNA, 20 bp, Artificial Sequence
  Description of Artificial Sequence: Synthetic oligonucleotide
  Target: ATXN2; (+) strand; PAM type: YTN; PAM sequence: TTA
taggcaatatctcatcgagc

SEQ ID NO: 93254 - DNA, 20 bp, Artificial Sequence
  Description of Artificial Sequence: Synthetic oligonucleotide
  Target: ATXN2; (+) strand; PAM type: YTN; PAM sequence: CTC
atcgagctctcacaggaaca

SEQ ID NO: 93255 - DNA, 20 bp, Artificial Sequence
  Description of Artificial Sequence: Synthetic oligonucleotide
  Target: ATXN2; (+) strand; PAM type: YTN; PAM sequence: CTC
tcacaggaacactatgaagc

SEQ ID NO: 93256 - DNA, 20 bp, Artificial Sequence
  Description of Artificial Sequence: Synthetic oligonucleotide
  Target: ATXN2; (+) strand; PAM type: YTN; PAM sequence: CTC
acaggaacactatgaagcag

SEQ ID NO: 93257 - DNA, 20 bp, Artificial Sequence
  Description of Artificial Sequence: Synthetic oligonucleotide
  Target: ATXN2; (+) strand; PAM type: YTN; PAM sequence: CTA
tgaagcaggttctaaaatta

SEQ ID NO: 93258 - DNA, 20 bp, Artificial Sequence
  Description of Artificial Sequence: Synthetic oligonucleotide
  Target: ATXN2; (+) strand; PAM type: YTN; PAM sequence: TTC
taaaattaacccattttggc

SEQ ID NO: 93259 - DNA, 20 bp, Artificial Sequence
  Description of Artificial Sequence: Synthetic oligonucleotide
  Target: ATXN2; (+) strand; PAM type: YTN; PAM sequence: CTA
aaattaacccattttggctt

SEQ ID NO: 93260 - DNA, 20 bp, Artificial Sequence
  Description of Artificial Sequence: Synthetic oligonucleotide
  Target: ATXN2; (+) strand; PAM type: YTN; PAM sequence: TTA
acccattttggcttggggga

SEQ ID NO: 93261 - DNA, 20 bp, Artificial Sequence
  Description of Artificial Sequence: Synthetic oligonucleotide
  Target: ATXN2; (+) strand; PAM type: YTN; PAM sequence: TTT
tggcttgggggaagtagata

SEQ ID NO: 93262 - DNA, 20 bp, Artificial Sequence
  Description of Artificial Sequence: Synthetic oligonucleotide
  Target: ATXN2; (+) strand; PAM type: YTN; PAM sequence: TTT
ggcttgggggaagtagatag

SEQ ID NO: 93263 - DNA, 20 bp, Artificial Sequence
  Description of Artificial Sequence: Synthetic oligonucleotide
  Target: ATXN2; (+) strand; PAM type: YTN; PAM sequence: TTG
gcttgggggaagtagatagc

SEQ ID NO: 93264 - DNA, 20 bp, Artificial Sequence
  Description of Artificial Sequence: Synthetic oligonucleotide
  Target: ATXN2; (+) strand; PAM type: YTN; PAM sequence: CTT
gggggaagtagatagcatgc

SEQ ID NO: 93265 - DNA, 20 bp, Artificial Sequence
  Description of Artificial Sequence: Synthetic oligonucleotide
  Target: ATXN2; (+) strand; PAM type: YTN; PAM sequence: TTG
ggggaagtagatagcatgcc

SEQ ID NO: 93266 - DNA, 20 bp, Artificial Sequence
  Description of Artificial Sequence: Synthetic oligonucleotide
  Target: ATXN2; (+) strand; PAM type: YTN; PAM sequence: TTA
cgcacatgatgtatagaggc

SEQ ID NO: 93267 - DNA, 20 bp, Artificial Sequence
  Description of Artificial Sequence: Synthetic oligonucleotide
  Target: ATXN2; (+) strand; PAM type: YTN; PAM sequence: TTC
aaacctaggtccatttacct

SEQ ID NO: 93268 - DNA, 20 bp, Artificial Sequence
  Description of Artificial Sequence: Synthetic oligonucleotide
  Target: ATXN2; (+) strand; PAM type: YTN; PAM sequence: CTA
ggtccatttacctctaaaac

SEQ ID NO: 93269 - DNA, 20 bp, Artificial Sequence
  Description of Artificial Sequence: Synthetic oligonucleotide
  Target: ATXN2; (+) strand; PAM type: YTN; PAM sequence: TTT
acctctaaaacccacattat

SEQ ID NO: 93270 - DNA, 20 bp, Artificial Sequence
  Description of Artificial Sequence: Synthetic oligonucleotide
  Target: ATXN2; (+) strand; PAM type: YTN; PAM sequence: TTA
cctctaaaacccacattatt

SEQ ID NO: 93271 - DNA, 20 bp, Artificial Sequence
  Description of Artificial Sequence: Synthetic oligonucleotide
  Target: ATXN2; (+) strand; PAM type: YTN; PAM sequence: CTC
taaaacccacattattaacc

SEQ ID NO: 93272 - DNA, 20 bp, Artificial Sequence
  Description of Artificial Sequence: Synthetic oligonucleotide
  Target: ATXN2; (+) strand; PAM type: YTN; PAM sequence: CTA
aaacccacattattaaccca

SEQ ID NO: 93273 - DNA, 20 bp, Artificial Sequence
  Description of Artificial Sequence: Synthetic oligonucleotide
  Target: ATXN2; (+) strand; PAM type: YTN; PAM sequence: TTA
ttaacccaaaacagatcaaa

SEQ ID NO: 93274 - DNA, 20 bp, Artificial Sequence
  Description of Artificial Sequence: Synthetic oligonucleotide
  Target: ATXN2; (+) strand; PAM type: YTN; PAM sequence: TTA
acccaaaacagatcaaatta

SEQ ID NO: 93275 - DNA, 20 bp, Artificial Sequence
  Description of Artificial Sequence: Synthetic oligonucleotide
  Target: ATXN2; (+) strand; PAM type: YTN; PAM sequence: TTA
ctagcaattcttacacaaat

SEQ ID NO: 93276 - DNA, 20 bp, Artificial Sequence
  Description of Artificial Sequence: Synthetic oligonucleotide
  Target: ATXN2; (+) strand; PAM type: YTN; PAM sequence: CTA
gcaattcttacacaaataaa

SEQ ID NO: 93277 - DNA, 20 bp, Artificial Sequence
  Description of Artificial Sequence: Synthetic oligonucleotide
  Target: ATXN2; (+) strand; PAM type: YTN; PAM sequence: TTC
ttacacaaataaagctatca

SEQ ID NO: 93278 - DNA, 20 bp, Artificial Sequence
  Description of Artificial Sequence: Synthetic oligonucleotide
  Target: ATXN2; (+) strand; PAM type: YTN; PAM sequence: CTT
acacaaataaagctatcagc

SEQ ID NO: 93279 - DNA, 20 bp, Artificial Sequence
  Description of Artificial Sequence: Synthetic oligonucleotide
  Target: ATXN2; (+) strand; PAM type: YTN; PAM sequence: TTA
cacaaataaagctatcagca

SEQ ID NO: 93280 - DNA, 20 bp, Artificial Sequence
  Description of Artificial Sequence: Synthetic oligonucleotide
  Target: ATXN2; (+) strand; PAM type: YTN; PAM sequence: CTA
tcagcactctgcatatggct

SEQ ID NO: 93281 - DNA, 20 bp, Artificial Sequence
  Description of Artificial Sequence: Synthetic oligonucleotide
  Target: ATXN2; (+) strand; PAM type: YTN; PAM sequence: CTC
tgcatatggctcaaaaggga

SEQ ID NO: 93282 - DNA, 20 bp, Artificial Sequence
  Description of Artificial Sequence: Synthetic oligonucleotide
  Target: ATXN2; (+) strand; PAM type: YTN; PAM sequence: CTG
catatggctcaaaagggaag

SEQ ID NO: 93283 - DNA, 20 bp, Artificial Sequence
  Description of Artificial Sequence: Synthetic oligonucleotide
  Target: ATXN2; (+) strand; PAM type: YTN; PAM sequence: CTC
aaaagggaaggaacaacaaa

SEQ ID NO: 93284 - DNA, 20 bp, Artificial Sequence
  Description of Artificial Sequence: Synthetic oligonucleotide
  Target: ATXN2; (+) strand; PAM type: YTN; PAM sequence: TTT
ctatttctgcctaaatgaag

SEQ ID NO: 93285 - DNA, 20 bp, Artificial Sequence
  Description of Artificial Sequence: Synthetic oligonucleotide
  Target: ATXN2; (+) strand; PAM type: YTN; PAM sequence: TTC
tatttctgcctaaatgaagg

SEQ ID NO: 93286 - DNA, 20 bp, Artificial Sequence
  Description of Artificial Sequence: Synthetic oligonucleotide
  Target: ATXN2; (+) strand; PAM type: YTN; PAM sequence: CTA
tttctgcctaaatgaaggac

SEQ ID NO: 93287 - DNA, 20 bp, Artificial Sequence
  Description of Artificial Sequence: Synthetic oligonucleotide
  Target: ATXN2; (+) strand; PAM type: YTN; PAM sequence: TTT
ctgcctaaatgaaggactac

SEQ ID NO: 93288 - DNA, 20 bp, Artificial Sequence
  Description of Artificial Sequence: Synthetic oligonucleotide
  Target: ATXN2; (+) strand; PAM type: YTN; PAM sequence: TTC
tgcctaaatgaaggactaca

SEQ ID NO: 93289 - DNA, 20 bp, Artificial Sequence
  Description of Artificial Sequence: Synthetic oligonucleotide
  Target: ATXN2; (+) strand; PAM type: YTN; PAM sequence: CTG
cctaaatgaaggactacaga

SEQ ID NO: 93290 - DNA, 20 bp, Artificial Sequence
  Description of Artificial Sequence: Synthetic oligonucleotide
  Target: ATXN2; (+) strand; PAM type: YTN; PAM sequence: CTA
aatgaaggactacagatatt

SEQ ID NO: 93291 - DNA, 20 bp, Artificial Sequence
  Description of Artificial Sequence: Synthetic oligonucleotide
  Target: ATXN2; (+) strand; PAM type: YTN; PAM sequence: CTA
cagatatttgtgaacaaatg

SEQ ID NO: 93292 - DNA, 20 bp, Artificial Sequence
  Description of Artificial Sequence: Synthetic oligonucleotide
  Target: ATXN2; (+) strand; PAM type: YTN; PAM sequence: TTT
gtgaacaaatgcagtttggg

SEQ ID NO: 93293 - DNA, 20 bp, Artificial Sequence
  Description of Artificial Sequence: Synthetic oligonucleotide
  Target: ATXN2; (+) strand; PAM type: YTN; PAM sequence: TTG
tgaacaaatgcagtttgggg

SEQ ID NO: 93294 - DNA, 20 bp, Artificial Sequence
  Description of Artificial Sequence: Synthetic oligonucleotide
  Target: ATXN2; (+) strand; PAM type: YTN; PAM sequence: TTT
ggggctatgagcatgtcatg

SEQ ID NO: 93295 - DNA, 20 bp, Artificial Sequence
  Description of Artificial Sequence: Synthetic oligonucleotide
  Target: ATXN2; (+) strand; PAM type: YTN; PAM sequence: TTG
gggctatgagcatgtcatga

SEQ ID NO: 93296 - DNA, 20 bp, Artificial Sequence
  Description of Artificial Sequence: Synthetic oligonucleotide
  Target: ATXN2; (+) strand; PAM type: YTN; PAM sequence: CTA
tgagcatgtcatgaagttag

SEQ ID NO: 93297 - DNA, 20 bp, Artificial Sequence
  Description of Artificial Sequence: Synthetic oligonucleotide
  Target: ATXN2; (+) strand; PAM type: YTN; PAM sequence: TTA
gctctaatgaatcactgact

SEQ ID NO: 93298 - DNA, 20 bp, Artificial Sequence
  Description of Artificial Sequence: Synthetic oligonucleotide
  Target: ATXN2; (+) strand; PAM type: YTN; PAM sequence: CTC
taatgaatcactgactgaca

SEQ ID NO: 93299 - DNA, 20 bp, Artificial Sequence
  Description of Artificial Sequence: Synthetic oligonucleotide
  Target: ATXN2; (+) strand; PAM type: YTN; PAM sequence: CTA
atgaatcactgactgacagt

SEQ ID NO: 93300 - DNA, 20 bp, Artificial Sequence
  Description of Artificial Sequence: Synthetic oligonucleotide
  Target: ATXN2; (+) strand; PAM type: YTN; PAM sequence: CTG
actgacagtgcagcatgcac

SEQ ID NO: 93301 - DNA, 20 bp, Artificial Sequence
  Description of Artificial Sequence: Synthetic oligonucleotide
  Target: ATXN2; (+) strand; PAM type: YTN; PAM sequence: CTG
acagtgcagcatgcactatg

SEQ ID NO: 93302 - DNA, 20 bp, Artificial Sequence
  Description of Artificial Sequence: Synthetic oligonucleotide
  Target: ATXN2; (+) strand; PAM type: YTN; PAM sequence: CTA
tgcattagttactattcaaa

SEQ ID NO: 93303 - DNA, 20 bp, Artificial Sequence
  Description of Artificial Sequence: Synthetic oligonucleotide
  Target: ATXN2; (+) strand; PAM type: YTN; PAM sequence: TTA
gttactattcaaagcactgc

SEQ ID NO: 93304 - DNA, 20 bp, Artificial Sequence
  Description of Artificial Sequence: Synthetic oligonucleotide
  Target: ATXN2; (+) strand; PAM type: YTN; PAM sequence: TTA
ctattcaaagcactgctaga

SEQ ID NO: 93305 - DNA, 20 bp, Artificial Sequence
  Description of Artificial Sequence: Synthetic oligonucleotide
  Target: ATXN2; (+) strand; PAM type: YTN; PAM sequence: CTA
ttcaaagcactgctagaagc

SEQ ID NO: 93306 - DNA, 20 bp, Artificial Sequence
  Description of Artificial Sequence: Synthetic oligonucleotide
  Target: ATXN2; (+) strand; PAM type: YTN; PAM sequence: TTC
aaagcactgctagaagctta

SEQ ID NO: 93307 - DNA, 20 bp, Artificial Sequence
  Description of Artificial Sequence: Synthetic oligonucleotide
  Target: ATXN2; (+) strand; PAM type: YTN; PAM sequence: CTG
ctagaagcttaaacaccaga

SEQ ID NO: 93308 - DNA, 20 bp, Artificial Sequence
  Description of Artificial Sequence: Synthetic oligonucleotide
  Target: ATXN2; (+) strand; PAM type: YTN; PAM sequence: CTA
gaagcttaaacaccagatgg

SEQ ID NO: 93309 - DNA, 20 bp, Artificial Sequence
  Description of Artificial Sequence: Synthetic oligonucleotide
  Target: ATXN2; (+) strand; PAM type: YTN; PAM sequence: CTT
aaacaccagatggtcagccc

SEQ ID NO: 93310 - DNA, 20 bp, Artificial Sequence
  Description of Artificial Sequence: Synthetic oligonucleotide
  Target: ATXN2; (+) strand; PAM type: YTN; PAM sequence: TTA
aacaccagatggtcagccct

SEQ ID NO: 93311 - DNA, 20 bp, Artificial Sequence
  Description of Artificial Sequence: Synthetic oligonucleotide
  Target: ATXN2; (+) strand; PAM type: YTN; PAM sequence: CTC
ttacttactagccatgtgag

SEQ ID NO: 93312 - DNA, 20 bp, Artificial Sequence
  Description of Artificial Sequence: Synthetic oligonucleotide
  Target: ATXN2; (+) strand; PAM type: YTN; PAM sequence: CTT
acttactagccatgtgagtt

SEQ ID NO: 93313 - DNA, 20 bp, Artificial Sequence
  Description of Artificial Sequence: Synthetic oligonucleotide
  Target: ATXN2; (+) strand; PAM type: YTN; PAM sequence: TTA
cttactagccatgtgagttt

SEQ ID NO: 93314 - DNA, 20 bp, Artificial Sequence
  Description of Artificial Sequence: Synthetic oligonucleotide
  Target: ATXN2; (+) strand; PAM type: YTN; PAM sequence: CTT
actagccatgtgagtttggg

SEQ ID NO: 93315 - DNA, 20 bp, Artificial Sequence
  Description of Artificial Sequence: Synthetic oligonucleotide
  Target: ATXN2; (+) strand; PAM type: YTN; PAM sequence: TTA
ctagccatgtgagtttgggc

SEQ ID NO: 93316 - DNA, 20 bp, Artificial Sequence
  Description of Artificial Sequence: Synthetic oligonucleotide
  Target: ATXN2; (+) strand; PAM type: YTN; PAM sequence: CTA
gccatgtgagtttgggcaga

SEQ ID NO: 93317 - DNA, 20 bp, Artificial Sequence
  Description of Artificial Sequence: Synthetic oligonucleotide
  Target: ATXN2; (+) strand; PAM type: YTN; PAM sequence: TTT
gggcagattacttaacttct

SEQ ID NO: 93318 - DNA, 20 bp, Artificial Sequence
  Description of Artificial Sequence: Synthetic oligonucleotide
  Target: ATXN2; (+) strand; PAM type: YTN; PAM sequence: TTG
ggcagattacttaacttctc

SEQ ID NO: 93319 - DNA, 20 bp, Artificial Sequence
  Description of Artificial Sequence: Synthetic oligonucleotide
  Target: ATXN2; (+) strand; PAM type: YTN; PAM sequence: TTA
cttaacttctctttgcccaa

SEQ ID NO: 93320 - DNA, 20 bp, Artificial Sequence
  Description of Artificial Sequence: Synthetic oligonucleotide
  Target: ATXN2; (+) strand; PAM type: YTN; PAM sequence: CTT
aacttctctttgcccaagct

SEQ ID NO: 93321 - DNA, 20 bp, Artificial Sequence
  Description of Artificial Sequence: Synthetic oligonucleotide
  Target: ATXN2; (+) strand; PAM type: YTN; PAM sequence: TTA
acttctctttgcccaagctg

SEQ ID NO: 93322 - DNA, 20 bp, Artificial Sequence
  Description of Artificial Sequence: Synthetic oligonucleotide
  Target: ATXN2; (+) strand; PAM type: YTN; PAM sequence: CTT
ctctttgcccaagctgccta

SEQ ID NO: 93323 - DNA, 20 bp, Artificial Sequence
  Description of Artificial Sequence: Synthetic oligonucleotide
  Target: ATXN2; (+) strand; PAM type: YTN; PAM sequence: TTC
tctttgcccaagctgcctaa

SEQ ID NO: 93324 - DNA, 20 bp, Artificial Sequence
  Description of Artificial Sequence: Synthetic oligonucleotide
  Target: ATXN2; (+) strand; PAM type: YTN; PAM sequence: CTC
tttgcccaagctgcctaata

SEQ ID NO: 93325 - DNA, 20 bp, Artificial Sequence
  Description of Artificial Sequence: Synthetic oligonucleotide
  Target: ATXN2; (+) strand; PAM type: YTN; PAM sequence: CTT
tgcccaagctgcctaatata

SEQ ID NO: 93326 - DNA, 20 bp, Artificial Sequence
  Description of Artificial Sequence: Synthetic oligonucleotide
  Target: ATXN2; (+) strand; PAM type: YTN; PAM sequence: TTT
gcccaagctgcctaatatac

SEQ ID NO: 93327 - DNA, 20 bp, Artificial Sequence
  Description of Artificial Sequence: Synthetic oligonucleotide
  Target: ATXN2; (+) strand; PAM type: YTN; PAM sequence: TTG
cccaagctgcctaatataca

SEQ ID NO: 93328 - DNA, 20 bp, Artificial Sequence
  Description of Artificial Sequence: Synthetic oligonucleotide
  Target: ATXN2; (+) strand; PAM type: YTN; PAM sequence: CTG
cctaatatacacagtgcaga

SEQ ID NO: 93329 - DNA, 20 bp, Artificial Sequence
  Description of Artificial Sequence: Synthetic oligonucleotide
  Target: ATXN2; (+) strand; PAM type: YTN; PAM sequence: CTA
atatacacagtgcagataca

SEQ ID NO: 93330 - DNA, 20 bp, Artificial Sequence
  Description of Artificial Sequence: Synthetic oligonucleotide
  Target: ATXN2; (+) strand; PAM type: YTN; PAM sequence: CTT
gcttgacagagatgttagac

SEQ ID NO: 93331 - DNA, 20 bp, Artificial Sequence
  Description of Artificial Sequence: Synthetic oligonucleotide
  Target: ATXN2; (+) strand; PAM type: YTN; PAM sequence: TTG
cttgacagagatgttagaca

SEQ ID NO: 93332 - DNA, 20 bp, Artificial Sequence
  Description of Artificial Sequence: Synthetic oligonucleotide
  Target: ATXN2; (+) strand; PAM type: YTN; PAM sequence: CTT
gacagagatgttagacaaga

SEQ ID NO: 93333 - DNA, 20 bp, Artificial Sequence
  Description of Artificial Sequence: Synthetic oligonucleotide
  Target: ATXN2; (+) strand; PAM type: YTN; PAM sequence: TTG
acagagatgttagacaagat

SEQ ID NO: 93334 - DNA, 20 bp, Artificial Sequence
  Description of Artificial Sequence: Synthetic oligonucleotide
  Target: ATXN2; (+) strand; PAM type: YTN; PAM sequence: TTA
gacaagatttaacatacaag

SEQ ID NO: 93335 - DNA, 20 bp, Artificial Sequence
  Description of Artificial Sequence: Synthetic oligonucleotide
  Target: ATXN2; (+) strand; PAM type: YTN; PAM sequence: TTT
aacatacaagcatgaagaac

SEQ ID NO: 93336 - DNA, 20 bp, Artificial Sequence
  Description of Artificial Sequence: Synthetic oligonucleotide
  Target: ATXN2; (+) strand; PAM type: YTN; PAM sequence: TTA
acatacaagcatgaagaaca

SEQ ID NO: 93337 - DNA, 20 bp, Artificial Sequence
  Description of Artificial Sequence: Synthetic oligonucleotide
  Target: ATXN2; (+) strand; PAM type: YTN; PAM sequence: CTG
gtacacaggaaatacgcaat

SEQ ID NO: 93338 - DNA, 20 bp, Artificial Sequence
  Description of Artificial Sequence: Synthetic oligonucleotide
  Target: ATXN2; (+) strand; PAM type: YTN; PAM sequence: TTA
tattatctgaagagaacaat

SEQ ID NO: 93339 - DNA, 20 bp, Artificial Sequence
  Description of Artificial Sequence: Synthetic oligonucleotide
  Target: ATXN2; (+) strand; PAM type: YTN; PAM sequence: TTA
tctgaagagaacaattagaa

SEQ ID NO: 93340 - DNA, 20 bp, Artificial Sequence
  Description of Artificial Sequence: Synthetic oligonucleotide
  Target: ATXN2; (+) strand; PAM type: YTN; PAM sequence: CTG
aagagaacaattagaaagtt

SEQ ID NO: 93341 - DNA, 20 bp, Artificial Sequence
  Description of Artificial Sequence: Synthetic oligonucleotide
  Target: ATXN2; (+) strand; PAM type: YTN; PAM sequence: TTA
gaaagttcactcttttattt

SEQ ID NO: 93342 - DNA, 20 bp, Artificial Sequence
  Description of Artificial Sequence: Synthetic oligonucleotide
  Target: ATXN2; (+) strand; PAM type: YTN; PAM sequence: TTC
actcttttatttttttttaa

SEQ ID NO: 93343 - DNA, 20 bp, Artificial Sequence
  Description of Artificial Sequence: Synthetic oligonucleotide
  Target: ATXN2; (+) strand; PAM type: YTN; PAM sequence: CTC
ttttatttttttttaattaa

SEQ ID NO: 93344 - DNA, 20 bp, Artificial Sequence
  Description of Artificial Sequence: Synthetic oligonucleotide
  Target: ATXN2; (+) strand; PAM type: YTN; PAM sequence: CTT
ttatttttttttaattaaaa

SEQ ID NO: 93345 - DNA, 20 bp, Artificial Sequence
  Description of Artificial Sequence: Synthetic oligonucleotide
  Target: ATXN2; (+) strand; PAM type: YTN; PAM sequence: TTT
tatttttttttaattaaaat

SEQ ID NO: 93346 - DNA, 20 bp, Artificial Sequence
  Description of Artificial Sequence: Synthetic oligonucleotide
  Target: ATXN2; (+) strand; PAM type: YTN; PAM sequence: TTT
atttttttttaattaaaatt

SEQ ID NO: 93347 - DNA, 20 bp, Artificial Sequence
  Description of Artificial Sequence: Synthetic oligonucleotide
  Target: ATXN2; (+) strand; PAM type: YTN; PAM sequence: TTA
tttttttttaattaaaattt

SEQ ID NO: 93348 - DNA, 20 bp, Artificial Sequence
  Description of Artificial Sequence: Synthetic oligonucleotide
  Target: ATXN2; (+) strand; PAM type: YTN; PAM sequence: TTT
ttttttaattaaaatttaag

SEQ ID NO: 93349 - DNA, 20 bp, Artificial Sequence
  Description of Artificial Sequence: Synthetic oligonucleotide
  Target: ATXN2; (+) strand; PAM type: YTN; PAM sequence: TTT
tttttaattaaaatttaagt

SEQ ID NO: 93350 - DNA, 20 bp, Artificial Sequence
  Description of Artificial Sequence: Synthetic oligonucleotide
  Target: ATXN2; (+) strand; PAM type: YTN; PAM sequence: TTT
ttttaattaaaatttaagtt

SEQ ID NO: 93351 - DNA, 20 bp, Artificial Sequence
  Description of Artificial Sequence: Synthetic oligonucleotide
  Target: ATXN2; (+) strand; PAM type: YTN; PAM sequence: TTT
tttaattaaaatttaagttc

SEQ ID NO: 93352 - DNA, 20 bp, Artificial Sequence
  Description of Artificial Sequence: Synthetic oligonucleotide
  Target: ATXN2; (+) strand; PAM type: YTN; PAM sequence: TTT
ttaattaaaatttaagttct

SEQ ID NO: 93353 - DNA, 20 bp, Artificial Sequence
  Description of Artificial Sequence: Synthetic oligonucleotide
  Target: ATXN2; (+) strand; PAM type: YTN; PAM sequence: TTT
taattaaaatttaagttctg

SEQ ID NO: 93354 - DNA, 20 bp, Artificial Sequence
  Description of Artificial Sequence: Synthetic oligonucleotide
  Target: ATXN2; (+) strand; PAM type: YTN; PAM sequence: TTT
aattaaaatttaagttctgg

SEQ ID NO: 93355 - DNA, 20 bp, Artificial Sequence
  Description of Artificial Sequence: Synthetic oligonucleotide
  Target: ATXN2; (+) strand; PAM type: YTN; PAM sequence: TTA
attaaaatttaagttctggg

SEQ ID NO: 93356 - DNA, 20 bp, Artificial Sequence
  Description of Artificial Sequence: Synthetic oligonucleotide
  Target: ATXN2; (+) strand; PAM type: YTN; PAM sequence: TTA
aaatttaagttctgggacac

SEQ ID NO: 93357 - DNA, 20 bp, Artificial Sequence
  Description of Artificial Sequence: Synthetic oligonucleotide
  Target: ATXN2; (+) strand; PAM type: YTN; PAM sequence: TTT
aagttctgggacacatattt

SEQ ID NO: 93358 - DNA, 20 bp, Artificial Sequence
  Description of Artificial Sequence: Synthetic oligonucleotide
  Target: ATXN2; (+) strand; PAM type: YTN; PAM sequence: TTA
agttctgggacacatatttt

SEQ ID NO: 93359 - DNA, 20 bp, Artificial Sequence
  Description of Artificial Sequence: Synthetic oligonucleotide
  Target: ATXN2; (+) strand; PAM type: YTN; PAM sequence: TTC
tgggacacatattttttttt

SEQ ID NO: 93360 - DNA, 20 bp, Artificial Sequence
  Description of Artificial Sequence: Synthetic oligonucleotide
  Target: ATXN2; (+) strand; PAM type: YTN; PAM sequence: CTG
ggacacatattttttttttc

SEQ ID NO: 93361 - DNA, 20 bp, Artificial Sequence
  Description of Artificial Sequence: Synthetic oligonucleotide
  Target: ATXN2; (+) strand; PAM type: YTN; PAM sequence: TTT
tttttttccactctcttttt

SEQ ID NO: 93362 - DNA, 20 bp, Artificial Sequence
  Description of Artificial Sequence: Synthetic oligonucleotide
  Target: ATXN2; (+) strand; PAM type: YTN; PAM sequence: TTT
ttttttccactctctttttt

SEQ ID NO: 93363 - DNA, 20 bp, Artificial Sequence
  Description of Artificial Sequence: Synthetic oligonucleotide
  Target: ATXN2; (+) strand; PAM type: YTN; PAM sequence: TTT
tttttccactctcttttttt

SEQ ID NO: 93364 - DNA, 20 bp, Artificial Sequence
  Description of Artificial Sequence: Synthetic oligonucleotide
  Target: ATXN2; (+) strand; PAM type: YTN; PAM sequence: TTT
ttttccactctctttttttt

SEQ ID NO: 93365 - DNA, 20 bp, Artificial Sequence
  Description of Artificial Sequence: Synthetic oligonucleotide
  Target: ATXN2; (+) strand; PAM type: YTN; PAM sequence: TTT
tttccactctcttttttttt

SEQ ID NO: 93366 - DNA, 20 bp, Artificial Sequence
  Description of Artificial Sequence: Synthetic oligonucleotide
  Target: ATXN2; (+) strand; PAM type: YTN; PAM sequence: TTT
ttccactctctttttttttc

SEQ ID NO: 93367 - DNA, 20 bp, Artificial Sequence
  Description of Artificial Sequence: Synthetic oligonucleotide
  Target: ATXN2; (+) strand; PAM type: YTN; PAM sequence: TTT
tccactctctttttttttct

SEQ ID NO: 93368 - DNA, 20 bp, Artificial Sequence
  Description of Artificial Sequence: Synthetic oligonucleotide
  Target: ATXN2; (+) strand; PAM type: YTN; PAM sequence: TTT
ccactctctttttttttctt

SEQ ID NO: 93369 - DNA, 20 bp, Artificial Sequence
  Description of Artificial Sequence: Synthetic oligonucleotide
  Target: ATXN2; (+) strand; PAM type: YTN; PAM sequence: TTC
cactctctttttttttcttt

SEQ ID NO: 93370 - DNA, 20 bp, Artificial Sequence
  Description of Artificial Sequence: Synthetic oligonucleotide
  Target: ATXN2; (+) strand; PAM type: YTN; PAM sequence: CTC
tctttttttttctttgagac

SEQ ID NO: 93371 - DNA, 20 bp, Artificial Sequence
  Description of Artificial Sequence: Synthetic oligonucleotide
  Target: ATXN2; (+) strand; PAM type: YTN; PAM sequence: CTC
tttttttttctttgagacag

SEQ ID NO: 93372 - DNA, 20 bp, Artificial Sequence
  Description of Artificial Sequence: Synthetic oligonucleotide
  Target: ATXN2; (+) strand; PAM type: YTN; PAM sequence: CTT
tttttttctttgagacagat

SEQ ID NO: 93373 - DNA, 20 bp, Artificial Sequence
  Description of Artificial Sequence: Synthetic oligonucleotide
  Target: ATXN2; (+) strand; PAM type: YTN; PAM sequence: TTT
ttttttctttgagacagatt

SEQ ID NO: 93374 - DNA, 20 bp, Artificial Sequence
  Description of Artificial Sequence: Synthetic oligonucleotide
  Target: ATXN2; (+) strand; PAM type: YTN; PAM sequence: TTT
tttttctttgagacagattc

SEQ ID NO: 93375 - DNA, 20 bp, Artificial Sequence
  Description of Artificial Sequence: Synthetic oligonucleotide
  Target: ATXN2; (+) strand; PAM type: YTN; PAM sequence: TTT
ttttctttgagacagattct

SEQ ID NO: 93376 - DNA, 20 bp, Artificial Sequence
  Description of Artificial Sequence: Synthetic oligonucleotide
  Target: ATXN2; (+) strand; PAM type: YTN; PAM sequence: TTT
tttctttgagacagattctc

SEQ ID NO: 93377 - DNA, 20 bp, Artificial Sequence
  Description of Artificial Sequence: Synthetic oligonucleotide
  Target: ATXN2; (+) strand; PAM type: YTN; PAM sequence: TTT
ttctttgagacagattctcg

SEQ ID NO: 93378 - DNA, 20 bp, Artificial Sequence
  Description of Artificial Sequence: Synthetic oligonucleotide
  Target: ATXN2; (+) strand; PAM type: YTN; PAM sequence: TTT
tctttgagacagattctcgc

SEQ ID NO: 93379 - DNA, 20 bp, Artificial Sequence
  Description of Artificial Sequence: Synthetic oligonucleotide
  Target: ATXN2; (+) strand; PAM type: YTN; PAM sequence: TTT
ctttgagacagattctcgct

SEQ ID NO: 93380 - DNA, 20 bp, Artificial Sequence
  Description of Artificial Sequence: Synthetic oligonucleotide
  Target: ATXN2; (+) strand; PAM type: YTN; PAM sequence: TTC
tttgagacagattctcgctc

SEQ ID NO: 93381 - DNA, 20 bp, Artificial Sequence
  Description of Artificial Sequence: Synthetic oligonucleotide
  Target: ATXN2; (+) strand; PAM type: YTN; PAM sequence: CTT
tgagacagattctcgctctg

SEQ ID NO: 93382 - DNA, 20 bp, Artificial Sequence
  Description of Artificial Sequence: Synthetic oligonucleotide
  Target: ATXN2; (+) strand; PAM type: YTN; PAM sequence: TTT
gagacagattctcgctctgt

SEQ ID NO: 93383 - DNA, 20 bp, Artificial Sequence
  Description of Artificial Sequence: Synthetic oligonucleotide
  Target: ATXN2; (+) strand; PAM type: YTN; PAM sequence: TTG
agacagattctcgctctgtc

SEQ ID NO: 93384 - DNA, 20 bp, Artificial Sequence
  Description of Artificial Sequence: Synthetic oligonucleotide
  Target: ATXN2; (+) strand; PAM type: YTN; PAM sequence: TTC
tcgctctgtcgcccactgat

SEQ ID NO: 93385 - DNA, 20 bp, Artificial Sequence
  Description of Artificial Sequence: Synthetic oligonucleotide
  Target: ATXN2; (+) strand; PAM type: YTN; PAM sequence: CTC
gctctgtcgcccactgatgc

SEQ ID NO: 93386 - DNA, 20 bp, Artificial Sequence
  Description of Artificial Sequence: Synthetic oligonucleotide
  Target: ATXN2; (+) strand; PAM type: YTN; PAM sequence: CTC
tgtcgcccactgatgcaatc

SEQ ID NO: 93387 - DNA, 20 bp, Artificial Sequence
  Description of Artificial Sequence: Synthetic oligonucleotide
  Target: ATXN2; (+) strand; PAM type: YTN; PAM sequence: CTG
tcgcccactgatgcaatctc

SEQ ID NO: 93388 - DNA, 20 bp, Artificial Sequence
  Description of Artificial Sequence: Synthetic oligonucleotide
  Target: ATXN2; (+) strand; PAM type: YTN; PAM sequence: CTG
atgcaatctcggatcactgc

SEQ ID NO: 93389 - DNA, 20 bp, Artificial Sequence
  Description of Artificial Sequence: Synthetic oligonucleotide
  Target: ATXN2; (+) strand; PAM type: YTN; PAM sequence: CTC
ggatcactgcaacctccacc

SEQ ID NO: 93390 - DNA, 20 bp, Artificial Sequence
  Description of Artificial Sequence: Synthetic oligonucleotide
  Target: ATXN2; (+) strand; PAM type: YTN; PAM sequence: CTG
caacctccacctcctggatt

SEQ ID NO: 93391 - DNA, 20 bp, Artificial Sequence
  Description of Artificial Sequence: Synthetic oligonucleotide
  Target: ATXN2; (+) strand; PAM type: YTN; PAM sequence: CTC
cacctcctggattcaagtga

SEQ ID NO: 93392 - DNA, 20 bp, Artificial Sequence
  Description of Artificial Sequence: Synthetic oligonucleotide
  Target: ATXN2; (+) strand; PAM type: YTN; PAM sequence: CTC
ctggattcaagtgattctcc

SEQ ID NO: 93393 - DNA, 20 bp, Artificial Sequence
  Description of Artificial Sequence: Synthetic oligonucleotide
  Target: ATXN2; (+) strand; PAM type: YTN; PAM sequence: CTG
gattcaagtgattctcctgc

SEQ ID NO: 93394 - DNA, 20 bp, Artificial Sequence
  Description of Artificial Sequence: Synthetic oligonucleotide
  Target: ATXN2; (+) strand; PAM type: YTN; PAM sequence: TTC
aagtgattctcctgcctcag

SEQ ID NO: 93395 - DNA, 20 bp, Artificial Sequence
  Description of Artificial Sequence: Synthetic oligonucleotide
  Target: ATXN2; (+) strand; PAM type: YTN; PAM sequence: TTC
tcctgcctcagcctcctgag

SEQ ID NO: 93396 - DNA, 20 bp, Artificial Sequence
  Description of Artificial Sequence: Synthetic oligonucleotide
  Target: ATXN2; (+) strand; PAM type: YTN; PAM sequence: CTC
ctgcctcagcctcctgagta

SEQ ID NO: 93397 - DNA, 20 bp, Artificial Sequence
  Description of Artificial Sequence: Synthetic oligonucleotide
  Target: ATXN2; (+) strand; PAM type: YTN; PAM sequence: CTG
cctcagcctcctgagtagct

SEQ ID NO: 93398 - DNA, 20 bp, Artificial Sequence
  Description of Artificial Sequence: Synthetic oligonucleotide
  Target: ATXN2; (+) strand; PAM type: YTN; PAM sequence: CTC
agcctcctgagtagctggga

SEQ ID NO: 93399 - DNA, 20 bp, Artificial Sequence
  Description of Artificial Sequence: Synthetic oligonucleotide
  Target: ATXN2; (+) strand; PAM type: YTN; PAM sequence: CTC
ctgagtagctgggattacag

SEQ ID NO: 93400 - DNA, 20 bp, Artificial Sequence
  Description of Artificial Sequence: Synthetic oligonucleotide
  Target: ATXN2; (+) strand; PAM type: YTN; PAM sequence: CTG
agtagctgggattacaggca

SEQ ID NO: 93401 - DNA, 20 bp, Artificial Sequence
  Description of Artificial Sequence: Synthetic oligonucleotide
  Target: ATXN2; (+) strand; PAM type: YTN; PAM sequence: CTG
ggattacaggcatgtgccac

SEQ ID NO: 93402 - DNA, 20 bp, Artificial Sequence
  Description of Artificial Sequence: Synthetic oligonucleotide
  Target: ATXN2; (+) strand; PAM type: YTN; PAM sequence: TTA
caggcatgtgccaccatgcc

SEQ ID NO: 93403 - DNA, 20 bp, Artificial Sequence
  Description of Artificial Sequence: Synthetic oligonucleotide
  Target: ATXN2; (+) strand; PAM type: YTN; PAM sequence: CTA
atttatatatttttaataaa

SEQ ID NO: 93404 - DNA, 20 bp, Artificial Sequence
  Description of Artificial Sequence: Synthetic oligonucleotide
  Target: ATXN2; (+) strand; PAM type: YTN; PAM sequence: TTT
atatatttttaataaagata

SEQ ID NO: 93405 - DNA, 20 bp, Artificial Sequence
  Description of Artificial Sequence: Synthetic oligonucleotide
  Target: ATXN2; (+) strand; PAM type: YTN; PAM sequence: TTA
tatatttttaataaagatag

SEQ ID NO: 93406 - DNA, 20 bp, Artificial Sequence
  Description of Artificial Sequence: Synthetic oligonucleotide
  Target: ATXN2; (+) strand; PAM type: YTN; PAM sequence: TTT
ttaataaagatagggtttcg

SEQ ID NO: 93407 - DNA, 20 bp, Artificial Sequence
  Description of Artificial Sequence: Synthetic oligonucleotide
  Target: ATXN2; (+) strand; PAM type: YTN; PAM sequence: TTT
taataaagatagggtttcgc

SEQ ID NO: 93408 - DNA, 20 bp, Artificial Sequence
  Description of Artificial Sequence: Synthetic oligonucleotide
  Target: ATXN2; (+) strand; PAM type: YTN; PAM sequence: TTT
aataaagatagggtttcgcc

SEQ ID NO: 93409 - DNA, 20 bp, Artificial Sequence
  Description of Artificial Sequence: Synthetic oligonucleotide
  Target: ATXN2; (+) strand; PAM type: YTN; PAM sequence: TTA
ataaagatagggtttcgcca

SEQ ID NO: 93410 - DNA, 20 bp, Artificial Sequence
  Description of Artificial Sequence: Synthetic oligonucleotide
  Target: ATXN2; (+) strand; PAM type: YTN; PAM sequence: TTT
cgccatgttatccaggctgg

SEQ ID NO: 93411 - DNA, 20 bp, Artificial Sequence
  Description of Artificial Sequence: Synthetic oligonucleotide
  Target: ATXN2; (+) strand; PAM type: YTN; PAM sequence: TTC
gccatgttatccaggctggt

SEQ ID NO: 93412 - DNA, 20 bp, Artificial Sequence
  Description of Artificial Sequence: Synthetic oligonucleotide
  Target: ATXN2; (+) strand; PAM type: YTN; PAM sequence: TTA
tccaggctggtctcaaactc

SEQ ID NO: 93413 - DNA, 20 bp, Artificial Sequence
  Description of Artificial Sequence: Synthetic oligonucleotide
  Target: ATXN2; (+) strand; PAM type: YTN; PAM sequence: CTG
gtctcaaactcctgacctca

SEQ ID NO: 93414 - DNA, 20 bp, Artificial Sequence
  Description of Artificial Sequence: Synthetic oligonucleotide
  Target: ATXN2; (+) strand; PAM type: YTN; PAM sequence: CTC
aaactcctgacctcaagtga

SEQ ID NO: 93415 - DNA, 20 bp, Artificial Sequence
  Description of Artificial Sequence: Synthetic oligonucleotide
  Target: ATXN2; (+) strand; PAM type: YTN; PAM sequence: CTC
ctgacctcaagtgatccacc

SEQ ID NO: 93416 - DNA, 20 bp, Artificial Sequence
  Description of Artificial Sequence: Synthetic oligonucleotide
  Target: ATXN2; (+) strand; PAM type: YTN; PAM sequence: CTG
acctcaagtgatccacccgc

SEQ ID NO: 93417 - DNA, 20 bp, Artificial Sequence
  Description of Artificial Sequence: Synthetic oligonucleotide
  Target: ATXN2; (+) strand; PAM type: YTN; PAM sequence: CTC
aagtgatccacccgcctcag

SEQ ID NO: 93418 - DNA, 20 bp, Artificial Sequence
  Description of Artificial Sequence: Synthetic oligonucleotide
  Target: ATXN2; (+) strand; PAM type: YTN; PAM sequence: CTC
agcctcccaaagtgttagga

SEQ ID NO: 93419 - DNA, 20 bp, Artificial Sequence
  Description of Artificial Sequence: Synthetic oligonucleotide
  Target: ATXN2; (+) strand; PAM type: YTN; PAM sequence: CTC
ccaaagtgttaggattatag

SEQ ID NO: 93420 - DNA, 20 bp, Artificial Sequence
  Description of Artificial Sequence: Synthetic oligonucleotide
  Target: ATXN2; (+) strand; PAM type: YTN; PAM sequence: TTA
ggattataggtatcagccac

SEQ ID NO: 93421 - DNA, 20 bp, Artificial Sequence
  Description of Artificial Sequence: Synthetic oligonucleotide
  Target: ATXN2; (+) strand; PAM type: YTN; PAM sequence: TTA
taggtatcagccaccgtgcc

SEQ ID NO: 93422 - DNA, 20 bp, Artificial Sequence
  Description of Artificial Sequence: Synthetic oligonucleotide
  Target: ATXN2; (+) strand; PAM type: YTN; PAM sequence: CTC
tcattttttaaaaaccactt

SEQ ID NO: 93423 - DNA, 20 bp, Artificial Sequence
  Description of Artificial Sequence: Synthetic oligonucleotide
  Target: ATXN2; (+) strand; PAM type: YTN; PAM sequence: CTC
attttttaaaaaccacttct

SEQ ID NO: 93424 - DNA, 20 bp, Artificial Sequence
  Description of Artificial Sequence: Synthetic oligonucleotide
  Target: ATXN2; (+) strand; PAM type: YTN; PAM sequence: TTT
tttaaaaaccacttcttttc

SEQ ID NO: 93425 - DNA, 20 bp, Artificial Sequence
  Description of Artificial Sequence: Synthetic oligonucleotide
  Target: ATXN2; (+) strand; PAM type: YTN; PAM sequence: TTT
ttaaaaaccacttcttttct

SEQ ID NO: 93426 - DNA, 20 bp, Artificial Sequence
  Description of Artificial Sequence: Synthetic oligonucleotide
  Target: ATXN2; (+) strand; PAM type: YTN; PAM sequence: TTT
taaaaaccacttcttttctt

SEQ ID NO: 93427 - DNA, 20 bp, Artificial Sequence
  Description of Artificial Sequence: Synthetic oligonucleotide
  Target: ATXN2; (+) strand; PAM type: YTN; PAM sequence: TTT
aaaaaccacttcttttcttc

SEQ ID NO: 93428 - DNA, 20 bp, Artificial Sequence
  Description of Artificial Sequence: Synthetic oligonucleotide
  Target: ATXN2; (+) strand; PAM type: YTN; PAM sequence: TTA
aaaaccacttcttttcttcc

SEQ ID NO: 93429 - DNA, 20 bp, Artificial Sequence
  Description of Artificial Sequence: Synthetic oligonucleotide
  Target: ATXN2; (+) strand; PAM type: YTN; PAM sequence: CTT
cttttcttcctggtatgccc

SEQ ID NO: 93430 - DNA, 20 bp, Artificial Sequence
  Description of Artificial Sequence: Synthetic oligonucleotide
  Target: ATXN2; (+) strand; PAM type: YTN; PAM sequence: TTC
ttttcttcctggtatgcccc

SEQ ID NO: 93431 - DNA, 20 bp, Artificial Sequence
  Description of Artificial Sequence: Synthetic oligonucleotide
  Target: ATXN2; (+) strand; PAM type: YTN; PAM sequence: CTT
ttcttcctggtatgccccta

SEQ ID NO: 93432 - DNA, 20 bp, Artificial Sequence
  Description of Artificial Sequence: Synthetic oligonucleotide
  Target: ATXN2; (+) strand; PAM type: YTN; PAM sequence: TTT
tcttcctggtatgcccctat

SEQ ID NO: 93433 - DNA, 20 bp, Artificial Sequence
  Description of Artificial Sequence: Synthetic oligonucleotide
  Target: ATXN2; (+) strand; PAM type: YTN; PAM sequence: TTT
cttcctggtatgcccctatg

SEQ ID NO: 93434 - DNA, 20 bp, Artificial Sequence
  Description of Artificial Sequence: Synthetic oligonucleotide
  Target: ATXN2; (+) strand; PAM type: YTN; PAM sequence: TTC
ttcctggtatgcccctatgg

SEQ ID NO: 93435 - DNA, 20 bp, Artificial Sequence
  Description of Artificial Sequence: Synthetic oligonucleotide
  Target: ATXN2; (+) strand; PAM type: YTN; PAM sequence: CTT
cctggtatgcccctatggat

SEQ ID NO: 93436 - DNA, 20 bp, Artificial Sequence
  Description of Artificial Sequence: Synthetic oligonucleotide
  Target: ATXN2; (+) strand; PAM type: YTN; PAM sequence: TTC
ctggtatgcccctatggatc

SEQ ID NO: 93437 - DNA, 20 bp, Artificial Sequence
  Description of Artificial Sequence: Synthetic oligonucleotide
  Target: ATXN2; (+) strand; PAM type: YTN; PAM sequence: CTG
gtatgcccctatggatcaag

SEQ ID NO: 93438 - DNA, 20 bp, Artificial Sequence
  Description of Artificial Sequence: Synthetic oligonucleotide
  Target: ATXN2; (+) strand; PAM type: YTN; PAM sequence: CTA
tggatcaaggagttattagt

SEQ ID NO: 93439 - DNA, 20 bp, Artificial Sequence
  Description of Artificial Sequence: Synthetic oligonucleotide
  Target: ATXN2; (+) strand; PAM type: YTN; PAM sequence: TTA
ttagtaagaggctaaataat

SEQ ID NO: 93440 - DNA, 20 bp, Artificial Sequence
  Description of Artificial Sequence: Synthetic oligonucleotide
  Target: ATXN2; (+) strand; PAM type: YTN; PAM sequence: TTA
gtaagaggctaaataataca

SEQ ID NO: 93441 - DNA, 20 bp, Artificial Sequence
  Description of Artificial Sequence: Synthetic oligonucleotide
  Target: ATXN2; (+) strand; PAM type: YTN; PAM sequence: CTA
aataatacatttggttattc

SEQ ID NO: 93442 - DNA, 20 bp, Artificial Sequence
  Description of Artificial Sequence: Synthetic oligonucleotide
  Target: ATXN2; (+) strand; PAM type: YTN; PAM sequence: TTT
ggttattcaggcacctaaaa

SEQ ID NO: 93443 - DNA, 20 bp, Artificial Sequence
  Description of Artificial Sequence: Synthetic oligonucleotide
  Target: ATXN2; (+) strand; PAM type: YTN; PAM sequence: TTG
gttattcaggcacctaaaag

SEQ ID NO: 93444 - DNA, 20 bp, Artificial Sequence
  Description of Artificial Sequence: Synthetic oligonucleotide
  Target: ATXN2; (+) strand; PAM type: YTN; PAM sequence: TTA
ttcaggcacctaaaagtagt

SEQ ID NO: 93445 - DNA, 20 bp, Artificial Sequence
  Description of Artificial Sequence: Synthetic oligonucleotide
  Target: ATXN2; (+) strand; PAM type: YTN; PAM sequence: TTC
aggcacctaaaagtagtaag

SEQ ID NO: 93446 - DNA, 20 bp, Artificial Sequence
  Description of Artificial Sequence: Synthetic oligonucleotide
  Target: ATXN2; (+) strand; PAM type: YTN; PAM sequence: CTA
aaagtagtaagactaaaact

SEQ ID NO: 93447 - DNA, 20 bp, Artificial Sequence
  Description of Artificial Sequence: Synthetic oligonucleotide
  Target: ATXN2; (+) strand; PAM type: YTN; PAM sequence: CTA
aaactcctaaagagataaga

SEQ ID NO: 93448 - DNA, 20 bp, Artificial Sequence
  Description of Artificial Sequence: Synthetic oligonucleotide
  Target: ATXN2; (+) strand; PAM type: YTN; PAM sequence: CTC
ctaaagagataagacttttt

SEQ ID NO: 93449 - DNA, 20 bp, Artificial Sequence
  Description of Artificial Sequence: Synthetic oligonucleotide
  Target: ATXN2; (+) strand; PAM type: YTN; PAM sequence: CTA
aagagataagactttttatg

SEQ ID NO: 93450 - DNA, 20 bp, Artificial Sequence
  Description of Artificial Sequence: Synthetic oligonucleotide
  Target: ATXN2; (+) strand; PAM type: YTN; PAM sequence: CTT
tttatgttgctccttcttgg

SEQ ID NO: 93451 - DNA, 20 bp, Artificial Sequence
  Description of Artificial Sequence: Synthetic oligonucleotide
  Target: ATXN2; (+) strand; PAM type: YTN; PAM sequence: TTT
ttatgttgctccttcttgga

SEQ ID NO: 93452 - DNA, 20 bp, Artificial Sequence
  Description of Artificial Sequence: Synthetic oligonucleotide
  Target: ATXN2; (+) strand; PAM type: YTN; PAM sequence: TTT
tatgttgctccttcttggaa

SEQ ID NO: 93453 - DNA, 20 bp, Artificial Sequence
  Description of Artificial Sequence: Synthetic oligonucleotide
  Target: ATXN2; (+) strand; PAM type: YTN; PAM sequence: TTT
atgttgctccttcttggaat

SEQ ID NO: 93454 - DNA, 20 bp, Artificial Sequence
  Description of Artificial Sequence: Synthetic oligonucleotide
  Target: ATXN2; (+) strand; PAM type: YTN; PAM sequence: TTA
tgttgctccttcttggaatt

SEQ ID NO: 93455 - DNA, 20 bp, Artificial Sequence
  Description of Artificial Sequence: Synthetic oligonucleotide
  Target: ATXN2; (+) strand; PAM type: YTN; PAM sequence: TTG
ctccttcttggaatttaagt

SEQ ID NO: 93456 - DNA, 20 bp, Artificial Sequence
  Description of Artificial Sequence: Synthetic oligonucleotide
  Target: ATXN2; (+) strand; PAM type: YTN; PAM sequence: CTC
cttcttggaatttaagtcaa

SEQ ID NO: 93457 - DNA, 20 bp, Artificial Sequence
  Description of Artificial Sequence: Synthetic oligonucleotide
  Target: ATXN2; (+) strand; PAM type: YTN; PAM sequence: CTT
cttggaatttaagtcaagca

SEQ ID NO: 93458 - DNA, 20 bp, Artificial Sequence
  Description of Artificial Sequence: Synthetic oligonucleotide
  Target: ATXN2; (+) strand; PAM type: YTN; PAM sequence: TTC
ttggaatttaagtcaagcat

SEQ ID NO: 93459 - DNA, 20 bp, Artificial Sequence
  Description of Artificial Sequence: Synthetic oligonucleotide
  Target: ATXN2; (+) strand; PAM type: YTN; PAM sequence: CTT
ggaatttaagtcaagcatta

SEQ ID NO: 93460 - DNA, 20 bp, Artificial Sequence
  Description of Artificial Sequence: Synthetic oligonucleotide
  Target: ATXN2; (+) strand; PAM type: YTN; PAM sequence: TTG
gaatttaagtcaagcattaa

SEQ ID NO: 93461 - DNA, 20 bp, Artificial Sequence
  Description of Artificial Sequence: Synthetic oligonucleotide
  Target: ATXN2; (+) strand; PAM type: YTN; PAM sequence: TTT
aagtcaagcattaatgaagg

SEQ ID NO: 93462 - DNA, 20 bp, Artificial Sequence
  Description of Artificial Sequence: Synthetic oligonucleotide
  Target: ATXN2; (+) strand; PAM type: YTN; PAM sequence: TTA
agtcaagcattaatgaaggt

SEQ ID NO: 93463 - DNA, 20 bp, Artificial Sequence
  Description of Artificial Sequence: Synthetic oligonucleotide
  Target: ATXN2; (+) strand; PAM type: YTN; PAM sequence: TTA
atgaaggtttacagaaagtt

SEQ ID NO: 93464 - DNA, 20 bp, Artificial Sequence
  Description of Artificial Sequence: Synthetic oligonucleotide
  Target: ATXN2; (+) strand; PAM type: YTN; PAM sequence: TTT
acagaaagttgtgctgatag

SEQ ID NO: 93465 - DNA, 20 bp, Artificial Sequence
  Description of Artificial Sequence: Synthetic oligonucleotide
  Target: ATXN2; (+) strand; PAM type: YTN; PAM sequence: TTA
cagaaagttgtgctgatagc

SEQ ID NO: 93466 - DNA, 20 bp, Artificial Sequence
  Description of Artificial Sequence: Synthetic oligonucleotide
  Target: ATXN2; (+) strand; PAM type: YTN; PAM sequence: TTG
tgctgatagctaaaatgttt

SEQ ID NO: 93467 - DNA, 20 bp, Artificial Sequence
  Description of Artificial Sequence: Synthetic oligonucleotide
  Target: ATXN2; (+) strand; PAM type: YTN; PAM sequence: CTG
atagctaaaatgttttctgc

SEQ ID NO: 93468 - DNA, 20 bp, Artificial Sequence
  Description of Artificial Sequence: Synthetic oligonucleotide
  Target: ATXN2; (+) strand; PAM type: YTN; PAM sequence: CTA
aaatgttttctgctaactga

SEQ ID NO: 93469 - DNA, 20 bp, Artificial Sequence
  Description of Artificial Sequence: Synthetic oligonucleotide
  Target: ATXN2; (+) strand; PAM type: YTN; PAM sequence: TTT
tctgctaactgaaaaagtac

SEQ ID NO: 93470 - DNA, 20 bp, Artificial Sequence
  Description of Artificial Sequence: Synthetic oligonucleotide
  Target: ATXN2; (+) strand; PAM type: YTN; PAM sequence: TTT
ctgctaactgaaaaagtaca

SEQ ID NO: 93471 - DNA, 20 bp, Artificial Sequence
  Description of Artificial Sequence: Synthetic oligonucleotide
  Target: ATXN2; (+) strand; PAM type: YTN; PAM sequence: TTC
tgctaactgaaaaagtacag

SEQ ID NO: 93472 - DNA, 20 bp, Artificial Sequence
  Description of Artificial Sequence: Synthetic oligonucleotide
  Target: ATXN2; (+) strand; PAM type: YTN; PAM sequence: CTG
ctaactgaaaaagtacagcc

SEQ ID NO: 93473 - DNA, 20 bp, Artificial Sequence
  Description of Artificial Sequence: Synthetic oligonucleotide
  Target: ATXN2; (+) strand; PAM type: YTN; PAM sequence: CTA
actgaaaaagtacagccttt

SEQ ID NO: 93474 - DNA, 20 bp, Artificial Sequence
  Description of Artificial Sequence: Synthetic oligonucleotide
  Target: ATXN2; (+) strand; PAM type: YTN; PAM sequence: CTG
aaaaagtacagccttttaaa

SEQ ID NO: 93475 - DNA, 20 bp, Artificial Sequence
  Description of Artificial Sequence: Synthetic oligonucleotide
  Target: ATXN2; (+) strand; PAM type: YTN; PAM sequence: CTT
ttaaaatacagtaactctaa

SEQ ID NO: 93476 - DNA, 20 bp, Artificial Sequence
  Description of Artificial Sequence: Synthetic oligonucleotide
  Target: ATXN2; (+) strand; PAM type: YTN; PAM sequence: TTT
taaaatacagtaactctaat

SEQ ID NO: 93477 - DNA, 20 bp, Artificial Sequence
  Description of Artificial Sequence: Synthetic oligonucleotide
  Target: ATXN2; (+) strand; PAM type: YTN; PAM sequence: TTT
aaaatacagtaactctaatc

SEQ ID NO: 93478 - DNA, 20 bp, Artificial Sequence
  Description of Artificial Sequence: Synthetic oligonucleotide
  Target: ATXN2; (+) strand; PAM type: YTN; PAM sequence: TTA
aaatacagtaactctaatca

SEQ ID NO: 93479 - DNA, 20 bp, Artificial Sequence
  Description of Artificial Sequence: Synthetic oligonucleotide
  Target: ATXN2; (+) strand; PAM type: YTN; PAM sequence: CTC
taatcaagacagtatggtac

SEQ ID NO: 93480 - DNA, 20 bp, Artificial Sequence
  Description of Artificial Sequence: Synthetic oligonucleotide
  Target: ATXN2; (+) strand; PAM type: YTN; PAM sequence: CTA
atcaagacagtatggtactg

SEQ ID NO: 93481 - DNA, 20 bp, Artificial Sequence
  Description of Artificial Sequence: Synthetic oligonucleotide
  Target: ATXN2; (+) strand; PAM type: YTN; PAM sequence: CTG
ccataaggataagacataga

SEQ ID NO: 93482 - DNA, 20 bp, Artificial Sequence
  Description of Artificial Sequence: Synthetic oligonucleotide
  Target: ATXN2; (+) strand; PAM type: YTN; PAM sequence: TTC
agtggaggacaattcagagt

SEQ ID NO: 93483 - DNA, 20 bp, Artificial Sequence
  Description of Artificial Sequence: Synthetic oligonucleotide
  Target: ATXN2; (+) strand; PAM type: YTN; PAM sequence: TTC
agagtccagtaataaacttt

SEQ ID NO: 93484 - DNA, 20 bp, Artificial Sequence
  Description of Artificial Sequence: Synthetic oligonucleotide
  Target: ATXN2; (+) strand; PAM type: YTN; PAM sequence: CTT
tcacatttgtagtcaacaga

SEQ ID NO: 93485 - DNA, 20 bp, Artificial Sequence
  Description of Artificial Sequence: Synthetic oligonucleotide
  Target: ATXN2; (+) strand; PAM type: YTN; PAM sequence: TTT
cacatttgtagtcaacagac

SEQ ID NO: 93486 - DNA, 20 bp, Artificial Sequence
  Description of Artificial Sequence: Synthetic oligonucleotide
  Target: ATXN2; (+) strand; PAM type: YTN; PAM sequence: TTC
acatttgtagtcaacagact

SEQ ID NO: 93487 - DNA, 20 bp, Artificial Sequence
  Description of Artificial Sequence: Synthetic oligonucleotide
  Target: ATXN2; (+) strand; PAM type: YTN; PAM sequence: TTT
gtagtcaacagacttccaac

SEQ ID NO: 93488 - DNA, 20 bp, Artificial Sequence
  Description of Artificial Sequence: Synthetic oligonucleotide
  Target: ATXN2; (+) strand; PAM type: YTN; PAM sequence: TTG
tagtcaacagacttccaaca

SEQ ID NO: 93489 - DNA, 20 bp, Artificial Sequence
  Description of Artificial Sequence: Synthetic oligonucleotide
  Target: ATXN2; (+) strand; PAM type: YTN; PAM sequence: CTT
ccaacaagcatgtgaagata

SEQ ID NO: 93490 - DNA, 20 bp, Artificial Sequence
  Description of Artificial Sequence: Synthetic oligonucleotide
  Target: ATXN2; (+) strand; PAM type: YTN; PAM sequence: TTC
caacaagcatgtgaagataa

SEQ ID NO: 93491 - DNA, 20 bp, Artificial Sequence
  Description of Artificial Sequence: Synthetic oligonucleotide
  Target: ATXN2; (+) strand; PAM type: YTN; PAM sequence: TTC
aatggaggaaagaatagtct

SEQ ID NO: 93492 - DNA, 20 bp, Artificial Sequence
  Description of Artificial Sequence: Synthetic oligonucleotide
  Target: ATXN2; (+) strand; PAM type: YTN; PAM sequence: CTT
ttttttgagatggagtctca

SEQ ID NO: 93493 - DNA, 20 bp, Artificial Sequence
  Description of Artificial Sequence: Synthetic oligonucleotide
  Target: ATXN2; (+) strand; PAM type: YTN; PAM sequence: TTT
tttttgagatggagtctcac

SEQ ID NO: 93494 - DNA, 20 bp, Artificial Sequence
  Description of Artificial Sequence: Synthetic oligonucleotide
  Target: ATXN2; (+) strand; PAM type: YTN; PAM sequence: TTT
ttttgagatggagtctcact

SEQ ID NO: 93495 - DNA, 20 bp, Artificial Sequence
  Description of Artificial Sequence: Synthetic oligonucleotide
  Target: ATXN2; (+) strand; PAM type: YTN; PAM sequence: TTT
tttgagatggagtctcactc

SEQ ID NO: 93496 - DNA, 20 bp, Artificial Sequence
  Description of Artificial Sequence: Synthetic oligonucleotide
  Target: ATXN2; (+) strand; PAM type: YTN; PAM sequence: TTT
ttgagatggagtctcactct

SEQ ID NO: 93497 - DNA, 20 bp, Artificial Sequence
  Description of Artificial Sequence: Synthetic oligonucleotide
  Target: ATXN2; (+) strand; PAM type: YTN; PAM sequence: TTT
tgagatggagtctcactctg

SEQ ID NO: 93498 - DNA, 20 bp, Artificial Sequence
  Description of Artificial Sequence: Synthetic oligonucleotide
  Target: ATXN2; (+) strand; PAM type: YTN; PAM sequence: TTT
gagatggagtctcactctgt

SEQ ID NO: 93499 - DNA, 20 bp, Artificial Sequence
  Description of Artificial Sequence: Synthetic oligonucleotide
  Target: ATXN2; (+) strand; PAM type: YTN; PAM sequence: TTG
agatggagtctcactctgtc

SEQ ID NO: 93500 - DNA, 20 bp, Artificial Sequence
  Description of Artificial Sequence: Synthetic oligonucleotide
  Target: ATXN2; (+) strand; PAM type: YTN; PAM sequence: CTC
actctgtcgcccacactgga

SEQ ID NO: 93501 - DNA, 20 bp, Artificial Sequence
  Description of Artificial Sequence: Synthetic oligonucleotide
  Target: ATXN2; (+) strand; PAM type: YTN; PAM sequence: CTC
tgtcgcccacactggagtgc

SEQ ID NO: 93502 - DNA, 20 bp, Artificial Sequence
  Description of Artificial Sequence: Synthetic oligonucleotide
  Target: ATXN2; (+) strand; PAM type: YTN; PAM sequence: CTG
tcgcccacactggagtgcat

SEQ ID NO: 93503 - DNA, 20 bp, Artificial Sequence
  Description of Artificial Sequence: Synthetic oligonucleotide
  Target: ATXN2; (+) strand; PAM type: YTN; PAM sequence: CTG
gagtgcatgatctcagctca

SEQ ID NO: 93504 - DNA, 20 bp, Artificial Sequence
  Description of Artificial Sequence: Synthetic oligonucleotide
  Target: ATXN2; (+) strand; PAM type: YTN; PAM sequence: CTC
agctcactgcaacctctacc

SEQ ID NO: 93505 - DNA, 20 bp, Artificial Sequence
  Description of Artificial Sequence: Synthetic oligonucleotide
  Target: ATXN2; (+) strand; PAM type: YTN; PAM sequence: CTC
actgcaacctctacctcctg

SEQ ID NO: 93506 - DNA, 20 bp, Artificial Sequence
  Description of Artificial Sequence: Synthetic oligonucleotide
  Target: ATXN2; (+) strand; PAM type: YTN; PAM sequence: CTG
caacctctacctcctgggtt

SEQ ID NO: 93507 - DNA, 20 bp, Artificial Sequence
  Description of Artificial Sequence: Synthetic oligonucleotide
  Target: ATXN2; (+) strand; PAM type: YTN; PAM sequence: CTC
tacctcctgggttcaagcga

SEQ ID NO: 93508 - DNA, 20 bp, Artificial Sequence
  Description of Artificial Sequence: Synthetic oligonucleotide
  Target: ATXN2; (+) strand; PAM type: YTN; PAM sequence: CTA
cctcctgggttcaagcgaat

SEQ ID NO: 93509 - DNA, 20 bp, Artificial Sequence
  Description of Artificial Sequence: Synthetic oligonucleotide
  Target: ATXN2; (+) strand; PAM type: YTN; PAM sequence: CTC
ctgggttcaagcgaatctcc

SEQ ID NO: 93510 - DNA, 20 bp, Artificial Sequence
  Description of Artificial Sequence: Synthetic oligonucleotide
  Target: ATXN2; (+) strand; PAM type: YTN; PAM sequence: CTG
ggttcaagcgaatctcctgc

SEQ ID NO: 93511 - DNA, 20 bp, Artificial Sequence
  Description of Artificial Sequence: Synthetic oligonucleotide
  Target: ATXN2; (+) strand; PAM type: YTN; PAM sequence: TTC
aagcgaatctcctgcctcag

SEQ ID NO: 93512 - DNA, 20 bp, Artificial Sequence
  Description of Artificial Sequence: Synthetic oligonucleotide
  Target: ATXN2; (+) strand; PAM type: YTN; PAM sequence: CTC
ctgcctcagccactacagta

SEQ ID NO: 93513 - DNA, 20 bp, Artificial Sequence
  Description of Artificial Sequence: Synthetic oligonucleotide
  Target: ATXN2; (+) strand; PAM type: YTN; PAM sequence: CTG
cctcagccactacagtagtg

SEQ ID NO: 93514 - DNA, 20 bp, Artificial Sequence
  Description of Artificial Sequence: Synthetic oligonucleotide
  Target: ATXN2; (+) strand; PAM type: YTN; PAM sequence: CTC
agccactacagtagtgggac

SEQ ID NO: 93515 - DNA, 20 bp, Artificial Sequence
  Description of Artificial Sequence: Synthetic oligonucleotide
  Target: ATXN2; (+) strand; PAM type: YTN; PAM sequence: CTA
cagtagtgggactagactac

SEQ ID NO: 93516 - DNA, 20 bp, Artificial Sequence
  Description of Artificial Sequence: Synthetic oligonucleotide
  Target: ATXN2; (+) strand; PAM type: YTN; PAM sequence: CTA
gactacaggtgtgcgccacc

SEQ ID NO: 93517 - DNA, 20 bp, Artificial Sequence
  Description of Artificial Sequence: Synthetic oligonucleotide
  Target: ATXN2; (+) strand; PAM type: YTN; PAM sequence: CTA
caggtgtgcgccaccacacc

SEQ ID NO: 93518 - DNA, 20 bp, Artificial Sequence
  Description of Artificial Sequence: Synthetic oligonucleotide
  Target: ATXN2; (+) strand; PAM type: YTN; PAM sequence: TTT
ttgtatttttagtagacatg

SEQ ID NO: 93519 - DNA, 20 bp, Artificial Sequence
  Description of Artificial Sequence: Synthetic oligonucleotide
  Target: ATXN2; (+) strand; PAM type: YTN; PAM sequence: TTT
tgtatttttagtagacatgc

SEQ ID NO: 93520 - DNA, 20 bp, Artificial Sequence
  Description of Artificial Sequence: Synthetic oligonucleotide
  Target: ATXN2; (+) strand; PAM type: YTN; PAM sequence: TTT
gtatttttagtagacatgcg

SEQ ID NO: 93521 - DNA, 20 bp, Artificial Sequence
  Description of Artificial Sequence: Synthetic oligonucleotide
  Target: ATXN2; (+) strand; PAM type: YTN; PAM sequence: TTG
tatttttagtagacatgcgg

SEQ ID NO: 93522 - DNA, 20 bp, Artificial Sequence
  Description of Artificial Sequence: Synthetic oligonucleotide
  Target: ATXN2; (+) strand; PAM type: YTN; PAM sequence: TTT
ttagtagacatgcggtttca

SEQ ID NO: 93523 - DNA, 20 bp, Artificial Sequence
  Description of Artificial Sequence: Synthetic oligonucleotide
  Target: ATXN2; (+) strand; PAM type: YTN; PAM sequence: TTT
tagtagacatgcggtttcac

SEQ ID NO: 93524 - DNA, 20 bp, Artificial Sequence
  Description of Artificial Sequence: Synthetic oligonucleotide
  Target: ATXN2; (+) strand; PAM type: YTN; PAM sequence: TTT
agtagacatgcggtttcacc

SEQ ID NO: 93525 - DNA, 20 bp, Artificial Sequence
  Description of Artificial Sequence: Synthetic oligonucleotide
  Target: ATXN2; (+) strand; PAM type: YTN; PAM sequence: TTA
gtagacatgcggtttcacca

SEQ ID NO: 93526 - DNA, 20 bp, Artificial Sequence
  Description of Artificial Sequence: Synthetic oligonucleotide
  Target: ATXN2; (+) strand; PAM type: YTN; PAM sequence: TTT
caccatttggtcagactggt

SEQ ID NO: 93527 - DNA, 20 bp, Artificial Sequence
  Description of Artificial Sequence: Synthetic oligonucleotide
  Target: ATXN2; (+) strand; PAM type: YTN; PAM sequence: TTC
accatttggtcagactggtt

SEQ ID NO: 93528 - DNA, 20 bp, Artificial Sequence
  Description of Artificial Sequence: Synthetic oligonucleotide
  Target: ATXN2; (+) strand; PAM type: YTN; PAM sequence: TTT
ggtcagactggtttcgaact

SEQ ID NO: 93529 - DNA, 20 bp, Artificial Sequence
  Description of Artificial Sequence: Synthetic oligonucleotide
  Target: ATXN2; (+) strand; PAM type: YTN; PAM sequence: TTG
gtcagactggtttcgaactc

SEQ ID NO: 93530 - DNA, 20 bp, Artificial Sequence
  Description of Artificial Sequence: Synthetic oligonucleotide
  Target: ATXN2; (+) strand; PAM type: YTN; PAM sequence: CTG
gtttcgaactcctgacctca

SEQ ID NO: 93531 - DNA, 20 bp, Artificial Sequence
  Description of Artificial Sequence: Synthetic oligonucleotide
  Target: ATXN2; (+) strand; PAM type: YTN; PAM sequence: TTT
cgaactcctgacctcatgtg

SEQ ID NO: 93532 - DNA, 20 bp, Artificial Sequence
  Description of Artificial Sequence: Synthetic oligonucleotide
  Target: ATXN2; (+) strand; PAM type: YTN; PAM sequence: TTC
gaactcctgacctcatgtga

SEQ ID NO: 93533 - DNA, 20 bp, Artificial Sequence
  Description of Artificial Sequence: Synthetic oligonucleotide
  Target: ATXN2; (+) strand; PAM type: YTN; PAM sequence: CTC
ctgacctcatgtgatctgcc

SEQ ID NO: 93534 - DNA, 20 bp, Artificial Sequence
  Description of Artificial Sequence: Synthetic oligonucleotide
  Target: ATXN2; (+) strand; PAM type: YTN; PAM sequence: CTG
acctcatgtgatctgcctgc

SEQ ID NO: 93535 - DNA, 20 bp, Artificial Sequence
  Description of Artificial Sequence: Synthetic oligonucleotide
  Target: ATXN2; (+) strand; PAM type: YTN; PAM sequence: CTC
atgtgatctgcctgcttggg

SEQ ID NO: 93536 - DNA, 20 bp, Artificial Sequence
  Description of Artificial Sequence: Synthetic oligonucleotide
  Target: ATXN2; (+) strand; PAM type: YTN; PAM sequence: CTG
cctgcttgggactcccaaag

SEQ ID NO: 93537 - DNA, 20 bp, Artificial Sequence
  Description of Artificial Sequence: Synthetic oligonucleotide
  Target: ATXN2; (+) strand; PAM type: YTN; PAM sequence: CTG
cttgggactcccaaagtgct

SEQ ID NO: 93538 - DNA, 20 bp, Artificial Sequence
  Description of Artificial Sequence: Synthetic oligonucleotide
  Target: ATXN2; (+) strand; PAM type: YTN; PAM sequence: CTT
gggactcccaaagtgctggg

SEQ ID NO: 93539 - DNA, 20 bp, Artificial Sequence
  Description of Artificial Sequence: Synthetic oligonucleotide
  Target: ATXN2; (+) strand; PAM type: YTN; PAM sequence: TTG
ggactcccaaagtgctggga

SEQ ID NO: 93540 - DNA, 20 bp, Artificial Sequence
  Description of Artificial Sequence: Synthetic oligonucleotide
  Target: ATXN2; (+) strand; PAM type: YTN; PAM sequence: CTC
ccaaagtgctgggattacag

SEQ ID NO: 93541 - DNA, 20 bp, Artificial Sequence
  Description of Artificial Sequence: Synthetic oligonucleotide
  Target: ATXN2; (+) strand; PAM type: YTN; PAM sequence: CTG
ggattacaggcgttgagagc

SEQ ID NO: 93542 - DNA, 20 bp, Artificial Sequence
  Description of Artificial Sequence: Synthetic oligonucleotide
  Target: ATXN2; (+) strand; PAM type: YTN; PAM sequence: TTA
caggcgttgagagccactgt

SEQ ID NO: 93543 - DNA, 20 bp, Artificial Sequence
  Description of Artificial Sequence: Synthetic oligonucleotide
  Target: ATXN2; (+) strand; PAM type: YTN; PAM sequence: TTG
agagccactgtgcctggcca

SEQ ID NO: 93544 - DNA, 20 bp, Artificial Sequence
  Description of Artificial Sequence: Synthetic oligonucleotide
  Target: ATXN2; (+) strand; PAM type: YTN; PAM sequence: CTG
tgcctggccaagaatagtct

SEQ ID NO: 93545 - DNA, 20 bp, Artificial Sequence
  Description of Artificial Sequence: Synthetic oligonucleotide
  Target: ATXN2; (+) strand; PAM type: YTN; PAM sequence: CTG
gccaagaatagtctttttaa

SEQ ID NO: 93546 - DNA, 20 bp, Artificial Sequence
  Description of Artificial Sequence: Synthetic oligonucleotide
  Target: ATXN2; (+) strand; PAM type: YTN; PAM sequence: CTT
tttaacagatggtgctggga

SEQ ID NO: 93547 - DNA, 20 bp, Artificial Sequence
  Description of Artificial Sequence: Synthetic oligonucleotide
  Target: ATXN2; (+) strand; PAM type: YTN; PAM sequence: TTT
ttaacagatggtgctgggac

SEQ ID NO: 93548 - DNA, 20 bp, Artificial Sequence
  Description of Artificial Sequence: Synthetic oligonucleotide
  Target: ATXN2; (+) strand; PAM type: YTN; PAM sequence: TTT
taacagatggtgctgggaca

SEQ ID NO: 93549 - DNA, 20 bp, Artificial Sequence
  Description of Artificial Sequence: Synthetic oligonucleotide
  Target: ATXN2; (+) strand; PAM type: YTN; PAM sequence: TTT
aacagatggtgctgggacaa

SEQ ID NO: 93550 - DNA, 20 bp, Artificial Sequence
  Description of Artificial Sequence: Synthetic oligonucleotide
  Target: ATXN2; (+) strand; PAM type: YTN; PAM sequence: TTA
acagatggtgctgggacaac

SEQ ID NO: 93551 - DNA, 20 bp, Artificial Sequence
  Description of Artificial Sequence: Synthetic oligonucleotide
  Target: ATXN2; (+) strand; PAM type: YTN; PAM sequence: CTG
ggacaactaatacctacata

SEQ ID NO: 93552 - DNA, 20 bp, Artificial Sequence
  Description of Artificial Sequence: Synthetic oligonucleotide
  Target: ATXN2; (+) strand; PAM type: YTN; PAM sequence: CTA
atacctacatacggaagaat

SEQ ID NO: 93553 - DNA, 20 bp, Artificial Sequence
  Description of Artificial Sequence: Synthetic oligonucleotide
  Target: ATXN2; (+) strand; PAM type: YTN; PAM sequence: CTA
catacggaagaatgaatctg

SEQ ID NO: 93554 - DNA, 20 bp, Artificial Sequence
  Description of Artificial Sequence: Synthetic oligonucleotide
  Target: ATXN2; (+) strand; PAM type: YTN; PAM sequence: CTG
aacttacacagtaaaaatgg

SEQ ID NO: 93555 - DNA, 20 bp, Artificial Sequence
  Description of Artificial Sequence: Synthetic oligonucleotide
  Target: ATXN2; (+) strand; PAM type: YTN; PAM sequence: CTT
acacagtaaaaatggttata

SEQ ID NO: 93556 - DNA, 20 bp, Artificial Sequence
  Description of Artificial Sequence: Synthetic oligonucleotide
  Target: ATXN2; (+) strand; PAM type: YTN; PAM sequence: TTA
cacagtaaaaatggttataa

SEQ ID NO: 93557 - DNA, 20 bp, Artificial Sequence
  Description of Artificial Sequence: Synthetic oligonucleotide
  Target: ATXN2; (+) strand; PAM type: YTN; PAM sequence: TTA
taagtgtatggttatgtgtc

SEQ ID NO: 93558 - DNA, 20 bp, Artificial Sequence
  Description of Artificial Sequence: Synthetic oligonucleotide
  Target: ATXN2; (+) strand; PAM type: YTN; PAM sequence: TTA
tgtgtcaattagaaataaaa

SEQ ID NO: 93559 - DNA, 20 bp, Artificial Sequence
  Description of Artificial Sequence: Synthetic oligonucleotide
  Target: ATXN2; (+) strand; PAM type: YTN; PAM sequence: TTA
gaaataaaaaattaatataa

SEQ ID NO: 93560 - DNA, 20 bp, Artificial Sequence
  Description of Artificial Sequence: Synthetic oligonucleotide
  Target: ATXN2; (+) strand; PAM type: YTN; PAM sequence: TTA
atataaagaatgaatttgaa

SEQ ID NO: 93561 - DNA, 20 bp, Artificial Sequence
  Description of Artificial Sequence: Synthetic oligonucleotide
  Target: ATXN2; (+) strand; PAM type: YTN; PAM sequence: TTT
gaaccccaccttatgctata

SEQ ID NO: 93562 - DNA, 20 bp, Artificial Sequence
  Description of Artificial Sequence: Synthetic oligonucleotide
  Target: ATXN2; (+) strand; PAM type: YTN; PAM sequence: TTG
aaccccaccttatgctatat

SEQ ID NO: 93563 - DNA, 20 bp, Artificial Sequence
  Description of Artificial Sequence: Synthetic oligonucleotide
  Target: ATXN2; (+) strand; PAM type: YTN; PAM sequence: CTT
atgctatattaaataactgc

SEQ ID NO: 93564 - DNA, 20 bp, Artificial Sequence
  Description of Artificial Sequence: Synthetic oligonucleotide
  Target: ATXN2; (+) strand; PAM type: YTN; PAM sequence: TTA
tgctatattaaataactgct

SEQ ID NO: 93565 - DNA, 20 bp, Artificial Sequence
  Description of Artificial Sequence: Synthetic oligonucleotide
  Target: ATXN2; (+) strand; PAM type: YTN; PAM sequence: CTA
tattaaataactgctcaaaa

SEQ ID NO: 93566 - DNA, 20 bp, Artificial Sequence
  Description of Artificial Sequence: Synthetic oligonucleotide
  Target: ATXN2; (+) strand; PAM type: YTN; PAM sequence: TTA
aataactgctcaaaatgggc

SEQ ID NO: 93567 - DNA, 20 bp, Artificial Sequence
  Description of Artificial Sequence: Synthetic oligonucleotide
  Target: ATXN2; (+) strand; PAM type: YTN; PAM sequence: CTG
ctcaaaatgggctgagcacc
